United States Patent Application Publication US 2026/0337666 A1 - sequence listing, part 11

SEQ ID NO: 15055 - DNA, 7037 bp, Homo sapiens
  source 1..7037: mol_type = unassigned DNA
cccacgcgcgcgcgctcgcgcaccacgcgccccgcgcggcccgcccggatcgtggcctctcgagagcaagacatgggaaagcggaaccaccaaaaggagtgatgatcaacgatctcatgataaatctggatgctagttctcatgcctcaggacatcctactgggaacgacacaccagctcctgggatcagactttcatctacttaggacccctctttgcccagactactaaagccagtcttcactagccacgaatggctacccaaaggaaacacttggtgaaagattttaatccttacattacctgctatatctgtaaagggtatctgatcaagccaacaacagtgacggaatgcctccatacattctgtaagacttgtattgttcagcactttgaagatagcaatgattgcccaaggtgtggcaaccaagttcatgagacaaatccattagaaatgttgaggttggacaatacattagaggaaattatatttaagctggtccctggactacgagaacaagaacttgagcgtgaatctgaattttggaagaaaaataagcctcaagaaaatggacaagatgatacttcaaaagctgacaaaccgaaagtagatgaagaaggtgatgaaaatgaagatgataaagattatcacagaagtgacccacaaattgctatctgtctagattgtttacgaaataatgggcaatcaggggacaatgtagtaaagggtttaatgaagaaattcattcgatgttctacacgtgtaactgtgggaactattaaaaaatttctaagtttaaaactaaaacttccaagttcttatgagttggatgtgctgtgcaatggtgaaattatggggaaggatcatactatggaattcatctacatgacaagatggcgactaagaggcgaaaactttcggtgtctgaactgctcagcttcgcaagtctgctctcaggatggccctttgtatcagtcataccctatggtactgcagtatcgaccaagaattgatttcggttagaccaaggggcccagacctcactgagatgaatcctgcactatttgtttactcgtcaacagattgcacagttaacggtgtgtggactagaggaacacaaccagattttcagcatgcaaataaggccattgtctatctctaaattgtcagttgcattcatgttgtttctattaggagcaaaccaagtgccattctgctactgaaccatctgcataaggtatttgtgttgtctcaaagtgtgcaagtcatggtaaaaatcagttagctgtgccgccatgattcacccttctgaatattttgcttgcctgttccaagattgttctaatgtttaattacactagtaaaatggctcaatttttgtggtgttgcagttttcacatacttactcttttattcttgtttaaatagcgtactctacaagaaactaataattatatcttgaaattattttgtatggaagtatatttagaaaagtggtttttgagccactgtcttgttcttgataagctttttgtgtgaaaaaaagttcattcttgagtgtgcaagtccttttgccaagaattccaattattctgtaacattagagcacaatataattgtagacattctaagcatctgtccgtgtagtctaccaattgcacaaggaaggcatgttagccctccagattgaaaatgtatgtgacctcttgaactgaagttagattcccaaccattcaaaatgttggcagctgatcacatttacttctgataaaagtaatgtgtaagtaaggttaatcttctttcataatgccttatgacaagcaggtgctgcttcatgaaacgtcattgtatagcccatttcatgtatcattacattgttgctgttatttaatgagtgcattatttctctttttaagttggccttaggtatatgtcattgtggcatgcagagggttatgacgattttaaatattaggatttttagagcacataacattagctattttatggatttcaaaagtctcaaaacagttgtagattaaaactgttagttacctttcacatttccaaactatgtgcataaaatagaataaatgcagtatagaactatgctaaccaaaattaataggttaagggtattttattttaaatcctgtagtaattggggaaatgagaagattattattttatacatgagttcattaagatcagaaatacaaaatgtcctgtattttgcagttttgttaagtcttccattcgttttaggattagtctgcaagtcaaagaaagtcttgttaccttaaattatatgaaaactgtcattttaaatcttttaatatttacagttttcaaaaaccttacttggaaattgctttgaaacaaacaagctaacctttgaaacttaggaaaaaatcttgaaagttaggaaaaatatttgagaaatatgacgagcacaatctgtgtgttacacacatttagtttttatactgcatatgtggtaaatgtgtcacattttccagtaaaatgtatcagaaatcaatgccttctgaatttcaaaatgattcttagaaataagatattgtacaactctagcaaacatacaaagtacagctaaatcttaatatatttcactatgtaaaaggctgaaacttcataattatctgttccttctatctttttttgagtcaaaaagtctattaaatttttctgttgttgttccaactttggtgaaaaaggttatggcaatactttaactttgttttgttacattgtttttgttcttggaatggctcacaagcagaatttaaaaggcagattttcattaactataaatggctgaaaaaactgaatttactatctagctacagaaattatttttctatggtgtgaaactgttcccagacatccctaagaacttttacaaattattataaatttgtcacacctaggtcagcgattaaaatagtgttttgcaaatggaattttaattaactcaaaatgaattaagagtgcattttaaaaatcacaagtgagactttgatgttttggccccccagccaaaacttaatggtcataaatgaattttatctacaaaatctctttaaatttggctggttgccttgtcatatgtaatttcactattttccaaggaaatatataggaagcaattatgaaactgagaatagttttatatagaattcttttatttactgataatgcattaacatttttattgaaatgcaatggaatatgtgccaaaacacgtgaaaagcttacataaagaaaggcatcagttgtcgtttggagaaaggtacacatttttttgatggtcctaagtgatatggtattactactagaatcacagatttcttcaactgacttattttggtatattcaactacagctttctaaggataggactactttcatgtctagtaatacactgtattccccgttaattatcccttaagtcagattgtagaatttgcaagaaactaggtatagaaaaaatgtacaggcaacttttgtggttagctttataaatttagggtgcttataaaatgataaaatgaattctttaaataacctataggaatcatctgaatctgtaacatcagagactaaaactaaaagttttctttaatctgttgtttcttaagcaataaactgaaagacctttacttccataaaagattttgttatctcttttatctgccttagaaattataagtataaaagggtcaagggaacttagatataaagaatgactgtggtttataaacattactttaattgaagtaatcacatcagttaatagagaaatcaaaatatgtatggccttttctctagattagcaaaacagctttacaaagtatgaaaaaataaactaaaatgctcattgatgaggtaatactcagtctggagtacaggtaacttgggtaatgccttttaactactcttagaggagtatattatttctttatacattaaacatctatcccatagtaatgtgccacattttataaacgtaatgactttgctcaactacattacacactcaaatgtaatctaaatttaaactgattatttaaggaaaaaaagtgtgttatataatattgtgaactgtttagctttactgaaatatttaagagaaagtgcctcattactaaagtgcatttctgttttaaatttactgcataaagtttgagttatctgtacctgtctcttatgaatggtttcatatctaaataggctcttgtaagttaatttttttggaagattttcataagaatatagatatcaccaaagacattttacagtaaattaataaccatgttggagagacggttttaacagtttggaggttggaaatttttagattgcaatttaattttatatagttaggcaataaccttgattaattgctaaaatatcaccaaagaaaggctttaaactgaattttcttggtgagatcagtcaaatgcaggcttttcttgcaataatcagaacacacttcctttcaaatatgttcattgtttttcagcatcatctaacagatcttagtaaatctaaatcctcaaagatgagaaagaggtaaacacaacaaatagccttcctctgcatgaaaagtgagagaaatacatactttgaaaagaaagttcagatttttaatttgagagggtttttatttcatggaggcagtgttaactaaaattaagcttagatttagctcctgtattattcataatatgagaaattttattaaaggcagactttggtaaaagtgccaacacacttacttgtatagaaaagacttcattctatgggatttatataagtaagtgctttctctatattcaaaatatttcataaggacctgtggtttttttccccttaaaaagcaactctaggccgggcacagtggctcatgcctgtaatcccagcactttgggaggccaaggcaggtggatcacttgaggtcaggagttcgagaccagctggttaacatggtgaaaccccatctctactaaaaatacaaaaattagccaggtgtggtggcacgcgcctgtaatcccagctacatgggaggttgaggcaggagaatctcttgaacccaggaggtggaggttgcagtgagccgcaattacaccactgcactccagcctgggtgacacagcgagtctccatctccaaaaaaaattcaactcttggtcttgtttctcagcacttagtttattgttattagaatttagccatacagccaactttgacaaaatgggtcacagaacaagcatgtacatcaagaggaagttccatatcccccttgtaccatttctccttgggaactcatgctatgggctaccttaaaggtaaaactcatcttatggagtctttctgataggtcactaggtaaaactccttggatagggtgaaaatggatgcacactctattacatactctggtttatcataaggaattttccagaaagctaagctttatactaataagatattggttggtagtaggaacttcaaaaatgaatgagtttgccataactttaattttctggattagaaacacaaaacttgaaatgcaattatcaatattttgtaatatatattcctacagtttgggtagaaataaggaacatgtctgctagatctggtttatgaaaaagtgaaaaatattaaatacaccagagactcaaaccctttcaaggcacacaataactgttctggatttacctgacaaacctagttgagtagcattttgacagaaaatatcagactgaaagttcattcaaatgtacttaaatgtacaatacagtgttcaatagtttttattgcagtgatgtttttccaataatttaagtaattctcttcctagtataatacagttttcataaataatgtttacttgctttctttatattttcaaataaaattaaaatgctcgagcacttcctttcagaaagttataaaattaaaaataattattttaaatgctcattcaaatgtgtctgtatacttgctatgcccctttttctataattccaaactgagactgatttttcagagatttttaactttaataattttaaatctagaatcaagtgaaacagatatgttaaatactgagtctagttttcttccatcttatggagcttcatggaataagaaactaatctagtgcaaatgaagattaaatatttctgggtgatggagagatagtcaacaaatttatttatccatcctctgcacatcagtccactggagcaggagttctacacattaaaaatgtaatgggatcagcctagcattgtttggtgttcttttgttgtattttttagaatgggggtgggggcctaagtgtccttatgaagctgtggtccacgacaggagcttgttgggggagtaccagggttctgctgctttcctgcatctgagcaacacaacagagatcatcagttttaaatagagtagccctcacaatcaaaatatcatagaatatattgtaaagttatgttgctaattttcctttgaaatataaaatattttaagctttttgtcaaaagtggtaacatcttaatacaaataaaaacctttttgtggttgtaagatttagcttataaatcattcaaattgaagtgaaagaattaccaggtcattgttaatgacttagtctattaagaatatatgtatttttgtaaaggaaaagcacttgtagatatttaatcagtacaagatatgtcttttgcagaaataaaatgctgcttagagattctccttaaatattttttatttttgtgctcaaatgtattttctgttgatctatggaatgttctgtacaaagctgtataattgtactgttgggctagatactttttttttttaatctggacttagccaagtatatttcaccatgttaaaatacagtatctttgttattaaaaattaaattgcataatttattattgtttgtcatctttaatattagtcactgtagattgcagccttcattaaaaatatctccttt

SEQ ID NO: 15056 - DNA, 5074 bp, Homo sapiens
  source 1..5074: mol_type = unassigned DNA
atttaaagctgggaggttctgccaccaagcacggccttcccactgggaacacaaacttgctggcgggaagagcccggaaagaaacctgtggatctcccttcgagatcatccaaagagaagaaaggtaagtagagctttgcatttacattttgaaaaattacaaagatgaactcatttttttcctgagagcaataactatttggcaatgcacagccctggcaaaaggccgtcgaatgtgtttgaaggtgtctgttgttgtttttgttcaggacgcttgcgttttctatttcaggtgacctcacattcgtgccccttagcagcactctgcagaaatgcctcctcagctgcaaaacggcctgaacctctcggccaaagttgtccagggaagcctggacagcctaccccaggcagtgagggagtttctcgagaataacgctgagctgtgtcagcctgatcacatccacatctgtgacggctctgaggaggagaatgggcggcttctgggccagatggaggaagagggcatcctcaggcggctgaagaagtatgacaactggtaagctcggcccccgctgcctgtcccagcaccctgcaggcagggctcccctgcgtctcctgggagttggtggagaaaggtgaatgaaggccttcgggtagtttcagactcttgagaagatgaatgcaatggtcagaaccatacagacttgaattttgtgacattagtgggccagcccaagctttaaatgaggtgtgtgcacaaaagctctgccaactagattcctgattaaaaaaaaggcagcccctctcctacagaccaggtcctagtggagtaaatgtccacctggccatgtcttagatggtctgtgtgttcacactgatggactgttgttagcgtgctcagcactctgctaggcatggaaagccacggtactgaaggagatggttcgctgcccgtggtgcttggctgaaaggaagcctgtgatttttgcagctggttggctctcactgaccccagggatgtggccaggatcgaaagcaagacggttatcgtcacccaagagcaaagagacacagtgcccatccccaaaacaggcctcagccagctcggtcgctggatgtcagaggaggattttgagaaagcgttcaatgccaggttcccagggtgcatgaaaggtgagcggaacattgatttgattgggtaaaacagcagagagccttttcttatttacatctatcctaatggtaattcaaacaataatggaagctcccaccacctcagatgtctttcagttccatacatgaagttggcaatgtattgaaaatgcacatccctcttctgcttttacagactgtcttatacaaacgtgaaaactagttccatgcatatgggttttaaatagcttggtgggacccaattgcacatttatgaaaactctttaatttcagcaggctgttcactttccagtggcctcttctaacccagggggctggtgaccagcagggtgtggtggtgttagtggaacaccgtgaaaatgggtctacctgggaaaaaaatgctggtcgtgttcgaagtccaaggtcatttctcaccagtgcccacccatcgcaccctgtaggtcgcaccatgtacgtcatcccattcagcatggggccgctgggctcgcctctgtcaaagatcggcatcgagctgacggattcaccctacgtggtggccagcatgcggatcatgacgcggatgggcacgcccgtcctggaagcagtgggcgatggggagtttgtcaaatgcctccattctgtggggtgccctctgcctttacaaagtaagtgtattatttcagaatcaaaagtcaaaataaaaaagaaagctgaacgcaaaccccagtgagtgcctcggggacccccaagcagggccctggcgcactgacttgggaggggtccttgttcacagagcctttggtcaacaactggccctgcaacccggagctgacgctcatcgcccacctgcctgaccgcagagagatcatctcctttggcagtgggtacggcgggaactcgctgctcgggaagaagtgctttgctctcaggatggccagccggctggccaaggaggaagggtggctggcagagcacatgctggtgagcctgcaggaagccctgatgtgcagatgagaggcctggggggtggcagaaacaaacagcattacagttcccacccgtcagcacacctctctgagcgtgcaggttcccggacagatcgggaaaccccaccagtaatgattagtttacacatatacatcgcttttgaaggcccccaaacaccaggggaccatagagatcctttggacttcatgattctgggagtgtttgtttgcactgatacctgaagaaatagatcttgagggcctacattccaacctctgggctgaagtaccaacctcggggagaaggaaacaaagatcacaataaagaatcttgtccccaacagattctgggtataaccaaccctgagggtgagaagaagtacctggcggccgcatttcccagcgcctgcgggaagaccaacctggccatgatgaaccccagcctccccgggtggaaggttgagtgcgtcggggatgacattgcctggatgaagtttgacgcacaaggtgactcttttagacccaactcttggtaacgattggactcaagcgaatcgttggccttcgaaacatgtcacattctcctcagtccagtgtttggatttttaaactctgttagtccagagttggccaagccttagaaatatggatcctgtaagaattcttcaacttaatattcaatctggattgaaactgggccatatgttgctgtttgtttacatacatacatttgtttaaatggtattggtggaaaattgtggaggaagcaagagtcgtaaacgtatcaaagttgcatatgatgcttggatgaaaagagataaatgcatattctagggagggaaaaaagatttgagaagttggcatagaaattagtccggcaatatataagagtatatgttctgctttgcctggcactcactactgcttctctggtttaaaactctccaggtcatttaagggccatcaacccagaaaatggctttttcggtgtcgctcctgggacttcagtgaagaccaaccccaatgccatcaagaccatccagaagaacacaatctttaccaatgtggccgagaccagcgacgggggcgtttactgggaaggcattgatgagccgctagcttcaggtgtcaccatcacgtcctggaagaataaggagtggagctcagaggatggtgtgtccctgccagaggccttggtgtgccgggctgcagggactgcctgtttgagccaggcactcacgagcctttctctgtcttataggggaaccttgtgcccaccccaactcgaggttctgcacccctgccagccagtgccccatcattgatgctgcctgggagtctccggaaggtgttcccattgaaggcattatctttggaggccgtagacctgctggtgaggctctccttcatttaggctgggaacatgggtgtgctgggtaccgaagggcatctgtgaaatctctccttttccatgaccttgtcagagggtgcccaggggcttcctttcttgagcttccttcccaaagatccagaataattggcaagttcaaatgtagaaccaacccttctggtcacctggaacctttctgaatccctgatctattgtagcttgatcaaattttactttttactttgtggcctcagtcatgtaactttgagttagcagttttctgcaatttagcttggtgaacgcaaaactagctcgattacaaagttattgtcttgccgtgtctttccgtgttgtgaataacaccactggttgtggagtctgaatttcaaagcctctgatgaacatttctctttttttttcctgctaaaggtgtccctctagtctatgaagctctcagctggcaacatggagtctttgtgggggcggccatgagatcagaggccacagcggctgcagaacataaaggcaaaatcatcatgcatgacccctttgccatgcggcccttctttggctacaacttcggcaaatacctggcccactggcttagcatggcccagcacccagcagccaaactgcccaagatcttccatgtcaactggttccggaaggacaaggaaggcaaattcctctggccaggctttggagagaactccagggtgctggagtggatgttcaaccggatcgatggaaaagccagcaccaagctcacgcccataggctacatccccaaggaggatgccctgaacctgaaaggcctggggcacatcaacatgatggagcttttcagcatctccaaggaattctgggagaaggaggtggaagacatcgagaagtatctggaggatcaagtcaatgccgacctcccctgtgaaatcgagagagagatccttgccttgaagcaaagaataagccagatgtaatcagggcctgagtgctttacctttaaaatcattccctttcccatccataaggtgcagtaggagcaagagagggcaagtgttcccaaattgacgccaccataataatcatcaccacaccgtgagcagatctgaaaggcacactttgatttttttaaggataagaaccacagaacactgggtagtagctaatgaaattgagaagggaaatcttagcatgcctccaaaaattcacatccaatgcatagtttgttcaaatttaaggttactcaggcattgatcttttcagtgttttttcactttagctatgtggattagctagaatgcacaccaaaaaaatacttgagctgtatatatatatgtgtgtgtgtgtgtgtgtgtgtgtgtgtgtgtgtgcatgtatgtgcacatgtgtctgtgtggtatatttgtgtatgtgtatttgtatgtactgttattgaaaatatatttaatacctttggaaaaatcttgggcaagatgacctactagttttccttgaaaaaaagttgctttgttattaatattgtgcttaaattatttttata

SEQ ID NO: 15057 - DNA, 4341 bp, Homo sapiens
  source 1..4341: mol_type = unassigned DNA
atttaaagctgggaggttctgccaccaagcacggccttcccactgggaacacaaacttgctggcgggaagagcccggaaagaaacctgtggatctcccttcgagatcatccaaagagaagaaaggtgacctcacattcgtgccccttagcagcactctgcagaaatgcctcctcagctgcaaaacggcctgaacctctcggccaaagttgtccagggaagcctggacagcctaccccaggcagtgagggagtttctcgagaataacgctgagctgtgtcagcctgatcacatccacatctgtgacggctctgaggaggagaatgggcggcttctgggccagatggaggaagagggcatcctcaggcggctgaagaagtatgacaactgctggttggctctcactgaccccagggatgtggccaggatcgaaagcaagacggttatcgtcacccaagagcaaagagacacagtgcccatccccaaaacaggcctcagccagctcggtcgctggatgtcagaggaggattttgagaaagcgttcaatgccaggttcccagggtgcatgaaaggtcgcaccatgtacgtcatcccattcagcatggggccgctgggctcgcctctgtcaaagatcggcatcgagctgacggattcaccctacgtggtggccagcatgcggatcatgacgcggatgggcacgcccgtcctggaagcagtgggcgatggggagtttgtcaaatgcctccattctgtggggtgccctctgcctttacaaaagcctttggtcaacaactggccctgcaacccggagctgacgctcatcgcccacctgcctgaccgcagagagatcatctcctttggcagtgggtacggcgggaactcgctgctcgggaagaagtgctttgctctcaggatggccagccggctggccaaggaggaagggtggctggcagagcacatgctgattctgggtataaccaaccctgagggtgagaagaagtacctggcggccgcatttcccagcgcctgcgggaagaccaacctggccatgatgaaccccagcctccccgggtggaaggttgagtgcgtcggggatgacattgcctggatgaagtttgacgcacaaggtcatttaagggccatcaacccagaaaatggctttttcggtgtcgctcctgggacttcagtgaagaccaaccccaatgccatcaagaccatccagaagaacacaatctttaccaatgtggccgagaccagcgacgggggcgtttactgggaaggcattgatgagccgctagcttcaggtgtcaccatcacgtcctggaagaataaggagtggagctcagaggatggggaaccttgtgcccaccccaactcgaggttctgcacccctgccagccagtgccccatcattgatgctgcctgggagtctccggaaggtgttcccattgaaggcattatctttggaggccgtagacctgctggtgtccctctagtctatgaagctctcagctggcaacatggagtctttgtgggggcggccatgagatcagaggccacagcggctgcagaacataaaggcaaaatcatcatgcatgacccctttgccatgcggcccttctttggctacaacttcggcaaatacctggcccactggcttagcatggcccagcacccagcagccaaactgcccaagatcttccatgtcaactggttccggaaggacaaggaaggcaaattcctctggccaggctttggagagaactccagggtgctggagtggatgttcaaccggatcgatggaaaagccagcaccaagctcacgcccataggctacatccccaaggaggatgccctgaacctgaaaggcctggggcacatcaacatgatggagcttttcagcatctccaaggaattctgggagaaggaggtggaagacatcgagaagtatctggaggatcaagtcaatgccgacctcccctgtgaaatcgagagagagatccttgccttgaagcaaagaataagccagatgtaatcagggcctgagtgctttacctttaaaatcattccctttcccatccataaggtgcagtaggagcaagagagggcaagtgttcccaaattgacgccaccataataatcatcaccacaccgtgagcagatctgaaaggcacactttgatttttttaaggataagaaccacagaacactgggtagtagctaatgaaattgagaagggaaatcttagcatgcctccaaaaattcacatccaatgcatagtttgttcaaatttaaggttactcaggcattgatcttttcagtgttttttcactttagctatgtggattagctagaatgcacaccaaaaaaatacttgagctgtatatatatatgtgtgtgtgtgtgtgtgtgtgtgtgtgtgtgtgtgcatgtatgtgcacatgtgtctgtgtggtatatttgtgtatgtgtatttgtatgtactgttattgaaaatatatttaatacctttggaaaaatcttgggcaagatgacctactagttttccttgaaaaaaagttgctttgttattaatattgtgcttaaattatttttatacaccattgttccttacctttacataattgcaatatttcccccttactacttcttggaaaaaaattacaaaatgaagttttatagaaaagatggatttgctttgcttggtttttcttatttgagctaccaagaggagagaactctgattaaatatcttgtgatttaaatcctgccccctccccaagaaggtggggacgttcagaatcacacttgaagagggggtgcattgcctggtcccagggagaaggagggagcagatggggaggaatgaggcagggaaccatggttggggttttctgaatttgctgaagccactagttggcatcctttaacaattctacaaacctttagatggtgaggcttatgtggcaggactgggagggtttaatgcatgctttttgacagtttggatctggaggggtctcaggcttccacaaaaattacattgtggacagtttcataggattttgccttttaactcttcaaagcaacagttttctcaactgtcatccccgcgggggagcagaggaagacaagtgagaaggaaaaggggacaggatctgggttgagcaagcattaattgagcgccttctgtatcccggacatcatgccaacaccatgggctgcccgagaagagaggtgggtggtttggtccccagctctgccttgaaccctcacctgctctcctctactcccagtgtttattggatattccagaacagtccaaacgaaccataaactttatatcacagattcaatctgtgtaaatactattatcttcaagttgtagtttctttcttgggcccaggctgtgaaattggcttcacccctaccacaccccagcgggcaggcttgttcttatgtcacactccacccctccagtctcctcaactggaaaacttgcctcttttcctcacttcctctgctccttacaatggcttcatatggaaggtgaagctgagatcaccccaattttacaggtgaggaaactgaggtcaagctaggagcgtccagcggggctgagaaattgccaggatttccttccccattaaggagctgagagtcttagctccagacacgttggcttgttagaatatcaaaaccaccgaaggggaaaaaccacttactggaattaaatgctatctgctgtattagtttaaatcagtggcgttcaaacttgtttctccttttcactgcggaacacgttcttgacatgtacttgactcagagtcccatgtctaaaggagacagagcccaaggcagcccacctgaagctggggagggagtccaaagtgcaagccacctggtctccatttccccgccccttgggggcctttgggcagctccttggacccctgaaagaggccaccaggataaactttgttaaaatgcatgccttgtgccccactgtcctattacgggctttcagtagtctccactccctcggcaggcaaagacactggccatctccaaattccctcccctcctgcacagcatcagccacctggcaagcagtctcacataggaccatttgccagcaggccctgcaagcctgggggacagcctagaggaggtgacttacatacacagcataagagttttcaggagaccaaaaagattcaatatatgtcattaactcctgactcagtttccccaaaccatgcctcctgagtgctccctctgtctccaaatcctgatttttgtgcgcggacccctgtctacaataaacaggatcctatgacttc

SEQ ID NO: 15058 - DNA, 1037 bp, Homo sapiens
  source 1..1037: mol_type = unassigned DNA
accaagcacggccttcccactgggaacacaaacttgctggcgggaagagcccggaaagaaacctgtggatctcccttcgagatcatccaaagagaagaaaggtgacctcacattcgtgccccttagcagcactctgcagaaatgcctcctcagctgcaaaacggcctgaacctctcggccaaagttgtccagggaagcctggacagcctaccccaggcagtgagggagtttctcgagaataacgctgagctgtgtcagcctgatcacatccacatctgtgacggctctgaggaggagaatgggcggcttctgggccagatggaggaagagggcatcctcaggcggctgaagaagtatgacaactggtaagctcggcccccgctgcctgtcccagcaccctgcaggcagggctcccctgcgtctcctgggagttggtggagaaaggtgaatgaaggccttcgggtagtttcagactcttgagaagatgaatgcaatggtcagaaccatacagacttgaattttgtgacattagtgggccagcccaagctttaaatgaggtgtgtgcacaaaagctctgccaactagattcctgattaaaaaaaaggcagcccctctcctacagaccaggtcctagtggagtaaatgtccacctggccatgtcttagatggtctgtgtgttcacactgatggactgttgttagcgtgctcagcactctgctaggcatggaaagccacggtactgaaggagatggttcgctgcccgtggtgcttggctgaaaggaagcctgtgatttttgcagctggttggctctcactgaccccagggatgtggccaggatcgaaagcaagacggttatcgtcacccaagagcaaagagacacagtgcccatccccaaaacaggcctcagccagctcggtcgctggatgtcagaggaggattttgagaaagcgttcaatgccaggttcccagggtgcatgaaaggtgagcggaacattgatttgattgggtaaaacagcagagagccttttcttattta

SEQ ID NO: 15059 - DNA, 783 bp, Homo sapiens
  source 1..783: mol_type = unassigned DNA
caccacctcagatgtctttcagttccatacatgaagttggcaatgtattgaaaatgcacatccctcttctgcttttacagactgtcttatacaaacgtgaaaactagttccatgcatatgggttttaaatagcttggtgggacccaattgcacatttatgaaaactctttaatttcagcaggctgttcactttccagtggcctcttctaacccagggggctggtgaccagcagggtgtggtggtgttagtggaacaccgtgaaaatgggtctacctgggaaaaaaatgctggtcgtgttcgaagtccaaggtcatttctcaccagtgcccacccatcgcaccctgtaggtcgcaccatgtacgtcatcccattcagcatggggccgctgggctcgcctctgtcaaagatcggcatcgagctgacggattcaccctacgtggtggccagcatgcggatcatgacgcggatgggcacgcccgtcctggaagcagtgggcgatggggagtttgtcaaatgcctccattctgtggggtgccctctgcctttacaaaagcctttggtcaacaactggccctgcaacccggagctgacgctcatcgcccacctgcctgaccgcagagagatcatctcctttggcagtgggtacggcgggaactcgctgctcgggaagaagtgctttgctctcaggatggccagccggctggccaaggaggaagggtggctggcagagcacatgctgattctgggtataaccaaccctgagggtgagaagaagtacctgg

SEQ ID NO: 15060 - DNA, 409 bp, Homo sapiens
  source 1..409: mol_type = unassigned DNA
aagcagtgggcgatggggagtttgtcaaatgcctccattctgtggggtgccctctgcctttacaaagtaagtgtattatttcagaatcaaaagtcaaaataaaaaagaaagctgaacgcaaaccccagtgagtgcctcggggacccccaagcagggccctggcgcactgacttgggaggggtccttgttcacagagcctttggtcaacaactggccctgcaacccggagctgacgctcatcgcccacctgcctgaccgcagagagatcatctcctttggcagtgggtacggcgggaactcgctgctcgggaagaagtgctttgctctcaggatggccagccggctggccaaggaggaagggtggctggcagagcacatgctgattctgggtataaccaaccctgagggt

SEQ ID NO: 15061 - DNA, 581 bp, Homo sapiens
  source 1..581: mol_type = unassigned DNA
tagaaattagtccggcaatatataagagtatatgttctgctttgcctggcactcactactgcttctctggtttaaaactctccaggtcatttaagggccatcaacccagaaaatggctttttcggtgtcgctcctgggacttcagtgaagaccaaccccaatgccatcaagaccatccagaagaacacaatctttaccaatgtggccgagaccagcgacgggggcgtttactgggaaggcattgatgagccgctagcttcaggtgtcaccatcacgtcctggaagaataaggagtggagctcagaggatggggaaccttgtgcccaccccaactcgaggttctgcacccctgccagccagtgccccatcattgatgctgcctgggagtctccggaaggtgttcccattgaaggcattatctttggaggccgtagacctgctggtgtccctctagtctatgaagctctcagctggcaacatggagtctttgtgggggcggccatgagatcagaggccacagcggctgcagaacataaaggcaaaatcatcatgcatgacccctttgccatgcggcccttctt

SEQ ID NO: 15062 - DNA, 457 bp, Homo sapiens
  source 1..457: mol_type = unassigned DNA
aggatcggcggggaccatggcgggctccccagaccaggagggcttcttcaatctgctgagccacgtgcagggcgaccggatggagggacagcgctgttcactgcaagccgggccgggccagaccaccaagagccagagcgaccccacccccgagatggacagcctcatggacatgctggccagtacccagggccgccgcatggatgaccaacgtgtgacagtcagcagcctgcccggcttccagcccgtggggtccaaggacggagcacagaaacgagctgggaccctcagtccccaacccctgctcacccctcaggacccgaccgctctcggcttccgtcggaacagcagcccccagcccccgacacaagccccctgagggcctgaggcatcctgggtctcactcggcccccaaaaactgataaaagaataaaacacttaaatgaataacaaggaa

SEQ ID NO: 15063 - DNA, 776 bp, Homo sapiens
  source 1..776: mol_type = unassigned DNA
gacatcacacctgagagtccctggggtccagtcattgctgctgggcacagcgaggtccaagctcaggtcgccctgccccctacccaccatgccagatccagcatcgttgtgggcaaacaattatctggatgatctttatggggcttaagcttgggtgggagcagatggggcatgagctggggatttggggatggggggaatccacacccccacgtcctggacgtttaaaaggccctctctggcactgggccggggcagaggccagcagaaaagtgactggagtccagggacatgatggatcaggaggagaagacggaggaaggctcaggcccctgtgccgaggcgggctccccagaccaggagggcttcttcaatctgctgagccacgtgcagggcgaccggatggagggacagcgctgttcactgcaagccgggccgggccagaccaccaagagccagagcgaccccacccccgagatggacagcctcatggacatgctggccagtacccagggccgccgcatggatgaccaacgtgtgacagtcagcagcctgcccggcttccagcccgtggggtccaaggacggagcacagaaacgagctgggaccctcagtccccaacccctgctcacccctcaggacccgaccgctctcggcttccgtcggaacagcagcccccagcccccgacacaagccccctgagggcctgaggcatcctgggtctcactcggcccccaaaaactgataaaagaataaaacacttaaatgaataacaa

SEQ ID NO: 15064 - DNA, 660 bp, Homo sapiens
  source 1..660: mol_type = unassigned DNA
gcccctggtgctctcagatgtcggccaggcttgcagacaggtgaatgcatctcattggctccagggaggcatgatgccaccgggcagctctttttaagagaaaagccagaaccggtggagcagcgacccctgagcagtgttctctgtgctgagcggcgggactgagctgttgagttagagccaacatgagtgagcgacaaggtgctggggcaaccaatggaaaagacaagacatctggtgaaaatgatggacagaagaaagttcaagaagaatttgacattgacatggatgcaccagagacagaacgtgcagcggtggccattcagtctcagttcagaaaattccagaagaagaaggctgggtctcagtcctagtgggagaaccccctcctagtccacctgaaaacaccaaattcaaccatcatctgtcaagaaattaaaagaacaacaccctagagagaagtcatccacacacaatccacacacgcatagcaaacctccaatgcatgtacagaaacctgtgatatttatacccttgtaggaaggtatagacaatggaattgtgagtagcttaatctctatgtttctctccattttcattcctcctgcaactattttccttgatgttgtaataaaatgaagttacgatgagtgaattcaa

SEQ ID NO: 15065 - DNA, 683 bp, Homo sapiens
  source 1..683: mol_type = unassigned DNA
gcgacccctgagcagtgttctctgtgctgagcggcgggactgagctgttgagttagagccaacatgagtgagcgacaaggtgctggggcaaccaatggaaaagacaagacatctggtgaaaatgtcgggtgccccattctcttccttacacactcctgactggctcagcggaaggagctcctgccactcctctaacagcatctgaccttccccgccgccccgggaactggactctctgaagtatacagaaaagtagcgattccttaaatatggacagaagaaagttcaagaagaatttgacattgacatggatgcaccagagacagaacgtgcagcggtggccattcagtctcagttcagaaaattccagaagaagaaggctgggtctcagtcctagtgggagaaccccctcctagtccacctgaaaacaccaaattcaaccatcatctgtcaagaaattaaaagaacaacaccctagagagaagtcatccacacacaatccacacacgcatagcaaacctccaatgcatgtacagaaacctgtgatatttatacccttgtaggaaggtatagacaatggaattgtgagtagcttaatctctatgtttctctccattttcattcctcctgcaactattttccttgatgttgtaataaaatgaagttacgatgagtgaattcaa

SEQ ID NO: 15066 - DNA, 706 bp, Homo sapiens
  source 1..706: mol_type = unassigned DNA
cagtgttctctgtgctgagcggcgggactgagctgttgagttagagccaacatgagtgagaaaaaaatatgagctgtgatttgtacaaaacacacaaaatgcatccgttggaatcagagatccaggaaacttcagctgaaattaacaacttcgtaacacaggtagagcctacgtccttcatgagaaaaatgacacaaatctcagtattctttgtttggagtctcttgacatccatgtgagcgacaaggtgctggggcaaccaatggaaaagacaagacatctggtgaaaatgatggacagaagaaagttcaagaagaatttgacattgacatggatgcaccagagacagaacgtgcagcggtggccattcagtctcagttcagaaaattccagaagaagaaggctgggtctcagtcctagtgggagaaccccctcctagtccacctgaaaacaccaaattcaaccatcatctgtcaagaaattaaaagaacaacaccctagagagaagtcatccacacacaatccacacacgcatagcaaacctccaatgcatgtacagaaacctgtgatatttatacccttgtaggaaggtatagacaatggaattgtgagtagcttaatctctatgtttctctccattttcattcctcctgcaactattttccttgatgttgtaataaaatgaagttacgatgagtgaattcaa

SEQ ID NO: 15067 - DNA, 587 bp, Homo sapiens
  source 1..587: mol_type = unassigned DNA
cgacaaggtgctggggcaaccaatggaaaagacaagacatctggtgaaaatgtcagagtgtgaagaagggcaaactgtggcttttctgtggtttgctgttggggcagctagctgctgattcctgggaaggaatttcaattctttccatgtgctcagagagaagaaggcatttgatggacagaagaaagttcaagaagaatttgacattgacatggatgcaccagagacagaacgtgcagcggtggccattcagtctcagttcagaaaattccagaagaagaaggctgggtctcagtcctagtgggagaaccccctcctagtccacctgaaaacaccaaattcaaccatcatctgtcaagaaattaaaagaacaacaccctagagagaagtcatccacacacaatccacacacgcatagcaaacctccaatgcatgtacagaaacctgtgatatttatacccttgtaggaaggtatagacaatggaattgtgagtagcttaatctctatgtttctctccattttcattcctcctgcaactattttccttgatgttgtaataaaatgaagttacgatgagtgaattcaa

SEQ ID NO: 15068 - DNA, 3868 bp, Homo sapiens
  source 1..3868: mol_type = unassigned DNA
gggcttgccccacaaagtgtgtcgaaggtgtgacgagaactgcttgagctgtgcaggctccagcaggaactgtagcaggtgtaagacgggcttcacacagctggggacctcctgcatcaccaaccacacgtgcagcaacggggacatttggcaacgtctggagacattttgggttgtcacaactggaaggatgtactcacatccagtgggtggaggccaggaatgctgctaagcaccctgcaatgcacagcagcccccatgacaaagaactgtccagaccaaaatgtcaatagtgccgaggttgagaaattccggccaaaagaaatggaatcaaaaaagaaaattgtttgcaacttcatagagataccctcaatgaataaaaccacatatggtttgacttctgtccctgttcctatgctgaagggaaacttgtacaactttccctttttaaagtaaagagataccaccccactcttttttttttttaaacacagcaacagaagggccccaagttaaaaccagctctccagcctaaggactccacctggtggtcctctctggaattaaatgaagttgaggttttattttgtttaattttttcattattcagttattttgtttaacatttttagttattttgtttaaatttttagttattttaacttttaagttattttatttcttagttattttaacttgttattttaatttttttagttattttaactttttaaagttattttaattctttagttattttgtttaacttttttagtttttttagttaaacaaaagttgcagtgaccggggcaggtgtgatggctcaggcctgtaatcccagcactttgggaggccgaggcagggacagggggcaggggaaatcacttcttaggtcaggagctcaagaccagcctggcaaacatgacaaaaccccgtctctactaaaaatataaaaatcagccaggcatggtggcgagcgcctgtaatcccagctacttgagaggctgaggcacgagaatcacttgaacctcatgttattcctcatgaggcggaggttgcagtgagccgagattccgccactgtactccagcctgggcaacagagcgagactccatctcagaaaacaaagaagttccaagtacaatacaaagaaattccctcccaatttgagagtaagttgccgatataccctatgaccgccccccccccgccaatacttcagtgggtatttcctatgaacaacgacattctccggcacagccatcagactcaggaaattaacatcggtatgttattaccatcaaccctctgactgaattctagttctgccagttgtcccaataaagttcttagcaaaatggtctggtttagaaacacacttttcacttagtcatcatgtctctttaatgttcttccatctggaacagttcctcagtctccttgcctcatgatgtggaagcttttaaagactataggccagttatttgtaggctgcccttcgctgtgcacttgtctgagggttcctcacgttttgagtcaagtcatgcatctttgacacgaatctcacaggctgattctgtgttctgtctgcattctagcagggagtacacgatctgttccattattggtgatgttaacgatcattggttagagttttcttccgggctatgaagtgatgcctgccaaagcatatccactaccaccgctgttcaacattgtgctaaagatcccagccagtgtaacagggcaaaaaatacagaaccagtataataattggaaaggaggaaataaaactatcttttttttttttttttttttttttttttgagaccgagtctcactctgttgcccaggctggagtgcaatggcatgatcttcactcactgcaacctccgcctccctgattcaagtgattctcgtgcctcagcctcccaagtagctgggattacaggtacgtgccaccacacccggctaatttttgtatttttagtagaggcggggtttcaccatgttggccaggctggtctcaaactcctgacctcaggtgacccacccacctcagcctcccatagtgctgggattacaggcgtgagccaccacgcccagccaactatcattattctcaaatagcatggttatgtatgtagaaaatccacaagaatggttacagataaacttaagtaaatttcacaagatcgctggatgtaacgccaatatacaaaaatctgctgtatttaaatatatcaaactaatgattagaaaatggagtttttaaacaaaaggtactatttacagtagcatcaaaatctatcaaatatctagacaatctagtaaaggatatacaaggccttgacacaaaatctgcaggatgctgctgaaattaaagagtgcctcaataaatgtagggctataatatgcccattgattggaatacttcatattgtaaagatattaattctctccaaattcttctacagatccaacacactacaaatcaaatcatgggtgctttttcacatatatctataatttatgttcacatgcaaaggattagaataatcagataactactagataatctgagaaaaaaatgggagctttttttgagggacaaataccaagtctttttctaaagcttgtattctgcaaggatagctgactaaacccatggaaaagaacagctagttcagaagcagaggccctcacatatttggacacttgatttttgaaaagagctgctctgcagagcagtgggggagaagatggtcttttcaataaatggtgctgggtccaccaaatatccatatggggaaaaatatatcttcttccctaccttagactatgcacaaaaatctaggccagagagactgcagatctaaatggacaaggtggaagaagaaagcttttagaagaaaatataattttggagtaggcaaaagtttctcacagcgtactcgaaaactattagctgtatagggaacggttcataaatcagactgtattaaaatgaagaacctctattcatcaaaagataccattaagagagtgaaaacccaagccacagggggaagatactcactacagacatagctcacaaggttcctattgaaaaaatataaagagctcctacaaatcagtttaaaaataaagcccaatagaaaaatgggcaaaacacctaagcagacacttcattaaagaggttatccaaacaaacataaatatattttttaaagttctcaattgtgttagtaattagggaaatacagttaaaaccacaatttcataccattacctatctaccagaatggctaagattaaaaagacaatactaaacgttagcaaggagtttaagttggcaaccactttggaaaactatgtcctacttaagctgaacataagtaagccctatgacccagtaattccatccctgggagtatatcagtatatgtgttcacataaagatatatattattgagtttgtaggtacactatttataatataaaagagtgaaaattacccaaatgttcatcaacagcagaatggataagtaaattgtaaaacatccacaatgaaataccatattacagtgagaatagattaactacatctacacacaaacataatgtttagcaaaaaatatgcaaggtacttcatttgcataaatacaaaactagataaagcaaatctatacaagatggcaggataatggttacccttggggcaagggtggtgactagatgaagacaggaggagggcttctggaatgtggcaatgtcctgttcttacgaggatgctagttggttgggtgtgttcagtttgcattcttctatatgtatatcatacttcaataaaagttcaaggagaatc

SEQ ID NO: 15069 - DNA, 543 bp, Homo sapiens
  source 1..543: mol_type = unassigned DNA
gctgaagggcagtggaccttggaaatccaagatctgccatcccaggtccgcaacccggagaagcaagggaagttgaaagaatggagcctcatactgtatggcacagcagagcacccgtaccacaccttcagtgcccatcagtcccgctcgcggatgctggagctctcagccccagagctggagccacccaaggctgccctgtcaccctcccaggtggaagttcctgaagatgaggaagattacacagctcaatccaccccaggctctgctaatattttacagaccagggacatttggcaacgtctggagacattttgggttgtcacaactggaaggatgtactcacatccagtgggtggaggccaggaatgctgctaagcaccctgcaatgcacagcagcccccatgacaaagaactgtccagaccaaaatgtcaatagtgccgaggttgagaaattccggccaaaagaaatggaatcaaaaaagaaaattgtttgcaacttcatagagataccctcaatgaataaaaccacatatggtttga

SEQ ID NO: 15070 - DNA, 4409 bp, Homo sapiens
  source 1..4409: mol_type = unassigned DNA
cgggaacgcgccgcggccgcctcctcctccccggctcccgcccgcggcggtgttggcggcggcggtggcggcggcggcggcgcttccccggcgcggagcggctttaaaaggcggcactccaccccccggcgcactcgcagctcgggcgccgcgcgagcctgtcgccgctatgcctccgcgcgcgccgcctgcgcccgggccccggccgccgccccgggccgccgccgccaccgacaccgccgcgggcgcggggggcgcggggggcgcggggggcgccggcgggcccgggttccggccgctcgcgccgcgtccctggcgctggctgctgctgctggcgctgcctgccgcctgctccgcgcccccgccgcgccccgtctacaccaaccactgggcggtgcaagtgctgggcggcccggccgaggcggaccgcgtggcggcggcgcacgggtacctcaacttgggccagattggaaacctggaagattactaccatttttatcacagcaaaacctttaaaagatcaaccttgagtagcagaggccctcacaccttcctcagaatggacccccaggtgaaatggctccagcaacaggaagtgaaacgaagggtgaagagacaggtgcgaagtgacccgcaggccctttacttcaacgaccccatttggtccaacatgtggtacctgcattgtggcgacaagaacagtcgctgccggtcggaaatgaatgtccaggcagcgtggaagaggggctacacaggaaaaaacgtggtggtcaccatccttgatgatggcatagagagaaatcaccctgacctggccccaaattatgattcctacgccagctacgacgtgaacggcaatgattatgacccatctccacgatatgatgccagcaatgaaaataaacacggcactcgttgtgcgggagaagttgctgcttcagcaaacaattcctactgcatcgtgggcatagcgtacaatgccaaaataggaggcatccgcatgctggacggcgatgtcacagatgtggtcgaggcaaagtcgctgggcatcagacccaactacatcgacatttacagtgccagctgggggccggacgacgacggcaagacggtggacgggcccggccgactggctaagcaggctttcgagtatggcattaaaaagggccggcagggcctgggctccattttcgtctgggcatctgggaatggcgggagagagggggactactgctcgtgcgatggctacaccaacagcatctacaccatctccgtcagcagcgccaccgagaatggctacaagccctggtacctggaagagtgtgcctccaccctggccaccacctacagcagtggggccttttatgagcgaaaaatcgtcaccacggatctgcgtcagcgctgtaccgatggccacactgggacctcagtctctgcccccatggtggcgggcatcatcgccttggctctagaagcaaacagccagttaacctggagggacgtccagcacctgctagtgaagacatcccggccggcccacctgaaagcgagcgactggaaagtgaacggcgcgggtcataaagttagccatttctatggatttggtttggtggacgcagaagctctcgttgtggaggcaaagaagtggacagcagtgccatcgcagcacatgtgtgtggccgcctcggacaagagacccaggagcatccccttagtgcaggtgctgcggactacggccctgaccagcgcctgcgcggagcactcggaccagcgggtggtctacttggagcacgtggtggttcgcacctccatctcacacccacgccgaggagacctccagatctacctggtttctccctcgggaaccaagtctcaacttctggcaaagaggttgctggatctttccaatgaagggtttacaaactgggaattcatgactgtccactgctggggagaaaaggctgaagggcagtggaccttggaaatccaagatctgccatcccaggtccgcaacccggagaagcaagggaagttgaaagaatggagcctcatactgtatggcacagcagagcacccgtaccacaccttcagtgcccatcagtcccgctcgcggatgctggagctctcagccccagagctggagccacccaaggctgccctgtcaccctcccaggtggaagttcctgaagatgaggaagattacacagctcaatccaccccaggctctgctaatattttacagaccagtgtgtgccatccggagtgtggtgacaaaggctgtgatggccccaatgcagaccagtgcttgaactgcgtccacttcagcctggggagtgtcaagaccagcaggaagtgcgtgagtgtgtgccccttgggctactttggggacacagcagcaagacgctgtcgccggtgccacaaggggtgtgagacctgctccagcagagctgcgacgcagtgcctgtcttgccgccgcgggttctatcaccaccaggagatgaacacctgtgtgaccctctgtcctgcaggattttatgctgatgaaagtcagaaaaattgccttaaatgccacccaagctgtaaaaagtgcgtggatgaacctgagaaatgtactgtctgtaaagaaggattcagccttgcacggggcagctgcattcctgactgtgagccaggcacctactttgactcagagctgatcagatgtggggaatgccatcacacctgcggaacctgcgtggggccaggcagagaagagtgcattcactgtgcgaaaaacttccacttccacgactggaagtgtgtgccagcctgtggtgagggcttctacccagaagagatgccgggcttgccccacaaagtgtgtcgaaggtgtgacgagaactgcttgagctgtgcaggctccagcaggaactgtagcaggtgtaagacgggcttcacacagctggggacctcctgcatcaccaaccacacgtgcagcaacgctgacgagacattctgcgagatggtgaagtccaaccggctgtgcgaacggaagctcttcattcagttctgctgccgcacgtgcctcctggccgggtaagggtgcctagctgcccacagagggcaggcactcccatccatccatccgtccaccttcctccagactgtcggccagagtctgtttcaggagcggcgccctgcacctgacagctttatctccccaggagcagcatctctgagcacccaagccaggtgggtggtggctcttaaggaggtgttcctaaaatggtgatatcctctcaaatgctgcttgttggctccagtcttccgacaaactaacaggaacaaaatgaattctgggaatccacagctctggctttggagcagcttctgggaccataagtttactgaatcttcaagaccaaagcagaaaagaaaggcgcttggcatcacacatcactcttctccccgtgcttttctgcggctgtgtagtaaatctccccggcccagctggcgaaccctgggccatcctcacatgtgacaaagggccagcagtctacctgctcgttgcctgccactgagcagtctggggacggtttggtcagactataaataagataggtttgagggcataaaatgtatgaccactggggccggagtatctatttctacatagtcagctacttctgaaactgcagcagtggcttagaaagtccaattccaaagccagaccagaagattctatcccccgcagcgctctcctttgagcaagccgagctctccttgttaccgtgttctgtctgtgtcttcaggagtctcatggcctgaacgaccacctcgacctgatgcagagccttctgaggagaggcaacaggaggcattctgtggccagccaaaaggtaccccgatggccaagcaattcctctgaacaaaatgtaaagccagccatgcattgttaatcatccatcacttcccattttatggaattgcttttaaaatacatttggcctctgcccttcagaagactcgtttttaaggtggaaactcctgtgtctgtgtatattacaagcctacatgacacagttggatttattctgccaaacctgtgtaggcattttataagctacatgttctaatttttaccgatgttaattattttgacaaatatttcatatattttcattgaaatgcacagatctgcttgatcaattcccttgaatagggaagtaacatttgccttaaattttttcgacctcgtctttctccatattgtcctgctcccctgtttgacgacagtgcatttgccttgtcacctgtgagctggagagaacccagatgttgtttattgaatctacaactctgaaagagaaatcaatgaagcaagtacaatgttaaccctaaattaataaaagagttaacatcccatggca

SEQ ID NO: 15071 - DNA, 3723 bp, Homo sapiens
  source 1..3723: mol_type = unassigned DNA
cagattggaaacctggaagattactaccatttttatcacagcaaaacctttaaaagatcaaccttgagtagcagaggccctcacaccttcctcagaatggacccccaggtgaaatggctccagcaacaggaagtgaaacgaagggtgaagagacaggtgcgaagtgacccgcaggccctttacttcaacgaccccatttggtccaacatgtggtacctgcattgtggcgacaagaacagtcgctgccggtcggaaatgaatgtccaggcagcgtggaagaggggctacacaggaaaaaacgtggtggtcaccatccttgatgatggcatagagagaaatcaccctgacctggccccaaattatgattcctacgccagctacgacgtgaacggcaatgattatgacccatctccacgatatgatgccagcaatgaaaataaacacggcactcgttgtgcgggagaagttgctgcttcagcaaacaattcctactgcatcgtgggcatagcgtacaatgccaaaataggaggcatccgcatgctggacggcgatgtcacagatgtggtcgaggcaaagtcgctgggcatcagacccaactacatcgacatttacagtgccagctgggggccggacgacgacggcaagacggtggacgggcccggccgactggctaagcaggctttcgagtatggcattaaaaagggccggcagggcctgggctccattttcgtctgggcatctgggaatggcgggagagagggggactactgctcgtgcgatggctacaccaacagcatctacaccatctccgtcagcagcgccaccgagaatggctacaagccctggtacctggaagagtgtgcctccaccctggccaccacctacagcagtggggccttttatgagcgaaaaatcgtcaccacggatctgcgtcagcgctgtaccgatggccacactgggacctcagtctctgcccccatggtggcgggcatcatcgccttggctctagaagcaaagagcatccccttagtgcaggtgctgcggactacggccctgaccagcgcctgcgcggagcactcggaccagcgggtggtctacttggagcacgtggtggttcgcacctccatctcacacccacgccgaggagacctccagatctacctggtttctccctcgggaaccaagtctcaacttctggcaaagaggttgctggatctttccaatgaagggtttacaaactgggaattcatgactgtccactgctggggagaaaaggctgaagggcagtggaccttggaaatccaagatctgccatcccaggtccgcaacccggagaagcaagggaagttgaaagaatggagcctcatactgtatggcacagcagagcacccgtaccacaccttcagtgcccatcagtcccgctcgcggatgctggagctctcagccccagagctggagccacccaaggctgccctgtcaccctcccaggtggaagttcctgaagatgaggaagattacacagctcaatccaccccaggctctgctaatattttacagaccagtgtgtgccatccggagtgtggtgacaaaggctgtgatggccccaatgcagaccagtgcttgaactgcgtccacttcagcctggggagtgtcaagaccagcaggaagtgcgtgagtgtgtgccccttgggctactttggggacacagcagcaagacgctgtcgccggtgccacaaggggtgtgagacctgctccagcagagctgcgacgcagtgcctgtcttgccgccgcgggttctatcaccaccaggagatgaacacctgtgtgaccctctgtcctgcaggattttatgctgatgaaagtcagaaaaattgccttaaatgccacccaagctgtaaaaagtgcgtggatgaacctgagaaatgtactgtctgtaaagaaggattcagccttgcacggggcagctgcattcctgactgtgagccaggcacctactttgactcagagctgatcagatgtggggaatgccatcacacctgcggaacctgcgtggggccaggcagagaagagtgcattcactgtgcgaaaaacttccacttccacgactggaagtgtgtgccagcctgtggtgagggcttctacccagaagagatgccgggcttgccccacaaagtgtgtcgaaggtgtgacgagaactgcttgagctgtgcaggctccagcaggaactgtagcaggtgtaagacgggcttcacacagctggggacctcctgcatcaccaaccacacgtgcagcaacgctgacgagacattctgcgagatggtgaagtccaaccggctgtgcgaacggaagctcttcattcagttctgctgccgcacgtgcctcctggccgggtaagggtgcctagctgcccacagagggcaggcactcccatccatccatccgtccaccttcctccagactgtcggccagagtctgtttcaggagcggcgccctgcacctgacagctttatctccccaggagcagcatctctgagcacccaagccaggtgggtggtggctcttaaggaggtgttcctaaaatggtgatatcctctcaaatgctgcttgttggctccagtcttccgacaaactaacaggaacaaaatgaattctgggaatccacagctctggctttggagcagcttctgggaccataagtttactgaatcttcaagaccaaagcagaaaagaaaggcgcttggcatcacacatcactcttctccccgtgcttttctgcggctgtgtagtaaatctccccggcccagctggcgaaccctgggccatcctcacatgtgacaaagggccagcagtctacctgctcgttgcctgccactgagcagtctggggacggtttggtcagactataaataagataggtttgagggcataaaatgtatgaccactggggccggagtatctatttctacatagtcagctacttctgaaactgcagcagtggcttagaaagtccaattccaaagccagaccagaagattctatcccccgcagcgctctcctttgagcaagccgagctctccttgttaccgtgttctgtctgtgtcttcaggagtctcatggcctgaacgaccacctcgacctgatgcagagccttctgaggagaggcaacaggaggcattctgtggccagccaaaaggtaccccgatggccaagcaattcctctgaacaaaatgtaaagccagccatgcattgttaatcatccatcacttcccattttatggaattgcttttaaaatacatttggcctctgcccttcagaagactcgtttttaaggtggaaactcctgtgtctgtgtatattacaagcctacatgacacagttggatttattctgccaaacctgtgtaggcattttataagctacatgttctaatttttaccgatgttaattattttgacaaatatttcatatattttcattgaaatgcacagatctgcttgatcaattcccttgaatagggaagtaacatttgccttaaattttttcgacctcgtctttctccatattgtcctgctcccctgtttgacgacagtgcatttgccttgtcacctgtgagctggagagaacccagatgttgtttattgaatctacaactctgaaagagaaatcaatgaagcaagtacaatgttaaccctaaattaataaaagagttaacatcccatggc

SEQ ID NO: 15072 - DNA, 3325 bp, Homo sapiens
  source 1..3325: mol_type = unassigned DNA
cagctgctgagtgtgtggcaacctggttagagcaatggaaaaccgaggcccctgccatcctgctgagctgggtgaggttgtatttgaagaagcaagcaagccgtaacctcctggctgtccaccgcagcgcgctcctcaccacagttcttcactgatgaagcagccctcagccgtggcctgggggcactgggcccctgggtcctccagaccactgacatctctttaaatgactcagctcggccctggttctcgtctcaccagtggcattgtctgtaagagaaaccagagggtctgtggggaaagtcataacctgtactggggcatcagggtttggtggctgggccaccagaatgtgcaagggcaggtgtggggagggggcagcatgatgggggcagacccatggggcttcccacaagtgcacaaccccctctggcaagtcctctaaccccatcctttcctctggggcggcctggatgggaatattagaaaggctcgtgggtgtgagtttgcctgtggggtttacacatttacaattacagaccaagggcttgagctctaggctcagcatcctcagacacactaggaataaaacccacctcccacccaggctgaagcgatgctgcacctggggctccagagcagcggagtccgtggtgagaccagaccccatcagagggctgctctgcaaagagccccacgaggaggcctggtgtctgagcgtgggaaggcttcacacagcagggaggggacatctgtataaagcaaagaactgccccccagggaggcccaggcatgagcacaacaaagctccaagccctgcctatggggcctgttccacccttaactggcaacaatggggaggtgggcagctgatgcaagcactgtggagaccgagtcaccgggctctggactcaggacaggcagcagcatagccggggtgcactcacggccccaggatgggaaacgtgctccttcaagcactcggcccgcatcggcaagtgctttctgtagagggcacaatggtcagtcgttcaggcttttggggccacactgcctctgtcacagctactcagctcagccactgctacacaaaagattgtcaatgaatgagtgtgactgtggtccaggataaatgctggatgtggcccttgggctgtagtgcaccaaccgtcccctgaggtcacgtttaccctgcattagaaatagccctggctggtgtccatctctgcgcaggctgggccaggaccgtccgagaggggcaggaattgtggggcatctctcccactccccgagggtaagcaggcatggccacatataggtgacagcagccttctggtcagctcgagtcaggtgtgtcacatccctgggtggagtctggcctggaccccaagcctacagccatcgcagcccggcagccgctggagagagaagactgacacagctctgggagccgtgtggtggggtgggggctgggtgccagggcccaggagggtgtccaggtgagctgcgggaagcctcggaggcctggcccctgatcctgggcttgctcctgccaactggccatggctgtctctgccctcccagggcaatagtgaggtcagacaggagaaaagacatgcagacactcagcccctgtgtcagggaatggtgggcgacacagcctctccacagaggaccgaggctgagggggtgggaaggaggtgcagggaggtgagggttctgggaagggagcccggagtggtggagcctcttccccagacttcagcaggaacggtatcttcccacaggtgtgacgagaactgcttgagctgtgcaggctccagcaggaactgtagcaggtgtaagacgggcttcacacagctggggacctcctgcatcaccaaccacacgtgcagcaacgctgacgagacattctgcgagatggtgaagtccaaccggctgtgcgaacggaagctcttcattcagttctgctgccgcacgtgcctcctggccgggtaagggtgcctagctgcccacagagggcaggcactcccatccatccatccgtccaccttcctccagactgtcggccagagtctgtttcaggagcggcgccctgcacctgacagctttatctccccaggagcagcatctctgagcacccaagccaggtgggtggtggctcttaaggaggtgttcctaaaatggtgatatcctctcaaatgctgcttgttggctccagtcttccgacaaactaacaggaacaaaatgaattctgggaatccacagctctggctttggagcagcttctgggaccataagtttactgaatcttcaagaccaaagcagaaaagaaaggcgcttggcatcacacatcactcttctccccgtgcttttctgcggctgtgtagtaaatctccccggcccagctggcgaaccctgggccatcctcacatgtgacaaagggccagcagtctacctgctcgttgcctgccactgagcagtctggggacggtttggtcagactataaataagataggtttgagggcataaaatgtatgaccactggggccggagtatctatttctacatagtcagctacttctgaaactgcagcagtggcttagaaagtccaattccaaagccagaccagaagattctatcccccgcagcgctctcctttgagcaagccgagctctccttgttaccgtgttctgtctgtgtcttcaggagtctcatggcctgaacgaccacctcgacctgatgcagagccttctgaggagaggcaacaggaggcattctgtggccagccaaaaggtaccccgatggccaagcaattcctctgaacaaaatgtaaagccagccatgcattgttaatcatccatcacttcccattttatggaattgcttttaaaatacatttggcctctgcccttcagaagactcgtttttaaggtggaaactcctgtgtctgtgtatattacaagcctacatgacacagttggatttattctgccaaacctgtgtaggcattttataagctacatgttctaatttttaccgatgttaattattttgacaaatatttcatatattttcattgaaatgcacagatctgcttgatcaattcccttgaatagggaagtaacatttgccttaaattttttcgacctcgtctttctccatattgtcctgctcccctgtttgacgacagtgcatttgccttgtcacctgtgagctggagagaacccagatgttgtttattgaatctacaactctgaaagagaaatcaatgaagcaagtacaatgttaaccctaaattaataaaagagttaacatcccatg

SEQ ID NO: 15073 - DNA, 4269 bp, Homo sapiens
  source 1..4269: mol_type = unassigned DNA
gagcggctttaaaaggcggcactccaccccccggcgcactcgcagctcgggcgccgcgcgagcctgtcgccgctatgcctccgcgcgcgccgcctgcgcccgggccccggccgccgccccgggccgccgccgccaccgacaccgccgcgggcgcggggggcgcggggggcgcggggggcgccggcgggcccgggttccggccgctcgcgccgcgtccctggcgctggctgctgctgctggcgctgcctgccgcctgctccgcgcccccgccgcgccccgtctacaccaaccactgggcggtgcaagtgctgggcggcccggccgaggcggaccgcgtggcggcggcgcacgggtacctcaacttgggccagattggaaacctggaagattactaccatttttatcacagcaaaacctttaaaagatcaaccttgagtagcagaggccctcacaccttcctcagaatggacccccaggtgaaatggctccagcaacaggaagtgaaacgaagggtgaagagacaggtgcgaagtgacccgcaggccctttacttcaacgaccccatttggtccaacatgtggtacctgcattgtggcgacaagaacagtcgctgccggtcggaaatgaatgtccaggcagcgtggaagaggggctacacaggaaaaaacgtggtggtcaccatccttgatgatggcatagagagaaatcaccctgacctggccccaaattatgattcctacgccagctacgacgtgaacggcaatgattatgacccatctccacgatatgatgccagcaatgaaaataaacacggcactcgttgtgcgggagaagttgctgcttcagcaaacaattcctactgcatcgtgggcatagcgtacaatgccaaaataggaggcatccgcatgctggacggcgatgtcacagatgtggtcgaggcaaagtcgctgggcatcagacccaactacatcgacatttacagtgccagctgggggccggacgacgacggcaagacggtggacgggcccggccgactggctaagcaggctttcgagtatggcattaaaaagggccggcagggcctgggctccattttcgtctgggcatctgggaatggcgggagagagggggactactgctcgtgcgatggctacaccaacagcatctacaccatctccgtcagcagcgccaccgagaatggctacaagccctggtacctggaagagtgtgcctccaccctggccaccacctacagcagtggggccttttatgagcgaaaaatcgtcaccacggatctgcgtcagcgctgtaccgatggccacactgggacctcagtctctgcccccatggtggcgggcatcatcgccttggctctagaagcaaacagccagttaacctggagggacgtccagcacctgctagtgaagacatcccggccggcccacctgaaagcgagcgactggaaagtgaacggcgcgggtcataaagttagccatttctatggatttggtttggtggacgcagaagctctcgttgtggaggcaaagaagtggacagcagtgccatcgcagcacatgtgtgtggccgcctcggacaagagacccaggagcatccccttagtgcaggtgctgcggactacggccctgaccagcgcctgcgcggagcactcggaccagcgggtggtctacttggagcacgtggtggttcgcacctccatctcacacccacgccgaggagacctccagatctacctggtttctccctcgggaaccaagtctcaacttctggcaaagaggttgctggatctttccaatgaagggtttacaaactgggaattcatgactgtccactgctggggagaaaaggctgaagggcagtggaccttggaaatccaagatctgccatcccaggtccgcaacccggagaagcaagggaagttgaaagaatggagcctcatactgtatggcacagcagagcacccgtaccacaccttcagtgcccatcagtcccgctcgcggatgctggagctctcagccccagagctggagccacccaaggctgccctgtcaccctcccaggtggaagttcctgaagatgaggaagattacacaggtgtgtgccatccggagtgtggtgacaaaggctgtgatggccccaatgcagaccagtgcttgaactgcgtccacttcagcctggggagtgtcaagaccagcaggaagtgcgtgagtgtgtgccccttgggctactttggggacacagcagcaagacgctgtcgccggtgccacaaggggtgtgagacctgctccagcagagctgcgacgcagtgcctgtcttgccgccgcgggttctatcaccaccaggagatgaacacctgtgtgaccctctgtcctgcaggattttatgctgatgaaagtcagaaaaattgccttaaatgccacccaagctgtaaaaagtgcgtggatgaacctgagaaatgtactgtctgtaaagaaggattcagccttgcacggggcagctgcattcctgactgtgagccaggcacctactttgactcagagctgatcagatgtggggaatgccatcacacctgcggaacctgcgtggggccaggcagagaagagtgcattcactgtgcgaaaaacttccacttccacgactggaagtgtgtgccagcctgtggtgagggcttctacccagaagagatgccgggcttgccccacaaagtgtgtcgaaggtgtgacgagaactgcttgagctgtgcaggctccagcaggaactgtagcaggtgtaagacgggcttcacacagctggggacctcctgcatcaccaaccacacgtgcagcaacgctgacgagacattctgcgagatggtgaagtccaaccggctgtgcgaacggaagctcttcattcagttctgctgccgcacgtgcctcctggccgggtaagggtgcctagctgcccacagagggcaggcactcccatccatccatccgtccaccttcctccagactgtcggccagagtctgtttcaggagcggcgccctgcacctgacagctttatctccccaggagcagcatctctgagcacccaagccaggtgggtggtggctcttaaggaggtgttcctaaaatggtgatatcctctcaaatgctgcttgttggctccagtcttccgacaaactaacaggaacaaaatgaattctgggaatccacagctctggctttggagcagcttctgggaccataagtttactgaatcttcaagaccaaagcagaaaagaaaggcgcttggcatcacacatcactcttctccccgtgcttttctgcggctgtgtagtaaatctccccggcccagctggcgaaccctgggccatcctcacatgtgacaaagggccagcagtctacctgctcgttgcctgccactgagcagtctggggacggtttggtcagactataaataagataggtttgagggcataaaatgtatgaccactggggccggagtatctatttctacatagtcagctacttctgaaactgcagcagtggcttagaaagtccaattccaaagccagaccagaagattctatcccccgcagcgctctcctttgagcaagccgagctctccttgttaccgtgttctgtctgtgtcttcaggagtctcatggcctgaacgaccacctcgacctgatgcagagccttctgaggagaggcaacaggaggcattctgtggccagccaaaaggtaccccgatggccaagcaattcctctgaacaaaatgtaaagccagccatgcattgttaatcatccatcacttcccattttatggaattgcttttaaaatacatttggcctctgcccttcagaagactcgtttttaaggtggaaactcctgtgtctgtgtatattacaagcctacatgacacagttggatttattctgccaaacctgtgtaggcattttataagctacatgttctaatttttaccgatgttaattattttgacaaatatttcatatattttcattgaaatgcacagatctgcttgatcaattcccttgaatagggaagtaacatttgccttaaattttttcgacctcgtctttctccatattgtcctgctcccctgtttgacgacagtgcatttgccttgtcacctgtgagctggagagaacccagatgttgtttattgaatctacaactctgaaagagaaatcaatgaagcaagtacaatgttaaccctaaattaataaaagagttaacatccc

SEQ ID NO: 15074 - DNA, 1196 bp, Homo sapiens
  source 1..1196: mol_type = unassigned DNA
acaaatgggagtatggagtgacaagttagaagctatgtccacagataaataaacagcacagattgcaagacagagaagcgcaatcaagaggcagttattcttcgtccatgagaaaaatgaaagggccaggcagagaagagtgcattcactgtgcgaaaaacttccacttccacgactggaagtgtgtgccagcctgtggtgagggcttctacccagaagagatgccgggcttgccccacaaagtgtgtcgaagagtcaccattcttatttgatggccctggacccttctgttgttggacatgagctgttaaaggaggagctgtttgctctggtctcctcttttctggctgaatattgccctatgttgggagatcatgaactcaggacccagaacagggcagggcaacctgtcttattcagggtgggagcaacattgaggagtttgaagggacctgtgagggtgtgacgatggggtgtgacgagaactgcttgagctgtgcaggctccagcaggaactgtagcaggtgtaagacgggcttcacacagctggggacctcctgcatcaccaaccacacgtgcagcaacgctgacgagacattctgcgagatggtgaagtccaaccggctgtgcgaacggaagctcttcattcagttctgctgccgcacgtgcctcctggccgggtaagggtgcctagctgcccacagagggcaggcactcccatccatccatccgtccaccttcctccagactgtcggccagagtctgtttcaggagcggcgccctgcacctgacagctttatctccccaggagcagcatctctgagcacccaagccaggtgggtggtggctcttaaggaggtgttcctaaaatggtgatatcctctcaaatgctgcttgttggctccagtcttccgacaaactaacaggaacaaaatgaattctgggaatccacagctctggctttggagcagcttctgggaccataagtttactgaatcttcaagaccaaagcagaaaagaaaggcgcttggcatcacacatcactcttctccccgtgcttttctgcggctgtgtagtaaatctccccggcccagctggcgaaccctgggccatcctcacatgtgacaaagggccagcagtctacctgctcgttgcctgccactgagcagtctggggacggtttggtcagactataa

SEQ ID NO: 15075 - DNA, 1210 bp, Homo sapiens
  source 1..1210: mol_type = unassigned DNA
gagaacaacttcctgtgtcactgctgcagcggtgagaacaacttcctgtgtcactgctgcagcgggaagttgaaagaatggagcctcatactgtatggcacagcagagcacccgtaccacaccttcagtgcccatcagtcccgctcgcggatgctggagctctcagccccagagctggagccacccaaggctgccctgtcaccctcccaggtggaagttcctgaagatgaggaagattacacaggtgtgtgccatccggagtgtggtgacaaaggctgtgatggccccaatgcagaccagtgcttgaactgcgtccacttcagcctggggagtgtcaagaccagcaggaagtgcgtgagtgtgtgccccttgggctactttggggacacagcagcaagacgctgtcgccggtgccacaaggggtgtgagacctgctccagcagagctgcgacgcagtgcctgtcttgccgccgcgggttctatcaccaccaggagatgaacacctgtgtgaccctctgtcctgcaggattttatgctgatgaaagtcagaaaaattgccttaaatgccacccaagctgtaaaaagtgcgtggatgaacctgagaaatgtactgtctgtaaagaaggattcagccttgcacggggcagctgcattcctgactgtgagccaggcacctactttgactcagagctgatcagatgtggggaatgccatcacacctgcggaacctgcgtggggccaggcagagaagagtgcattcactgtgcgaaaaacttccacttccacgactggaagtgtgtgccagcctgtggtgagggcttctacccagaagagatgccgggcttgccccacaaagtgtgtcgaaggtgtgacgagaactgcttgagctgtgcaggctccagcaggaactgtagcaggtgtaagacgggcttcacacagctggggacctcctgcatcaccaaccacacgtgcagcaacgctgacgagacattctgcgagatggtgaagtccaaccggctgtgcgaacggaagctcttcattcagttctgctgccgcacgtgcctcctggccgggtaagggtgcctagctgcccacagagggcaggcactcccatccatccatccgtccaccttcctccagactgtcggccagagtctgtttcaggagcggcgccctgcacctgacagctttatctccccaggagcagcat

SEQ ID NO: 15076 - DNA, 543 bp, Homo sapiens
  source 1..543: mol_type = unassigned DNA
ctttatagagtcccttggaattctcatctcaaaccagtgacttctccatcacttcagctattaaattcattgggccaggcagagaagagtgcattcactgtgcgaaaaacttccacttccacgactggaagtgtgtgccagcctgtggtgagggcttctacccagaagagatgccgggcttgccccacaaagtgtgtcgaaggtgtgacgagaactgcttgagctgtgcaggctccagcaggaactgtagcaggtgtaagacgggcttcacacagctggggacctcctgcatcaccaaccacacgtgcagcaacgctgacgagacattctgcgagatggtgaagtccaaccggctgtgcgaacggaagctcttcattcagttctgctgccgcacgtgcctcctggccgggtaagggtgcctagctgcccacagagggcaggcactcccatccatccatccgtccaccttcctccagactgtcggccagagtctgtttcaggagcggcgccctgcacctgacagctttatctccccaggagcag

SEQ ID NO: 15077 - DNA, 338 bp, Homo sapiens
  source 1..338: mol_type = unassigned DNA
gtggcctgggggcactgggcccctgggtcctccagaccactgacatctctttaaatgactcagctcggccctggttctcgtctcaccagtggcattgtctgtgtgacgagaactgcttgagctgtgcaggctccagcaggaactgtagcaggtgtaagacgggcttcacacagctggggacctcctgcatcaccaaccacacgtgcagcaacgctgacgagacattctgcgagatggtgaagtccaaccggctgtgcgaacggaagctcttcattcagttctgctgccgcacgtgcctcctggccgggtaagggtgcctagctgcccacagagggcag

SEQ ID NO: 15078 - DNA, 507 bp, Homo sapiens
  source 1..507: mol_type = unassigned DNA
gaagactttggcactggatttccaagtgttcagggagcagaggtgggcctaggcctgttggaaacagggcccatcatcgtggcacggccagtgggcaggtgtgctccctctgagatcatctcatgcctcgatgtccccgtctgtgaaatggtgatggcgatgcccacctcctgggagtgggtgaggacggcccagctcacagaacctgggaaatggcagctgtggtggtggcctgggggctcctgaatggtacccctgatctcacaaggccctgaagcaggcctggggcatggtcttctgccagccatccctgatacctgcttcttttcctgtgtctctcagggccaggcagagaagagtgcattcactgtgcgaaaaacttccacttccacgactggaagtgtgtgccagcctgtggtgagggcttctacccagaagagatgccgggcttgccccacaaagtgtgtcgaaggtgtgacgagaactgcttgagctgtgcaggctcca

SEQ ID NO: 15079 - DNA, 3132 bp, Homo sapiens
  source 1..3132: mol_type = unassigned DNA
gagcggctttaaaaggcggcactccaccccccggcgcactcgcagctcgggcgccgcgcgagcctgtcgccgctatgcctccgcgcgcgccgcctgcgcccgggccccggccgccgccccgggccgccgccgccaccgacaccgccgcgggcgcggggggcgcggggggcgcggggggcgccggcgggcccgggttccggccgctcgcgccgcgtccctggcgctggctgctgctgctggcgctgcctgccgcctgctccgcgcccccgccgcgccccgtctacaccaaccactgggcggtgcaagtgctgggcggcccggccgaggcggaccgcgtggcggcggcgcacgggtacctcaacttgggccagattggaaacctggaagattactaccatttttatcacagcaaaacctttaaaagatcaaccttgagtagcagaggccctcacaccttcctcagaatggacccccaggtgaaatggctccagcaacaggaagtgaaacgaagggtgaagagacaggtgcgaagtgacccgcaggccctttacttcaacgaccccatttggtccaacatgtggtacctgcattgtggcgacaagaacagtcgctgccggtcggaaatgaatgtccaggcagcgtggaagaggggctacacaggaaaaaacgtggtggtcaccatccttgatgatggcatagagagaaatcaccctgacctggccccaaattatgattcctacgccagctacgacgtgaacggcaatgattatgacccatctccacgatatgatgccagcaatgaaaataaacacggcactcgttgtgcgggagaagttgctgcttcagcaaacaattcctactgcatcgtgggcatagcgtacaatgccaaaataggaggcatccgcatgctggacggcgatgtcacagatgtggtcgaggcaaagtcgctgggcatcagacccaactacatcgacatttacagtgccagctgggggccggacgacgacggcaagacggtggacgggcccggccgactggctaagcaggctttcgagtatggcattaaaaagggccggcagggcctgggctccattttcgtctgggcatctgggaatggcgggagagagggggactactgctcgtgcgatggctacaccaacagcatctacaccatctccgtcagcagcgccaccgagaatggctacaagccctggtacctggaagagtgtgcctccaccctggccaccacctacagcagtggggccttttatgagcgaaaaatcgtcaccacggatctgcgtcagcgctgtaccgatggccacactgggacctcagtctctgcccccatggtggcgggcatcatcgccttggctctagaagcaaacagccagttaacctggagggacgtccagcacctgctagtgaagacatcccggccggcccacctgaaagcgagcgactggaaagtgaacggcgcgggtcataaagttagccatttctatggatttggtttggtggacgcagaagctctcgttgtggaggcaaagaagtggacagcagtgccatcgcagcacatgtgtgtggccgcctcggacaagagacccaggagcatccccttagtgcaggtgctgcggactacggccctgaccagcgcctgcgcggagcactcggaccagcgggtggtctacttggagcacgtggtggttcgcacctccatctcacacccacgccgaggagacctccagatctacctggtttctccctcgggaaccaagtctcaacttctggcaaagaggttgctggatctttccaatgaagggtttacaaactgggaattcatgactgtccactgctggggagaaaaggctgaagggcagtggaccttggaaatccaagatctgccatcccaggtccgcaacccggagaagcaagggaagttgaaagaatggagcctcatactgtatggcacagcagagcacccgtaccacaccttcagtgcccatcagtcccgctcgcggatgctggagctctcagccccagagctggagccacccaaggctgccctgtcaccctcccaggtggaagttcctgaagatgaggaagattacacagctcaatccaccccaggctctgctaatattttacagaccagtgtgtgccatccggagtgtggtgacaaaggctgtgatggccccaatgcagaccagtgcttgaactgcgtccacttcagcctggggagtgtcaagaccagcaggaagtgcgtgagtgtgtgccccttgggctactttggggacacagcagcaagacgctgtcgccggtgccacaaggggtgtgagacctgctccagcagagctgcgacgcagtgcctgtcttgccgccgcgggttctatcaccaccaggagatgaacacctgtgtgaccctctgtcctgcaggattttatgctgatgaaagtcagaaaaattgccttaaatgccacccaagctgtaaaaagtgcgtggatgaacctgagaaatgtactgtctgtaaagaaggattcagccttgcacggggcagctgcattcctgactgtgagccaggcacctactttgactcagagctgatcagatgtggggaatgccatcacacctgcggaacctgcgtggggccaggcagagaagagtgcattcactgtgcgaaaaacttccacttccacgactggaagtgtgtgccagcctgtggtgagggcttctacccagaagagatgccgggcttgccccacaaagtgtgtcgaaggtacggtcctcctggcggggaacggcaggcagctgtgtccagcaaaggagtgcctggagggcagagtctggcagcatcttccccaggggccggggagggcatgttgcatcaccccactgtggacaggagcccatttacagagctgctgaggggccttcgtccctttgttcactggatgcatatttgttgggtccctgctgtgggcagacaccgtgcagcagcgggataagatgggaagcagaatagcaaggtgctcacaccccattggtggactacgcgggacgtccctgcccatgtcgcgctcagcatgcatcctttgcactgtcgataatcagagaaaccatgttttgggttaaaaa

SEQ ID NO: 15080 - DNA, 3093 bp, Homo sapiens
  source 1..3093: mol_type = unassigned DNA
gagcggctttaaaaggcggcactccaccccccggcgcactcgcagctcgggcgccgcgcgagcctgtcgccgctatgcctccgcgcgcgccgcctgcgcccgggccccggccgccgccccgggccgccgccgccaccgacaccgccgcgggcgcggggggcgcggggggcgcggggggcgccggcgggcccgggttccggccgctcgcgccgcgtccctggcgctggctgctgctgctggcgctgcctgccgcctgctccgcgcccccgccgcgccccgtctacaccaaccactgggcggtgcaagtgctgggcggcccggccgaggcggaccgcgtggcggcggcgcacgggtacctcaacttgggccagattggaaacctggaagattactaccatttttatcacagcaaaacctttaaaagatcaaccttgagtagcagaggccctcacaccttcctcagaatggacccccaggtgaaatggctccagcaacaggaagtgaaacgaagggtgaagagacaggtgcgaagtgacccgcaggccctttacttcaacgaccccatttggtccaacatgtggtacctgcattgtggcgacaagaacagtcgctgccggtcggaaatgaatgtccaggcagcgtggaagaggggctacacaggaaaaaacgtggtggtcaccatccttgatgatggcatagagagaaatcaccctgacctggccccaaattatgattcctacgccagctacgacgtgaacggcaatgattatgacccatctccacgatatgatgccagcaatgaaaataaacacggcactcgttgtgcgggagaagttgctgcttcagcaaacaattcctactgcatcgtgggcatagcgtacaatgccaaaataggaggcatccgcatgctggacggcgatgtcacagatgtggtcgaggcaaagtcgctgggcatcagacccaactacatcgacatttacagtgccagctgggggccggacgacgacggcaagacggtggacgggcccggccgactggctaagcaggctttcgagtatggcattaaaaagggccggcagggcctgggctccattttcgtctgggcatctgggaatggcgggagagagggggactactgctcgtgcgatggctacaccaacagcatctacaccatctccgtcagcagcgccaccgagaatggctacaagccctggtacctggaagagtgtgcctccaccctggccaccacctacagcagtggggccttttatgagcgaaaaatcgtcaccacggatctgcgtcagcgctgtaccgatggccacactgggacctcagtctctgcccccatggtggcgggcatcatcgccttggctctagaagcaaacagccagttaacctggagggacgtccagcacctgctagtgaagacatcccggccggcccacctgaaagcgagcgactggaaagtgaacggcgcgggtcataaagttagccatttctatggatttggtttggtggacgcagaagctctcgttgtggaggcaaagaagtggacagcagtgccatcgcagcacatgtgtgtggccgcctcggacaagagacccaggagcatccccttagtgcaggtgctgcggactacggccctgaccagcgcctgcgcggagcactcggaccagcgggtggtctacttggagcacgtggtggttcgcacctccatctcacacccacgccgaggagacctccagatctacctggtttctccctcgggaaccaagtctcaacttctggcaaagaggttgctggatctttccaatgaagggtttacaaactgggaattcatgactgtccactgctggggagaaaaggctgaagggcagtggaccttggaaatccaagatctgccatcccaggtccgcaacccggagaagcaagggaagttgaaagaatggagcctcatactgtatggcacagcagagcacccgtaccacaccttcagtgcccatcagtcccgctcgcggatgctggagctctcagccccagagctggagccacccaaggctgccctgtcaccctcccaggtggaagttcctgaagatgaggaagattacacaggtgtgtgccatccggagtgtggtgacaaaggctgtgatggccccaatgcagaccagtgcttgaactgcgtccacttcagcctggggagtgtcaagaccagcaggaagtgcgtgagtgtgtgccccttgggctactttggggacacagcagcaagacgctgtcgccggtgccacaaggggtgtgagacctgctccagcagagctgcgacgcagtgcctgtcttgccgccgcgggttctatcaccaccaggagatgaacacctgtgtgaccctctgtcctgcaggattttatgctgatgaaagtcagaaaaattgccttaaatgccacccaagctgtaaaaagtgcgtggatgaacctgagaaatgtactgtctgtaaagaaggattcagccttgcacggggcagctgcattcctgactgtgagccaggcacctactttgactcagagctgatcagatgtggggaatgccatcacacctgcggaacctgcgtggggccaggcagagaagagtgcattcactgtgcgaaaaacttccacttccacgactggaagtgtgtgccagcctgtggtgagggcttctacccagaagagatgccgggcttgccccacaaagtgtgtcgaaggtacggtcctcctggcggggaacggcaggcagctgtgtccagcaaaggagtgcctggagggcagagtctggcagcatcttccccaggggccggggagggcatgttgcatcaccccactgtggacaggagcccatttacagagctgctgaggggccttcgtccctttgttcactggatgcatatttgttgggtccctgctgtgggcagacaccgtgcagcagcgggataagatgggaagcagaatagcaaggtgctcacaccccattggtggactacgcgggacgtccctgcccatgtcgcgctcagcatgcatcctttgcactgtcgataatcagagaaaccatgttttgggttaaaaa

SEQ ID NO: 15081 - DNA, 379 bp, Homo sapiens
  source 1..379: mol_type = unassigned DNA
gagcactcggaccagcgggtggtctacttggagcacgtggtggttcgcacctccatctcacacccacgccgaggagacctccagatctacctggtttctccctcgggaaccaagtctcaacttctggcaaagaggtggaagttcctgaagatgaggaagattacacaggtgtgtgccatccggagtgtggtgacaaaggctgtgatggccccaatgcagaccagtgcttgaactgcgtccacttcagcctggggagtgtcaagaccagcaggaagtgcgtgagtgtgtgccccttgggctactttggggacacagcagcaagacgctgtcgccggtgccacaaggggtgtgagacctgctccagcagagctgcgacgca

SEQ ID NO: 15082 - DNA, 501 bp, Homo sapiens
  source 1..501: mol_type = unassigned DNA
catgtgtgtggccgcctcggacaagagacccaggagcatccccttagtgcaggtgctgcggactacggccctgaccagcgcctgcgcggagcactcggaccagcgggtggtctacttggagcacgtggtggttcgcacctccatctcacacccacgccgaggagacctccagatctacctggtttctccctcgggaaccaagtctcaacttctggcaaagagggaagttgaaagaatggagcctcatactgtatggcacagcagagcacccgtaccacaccttcagtgcccatcagtcccgctcgcggatgctggagctctcagccccagagctggagccacccaaggctgccctgtcaccctcccaggtggaagttcctgaagatgaggaagattacacaggtgtgtgccatccggagtgtggtgacaaaggctgtgatggccccaatgcagaccagtgcttgaactgcgtccacttcagcctggggagtgtcaagacca

SEQ ID NO: 15083 - DNA, 3336 bp, Homo sapiens
  source 1..3336: mol_type = unassigned DNA
cgggcgccgcgcgagcctgtcgccgctatgcctccgcgcgcgccgcctgcgcccgggccccggccgccgccccgggccgccgccgccaccgacaccgccgcgggcgcggggggcgcggggggcgcggggggcgccggcgggcccgggttccggccgctcgcgccgcgtccctggcgctggctgctgctgctggcgctgcctgccgcctgctccgcgcccccgccgcgccccgtctacaccaaccactgggcggtgcaagtgctgggcggcccggccgaggcggaccgcgtggcggcggcgcacgggtacctcaacttgggccagattggaaacctggaagattactaccatttttatcacagcaaaacctttaaaagatcaaccttgagtagcagaggccctcacaccttcctcagaatggacccccaggtgaaatggctccagcaacaggaagtgaaacgaagggtgaagagacaggtgcgaagtgacccgcaggccctttacttcaacgaccccatttggtccaacatgtggtacctgcattgtggcgacaagaacagtcgctgccggtcggaaatgaatgtccaggcagcgtggaagaggggctacacaggaaaaaacgtggtggtcaccatccttgatgatggcatagagagaaatcaccctgacctggccccaaattatgattcctacgccagctacgacgtgaacggcaatgattatgacccatctccacgatatgatgccagcaatgaaaataaacacggcactcgttgtgcgggagaagttgctgcttcagcaaacaattcctactgcatcgtgggcatagcgtacaatgccaaaataggaggcatccgcatgctggacggcgatgtcacagatgtggtcgaggcaaagtcgctgggcatcagacccaactacatcgacatttacagtgccagctgggggccggacgacgacggcaagacggtggacgggcccggccgactggctaagcaggctttcgagtatggcattaaaaagggccggcagggcctgggctccattttcgtctgggcatctgggaatggcgggagagagggggactactgctcgtgcgatggctacaccaacagcatctacaccatctccgtcagcagcgccaccgagaatggctacaagccctggtacctggaagagtgtgcctccaccctggccaccacctacagcagtggggccttttatgagcgaaaaatcgtcaccacggatctgcgtcagcgctgtaccgatggccacactgggacctcagtctctgcccccatggtggcgggcatcatcgccttggctctagaagcaaacagccagttaacctggagggacgtccagcacctgctagtgaagacatcccggccggcccacctgaaagcgagcgactggaaagtgaacggcgcgggtcataaagttagccatttctatggatttggtttggtggacgcagaagctctcgttgtggaggcaaagaagtggacagcagtgccatcgcagcacatgtgtgtggccgcctcggacaagagacccaggagcatccccttagtgcaggtgctgcggactacggccctgaccagcgcctgcgcggagcactcggaccagcgggtggtctacttggagcacgtggtggttcgcacctccatctcacacccacgccgaggagacctccagatctacctggtttctccctcgggaaccaagtctcaacttctggcaaagaggttgctggatctttccaatgaagggtttacaaactgggaattcatgactgtccactgctggggagaaaaggctgaagggcagtggaccttggaaatccaagatctgccatcccaggtccgcaacccggagaagcaaggtgatcttgagactcctgttgcaaatcaactgaccacagaagagagggaacctggactaaaacacgtgttccggtggcagattgaacaagagctttggtaatctctgtgaaatactgcagagggacagatgaccaaagccaccacatttagaactttggctgcctttggaagtccagagctggatctctcagctcccgcccccagaggctcagcactttggacatggctcacaaacagttgttgattgactgcatgaatgcgtgtgcgtgcaagcatgaaccttgtttaaatcaagagcttacataattttaaccagttctgtcttcagctgtacatactcagtaaaatgtttaatgaaggggaagagattagtctcttctgtgtgaccatgttttccctttattcatcctaaaaagttccatgaattcttgatttcctttcagtggccctttcaacaatgtcttttttcccaagagcataactgttctcattttattgctagccatcttgatctgtgttttattgacatctcttttgagctaatcttcatttctaagataagagttgagattttgcaatctgtgttcgatggctcaatctatcctgtgcttgatgctagaaaggaagacagatttaaagcacatgccttctgtgccggctttcaagtttgtcactaaactctcatttctggaaagtgcaattatagagtatcactcccacttccttggaaacagagctgaagaacttggcacactctccaaacagtcaccatacacactgttgtcaaaaagttccatttttaaccccatttgcattaatattgcagtcaatctctttacctccttttctctttcacggggccgtgacagtgacgcctttccccaaaactctcctcgtttgagaaaaaaagaagtatgtatccccacttatctcggggagaaatgcaaccaactgctgctgtgcacatttatgaatcacagtattgtttagtcggttctgtatctccagtagaaagcataacaaaaagatgacctttgtctcacctcatagctaatttttgcaaataaaatactaaacattgatgaaaatgaaaatgacagatctgaggaagagggagagctctcttgaaacccctttcccagatttgccctcagttttaggaatgaggtacgcttgggcattcctgttgcctgcatggttcggcattctggcagccaggttcgccccagaatagataagtgtgtttgattttcgaacatttgactttattacctatttccagaaacacttcgtgttcaaactacgtctctacaggcatttctacttggtctttttctcccctgacatttcacagagtcctaactgtgctgcatgtataacttgttctttctttttgttacttgcatagcaagcatgtttctatgtcattaaatatcctttgtaagcagca

SEQ ID NO: 15084 - DNA, 2921 bp, Homo sapiens
  source 1..2921: mol_type = unassigned DNA
cgggcgccgcgcgagcctgtcgccgctatgcctccgcgcgcgccgcctgcgcccgggccccggccgccgccccgggccgccgccgccaccgacaccgccgcgggcgcggggggcgcggggggcgcggggggcgccggcgggcccgggttccggccgctcgcgccgcgtccctggcgctggctgctgctgctggcgctgcctgccgcctgctccgcgcccccgccgcgccccgtctacaccaaccactgggcggtgcaagtgctgggcggcccggccgaggcggaccgcgtggcggcggcgcacgggtacctcaacttgggccagattggaaacctggaagattactaccatttttatcacagcaaaacctttaaaagatcaaccttgagtagcagaggccctcacaccttcctcagaatggacccccaggtgaaatggctccagcaacaggaagtgaaacgaagggtgaagagacaggtgcgaagtgacccgcaggccctttacttcaacgaccccatttggtccaacatgtggtacctgcattgtggcgacaagaacagtcgctgccggtcggaaatgaatgtccaggcagcgtggaagaggggctacacaggaaaaaacgtggtggtcaccatccttgatgatggcatagagagaaatcaccctgacctggccccaaattatgattcctacgccagctacgacgtgaacggcaatgattatgacccatctccacgatatgatgccagcaatgaaaataaacacggcactcgttgtgcgggagaagttgctgcttcagcaaacaattcctactgcatcgtgggcatagcgtacaatgccaaaataggaggcatccgcatgctggacggcgatgtcacagatgtggtcgaggcaaagtcgctgggcatcagacccaactacatcgacatttacagtgccagctgggggccggacgacgacggcaagacggtggacgggcccggccgactggctaagcaggctttcgagtatggcattaaaaagggccggcagggcctgggctccattttcgtctgggcatctgggaatggcgggagagagggggactactgctcgtgcgatggctacaccaacagcatctacaccatctccgtcagcagcgccaccgagaatggctacaagccctggtacctggaagagtgtgcctccaccctggccaccacctacagcagtggggccttttatgagcgaaaaatcgtcaccacggatctgcgtcagcgctgtaccgatggccacactgggacctcagtctctgcccccatggtggcgggcatcatcgccttggctctagaagcaaacagccagttaacctggagggacgtccagcacctgctagtgaagacatcccggccggcccacctgaaagcgagcgactggaaagtgaacggcgcgggtcataaagttagccatttctatggatttggtttggtggacgcagaagctctcgttgtggaggcaaagaagtggacagcagtgccatcgcagcacatgtgtgtggccgcctcggacaagagacccaggagcatccccttagtgcaggtgctgcggactacggccctgaccagcgcctgcgcggagcactcggaccagcgggtggtctacttggagcacgtggtggttcgcacctccatctcacacccacgccgaggagacctccagatctacctggtttctccctcgggaaccaagtctcaacttctggcaaagaggttgctggatctttccaatgaagggtttacaaactgggaattcatgactgtccactgctggggagaaaaggctgaagggcagtggaccttggaaatccaagatctgccatcccaggtccgcaacccggagaagcaagggaacctggactaaaacacgtgttccggtggcagattgaacaagagctttggtaatctctgtgaaatactgcagagggacagatgaccaaagccaccacatttagaactttggctgcctttggaagtccagagctggatctctcagctcccgcccccagaggctcagcactttggacatggctcacaaacagttgttgattgactgcatgaatgcgtgtgcgtgcaagcatgaaccttgtttaaatcaagagcttacataattttaaccagttctgtcttcagctgtacatactcagtaaaatgtttaatgaaggggaagagattagtctcttctgtgtgaccatgttttccctttattcatcctaaaaagttccatgaattcttgatttcctttcagtggccctttcaacaatgtcttttttcccaagagcataactgttctcattttattgctagccatcttgatctgtgttttattgacatctcttttgagctaatcttcatttctaagataagagttgagattttgcaatctgtgttcgatggctcaatctatcctgtgcttgatgctagaaaggaagacagatttaaagcacatgccttctgtgccggctttcaagtttgtcactaaactctcatttctggaaagtgcaattatagagtatcactcccacttccttggaaacagagctgaagaacttggcacactctccaaacagtcaccatacacactgttgtcaaaaagttccatttttaaccccatttgcattaatattgcagtcaatctctttacctccttttctctttcacggggccgtgacagtgacgcctttccccaaaactctcctcgtttgagaaaaaaagaagtatgtatccccacttatctcggggagaaatgcaaccaactgctgctgtgcacatttatgaatcacagtattgtttagtcggttctgtatctccagtagaaagcataacaaaaagatgacctttgtctcacctcatagctaatttttgcaaataaaatactaaacattg

SEQ ID NO: 15085 - DNA, 462 bp, Homo sapiens
  source 1..462: mol_type = unassigned DNA
ccctgaccagcgcctgcgcggagcactcggaccagcgggtggtctacttggagcacgtggtggttcgcacctccatctcacacccacgccgaggagacctccagatctacctggtttctccctcgggaaccaagtctcaacttctggcaaagaggttgctggatctttccaatgaagggtttacaaactgggaattcatgactgtccactgctggggagaaaaggctgaagggcagtggaccttggaaatccaagatctgccatcccaggtccgcaacccggagaagcaaggtgatcttgagactcctgttgcaaatcaactgaccacagaagagaggttcgtttccacactctcgattctgttccattggtctgtatatctatcttggagtcagtaccatattgttttgatcactgtagctttgtagtaagttttgaaataagaaagtgcgagtcctccaa

SEQ ID NO: 15086 - DNA, 852 bp, Homo sapiens
  source 1..852: mol_type = unassigned DNA
gccatttctatggatttggtttggtggacgcagaagctctcgttgtggaggcaaagaagtggacagcagtgccatcgcagcacatgtgtgtggccgcctcggacaagagacccaggagcatccccttagtgcaggtgctgcggactacggccctgaccagcgcctgcgcggagcactcggaccagcgggtggtctacttggagcacgtggtggttcgcacctccatctcacacccacgccgaggagacctccagatctacctggtttctccctcgggaaccaagtctcaacttctggcaaagaggttgctggatctttccaatgaagggtttacaaactgggaattcatgactgtccactgctggggagaaaaggctgaagggcagtggaccttggaaatccaagatctgccatcccaggtccgcaacccggagaagcaaggtcagtggctcttgggaatctcatgacagcttttgtatctcaagcctctttttacctctgggccttatttaactacggagtctctgataattctttgttttgtgttttagaggtagaattcccataacagaaaattcaccattttaattatttttaagtggacagttcagtggcttttagtacatccacgatgtcatgtaaacgtcagcactatctaattccagaatgttttcatccccacaaaaagaaaccccatacccatgaagcagccactccccattccctcctcccctcccagctcctggcaacctctaatccacttaccatttctttggatttgcctctcctggacatttcatatagatgaaataatacaacacctggccttttgtgtctggcttctttcactta

SEQ ID NO: 15087 - DNA, 1035 bp, Homo sapiens
  source 1..1035: mol_type = unassigned DNA
tgggcggcccggccgaggcggaccgcgtggcggcggcgcacgggtacctcaacttgggccagattggaaacctggaagattactaccatttttatcacagcaaaacctttaaaagatcaaccttgagtagcagaggccctcacaccttcctcagaatggacccccaggtgaaatggctccagcaacaggaagtgaaacgaagggtgaagagacaggtgcgaagtgacccgcaggccctttacttcaacgaccccatttggtccaacatgtggtacctggattcctacgccagctacgacgtgaacggcaatgattatgacccatctccacgatatgatgccagcaatgaaaataaacacggcactcgttgtgcgggagaagttgctgcttcagcaaacaattcctactgcatcgtgggcatagcgtacaatgccaaaataggaggcatccgcatgctggacggcgatgtcacagatgtggtcgaggcaaagtcgctgggcatcagacccaactacatcgacatttacagtgccagctgggggccggacgacgacggcaagacggtggacgggcccggccgactggctaagcaggctttcgagtatggcattaaaaagggccggcagggcctgggctccattttcgtctgggcatctgggaatggcgggagagagggggactactgctcgtgcgatggctacaccaacagcatctacaccatctccgtcagcagcgccaccgagaatggctacaagccctggtacctggaagagtgtgcctccaccctggccaccacctacagcagtggggccttttatgagcgaaaaatcgtcaccacggatctgcgtcagcgctgtaccgatggccacactgggacctcagtctctgcccccatggtggcgggcatcatcgccttggctctagaagcaaacagccagttaacctggagggacgtccagcacctgctagtgaagacatcccggccggcccacctgaaagcgagcgactggaaagtgaacggcgcgggtcataaag

SEQ ID NO: 15088 - DNA, 2309 bp, Homo sapiens
  source 1..2309: mol_type = unassigned DNA
tcgcgggccgaggacgcctctggggcggcaccgcgtcccgagagccccagaagtcggcggggaagttcccccggtggggggcgtttcgggcctcccggacggctctcggccccggagcccggtcgcaggagcgcgggcccgggggcgggaacgcgccgcggccgcctcctcctccccggctcccgcccgcggcggtgttggcggcggcggtggcggcggcggcggcgcttccccggcgcggagcggctttaaaaggcggcactccaccccccggcgcactcgcagctcgggcgccgcgcgagcctgtcgccgctatgcctccgcgcgcgccgcctgcgcccgggccccggccgccgccccgggccgccgccgccaccgacaccgccgcgggcgcggggggcgcggggggcgcggggggcgccggcgggcccgggttccggccgctcgcgccgcgtccctggcgctggctgctgctgctggcgctgcctgccgcctgctccgcgcccccgccgcgccccgtctacaccaaccactgggcggtgcaagtgctgggcggcccggccgaggcggaccgcgtggcggcggcgcacgggtacctcaacttgggccagattggaaacctggaagattactaccatttttatcacagcaaaacctttaaaagatcaaccttgagtagcagaggccctcacaccttcctcagaatggacccccaggtgaaatggctccagcaacaggaagtgaaacgaagggtgaagagacaggtgcgaagtgacccgcaggccctttacttcaacgaccccatttggtccaacatgtggtacctgcattgtggcgacaagaacagtcgctgccggtcggaaatgaatgtccaggcagcgtggaagaggggctacacaggaaaaaacgtggtggtcaccatccttgatgatggcatagagagaaatcaccctgacctggccccaaattatgattcctacgccagctacgacgtgaacggcaatgattatgacccatctccacgatatgatgccagcaatgaaaataaacacggcactcgttgtgcgggagaagttgctgcttcagcaaacaattcctactgcatcgtgggcatagcgtacaatgccaaaataggaggcatccgcatgctggacggcgatgtcacagatgtggtcgaggcaaagtcgctgggcatcagacccaactacatcgacatttacagtgccagctgggggccggacgacgacggcaagacggtggacgggcccggccgactggctaagcaggctttcgagtatggcattaaaaagggccggcagggcctgggctccattttcgtctgggcatctgggaatggcgggagagagggggactactgctcgtgcgatggctacaccaacagcatctacaccatctccgtcagcagcgccaccgagaatggctacaagccctggtacctggaagagtgtgcctccaccctggccaccacctacagcagtggggccttttatgagcgaaaaatcgtcaccacggatctgcgtcagcgctgtaccgatggccacactgggacctcagtctctgcccccatggtggcgggcatcatcgccttggctctagaagcaaacagccagttaacctggagggacgtccagcacctgctagtgaagacatcccggccggcccacctgaaagcgagcgactggaaagtgaacggcgcgggtcataaagttagccatttctatggatttggtttggtggacgcagaagctctcgttgtggaggcaaagaagtggacagcagtgccatcgcagcacatgtgtgtggccgcctcggacaagagacccaggagcatccccttagtgcaggtgctgcggactacggccctgaccagcgcctgcgcggagcactcggaccagcgggtggtctacttggagcacgtggtggttcgcacctccatctcacacccacgccgaggagacctccagatctacctggtttctccctcgggaaccaagtctcaacttctggcaaagaggttgctggatctttccaatgaagggtttacaaactgggaattcatgactgtccactgctggggagaaaaggctgaagggcagtggaccttggaaatccaagatctgccatcccaggtccgcaacccggagaagcaaggtgatcttgagactcctgttgcaaatcaactgaccacagaagagaggttcgtttccacactctcgattctgttccattggtctgtatatctatcttggagtcagtaccatattgttttgatcactgtagctttgtag

SEQ ID NO: 15089 - DNA, 5307 bp, Homo sapiens
  source 1..5307: mol_type = unassigned DNA
aaagggtagaggcctctagagaagataaaaagatcaggagcaggcatggtaggccatcaggagtgcatcatggaagaggacaatcgcgctccccaattgtggcgcaagaccctgactgcacctgccccatttgctgatgaaaccaactgccagtgtcaagcaccccatgaaaaactgaccattgctcaggcccgcttaggaacaccagctgacaggcctgtcagagtatacgccgatggaatatttgacctcttccactcaggtcatgcaagagcccttatgcaagcaaaaacactgtttcccaacagctacttgttggtaggagtttgcagtgatgatctcacccacaaattcaaaggtttcaccgtgatgaatgaagccgagagatacgaagctctcagacactgtcgctacgtagacgaagttatcagagatgctccctggacactcacgccagagtttctggaaaaacacaagattgactttgtggctcatgatgacattccgtattcctctgctggctctgatgatgtttacaagcacataaaggaagcagggatgttcgttccaacgcagagaacagaaggcatctcaacatcggacatcattaccagaattgttcgtgactatgatgtttatgcccgacgtaacctccagagagggtatacagccaaggaactgaatgtcagctttataaatgagaagaggtaccgtttccagaaccaagtggacaaaatgaaggaaaaagtcaagaatgtggaggaaagatcaaaggaatttgtgaacagagtggaagaaaagagccatgatctaattcaaaagtgggaagagaagtcaagggaattcattggcaacttcctagaactgtttggacctgatggagcatggaagcagatgttccaggagaggagcagccggatgctgcaggccttatccccgaagcagagccctgtgagcagcccaacccggagccggtccccttcccgctccccatcgcccaccttctcatggcttccactcaaaacctcacccccttcctcacccaaagcagcctcagcctctatcagcagcatgagcgagggggatgaggatgaaaagtagaggctgctgggaggcaagagccgcaccatgcaggatggggaggagggcgagagtcacagggttgcctgggtggtgtttgaagggtaatagtcacaggagctgcagctcagcagagagaccctgaactctgctaagggaaggtcttgggaccagttctctctcactctccgtacagctgaagagttgggcgaggtgcagagacttctagctggacaacctacacaaaccttagcgtctagagtcactctaaccttgctaaggaaggatgcagagttccctagagagacttgcactgatggggtgacttctgctttggtccttccaccacccccaccaagtaaaccacctgtggcagcggctgttccctcaacctgctacttctgcgtccataagggtcctgcacgttgcctcccaccaccccagctctgccagaataaaattgtttccaatagaggtggcaaagtgcttctgaaatagtcgagaaaaagacagattccaacctcctcagtccagccactgagacctgatgttggaacgcatcagctccttccagttccatgaatgtggctcatagacaaagccttgctttaggctggttataaaaggtcatctagtgtgaaccttaactttttattcaaaggacagttttgtcaagaactccacgtaaggcctgatgtgctcctggttgtactttctcatcactggtttgacttcattgttttgcagaaattaccttaatccgtgggaactgcaacaaagaaaaacttcctaatatataaaaaagaggagctgctttgctttgcctccaggtttagcggacaagaaatgtctcctgaagcttctccttaaaggatgctattatggaatggcttttcccatttctgaccagttaacagtttcatagacctcaagtaacagtttgaggtatcaaacatagtataccaatagggggtgctacctgcacgtatctgttctatatatgctccaatatgtcatccccgggtgtatcccatgtgcaatatgagtatatagtggtggcattttataatagaccccactcctgcgctccaccataatactcctctgaaatccttggtctcaagaaacatctgttctcttgtgacttgggcactttgtcaagcttattccagattcctgtggaaacgttttatcccaaccaggaaattagtattttgttctcgtggcctcctataacatttttgggtgaaggagaactcaagactttttacagagaactgtgggctcagttatgatctcagcatctgaatggtctaggtagtatcaccattatctctggccctaggtttgccaagtaggatgaagactctaagtgttcctgctgagttgtccaaaggtcctgctccttagtcacctgtgcgaaatgagcagggagagttaaggcatagaaccaaactctttgggttattgtatgggtatgccagtaaattcagacacagagctggggtctgactgaatagaggcccaaaccagcaacttgtaggcagagcccagaatctcttgtgatagaaataccccttttcagaggccttgggaaccagccttctaggtgacaaggggacaaccagtgaaggaaggcggcatgtctttccccttcttgttggggttgaactacctccctatccacttggagatgagtgctgtctgctgtgaagcaaaactatgaggctgagctggcttggaacctctttgttcttggcactttccttctccaggactctgggaagcactcatatgggacagagggctggcaggaacatggcatgtgaagaagaaaacttctttttgcagtcaagggccacccagaatattgctcttcagagagggacaagggcctcattcttccatttggtctctgtcttccatcatgcactcaggtcaagccatgcaagtctgcctaccatttgagttagttggcacttgtagcagtgaaggatgaggccagccaggcaagggaaggtggcgggaacaagggaagagaaaaggaggaaagaagttcctggagggaggaaaggaggataaagaaaatctgctctcataaaaccatttcaggacctcactttacaggtgagactctcttgggaaggcctttgtgcccctgctccatggcccagggcagatagattcacttttacctgaatcttatactctggagcaaatagtgtatcaggctgactatacatttgcaggccttacacgccatactgacaggtgccacttacgtgactcatcagataatgtcaccattgctgccaattatgggaaataactaatgcctattccagggatgagcccaaaccacacataaatgggttctaaatctcaccctcctaacctgcagtgagtccccccgttccaccctcttgaggctgcaaatctactgagaaggaatgggaaggattctacaacccaacttttgatactttttggccatctctcagtctctcccagcccctacccccacaccacctccctgctcccaggcagagaccgggttgcactttgttagggccagcaggtcaactgtaatggccaagagtgagttaaggctggaatgagaaatatgccccaagcttggaggggtaagcaggaataacacaaagcaaggaaagagattctttttgccctagtgaggaaaggaagcttcagaatgagggctggaggatagcaacttaggactgcagaagggggcagcttatgaagatgggagaaagtgggactgaagttgtaggggagcaggagggtagtgattttccgcttttctttctttctttcttttactttctttctctttctttctctctctctctctttctttttctttcttctttctctttttctttcctctttttctttctttctttttctttctctttcttccttctttctttcattcttctttgttctttcttctttctttctttttttttttttttgagatggagttttgctcttgttgctcaggctggagtgcaatggcacaatctcggctcactgcagcctccacctcccaggttcaaggggttcttctgcctcagcctcccaagtagctgggattacaggtgcctgccacgacacccagctaatttttgtatgtttagtagagacggggtttcaccatgttggccaggctggtctcaaattcctgacctcaggtgattctcccgcctcggcctcccaaagtgctgggattatgagcacgagccacggcgtccagccgattttccgctccctttcaagtgttaactcaccccctgacaggtgaagagggaagggttccttttacgcacaaccaaggttagcaaatgcccatgcaggatatggggtccctgcctctctggttgcttcatttcagcacttctatattagctgcttatggggaccctaaaatgaactggtcacccctccaccagctaagaaacaagggtgggattgctgtgccataagtcacactgaacgacttgcttctggcaagcatgctcctgtgtgtcaggaccttaccaaggcaaagaaatgccaggctcaagaggagcaggacgtgagacattggcctggcttctaacctggtctgagtggaagagacacagcttagggatttcagttttgctcttaggctactagatactgttatttcaccccctgagggagggacaggaagagcacggatttattttctctccgtcttcagtacttattttagcatctagtcataccccagggagagatgcgagacggtgtcactggctcagctgaagcagatgagcccgtctctagcagagatgtgcctgtttcttaggcatccgttcagcactagtcttggccatcagatttttaaaaaagaaatagctcatgaggcatttgcaacttctcctctctagacttctttctagttttcctctgttgtgtcactgcgatgtgtccagggacaaagccataagtagagcatacatacttaagactatgctgtacatataagacaagacctgtctgggttaaagcacgaccttatgcccaagcatttactctggtgctgaataacgcgaactactggaatcagcctcccccaactctgcgcgccccctgcccccctgctcctatcccattcttgctctcaaatggaccacaccattctcaactcgtttataaataaagggatgcagaattgca

SEQ ID NO: 15090 - DNA, 1289 bp, Homo sapiens
  source 1..1289: mol_type = unassigned DNA
gcctgggaggagactctctgagggtgtagagctagagggagcattcactggccatgccagtagttaccactgatgctgagtcagaaacaggtatcccaaaatccctttccaatgagcctccctcagaaaccatggaggaaatagagcacacatgcccacagcctcgactgaccctgactgcacctgccccatttgctgatgaaaccaactgccagtgtcaagcaccccatgaaaaactgaccattgctcaggcccgcttaggaacaccagctgacaggcctgtcagagtatacgccgatggaatatttgacctcttccactcaggtcatgcaagagcccttatgcaagcaaaaacactgtttcccaacagctacttgttggtaggagtttgcagtgatgatctcacccacaaattcaaaggtttcaccgtgatgaatgaagccgagagatacgaagctctcagacactgtcgctacgtagacgaagttatcagagatgctccctggacactcacgccagagtttctggaaaaacacaagattgactttgtggctcatgatgacattccgtattcctctgctggctctgatgatgtttacaagcacataaaggaagcagggatgttcgttccaacgcagagaacagaaggcatctcaacatcggacatcattaccagaattgttcgtgactatgatgtttatgcccgacgtaacctccagagagggtatacagccaaggaactgaatgtcagctttataaatgagaagaggtaccgtttccagaaccaagtggacaaaatgaaggaaaaagtcaagaatgtggaggaaagatcaaaggaatttgtgaacagagtggaagaaaagagccatgatctaattcaaaagtgggaagagaagtcaagggaattcattggcaacttcctagaactgtttggacctgatggagcatggaagcagatgttccaggagaggagcagccggatgctgcaggccttatccccgaagcagagccctctgaagagttgggcgaggtgcagagacttctagctggacaacctacacaaaccttagcgtctagagtcactctaaccttgctaaggaaggatgcagagttccctagagagacttgcactgatggggtgacttctgctttggtccttccaccacccccaccaagtaaaccacctgtggcagcggctgttccctcaacctgctacttctgcgtccataagggtcctgcacgttgcctcccaccaccccagctctgccagaataaaattgtttccaata

SEQ ID NO: 15091 - DNA, 1692 bp, Homo sapiens
  source 1..1692: mol_type = unassigned DNA
agaaagaaggggagaagaagcggggggatgggtggagggtagaggggagaaaaatacgtgacaaagaaaacattctctgcctgggaggagactctctgagggtgtagagctagagggagcattcactggccatgccagtagttaccactgatgctgagtcagaaacaggtatcccaaaatccctttccaatgagcctccctcagaaaccatggaggaaatagagcacacatgcccacagcctcgactgaccctgactgcacctgccccatttgctgatgaaaccaactgccagtgtcaagcaccccatgaaaaactgaccattgctcaggcccgcttaggaacaccagctgacaggcctgtcagagtatacgccgatggaatatttgacctcttccactcaggtcatgcaagagcccttatgcaagcaaaaacactgtttcccaacagctacttgttggtaggagtttgcagtgatgatctcacccacaaattcaaaggtttcaccgtgatgaatgaagccgagagatacgaagctctcagacactgtcgctacgtagacgaagttatcagagatgctccctggacactcacgccagagtttctggaaaaacacaagattgactttgtggctcatgatgacattccgtattcctctgctggctctgatgatgtttacaagcacataaaggaagcagggatgttcgttccaacgcagagaacagaaggcatctcaacatcggacatcattaccagaattgttcgtgactatgatgtttatgcccgacgtaacctccagagagggtatacagccaaggaactgaatgtcagctttataaatgagaagaggtaccgtttccagaaccaagtggacaaaatgaaggaaaaagtcaagaatgtggaggaaagatcaaaggaatttgtgaacagagtggaagaaaagagccatgatctaattcaaaagtgggaagagaagtcaagggaattcattggcaacttcctagaactgtttggacctgatggagcatggaagcagatgttccaggagaggagcagccggatgctgcaggccttatccccgaagcagagccctgtgagcagcccaacccggagccggtccccttcccgctccccatcgcccaccttctcatggcttccactcaaaacctcacccccttcctcacccaaagcagcctcagcctctatcagcagcatgagcgagggggatgaggatgaaaagtagaggctgctgggaggcaagagccgcaccatgcaggatggggaggagggcgagagtcacagggttgcctgggtggtgtttgaagggtaatagtcacaggagctgcagctcagcagagagaccctgaactctgctaagggaaggtcttgggaccagttctctctcactctccgtacagctgaagagttgggcgaggtgcagagacttctagctggacaacctacacaaaccttagcgtctagagtcactctaaccttgctaaggaaggatgcagagttccctagagagacttgcactgatggggtgacttctgctttggtccttccaccacccccaccaagtaaaccacctgtggcagcggctgttccctcaacctgctacttctgcgtccataagggtcctgcacgttgcctcccaccaccccagctctgccagaataaaattgtttccaata

SEQ ID NO: 15092 - DNA, 856 bp, Homo sapiens
  source 1..856: mol_type = unassigned DNA
cctcagaaaccatggaggaaatagagcacacatgcccacagcctcgactgaccctgactgcacctgccccatttgctgatgaaaccaactgccagtgtcaagcaccccatgaaaaactgaccattgctcaggcccgcttaggaacaccagctgacaggcctgtcagagtatacgccgatggaatatttgacctcttccactcaggtcatgcaagagcccttatgcaagcaaaaacactgtttcccaacagctacttgttggtaggagtttgcagtgatgatctcacccacaaattcaaaggtttcaccgtgatgaatgaagccgagagatacgaagctctcagacactgtcgctacgtagacgaagttatcagagatgctccctggacactcacgccagagtttctggaaaaacacaagggatgttcgttccaacgcagagaacagaaggcatctcaacatcggacatcattaccagaattgttcgtgactatgatgtttatgcccgacgtaacctccagagagggtatacagccaaggaactgaatgtcagctttataaatgagaagaggtaccgtttccagaaccaagtggacaaaatgaaggaaaaagtcaagaatgtggaggaaagatcaaaggaatttgtgaacagagtggaagaaaagagccatgatctaattcaaaagtgggaagagaagtcaagggaattcattggcaacttcctagaactgtttggacctgatggagcatggaagcagatgttccaggagaggagcagccggatgctgcaggccttatccccgaagcagagccctgtgagcagcccaacccggagccggtccccttcccgctcccca

SEQ ID NO: 15093 - DNA, 1242 bp, Homo sapiens
  source 1..1242: mol_type = unassigned DNA
acgagttcagtagacagggattctcacccactcaacaaggacaccaggcacagagatccaaactattatatcaaatccagtccctaaaatggaagaagccaaaagccaaagtttggaggaagactttgaaggacaggccacacatacaggacccaaaggagtaataaatgattggagaaagtttaaattagagagtcaagacagtgattcaattccacctagcaagaaggagattctcaggcaaatgtcttctcctcagagtaggaatggcaaagattcaaaggaacgagtcagcagaaagatgagcattcaagaatatgaactaatccataaagagaaagaggatgaaaactgccttcgtaaataccgtagacagtgtatgcaggatatgcaccagaagctgagttttgggcctagatatgggtttgtgtatgagctggaaactggaaagcaattcctagaaacaattgaaaaggaactgaagatcaccacaattgttgttcacatttatgaagatggtattaagggttgtgatgctctaaacagtagtttaacatgccttgcagcagaataccctatagttaagttttgtaaaataaaagcttcgaatacaggtgctggggaccgcttttccttagatgtacttcctacactgctcatctataaaggtggggaactcataagcaattttattagtgttgctgaacagtttgctgaagaattttttgctggggatgtggagtctttcctaaatgaatatgggttactacctgaaagagaggtacatgtcctagagcataccaaaatagaagaagaagatgttgaatgaagattcactatgtcaatatctcatgtttatcctttaggtattggatgatggttttggtagtatctatattgctttagtgaacacagagtatgggcacggctatgctaacttgacaaaaatgactgatgcaacaatcgagttattagcatttcttagtattagttactcaaattgatacaatgcttgactacaaaacagagctgtcttcagcaacattattagtagacaaagaggatgtggataatattatgacatttttcaaaaatccctttcaagttatgttttgtcttttttactccattttccctcatcactgttattatttggacttttcaaattacattattcattataattttctttgtgtaataaaaatgaaatctcatgagaaaataaattttctatttgaagtc

SEQ ID NO: 15094 - DNA, 1174 bp, Homo sapiens
  source 1..1174: mol_type = unassigned DNA
aaatgtgtggagatttattttataatagcaatgtgaggaataccttcctaattatgacaaaaacaaaaacaacaacaaaaagaccattgaagaaaaggacccaaaggagtaataaatgattggagaaagtttaaattagagagtcaagacagtgattcaattccacctagcaagaaggagattctcaggcaaatgtcttctcctcagagtaggaatggcaaagattcaaaggaacgagtcagcagaaagatgagcattcaagaatatgaactaatccataaagagaaagaggatgaaaactgccttcgtaaataccgtagacagtgtatgcaggatatgcaccagaagctgagttttgggcctagatatgggtttgtgtatgagctggaaactggaaagcaattcctagaaacaattgaaaaggaactgaagatcaccacaattgttgttcacatttatgaagatggtattaagggttgtgatgctctaaacagtagtttaacatgccttgcagcagaataccctatagttaagttttgtaaaataaaagcttcgaatacaggtgctggggaccgcttttccttagatgtacttcctacactgctcatctataaaggtggggaactcataagcaattttattagtgttgctgaacagtttgctgaagaattttttgctggggatgtggagtctttcctaaatgaatatgggttactacctgaaagagaggtacatgtcctagagcataccaaaatagaagaagaagatgttgaatgaagattcactatgtcaatatctcatgtttatcctttaggtattggatgatggttttggtagtatctatattgctttagtgaacacagagtatgggcacggctatgctaacttgacaaaaatgactgatgcaacaatcgagttattagcatttcttagtattagttactcaaattgatacaatgcttgactacaaaacagagctgtcttcagcaacattattagtagacaaagaggatgtggataatattatgacatttttcaaaaatccctttcaagttatgttttgtcttttttactccattttccctcatcactgttattatttggacttttcaaattacattattcattataattttctttgtgtaataaaaatgaaatctcatgagaaaataaa

SEQ ID NO: 15095 - DNA, 4885 bp, Homo sapiens
  source 1..4885: mol_type = unassigned DNA
ggtgaggtggtgagcagtggatatatgcctgtcaaagtcaatagcaaatctgtcagagtcttccctcagctttgtacatcagcactgttttgatagataagagaggctactgtataagtgtgtaagatttgtaatggactgaggaatgcttgttctagctgctgaaactgactgtaactgtattgtcttaggagcatcatcatggggtctagtgccacagagattgaagaattggaaaacaccacttttaagtatcttacaggagaacagactgaaaaaatgtggcagcgcctgaaaggaatactaagatgcttggtgaagcagctggaaagaggtgatgttaacgtcgtcgacttaaagaagaatattgaatatgcggcatctgtgctggaagcagtttatatcgatgaaacaagaagacttctggatactgaagatgagctcagtgacattcagactgactcagtcccatctgaagtccgggactggttggcttctacctttacacggaaaatggggatgacaaaaaagaaacctgaggaaaaaccaaaatttcggagcattgtgcatgctgttcaagctggaatttttgtggaaagaatgtaccgaaaaacatatcatatggttggtttggcatatccagcagctgtcatcgtaacattaaaggatgttgataaatggtctttcgatgtatttgccctaaatgaagcaagtggagagcatagtctgaagtttatgatttatgaactgtttaccagatatgatcttatcaaccgtttcaagattcctgtttcttgcctaatcacctttgcagaagctttagaagttggttacagcaagtacaaaaatccatatcacaatttgattcatgcagctgatgtcactcaaactgtgcattacataatgcttcatacaggtatcatgcactggctcactgaactggaaattttagcaatggtctttgctgctgccattcatgattatgagcatacagggacaacaaacaactttcacattcagacaaggtcagatgttgccattttgtataatgatcgctctgtccttgagaatcaccacgtgagtgcagcttatcgacttatgcaagaagaagaaatgaatatcttgataaatttatccaaagatgactggagggatcttcggaacctagtgattgaaatggttttatctacagacatgtcaggtcacttccagcaaattaaaaatataagaaacagtttgcagcagcctgaagggattgacagagccaaaaccatgtccctgattctccacgcagcagacatcagccacccagccaaatcctggaagctgcattatcggtggaccatggccctaatggaggagtttttcctgcagggagataaagaagctgaattagggcttccattttccccactttgtgatcggaagtcaaccatggtggcccagtcacaaataggtttcatcgatttcatagtagagccaacattttctcttctgacagactcaacagagaaaattgttattcctcttatagaggaagcctcaaaagccgaaacttcttcctatgtggcaagcagctcaaccaccattgtggggttacacattgctgatgcactaagacgatcaaatacaaaaggctccatgagtgatgggtcctattccccagactactcccttgcagcagtggacctgaagagtttcaagaacaacctggtggacatcattcagcagaacaaagagaggtggaaagagttagctgcacaaggtgaatctgatcttcataagaactcagaagacttagtaaatgctgaagaaaaacatgatgagacacattcataggcccgaaacaccttaaagacttctgtcattttaaacatgagaggacaatgaaatcagcatgaaaacatcctaaattctcaactttccacaaagctatggctcttctttcaacatagaattggattgggccattttaattgactcctatacaaggaattaagaagaacataaattttgagctagtaactctggccaaataaatacactcaagtttttatcagagtttttggccagtgcttctgccatttttttccctccacaatttggccttcttcaatcaagccagataaatttttgagacaaaagtcagacagtttttaatttttcttgctttgaaccctgtcataatgactgtgcaatacatgtgcagaagatgaggtattttaaaatttacttccttgcactgtcttacacagagtgctataactataaatttttcaaggtcttaaataaaaggaagcaaaaacaaaattattgaaaaattttttttgttgtgctggggaatatactatttagattgtccttcttattttaaatgcatgggaacagaatgacaggtgggatgctgaggagctggttgaagcatcagagcaatgctacagtccaacaatggagcattagatccccagctaggtgacctgatgaacacctttgtaaactctcatactgggaaatggcagtgaaacctttttctgaacccgtggaccagcctgcgtccgtccccatggtttcaaagcacgaatgcattacctccatggttgtggttacaagcaagtcacatgctatctacagttcatgataacaagaccgtcaaccattgctggagacagacactagaatggaaaatgaaatttgccagcgggatgtttatcccatcagaatgtaacaaaatatattaccagccaagagataagagacaagaatgtgtgtgtgtgtgtgtgtgtgtgtgtgtgtgtgttcaaaaatgtctatgaaaatgaaaacccacacttttctgtacagataacattatttgatgtgacttttatattttactacacagaaacaaactgcagccctcagaggccctgcttccttgtcatgttttgcctgagcatgtgcaaagtctttcctttgcttaaagctgaaaaactacctttatgcattgttagctgacaagaaagatcaagcacaattagatgttgtaacttttcactgtacaagcattgcaatgattgtgagcttcagtgaatttatctttgtgaaaggtaaaaattggctggaaagaatcaggagtagccataaattaaatcatgcaaaggaggatccatgcatcctaacaagttttctgctgcatctgcttccttcctgggctccacaatgttaagcaatattttagaaaagggtacaattggaagcttttaagcctgagtggtgagattttataactcacaacttagatctcttttaatgtgtaagccatattctatatgcatatttattatgcatcattgtaatttaagatatatttggatgtaggctgtataaatgcttttaattgttctgtgaatagatccttagctttagtttcacctgaatcttgtgcaaaacacagctaaataattgaattgtattatagacattatgaggtaattgatcttttaaatgtaaggagtaagattgatctataataatgtgctggggaaaacatttatagatatgtacatcatggttactttttgtcctttcaaatggactttttatttctatttatggagagactgtaactactgcttttaatgtctttttaaagcaagctatttaccagcttgaaaatatcatgcatttaaaatagaatctatctggggagtctaattactattgttcctatttgagccagttgtctttcagtaaagctatagaatctctcaaagaagtaaatagaaatactacttcttaaatgtcataggaagcatatccactttgtttctattagtactttaagatctataagaccttattactaaaaagtagaggaatataaagaattcatcaatttctgtatatgggctttaacctaattttccaggttatgcgacttataaagcactgtgaccaaacttccagagacagtaaaaaaaaaaaaaagaaaaaaaagttttactccttcagaagtattgtcatgctactgctgtacttattttcctaatctctctctatctgctatactccctccttttctttctttttcttttaagcttttatatttattccttcctttgttttcctctctgtaagacagctactactgagcactaattagtagaaagtcagagtggaggttatctgtgcatgtctttctgcaaacattactgttgaggccatctgaagagagggattgataggttaggctgttgcaccgtgaatgtcctgctttgcatttttaacctcagctccccaacatatatatcttgcagtttatatgccttttcatttaaccgaaacctcttttatttaatttttaacataacaacctacaattcttgtgtttttattatgctgtatttttctgtgtttcttattacatgtgattgctaaataaatcatatttgagggaaaacattgtgaaacatttggtgttttatgcaattcaatttagtgaggcattgaaaagttggagaaattgggggaaacccaaaggagaccaacttaaaaattgatatgagtttggtaagaaagtgctttttgttccattaaataaatactgattgaattacttattattatacctattattcataagctcctggctggaagcatggtgcatatatgcatatggcaatatttcctctagaaatttcaagtcttataaaggagataatctacacagactgtaatttatacctaataactagaatgccacataaaaaagtaaccagttgcaaataaaatgcacctatgtatatttgaggaggtaaaaaactgcttctgtcttcagagctttcaggactaagtggtgcatcagttggcatttagtaaataaaaacaagtttataaacattgccta

SEQ ID NO: 15096 - DNA, 2034 bp, Homo sapiens
  source 1..2034: mol_type = unassigned DNA
ggagcttgaccagcatgtggaaggagagctctcatggctgcaataacttagggagttcctacctggatgacactggggtaggaagttttctgtttgttttgttctgtttcggagggtcccgtgcacttctcttgcctggatcaacgtgactcttggtggtttttgcacaccctgctctgtgggggagtgccccaacgtgcctgtcttatgtggcctctatggacacactgctcagctggcagagaacagggaagttttctcccagcacccaaaaagagaaagaggaaactactttttctttctgggctccttgcagcacaatagatcaggataagcttccacatttcctctctggagtttctggagtggtttccaggaagaagttaaaccttcacctttaaatggatgaccatgtcacaatcaggaagaaacatctccaaagacccatctttagactaagatgcttggtgaagcagctggaaagaggtgatgttaacgtcgtcgacttaaagaagaatattgaatatgcggcatctgtgctggaagcagtttatatcgatgaaacaagaagacttctggatactgaagatgagctcagtgacattcagactgactcagtcccatctgaagtccgggactggttggcttctacctttacacggaaaatggggatgacaaaaaagaaacctgaggaaaaaccaaaatttcggagcattgtgcatgctgttcaagctggaatttttgtggaaagaatgtaccgaaaaacatatcatatggttggtttggcatatccagcagctgtcatcgtaacattaaaggatgttgataaatggtctttcgatgtatttgccctaaatgaagcaagtggagagcatagtctgaagtttatgatttatgaactgtttaccagatatgatcttatcaaccgtttcaagattcctgtttcttgcctaatcacctttgcagaagctttagaagttggttacagcaagtacaaaaatccatatcacaatttgattcatgcagctgatgtcactcaaactgtgcattacataatgcttcatacaggtatcatgcactggctcactgaactggaaattttagcaatggtctttgctgctgccattcatgattatgagcatacagggacaacaaacaactttcacattcagacaaggtcagatgttgccattttgtataatgatcgctctgtccttgagaatcaccacgtgagtgcagcttatcgacttatgcaagaagaagaaatgaatatcttgataaatttatccaaagatgactggagggatcttcggaacctagtgattgaaatggttttatctacagacatgtcaggtcacttccagcaaattaaaaatataagaaacagtttgcagcagcctgaagggattgacagagccaaaaccatgtccctgattctccacgcagcagacatcagccacccagccaaatcctggaagctgcattatcggtggaccatggccctaatggaggagtttttcctgcagggagataaagaagctgaattagggcttccattttccccactttgtgatcggaagtcaaccatggtggcccagtcacaaataggtttcatcgatttcatagtagagccaacattttctcttctgacagactcaacagagaaaattgttattcctcttatagaggaagcctcaaaagccgaaacttcttcctatgtggcaagcagctcaaccaccattgtggggttacacattgctgatgcactaagacgatcaaatacaaaaggctccatgagtgatgggtcctattccccagactactcccttgcagcagtggacctgaagagtttcaagaacaacctggtggacatcattcagcagaacaaagagaggtggaaagagttagctgcacaaggtgaatctgatcttcataagaactcagaagacttagtaaatgctgaagaaaaacatgatgagacacattcataggcccgaaacaccttaaagacttctgtcattttaaacatgagag

SEQ ID NO: 15097 - DNA, 2000 bp, Homo sapiens
  source 1..2000: mol_type = unassigned DNA
gaattctgatgtgcttcagtgcacagaacagtaacagatgagctgcttttggggagagcttgagtactcagtcggagcatcatcatggggtctagtgccacagagattgaagaattggaaaacaccacttttaagtatcttacaggagaacagactgaaaaaatgtggcagcgcctgaaaggaatactaagatgcttggtgaagcagctggaaagaggtgatgttaacgtcgtcgacttaaagaagaatattgaatatgcggcatctgtgctggaagcagtttatatcgatgaaacaagaagacttctggatactgaagatgagctcagtgacattcagactgactcagtcccatctgaagtccgggactggttggcttctacctttacacggaaaatggggatgacaaaaaagaaacctgaggaaaaaccaaaatttcggagcattgtgcatgctgttcaagctggaatttttgtggaaagaatgtaccgaaaaacatatcatatggttggtttggcatatccagcagctgtcatcgtaacattaaaggatgttgataaatggtctttcgatgtatttgccctaaatgaagcaagtggagagcatagtctgaagtttatgatttatgaactgtttaccagatatgatcttatcaaccgtttcaagattcctgtttcttgcctaatcacctttgcagaagctttagaagttggttacagcaagtacaaaaatccatatcacaatttgattcatgcagctgatgtcactcaaactgtgcattacataatgcttcatacaggtatcatgcactggctcactgaactggaaattttagcaatggtctttgctgctgccattcatgattatgagcatacagggacaacaaacaactttcacattcagacaaggtcagatgttgccattttgtataatgatcgctctgtccttgagaatcaccacgtgagtgcagcttatcgacttatgcaagaagaagaaatgaatatcttgataaatttatccaaagatgactggagggatcttcggaacctagtgattgaaatggttttatctacagacatgtcaggtcacttccagcaaattaaaaatataagaaacagtttgcagcagcctgaagggattgacagagccaaaaccatgtccctgattctccacgcagcagacatcagccacccagccaaatcctggaagctgcattatcggtggaccatggccctaatggaggagtttttcctgcagggagataaagaagctgaattagggcttccattttccccactttgtgatcggaagtcaaccatggtggcccagtcacaaataggtttcatcgatttcatagtagagccaacattttctcttctgacagactcaacagagaaaattgttattcctcttatagaggaagcctcaaaagccgaaacttcttcctatgtggcaagcagctcaaccaccattgtggggttacacattgctgatgcactaagacgatcaaatacaaaaggctccatgagtgatgggtcctattccccagactactcccttgcagcagtggacctgaagagtttcaagaacaacctggtggacatcattcagcagaacaaagagaggtggaaagagttagctgcacaagaagcaagaaccagttcacagaagtgtgagtttattcatcagtaaacacctttaagtaaaacctcgtgcatggtggcagctctaatttgaccaaaagacttggagattttgattatgcttgctggaaatctaccctgtcctgtgtgagacaggaaatctatttttgcagattgctcaataagcatcatgagccacataaataacagctgtaaactccttaattcaccgggctcaactgctaccgaacagattcatctagtggctacatcagcaccttgtgctttcagatatctgtttcaatggcattttgtggcatttgtctttaccgagtgccaataaattttctttgagca

SEQ ID NO: 15098 - DNA, 726 bp, Homo sapiens
  source 1..726: mol_type = unassigned DNA
tttaaagtagtgatattttcaagccatgaagtttagtgacttgctgaaatgggctagggaatctaatttcaaatgggcaaaaagataaacaaactattttgctttaattttctagttcagtgttttaggggtaaatcaaaaccatccaaatgtcagatcagaaagaaagttaaaaatcatatagaaagacttctggatactgaagatgagctcagtgacattcagactgactcagtcccatctgaagtccgggactggttggcttctacctttacacggaaaatggggatgacaaaaaagaaacctgaggaaaaaccaaaatttcggagcattgtgcatgctgttcaagctggaatttttgtggaaagaatgtaccgaaaaacatatcatatggttggtttggcatatccagcagctgtcatcgtaacattaaaggatgttgataaatggtctttcgatgtatttgccctaaatgaagcaagtggagagcatagtctgaagtttatgatttatgaactgtttaccagatatgatcttatcaaccgtttcaagattcctgtttcttgcctaatcacctttgcagaagctttagaagttggttacagcaagtacaaaaatccatatcacaatttgattcatgcagctgatgtcactcaaactgtgcattacataatgcttcatacaggtatcatgcactggctcactgaactggaaattttagcaatg

SEQ ID NO: 15099 - DNA, 532 bp, Homo sapiens
  source 1..532: mol_type = unassigned DNA
aacagactgaaaaaatgtggcagcgcctgaaaggaatagccatatgtgagtggaaagatcttgaattgttcctgctcttcttgacagaagaaaataaaaactaagatgcttggtgaagcagctggaaagaggtgatgttaacgtcgtcgacttaaagaagaatattgaatatgcggcatctgtgctggaagcagtttatatcgatgaaacaagaagacttctggatactgaagatgagctcagtgacattcagactgactcagtcccatctgaagtccgggactggttggcttctacctttacacggaaaatggggatgacaaaaaagaaacctgaggaaaaaccaaaatttcggagcattgtgcatgctgttcaagctggaatttttgtggaaagaatgtaccgaaaaacatatcatatggttggtttggcatatccagcagctgtcatcgtaacattaaaggatgttgataaatggtctttcgatgtatttgccctaaatgaagcaagtggagagcatagtctgaagttt

SEQ ID NO: 15100 - DNA, 553 bp, Homo sapiens
  source 1..553: mol_type = unassigned DNA
gaaggtgaataagcatgcttacagcatcagttgatgtacatattcttgcaataacaacctgtggagctgtgttcttctgagcatcatcatggggtctagtgccacagagattgaagaattggaaaacaccacttttaagtatcttacaggagaacagactgaaaaaatgtggcagcgcctgaaaggaatactaagatgcttggtgaagcagctggaaagaggtgatgttaacgtcgtcgacttaaagaagaatattgaatatgcggcatctgtgctggaagcagtttatatcgatgaaacaagaagacttctggatactgaagatgagctcagtgacattcagactgactcagtcccatctgaagtccgggactggttggcttctacctttacacggaaaatggggatgacaaaaaagaaacctgaggaaaaaccaaaatttcggagcattgtgcatgctgttcaagctggaatttttgtggaaagaatgtaccgaaaaacatatcatatggttggtttggcatatccagcagctgtcatcgtaacattaaag

SEQ ID NO: 15101 - DNA, 565 bp, Homo sapiens
  source 1..565: mol_type = unassigned DNA
aaaggattcatagagcaggctgtgtgcagctgccgtattttccactggttaaattggcagttacctactgtgtggagttgctaggagaaggagcatcatcatggggtctagtgccacagagattgaagaattggaaaacaccacttttaagtatcttacaggagaacagactgaaaaaatgtggcagcgcctgaaaggaatactaagatgcttggtgaagcagctggaaagaggtgatgttaacgtcgtcgacttaaagaagaatattgaatatgcggcatctgtgctggaagcagtttatatcgatgaaacaagaagacttctggatactgaagatgagctcagtgacattcagactgactcagtcccatctgaagtccgggactggttggcttctacctttacacggaaaatggggatgacaaaaaagaaacctgaggaaaaaccaaaatttcggagcattgtgcatgctgttcaagctggaatttttgtggaaagaatgtaccgaaaaacatatcatatggttggtttggcatatccagcagctgtcatcgtaacattaaag

SEQ ID NO: 15102 - DNA, 2338 bp, Homo sapiens
  source 1..2338: mol_type = unassigned DNA
gagggacttagcctttcggagcttgaccagcatgtggaaggagagctctcatggctgcaataacttagggagttcctacctggatgacactggggtaggaagttttctgtttgttttgttctgtttcggagggtcccgtgcacttctcttgcctggatcaacgtgactcttggtggtttttgcacaccctgctctgtgggggagtgccccaacgtgcctgtcttatgtggcctctatggacacactgctcagctggcagagaacagggaagttttctcccagcacccaaaaagagaaagaggaaactactttttctttctgggctccttgcagcacaatagatcaggataagcttccacatttcctctctggagtttctggagtggtttccaggaagaagttaaaccttcacctttaaatggatgaccatgtcacaatcaggaagaaacatctccaaagacccatctttagactaagatgcttggtgaagcagctggaaagaggtgatgttaacgtcgtcgacttaaagaagaatattgaatatgcggcatctgtgctggaagcagtttatatcgatgaaacaagaagacttctggatactgaagatgagctcagtgacattcagactgactcagtcccatctgaagtccgggactggttggcttctacctttacacggaaaatggggatgacaaaaaagaaacctgaggaaaaaccaaaatttcggagcattgtgcatgctgttcaagctggaatttttgtggaaagaatgtaccgaaaaacatatcatatggttggtttggcatatccagcagctgtcatcgtaacattaaaggatgttgataaatggtctttcgatgtatttgccctaaatgaagcaagtggagagcatagtctgaagtttatgatttatgaactgtttaccagatatgatcttatcaaccgtttcaagattcctgtttcttgcctaatcacctttgcagaagctttagaagttggttacagcaagtacaaaaatccatatcacaatttgattcatgcagctgatgtcactcaaactgtgcattacataatgcttcatacaggtatcatgcactggctcactgaactggaaattttagcaatggtctttgctgctgccattcatgattatgagcatacagggacaacaaacaactttcacattcagacaaggtcagatgttgccattttgtataatgatcgctctgtccttgagaatcaccacgtgagtgcagcttatcgacttatgcaagaagaagaaatgaatatcttgataaatttatccaaagatgactggagggatcttcggaacctagtgattgaaatggttttatctacagacatgtcaggtcacttccagcaaattaaaaatataagaaacagtttgcagcagcctgaagggattgacagagccaaaaccatgtccctgattctccacgcagcagacatcagccacccagccaaatcctggaagctgcattatcggtggaccatggccctaatggaggagtttttcctgcagggagataaagaagctgaattagggcttccattttccccactttgtgatcggaagtcaaccatggtggcccagtcacaaataggtttcatcgatttcatagtagagccaacattttctcttctgacagactcaacagagaaaattgttattcctcttatagaggaagcctcaaaagccgaaacttcttcctatgtggcaagcagctcaaccaccattgtggggttacacattgctgatgcactaagacgatcaaatacaaaaggctccatgagtgatgggtcctattccccagactactcccttgcagcagtggacctgaagagtttcaagaacaacctggtggacatcattcagcagaacaaagagaggtggaaagagttagctgcacaagaagcaagaaccagttcacagaagtgtgagtttattcatcagtaaacacctttaagtaaaacctcgtgcatggtggcagctctaatttgaccaaaagacttggagattttgattatgcttgctggaaatctaccctgtcctgtgtgagacaggaaatctatttttgcagattgctcaataagcatcatgagccacataaataacagctgtaaactccttaattcaccgggctcaactgctaccgaacagattcatctagtggctacatcagcaccttgtgctttcagatatctgtttcaatggcattttgtggcatttgtctttaccgagtgccaataaattttctttgagcagctaattgctaattttgtcatttctacaataaagcttggtccacctgttttc

SEQ ID NO: 15103 - DNA, 2015 bp, Homo sapiens
  source 1..2015: mol_type = unassigned DNA
acaatgattcctattccacttgttctacctacactgtatctgatcactgcataagagatagtagaaatggcattatctttaaagtagtgatattttcaagccatgaagtttagtgacttgctgaaatgggctagggaatctaatttcaaatgggcaaaaagataaacaaactattttgctttaattttctagttcagtgttttaggggtaaatcaaaaccatccaaatgtcagatcagaaagaaagttaaaaatcatatagaaagacttctggatactgaagatgagctcagtgacattcagactgactcagtcccatctgaagtccgggactggttggcttctacctttacacggaaaatggggatgacaaaaaagaaacctgaggaaaaaccaaaatttcggagcattgtgcatgctgttcaagctggaatttttgtggaaagaatgtaccgaaaaacatatcatatggttggtttggcatatccagcagctgtcatcgtaacattaaaggatgttgataaatggtctttcgatgtatttgccctaaatgaagcaagtggagagcatagtctgaagtttatgatttatgaactgtttaccagatatgatcttatcaaccgtttcaagattcctgtttcttgcctaatcacctttgcagaagctttagaagttggttacagcaagtacaaaaatccatatcacaatttgattcatgcagctgatgtcactcaaactgtgcattacataatgcttcatacaggtatcatgcactggctcactgaactggaaattttagcaatggtctttgctgctgccattcatgattatgagcatacagggacaacaaacaactttcacattcagacaaggtcagatgttgccattttgtataatgatcgctctgtccttgagaatcaccacgtgagtgcagcttatcgacttatgcaagaagaagaaatgaatatcttgataaatttatccaaagatgactggagggatcttcggaacctagtgattgaaatggttttatctacagacatgtcaggtcacttccagcaaattaaaaatataagaaacagtttgcagcagcctgaagggattgacagagccaaaaccatgtccctgattctccacgcagcagacatcagccacccagccaaatcctggaagctgcattatcggtggaccatggccctaatggaggagtttttcctgcagggagataaagaagctgaattagggcttccattttccccactttgtgatcggaagtcaaccatggtggcccagtcacaaataggtttcatcgatttcatagtagagccaacattttctcttctgacagactcaacagagaaaattgttattcctcttatagaggaagcctcaaaagccgaaacttcttcctatgtggcaagcagctcaaccaccattgtggggttacacattgctgatgcactaagacgatcaaatacaaaaggctccatgagtgatgggtcctattccccagactactcccttgcagcagtggacctgaagagtttcaagaacaacctggtggacatcattcagcagaacaaagagaggtggaaagagttagctgcacaagaagcaagaaccagttcacagaagtgtgagtttattcatcagtaaacacctttaagtaaaacctcgtgcatggtggcagctctaatttgaccaaaagacttggagattttgattatgcttgctggaaatctaccctgtcctgtgtgagacaggaaatctatttttgcagattgctcaataagcatcatgagccacataaataacagctgtaaactccttaattcaccgggctcaactgctaccgaacagattcatctagtggctacatcagcaccttgtgctttcagatatctgtttcaatggcattttgtggcatttgtctttaccgagtgccaataaattttctttgagcagctaattgctaattttgtcatttctacaataaagcttggtccacctgttttc

SEQ ID NO: 15104 - DNA, 4885 bp, Homo sapiens; identical to SEQ ID NO: 15095
  source 1..4885: mol_type = unassigned DNA

SEQ ID NO: 15105 - DNA, 2034 bp, Homo sapiens; identical to SEQ ID NO: 15096
  source 1..2034: mol_type = unassigned DNA

SEQ ID NO: 15106 - DNA, 2000 bp, Homo sapiens; identical to SEQ ID NO: 15097
  source 1..2000: mol_type = unassigned DNA

SEQ ID NO: 15107 - DNA, 726 bp, Homo sapiens; identical to SEQ ID NO: 15098
  source 1..726: mol_type = unassigned DNA

SEQ ID NO: 15108 - DNA, 532 bp, Homo sapiens; identical to SEQ ID NO: 15099
  source 1..532: mol_type = unassigned DNA

SEQ ID NO: 15109 - DNA, 553 bp, Homo sapiens; identical to SEQ ID NO: 15100
  source 1..553: mol_type = unassigned DNA

SEQ ID NO: 15110 - DNA, 565 bp, Homo sapiens; identical to SEQ ID NO: 15101
  source 1..565: mol_type = unassigned DNA

SEQ ID NO: 15111 - DNA, 2338 bp, Homo sapiens; identical to SEQ ID NO: 15102
  source 1..2338: mol_type = unassigned DNA

SEQ ID NO: 15112 - DNA, 2015 bp, Homo sapiens; identical to SEQ ID NO: 15103
  source 1..2015: mol_type = unassigned DNA

SEQ ID NO: 15113 - DNA, 3444 bp, Homo sapiens
  source 1..3444: mol_type = unassigned DNA
gtaaacacgcactcacatccgccagtacagggcacacgcagccactcgtccccggcgcctgtgtgcgtgcgctcgcccttgggcgcttctgtctgtgtgtgcccccggcttccaatcgttcctttgggagggggaggagtggctgtgaggagtgagagactggcgggcaggctgaggagaagggagggagagcagagggaggggggaacccggccgggggaggaggagagaggcgaggaggcggctctggcagcgcgcggcggcggcggcggtagcggcagcagcagcggcggtgcggagagcttggactgggagcccaaagctcggctgggcagcgggagaggaggagccgcaggagctgcagctctgccagcttgggccgagcctagagacaccggcctggctggtccacgccagccgcagaccgtggctgagcatggagctgtccccccgcagtcctccggagatgctggaggagtcggattgcccgtcacccctggagctgaagtcagcccccagcaagaagatgtggattaagcttcggtctctgctgcgctacatggtgaagcagttggagaatggggagataaacattgaggagctgaagaaaaatctggagtacacagcttctctgctggaagccgtctacatagatgagacacggcaaatcttggacacggaggacgagctgcaggagctgcggtcagatgccgtgccttcggaggtgcgggactggctggcctccaccttcacccagcaggcccgggccaaaggccgccgagcagaggagaagcccaagttccgaagcattgtgcacgctgtgcaggctgggatcttcgtggaacggatgttccggagaacatacacctctgtgggccccacttactctactgcggttctcaactgtctcaagaacctggatctctggtgctttgatgtcttttccttgaaccaggcagcagatgaccatgccctgaggaccattgtttttgagttgctgactcggcataacctcatcagccgcttcaagattcccactgtgtttttgatgagtttcctggatgccttggagacaggctatgggaagtacaagaatccttaccacaaccagatccacgcagccgatgttacccagacagtccattgcttcttgctccgcacagggatggtgcactgcctgtcggagattgagctcctggccatcatctttgctgcagctatccatgattatgagcacacgggcactaccaacagcttccacatccagaccaagtcagaatgtgccatcgtgtacaatgatcgttcagtgctggagaatcaccacatcagctctgttttccgattgatgcaggatgatgagatgaacattttcatcaacctcaccaaggatgagtttgtagaactccgagccctggtcattgagatggtgttggccacagacatgtcctgccatttccagcaagtgaagaccatgaagacagccttgcaacagctggagaggattgacaagcccaaggccctgtctctactgctccatgctgctgacatcagccacccaaccaagcagtggttggtccacagccgttggaccaaggccctcatggaggaattcttccgtcagggtgacaaggaggcagagttgggcctgcccttttctccactctgtgaccgcacttccactctagtggcacagtctcagatagggttcatcgacttcattgtggagcccacattctctgtgctgactgacgtggcagagaagagtgttcagcccctggcggatgaggactccaagtctaaaaaccagcccagctttcagtggcgccagccctctctggatgtggaagtgggagaccccaaccctgatgtggtcagctttcgttccacctgggtcaagcgcattcaggagaataagcagaaatggaaggaacgggcagcaagtggcatcaccaaccagatgtccattgacgagctgtccccctgtgaagaagaggcccccccatcccctgccgaagatgaacacaaccagaatgggaatctggattagccctggggctggcccaggtcttcattgagtccaaagtgtttgatgtcatcagcaccatccatcaggactggctcccccatctgctccaagggagcgtggtcgtggaagaaacaacccacctgaaggccaaatgccagagatttggggttggggaaagggcccctccccacctgacacccactggggtgcactttaatgttccggcagcaagactggggaacttcaggctcccagtggtcactgtgcccatccctcagcctctggattctcttcatggccaggtggctgccagggagcggggagcttcctggaggcttcccagggccttggggaagggtcagagatgccagccccctgggacctcccccatcctttttgcctccaagtttctaagcaatacattttgggggttccctcagccccccaccccagatcttagctggcaggtctgggtgccccttttcctcccctgggaagggctggaataggatagaaagctgggggttttcagagccctatgtgtggggaggggagtggattccttcagggcatggtacctttctaggacctgggaatggggtggagaggacatcctcttcaccccagaattgcgctgcttcagccccatctccagcctgatcctctgaatcttccttccctccctttctgatacagtgactggggcaaaaggagccattgtgaccaggggctgcgggaggcctttcctgggaccttccttgggactggtctgggcccctggggcttgtcgcctgccctgagtccggagccctttgcctccttcctctcccctggggctgggaggctccatccgaccaatgtctgtaaagtgctttgaggatctccccagcaaagcaccttcagaatgtatcgacaccagctgggttagggtcaagggtgcctggggagggtgagtaatcctgcattgctaaaagagagggtctgtcccctcctctccacgtcccagaactggcccagctgcaggcactaagaagctcctcccctgagacaagtgaggggtagtcggtgaaaggcagatggacaaggggctcagggctgctgccttcctgtcctctggagagaacccagccaggcgcggtgccccttcctctcctcaggctcctccttgcccccaccttgccccaggaaaggccaaagtccaggtgactgccctccttctttcttgtaaataccaaccatgcatttgtacagtgggccctgttcatgcgaaatccacatccatggtctcctagacctgctaccctggtacttccaccctaccccaccccgagaagggcagagacgcatgtgactcacccctgcccttggtttcccagacccctgctatagccagagaacaataaagaagggagaccagg

SEQ ID NO: 15114 - DNA, 628 bp, Homo sapiens
  source 1..628: mol_type = unassigned DNA
gcgcggcggcggcggcggtagcggcagcagcagcggcggtgcggagagcttggactgggagcccaaagctcggctgggcagcgggagaggaggagccgcaggagctgcagctctgccagcttgggccgagcctagagacaccggcctggctggtccacgccagccgcagaccgtggctgagcatggagctgtccccccgcagtcctccggagatgctggaggagtcggattgcccgtcacccctggagctgaagtcagcccccagcaagaagatgtggattaagcttcggtctctgccccatggagtgatcttctatggttcttaccagttttgaaaatcatgctgccattctcctttttctgtctatggatgtggagctgctgtgaagattgcagcataaactatggttccctggacctctggagaaaaaggagtgtcatttttctcatgccttggctgcgctacatggtgaagcagttggagaatggggagataaacattgaggagctgaagaaaaatctggagtacacagcttctctgctggaagccgtctacatagatgagacacggcaaatcttggacacggaggacgagctgcaggagctgcggtcagatgccgtgccttcg

SEQ ID NO: 15115 - DNA, 4734 bp, Homo sapiens
  source 1..4734: mol_type = unassigned DNA
gcggcagcagcagcggcggtgcggagagcttggactgggagcccaaagctcggctgggcagcgggagaggaggagccgcaggagctgcagctctgccagcttgggccgagcctagagacaccggcctggctggtccacgccagccgcagaccgtggctgagcatggagctgtccccccgcagtcctccggagatgctggaggagtcggattgcccgtcacccctggagctgaagtcagcccccagcaagaagatgtggattaagcttcggtctctgctgcgctacatggtgaagcagttggagaatggggagataaacattgaggagctgaagaaaaatctggagtacacagcttctctgctggaagccgtctacatagatgagacacggcaaatcttggacacggaggacgagctgcaggagctgcggtcagatgccgtgccttcggaggtgcgggactggctggcctccaccttcacccagcaggcccgggccaaaggccgccgagcagaggagaagcccaagttccgaagcattgtgcacgctgtgcaggctgggatcttcgtggaacggatgttccggagaacatacacctctgtgggccccacttactctactgcggttctcaactgtctcaagaacctggatctctggtgctttgatgtcttttccttgaaccaggcagcagatgaccatgccctgaggaccattgtttttgagttgctgactcggcataacctcatcagccgcttcaaggttgggcagcatcctacctctacctccaggcaggattctccactcctctcatgcctgttctaaaagcctcccaacaaacagattccatagatcccctcactcagtctcaacatcagggaagtctccccatgcccacgcccagcctagcctttctttcacttgctgcagtcttagttccagacttcattaattgatttctagggggagattctcggtctgcaaccatctagcctgggattctgctctctcccgctttgcttttttcccccaacttgtcctctctaggctgacttgcagtgtggacactggaggcctggagttcagatgctgtcagccagtgccctttgggactagaaaccatgtttcctggataaaattggccactccctcccccgtcccccagttctggtctctgtgcaaggaattatatagagaaggtcagctcttgacagggctcggggcgggggcttgtatgacagggggacggtgtgtgaacttcatttgctcttcagcttgtctggatgggaagaattatatgagattaagtccttcctagatcctgtaccaggagggagcatcttttgggagggaaaaagtgccaggaaaaaaacaaaacactttcacatggacaaatcacatttggaagtagagggtgagggaggttgaagagccgtaatggggatattgggtcagcactttggggagcagtagatgttaaaggtgaagggaaacgtggatgatctgaagggccatagagaggggcggtcaaaggagtccaggtggagggtcccctcccaggccggcttcgggaggtcattccatccatcctctgcctccacttcactagaacaaattatctgtgcatgtaagcccttccttcacccttgactcctccttttacaacaactccctagggagtttccaaaactttcctgagatgctcagctgaaattttcttaagtgccttccggaagcctgttctgcaattttactttcttctttccaatcctgccctctccaggacagagaatagtagggctctctttttcctaagacttttcccagctcatgtttccccaaactggctctcagacttcagtcactagattctcctaaactctgcctccttacctggaaggactgggtctgggggacctcaagagtagctgttttgggttaggtttggcccagtcccagtctgctttgctccaaggcagttagaggaaggagggggtgcttcttgttttagttttctctgatgatagggccagcagcagctgcccttctcaaactccacattcttttcctgggcacctagcccctcccctactcctccctttttcttcccttccctccagggacgccatggcaacgcaaaagcaagggcagttgtcatggaaacagtcctttaaaatttcctgaatttggggcacagccctccaggggtgcgggtgggggatgttagggtctgactgactagtggtgcttcttctgtgtctctgtcactatattgctcatctctacagaaacctcccgagtcctgaaccttcgtcccctcctagcctcaagagattcagggacagatcaccagtcctgtcctctgggagccttgagccttttgaaggaggcagacataccctaagggcgtacacagagacagggcccggattcagagtagctggacagagctctggctgctggtgcttttgtgtgtgttctgtgggactgagggcgcgggtactggtgcatgtagagggtaagtggtcagggagggcaacccacatctggctggaagagtcctctctaggtcatcttcttcattcccttacttccgagcccttcttcatggttttggatgtggggatggagtgggatgtttggaaggtaggagggaagctttctttcattttctttgaaatctccagggaaataataataattatagctattctttagagagcatttactaaatgccttgtacttatctcattaatttccaggtaggtggtattatctttcattctgcaattaagtatctgaggcacagagaggcatgtgacttacccaaggttgcacagccagcaggtggtagaggcaggatatgagccaggttcacctaactaggttctgtgctctctccctatgccacactgccttctaaagaaagttgttgatctcggtccgtaatcaccaccattcctgtggatccttgatatatctccatttcccctaactccccgcagattcccactgtgtttttgatgagtttcctggatgccttggagacaggctatgggaagtacaagaatccttaccacaaccagatccacgcagccgatgttacccagacagtccattgcttcttgctccgcacagggatggtgcactgcctgtcggagattgagctcctggccatcatctttgctgcagctatccatgattatgagcacacgggcactaccaacagcttccacatccagaccaagtcagaatgtgccatcgtgtacaatgatcgttcagtgctggagaatcaccacatcagctctgttttccgattgatgcaggatgatgagatgaacattttcatcaacctcaccaaggatgagtttgtagaactccgagccctggtcattgagatggtgttggccacagacatgtcctgccatttccagcaagtgaagaccatgaagacagccttgcaacagctggagaggtggcatctggtggggtgtggctggggccaggccagagggaggggtgtgtgaactgggggggtatacacaagggtagttggtgtgccaggtctttacctcgctgtagagactccactggcttcaggtatcagactgcatctctatgtgagagagagagagagtgtgtgtgtgtgtgtgtgtgtgtgtgtgtgtgtgtgtgtgtccttacgtttactcacagccttggcagctgatccactggagagtgctttgggctgggaatctaagatgggggttctcatcgtagctctgggacaggcttactctggaatgttggaaaattcattcaacccttctgccccagttttattacctctgaaatggtgaaaatgatacgcctccccccacaacagcttgcccctagttcctagtctcatagggctattgggagagtcatacgaggtttaaaaaaatgcatagaacaaatgccataattacatctaatgttgcttagaagtgagtgggaatgtataaatgtgtgtgagagtggactgtgtgtgtgtgtgtcctgaaggtgtgtgttaatctctgtgtaaggtgtttatgtgtgggatgcagtgtcacagcgggtcattgttgagggtataataataattattactattctagataatatctactgagcacttattatgtgctagacactctcctgaatacttatttgttgtttgtcacttaattctcagaaccactcgatatgtggtagggttgttatttccattttagagttgaagaaaatgaaatatggaaattttaagtaacttgctcagtgtcacgcggctaacatgtggtaggtatagacgtgaacccaggccctttgattctaagagcctgggctctcagctactaacccgtgctgctacctaaacatatataagtgtgtgtgtgtctgtgtgtggggtgtgtgtgtagctttggagggtgtttgaagttatgtgaggccgggcgtggtggctcatgcctataattccagcactttgggaggccgaggcaggtggatagcttgaggtcaggaatttgagaccagcctggccaacacggtgaaacactgtctctaccaaaaaaatacaaaaattagctgggtgtggtggcatgcacgcctgtagtcccagctattcgggaggctgaggtgggagaatcacttgaacccaggtgacagaggttgcagtgagctgagattgtgccactgcactccagcccgggcaacagagtgagaccctgtctc

SEQ ID NO: 15116 - DNA, 2209 bp, Homo sapiens
  source 1..2209: mol_type = unassigned DNA
aaagctcggctgggcagcgggagaggaggagccgcaggagctgcagctctgccagcttgggccgagcctagagacaccggcctggctggtccacgccagccgcagaccgtggctgagcatggagctgtccccccgcagtcctccggagatgctggaggagtcggattgcccgtcacccctggagctgaagtcagcccccagcaagaagatgtggattaagcttcggtctctgctgcgctacatggtgaagcagttggagaatggggagataaacattgaggagctgaagaaaaatctggagtacacagcttctctgctggaagccgtctacatagatgagacacgggtctctaggctgtggaagcacctgctgtctttcctctgtgactccccttctggggtctcaggcaaatcttggacacggaggacgagctgcaggagctgcggtcagatgccgtgccttcggaggtgcgggactggctggcctccaccttcacccagcaggcccgggccaaaggccgccgagcagaggagaagcccaagttccgaagcattgtgcacgctgtgcaggctgggatcttcgtggaacggatgttccggagaacatacacctctgtgggccccacttactctactgcggttctcaactgtctcaagaacctggatctctggtgctttgatgtcttttccttgaaccaggcagcagatgaccatgccctgaggaccattgtttttgagttgctgactcggcataacctcatcagccgcttcaagattcccactgtgtttttgatgagtttcctggatgccttggagacaggctatgggaagtacaagaatccttaccacaaccagatccacgcagccgatgttacccagacagtccattgcttcttgctccgcacagggatggtgcactgcctgtcggagattgagctcctggccatcatctttgctgcagctatccatgattatgagcacacgggcactaccaacagcttccacatccagaccaagtcagaatgtgccatcgtgtacaatgatcgttcagtgctggagaatcaccacatcagctctgttttccgattgatgcaggatgatgagatgaacattttcatcaacctcaccaaggatgagtttgtagaactccgagccctggtcattgagatggtgttggccacagacatgtcctgccatttccagcaagtgaagaccatgaagacagccttgcaacagctggagaggattgacaagcccaaggccctgtctctactgctccatgctgctgacatcagccacccaaccaagcagtggttggtccacagccgttggaccaaggccctcatggaggaattcttccgtcagggtgacaaggaggcagagttgggcctgcccttttctccactctgtgaccgcacttccactctagtggcacagtctcagatagggttcatcgacttcattgtggagcccacattctctgtgctgactgacgtggcagagaagagtgttcagcccctggcggatgaggactccaagtctaaaaaccagcccagctttcagtggcgccagccctctctggatgtggaagtgggagaccccaaccctgatgtggtcagctttcgttccacctgggtcaagcgcattcaggagaataagcagaaatggaaggaacgggcagcaagtggcatcaccaaccagatgtccattgacgagctgtccccctgtgaagaagaggcccccccatcccctgccgaagatgaacacaaccagaatgggaatctggattagccctggggctggcccaggtcttcattgagtccaaagtgtttgatgtcatcagcaccatccatcaggactggctcccccatctgctccaagggagcgtggtcgtggaagaaacaacccacctgaaggccaaatgccagagatttggggttggggaaagggcccctccccacctgacacccactggggtgcactttaatgttccggcagcaagactggggaacttcaggctcccagtggtcactgtgcccatccctcagcctctggattctcttcatggccaggtggctgccagggagcggggagcttcctggaggcttcccagggccttggggaagggtcagagatgccagccccctgggacctcccccatcctttttgcctccaagtttctaagcaatacattttgggggttccctca

SEQ ID NO: 15117 - DNA, 1711 bp, Homo sapiens
  source 1..1711: mol_type = unassigned DNA
gattctctttggcacagatgttggcaggtgcgaggaagcacggccctgacacgcgtggccaggccacatgtgcaaggcatgtgcggagcaagctggccagttggagcgggcttaggagttgcaaaggctgcgctacatggtgaagcagttggagaatggggagataaacattgaggagctgaagaaaaatctggagtacacagcttctctgctggaagccgtctacatagatgagacacggcaaatcttggacacggaggacgagctgcaggagctgcggtcagatgccgtgccttcggaggtgcgggactggctggcctccaccttcacccagcaggcccgggccaaaggccgccgagcagaggagaagcccaagttccgaagcattgtgcacgctgtgcaggctgggatcttcgtggaacggatgttccggagaacatacacctctgtgggccccacttactctactgcggttctcaactgtctcaagaacctggatctctggtgctttgatgtcttttccttgaaccaggcagcagatgaccatgccctgaggaccattgtttttgagttgctgactcggcataacctcatcagccgcttcaagattcccactgtgtttttgatgagtttcctggatgccttggagacaggctatgggaagtacaagaatccttaccacaaccagatccacgcagccgatgttacccagacagtccattgcttcttgctccgcacagggatggtgcactgcctgtcggagattgagctcctggccatcatctttgctgcagctatccatgattatgagcacacgggcactaccaacagcttccacatccagaccaagtcagaatgtgccatcgtgtacaatgatcgttcagtgctggagaatcaccacatcagctctgttttccgattgatgcaggatgatgagatgaacattttcatcaacctcaccaaggatgagtttgtagaactccgagccctggtcattgagatggtgttggccacagacatgtcctgccatttccagcaagtgaagaccatgaagacagccttgcaacagctggagaggattgacaagcccaaggccctgtctctactgctccatgctgctgacatcagccacccaaccaagcagtggttggtccacagccgttggaccaaggccctcatggaggaattcttccgtcagggtgacaaggaggcagagttgggcctgcccttttctccactctgtgaccgcacttccactctagtggcacagtctcagatagggttcatcgacttcattgtggagcccacattctctgtgctgactgacgtggcagagaagagtgttcagcccctggcggatgaggactccaagtctaaaaaccagcccagctttcagtggcgccagccctctctggatgtggaagtgggagaccccaaccctgatgtggtcagctttcgttccacctgggtcaagcgcattcaggagaataagcagaaatggaaggaacgggcagcaagtggcatcaccaaccagatgtccattgacgagctgtccccctgtgaagaagaggcccccccatcccctgccgaagatgaacacaaccagaatgggaatctggattagccctggggctggcccaggtcttcattgagtccaaagtgtttgatgtcatcagcaccatccatcaggactggctcccccatctgctcc

SEQ ID NO: 15118 - DNA, 2992 bp, Homo sapiens
  source 1..2992: mol_type = unassigned DNA
gttctctctggtcagttgctcagttctactgggacctggaggaggaaggcaggggccaaagaggaagttgtcccctcttgggggccctggggctcctggggtcaggattttgatactctgaagcaggaaactttgattcccatggcaaaccctgttcctgttcagaggagccacctccagggccccattctcaggctgcgctacatggtgaagcagttggagaatggggagataaacattgaggagctgaagaaaaatctggagtacacagcttctctgctggaagccgtctacatagatgagacacggcccgggccaaaggccgccgagcagaggagaagcccaagttccgaagcattgtgcacgctgtgcaggctgggatcttcgtggaacggatgttccggagaacatacacctctgtgggccccacttactctactgcggttctcaactgtctcaagaacctggatctctggtgctttgatgtcttttccttgaaccaggcagcagatgaccatgccctgaggaccattgtttttgagttgctgactcggcataacctcatcagccgcttcaagattcccactgtgtttttgatgagtttcctggatgccttggagacaggctatgggaagtacaagaatccttaccacaaccagatccacgcagccgatgttacccagacagtccattgcttcttgctccgcacagggatggtgcactgcctgtcggagattgagctcctggccatcatctttgctgcagctatccatgattatgagcacacgggcactaccaacagcttccacatccagaccaagtcagaatgtgccatcgtgtacaatgatcgttcagtgctggagaatcaccacatcagctctgttttccgattgatgcaggatgatgagatgaacattttcatcaacctcaccaaggatgagtttgtagaactccgagccctggtcattgagatggtgttggccacagacatgtcctgccatttccagcaagtgaagaccatgaagacagccttgcaacagctggagaggattgacaagcccaaggccctgtctctactgctccatgctgctgacatcagccacccaaccaagcagtggttggtccacagccgttggaccaaggccctcatggaggaattcttccgtcagggtgacaaggaggcagagttgggcctgcccttttctccactctgtgaccgcacttccactctagtggcacagtctcagatagggttcatcgacttcattgtggagcccacattctctgtgctgactgacgtggcagagaagagtgttcagcccctggcggatgaggactccaagtctaaaaaccagcccagctttcagtggcgccagccctctctggatgtggaagtgggagaccccaaccctgatgtggtcagctttcgttccacctgggtcaagcgcattcaggagaataagcagaaatggaaggaacgggcagcaagtggcatcaccaaccagatgtccattgacgagctgtccccctgtgaagaagaggcccccccatcccctgccgaagatgaacacaaccagaatgggaatctggattagccctggggctggcccaggtcttcattgagtccaaagtgtttgatgtcatcagcaccatccatcaggactggctcccccatctgctccaagggagcgtggtcgtggaagaaacaacccacctgaaggccaaatgccagagatttggggttggggaaagggcccctccccacctgacacccactggggtgcactttaatgttccggcagcaagactggggaacttcaggctcccagtggtcactgtgcccatccctcagcctctggattctcttcatggccaggtggctgccagggagcggggagcttcctggaggcttcccagggccttggggaagggtcagagatgccagccccctgggacctcccccatcctttttgcctccaagtttctaagcaatacattttgggggttccctcagccccccaccccagatcttagctggcaggtctgggtgccccttttcctcccctgggaagggctggaataggatagaaagctgggggttttcagagccctatgtgtggggaggggagtggattccttcagggcatggtacctttctaggacctgggaatggggtggagaggacatcctcttcaccccagaattgcgctgcttcagccccatctccagcctgatcctctgaatcttccttccctccctttctgatacagtgactggggcaaaaggagccattgtgaccaggggctgcgggaggcctttcctgggaccttccttgggactggtctgggcccctggggcttgtcgcctgccctgagtccggagccctttgcctccttcctctcccctggggctgggaggctccatccgaccaatgtctgtaaagtgctttgaggatctccccagcaaagcaccttcagaatgtatcgacaccagctgggttagggtcaagggtgcctggggagggtgagtaatcctgcattgctaaaagagagggtctgtcccctcctctccacgtcccagaactggcccagctgcaggcactaagaagctcctcccctgagacaagtgaggggtagtcggtgaaaggcagatggacaaggggctcagggctgctgccttcctgtcctctggagagaacccagccaggcgcggtgccccttcctctcctcaggctcctccttgcccccaccttgccccaggaaaggccaaagtccaggtgactgccctccttctttcttgtaaataccaaccatgcatttgtacagtgggccctgttcatgcgaaatccacatccatggtctcctagacctgctaccctggtacttccaccctaccccaccccgagaagggcagagacgcatgtgactcacccctgcccttggtttcccagacccctgctatagccagagaacaataaagaagggagaccagg

SEQ ID NO: 15119 - DNA, 2150 bp, Homo sapiens
  source 1..2150: mol_type = unassigned DNA
agttgctcagttctactgggacctggaggaggaaggcaggggccaaagaggaagttgtcccctcttgggggccctggggctcctggggtcaggattttgatactctgaagcaggaaactttgattcccatggcaaaccctgttcctgttcagaggagccacctccagggccccattctcaggctgcgctacatggtgaagcagttggagaatggggagataaacattgaggagctgaagaaaaatctggagtacacagcttctctgctggaagccgtctacatagatgagacacggcaaatcttggacacggaggacgagctgcaggagctgcggtcagatgccgtgccttcggaggtgcgggactggctggcctccaccttcacccagcaggcccgggccaaaggccgccgagcagaggagaagcccaagttccgaagcattgtgcacgctgtgcaggctgggatcttcgtggaacggatgttccggagaacatacacctctgtgggccccacttactctactgcggttctcaactgtctcaagaacctggatctctggtgctttgatgtcttttccttgaaccaggcagcagatgaccatgccctgaggaccattgtttttgagttgctgactcggcataacctcatcagccgcttcaagattcccactgtgtttttgatgagtttcctggatgccttggagacaggctatgggaagtacaagaatccttaccacaaccagatccacgcagccgatgttacccagacagtccattgcttcttgctccgcacagggatggtgcactgcctgtcggagattgagctcctggccatcatctttgctgcagctatccatgattatgagcacacgggcactaccaacagcttccacatccagaccaagtcagaatgtgccatcgtgtacaatgatcgttcagtgctggagaatcaccacatcagctctgttttccgattgatgcaggatgatgagatgaacattttcatcaacctcaccaaggatgagtttgtagaactccgagccctggtcattgagatggtgttggccacagacatgtcctgccatttccagcaagtgaagaccatgaagacagccttgcaacagctggagaggattgacaagcccaaggccctgtctctactgctccatgctgctgacatcagccacccaaccaagcagtggttggtccacagccgttggaccaaggccctcatggaggaattcttccgtcagggtgacaaggaggcagagttgggcctgcccttttctccactctgtgaccgcacttccactctagtggcacagtctcagatagggttcatcgacttcattgtggagcccacattctctgtgctgactgacgtggcagagaagagtgttcagcccctggcggatgaggactccaagtctaaaaaccagcccagctttcagtggcgccagccctctctggatgtggaagtgggagaccccaaccctgatgtggtcagctttcgttccacctgggtcaagcgcattcaggagaataagcagaaatggaaggaacgggcagcaagtggcatcaccaaccagatgtccattgacgagctgtccccctgtgaagaagaggcccccccatcccctgccgaagatgaacacaaccagaatgggaatctggattagccctggggctggcccaggtcttcattgagtccaaagtgtttgatgtcatcagcaccatccatcaggactggctcccccatctgctccaagggagcgtggtcgtggaagaaacaacccacctgaaggccaaatgccagagatttggggttggggaaagggcccctccccacctgacacccactggggtgcactttaatgttccggcagcaagactggggaacttcaggctcccagtggtcactgtgcccatccctcagcctctggattctcttcatggccaggtggctgccagggagcggggagcttcctggaggcttcccagggccttggggaagggtcagagatgccagccccctgggacctcccccatcctttttgcctccaagtttctaagcaatacattttgggggttccctcagccccccaccccagatcttagctggcaggtctgggtgccccttttcctcccct

SEQ ID NO: 15120 - DNA, 2782 bp, Homo sapiens
  source 1..2782: mol_type = unassigned DNA
aaagaggaagttgtcccctcttgggggccctggggctcctggggtcaggattttgatactctgaagcaggaaactttgattcccatggcaaaccctgttcctgttcagaggagccacctccagggccccattctcaggctgcgctacatggtgaagcagttggagaatggggagataaacattgaggagctgaagaaaaatctggagtacacagcttctctgctggaagccgtctacatagatgagacacgaacctggatctctggtgctttgatgtcttttccttgaaccaggcagcagatgaccatgccctgaggaccattgtttttgagttgctgactcggcataacctcatcagccgcttcaagattcccactgtgtttttgatgagtttcctggatgccttggagacaggctatgggaagtacaagaatccttaccacaaccagatccacgcagccgatgttacccagacagtccattgcttcttgctccgcacagggatggtgcactgcctgtcggagattgagctcctggccatcatctttgctgcagctatccatgattatgagcacacgggcactaccaacagcttccacatccagaccaagtcagaatgtgccatcgtgtacaatgatcgttcagtgctggagaatcaccacatcagctctgttttccgattgatgcaggatgatgagatgaacattttcatcaacctcaccaaggatgagtttgtagaactccgagccctggtcattgagatggtgttggccacagacatgtcctgccatttccagcaagtgaagaccatgaagacagccttgcaacagctggagaggattgacaagcccaaggccctgtctctactgctccatgctgctgacatcagccacccaaccaagcagtggttggtccacagccgttggaccaaggccctcatggaggaattcttccgtcagggtgacaaggaggcagagttgggcctgcccttttctccactctgtgaccgcacttccactctagtggcacagtctcagatagggttcatcgacttcattgtggagcccacattctctgtgctgactgacgtggcagagaagagtgttcagcccctggcggatgaggactccaagtctaaaaaccagcccagctttcagtggcgccagccctctctggatgtggaagtgggagaccccaaccctgatgtggtcagctttcgttccacctgggtcaagcgcattcaggagaataagcagaaatggaaggaacgggcagcaagtggcatcaccaaccagatgtccattgacgagctgtccccctgtgaagaagaggcccccccatcccctgccgaagatgaacacaaccagaatgggaatctggattagccctggggctggcccaggtcttcattgagtccaaagtgtttgatgtcatcagcaccatccatcaggactggctcccccatctgctccaagggagcgtggtcgtggaagaaacaacccacctgaaggccaaatgccagagatttggggttggggaaagggcccctccccacctgacacccactggggtgcactttaatgttccggcagcaagactggggaacttcaggctcccagtggtcactgtgcccatccctcagcctctggattctcttcatggccaggtggctgccagggagcggggagcttcctggaggcttcccagggccttggggaagggtcagagatgccagccccctgggacctcccccatcctttttgcctccaagtttctaagcaatacattttgggggttccctcagccccccaccccagatcttagctggcaggtctgggtgccccttttcctcccctgggaagggctggaataggatagaaagctgggggttttcagagccctatgtgtggggaggggagtggattccttcagggcatggtacctttctaggacctgggaatggggtggagaggacatcctcttcaccccagaattgcgctgcttcagccccatctccagcctgatcctctgaatcttccttccctccctttctgatacagtgactggggcaaaaggagccattgtgaccaggggctgcgggaggcctttcctgggaccttccttgggactggtctgggcccctggggcttgtcgcctgccctgagtccggagccctttgcctccttcctctcccctggggctgggaggctccatccgaccaatgtctgtaaagtgctttgaggatctccccagcaaagcaccttcagaatgtatcgacaccagctgggttagggtcaagggtgcctggggagggtgagtaatcctgcattgctaaaagagagggtctgtcccctcctctccacgtcccagaactggcccagctgcaggcactaagaagctcctcccctgagacaagtgaggggtagtcggtgaaaggcagatggacaaggggctcagggctgctgccttcctgtcctctggagagaacccagccaggcgcggtgccccttcctctcctcaggctcctccttgcccccaccttgccccaggaaaggccaaagtccaggtgactgccctccttctttcttgtaaataccaaccatgcatttgtacagtgggccctgttcatgcgaaatccacatccatggtctcctagacctgctaccctggtacttccaccctaccccaccccgagaagggcagagacgcatgtgactcacccctgcccttggtttcccagacccctgctatagccagagaacaataaagaagggagaccagg

SEQ ID NO: 15121 - DNA, 796 bp, Homo sapiens
  source 1..796: mol_type = unassigned DNA
ggtcaggaatttgagaccagcctggccaacacggtgaaacactgtctctaccaaaaaaatacaaaaattagctgggtgtggtggcatgcacgcctgtagtcccagctattcgggaggctgaggtgggagaatcacttgaacccaggtgacagaggttgcagtgagctgagattgtgccactgcactccagcccgggcaacagagtgagaccctgtctcaaaaaaaaaaaaaaaaaaaggaagaagttatgtgatagggtgtgcgtgggaagttagggaatggtcctaacttccttttcctaaaagatcagtctcccttcccttgccatctgccccaaccaggattgacaagcccaaggccctgtctctactgctccatgctgctgacatcagccacccaaccaagcagtggttggtccacagccgttggaccaaggccctcatggaggaattcttccgtcagggtgacaaggaggcagagttgggcctgcccttttctccactctgtgaccgcacttccactctagtggcacagtctcagatagggttcatcgacttcattgtggagcccacattctctgtgctgactgacgtggcagagaagagtgttcagcccctggcggatgaggactccaagtctaaaaaccagcccagctttcagtggcgccagccctctctggatgtggaagtgggagaccccaaccctgatgtggtcagctttcgttccacctgggtcaagcgcattcaggagaataagcagaaatggaaggaacgggcagcaagtggcatcaccaacc

SEQ ID NO: 15122 - DNA, 5109 bp, Homo sapiens
  source 1..5109: mol_type = unassigned DNA
gacttccttgtttggagtaaacttcggcaacatctcatggctgaggggtttgcctttccatctgttgatgtgctttctggaagctccccggtctgccagagaaaacatatctagaagacgcacgacgccaattcagccattcccttgggtccccaaatccccccagccaccagagacggaaggagaaggtgaagtagaaaacagactttcctgtggcgcgcgggatccgcggctgacagagagtagcgtggccaggcagggatctccgcgcccaccggtcagccccgtccacgcgctcgggcgcgcgtcctcccttcctgacactcctctcgccgcctctggaactcggcttggagatggggcagtcgcgacggctcctgcctccgccgagctcctagcgctttagctgttgacattgggtccccgctgttgtctccaggcgctcagctgccagcgcgcggcggggctgagagtgacagcgcggcgcggccgggggaggattcgccgccgagccccgggctgctcactccgccgtgggggggaccgcagacgccgctggtctcgctgcgaggcccctgcccggccggccgagccatgacggacgccggcaacaggaaggagggcttcaaaaaatgccggagcgccactttcagcatcgatggctacagcttcaccatagttgcaaatgaagctggagacaagaatgccagaccactggcccgcttctctcggtctaagtcacagaactgtctgtggaactccctcatcgatgggctcacagggaatgtcaaggagaagccaaggccaacaattgtccatgaccctcgacccccagaggagatcctagctgatgaattgccacagctggatagcccagaagtcttggtgaagacatccttcagattacggtctttggtcaaacaattagagagaggggaagcttcagtggtagatcttaagaagaatttggaatatgcagccacagtgcttgaatctgtgtatattgatgaaacaaggagactcctggatacagaggatgagctcagtgacattcagtcagatgctgtgccttctgaggtccgagactggctggcctccaccttcacgcggcagatggggatgatgctcaggaggagcgacgagaagccccggttcaagagcatcgttcacgcagtgcaggctgggatatttgtggagagaatgtatagacggacatcaaacatggttggactgagctatccaccagctgttattgaggcattaaaggatgtggacaagtggtcctttgacgtcttttccctcaatgaggccagtggggatcatgcactgaaatttattttctatgaactactcacacgttatgatctgatcagccgtttcaagatccccatttctgcacttgtctcatttgtggaggccctggaagtgggatacagcaagcacaaaaatccttaccataacttaatgcacgctgccgatgttacacagacagtgcattacctcctctataagacaggagtggcgaactggctgacggagctggagatctttgctataatcttctcagctgccatccatgactacgagcataccggaaccaccaacaatttccacattcagactcggtctgatccagctattctgtataatgacagatctgtactggagaatcaccatttaagtgcagcttatcgccttctgcaagatgacgaggaaatgaatattttgattaacctctcaaaggatgactggagggagtttcgaaccttggtaattgaaatggtgatggccacagatatgtcttgtcacttccaacaaatcaaagcaatgaagactgctctgcagcagccagaagccattgaaaagccaaaagccttatcccttatgctgcatacagcagatattagccatccagcaaaagcatgggacctccatcatcgctggacaatgtcactcctggaggagttcttcagacagggtgacagagaagcagagctggggctgcctttttctcctctgtgtgaccgaaagtccactatggttgctcagtcacaagtaggtttcattgatttcatcgtggaacccaccttcactgtgcttacggacatgaccgagaagattgtgagtccattaatcgatgaaacctctcaaactggtgggacaggacagaggcgttcgagtttgaatagcatcagctcgtcagatgccaagcgatcaggtgtcaagacctctggttcagagggaagtgccccgatcaacaattctgtcatctccgttgactataagagctttaaagctacttggacggaagtggtgcacatcaatcgggagagatggagggccaaggtacccaaagaggagaaggccaagaaggaagcagaggaaaaggctcgcctggccgcagaggagcagcaaaaggaaatggaagccaaaagccaggctgaagaaggcgcatctggcaaagctgagaaaaagacgtctggagaaactaagaatcaagtcaatggaacacgggcaaacaaaagtgacaaccctcgtgggaaaaactccaaagccgagaagtcatcaggagaacagcaacagaatggtgacttcaaagatggtaaaaataagacagacaagaaggatcactctaacatcggaaatgattcaaagaaaacagatggcacaaaacagcgttctcacggctcaccagccccaagcaccagctccacgtgtcgccttacgttgccagtcatcaagcctcctttgcgtcattttaaacgccctgcttacgcatctagctcctatgcaccttcagtctcaaagaaaactgatgagcatcctgcaaggtacaagatgctggatcagaggatcaaaatgaaaaagattcagaacatctcacataactggaacagaaaataggccgaggggaagaagagagggagtgaaggagggtctacctatctgcttctcagcacccactggccacagcaggacacacctccaagacccttggaggctgttggagcaggtactatcctggttgactccaccaaggtgaaatgaaagttgtatgtgattttcctctttgttgttcttgtatagacttttcaattgctgtatgtgggatcagcccagacgccagcaacaaactagcaagaggggtgtttttatggtataagtctctaaaagtctaaattggaccaaaattaaaatgacacaaacttaaaaaaaaataaaattcctctcattgccacttttttcaatctctaaaagttagttgcccccaaaagaatattggtttaataatcatcatatttaagaaatgcactgataaaaacatattttccaattttaaatacacctatttaaaatgtaaatacacttatttaaaattcaagtaaatatgtaactatcaaagtaaatgtattcaaaacagaagttgtgcttctgaatgtaaaaatattaaaaggaagagaagacggatgaattgttgtattcatggacatttcagaattcacgcttataaagcaaatccaagttaaaaaacaaaaaaagatttttgtgcctcatgaagattgtgcctcatgcccaataacctcatgtactttgaaggatgtgaaggtttgcaagagatgcatttggcttcattttcctctaatcttttacttctacccacagtagatgatacaaaaaatcttgccttaaagactgcaggtttaagagtcattgcaaaagatgtcagtttgattttgtggtcctaggccaagagggtgtaaaattctgagcctagtttaaattctttattttcagattgttctggactgaaaataaagaatttaaactaggctagagatgcctttaagttacatttcagatcctcttcacagcacgctacatatctaaagcccttgagatcctgattgttctcacagttgttggtggaatccatagttttataactcacctctttttatggtggcattgttagcccttctgtgtctctccctaggatttttaattcaggactaaaatcacagaagtagcaaggaaaggctcaagactagagatagctttcaatctcttcagaaatagcctggtgcagtgagaaaactaggtttgttttcaggccagtctgatcttcatcctattctgtctataactagttgcaggtccttgctcggatggcataattttttgatgcctccatttgcttaactagaaactaggattcatatacacactctgcactttgtattgaagattaatgataatgtaggttttggttgctgtggctgagcctggccagtaataggtgcataacagaagtagctaagagcatttcataatcaggatgaactctccaggacagccctacaaagaaggagctgtttgttcccggatggcctcgaccttccaggcttgattgtaaagagtttagtgtcctctccttctctcattccctgcagttcatttccaataaactgcagttattcaagttgagcaagttccggaatttagtgcctaccatgctattgggcagtttatttataatgtgctttatgatgatacttcagagaaatttaattgctatacaaaaagacgaatcattgtgacttttcgttaaggaggcgattgcaattctttgctccctgcctggtgtctgggttagaaggcccttctgcaggctggtagtgtctgttccacctggattaggttaactcaacaggtaattcctatctgtttatacacagatgctttagcgcttgctgtacaaagtcatttggctacacactgaggaggcccatgggagtagtagcctcctcaaataatgttccctacctatctgtcaataccttccatcttaggtattgagaatttaatgaggctgtgttttcttggctgtgcttcttgatgttggaagccatgttcctggggaacaaatctgtattcttttctcctaagatgtgagtttttttcaacctttgctaatattttaatggagcaaatgtacagatgttgagattttgcactgcttataaaatgcctaccatgttttttgcataatggattgtatagaaatgcagattatattcttacagcaaataaaaagatgcttttaacaga

SEQ ID NO: 15123 - DNA, 2952 bp, Homo sapiens
  source 1..2952: mol_type = unassigned DNA
gctcagccgccgcttttctctcccttctcactttctctcctccccacccagccctccttttcacctccaaaccctttagctgcgcgctgatcgcttctgtggctttgtttgggggtagggggagaatacgaatagacccgaggtgctttctcttggagctggagtccaatcccaatccctatctctatccctatccctgtgcttatccctgggcattagcccgggaccatggctggttcccgcagctgcctccggagcgcacctggggccatggtttgccgcgatcggagtccgctctaagtcggagtctgggggcgcagaagggggagcgcgccgagaaagtgccgggcaaacgcgcgccgcgcctggctgggcatcgcgagctgggcgaggagacggggaggggacagcccaaactatctcagcttcaccgccagtggtcacctacctgcagctatggagtcgccaaccaaggagattgaagaatttgagagcaactctctgaaatacctgcaaccggaacagatcgagaaaatctggcttcggctccgcgggctgaggaaatataagaaaacgtcccagagattacggtctttggtcaaacaattagagagaggggaagcttcagtggtagatcttaagaagaatttggaatatgcagccacagtgcttgaatctgtgtatattgatgaaacaaggagactcctggatacagaggatgagctcagtgacattcagtcagatgctgtgccttctgaggtccgagactggctggcctccaccttcacgcggcagatggggatgatgctcaggaggagcgacgagaagccccggttcaagagcatcgttcacgcagtgcaggctgggatatttgtggagagaatgtatagacggacatcaaacatggttggactgagctatccaccagctgttattgaggcattaaaggatgtggacaagtggtcctttgacgtcttttccctcaatgaggccagtggggatcatgcactgaaatttattttctatgaactactcacacgttatgatctgatcagccgtttcaagatccccatttctgcacttgtctcatttgtggaggccctggaagtgggatacagcaagcacaaaaatccttaccataacttaatgcacgctgccgatgttacacagacagtgcattacctcctctataagacaggagtggcgaactggctgacggagctggagatctttgctataatcttctcagctgccatccatgactacgagcataccggaaccaccaacaatttccacattcagactcggtctgatccagctattctgtataatgacagatctgtactggagaatcaccatttaagtgcagcttatcgccttctgcaagatgacgaggaaatgaatattttgattaacctctcaaaggatgactggagggagtttcgaaccttggtaattgaaatggtgatggccacagatatgtcttgtcacttccaacaaatcaaagcaatgaagactgctctgcagcagccagaagccattgaaaagccaaaagccttatcccttatgctgcatacagcagatattagccatccagcaaaagcatgggacctccatcatcgctggacaatgtcactcctggaggagttcttcagacagggtgacagagaagcagagctggggctgcctttttctcctctgtgtgaccgaaagtccactatggttgctcagtcacaagtaggtttcattgatttcatcgtggaacccaccttcactgtgcttacggacatgaccgagaagattgtgagtccattaatcgatgaaacctctcaaactggtgggacaggacagaggcgttcgagtttgaatagcatcagctcgtcagatgccaagcgatcaggtgtcaagacctctggttcagagggaagtgccccgatcaacaattctgtcatctccgttgactataagagctttaaagctacttggacggaagtggtgcacatcaatcgggagagatggagggccaaggtacccaaagaggagaaggccaagaaggaagcagaggaaaaggctcgcctggccgcagaggagcagcaaaaggaaatggaagccaaaagccaggctgaagaaggcgcatctggcaaagctgagaaaaagacgtctggagaaactaagaatcaagtcaatggaacacgggcaaacaaaagtgacaaccctcgtgggaaaaactccaaagccgagaagtcatcaggagaacagcaacagaatggtgacttcaaagatggtaaaaataagacagacaagaaggatcactctaacatcggaaatgattcaaagaaaacagatggcacaaaacagcgttctcacggctcaccagccccaagcaccagctccacgtgtcgccttacgttgccagtcatcaagcctcctttgcgtcattttaaacgccctgcttacgcatctagctcctatgcaccttcagtctcaaagaaaactgatgagcatcctgcaaggtacaagatgctggatcagaggatcaaaatgaaaaagattcagaacatctcacataactggaacagaaaataggccgaggggaagaagagagggagtgaaggagggtctacctatctgcttctcagcacccactggccacagcaggacacacctccaagacccttggaggctgttggagcaggtactatcctggttgactccaccaaggtgaaatgaaagttgtatgtgattttcctctttgttgttcttgtatagacttttcaattgctgtatgtgggatcagcccagacgccagcaacaaactagcaagaggggtgtttttatggtataagtctctaaaagtctaaattggaccaaaattaaaatgacacaaacttaaaaaaaaataaaattcctctcattgccacttttttcaatctctaaaagttagttgccccc

SEQ ID NO: 15124 - DNA, 2898 bp, Homo sapiens
  source 1..2898: mol_type = unassigned DNA
agcaagaaaacatcaagagtttttgagtgtggtgtgtggttcccttcgtccccatcagtcgcttcaatatttcaaaatggatccggttctgtggcgggtgcgagagtgaggctgtgggggacctccaggcccaacctccgcgaagcctcgcggcttctgcgtgccctggccccgggaggataaggatttcccttccctcctacttgcgcgcggagccgagctcttgttgaggtgagggttccggaagcccacgcagctccgcaggtcggtggtggccgcggctgccctgcgggggtgagtgtgcccggccggggtcggagcccagcgtgtgcccggcagacggcggtgcccgcgcgcccctccctccgcgcccgcggtgacagcccagacaccagcccgggcgctgacagacgacttttctcacttgtcagttttctcgcttgtcagcagagctgctgctatggagtcgccaaccaaggagattgaagaatttgagagcaactctctgaaatacctgcaaccggaacagatcgagaaaatctggcttcggctccgcgggctgaggaaatataagaaaacgtcccagagattacggtctttggtcaaacaattagagagaggggaagcttcagtggtagatcttaagaagaatttggaatatgcagccacagtgcttgaatctgtgtatattgatgaaacaaggagactcctggatacagaggatgagctcagtgacattcagtcagatgctgtgccttctgaggtccgagactggctggcctccaccttcacgcggcagatggggatgatgctcaggaggagcgacgagaagccccggttcaagagcatcgttcacgcagtgcaggctgggatatttgtggagagaatgtatagacggacatcaaacatggttggactgagctatccaccagctgttattgaggcattaaaggatgtggacaagtggtcctttgacgtcttttccctcaatgaggccagtggggatcatgcactgaaatttattttctatgaactactcacacgttatgatctgatcagccgtttcaagatccccatttctgcacttgtctcatttgtggaggccctggaagtgggatacagcaagcacaaaaatccttaccataacttaatgcacgctgccgatgttacacagacagtgcattacctcctctataagacaggagtggcgaactggctgacggagctggagatctttgctataatcttctcagctgccatccatgactacgagcataccggaaccaccaacaatttccacattcagactcggtctgatccagctattctgtataatgacagatctgtactggagaatcaccatttaagtgcagcttatcgccttctgcaagatgacgaggaaatgaatattttgattaacctctcaaaggatgactggagggagtttcgaaccttggtaattgaaatggtgatggccacagatatgtcttgtcacttccaacaaatcaaagcaatgaagactgctctgcagcagccagaagccattgaaaagccaaaagccttatcccttatgctgcatacagcagatattagccatccagcaaaagcatgggacctccatcatcgctggacaatgtcactcctggaggagttcttcagacagggtgacagagaagcagagctggggctgcctttttctcctctgtgtgaccgaaagtccactatggttgctcagtcacaagtaggtttcattgatttcatcgtggaacccaccttcactgtgcttacggacatgaccgagaagattgtgagtccattaatcgatgaaacctctcaaactggtgggacaggacagaggcgttcgagtttgaatagcatcagctcgtcagatgccaagcgatcaggtgtcaagacctctggttcagagggaagtgccccgatcaacaattctgtcatctccgttgactataagagctttaaagctacttggacggaagtggtgcacatcaatcgggagagatggagggccaaggtacccaaagaggagaaggccaagaaggaagcagaggaaaaggctcgcctggccgcagaggagcagcaaaaggaaatggaagccaaaagccaggctgaagaaggcgcatctggcaaagctgagaaaaagacgtctggagaaactaagaatcaagtcaatggaacacgggcaaacaaaagtgacaaccctcgtgggaaaaactccaaagccgagaagtcatcaggagaacagcaacagaatggtgacttcaaagatggtaaaaataagacagacaagaaggatcactctaacatcggaaatgattcaaagaaaacagatggcacaaaacagcgttctcacggctcaccagccccaagcaccagctccacgtgtcgccttacgttgccagtcatcaagcctcctttgcgtcattttaaacgccctgcttacgcatctagctcctatgcaccttcagtctcaaagaaaactgatgagcatcctgcaaggtacaagatgctggatcagaggatcaaaatgaaaaagattcagaacatctcacataactggaacagaaaataggccgaggggaagaagagagggagtgaaggagggtctacctatctgcttctcagcacccactggccacagcaggacacacctccaagacccttggaggctgttggagcaggtactatcctggttgactccaccaaggtgaaatgaaagttgtatgtgattttcctctttgttgttcttgtatagacttttcaattgctgtatgtgggatcagcccagacgccagcaacaaactagcaagaggggtgtttttatggtataagtctctaaaagtctaaattggaccaaaattaaaatgacacaaacttaaa

SEQ ID NO: 15125 - DNA, 8852 bp, Homo sapiens
  source 1..8852: mol_type = unassigned DNA
gtggtgtgtggttcccttcgtccccatcagtcgcttcaatatttcaaaatggatccggttctgtggcgggtgcgagagtgaggctgtgggggacctccaggcccaacctccgcgaagcctcgcggcttctgcgtgccctggccccgggaggataaggatttcccttccctcctacttgcgcgcggagccgagctcttgttgagctatggagtcgccaaccaaggagattgaagaatttgagagcaactctctgaaatacctgcaaccggaacagatcgagaaaatctggcttcggctccgcgggctgaggaaatataagaaaacgtcccagagattacggtctttggtcaaacaattagagagaggggaagcttcagtggtagatcttaagaagaatttggaatatgcagccacagtgcttgaatctgtgtatattgatgaaacaaggagactcctggatacagaggatgagctcagtgacattcagtcagatgctgtgccttctgaggtccgagactggctggcctccaccttcacgcggcagatggggatgatgctcaggaggagcgacgagaagccccggttcaagagcatcgttcacgcagtgcaggctgggatatttgtggagagaatgtatagacggacatcaaacatggttggactgagctatccaccagctgttattgaggcattaaaggatgtggacaagtggtcctttgacgtcttttccctcaatgaggccagtggggatcatgcactgaaatttattttctatgaactactcacacgttatgatctgatcagccgtttcaagatccccatttctgcacttgtctcatttgtggaggccctggaagtgggatacagcaagcacaaaaatccttaccataacttaatgcacgctgccgatgttacacagacagtgcattacctcctctataagacaggagtggcgaactggctgacggagctggagatctttgctataatcttctcagctgccatccatgactacgagcataccggaaccaccaacaatttccacattcagactcggtctgatccagctattctgtataatgacagatctgtactggagaatcaccatttaagtgcagcttatcgccttctgcaagatgacgaggaaatgaatattttgattaacctctcaaaggatgactggagggagtttcgaaccttggtaattgaaatggtgatggccacagatatgtcttgtcacttccaacaaatcaaagcaatgaagactgctctgcagcagccagaagccattgaaaagccaaaagccttatcccttatgctgcatacagcagatattagccatccagcaaaagcatgggacctccatcatcgctggacaatgtcactcctggaggagttcttcagacagggtgacagagaagcagagctggggctgcctttttctcctctgtgtgaccgaaagtccactatggttgctcagtcacaagtaggtttcattgatttcatcgtggaacccaccttcactgtgcttacggacatgaccgagaagattgtgagtccattaatcgatgaaacctctcaaactggtgggacaggacagaggcgttcgagtttgaatagcatcagctcgtcagatgccaagcgatcaggtgtcaagacctctggttcagagggaagtgccccgatcaacaattctgtcatctccgttgactataagagctttaaagctacttggacggaagtggtgcacatcaatcgggagagatggagggccaaggtacccaaagaggagaaggccaagaaggaagcagaggaaaaggctcgcctggccgcagaggagcagcaaaaggaaatggaagccaaaagccaggctgaagaaggcgcatctggcaaagctgagaaaaagacgtctggagaaactaagaatcaagtcaatggaacacgggcaaacaaaagtgacaaccctcgtgggaaaaactccaaagccgagaagtcatcaggagaacagcaacagaatggtgacttcaaagatggtaaaaataagacagacaagaaggatcactctaacatcggaaatgattcaaagaaaacagatgattcacaagagtaaaaaagacctcatagacaataaaagaggctgccagtgtcttgcatcattctagctgagcttcttcattctccttcttctccttcttccacaaagacccatatctggagaaggtgtacaactttcaaacacaagccccccaccccctgacccttggccttccctcacaccatctccttccaggggatgaatctttgggggttggtttgaggtcttagaactctgggggatattcccctgagcaaaacaaacaacgtgagatttttactcaaacagaaacaaaacatgaaggggcatcctcaaaatcctttgctaatgacctggctttcaaggcatctgtctggcctgatgagaatggacatcctggatatgctgggagaggcctgaaaaaagccacacacacagtaattgccattttatgactgtcaatgccgttactttaaatgttgtcatttttgcactggctactgatgatacagccatgctgacattcatcaccgcaaagatgatgattccagtctctggttcctttcctgagtcaggaacatttgttttctccaatttcctttcagacttaaaattgttcttatgctttttttcccacttctgtaatacagaattctgtttgttttctaaaaaagattattctataggaatctttatttgatggctaatttattttctctgtgcattcattagtataaacctgaatgttcagctggtgactgtactgttgagtgggaacccattgtttccactggtagcattgataactaagtggttactgaaatttttaccactggctggacatcttcttttggatatctgtggttttatttcatcactcttctttttattcagtaaagtgctaagggaattagtatcagggagatatggcagataattctttgcattttagtgagtttttaaaaatacaagatagaagtggattaatagcacgaataaaaaataagaatagtagatgtagcatggaaagagaataacattgcagcccccttgagaccaaattacaggtgggatctaagggagtgcaagtaaagtgggattttatgagtctaaatgatgtgatttagataaaagtgattcttaaaatgtggttattggtcacacaggaatctctgagtccttcccaagagtgaagcacatgaatatgctgatgatgaagtggggattagtaatagaaagagagctaggcaataggtttaagtgtattccccactacagatttaatttctacatgaaaaagcacgagaacagatatttaaacgtccttttattactaaggtgaaatattggcattttttcaggcagaaagaaagagactgtatgtggtcttcctggacctttgccttgccaaaatgttccccaacagaaagatctgaagaactttgtagtatcgaatgcacaacagcatgctgatatttgaacagatttcttctgtcagctttacattttgccttggagaaacacttagatttttctgttgtgctccctgtgttcataacaatgacctcaccacataatgtggccagaaattcaaatgacttcaggggcctagcaggtcaagtaaatgaataaagcaagccatgtaatatcacagtcattgtggtaaatggcaattcatagtgggcctttgtatcagcaagacaggaaggagcaatggggactgtgagaaattggagagggtgggtgctgtcaaaacagggtagttggtaggcagcaactgaatttgagctgtgtggggatgggggtcctagatacctaggatttgatataagctctctccaaatttttacatattgacaactaactcaaaaacttacaaacactgtgctaatcaaatgaaacatgcctgtgagctgcattcaatccatggggcattggtttgcaagctatgttcttagaggtggtatgattttgtattgaaattaaatataaccaagagtatgtcaatttttgaccttggaacctggaccttttacctcatttatattctgtatttttgtatgtggggctttttggccagtcaaaatagaaagtctacagcttccattttataatctaacaagcaacaagaaacaacatttgaaaaagaaacaggaatatagccattttttctagcaccaataaaaatggaaatgtttttcatttgctttaagtcattaatcagctgaaaaagaatagaaagagaatttcattccataaagaacttcacctaaaactctcagtgaagcaaaacaaaactccatgtaactcactcttagctttaaatctttaaaaagtgtttcgaagggatattgagtaaaaatgcagttatctattaaaaatacaaaatgctatattatatgatgctatgaattgatactggagctgataaaacattaaagtaattattccaaatcagtgctgactgcaaaagcaatatttccaaagctctagcttattttctgcggtcttttaattcccttgaaatagctttcttcaagttgagcagcaatttgggacaaacattattctattgcacagattatggcatcttactctggtttacacacacagagcaagggcttacacacctgaattaagaattaactagcatgtggggacagcaatagggatagtcctaccacagacgaaaccatgcgctctacacgtccctggataaaatgtgacaagttagcccttgaatttgggtccccatgtcaccaaatagctctatatttaagttgtgttaatgtggtacgtttcagtggcataatgacccattcttatcgaggcctttgttccatattttatttgtgccaatctttcttaggttatgagccctaatagtttatggcagcagacaagagactcatttctaacccattaaattcaaatggactttcttccactgtccatttcatttttggagctgttataaactaccgaaaacatttgacaggatcccattgtggatctgatacacttaaacagtaaaatgatatctaaacatctgaaagccaaagaataacctagtgcacgtgttcattcatttgtagaatttaagccattgtattatattttccacttggaaccatgcctttagatacaaaagtgtaaagtaaaaagcaacattatcatgggatgtgagacggtaatccaaaagttgaagaccaatttttgttatccatattttggaagtatggatactgtttattttaatatcacttctctcatgggtcacttttccttagataggtaggtaggtagatagatagatagatagatgatagatagatagatagatagatagatagatagatagatagatagatagatagatagatagataatataatatattttcttctttcttaacctatgagcagagactttgatgatggaaattactttgtaacattccccatggagcctaggaaaaacaatagaaaaaaagcatgaaatctttttctcatagtgaaatagagaagattctaagattggaaatctgtgtatgtggtgttctatcccaaataaagagaatttagggaattcaggcaacaatttttttcctaattggaaactttgttctgatcctgagatgcccacacaccccacaggagacgcagtgctggcccaccacagtgtttggaacacggtcagcattcaggaaacacattcaaaatcgtctaactgaattccactatccacttgtgaatgcaaacaaaattcaaatttccctgaaaatttattcaacttctatatgccaagcacactgctaaaggcttatcttctaagtatatgcaggcataccctactcacacaaatagcttattaccagagataggaaattgcaggtaatttgggagaaattgtcatagccaaatttatggaaaaaataaaataaaaacttctctatggcctcttgatttaagaaaaaaacagaacaatacaaaaaaaaaaaagcactaaaacaggatttatctgagaatgtctttccaaaagggaagatgacaccaatctatataaaacgtcagtggatttactgagaatccgagtggaaacttttaaaaccttaaacagactctcctacagcaaatagattctctatgtgcagcatgaggaatcactgcatagttctgctccaccaataatatgattggtacagcaccaaaccatggcaaagttagatgttaaagaacataatgttgcaataatgatgttatattggatcttatgcatgaacaaatggaaagtaataatttatcaactgtgatccatgattaaaggcctcattatcactaagaaaatgaacttaatgaaaaaaattataatgagcaatgacaatattcctataaaacctccctctgggtatcaagagacatattacctgccaaggccagattttactttttaaggtttcctctctctcaccaaagacactagtgggcacagaggtgacactagagttagaatgttaccagagtcatttgcattagacagtttatctgatcatgaacatgttcccagggagattagaaaaatgggaagcaggcctctaaagatcctccttggacatttgtaaaaaggctggctgcttctccaggaatgtctgaattaagcaagaattgtgccactgaaatagcttcttgtttttatattaaacaaggaacgattgtgcagtggatgacctggactgaaagatgtatgatggtcaagtttaaacatattaattcctgattgttttcttaaatacccaccctagtcattttttggaaaatattgccagacatatttgacatgaattcatgtttattctggcttctgttcccaagcagaagtggattaaccctggcaatggctggcttcactaactgtacttgcacccagcctgggctgccatctgctcagccaggagaagcagggagtggggtgtgggccctttaagttcgctcagggcacactcattcagtctcccctgaggagaccttgtccccctttgtggggtgaatgctggctgttgcaggccagaggcagtgccaactggagactcatcctctcagctttggtcagcttcagccacgtattcttcatgagtgctggcttctgaacctgcaggatcatttctcagtcagtttatggtgcagggtaattcatttaaaataaagcccattaaaaccccatggctatagaatgggttttaaatagattgtcctggagacacatcattgtatagtctttgcttccctctcatgacctatcttggagtagaatttgtgtactactgtccttgtctttgagtgggtatatgtgtgatggtacagaaatacagtcacatattatattaatatatatagatggataggaaaaacctacagccataggtattgtccaataactgattctagaggtagaactatagagtatacatttccttttttcttgctttgatgatatttttatacaattttatatgctataaaattttcaaaaatatatttgctattttcatttgtagagcttggttaggtttttatcagctcttgtgcccactgtacaaccagattcccctcatctaatttaaatgtcttccctttttcaaactctcctttatgttttcctttttttttcctcccatttttctacccttcacaaattccttcttttgcttctgtccaggtaacccattctgcttgcagtatcattttagcacgtacaaacacaaaataatgggaaaaataaaagcaccttgttccatgcaattcgtatgggaaagttttgggtgtcaaaggtcgctggggatagatggggaggcagaaatagcttgggaaaaggaagcaggaaaaaaggaaatctttatgggaaatcaattacccaaagcaaggtgagtcacctagaggtgaatatgatgttgttattgtcctcccttagtgtacagcacagtttttgctctcacagggtttttctctttaggatgcgtagcaccctatgcattaaatacatagcatcctaaagacaccctactcaccttgagtctgtaggctctttcctgatgagggcactggccatatatgaatggaaaactcaactcatctcctcagctttagatgttgctgctgttcagctggatttgtgagaaatatctggattactatcaagaacatttagcaagactcaaaagagagaggcaagcagaaccaaaacccaaacctcaaccaatgactagctgaataaacaattctttggaggaataaggaaggtatttctggatgtattctgagaatgctcttccaaaagggaagatggtaataatggacttgttttgatttcatggttgtgatagaatgtacttccatgatgtgaaatacacttctggcagataaaatgcaggttgtaatttgcatttgtacatcacagggtaaaagaatggccatccattctgaggaagagtgttctgttctctaagatgctgcttaaccaatgttatccaaatgccatagcatcatatctccaaatacaagattaaatcataaggattcatgtaaaacagagtatactgagctgttctcagaaaaattaatgatgtgtttattgtaaatctttattgcacagatgagcctgacagtccttcaatgtataattttcccccagcatctagtaatgcataagtacttgtatgttcttctgattaccaaataaaaacaatgagttaacctcttaattggaattggaaaaatgaaaa

SEQ ID NO: 15126 - DNA, 787 bp, Homo sapiens
  source 1..787: mol_type = unassigned DNA
gaatagaagtaatacctataaagcactgagaaagcagcctgcacaaggttggtacctaagtagtagctgttatgtatgcaaattggaaaagaaggttaaaggtttgaatacgaagttaaggtggtggtgaaaatagcaacctgtaactaatattttataacattcttagcagctcagtaatgctgttgactggttgactggtgctaattagaaatctagttcgcatctgttttctgttggtggtggctgttttgtttgttgctctttttttccagatgaccctgatttcaagaaaggctgtcctccgtggggcacttgaacatgtattgttagtaaatgcactggaaatgggtcttggttttgttaaccaacctgatttacaaaactagaggagaaggccaagaaggaagcagaggaaaaggctcgcctggccgcagaggagcagcaaaaggaaatggaagccaaaagccaggctgaagaaggcgcatctggcaaagctgagaaaaagacgtctggagaaactaagaatcaagtcaatggaacacgggcaaacaaaagtgacaaccctcgtgggaaaaactccaaagccgagaagtcatcaggagaacagcaacagaatggtgacttcaaagatggtaaaaataagacagacaagaaggatcactctaacatcggaaatgattcaaagaaaacagatgattcacaagagtaaaaaagacctcatagacaataaaagaggctgccagtgtcttgcatcattctagctgagcttcttcattctccttct

SEQ ID NO: 15127 - DNA, 2420 bp, Homo sapiens
  source 1..2420: mol_type = unassigned DNA
cggctcccgctttgctcagccgccgcttttctctcccttctcactttctctcctccccacccagccctccttttcacctccaaaccctttagctgcgcgctgatcgcttctgtggctttgtttgggggtagggggagaatacgaatagacccgaggtgctttctcttggagctggagtccaatcccaatccctatctctatccctatccctgtgcttatccctgggcattagcccgggaccatggctggttcccgcagctgcctccggagcgcacctggggccatggtttgccgcgatcggagtccgctctaagtcggagtctgggggcgcagaagggggagcgcgccgagaaagtgccgggcaaacgcgcgccgcgcctggctgggcatcgcgagctgggcgaggagacggggaggggacagcccaaactatctcagcttcaccgccagtggtcacctacctgcagctatggagtcgccaaccaaggagattgaagaatttgagagcaactctctgaaatacctgcaaccggaacagatcgagaaaatctggcttcggctccgcgggctgaggaaatataagaaaacgtcccagagattacggtctttggtcaaacaattagagagaggggaagcttcagtggtagatcttaagaagaatttggaatatgcagccacagtgcttgaatctgtgtatattgatgaaacaaggagactcctggatacagaggatgagctcagtgacattcagtcagatgctgtgccttctgaggtccgagactggctggcctccaccttcacgcggcagatggggatgatgctcaggaggagcgacgagaagccccggttcaagagcatcgttcacgcagtgcaggctgggatatttgtggagagaatgtatagacggacatcaaacatggttggactgagctatccaccagctgttattgaggcattaaaggatgtggacaagtggtcctttgacgtcttttccctcaatgaggccagtggggatcatgcactgaaatttattttctatgaactactcacacgttatgatctgatcagccgtttcaagatccccatttctgcacttgtctcatttgtggaggccctggaagtgggatacagcaagcacaaaaatccttaccataacttaatgcacgctgccgatgttacacagacagtgcattacctcctctataagacaggagtggcgaactggctgacggagctggagatctttgctataatcttctcagctgccatccatgactacgagcataccggaaccaccaacaatttccacattcagactcggtctgatccagctattctgtataatgacagatctgtactggagaatcaccatttaagtgcagcttatcgccttctgcaagatgacgaggaaatgaatattttgattaacctctcaaaggatgactggagggagtttcgaaccttggtaattgaaatggtgatggccacagatatgtcttgtcacttccaacaaatcaaagcaatgaagactgctctgcagcagccagaagccattgaaaagccaaaagccttatcccttatgctgcatacagcagatattagccatccagcaaaagcatgggacctccatcatcgctggacaatgtcactcctggaggagttcttcagacagggtgacagagaagcagagctggggctgcctttttctcctctgtgtgaccgaaagtccactatggttgctcagtcacaagtaggtttcattgatttcatcgtggaacccaccttcactgtgcttacggacatgaccgagaagattgtgagtccattaatcgatgaaacctctcaaactggtgggacaggacagaggcgttcgagtttgaatagcatcagctcgtcagatgccaagcgatcaggtgtcaagacctctggttcagagggaagtgccccgatcaacaattctgtcatctccgttgactataagagctttaaagctacttggacggaagtggtgcacatcaatcgggagagatggagggccaaggtacccaaagaggagaaggccaagaaggaagcagaggaaaaggctcgcctggccgcagaggagcagcaaaaggaaatggaagccaaaagccaggctgaagaaggcgcatctggcaaagctgagaaaaagacgtctggagaaactaagaatcaagtcaatggaacacgggcaaacaaaagtgacaaccctcgtgggaaaaactccaaagccgagaagtcatcaggagaacagcaacagaatggtgacttcaaagatggtaaaaataagacagacaagaaggatcactctaacatcggaaatgattcaaagaaaacagatgattcacaagagtaaaaaagacctcatagacaataaaagaggctgccagtgtcttgcatca

SEQ ID NO: 15128 - DNA, 495 bp, Homo sapiens
  source 1..495: mol_type = unassigned DNA
cttcacaggaaaataacttatttctgtctctcagaaaacttgtgtttggcaatagcttaccagctgcagggtagaaaggcagcactgtgggtgtgttgtcagcaagctgaagactttgagaaagaaacagattatctgattgctctgtaatctcctttcagaactggctgacggagctggagatctttgctataatcttctcagctgccatccatgactacgagcataccggaaccaccaacaatttccacattcagactcggtctgatccagctattctgtataatgacagatctgtactggagaatcaccatttaagtgcagcttatcgccttctgcaagatgacgaggaaatgaatattttgattaacctctcaaaggatgactggaggtaaggatgagaaaagagagagatttgtaggccagggaaggaactttgaagttggatgaagtatgctgtttttgagaaaagaacaccttgcttaaaatgttgat

SEQ ID NO: 15129 - DNA, 539 bp, Homo sapiens
  source 1..539: mol_type = unassigned DNA
ctttgcacctaacatgcaggtgaggcagagaggagcagctgctttgaacagagagctccaacttcagatttaatctcagtgtgctgattctgtttcttgtgttcaggagactcctggatacagaggatgagctcagtgacattcagtcagatgctgtgccttctgaggtccgagactggctggcctccaccttcacgcggcagatggggatgatgctcaggaggagcgacgagaagccccggttcaagagcatcgttcacgcagtgcaggctgggatatttgtggagagaatgtatagacggacatcaaacatggttggactgagctatccaccagctgttattgaggcattaaaggatgtggacaagtggtcctttgacgtcttttccctcaatgaggccagtggggatcatgcactgaaatttattttctatgaactactcacacgttatgatctgatcagccgtttcaagatccccatttctgcacttgtctcatttgtggaggccctggaagtgggatacagcaagcacaaaaat

SEQ ID NO: 15130 - DNA, 582 bp, Homo sapiens
  source 1..582: mol_type = unassigned DNA
gagaggcagaatgtccacggagccagaagtcaggaggcctgcactgtcttgctgccctgccactagctggaggagagcagaccagccggagggaagctggcagacttcttggaccttcaccacctcatttctaaactggagattacggtctttggtcaaacaattagagagaggggaagcttcagtggtagatcttaagaagaatttggaatatgcagccacagtgcttgaatctgtgtatattgatgaaacaaggagactcctggatacagaggatgagctcagtgacattcagtcagatgctgtgccttctgaggtccgagactggctggcctccaccttcacgcggcagatggggatgatgctcaggaggagcgacgagaagccccggttcaagagcatcgttcacgcagtgcaggctgggatatttgtggagagaatgtatagacggacatcaaacatggttggactgagctatccaccagctgttattgaggcattaaaggatgtggacaagtggtcctttgacgtcttttccctcaatgaggccagtggggatcatgcactgaaatttattttcta

SEQ ID NO: 15131 - DNA, 605 bp, Homo sapiens
  source 1..605: mol_type = unassigned DNA
aagaaaacatcaagagtttttgagtgtggtgtgtggttcccttcgtccccatcagtcgcttcaatatttcaaaatggatccggttctgtggcgggtgcgagagtgaggctgtgggggacctccaggcccaacctccgcgaagcctcgcggcttctgcgtgccctggccccgggaggataaggatttcccttccctcctacttgcgcgcggagccgagctcttgttgagcccgggaccatggctggttcccgcagctgcctccggagcgcacctggggccatggtttgccgcgatcggagtccgctctaagtcggagtctgggggcgcagaagggggagcgcgccgagaaagtgccgggcaaacgcgcgccgcgcctggctgggcatcgcgagctgggcgaggagacggggaggggacagcccaaactatctcagcttcaccgccagtggtcacctacctgcagctatggagtcgccaaccaaggagattgaagaatttgagagcaactctctgaaatacctgcaaccggaacagatcgagaaaatctggcttcggctccgcgggctgaggaaatataagaaaacgtcccagagattacggtcttt

SEQ ID NO: 15132 - DNA, 540 bp, Homo sapiens
  source 1..540: mol_type = unassigned DNA
aatatttcaaaatggatccggttctgtggcgggtgcgagagtgaggctgtgggggacctccaggcccaacctccgcgaagcctcgcggcttctgcgtgccctggccccgggaggataaggatttcccttccctcctacttgcgcgcggagccgagctcttgttgaggtgagggttccggaagcccacgcagctccgcaggtcggtggtggccgcggctgccctgcgggggtgagtgtgcccggccggggtcggagcccagcgtgtgcccggcagacggcggtgcccgcgcgcccctccctccgcgcccgcggtgacagcccagacaccagcccgggcgctgacagacgacttttctcacttgtcagttttctcgcttgtcagcagagctgctgcccgggaccatggctggttcccgcagctgcctccggagcgcacctggggccatggtttgccgcgatcggagtccgctctaagtcggagtctgggggcgcagaagggggagcgcgccgagaaagtgccgggcaaacgcgcgccgcgcc

SEQ ID NO: 15133 - DNA, 7576 bp, Homo sapiens
  source 1..7576: mol_type = unassigned DNA
gggggccactgggaattcagtgaagagggcaccctataccatggcagtgcccggcgacgctgcacgagtcagggacaagcccgtccacagtggggtgagtcaagcccccacggcgggccgggactgccaccatcgtgcggaccccgcatcgccgcgggactcgggctgccgtggctgctggggagacctggtgctgcagccgctccggagctctcggaaactttcctccgcgctgtgcgcgggctccctgtcctttctgctggcgctgctggtgaggctggtccgcggggaggtcggctgtgacctggagcagtgtaaggaggcggcggcggcggaggaggaggaagcagccccgggagcagaagggggcgtcttcccggggcctcggggaggtgctcccgggggcggtgcgcggctcagcccctggctgcagccctcggcgctgctcttcagtctcctgtgtgccttcttctggatgggcttgtacctcctgcgcgccggggtgcgcctgcctctggctgtcgcgctgctggccgcctgctgcgggggggaagcgctcgtccagattgggctgggcgtcggggaggatcacttactctcactccccgccgcgggggtggtgctcagctgcttggccgccgcgacatggctggtgctgaggctgaggctgggcgtcctcatgatcgccttgactagcgcggtcaggaccgtgtccctcatttccttagagaggttcaaggtcgcctggagaccttacctggcgtacctggccggcgtgctggggatcctcttggccaggtacgtggaacaaatcttgccgcagtccgcggaggcggctccaagggagcatttggggtcccagctgattgctgggaccaaggaagatatcccggtgtttaagaggaggaggcggtccagctccgtcgtgtccgccgagatgtccggctgcagcagcaagtcccatcggaggacctccctgccctgtataccgagggaacagctcatggggcattcagaatgggaccacaaacgagggccaagaggatcacagtcttcaggaaccagtattactgtggacatcgccgtcatgggcgaggcccacggcctcattaccgacctcctggcagacccttctcttccaccaaacgtgtgcacatccttgagagccgtgagcaacttgctcagcacacagctcaccttccaggccattcacaagcccagagtgaatcccgtcacttcgctcagtgaaaactatacctgttctgactctgaagagagctctgaaaaagacaagcttgctattccaaagcgcctgagaaggagtttgcctcctggcttgttgagacgagtttcttccacttggaccaccaccacctcggccacaggtctacccaccttggagcctgcaccagtacggagagaccgcagcaccagcatcaaactgcaggaagcaccttcatccagtcctgattcttggaataatccagtgatgatgaccctcaccaaaagcagatcctttacttcatcctatgctatttctgcagctaaccatgtaaaggctaaaaagcaaagtcgaccaggtgccctcgctaaaatttcacctctttcatcgccctgctcctcacctctccaagggactcctgccagcagcctggtcagcaaaatttctgcagtgcagtttccagaatctgctgacacaactgccaaacaaagcctaggttctcacagggccttaacttacactcagagtgccccagacctatcccctcaaatcctgactccacctgttatatgtagcagctgtggcagaccatattcccaagggaatcctgctgatgagcccctggagagaagtggggtagccactcggacaccaagtagaacagatgacactgctcaagttacctctgattatgaaaccaataacaacagtgacagcagtgacattgtacagaatgaagatgaaacagagtgcctgagagagcctctgaggaaagcatcggcttgcagcacctatgctcctgagaccatgatgtttctggacaaaccaattcttgctcccgaacctcttgtcatggataacctggactcaattatggagcagctaaatacttggaattttccaatttttgatttagtggaaaatataggaagaaaatgtggccgtattcttagtcaggtatcttacagactttttgaagacatgggcctctttgaagcttttaaaattccaattagggaatttatgaattattttcatgctttggagattggatatagggatattccttatcataacagaatccatgccactgatgttttacatgctgtttggtatcttactacacagcctattccaggcctctcaactgtgattaatgatcatggttcaaccagtgattcagattctgacagtggatttacacatggacatatgggatatgtattctcaaaaacgtataatgtgacagatgataaatacggatgtctgtctgggaatatccctgccttggagttgatggcgctgtatgtggctgcagccatgcacgattatgatcatccaggaaggactaatgctttcctggttgcaactagtgctcctcaggcggtgctatataacgatcgttcagttttggagaatcatcacgcagctgctgcatggaatcttttcatgtcccggccagagtataacttcttaattaaccttgaccatgtggaatttaagcatttccgtttccttgtcattgaagcaattttggccactgacctgaagaaacactttgacttcgtagccaaatttaatggcaaggtaaatgatgatgttggaatagattggaccaatgaaaatgatcgtctactggtttgtcaaatgtgtataaagttggctgatatcaatggtccagctaaatgtaaagaactccatcttcagtggacagatggtattgtcaatgaattttatgaacagggtgatgaagaggccagccttggattacccataagccccttcatggatcgttctgctcctcagctggccaaccttcaggaatccttcatctctcacattgtggggcctctgtgcaactcctatgattcagcaggactaatgcctggaaaatgggtggaagacagcgatgagtcaggagatactgatgacccagaagaagaggaggaagaagcaccagcaccaaatgaagaggaaacctgtgaaaataatgaatctccaaaaaagaagactttcaaaaggagaaaaatctactgccaaataactcagcacctcttacagaaccacaagatgtggaagaaagtcattgaagaggagcaacggttggcaggcatagaaaatcaatccctggaccagacccctcagtcgcactcttcagaacagatccaggctatcaaggaagaagaagaagagaaagggaaaccaagaggcgaggagataccaacccaaaagccagaccagtgacaatggatagaatgggctgtgtttccaaacagattgacttgtcaaagactctcttcaagccagcacaacatttagacacaacactgtagaaatttgagatgggcaaatggctattgcattttgggattcttcgcattttgtgtgtatatttttacagtgaggtacattgttaaaaactttttgctcaaagaagctttcacattgcaacaccagcttctaaggattttttaaggagggaatatatatgtgtgtgtgtatataagctcccacatagatacatgtaaaacatattcacacccatgcacgcacacacatacacactgaaggccacgattgctggctccacaatttagtaacatttatattaagatatatatatagtggtcactgtgatataataaatcataaaggaaaccaaatcacaaaggagatggtgtggcttagcaaggaaacagtgcaggaaatgtaggttaccaactaagcagcttttgctcttagtactgagggatgaaagttccagagcattatttgaattctgatacatcctgccaacactgtgtgtgtgtgtgtgtgtgtgtgtgtgtgtgtgtgtgtgtgtgaaagagagacagaagggaatggtttgagagggtgcttgtgtgcatgtgtgtgcatatgtaaagagatttttgtggtttaagtaactcagaatagctgtagcaaatgactgaatacatgtgaacaaacagaaggaagttcactctggagtgtctttgggaggcagccattccaaatgccctcctccatttagcttcaataaagggccttttgctgatggagggcactcaagggctgggtgagagggccacgtgtttggtattacattactgctatgcaccacttgaaggagctctatcaccagcctcaaacccgaaagactgaggcattttccagtctacttgcctaatgaatgtataggaactgtctatgagtatggatgtcactcaactaagatcaaatcaccatttaaggggatggcattctttatacctaaacacctaagagctgaagtcaggtcttttaatcaggttagaattctaaatgatgccagagaaggcttgggaaattgtacttcagcgtgatagcctgtgtcttcttaatttgctgcaaaatatgtggtagagaaagaaaaggaaacagaaaaatcactctgggttatatagcaagagatgaaggagaatatttcaacacagggtttttgtgttgacataggaaaagcctgattcttggcaactgttgtagtttgtctttcaggggtgaaggtcccactgacaacccctgttgtggtgttccacacgctgtttgttggggtagcttccatcggcagtctggcccattgtcagtcatgcttcttctggccggggagattatagagagattgtttgaagattgggttattattgaaagtctttttttttgtttgttttgttttggtttgtttgtttatctacacttgtttatgctgtgagccaaacctctatttaaaaagttgatactcactttcaatattttatttcatattattatatatgtcatgatagttatcttgatgtaaatatgaagatttttttgtttctgtagatagtaaactctttttttaaaaaaggaaaagggaaacatttttataaagttatattttaatcaccatttttatacattgtagttctctccaagcccagtaagagaatgatgattcatttgcatggaggtcgatggacaaccaatcatctaccttttctaatttaaatgataatctgatatagttttattgccagttaaatgaggatgctgcaaagcatgttttttcactagtaacttttgctaactgaatgaattctgggtccatatctcccagatgaaaaactgttaaccaataccatattttatagttggtgtccatttctttccaacactgtttgttatgattcttccttgagtacttatatacagacctgctcattatctaaacaatcttaccttctaagtaaaccttgattgtgatttccagtttttattttctctgacgtagtagaaaggaatgtttacattaaaaatacttttgtttctcataaatggatattgtactcccccctttcaaagcattattttacaataattcatggcattttaaaaaataaggcaaagataatacgacaaaaaatatacatggtttcaaggcaaattctccaataagttggaaaatgtaaaaaggatcaagtggatgcagcctctacctaaataattaaaatatatttcagtatatttctgaattaacaccaggtcttcattatttagaacttactaaattgttttcattttcttagttttacctgtgtatctccatgtttgcaaaaattactataagtcaaattttgccagtgaatttaactatttttctttccttgcaattaaggggaaaaaagcatttatcttatcttctcataccccttgcatctaagtacttagcaaagtcaatattttcccattttccaaatgcgtccatctctaacataaatattaattgaacatagagctatgtttggagtgagtggactggcaggacagttggaagtccatcacagtctattgacagtttcatcaaagctgtatagtccaactagtggggcagcttggctactatggtggaagtctcagcaaactgcctggttttgtttgtttgttttgttttaaggtacaggaaataagaggaataatagtggccaaagcaattagaacatcttcattccagaactgtgttcagcaatccaggcagattgatacatttttctttaaaaataaattgctattacagctagacgtcaattgggataaataaagggatgaagatccactaagtttgtgactttcatacacacccagtacatctcaaaggatgctaagggacattttctgccagtagagttctccccctttttggtgacagcaatattattatgttcacatctaactccagagcttacttcctgtggtgccaatgtatttgttgcaatttactacatttttatatgagcctatttataggtgccattaaactcaggtctttcaaatgaaagagtttctagcccacttagggaaaaagataattgtttagaaaaccataaaatcaatggtaggaaaagttggaactggttacctggatgccatggttctctgttaaataaagtaagagaccaggtgtattctgagtgtcatcagtgttattttcagcatgctaataaatgtctttccggttatatatctatctaaattaacctttaaaatattggtttccttgataaaagcaccacttttgcttttgttagctgtaatattttttgtcatttagataagacctggtttggctctcaataaaagatgaagacagtagctctgtacagggatatatctatattagtcttcatctgatgaatgaagaaattttctcatattatgttcaagaaagtatttacttcctaaaaatagaattcccgattctgtctattttggttgaataccagaacaaatctttccgttgcaatcccagtaaaacgaaagaaaaggaatatcttacagactgttcatattagatgtatgtagactgttaatttgcaatttccccatatttcctgcctatcttacccagataactttctttgaaggtaaaagctgtgcaaaaggcatgagactcaggcctactctttgtttaaatgatggaaaaatataaattattttctaagtaataaaagtataaaaattatcattataaataaagtctaaagtttgaaattattaatttataaaagtgaactaattgtgtgattatcaaatcctgattaatgagaagtgaataatctaaaaatcatttatattctactgtgggaggtattcttggtgcttccatgtcagtatcgggctctccattgtcctcatcatttatagtacttctaaaataataatggaaacctcaataagggtcttgtcctcttctgtcatcctaaccctgattctagtttaatgcctttcctgacttatatgccatttgtaaataaacttcctttcaaactgttagaa

SEQ ID NO: 15134 - DNA, 685 bp, Homo sapiens
  source 1..685: mol_type = unassigned DNA
gaagatatcccggtgtttaagaggaggaggcggtccagctccgtcgtgtccgccgagatgtccggctgcagcagcaagtcccatcggaggacctccctgccctgtataccgagggaacagctcatggggcattcagaatgggaccacaaacgagggccaagaggatcacaggtaagtttcttttccttttctttttcacgtttcgtttcgtaacactttcagccacgggttttctaaaactcaagagataataaaatgtggagcgaggaagaggcaaaataaccatgccatttgtttttatttaagttaactataattaaagtctggatttcaaatcccaaaggcagatgccaggatattccttctaagagctttctggtatcccagattggttgtgtttatatgaatatagattttatattcatcttgtctcggcagaatacattttgatcagcaacccactctctttattcatttcctttgacaatttttccgtgtattttcttttttcttcagcttcctgtttttggttaaatattttgaaatataatcagactaaactctgaactaattacaagattttgtctctaaattaactctcttcatctgagggaaacagaaagatgaaaggacctattatttttgaaaagaaacaaattctaagtctttctatattaccagagtg

SEQ ID NO: 15135 - DNA, 2969 bp, Homo sapiens
  source 1..2969: mol_type = unassigned DNA
atttgactctccaatagtgattgccacccataagttgttcaggaaatgttgaatcaatgaatgagagtggggcataaaatgggaaatttgagcacacagaactttcatttaacctacttcactatttgactatggtgtggccttgcttttaattggaggatagctggagttgcaatcagtattcatgaaagcatgtttttaaaaaaatgagaatcagtctaacagaatctgaactttaaagaacatctcattactgattatacatggtgacgatattttccaaatcgtggagcttctactgggaaaagtcttcaggaaccagtattactgtggacatcgccgtcatgggcgaggcccacggcctcattaccgacctcctggcagacccttctcttccaccaaacgtgtgcacatccttgagagccgtgagcaacttgctcagcacacagctcaccttccaggccattcacaagcccagagtgaatcccgtcacttcgctcagtgaaaactatacctgttctgactctgaagagagctctgaaaaagacaagcttgctattccaaagcgcctgagaaggagtttgcctcctggcttgttgagacgagtttcttccacttggaccaccaccacctcggccacaggtctacccaccttggagcctgcaccagtacggagagaccgcagcaccagcatcaaactgcaggaagcaccttcatccagtcctgattcttggaataatccagtgatgatgaccctcaccaaaagcagatcctttacttcatcctatgctatttctgcagctaaccatgtaaaggctaaaaagcaaagtcgaccaggtgccctcgctaaaatttcacctctttcatcgccctgctcctcacctctccaagggactcctgccagcagcctggtcagcaaaatttctgcagtgcagtttccagaatctgctgacacaactgccaaacaaagcctaggttctcacagggccttaacttacactcagagtgccccagacctatcccctcaaatcctgactccacctgttatatgtagcagctgtggcagaccatattcccaagggaatcctgctgatgagcccctggagagaagtggggtagccactcggacaccaagtagaacagatgacactgctcaagttacctctgattatgaaaccaataacaacagtgacagcagtgacattgtacagaatgaagatgaaacagagtgcctgagagagcctctgaggaaagcatcggcttgcagcacctatgctcctgagaccatgatgtttctggacaaaccaattcttgctcccgaacctcttgtcatggataacctggactcaattatggagcagctaaatacttggaattttccaatttttgatttagtggaaaatataggaagaaaatgtggccgtattcttagtcaggtatcttacagactttttgaagacatgggcctctttgaagcttttaaaattccaattagggaatttatgaattattttcatgctttggagattggatatagggatattccttatcataacagaatccatgccactgatgttttacatgctgtttggtatcttactacacagcctattccaggcctctcaactgtgattaatgatcatggttcaaccagtgattcagattctgacagtggatttacacatggacatatgggatatgtattctcaaaaacgtataatgtgacagatgataaatacggatgtctgtctgggaatatccctgccttggagttgatggcgctgtatgtggctgcagccatgcacgattatgatcatccaggaaggactaatgctttcctggttgcaactagtgctcctcaggcggtgctatataacgatcgttcagttttggagaatcatcacgcagctgctgcatggaatcttttcatgtcccggccagagtataacttcttaattaaccttgaccatgtggaatttaagcatttccgtttccttgtcattgaagcaattttggccactgacctgaagaaacactttgacttcgtagccaaatttaatggcaaggtaaatgatgatgttggaatagattggaccaatgaaaatgatcgtctactggtttgtcaaatgtgtataaagttggctgatatcaatggtccagctaaatgtaaagaactccatcttcagtggacagatggtattgtcaatgaattttatgaacagggtgatgaagaggccagccttggattacccataagccccttcatggatcgttctgctcctcagctggccaaccttcaggaatccttcatctctcacattgtggggcctctgtgcaactcctatgattcagcaggactaatgcctggaaaatgggtggaagacagcgatgagtcaggagatactgatgacccagaagaagaggaggaagaagcaccagcaccaaatgaagaggaaacctgtgaaaataatgaatctccaaaaaagaagactttcaaaaggagaaaaatctactgccaaataactcagcacctcttacagaaccacaagatgtggaagaaagtcattgaagaggagcaacggttggcaggcatagaaaatcaatccctggaccagacccctcagtcgcactcttcagaacagatccaggctatcaaggaagaagaagaagagaaagggaaaccaagaggcgaggagataccaacccaaaagccagaccagtgacaatggatagaatgggctgtgtttccaaacagattgacttgtcaaagactctcttcaagccagcacaacatttagacacaacactgtagaaatttgagatgggcaaatggctattgcattttgggattcttcgcattttgtgtgtatatttttacagtgaggtacattgttaaaaactttttgctcaaagaagctttcacattgcaacaccagcttctaaggattttttaaggagggaatatatat

SEQ ID NO: 15136 - DNA, 6076 bp, Homo sapiens
  source 1..6076: mol_type = unassigned DNA
gctcgcgcgcccaacggaccaggctggggccgtgaggtaactgttgcagccagcggaggtgggaggcgacactgagtctccagtcccgagaggtgcccgagggaaaaggaggcggcagctaaactggtcctggagagaagccccttccgcccctctcctcagccagcatgtcccggactccgccgctcctcagtccgcgcggtggggaccccgggccgtggcggccggcgcagccctgacgggttgcgaaccagggggcgccccgaacgcgggggttggggtctgggagcgcgagcggccgctacggtacgagcggggtgtgctgagtcccgtggccacccccggccccagccatgaggagggacgagcgagacgccaaagccatgcggtccctgcagccgccggatggggccggctcgccccccgagagtctgaggaacggctacgtgaagagctgcgtgagccccttgcggcaggaccctccgcgcggcttcttcttccacctctgccgcttctgcaacgtggagctgcggccgccgccggcctctccccagcagccgcggcgctgctcccccttctgccgggcgcgcctctcgctgggcgccctggctgcctttgtcctcgccctgctgctgggcgcggaacccgagagctgggctgccggggccgcctggctgcggacgctgctgagcgtgtgttcgcacagcttgagccccctcttcagcatcgcctgtgccttcttcttcctcacctgcttcctcacccggaccaagcggggacccggcccgggccggagctgcggctcctggtggctgctggcgctgcccgcctgctgttacctgggggacttcttggtgtggcagtggtggtcttggccttggggggatggcgacgcagggtccgcggccccgcacacgcccccggaggcggcagcgggcaggttgctgctggtgctgagctgcgtagggctgctgctgacgctcgcgcacccgctgcggctccggcactgcgttctggtgctgctcctggccagcttcgtctggtgggtctccttcaccagcctcgggtcgctgccctccgccctcaggccgctgctctccggcctggtggggggcgctggctgcctgctggccctggggttggatcacttctttcaaatcagggaagcgcctcttcatcctcgactgtccagtgccgccgaagaaaaagtgcctgtgatccgaccccggaggaggtccagctgcgtgtcgttaggagaaactgcagccagttactatggcagttgcaaaatattcaggagaccgtcgttgccttgtatttccagagaacagatgattctttgggattgggacttaaaacaatggtataagcctcattatcaaaattctggaggtggaaatggagttgatctttcagtgctaaatgaggctcgcaatatggtgtcagatcttctgactgatccaagccttccaccacaagtcatttcctctctacggagtattagtagcttaatgggtgctttctcaggttcctgtaggccaaagattaatcctctcacaccatttcctggattttacccctgttctgaaatagaggacccagctgagaaaggggatagaaaacttaacaagggactaaataggaatagtttgccaactccacagctgaggagaagctcaggaacttcaggattgctacctgttgaacagtcttcaaggtgggatcgtaataatggcaaaagacctcaccaagaatttggcatttcaagtcaaggatgctatctaaatgggccttttaattcaaatctactgactatcccgaagcaaaggtcatcttctgtatcactgactcaccatgtaggtctcagaagagctggtgttttgtccagtctgagtcctgtgaattcttccaaccatggaccagtgtctactggctctctaactaatcgatcacccatagaatttcctgatactgctgattttcttaataagccaagcgttatcttgcagagatctctgggcaatgcacctaatactccagatttttatcagcaacttagaaattctgatagcaatctgtgtaacagctgtggacatcaaatgctgaaatatgtttcaacatctgaatcagatggtacagattgctgcagtggaaaatcaggtgaagaagaaaacattttctcgaaagaatcattcaaacttatggaaactcaacaagaagaggaaacagagaagaaagacagcagaaaattatttcaggaaggtgataagtggctaacagaagaggcacagagtgaacagcaaacaaatattgaacaggaagtatcactggacctgattttagtagaagagtatgactcattaatagaaaagatgagcaactggaattttccaatttttgaacttgtagaaaagatgggagagaaatcaggaaggattctcagtcaggttatgtataccttatttcaagacactggtttattggaaatatttaaaattcccactcaacaatttatgaactattttcgtgcattagaaaatggctatcgagacattccttatcacaatcgtatacatgccacagatgtgctacatgcagtttggtatctgacaacacggccagttcctggcttacagcagatccacaatggttgtggaacaggaaatgaaacagattctgatggtagaattaaccatgggcgaattgcttatatttcttcgaagagctgctctaatcctgatgagagttatggctgcctgtcttcaaacattcctgcattagaattgatggctctatacgtggcagctgccatgcatgattatgatcacccagggaggacaaatgcatttctagtggctacaaatgcccctcaggcagttttatacaatgacagatctgttctggaaaatcatcatgctgcgtcagcttggaatctatatctttctcgcccagaatacaacttccttcttcatcttgatcatgtggaattcaagcgctttcgttttttagtcattgaagcaatccttgctacggatcttaaaaagcattttgattttctcgcagaattcaatgccaaggcaaatgatgtaaatagtaatggcatagaatggagtaatgaaaatgatcgcctcttggtatgccaggtgtgcatcaaactggcagatataaatggcccagcaaaagttcgagacttgcatttgaaatggacagaaggcattgtcaatgaattttatgagcagggagatgaagaagcaaatcttggtctgcccatcagtccattcatggatcgttcttctcctcaactagcaaaactccaagaatcttttatcacccacatagtgggtcccctgtgtaactcctatgatgctgctggtttgctaccaggtcagtggttagaagcagaagaggataatgatactgaaagtggtgatgatgaagacggtgaagaattagatacagaagatgaagaaatggaaaacaatctaaatccaaaaccaccaagaaggaaaagcagacggcgaatattttgtcagctaatgcaccacctcactgaaaaccacaagatatggaaggaaatcgtagaggaagaagaaaaatgtaaagctgatgggaataaactgcaggtggagaattcctccttacctcaagcagatgagattcaggtaattgaagaggcagatgaagaggaatagcgacagtttgagtaaaagaaaagtcatattgaagaagcccagagggttgtgcccaggggcagaaatcattgcctagtgttcaccggctgactctcaactgaccattcccatgtggacaggccttaatactgtgagaggatccttgctctgctggcagtttcccactcctatgcactttcacaggaactagaaaactattcttaaaccaaaaataccatccgtgttgacccatgttgcagagcccttacttaaatccttcactggtgtatgaatactttgtcataatgctgctttgctgggtagtgagctcttatttttcactgggggtcagctataactaaaaactcaagtgacatatttcagttaccaaagtggccaggaactttttgcttttatgaaaatagattcatattgtatttcccagtgtgtcttttatgtctttgaatgttttggagaaaagtctatgcctgtctaaaaatgaatccagtgttgcctttctgagggatttctgctcaatgcaatacactgttcagtgctattctcccagctaggtttatccatgaaggactgagtgacctttgttgtatttaacaaaatccaggtgcatcaatttctgatgctttttactattgtgtattatctactatgtgtgttttatttctgctgagagtattcaggtttgccatggacatcagaagtttgaattccagtcttatcttatgttccatggctgaattttaaagctgtttaggtttaacaatgaagggatttattctttagtcaaaattgttgtttttactctagctcaggattcgtatttttaaagatttagttaatatgaacacagcacagatttgttagaagaaaaaaaatttgctgtaataccaaaactaacctcatcaaagatacagaaaaaaagaaatatagtgagccctaaaggacacatacattgaataaataattggaacatgtggttatctttagatccacatcttagctgtcatttgttcactctaaaactgatgttcatctttctgttaatttccctctgcctaaagactacatgacagaaatgacctatcactacttattatttctgaagcctaactgcaagactgatttctgagaacaagtaaagaactggaatacttatttttcatataaaaatctaaatgtgttaataaatcatttcatacaaaagtacattattaaataaccacattattaaaataattgcaagaaaatggaccatatttacaatgttttgtaaacttgctagtgtgtggatatgtaccctacttgtgaaatacatttgaagatataaagagcagccaaaatgatggcaaaatggtaggctaatattttctattattattggagaacatatcatattttggaatcatgcaattttgcacacagtgaaaccattaattttccaaggtaattcctttagaatatggtattggcatgcagtttcttacttatctagaatatttggcttatctgaaagatatcaatttaagatctctggaagtgttagaatttttgatccttcacagtgtcaatatttaatgaatcactaagctttatttattagacgtgttgagtgagtgctgagttccttgctgccacttttgttaccattgtcacacactatgtgtaaaccagtcccaccacttattactaataaaattttgactgataatttatatttgcacttacaatatatatatcctgtccttatatttctctagagtacattttccatcatgtttaagtgtatttctgctattatttcctctcctgcagaatacatacaagtgtatgtgtataaagtcatacatgtacaagcatgcatattgagattgaatcacatttccatactgtctgttattttattgggttttatattgggtttctttagtttatgttgttttctcaaaagcagcattttaaattacgaatactggacttattggatttaattataaatccaattactactggaaactcatttttacataatatagtccttaaattatttaacccttgctaagtaattgacatatgtaacaataactagcctaaagaaacccaaaaaagtatctctcccgagctgaaacttaaaaattcgtaagtgtaagaaagaatgtgagaatatattaaatgcacactgtaccattagatgaaatcttacttgagaaattgccataagccatattacagatcttactttgttactgaatcagattaatttcttgttataataattttcatcataaattttctatttttaaagccgctggtactagaaatattcttttaatgctatatctatgtacctactgacacatttttctccataaaagtacttttaaaaatta

SEQ ID NO: 15137 - DNA, 3665 bp, Homo sapiens
  source 1..3665: mol_type = unassigned DNA
gaggcggcagctaaactggtcctggagagaagccccttccgcccctctcctcagccagcatgtcccggactccgccgctcctcagtccgcgcggtggggaccccgggccgtggcggccggcgcagccctgacgggttgcgaaccagggggcgccccgaacgcgggggttggggtctgggagcgcgagcggccgctacggtacgagcggggtgtgctgagtcccgtggccacccccggccccagccatgaggagggacgagcgagacgccaaagccatgcggtccctgcagccgccggatggggccggctcgccccccgagagtctgaggaacggctacgtgaagagctgcgtgagccccttgcggcaggaccctccgcgcggcttcttcttccacctctgccgcttctgcaacgtggagctgcggccgccgccggcctctccccagcagccgcggcgctgctcccccttctgccgggcgcgcctctcgctgggcgccctggctgcctttgtcctcgccctgctgctgggcgcggaacccgagagctgggctgccggggccgcctggctgcggacgctgctgagcgtgtgttcgcacagcttgagccccctcttcagcatcgcctgtgccttcttcttcctcacctgcttcctcacccggaccaagcggggacccggcccgggccggagctgcggctcctggtggctgctggcgctgcccgcctgctgttacctgggggacttcttggtgtggcagtggtggtcttggccttggggggatggcgacgcagggtccgcggccccgcacacgcccccggaggcggcagcgggcaggttgctgctggtgctgagctgcgtagggctgctgctgacgctcgcgcacccgctgcggctccggcactgcgttctggtgctgctcctggccagcttcgtctggtgggtctccttcaccagcctcgggtcgctgccctccgccctcaggccgctgctctccggcctggtggggggcgctggctgcctgctggccctggggttggatcacttctttcaaatcagggaagcgcctcttcatcctcgactgtccagtgccgccgaagaaaaagtgcctgtgatccgaccccggaggaggtccagctgcgtgtcgttaggagaaactgcagccagttactatggcagttgcaaaatattcaggagaccgtcgttgccttgtatttccagagaacagatgattctttgggattgggacttaaaacaatggtataagcctcattatcaaaattctggaggtggaaatggagttgatctttcagtgctaaatgaggctcgcaatatggtgtcagatcttctgactgatccaagccttccaccacaaggactaaataggaatagtttgccaactccacagctgaggagaagctcaggaacttcaggattgctacctgttgaacagtcttcaaggtgggatcgtaataatggcaaaagacctcaccaagaatttggcatttcaagtcaaggatgctatctaaatgggccttttaattcaaatctactgactatcccgaagcaaaggtcatcttctgtatcactgactcaccatgtaggtctcagaagagctggtgttttgtccagtctgagtcctgtgaattcttccaaccatggaccagtgtctactggctctctaactaatcgatcacccatagaatttcctgatactgctgattttcttaataagccaagcgttatcttgcagagatctctgggcaatgcacctaatactccagatttttatcagcaacttagaaattctgatagcaatctgtgtaacagctgtggacatcaaatgctgaaatatgtttcaacatctgaatcagatggtacagattgctgcagtggaaaatcaggtgaagaagaaaacattttctcgaaagaatcattcaaacttatggaaactcaacaagaagaggaaacagagaagaaagacagcagaaaattatttcaggaaggtgataagtggctaacagaagaggcacagagtgaacagcaaacaaatattgaacaggaagtatcactggacctgattttagtagaagagtatgactcattaatagaaaagatgagcaactggaattttccaatttttgaacttgtagaaaagatgggagagaaatcaggaaggattctcagtcaggttatgtataccttatttcaagacactggtttattggaaatatttaaaattcccactcaacaatttatgaactattttcgtgcattagaaaatggctatcgagacattccttatcacaatcgtatacatgccacagatgtgctacatgcagtttggtatctgacaacacggccagttcctggcttacagcagatccacaatggttgtggaacaggaaatgaaacagattctgatggtagaattaaccatgggcgaattgcttatatttcttcgaagagctgctctaatcctgatgagagttatggctgcctgtcttcaaacattcctgcattagaattgatggctctatacgtggcagctgccatgcatgattatgatcacccagggaggacaaatgcatttctagtggctacaaatgcccctcaggcagttttatacaatgacagatctgttctggaaaatcatcatgctgcgtcagcttggaatctatatctttctcgcccagaatacaacttccttcttcatcttgatcatgtggaattcaagcgctttcgttttttagtcattgaagcaatccttgctacggatcttaaaaagcattttgattttctcgcagaattcaatgccaaggcaaatgatgtaaatagtaatggcatagaatggagtaatgaaaatgatcgcctcttggtatgccaggtgtgcatcaaactggcagatataaatggcccagcaaaagttcgagacttgcatttgaaatggacagaaggcattgtcaatgaattttatgagcagggagatgaagaagcaaatcttggtctgcccatcagtccattcatggatcgttcttctcctcaactagcaaaactccaagaatcttttatcacccacatagtgggtcccctgtgtaactcctatgatgctgctggtttgctaccaggtcagtggttagaagcagaagaggataatgatactgaaagtggtgatgatgaagacggtgaagaattagatacagaagatgaagaaatggaaaacaatctaaatccaaaaccaccaagaaggaaaagcagacggcgaatattttgtcagctaatgcaccacctcactgaaaaccacaagatatggaaggaaatcgtagaggaagaagaaaaatgtaaagctgatgggaataaactgcaggtggagaattcctccttacctcaagcagatgagattcaggtaattgaagaggcagatgaagaggaatagcgacagtttgagtaaaagaaaagtcatattgaagaagcccagagggttgtgcccaggggcagaaatcattgcctagtgttcaccggctgactctcaactgaccattcccatgtggacaggccttaatactgtgagaggatccttgctctgctggcagtttcccactcctatgcactttcacaggaactagaaaactattcttaaaccaaaaataccatccgtgttgacccatgt

SEQ ID NO: 15138 - DNA, 5521 bp, Homo sapiens
  source 1..5521: mol_type = unassigned DNA
cgccggcctctccccagcagccgcggcgctgctcccccttctgccgggcgcgcctctcgctgggcgccctggctgcctttgtcctcgccctgctgctgggcgcggaacccgagagctgggctgccggggccgcctggctgcggacgctgctgagcgtgtgttcgcacagcttgagccccctcttcagcatcgcctgtgccttcttcttcctcacctgcttcctcacccggaccaagcggggacccggcccgggccggagctgcggctcctggtggctgctggcgctgcccgcctgctgttacctgggggacttcttggtgtggcagtggtggtcttggccttggggggatggcgacgcagggtccgcggccccgcacacgcccccggaggcggcagcgggcaggttgctgctggtgctgagctgcgtagggctgctgctgacgctcgcgcacccgctgcggctccggcactgcgttctggtgctgctcctggccagcttcgtctggtgggtctccttcaccagcctcgggtcgctgccctccgccctcaggccgctgctctccggcctggtggggggcgctggctgcctgctggccctggggttggatcacttctttcaaatcagggaagcgcctcttcatcctcgactgtccagtgccgccgaagaaaaagtgcctgtgatccgaccccggaggaggtccagctgcgtgtcgttaggagaaactgcagccagttactatggcagttgcaaaatattcaggagaccgtcgttgccttgtatttccagagaacagatgattctttgggattgggacttaaaacaatggtataagcctcattatcaagtaagtataattaatatctgtgatgaatatctaaataatatctgtgatcactaaataatatctgtgatgcaacttttgacacttaaagttacactcacaatatttctgtgccataagattttctttaactaaactaataagttaactagaaccttcattgaggtagattttttaaaaatatattttaattataagggaaaaagaaaatgataaaaacaaaatttatataaattgttatgaaaaatattgctaatataatctgggctcagaatcaactaatatttctatattaaggataagatttttttcttttctgatgtggaccactgttctataaaggggaaaaaatagatggaaggccatatctgagacaaagcaaagcagttggcaacatattttattagggaagtaaagatatccaactttcattttttggtaaactttttatcaaattataacatacatgcaggaaagtgtacagctcaattttcagaagttaaacatcccatgtaactggtactgatatgaagaaatagaatgtttccagtatctcagaagcctcacatatgcccaattccagtcattacctatatccccaaagataaatcctatccgacttctaataactagttttgctaatttttgaactttatatatacacaaatggaataatatgtgtacttttttaggattaattttttgaacacctaagtaatatatgtttatatcagataaaatgaaaatagaagtatttaatataaggagaaaaaaggaaaatcactcataaaacatcaagcaataactgtgttaacttttgatgtctatctttattgatctttcccattatgctaaatttacttaataattctaatagcttatttgaagattctttgagtcttgacgtacacaaaaatgttatctatgaataaagacagatttatttatttatttcaaaacctatgccttttatttctttttctcatgttattgtactttctaggaccttcaacgcagtgttgaatggaagtggtatgagtaggcagccttgtttttcttcatgaactcagggaaaaaatgttcaacatatcaccactaatgttttttgtagataccctttagcagattaaggaagttttattctaattctagtttactaaggactttttttctcttaagttatgagtgggtatataattttatcagatgctttttctgcatctattcaaatgattcgagatttttttctaattattctactaatgtggtgaattacattgtttatgtttgttaaaccatccctgtattcccagaataaagtaaatttgatcaagatgtattttgtttaaatatttatcactagattctatttgttaatgttttgtttagaaattttgaatttgtgtttatgagagagtgttggcctataaattcttacttttcataatgttcttggcattatattggtatcacggttaccaagaaccttgatatcaagataaaataaggtgagatatttaccctttctattacctcgaaaagtttgggtaagattaaaaattggtattatttcctcctttaatgtttggaagaatgctctggtgaagctatctcaccttgaagaattattttgtggtcaaattttaagttatggattcaatttctttaatagttttagtatcatttagattttccatcttttcttctaacaattgagttacttgtgtttttctaggaattcctttttttgttgttgttccttctggcatttgtgagactgctgaaagccctattttaatttcaaaatagaaatctttttgaggatttctacttggtttatctctctcttagccactgtttataaattggcaaatacctttagaggaaaagcaggtctgaatttaagctcactactttgtttttctcatcactttgggatcttgtttggcaccccctgtcttcatagctctgaactccaatttcggtctcccagccccttgggactatagatctctactctgttttctggcctcttttgtgcttctcatcctctctgctctgtgccagttatgaatcagcagaaaattcctagagggaaaagagtagcacagaatgttggatttcttttaatcttttctcttaattctgggttcttggccttttatgccctggctgtttggttgtgttttgatgccttgaaatgtatgctatttatattttatttcagcttttctagttgttctagacagaagagttggtctgatacaaaccagtccctcttagctggaaaattaggcaagcctcttaagacactctgaacctattccctcacctacaaattgagaataataccagttccctcaaagggctaattaatatgtgcctggtacttaatacaaatgtgggccaatattatataaatttcaatagtaataaatactaatctgaacttgaagtataagacaggaatgagcatttttttctttaaaaggccagagagtaagtattttagcatttgctggaaacatatgaccattgctaccttttgccgtccccagtgcttctcattgcctcctttgtcctcttctccctcccactcctcttctttttcaataaccatttaaaacataaaaactattcttaactttctgttcaacaatcaagattttgctaaatataagtgaatggaaaataggaatttaagttcagcttttaaaattgtggcaaataatttgaatattcaatttgatctgccataagttatcatgtcactctcttgctcatttctctcgtttcacccagtgtaaaagtctttgtcatgtacgtaaaagaacttacacaacatggttccctcccttactctcttgtacttctctgtctttgtcttctactactttctccttcatttactctgttccagctgcactggcctccttgttattccccaaacaagtcagacaggcttctgactcaggtctttgcacttgctagtctctctgcctgggatgcttatttcccacactttgtcatgtctttacataagcatttccttcttagtgaggcataccccaactatcctctctaaaattgcattgcgttctatcacatctttttcccttaacttactttattttctctttttagcagcttgttcaaaatctattatatacgaccctttattactcatattacttagcttggaatccagtgttctcaaaaatttggtcccaacatgtctttccaacctgtttttcattgctttcttatataatctgtacttcaacaatttcatattccctgtatagcattattttaccacttaaaaattgtattttaccacttttatacttttatttatgctgtgtccattttgtgcagtacacttccccaatacatttttgttttgttttattgtaaacaaatataaatataatcctaccaaatttttagggcccagctcaaatgctaccccttccataaaatttctgttaccatccaaatggaaggtttctatatctcttttgaacgctaatgccattttgtctgtatatataatttttttctttttttgagacgaagtttctctcttgttgcccaggctggagtgcagtggcatgatctcggctcaccgcaacctccagctccctggttcaagcgattctcctgcctcagcctccggagtagctgggattacaggcatgtgccaccacacctggctaattttgtatttttagtagagatgggatttctccatgttggtcaggctggtcttgaactcccgacctcaggtgatctgcccacctcggcctcccaaagtgctgggattacaggggtaagagaccacacttggccattttgtctgtatttttatctcttcactttctgttaataataacagtactatctttgcctttagttatatatactatactttatatgctctgcatgtgttaccatatgtaactctctcttttcctccttgctaagtacagttattaagtctggaaataatgtaagaggcaatcaagtgagaactacaaaaaatagaaagaggaaggcagactggctagggaccctagtacaggaaaaacaacacagtgacagagtctcttatgacccacacccaacagcaaacctggtctaggcccccactctcaacctagcaacataaggtgacacaggtaggcttattctttccccagattaaacaagagccctgccaacactaggcaagtctggtggctctagcaagggggaattgatttggaaccactggcaatcagtgaccagggagaagcattctccttccctcctgggcatgagactccccttccccactgacagacactgggtggccagtgtgcctggcaagggggatgtcctcacaaatgcctagcccagaaagtgatctttgttcctgtcacctggagactcctttctctcccctaaaggtaccagatgacccaacctgaggaagctctctttccccctactgtaaggcaccagtgtggactgtggactagtgggaacccaacgggcaccaaatgctagatgacgagttagtgggtgcagcgcaccagcatggcacatgtatacatatgtaactaacctgcacaatgtgcacatgtaccctaaaacttaaagtataattaaaaaataataataataatagtaataat

SEQ ID NO: 15139 - DNA, 788 bp, Homo sapiens
  source 1..788: mol_type = unassigned DNA
gttactgctctgtattgaaaaccagttctgttttacttcaaagcctttgctatacagtatacatggaggaaaatgagtgaccaggtgatcatatggggatcttaagaaataccagaagttgttcttttggaaacttgtaagcttcttttaaaatcttacttcctgtcggtctaagaagggcactcttgatgaatgcttcttagttgtttgtgagggttgtggcttaaagtagctaagctttataattctgttggctctgtcaaatgaaaagtctatccattccaaaactgaacaaataagttttatttctgtgtgagaacaaatggttacttggaatttactgggatttttctttttccaaatccacatagtactggcaacatcttttttttctttgatgttaagatatttccaacattgattctttacagtatatgataggtcaagggattccattcatcatatactgataggtccaaggatgagggaaaaacttcatacaagggaaatataagtgtttttctgatgttcaagtggcagtaggtgtgggaagccgttgcaagcagtatctcccaagagtgagcttattctcctattgtagatatcaggatatcattgctttccttttctgcactgtatcatgttttagttattttatggaaatctatcagagtggaagagcaaaaggtcagttggaagagaaaaaagatgaaactgaaactaaaagtggttaaatatacttacattaggtatcaattactacttgtatattatccatgttacatttt

SEQ ID NO: 15140 - DNA, 693 bp, Homo sapiens
  source 1..693: mol_type = unassigned DNA
tgtgaaatttggagtaaattgacagattttcagaataaaatgtttcttttttctctgtacatgttaaaaatatactttgtattgatactttcatgtgccatcactaatattacatatatagcatattaaagagtgacattttaaaccattgttaaattattcaacagggactaaataggaatagtttgccaactccacagctgaggagaagctcaggaacttcaggattgctacctgttgaacagtcttcaaggtgggatcgtaataatggcaaaagacctcaccaagaatttggcatttcaagtcaaggatgctatctaaatgggccttttaattcaaatctactgactatcccgaagcaaaggtcatcttctgtatcactgactcaccatgtaggtctcagaagagctggtgttttgtccagtctgagtcctgtgaattcttccaaccatggaccagtgtctactggctctctaactaatcgatcacccatagaatttcctgatactgctgattttcttaataagccaagcgttatcttgcagagatctctgggcaatgcacctaatactccagatttttatcagcaacttagaaattctgatagcaatctgtgtaacagctgtggacatcaaatgctgaaatatgtttcaacatctgaatcagatggtacagattgctgcagtggaaaat

SEQ ID NO: 15141 - DNA, 8232 bp, Homo sapiens
  source 1..8232: mol_type = unassigned DNA
gggccccctctcggtagccctgaggctctggcgccttcaagtgagaagctaagcaccagcctctgctgggctgcagaagcggcggcggcggcagcagcagcagcagcatcaggaaggcgctcgggccagcgcggtgaacccgggctgggcagcaggtcgcggagccgcgagccaggatggaggcagagggcagcagcgcgccggcccgggcgggcagcggagagggcagcgacagcgccggcggggccacgctcaaagcccccaagcatctctggaggcacgagcagcaccaccagtacccgctccggcagccccagttccgcctcctgcatccccatcaccacctgcccccgccgccgccaccctcgccccagccccagccccagtgtccgctacagccgccgccgccgccccccctgccgccgcccccgccgccgcccggggctgcccgcggccgctacgcctcgagcggggccaccggccgcgtccggcatcgcggctactcggacaccgagcgctacctgtactgtcgcgccatggaccgcacctcctacgcggtggagaccggccaccggcccggcctgaagaaatccaggatgtcctggccctcctcgttccagggactcaggcgttttgatgtggacaatggcacatctgcgggacggagtcccttggatcccatgaccagcccaggatccgggctaattctccaagcaaattttgtccacagtcaacgacgggagtccttcctgtatcgatccgacagcgattatgacctctctccaaagtctatgtcccggaactcctccattgccagtgatatacacggagatgacttgattgtgactccatttgctcaggtcttggccagtctgcgaactgtacgaaacaactttgctgcattaactaatttgcaagatcgagcacctagcaaaagatcacccatgtgcaaccaaccatccatcaacaaagccaccataacagaggaggcctaccagaaactggccagcgagaccctggaggagctggactggtgtctggaccagctagagaccctacagaccaggcactccgtcagtgagatggcctccaacaagtttaaaaggatgcttaatcgggagctcacccatctctctgaaatgagtcggtctggaaatcaagtgtcagagtttatatcaaacacattcttagataagcaacatgaagtggaaattccttctccaactcagaaggaaaaggagaaaaagaaaagaccaatgtctcagatcagtggagtcaagaaattgatgcacagctctagtctgactaattcaagtatcccaaggtttggagttaaaactgaacaagaagatgtccttgccaaggaactagaagatgtgaacaaatggggtcttcatgttttcagaatagcagagttgtctggtaaccggcccttgactgttatcatgcacaccatttttcaggaacgggatttattaaaaacatttaaaattccagtagatactttaattacatatcttatgactctcgaagaccattaccatgctgatgtggcctatcacaacaatatccatgctgcagatgttgtccagtctactcatgtgctattatctacacctgctttggaggctgtgtttacagatttggagattcttgcagcaatttttgccagtgcaatacatgatgtagatcatcctggtgtgtccaatcaatttctgatcaatacaaactctgaacttgccttgatgtacaatgattcctcagtcttagagaaccatcatttggctgtgggctttaaattgcttcaggaagaaaactgtgacattttccagaatttgaccaaaaaacaaagacaatctttaaggaaaatggtcattgacatcgtacttgcaacagatatgtcaaaacacatgaatctactggctgatttgaagactatggttgaaactaagaaagtgacaagctctggagttcttcttcttgataattattccgataggattcaggttcttcagaatatggtgcactgtgcagatctgagcaacccaacaaagcctctccagctgtaccgccagtggacggaccggataatggaggagttcttccgccaaggagaccgagagagggaacgtggcatggagataagccccatgtgtgacaagcacaatgcttccgtggaaaaatcacaggtgggcttcatagactatattgttcatcccctctgggagacatgggcagacctcgtccaccctgacgcccaggatattttggacactttggaggacaatcgtgaatggtaccagagcacaatccctcagagcccctctcctgcacctgatgacccagaggagggccggcagggtcaaactgagaaattccagtttgaactaactttagaggaagatggtgagtcagacacggaaaaggacagtggcagtcaagtggaagaagacactagctgcagtgactccaagactctttgtactcaagactcagagtctactgaaattccccttgatgaacaggttgaagaggaggcagtaggggaagaagaggaaagccagcctgaagcctgtgtcatagatgatcgttctcctgacacgtaacagtgcaaaaactttcatgccttttttttttttaagtagaaaaattgtttccaaagtgcatgtcacatgccacaaccacggtcacacctcactgtcatctgccaggacgtttgttgaacaaaactgaccttgactactcagtccagcgctcaggaatatcgtaaccagttttttcacctccatgtcatccgagcaaggtggacatcttcacgaacagcgtttttaacaagatttcagcttggtagagctgacaaagcagataaaatctactccaaattattttcaagagagtgtgactcatcaggcagcccaaaagtttattggacttggggtttctattcctttttatttgtttgcaatattttcagaagaaaggcattgcacagagtgaacttaatggacgaagcaacaaatatgtcaagaacaggacatagcacgaatctgttaccagtaggaggaggatgagccacagaaattgcataattttctaatttcaagtcttcctgatacatgactgaatagtgtggttcagtgagctgcactgacctctacattttgtatgatatgtaaaacagattttttgtagagcttacttttattattaaatgtattgaggtattatatttaaaaaaaactatgttcagaacttcatctgccactggttatttttttctaaggagtaacttgcaagttttcagtacaaatctgtgctacactggataaaaatctaatttatgaattttacttgcaccttatagttcatagcaattaactgatttgtagtgattcattgtttgttttatataccaatgacttccatattttaaaagagaaaaacaactttatgttgcaggaaaccctttttgtaagtctttattatttactttgcattttgtttcactctttccagataagcagagttgctcttcaccagtgtttttcttcatgtgcaaagtgactatttgttctataatacttttatgtgtgttatatcaaatgtgtcttaagcttcatgcaaactcagtcatcagttcgtgttgtctgaagcaagtgggagatatataaatacccagtagctaaaatggtcagtcttttttagatgttttcctacttagtatctcctaataacgttttgctgtgtcactagatgttcatttcacaagtgcatgtctttctaataatccacacatttcatgctctaataatccacacatttcatgctcatttttattgtttttacagccagttatagtaagaaaaaggtttttccccttgtgctgctttataatttagcgtgtgtctgaaccttatccatgtttgctagatgaggtcttgtcaaatatatcactaccattgtcaccggtgaaaagaaacaggtagttaagttagggttaacattcatttcaaccacgaggttgtatatcatgactagcttttactcttggtttacagagaaaagttaaacagccaactaggcagtttttaagaatattaacaatatattaacaaacaccaatacaactaatcctatttggttttaatgatttcaccatgggattaagaactatatcaggaacatccctgagaaacggttttaagtgtagcaactactcttccttaatggacagccacataacgtgtaggaagtcctttatcacttatcctcgatccataagcatatcttgcagaggggaactacttctttaaacacatggagggaaagaagatgatgccactggcaccagagggttagtactgtgatgcatcctaaaatatttattatattggtaaaaattctggttaaataaaaaattagagatcactcttggctgatttcagcaccaggaactgtattacagttttagagattaattcctagtgtttacctgattatagcagttggcatcatggggcatttaattctgactttatccccacgtcagccttaataaagtcttctttaccttctctatgaagactttaaagcccaaataatcatttttcacattgatattcaagaattgagatagatagaagccaaagtgggtatctgacaagtggaaaatcaaacgtttaagaagaattacaactctgaaaagcatttatatgtggaacttctcaaggagcctcctggggactggaaagtaagtcatcagccaggcaaatgactcatgctgaagagagtccccatttcagtcccctgagatctagctgatgcttagatcctttgaaataaaaattatgtctttataactctgatcttttacataaagcagaagaggaatcaactagttaattgcaaggtttctactctgtttcctctgtaaagatcagatggtaatctttcaaataagaaaaaaataaagacgtatgtttgaccaagtagtttcacaagaatatttgggaacttgtttcttttaattttatttgtccctgagtgaagtctagaaagaaaggtaaagagtctagagtttattcctctttccaaaacattctcattcctctcctccctacacttagtatttcccccacagagtgcctagaatcttaataatgaataaaataaaaagcagcaatatgtcattaacaaatccagacctgaaagggtaaagggtttataactgcactaataaagagaggctctttttttttcttccagtttgttggtttttaatggtaccgtgttgtaaagatacccactaatggacaatcaaattgcagaaaaggctcaatatccaagagacagggactaatgcactgtacaatctgcttatccttgcccttctctcttgccaaagtgtgcttcagaaatatatactgctttaaaaaagaataaaagaatatccttttacaagtggctttacatttcctaaaatgccataagaaaatgcaatatctgggtactgtatggggaaaaaaatgtccaagtttgtgtaaaaccagtgcatttcagcttgcaagttactgaacacaataatgctgttttaattttgttttatatcagttaaaattcacaataatgtagatagaacaaattacagacaaggaaagaaaaaacttgaatgaaatggattttacagaaagctttatgataatttttgaatgcattatttattttttgtgccatgcattttttttctcaccaaatgaccttacctgtaatacagtcttgtttgtctgtttacaaccatgtatttattgcaatgtacatactgtaatgttaattgtaaattatctgttcttattaaaacatcatcccatgatgggatggtgttgatatatttggaaactcttggtgagagaatgaatggtgtgtatacatactctgtacatttttcttttctcctgtaatatagtcttgtcaccttagagcttgtttatggaagattcaagaaaactataaaatacttaaagatatataaatttaaaaaaacatagctgcaggtctttggtcccagggctgtgccttaactttaaccaatattttcttctgttttgctgcatttgaaaggtaacagtggagctagggctgggcattttacatccaggcttttaattgattagaattctgccaataggtggattttacaaaaccacagacaacctctgaaagattctgagacccttttgagacagaagctcttaagtacttcttgccagggagcagcactgcatgtgtgatggttgtttgccatctgttgatcaggaactacttcagctacttgcatttgattatttcctttttttttttttttaactcggaaacacaactggggaaatatattctttcccagtgattataaacaatctttttcttttttttaagtccttttggcttctagagctcataggaaaatggacttgatttgaaattggagccagagtttactcgtgttggttatctattcatcagcttcctgacatgttaagagaatacattaaagagaaaatactgttttttaatcctaaaatttttcttccactaagataaaccaaatgtccttacatatatgtaaacccatctatttaaacgcaaaggtgggttgatgtcagtttacatagcagaaagcattcactatcctctaagatttgtttctgcaaaactttcattgctttagaattttaaaatttcaccttgtacaatggccagcccctaaagcaggaaacatttataatggattatatggaaacatcctcccagtacttgcccagcccttgaatcatgtggcttttcagtgaaaggaaagattctttttctaggaaaaatgagcctattttattttattttattttattttttgacacaaactgtagattttagcagccctggcccaaaggaatttgattacttttgttttaaacagtacaaaggggacactataattacaaaaacatccttaactgatttgagttgtttttatttctttggatatattttcagagtggtaaattgtgtgtgagaattacaaatgattattcttttagtggtttcttagcctctcttacagcccacggggatagtactgtacatcaataccttcatatgaaatttttatatgcaatgaaaataaaagcatgggttgattctgcctatttatgactcaatcttttacaaataaaagattattcattttaaattatagttcaatcagcatgtctcttaggatactgaacgtggttgaaatgaaaggatagtgacatcataagttagtactgatattcataaccaaataaagccaacttgagtaattttgctacattaaaaattaccaaaattacttagatggcctataagattaagcatggtgttttctaagcaagctttgaaaggggccttccatacttacttaattgaatattctgggatattgaaaattattcagatacttgacaattatttttggttacctactccgcaaactacaaagttttaaggactcaacaataagttaatgagacacagtgtttgctttcatggagcttacagtctggaggggacaaaggcttaaacaatactcatataattatatatgtgatcagtacaatgaaggagctcagtggggtaaataagcaggaacctgaacttgatctgttccggagggccacagaaggcttccttgaggccttgagaaagtgatttgcatctgagttctgaaggattgtaagaggtaactagggaaaaagttgacaggaagaggaaggggatccagacaagaaacatttgcaaagatcttgaggcataaatgagcttgagacatctggagaaactgaggaaaagtgagagagtaggcagggcctggagccgcagagccattgctaaccatcctgtgtgagatatcccccattctgtagctttattctcataaccctgctcaattttctttataacacttctcacagatttatatacgtgtttgtttttgttatctgtctctcccaccagaccacagctccatgagagcaaggtctttgcttaccaatatatcactagcacttaaaactatgcctggtacacagtaggttcttaatatgtgttgaatatagccatcaaattgatattggatataattcaatctgataagatattttgagatattaaagagtttttaacttgataccataaaaa

SEQ ID NO: 15142 - DNA, 6659 bp, Homo sapiens
  source 1..6659: mol_type = unassigned DNA
gaaaacaaggtagtacatttagcctccgagaaacacgcgtttacttttgaagcaaagaagcaccgggcaaccagtgagcagcatatgtctgaaatctattatctgacatgttctttccagccttcccaggaatgctggtctgactactcagatttgcttttacttcttgccttttggatataatgagtttgccaagcagctgtgagtacctgactctggggaaggtggctagattccgaagcgcttatgttcatggatcaccatacgcgatcaacatgccaattgatattaagccacagaggagacgttttgatgtggacaatggcacatctgcgggacggagtcccttggatcccatgaccagcccaggatccgggctaattctccaagcaaattttgtccacagtcaacgacgggagtccttcctgtatcgatccgacagcgattatgacctctctccaaagtctatgtcccggaactcctccattgccagtgatatacacggagatgacttgattgtgactccatttgctcaggtcttggccagtctgcgaactgtacgaaacaactttgctgcattaactaatttgcaagatcgagcacctagcaaaagatcacccatgtgcaaccaaccatccatcaacaaagccaccataacagaggaggcctaccagaaactggccagcgagaccctggaggagctggactggtgtctggaccagctagagaccctacagaccaggcactccgtcagtgagatggcctccaacaagtttaaaaggatgcttaatcgggagctcacccatctctctgaaatgagtcggtctggaaatcaagtgtcagagtttatatcaaacacattcttagataagcaacatgaagtggaaattccttctccaactcagaaggaaaaggagaaaaagaaaagaccaatgtctcagatcagtggagtcaagaaattgatgcacagctctagtctgactaattcaagtatcccaaggtttggagttaaaactgaacaagaagatgtccttgccaaggaactagaagatgtgaacaaatggggtcttcatgttttcagaatagcagagttgtctggtaaccggcccttgactgttatcatgcacaccatttttcaggaacgggatttattaaaaacatttaaaattccagtagatactttaattacatatcttatgactctcgaagaccattaccatgctgatgtggcctatcacaacaatatccatgctgcagatgttgtccagtctactcatgtgctattatctacacctgctttggaggctgtgtttacagatttggagattcttgcagcaatttttgccagtgcaatacatgatgtagatcatcctggtgtgtccaatcaatttctgatcaatacaaactctgaacttgccttgatgtacaatgattcctcagtcttagagaaccatcatttggctgtgggctttaaattgcttcaggaagaaaactgtgacattttccagaatttgaccaaaaaacaaagacaatctttaaggaaaatggtcattgacatcgtacttgcaacagatatgtcaaaacacatgaatctactggctgatttgaagactatggttgaaactaagaaagtgacaagctctggagttcttcttcttgataattattccgataggattcaggttcttcagaatatggtgcactgtgcagatctgagcaacccaacaaagcctctccagctgtaccgccagtggacggaccggataatggaggagttcttccgccaaggagaccgagagagggaacgtggcatggagataagccccatgtgtgacaagcacaatgcttccgtggaaaaatcacaggtgggcttcatagactatattgttcatcccctctgggagacatgggcagacctcgtccaccctgacgcccaggatattttggacactttggaggacaatcgtgaatggtaccagagcacaatccctcagagcccctctcctgcacctgatgacccagaggagggccggcagggtcaaactgagaaattccagtttgaactaactttagaggaagatggtgagtcagacacggaaaaggacagtggcagtcaagtggaagaagacactagctgcagtgactccaagactctttgtactcaagactcagagtctactgaaattccccttgatgaacaggttgaagaggaggcagtaggggaagaagaggaaagccagcctgaagcctgtgtcatagatgatcgttctcctgacacgtaacagtgcaaaaactttcatgccttttttttttttaagtagaaaaattgtttccaaagtgcatgtcacatgccacaaccacggtcacacctcactgtcatctgccaggacgtttgttgaacaaaactgaccttgactactcagtccagcgctcaggaatatcgtaaccagttttttcacctccatgtcatccgagcaaggtggacatcttcacgaacagcgtttttaacaagatttcagcttggtagagctgacaaagcagataaaatctactccaaattattttcaagagagtgtgactcatcaggcagcccaaaagtttattggacttggggtttctattcctttttatttgtttgcaatattttcagaagaaaggcattgcacagagtgaacttaatggacgaagcaacaaatatgtcaagaacaggacatagcacgaatctgttaccagtaggaggaggatgagccacagaaattgcataattttctaatttcaagtcttcctgatacatgactgaatagtgtggttcagtgagctgcactgacctctacattttgtatgatatgtaaaacagattttttgtagagcttacttttattattaaatgtattgaggtattatatttaaaaaaaactatgttcagaacttcatctgccactggttatttttttctaaggagtaacttgcaagttttcagtacaaatctgtgctacactggataaaaatctaatttatgaattttacttgcaccttatagttcatagcaattaactgatttgtagtgattcattgtttgttttatataccaatgacttccatattttaaaagagaaaaacaactttatgttgcaggaaaccctttttgtaagtctttattatttactttgcattttgtttcactctttccagataagcagagttgctcttcaccagtgtttttcttcatgtgcaaagtgactatttgttctataatacttttatgtgtgttatatcaaatgtgtcttaagcttcatgcaaactcagtcatcagttcgtgttgtctgaagcaagtgggagatatataaatacccagtagctaaaatggtcagtcttttttagatgttttcctacttagtatctcctaataacgttttgctgtgtcactagatgttcatttcacaagtgcatgtctttctaataatccacacatttcatgctctaataatccacacatttcatgctcatttttattgtttttacagccagttatagtaagaaaaaggtttttccccttgtgctgctttataatttagcgtgtgtctgaaccttatccatgtttgctagatgaggtcttgtcaaatatatcactaccattgtcaccggtgaaaagaaacaggtagttaagttagggttaacattcatttcaaccacgaggttgtatatcatgactagcttttactcttggtttacagagaaaagttaaacagccaactaggcagtttttaagaatattaacaatatattaacaaacaccaatacaactaatcctatttggttttaatgatttcaccatgggattaagaactatatcaggaacatccctgagaaacggttttaagtgtagcaactactcttccttaatggacagccacataacgtgtaggaagtcctttatcacttatcctcgatccataagcatatcttgcagaggggaactacttctttaaacacatggagggaaagaagatgatgccactggcaccagagggttagtactgtgatgcatcctaaaatatttattatattggtaaaaattctggttaaataaaaaattagagatcactcttggctgatttcagcaccaggaactgtattacagttttagagattaattcctagtgtttacctgattatagcagttggcatcatggggcatttaattctgactttatccccacgtcagccttaataaagtcttctttaccttctctatgaagactttaaagcccaaataatcatttttcacattgatattcaagaattgagatagatagaagccaaagtgggtatctgacaagtggaaaatcaaacgtttaagaagaattacaactctgaaaagcatttatatgtggaacttctcaaggagcctcctggggactggaaagtaagtcatcagccaggcaaatgactcatgctgaagagagtccccatttcagtcccctgagatctagctgatgcttagatcctttgaaataaaaattatgtctttataactctgatcttttacataaagcagaagaggaatcaactagttaattgcaaggtttctactctgtttcctctgtaaagatcagatggtaatctttcaaataagaaaaaaataaagacgtatgtttgaccaagtagtttcacaagaatatttgggaacttgtttcttttaattttatttgtccctgagtgaagtctagaaagaaaggtaaagagtctagagtttattcctctttccaaaacattctcattcctctcctccctacacttagtatttcccccacagagtgcctagaatcttaataatgaataaaataaaaagcagcaatatgtcattaacaaatccagacctgaaagggtaaagggtttataactgcactaataaagagaggctctttttttttcttccagtttgttggtttttaatggtaccgtgttgtaaagatacccactaatggacaatcaaattgcagaaaaggctcaatatccaagagacagggactaatgcactgtacaatctgcttatccttgcccttctctcttgccaaagtgtgcttcagaaatatatactgctttaaaaaagaataaaagaatatccttttacaagtggctttacatttcctaaaatgccataagaaaatgcaatatctgggtactgtatggggaaaaaaatgtccaagtttgtgtaaaaccagtgcatttcagcttgcaagttactgaacacaataatgctgttttaattttgttttatatcagttaaaattcacaataatgtagatagaacaaattacagacaaggaaagaaaaaacttgaatgaaatggattttacagaaagctttatgataatttttgaatgcattatttattttttgtgccatgcattttttttctcaccaaatgaccttacctgtaatacagtcttgtttgtctgtttacaaccatgtatttattgcaatgtacatactgtaatgttaattgtaaattatctgttcttattaaaacatcatcccatgatgggatggtgttgatatatttggaaactcttggtgagagaatgaatggtgtgtatacatactctgtacatttttcttttctcctgtaatatagtcttgtcaccttagagcttgtttatggaagattcaagaaaactataaaatacttaaagatatataaatttaaaaaaacatagctgcaggtctttggtcccagggctgtgccttaactttaaccaatattttcttctgttttgctgcatttgaaaggtaacagtggagctagggctgggcattttacatccaggcttttaattgattagaattctgccaataggtggattttacaaaaccacagacaacctctgaaagattctgagacccttttgagacagaagctcttaagtacttcttgccagggagcagcactgcatgtgtgatggttgtttgccatctgttgatcaggaactacttcagctacttgcatttgattatttcctttttttttttttttaactcggaaacacaactggggaaatatattctttcccagtgattataaacaatctttttcttttttttaagtccttttggcttctagagctcataggaaaatggacttgatttgaaattggagccagagtttactcgtgttggttatctattcatcagcttcctgacatgttaagagaatacattaaagagaaaatactgttttttaatcctaaaatttttcttccactaagataaaccaaatgtccttacatatatgtaaacccatctatttaaacgcaaaggtgggttgatgtcagtttacatagcagaaagcattcactatcctctaagatttgtttctgcaaaactttcattgctttagaattttaaaatttcaccttgtacaatggccagcccctaaagcaggaaacatttataatggattatatggaaacatcctcccagtacttgcccagcccttgaatcatgtggcttttcagtgaaaggaaagattctttttctaggaaaaatgagcctattttattttattttattttattttttgacacaaactgtagattttagcagccctggcccaaaggaatttgattacttttgttttaaacagtacaaaggggaca

SEQ ID NO: 15143 - DNA, 3122 bp, Homo sapiens
  source 1..3122: mol_type = unassigned DNA
caatacttgttgcaataattgcccacgatagctgctcaaacaagagagttggaattcatctgtaaaaatcactacatgtaacgtaggagacaagaaaaatattaatgacagaagatctgcgaacatgatgcacgtgaataattttccctttagaaggcattcctggatatgttttgatgtggacaatggcacatctgcgggacggagtcccttggatcccatgaccagcccaggatccgggctaattctccaagcaaattttgtccacagtcaacgacgggagtccttcctgtatcgatccgacagcgattatgacctctctccaaagtctatgtcccggaactcctccattgccagtgatatacacggagatgacttgattgtgactccatttgctcaggtcttggccagtctgcgaactgtacgaaacaactttgctgcattaactaatttgcaagatcgagcacctagcaaaagatcacccatgtgcaaccaaccatccatcaacaaagccaccataacagaggaggcctaccagaaactggccagcgagaccctggaggagctggactggtgtctggaccagctagagaccctacagaccaggcactccgtcagtgagatggcctccaacaagtttaaaaggatgcttaatcgggagctcacccatctctctgaaatgagtcggtctggaaatcaagtgtcagagtttatatcaaacacattcttagataagcaacatgaagtggaaattccttctccaactcagaaggaaaaggagaaaaagaaaagaccaatgtctcagatcagtggagtcaagaaattgatgcacagctctagtctgactaattcaagtatcccaaggtttggagttaaaactgaacaagaagatgtccttgccaaggaactagaagatgtgaacaaatggggtcttcatgttttcagaatagcagagttgtctggtaaccggcccttgactgttatcatgcacaccatttttcaggaacgggatttattaaaaacatttaaaattccagtagatactttaattacatatcttatgactctcgaagaccattaccatgctgatgtggcctatcacaacaatatccatgctgcagatgttgtccagtctactcatgtgctattatctacacctgctttggaggctgtgtttacagatttggagattcttgcagcaatttttgccagtgcaatacatgatgtagatcatcctggtgtgtccaatcaatttctgatcaatacaaactctgaacttgccttgatgtacaatgattcctcagtcttagagaaccatcatttggctgtgggctttaaattgcttcaggaagaaaactgtgacattttccagaatttgaccaaaaaacaaagacaatctttaaggaaaatggtcattgacatcgtacttgcaacagatatgtcaaaacacatgaatctactggctgatttgaagactatggttgaaactaagaaagtgacaagctctggagttcttcttcttgataattattccgataggattcaggttcttcagaatatggtgcactgtgcagatctgagcaacccaacaaagcctctccagctgtaccgccagtggacggaccggataatggaggagttcttccgccaaggagaccgagagagggaacgtggcatggagataagccccatgtgtgacaagcacaatgcttccgtggaaaaatcacaggtgggcttcatagactatattgttcatcccctctgggagacatgggcagacctcgtccaccctgacgcccaggatattttggacactttggaggacaatcgtgaatggtaccagagcacaatccctcagagcccctctcctgcacctgatgacccagaggagggccggcagggtcaaactgagaaattccagtttgaactaactttagaggaagatggtgagtcagacacggaaaaggacagtggcagtcaagtggaagaagacactagctgcagtgactccaagactctttgtactcaagactcagagtctactgaaattccccttgatgaacaggttgaagaggaggcagtaggggaagaagaggaaagccagcctgaagcctgtgtcatagatgatcgttctcctgacacgtaacagtgcaaaaactttcatgccttttttttttttaagtagaaaaattgtttccaaagtgcatgtcacatgccacaaccacggtcacacctcactgtcatctgccaggacgtttgttgaacaaaactgaccttgactactcagtccagcgctcaggaatatcgtaaccagttttttcacctccatgtcatccgagcaaggtggacatcttcacgaacagcgtttttaacaagatttcagcttggtagagctgacaaagcagataaaatctactccaaattattttcaagagagtgtgactcatcaggcagcccaaaagtttattggacttggggtttctattcctttttatttgtttgcaatattttcagaagaaaggcattgcacagagtgaacttaatggacgaagcaacaaatatgtcaagaacaggacatagcacgaatctgttaccagtaggaggaggatgagccacagaaattgcataattttctaatttcaagtcttcctgatacatgactgaatagtgtggttcagtgagctgcactgacctctacattttgtatgatatgtaaaacagattttttgtagagcttacttttattattaaatgtattgaggtattatatttaaaaaaaactatgttcagaacttcatctgccactggttatttttttctaaggagtaacttgcaagttttcagtacaaatctgtgctacactggataaaaatctaatttatgaattttacttgcaccttatagttcatagcaattaactgatttgtagtgattcattgtttgttttatataccaatgacttccatattttaaaagagaaaaacaactttatgttgcaggaaaccctttttgtaagtctttattatttactttgcattttgtttcactctttccagataagcagagttgctcttcaccagtgtttttcttcatgtgcaaagtgactatttgttctataatac

SEQ ID NO: 15144 - DNA, 3350 bp, Homo sapiens
  source 1..3350: mol_type = unassigned DNA
agagagactgaggcaggcgactgaatgcactaacagcagcaggctcagacctgcttccctggacatttccgggaccgtgagcgagggaaccacgttgccctggattcttgccagctgtacaaagttgaccaggaaaatggctcagcagacaagcccggacactttaacagtacctgaagtggataatccgcattgtccaaacccgtggctgaacgaagaccttgtgaaatccttgcgagaaaacctgttgcagcatgagaagtccaagacagcgaggaaatcggtttctcccaagctctctccagtgatctctccgagaaattcccccaggcttctgcgcagaatgcttctcagcagcaacatccccaaacagcggcgtttcacggtggcacatacatgttttgatgtggacaatggcacatctgcgggacggagtcccttggatcccatgaccagcccaggatccgggctaattctccaagcaaattttgtccacagtcaacgacgggagtccttcctgtatcgatccgacagcgattatgacctctctccaaagtctatgtcccggaactcctccattgccagtgatatacacggagatgacttgattgtgactccatttgctcaggtcttggccagtctgcgaactgtacgaaacaactttgctgcattaactaatttgcaagatcgagcacctagcaaaagatcacccatgtgcaaccaaccatccatcaacaaagccaccataacagaggaggcctaccagaaactggccagcgagaccctggaggagctggactggtgtctggaccagctagagaccctacagaccaggcactccgtcagtgagatggcctccaacaagtttaaaaggatgcttaatcgggagctcacccatctctctgaaatgagtcggtctggaaatcaagtgtcagagtttatatcaaacacattcttagataagcaacatgaagtggaaattccttctccaactcagaaggaaaaggagaaaaagaaaagaccaatgtctcagatcagtggagtcaagaaattgatgcacagctctagtctgactaattcaagtatcccaaggtttggagttaaaactgaacaagaagatgtccttgccaaggaactagaagatgtgaacaaatggggtcttcatgttttcagaatagcagagttgtctggtaaccggcccttgactgttatcatgcacaccatttttcaggaacgggatttattaaaaacatttaaaattccagtagatactttaattacatatcttatgactctcgaagaccattaccatgctgatgtggcctatcacaacaatatccatgctgcagatgttgtccagtctactcatgtgctattatctacacctgctttggaggctgtgtttacagatttggagattcttgcagcaatttttgccagtgcaatacatgatgtagatcatcctggtgtgtccaatcaatttctgatcaatacaaactctgaacttgccttgatgtacaatgattcctcagtcttagagaaccatcatttggctgtgggctttaaattgcttcaggaagaaaactgtgacattttccagaatttgaccaaaaaacaaagacaatctttaaggaaaatggtcattgacatcgtacttgcaacagatatgtcaaaacacatgaatctactggctgatttgaagactatggttgaaactaagaaagtgacaagctctggagttcttcttcttgataattattccgataggattcaggttcttcagaatatggtgcactgtgcagatctgagcaacccaacaaagcctctccagctgtaccgccagtggacggaccggataatggaggagttcttccgccaaggagaccgagagagggaacgtggcatggagataagccccatgtgtgacaagcacaatgcttccgtggaaaaatcacaggtgggcttcatagactatattgttcatcccctctgggagacatgggcagacctcgtccaccctgacgcccaggatattttggacactttggaggacaatcgtgaatggtaccagagcacaatccctcagagcccctctcctgcacctgatgacccagaggagggccggcagggtcaaactgagaaattccagtttgaactaactttagaggaagatggtgagtcagacacggaaaaggacagtggcagtcaagtggaagaagacactagctgcagtgactccaagactctttgtactcaagactcagagtctactgaaattccccttgatgaacaggttgaagaggaggcagtaggggaagaagaggaaagccagcctgaagcctgtgtcatagatgatcgttctcctgacacgtaacagtgcaaaaactttcatgccttttttttttttaagtagaaaaattgtttccaaagtgcatgtcacatgccacaaccacggtcacacctcactgtcatctgccaggacgtttgttgaacaaaactgaccttgactactcagtccagcgctcaggaatatcgtaaccagttttttcacctccatgtcatccgagcaaggtggacatcttcacgaacagcgtttttaacaagatttcagcttggtagagctgacaaagcagataaaatctactccaaattattttcaagagagtgtgactcatcaggcagcccaaaagtttattggacttggggtttctattcctttttatttgtttgcaatattttcagaagaaaggcattgcacagagtgaacttaatggacgaagcaacaaatatgtcaagaacaggacatagcacgaatctgttaccagtaggaggaggatgagccacagaaattgcataattttctaatttcaagtcttcctgatacatgactgaatagtgtggttcagtgagctgcactgacctctacattttgtatgatatgtaaaacagattttttgtagagcttacttttattattaaatgtattgaggtattatatttaaaaaaaactatgttcagaacttcatctgccactggttatttttttctaaggagtaacttgcaagttttcagtacaaatctgtgctacactggataaaaatctaatttatgaattttacttgcaccttatagttcatagcaattaactgatttgtagtgattcattgtttgttttatataccaatgacttccatattttaaaagagaaaaacaactttatgttgcaggaaaccctttttgtaagtctttattatttactttgcattttgtttcactctttccagataagcagagttgctcttcaccagtgtttttcttcatgtgcaaagtgactatttgttctataatac

SEQ ID NO: 15145 - DNA, 2969 bp, Homo sapiens
  source 1..2969: mol_type = unassigned DNA
gtggtggccgcgcacccggccgcggctgattcattcacttcaagtgccgtgcagaaggctcggcaggcggggcgggcgtggggccgcggctccgggttggggaccgaggagatccggctgtggaccagacgctcctctgcggggcgggcacccaagcgcgctcgccaccccctcgccatccgctagagccgggctcctggactgggactcgggcccgccgcacagttgaaaagtcgcatagtggtttttccgctcgcgtcgctgtgtgaaagttggctcgccgctctttgcacgccctccctggaggccgacccgagacgccaagctggagagaccgtgcctccccgaggccggccgccccgcgagcacagcctccgcccccgttgcactgccgggctgggcaatatgaaggagcagccctcatgtgccggcaccgggcatccgagcatggcgggaggaggcctaccagaaactggccagcgagaccctggaggagctggactggtgtctggaccagctagagaccctacagaccaggcactccgtcagtgagatggcctccaacaagtttaaaaggatgcttaatcgggagctcacccatctctctgaaatgagtcggtctggaaatcaagtgtcagagtttatatcaaacacattcttagataagcaacatgaagtggaaattccttctccaactcagaaggaaaaggagaaaaagaaaagaccaatgtctcagatcagtggagtcaagaaattgatgcacagctctagtctgactaattcaagtatcccaaggtttggagttaaaactgaacaagaagatgtccttgccaaggaactagaagatgtgaacaaatggggtcttcatgttttcagaatagcagagttgtctggtaaccggcccttgactgttatcatgcacaccatttttcaggaacgggatttattaaaaacatttaaaattccagtagatactttaattacatatcttatgactctcgaagaccattaccatgctgatgtggcctatcacaacaatatccatgctgcagatgttgtccagtctactcatgtgctattatctacacctgctttggaggctgtgtttacagatttggagattcttgcagcaatttttgccagtgcaatacatgatgtagatcatcctggtgtgtccaatcaatttctgatcaatacaaactctgaacttgccttgatgtacaatgattcctcagtcttagagaaccatcatttggctgtgggctttaaattgcttcaggaagaaaactgtgacattttccagaatttgaccaaaaaacaaagacaatctttaaggaaaatggtcattgacatcgtacttgcaacagatatgtcaaaacacatgaatctactggctgatttgaagactatggttgaaactaagaaagtgacaagctctggagttcttcttcttgataattattccgataggattcaggttcttcagaatatggtgcactgtgcagatctgagcaacccaacaaagcctctccagctgtaccgccagtggacggaccggataatggaggagttcttccgccaaggagaccgagagagggaacgtggcatggagataagccccatgtgtgacaagcacaatgcttccgtggaaaaatcacaggtgggcttcatagactatattgttcatcccctctgggagacatgggcagacctcgtccaccctgacgcccaggatattttggacactttggaggacaatcgtgaatggtaccagagcacaatccctcagagcccctctcctgcacctgatgacccagaggagggccggcagggtcaaactgagaaattccagtttgaactaactttagaggaagatggtgagtcagacacggaaaaggacagtggcagtcaagtggaagaagacactagctgcagtgactccaagactctttgtactcaagactcagagtctactgaaattccccttgatgaacaggttgaagaggaggcagtaggggaagaagaggaaagccagcctgaagcctgtgtcatagatgatcgttctcctgacacgtaacagtgcaaaaactttcatgccttttttttttttaagtagaaaaattgtttccaaagtgcatgtcacatgccacaaccacggtcacacctcactgtcatctgccaggacgtttgttgaacaaaactgaccttgactactcagtccagcgctcaggaatatcgtaaccagttttttcacctccatgtcatccgagcaaggtggacatcttcacgaacagcgtttttaacaagatttcagcttggtagagctgacaaagcagataaaatctactccaaattattttcaagagagtgtgactcatcaggcagcccaaaagtttattggacttggggtttctattcctttttatttgtttgcaatattttcagaagaaaggcattgcacagagtgaacttaatggacgaagcaacaaatatgtcaagaacaggacatagcacgaatctgttaccagtaggaggaggatgagccacagaaattgcataattttctaatttcaagtcttcctgatacatgactgaatagtgtggttcagtgagctgcactgacctctacattttgtatgatatgtaaaacagattttttgtagagcttacttttattattaaatgtattgaggtattatatttaaaaaaaactatgttcagaacttcatctgccactggttatttttttctaaggagtaacttgcaagttttcagtacaaatctgtgctacactggataaaaatctaatttatgaattttacttgcaccttatagttcatagcaattaactgatttgtagtgattcattgtttgttttatataccaatgacttccatattttaaaagagaaaaacaactttatgttgcaggaaaccctttttgtaagtctttattatttactttgcatt

SEQ ID NO: 15146 - DNA, 2599 bp, Homo sapiens
  source 1..2599: mol_type = unassigned DNA
agttccttatttggtagcttttgacaggactagcctttcttgcaactaagcatcttgacatacattattcattaagccctggagctcgggagagaaagatgcagacccttagatctttagatattcctttatcacgtggattttctttattcagaatagttgctgaattttgtgccattctggagtcttacaaatggcatgtattcgatgggaagacggctggatgggatttaatgcgaggctttcttatgtatacttaattaccaaaaatctttaaaaactcatactctgcgtggcttgtggaggttgttaaagtgtcgagattttgaagctaaatacattttagagcttactatatatatacatatatatatatatacatataatcaatcaaaaatgcctgaagcaaactatttactgtcagtgtcttggggctacataaagtttaaaaggatgcttaatcgggagctcacccatctctctgaaatgagtcggtctggaaatcaagtgtcagagtttatatcaaacacattcttagataagcaacatgaagtggaaattccttctccaactcagaaggaaaaggagaaaaagaaaagaccaatgtctcagatcagtggagtcaagaaattgatgcacagctctagtctgactaattcaagtatcccaaggtttggagttaaaactgaacaagaagatgtccttgccaaggaactagaagatgtgaacaaatggggtcttcatgttttcagaatagcagagttgtctggtaaccggcccttgactgttatcatgcacaccatttttcaggaacgggatttattaaaaacatttaaaattccagtagatactttaattacatatcttatgactctcgaagaccattaccatgctgatgtggcctatcacaacaatatccatgctgcagatgttgtccagtctactcatgtgctattatctacacctgctttggaggctgtgtttacagatttggagattcttgcagcaatttttgccagtgcaatacatgatgtagatcatcctggtgtgtccaatcaatttctgatcaatacaaactctgaacttgccttgatgtacaatgattcctcagtcttagagaaccatcatttggctgtgggctttaaattgcttcaggaagaaaactgtgacattttccagaatttgaccaaaaaacaaagacaatctttaaggaaaatggtcattgacatcgtacttgcaacagatatgtcaaaacacatgaatctactggctgatttgaagactatggttgaaactaagaaagtgacaagctctggagttcttcttcttgataattattccgataggattcaggttcttcagaatatggtgcactgtgcagatctgagcaacccaacaaagcctctccagctgtaccgccagtggacggaccggataatggaggagttcttccgccaaggagaccgagagagggaacgtggcatggagataagccccatgtgtgacaagcacaatgcttccgtggaaaaatcacaggtgggcttcatagactatattgttcatcccctctgggagacatgggcagacctcgtccaccctgacgcccaggatattttggacactttggaggacaatcgtgaatggtaccagagcacaatccctcagagcccctctcctgcacctgatgacccagaggagggccggcagggtcaaactgagaaattccagtttgaactaactttagaggaagatggtgagtcagacacggaaaaggacagtggcagtcaagtggaagaagacactagctgcagtgactccaagactctttgtactcaagactcagagtctactgaaattccccttgatgaacaggttgaagaggaggcagtaggggaagaagaggaaagccagcctgaagcctgtgtcatagatgatcgttctcctgacacgtaacagtgcaaaaactttcatgccttttttttttttaagtagaaaaattgtttccaaagtgcatgtcacatgccacaaccacggtcacacctcactgtcatctgccaggacgtttgttgaacaaaactgaccttgactactcagtccagcgctcaggaatatcgtaaccagttttttcacctccatgtcatccgagcaaggtggacatcttcacgaacagcgtttttaacaagatttcagcttggtagagctgacaaagcagataaaatctactccaaattattttcaagagagtgtgactcatcaggcagcccaaaagtttattggacttggggtttctattcctttttatttgtttgcaatattttcagaagaaaggcattgcacagagtgaacttaatggacgaagcaacaaatatgtcaagaacaggacatagcacgaatctgttaccagtaggaggaggatgagccacagaaattgcataattttctaatttcaagtcttcctgatacatgactgaatagtgtggttcagtgagctgcactgacctctacattttgtatgatatgtaaaacagattttttgtagagcttacttttattattaaatgtattgaggtattatatttaaaaaaaactatgttcagaa

SEQ ID NO: 15147 - DNA, 2860 bp, Homo sapiens
  source 1..2860: mol_type = unassigned DNA
ttctcactgccctgcggtgttttgaactgccttcttacagacgtcatacagcccttgaggaatagtttctgcctggtgagattgaatgatagttctcattcacaaaaccctggattctaagcagggacacacagaaattactttcgcaggtaaatcagcccacccagccaaagtgtggagagatttgttccttggctgacttctttgctccacggagaggagtgttttcctgtgcttgccctgaaatggaacttccttgacagctctcccgtgttacagtacctcccggtcattttctttttctctctctctacctgcgctcttcgagtgtcagaaacctttaaagctgttactatggaattgcaaaaaagagatcaagtgactctttcactatgctggtttcccttgtgacccagatgaagaatcaattcagaattcagttcctcccttggcattgcaagacacagaagaaactgtcacttcctaacagcctagtactggagtaaattcagtatgaaggaagaaagcgctcctgcgtgttagaaccttgcccatgagctggaccgaggacaggagatggactccaggaaaattggatttcttcaagcagcctcccttggaaatggaatatctttaaaatcttctttgcagaaagacagttagaatgtattaatcagaatagttgaagacttattttcctttttattttttttcaaaatgagcattattatgaagccaagatcccgatctacaagttccctaaggactgcagaggcagtttgttttgatgtggacaatggcacatctgcgggacggagtcccttggatcccatgaccagcccaggatccgggctaattctccaagcaaattttgtccacagtcaacgacgggagtccttcctgtatcgatccgacagcgattatgacctctctccaaagtctatgtcccggaactcctccattgccagtgatatacacggagatgacttgattgtgactccatttgctcaggtcttggccagtctgcgaactgtacgaaacaactttgctgcattaactaatttgcaagatcgagcacctagcaaaagatcacccatgtgcaaccaaccatccatcaacaaagccaccataacagaggaggcctaccagaaactggccagcgagaccctggaggagctggactggtgtctggaccagctagagaccctacagaccaggcactccgtcagtgagatggcctccaacaagtttaaaaggatgcttaatcgggagctcacccatctctctgaaatgagtcggtctggaaatcaagtgtcagagtttatatcaaacacattcttagataagcaacatgaagtggaaattccttctccaactcagaaggaaaaggagaaaaagaaaagaccaatgtctcagatcagtggagtcaagaaattgatgcacagctctagtctgactaattcaagtatcccaaggtttggagttaaaactgaacaagaagatgtccttgccaaggaactagaagatgtgaacaaatggggtcttcatgttttcagaatagcagagttgtctggtaaccggcccttgactgttatcatgcacaccatttttcaggaacgggatttattaaaaacatttaaaattccagtagatactttaattacatatcttatgactctcgaagaccattaccatgctgatgtggcctatcacaacaatatccatgctgcagatgttgtccagtctactcatgtgctattatctacacctgctttggaggctgtgtttacagatttggagattcttgcagcaatttttgccagtgcaatacatgatgtagatcatcctggtgtgtccaatcaatttctgatcaatacaaactctgaacttgccttgatgtacaatgattcctcagtcttagagaaccatcatttggctgtgggctttaaattgcttcaggaagaaaactgtgacattttccagaatttgaccaaaaaacaaagacaatctttaaggaaaatggtcattgacatcgtacttgcaacagatatgtcaaaacacatgaatctactggctgatttgaagactatggttgaaactaagaaagtgacaagctctggagttcttcttcttgataattattccgataggattcaggttcttcagaatatggtgcactgtgcagatctgagcaacccaacaaagcctctccagctgtaccgccagtggacggaccggataatggaggagttcttccgccaaggagaccgagagagggaacgtggcatggagataagccccatgtgtgacaagcacaatgcttccgtggaaaaatcacaggtgggcttcatagactatattgttcatcccctctgggagacatgggcagacctcgtccaccctgacgcccaggatattttggacactttggaggacaatcgtgaatggtaccagagcacaatccctcagagcccctctcctgcacctgatgacccagaggagggccggcagggtcaaactgagaaattccagtttgaactaactttagaggaagatggtgagtcagacacggaaaaggacagtggcagtcaagtggaagaagacactagctgcagtgactccaagactctttgtactcaagactcagagtctactgaaattccccttgatgaacaggttgaagaggaggcagtaggggaagaagaggaaagccagcctgaagcctgtgtcatagatgatcgttctcctgacacgtaacagtgcaaaaactttcatgccttttttttttttaagtagaaaaattgtttccaaagtgcatgtcacatgccacaaccacggtcacacctcactgtcatctgcc

SEQ ID NO: 15148 - DNA, 2294 bp, Homo sapiens
  source 1..2294: mol_type = unassigned DNA
actgcacaaaggaaatgccctcactcagctacaagtgcctcctgctccgtgcggggcctcagggccccagagccccgcaccagctctgacttctcgtggttcctggggatcttggcatcgtccttaaaaatggcttttgtttgggatcctctgggagccacggtgccaggaccatctacaagagccaaatcaagattgcgtttctcaaagtcctacagttttgatgtggacaatggcacatctgcgggacggagtcccttggatcccatgaccagcccaggatccgggctaattctccaagcaaattttgtccacagtcaacgacgggagtccttcctgtatcgatccgacagcgattatgacctctctccaaagtctatgtcccggaactcctccattgccagtgatatacacggagatgacttgattgtgactccatttgctcaggtcttggccagtctgcgaactgtacgaaacaactttgctgcattaactaatttgcaagatcgagcacctagcaaaagatcacccatgtgcaaccaaccatccatcaacaaagccaccataacagaggaggcctaccagaaactggccagcgagaccctggaggagctggactggtgtctggaccagctagagaccctacagaccaggcactccgtcagtgagatggcctccaacaagtttaaaaggatgcttaatcgggagctcacccatctctctgaaatgagtcggtctggaaatcaagtgtcagagtttatatcaaacacattcttagataagcaacatgaagtggaaattccttctccaactcagaaggaaaaggagaaaaagaaaagaccaatgtctcagatcagtggagtcaagaaattgatgcacagctctagtctgactaattcaagtatcccaaggtttggagttaaaactgaacaagaagatgtccttgccaaggaactagaagatgtgaacaaatggggtcttcatgttttcagaatagcagagttgtctggtaaccggcccttgactgttatcatgcacaccatttttcaggaacgggatttattaaaaacatttaaaattccagtagatactttaattacatatcttatgactctcgaagaccattaccatgctgatgtggcctatcacaacaatatccatgctgcagatgttgtccagtctactcatgtgctattatctacacctgctttggaggctgtgtttacagatttggagattcttgcagcaatttttgccagtgcaatacatgatgtagatcatcctggtgtgtccaatcaatttctgatcaatacaaactctgaacttgccttgatgtacaatgattcctcagtcttagagaaccatcatttggctgtgggctttaaattgcttcaggaagaaaactgtgacattttccagaatttgaccaaaaaacaaagacaatctttaaggaaaatggtcattgacatcgtacttgcaacagatatgtcaaaacacatgaatctactggctgatttgaagactatggttgaaactaagaaagtgacaagctctggagttcttcttcttgataattattccgataggattcaggttcttcagaatatggtgcactgtgcagatctgagcaacccaacaaagcctctccagctgtaccgccagtggacggaccggataatggaggagttcttccgccaaggagaccgagagagggaacgtggcatggagataagccccatgtgtgacaagcacaatgcttccgtggaaaaatcacaggtgggcttcatagactatattgttcatcccctctgggagacatgggcagacctcgtccaccctgacgcccaggatattttggacactttggaggacaatcgtgaatggtaccagagcacaatccctcagagcccctctcctgcacctgatgacccagaggagggccggcagggtcaaactgagaaattccagtttgaactaactttagaggaagatggtgagtcagacacggaaaaggacagtggcagtcaagtggaagaagacactagctgcagtgactccaagactctttgtactcaagactcagagtctactgaaattccccttgatgaacaggttgaagaggaggcagtaggggaagaagaggaaagccagcctgaagcctgtgtcatagatgatcgttctcctgacacgtaacagtgcaaaaactttcatgccttttttttttttaagtagaaaaattgtttccaaagtgcatgtcacatgccacaaccacggtcacacctcactgtcatctg

SEQ ID NO: 15149 - DNA, 2175 bp, Homo sapiens
  source 1..2175: mol_type = unassigned DNA
aacgtggtggccgcgcacccggccgcggctgattcattcacttcaagtgccgtgcagaaggctcggcaggcggggcgggcgtggggccgcggctccgggttggggaccgaggagatccggctgtggaccagacgctcctctgcggggcgggcacccaagcgcgctcgccaccccctcgccatccgctagagccgggctcctggactgggactcgggcccgccgcacagttgaaaagtcgcatagtggtttttccgctcgcgtcgctgtgtgaaagttggctcgccgctctttgcacgccctccctggaggccgacccgagacgccaagctggagagaccgtgcctccccgaggccggccgccccgcgagcacagcctccgcccccgttgcactgccgggctgggcaatatgaaggagcagccctcatgtgccggcaccgggcatccgagcatggcggggtatggcaggatggccccctttgaactcgctagcggacccgtgaagcgcttgagaactgagtccccctttccctgtctcttcgcagaggaggcctaccagaaactggccagcgagaccctggaggagctggactggtgtctggaccagctagagaccctacagaccaggcactccgtcagtgagatggcctccaacaagtttaaaaggatgcttaatcgggagctcacccatctctctgaaatgagtcggtctggaaatcaagtgtcagagtttatatcaaacacattcttagataagcaacatgaagtggaaattccttctccaactcagaaggaaaaggagaaaaagaaaagaccaatgtctcagatcagtggagtcaagaaattgatgcacagctctagtctgactaattcaagtatcccaaggtttggagttaaaactgaacaagaagatgtccttgccaaggaactagaagatgtgaacaaatggggtcttcatgttttcagaatagcagagttgtctggtaaccggcccttgactgttatcatgcacaccatttttcaggaacgggatttattaaaaacatttaaaattccagtagatactttaattacatatcttatgactctcgaagaccattaccatgctgatgtggcctatcacaacaatatccatgctgcagatgttgtccagtctactcatgtgctattatctacacctgctttggaggctgtgtttacagatttggagattcttgcagcaatttttgccagtgcaatacatgatgtagatcatcctggtgtgtccaatcaatttctgatcaatacaaactctgaacttgccttgatgtacaatgattcctcagtcttagagaaccatcatttggctgtgggctttaaattgcttcaggaagaaaactgtgacattttccagaatttgaccaaaaaacaaagacaatctttaaggaaaatggtcattgacatcgtacttgcaacagatatgtcaaaacacatgaatctactggctgatttgaagactatggttgaaactaagaaagtgacaagctctggagttcttcttcttgataattattccgataggattcaggttcttcagaatatggtgcactgtgcagatctgagcaacccaacaaagcctctccagctgtaccgccagtggacggaccggataatggaggagttcttccgccaaggagaccgagagagggaacgtggcatggagataagccccatgtgtgacaagcacaatgcttccgtggaaaaatcacaggtgggcttcatagactatattgttcatcccctctgggagacatgggcagacctcgtccaccctgacgcccaggatattttggacactttggaggacaatcgtgaatggtaccagagcacaatccctcagagcccctctcctgcacctgatgacccagaggagggccggcagggtcaaactgagaaattccagtttgaactaactttagaggaagatggtgagtcagacacggaaaaggacagtggcagtcaagtggaagaagacactagctgcagtgactccaagactctttgtactcaagactcagagtctactgaaattccccttgatgaacaggttgaagaggaggcagtaggggaagaagaggaaagccagcctgaagcctgtgtcatagatgatcgttctcctgacacgtaacagtgcaaa

SEQ ID NO: 15150 - DNA, 2478 bp, Homo sapiens
  source 1..2478: mol_type = unassigned DNA
aagcacgagtcctatagttggcgtaccctgaggcctgccagttcctgccttaatgcatatgtagtcgtaattgagttctgacacggccttggatgtttctgtcctaaatagctgacattgcatcttcaagactgtcattccagttggcttttgagtggatacgtgcagtgagatcattgacactggaaacactagttcccattttaattacttaaaacaccacgatgaaaagaaatacctgtgatttgctttctcggagcaaaagtgcctctgaggaaacactacattccagtaatgaagaggaagaccctttccgcggaatggaaccctatcttgtccggagactttcatgtcgcaatattcagcttccccctctcgccttcagacagttggaacaagctgacttgaaaagtgaatcagagaacattcaacgaccaaccagcctccccctgaagattctgccgctgattgctatcacttctgcagaatccagtggttttgatgtggacaatggcacatctgcgggacggagtcccttggatcccatgaccagcccaggatccgggctaattctccaagcaaattttgtccacagtcaacgacgggagtccttcctgtatcgatccgacagcgattatgacctctctccaaagtctatgtcccggaactcctccattgccagtgatatacacggagatgacttgattgtgactccatttgctcaggtcttggccagtctgcgaactgtacgaaacaactttgctgcattaactaatttgcaagatcgagcacctagcaaaagatcacccatgtgcaaccaaccatccatcaacaaagccaccataacagaggaggcctaccagaaactggccagcgagaccctggaggagctggactggtgtctggaccagctagagaccctacagaccaggcactccgtcagtgagatggcctccaacaagtttaaaaggatgcttaatcgggagctcacccatctctctgaaatgagtcggtctggaaatcaagtgtcagagtttatatcaaacacattcttagataagcaacatgaagtggaaattccttctccaactcagaaggaaaaggagaaaaagaaaagaccaatgtctcagatcagtggagtcaagaaattgatgcacagctctagtctgactaattcaagtatcccaaggtttggagttaaaactgaacaagaagatgtccttgccaaggaactagaagatgtgaacaaatggggtcttcatgttttcagaatagcagagttgtctggtaaccggcccttgactgttatcatgcacaccatttttcaggaacgggatttattaaaaacatttaaaattccagtagatactttaattacatatcttatgactctcgaagaccattaccatgctgatgtggcctatcacaacaatatccatgctgcagatgttgtccagtctactcatgtgctattatctacacctgctttggaggctgtgtttacagatttggagattcttgcagcaatttttgccagtgcaatacatgatgtagatcatcctggtgtgtccaatcaatttctgatcaatacaaactctgaacttgccttgatgtacaatgattcctcagtcttagagaaccatcatttggctgtgggctttaaattgcttcaggaagaaaactgtgacattttccagaatttgaccaaaaaacaaagacaatctttaaggaaaatggtcattgacatcgtacttgcaacagatatgtcaaaacacatgaatctactggctgatttgaagactatggttgaaactaagaaagtgacaagctctggagttcttcttcttgataattattccgataggattcaggttcttcagaatatggtgcactgtgcagatctgagcaacccaacaaagcctctccagctgtaccgccagtggacggaccggataatggaggagttcttccgccaaggagaccgagagagggaacgtggcatggagataagccccatgtgtgacaagcacaatgcttccgtggaaaaatcacaggtgggcttcatagactatattgttcatcccctctgggagacatgggcagacctcgtccaccctgacgcccaggatattttggacactttggaggacaatcgtgaatggtaccagagcacaatccctcagagcccctctcctgcacctgatgacccagaggagggccggcagggtcaaactgagaaattccagtttgaactaactttagaggaagatggtgagtcagacacggaaaaggacagtggcagtcaagtggaagaagacactagctgcagtgactccaagactctttgtactcaagactcagagtctactgaaattccccttgatgaacaggttgaagaggaggcagtaggggaagaagaggaaagccagcctgaagcctgtgtcatagatgatcgttctcctgacacgtaacagtgca

SEQ ID NO: 15151 - DNA, 1430 bp, Homo sapiens
  source 1..1430: mol_type = unassigned DNA
gacagaagatctgcgaacatgatgcacgtgaataattttccctttagaaggcattcctggatatgaggaggcctaccagaaactggccagcgagaccctggaggagctggactggtgtctggaccagctagagaccctacagaccaggcactccgtcagtgagatggcctccaacaagtttaaaaggatgcttaatcgggagctcacccatctctctgaaatgagtcggtctggaaatcaagtgtcagagtttatatcaaacacattcttagataagcaacatgaagtggaaattccttctccaactcagaaggaaaaggagaaaaagaaaagaccaatgtctcagatcagtggagtcaagaaattgatgcacagctctagtctgactaattcaagtatcccaaggtttggagttaaaactgaacaagaagatgtccttgccaaggaactagaagatgtgaacaaatggggtcttcatgttttcagaatagcagagttgtctggtaaccggcccttgactgttatcatgcacaccatttttcaggaacgggatttattaaaaacatttaaaattccagtagatactttaattacatatcttatgactctcgaagaccattaccatgctgatgtggcctatcacaacaatatccatgctgcagatgttgtccagtctactcatgtgctattatctacacctgctttggaggctgtgtttacagatttggagattcttgcagcaatttttgccagtgcaatacatgatgtagatcatcctggtgtgtccaatcaatttctgatcaatacaaactctgaacttgccttgatgtacaatgattcctcagtcttagagaaccatcatttggctgtgggctttaaattgcttcaggaagaaaactgtgacattttccagaatttgaccaaaaaacaaagacaatctttaaggaaaatggtcattgacatcgtacttgcaacagatatgtcaaaacacatgaatctactggctgatttgaagactatggttgaaactaagaaagtgacaagctctggagttcttcttcttgataattattccgataggattcaggttcttcagaatatggtgcactgtgcagatctgagcaacccaacaaagcctctccagctgtaccgccagtggacggaccggataatggaggagttcttccgccaaggagaccgagagagggaacgtggcatggagataagccccatgtgtgacaagcacaatgcttccgtggaaaaatcacaggtgggcttcatagactatattgttcatcccctctgggagacatgggcagacctcgtccaccctgacgcccaggatattttggacactttggaggacaatcgtgaatggtaccagagcacaatccctcagagcccctctcctgcacctgatgacccagagg

SEQ ID NO: 15152 - DNA, 2025 bp, Homo sapiens
  source 1..2025: mol_type = unassigned DNA
atggctcagcagacaagcccggacactttaacagtacctgaagtggataatccgcattgtccaaacccgtggctgaacgaagaccttgtgaaatccttgcgagaaaacctgttgcagcatgagaagtccaagacagcgaggaaatcggtttctcccaagctctctccagtgatctctccgagaaattcccccaggcttctgcgcagaatgcttctcagcagcaacatccccaaacagcggcgtttcacggtggcacatacatgttttgatgtggacaatggcacatctgcgggacggagtcccttggatcccatgaccagcccaggatccgggctaattctccaagcaaattttgtccacagtcaacgacgggagtccttcctgtatcgatccgacagcgattatgacctctctccaaagtctatgtcccggaactcctccattgccagtgatatacacggagatgacttgattgtgactccatttgctcaggtcttggccagtctgcgaactgtacgaaacaactttgctgcattaactaatttgcaagatcgagcacctagcaaaagatcacccatgtgcaaccaaccatccatcaacaaagccaccataacagggctctataatgggatcattgcatttctctgattactaatgagaaggaggcctaccagaaactggccagcgagaccctggaggagctggactggtgtctggaccagctagagaccctacagaccaggcactccgtcagtgagatggcctccaacaagtttaaaaggatgcttaatcgggagctcacccatctctctgaaatgagtcggtctggaaatcaagtgtcagagtttatatcaaacacattcttagataagcaacatgaagtggaaattccttctccaactcagaaggaaaaggagaaaaagaaaagaccaatgtctcagatcagtggagtcaagaaattgatgcacagctctagtctgactaattcaagtatcccaaggtttggagttaaaactgaacaagaagatgtccttgccaaggaactagaagatgtgaacaaatggggtcttcatgttttcagaatagcagagttgtctggtaaccggcccttgactgttatcatgcacaccatttttcaggaacgggatttattaaaaacatttaaaattccagtagatactttaattacatatcttatgactctcgaagaccattaccatgctgatgtggcctatcacaacaatatccatgctgcagatgttgtccagtctactcatgtgctattatctacacctgctttggaggctgtgtttacagatttggagattcttgcagcaatttttgccagtgcaatacatgatgtagatcatcctggtgtgtccaatcaatttctgatcaatacaaactctgaacttgccttgatgtacaatgattcctcagtcttagagaaccatcatttggctgtgggctttaaattgcttcaggaagaaaactgtgacattttccagaatttgaccaaaaaacaaagacaatctttaaggaaaatggtcattgacatcgtacttgcaacagatatgtcaaaacacatgaatctactggctgatttgaagactatggttgaaactaagaaagtgacaagctctggagttcttcttcttgataattattccgataggattcaggttcttcagaatatggtgcactgtgcagatctgagcaacccaacaaagcctctccagctgtaccgccagtggacggaccggataatggaggagttcttccgccaaggagaccgagagagggaacgtggcatggagataagccccatgtgtgacaagcacaatgcttccgtggaaaaatcacaggtgggcttcatagactatattgttcatcccctctgggagacatgggcagacctcgtccaccctgacgcccaggatattttggacactttggaggacaatcgtgaatggtaccagagcacaatccctcagagcccctctcctgcacctgatgacccagagg

SEQ ID NO: 15153 - DNA, 512 bp, Homo sapiens
  source 1..512: mol_type = unassigned DNA
agcgctacctgtactgtcgcgccatggaccgcacctcctacgcggtggagaccggccaccggcccggcctgaagaaatccaggatgtcctggccctcctcgttccagggactcaggcgttttgatgtggacaatggcacatctgcgggacggagtcccttggatcccatgaccagcccaggatccgggctaattctccaagcaaattttgtccacagtcaacgacgggagtccttcctgtatcgatccgacagcgattatgacctctctccaaagtctatgtcccggaactcctccattgccagtgatatacacggagatgacttgattgtgactccatttgctcaggtcttggccagtctgcgaactgtacgaaacaactttgctgcattaactaatttgcaagatcgagcacctagcaaaagatcacccatgtgcaaccaaccatccatcaacaaagccaccataacagtttaaaaggatgcttaatcgggagctcacccatctctctga

SEQ ID NO: 15154 - DNA, 1040 bp, Homo sapiens
  source 1..1040: mol_type = unassigned DNA
gaggcaggcgactgaatgcactaacagcagcaggctcagacctgcttccctggacatttccgggaccgtgagcgagggaaccacgttgccctggattcttgccagctgtacaaagttgaccaggaaaatggctcagcagacaagcccggacactttaacagtacctgaagtggataatccgcattgtccaaacccgtggctgaacgaagaccttgtgaaatccttgcgagaaaacctgttgcagcatgagaagtccaagacagcgaggaaatcggtttctcccaagctctctccagtgatctctccgagaaattcccccaggcttctgcgcagaatgcttctcagcagcaacatccccaaacagcggcgtttcacggtggcacatacatgttttgatgtggacaatggcacatctgcgggacggagtcccttggatcccatgaccagcccaggatccgggctaattctccaagcaaattttgtccacagtcaacgacgggagtccttcctgtatcgatccgacagcgattatgacctctctccaaagtctatgtcccggaactcctccattgccagtgatatacacggagatgacttgattgtgactccatttgctcaggtcttggccagtctgcgaactgtacgaaacaactttgctgcattaactaatttgcaagatcgagcacctagcaaaagatcacccatgtgcaaccaaccatccatcaacaaagccaccataacaggatcctggatggaattgaacccatatacgttacttgacatgtgaaacacgtgtgaccctggcagatgatttggctgaccttgaaaactacagctgtttagtcactttgaaaacaatgcaatacaagtgatttactaggcttcagttttaaccattttatgctgactggtggaaattctaacccttcagaaagaaaaaaaaattgtgaagcaatggaaatgtaccatcctgggtattaatgtcattaattttcaatacattttctcacaaaaagtataaagaagtctttgcttgacct

SEQ ID NO: 15155 - DNA, 709 bp, Homo sapiens
  source 1..709: mol_type = unassigned DNA
ttttgatgtggacaatggcacatctgcgggacggagtcccttggatcccatgaccagcccaggatccgggctaattctccaagcaaattttgtccacagtcaacgacgggagtccttcctgtatcgatccgacagcgattatgacctctctccaaagtctatgtcccggaactcctccattgccagtgatatacacggagatgacttgattgtgactccatttgctcaggtcttggccagtctgcgaactgtacgaaacaactttgctgcattaactaatttgcaagatcgagcacctagcaaaagatcacccatgtgcaaccaaccatccatcaacaaagccaccataacagtattttccatgcaccttatatatggcatgcatacgctctggaggtaaaatgtgactactggttcaagaaatttacaaaaccctcccttgctgtttctctttactggaaactgttgagggtactggaaataaaggagaaggccaatgtatctaagaccagtggatcagagaggagcccaagaaccttcatcatttccacagaaagggcagcagaggaaattaacctggccttttgtcatgctattatttctcaagatccagatggtacctgtcattaatgtatccctgagaactcagttcctctgaaggcacaaaaataatttgaccatctcatcatttgatccacacacatttatt

SEQ ID NO: 15156 - DNA, 443 bp, Homo sapiens
  source 1..443: mol_type = unassigned DNA
gagtcccttggatcccatgaccagcccaggatccgggctaattctccaagcaaattttgtccacagtcaacgacgggagtccttcctgtatcgatccgacagcgattatgacctctctccaaagtctatgtcccggaactcctccattgccagtgatatacacggagatgacttgattgtgactccatttgctcaggtcttggccagtctgcgaactgtacgaaacaactttgctgcattaactaatttgcaagatcgagcacctagcaaaagatcacccatgtgcaaccaaccatccatcaacaaagccaccataacaggagcggtgaaactagtacagctgcctgctctttacctgtagggggagacacatgatgcagtgacaagcatagaacagcacagaagtggttttagtccagaaaataaataaataagtaaattgg

SEQ ID NO: 15157 - DNA, 733 bp, Homo sapiens
  source 1..733: mol_type = unassigned DNA
gtcgcaatattcagcttccccctctcgccttcagacagttggaacaagctgacttgaaaagtgaatcagagaacattcaacgaccaaccagcctccccctgaagattctgccgctgattgctatcacttctgcagaatccagtggagagaatgtctctcctccatctgcgaagtgctgcattttaggtttgatctgacaatttgatgcaacggctcagttttgatgtggacaatggcacatctgcgggacggagtcccttggatcccatgaccagcccaggatccgggctaattctccaagcaaattttgtccacagtcaacgacgggagtccttcctgtatcgatccgacagcgattatgacctctctccaaagtctatgtcccggaactcctccattgccagtgatatgtaagtacaagggcaggcaaagagagagaaaaccgagtaaatttatatctagagctgatgacataataaaactaatgacttttgttcaactgtatcactctcctccaatgtagaaagaatatgaataaaattatacaagctagaaatgaatggtagatttaacctgagtgcactgtcactcttgattaacacacacacacacacacacacacacacacacacacgcatgtatttattttcccagaaaatactttataggaaaactgagaattaaatttttaatggaaactaacacttaaatcattagcttatatttatgtaga

SEQ ID NO: 15158 - DNA, 536 bp, Homo sapiens
  source 1..536: mol_type = unassigned DNA
cactacattccagtaatgaagaggaagaccctttccgcggaatggaaccctatcttgtccggagactttcatgtcgcaatattcagcttccccctctcgccttcagacagttggaacaagctgacttgaaaagtgaatcagagaacattcaacgaccaaccagcctccccctgaagattctgccgctgattgctatcacttctgcagaatccagtgggctttccagatccctgaagataaaatacaaactctccaacaagaccttttggccatcaggaacgcagcacctggctctctcactactgttaccctagcatgactgcttcagcgaagagataagagcttctttgactttttccactggaatttttcatgccagaagaaattgaacatgtgagcctggtgtctggaagagtagcctggatttatggtatcagatgcacatttttaacaccttcagttttctctttaaaatatctcttcaatcccttacttttctctatttgtttcaacattaaaatatgttatttttcttc

SEQ ID NO: 15159 - DNA, 2809 bp, Homo sapiens
  source 1..2809: mol_type = unassigned DNA
aaagagaggctttctgtgtcctgggaatgttctgctaagaagacagtgatgataatagttaccactgaataagtactgacatgtgaggaactaccaggatccctgctttacaggaagaagccgaggctcagaagtacacttgtctaaggtcccagaacaagtcattccagttggcttttgagtggatacgtgcagtgagatcattgacactggaaacactagttcccattttaattacttaaaacaccacgatgaaaagaaatacctgtgatttgctttctcggagcaaaagtgacaaaaagtaagagatgtggagaggaagacaggaatactagggaaaagtttctctttctccaatcactcactctggaggcagctagctgtcaactcacaaagacactcaagcagcctatggaagaaggccacatggtaaaatatggaggcctccagccaacagtcagcaaggaactgagacaagtcaacaaccatgcctctgaggaaacactacattccagtaatgaagaggaagaccctttccgcggaatggaaccctatcttgtccggagactttcatgtcgcaatattcagcttccccctctcgccttcagacagttggaacaagctgacttgaaaagtgaatcagagaacattcaacgaccaaccagcctccccctgaagattctgccgctgattgctatcacttctgcagaatccagtgggtgagtgccctcagatgtcatttccccattttatattttagatggtgattgttgtctgtggtcttttgagtttttgtggctcattgcttgatttgagtgggagaacaatggggtttctagagtcaaaaaaaaaaggatgaatttctcaggtgacatttctatatctgcaggagaagacattttagtgaaattgttttacatggaagagctgaaaatgtattggtgaatgctaataaacatttgccaaagggcagttgtacttggaaaattaatattggccatatgtgacttgatagaagacattttaacaaatgagaactaatggacaaattaccatgtagtgatacatgtctagaaacaataggaaatgttcactgatgcaaaatgaatttggaatcaagaataaattgtattgtaattagaatcaaaagaaatatgcaatggtattcatgagtctaaaaattttgcctttgacattttgaggtattgcttaccagaatactatttcagctcccagtataaggtgattttatttagcattagtacttatagaggagtcagccacagccacgtctccatcatgtaacatttttatttcctactttgcagggtataatttttgtttttattctttttcgtgttgtttaccaatggagttttacactttaaagcaatgtcaccagtttaaaaattgtgaaagaaagtaaggatattgggcacatcaattatttgttcttgtgaccagctgcatttttaagaagcctggatagaaaggaaagaggatgaagccagtgggccatacatagatagactcttgaacatttgctaaaactacaagaacaaaacaattactatgctacaaatgtgatggtcccacattctctgccaagttaaaggcatctctggggaaaatgtcttttggatcttgttaaagttaggaaggttgtgctcagaggaaatttggctagtaactcaactcaaagatactgaatttagctgttttacttgttattgaccagtctaagggacctgtgttagaaaaaggtatgaggaaaatactactagataaataataagaaaacaaatattcaccttgaagcaatgaaaagaggaaatatattttgtttctgttgttgtaattgaactatgtgtttaaagaagaatgcacacacattgatcagactcatactaaagcagatgggaattttatatgacagcttgacctgaacattttttgaaaaatgctgttcccctgaaactatttctcctttctttggaaataacattgctgccgttcattctgtgtagaagagattcacagatatcaggtgtatccagggatcccaagatcaccctcgggttcaatgatttgctagcagagctctcataattcagcaaatagtcatattcatggctctgatgtgttatagcaaaaggattcaatgcaaaataagcaaagggaaaggtagatggaacaaaatctggaggaaaccaaacataagcttccaagagtccccaagtgaagtaagacaagatacacttaattcctccagtaatgagttgagacaacacttgtgaaatgtgttcaccagggatgcctttaccagggaagcctattaaagactcagtacctagagtttttactggaggccagtcacttaggtaccctctgcctaggatatacaaacttccagatttccagaaggaaagtggatatgcagcataaaccacattatttgcacagacagtttaggcaaattgagccagtcttaccatttagagaatggtggatcactcctgaaagtcaggtctgctaaaggccaatgtttcaaacaggtcttcctatatttaattgacacagtcctgattaactgtttactacacaccaggttatcttagaatagttatcttactttcttcacacttgtggaagaagagattataattaaaattaaaatgcactaatttaaagccctgatatattcaattagctttggtatctcaaaaattttggttgctaaccatgatttctcattttgagttggtgttatatcatgtgcccttaaaataaaatgatgcaatatacctaa

SEQ ID NO: 15160 - DNA, 847 bp, Homo sapiens
  source 1..847: mol_type = unassigned DNA
agattatagcccagcgtacgagaagcacgagtcctatagttggcgtaccctgaggcctgccagttcctgccttaatgcatatgtagtcgtaattgagttctgacacggccttggatgtttctgtcctaaatagctgacattgcatcttcaagactgtcattccagttggcttttgagtggatacgtgcagtgagatcattgacactggaaacactagttcccattttaattacttaaaacaccacgatgaaaagaaatacctgtgatttgctttctcggagcaaaagtgcctctgaggaaacactacattccagtaatgaagaggaagaccctttccgcggaatggaaccctatcttgtccggagactttcatgtcgcaatattcagcttccccctctcgccttcagacagttggaacaagctgacttgaaaagtgaatcagagaacattcaacgaccaaccagcctccccctgaagattctgccgctgattgctatcacttctgcagaatccagtgggtgagtgccctcagatgtcatttccccattttatattttagatggtgattgttgtctgtggtcttttgagtttttgtggctcattgcttgatttgagtgggagaacaatggggtttctagagtcaaaaaaaaaaggatgaatttctcaggtgacatttctatatctgcaggagaagacattttagtgaaattgttttacatggaagagctgaaaatgtattggtgaatgctaataaacatttgccaaagggcagttgtacttggaaaattaatattggccatatgtgacttgatagaagacattttaacaaatgagaactaatggacaa

SEQ ID NO: 15161 - DNA, 300 bp, Homo sapiens
  source 1..300: mol_type = unassigned DNA
cactacattccagtaatgaagaggaagaccctttccgcggaatggaaccctatcttgtccggagactttcatgtcgcaatattcagcttccccctctcgccttcagacagttggaacaagctgacttgaaaagtgaatcagagaacattcaacgaccaaccagcctccccctgaagattctgccgctgattgctatcacttctgcagaatccagtgggagaagacattttagtgaaattgttttacatggaagagctgaaaatgtattggtgaatgctaataaacatttgccaaagggca

SEQ ID NO: 15162 - DNA, 599 bp, Homo sapiens
  source 1..599: mol_type = unassigned DNA
attttccttcatcccattctgatgctggcttccctgaagcaacactcctgttccagatttgtatgcttgagcattccagttggcttttgagtggatacgtgcagtgagatcattgacactggaaacactagttcccattttaattacttaaaacaccacgatgaaaagaaatacctgtgatttgctttctcggagcaaaagtgcctctgaggaaacactacattccagtaatgaagaggaagaccctttccgcggaatggaaccctatcttgtccggagactttcatgtcgcaatattcagcttccccctctcgccttcagacagttggaacaagctgacttgaaaagtgaatcagagaacattcaacgaccaaccagcctccccctgaagattctgccgctgattgctatcacttctgcagaatccagtgggtgagtgccctcagatgtcatttccccattttatattttagatggtgattgttgtctgtggtcttttgagtttttgtggctcattgcttgatttgagtgggagaacaatggggtttctagagtcaaaaaaaaaaggatgaatttctcaggtgacatttctatatctg

SEQ ID NO: 15163 - DNA, 558 bp, Homo sapiens
  source 1..558: mol_type = unassigned DNA
tttgagtgggaccaagaagagcatacaaagctgaaatgttctccagaagttgatttccaatggggataaacattccagttggcttttgagtggatacgtgcagtgagatcattgacactggaaacactagttcccattttaattacttaaaacaccacgatgaaaagaaatacctgtgatttgctttctcggagcaaaagtgcctctgaggaaacactacattccagtaatgaagaggaagaccctttccgcggaatggaaccctatcttgtccggagactttcatgtcgcaatattcagcttccccctctcgccttcagacagttggaacaagctgacttgaaaagtgaatcagagaacattcaacgaccaaccagcctccccctgaagattctgccgctgattgctatcacttctgcagaatccagtgggtgagtgccctcagatgtcatttccccattttatattttagatggtgattgttgtctgtggtcttttgagtttttgtggctcattgcttgatttgagtgggagaacaatggggtttctagagtcaaa

SEQ ID NO: 15164 - DNA, 581 bp, Homo sapiens
  source 1..581: mol_type = unassigned DNA
ctatagttggcgtaccctgaggcctgccagttcctgccttaatgcatatgtagtcgtaattgagttctgacacggccttggatgtttctgtcctaaatagctgacattgcatcttcaagactgttgtgaagaatttggaaattgcaaggagcatgggaaggagatgatttgggcattccagttggcttttgagtggatacgtgcagtgagatcattgacactggaaacactagttcccattttaattacttaaaacaccacgatgaaaagaaatacctgtgatttgctttctcggagcaaaagtgcctctgaggaaacactacattccagtaatgaagaggaagaccctttccgcggaatggaaccctatcttgtccggagactttcatgtcgcaatattcagcttccccctctcgccttcagacagttggaacaagctgacttgaaaagtgaatcagagaacattcaacgaccaaccagcctccccctgaagattctgccgctgattgctatcacttctgcagaatccagtgggtgagtgccctcagatgtcatttccccattttatattttagatggtg

SEQ ID NO: 15165 - DNA, 577 bp, Homo sapiens
  source 1..577: mol_type = unassigned DNA
atagttggcgtaccctgaggcctgccagttcctgccttaatgcatatgtagtcgtaattgagttctgacacggccttggatgtttctgtcctaaatagctgacattgcatcttcaagactgtggtctagctgtgtcccagagagcaacttcccttttcaaggcagcccactctgtgtgatgctttttcctaggtatgggcaacccatccctcctagggtgaaaacttcgctgttgctagttccagcattccagttggcttttgagtggatacgtgcagtgagatcattgacactggaaacactagttcccattttaattacttaaaacaccacgatgaaaagaaatacctgtgatttgctttctcggagcaaaagtgcctctgaggaaacactacattccagtaatgaagaggaagaccctttccgcggaatggaaccctatcttgtccggagactttcatgtcgcaatattcagcttccccctctcgccttcagacagttggaacaagctgacttgaaaagtgaatcagagaacattcaacgaccaaccagcctccccctgaagattctgccgctg

SEQ ID NO: 15166 - DNA, 494 bp, Homo sapiens
  source 1..494: mol_type = unassigned DNA
ggtcacacagagagtacgtgtcaaaggaaactcaaaagaacacattttctcagtgattacaggttttagagaagaggaacaatgcttcctctgagcctgaagaaaagaatgaaataagggctgcaagggaacatgcaggtttcacactacaggagcttgtctgtcttggtgcaagtgggagcattccagttggcttttgagtggatacgtgcagtgagatcattgacactggaaacactagttcccattttaattacttaaaacaccacgatgaaaagaaatacctgtgatttgctttctcggagcaaaagtgcctctgaggaaacactacattccagtaatgaagaggaagaccctttccgcggaatggaaccctatcttgtccggagactttcatgtcgcaatattcagcttccccctctcgccttcagacagttggaacaagctgacttgaaaagtgaatcagagaacattcaacgaccaaccagcctccc

SEQ ID NO: 15167 - DNA, 590 bp, Homo sapiens
  source 1..590: mol_type = unassigned DNA
atagttggcgtaccctgaggcctgccagttcctgccttaatgcatatgtagtcgtaattgagttctgacacggccttggatgtttctgtcctaaatagctgacattgcatcttcaagactgtggtctagctgtgtcccagagagcaacttcccttttcaaggcagcccactctgtgtgatgctttttcctaggtatgggcaacccatccctcctagggtgaaaacttcgctgttgctagttccagcattccagttggcttttgagtggatacgtgcagtgagatcattgacactggaaacactagttcccattttaattacttaaaacaccacgatgaaaagaaatacctgtgatttgctttctcggagcaaaagtcctgcttactgcgacctgatttttctcttgtggcccttaaaactatgaatatcaacagtcatccaattcttcaccttcatcttcctccctcagttgctgcctctgaggaaacactacattccagtaatgaagaggaagaccctttccgcggaatggaaccctatcttgtccggagactttcatgtcgcaatattcagcttccccctctcgcctt

SEQ ID NO: 15168 - DNA, 7690 bp, Homo sapiens
  source 1..7690: mol_type = unassigned DNA
ggaaaatattaatgacagcaaaacttgaattcacatgtttatttattctttcaacaagtttttctttaaaaccacacactgctgggctatcataagttttgatgtggacaatggcacatctgcgggacggagtcccttggatcccatgaccagcccaggatccgggctaattctccaagcaaattttgtccacagtcaacgacgggagtccttcctgtatcgatccgacagcgattatgacctctctccaaagtctatgtcccggaactcctccattgccagtgatatacacggagatgacttgattgtgactccatttgctcaggtcttggccagtctgcgaactgtacgaaacaactttgctgcattaactaatttgcaagatcgagcacctagcaaaagatcacccatgtgcaaccaaccatccatcaacaaagccaccataacagaggaggcctaccagaaactggccagcgagaccctggaggagctggactggtgtctggaccagctagagaccctacagaccaggcactccgtcagtgagatggcctccaacaagtttaaaaggatgcttaatcgggagctcacccatctctctgaaatgagtcggtctggaaatcaagtgtcagagtttatatcaaacacattcttagataagcaacatgaagtggaaattccttctccaactcagaaggaaaaggagaaaaagaaaagaccaatgtctcagatcagtggagtcaagaaattgatgcacagctctagtctgactaattcaagtatcccaaggtttggagttaaaactgaacaagaagatgtccttgccaaggaactagaagatgtgaacaaatggggtcttcatgttttcagaatagcagagttgtctggtaaccggcccttgactgttatcatgcacaccatttttcaggaacgggatttattaaaaacatttaaaattccagtagatactttaattacatatcttatgactctcgaagaccattaccatgctgatgtggcctatcacaacaatatccatgctgcagatgttgtccagtctactcatgtgctattatctacacctgctttggaggctgtgtttacagatttggagattcttgcagcaatttttgccagtgcaatacatgatgtagatcatcctggtgtgtccaatcaatttctgatcaatacaaactctgaacttgccttgatgtacaatgattcctcagtcttagagaaccatcatttggctgtgggctttaaattgcttcaggaagaaaactgtgacattttccagaatttgaccaaaaaacaaagacaatctttaaggaaaatggtcattgacatcgtacttgcaacagatatgtcaaaacacatgaatctactggctgatttgaagactatggttgaaactaagaaagtgacaagctctggagttcttcttcttgataattattccgataggattcaggttcttcagaatatggtgcactgtgcagatctgagcaacccaacaaagcctctccagctgtaccgccagtggacggaccggataatggaggagttcttccgccaaggagaccgagagagggaacgtggcatggagataagccccatgtgtgacaagcacaatgcttccgtggaaaaatcacaggtgggcttcatagactatattgttcatcccctctgggagacatgggcagacctcgtccaccctgacgcccaggatattttggacactttggaggacaatcgtgaatggtaccagagcacaatccctcagagcccctctcctgcacctgatgacccagaggagggccggcagggtcaaactgagaaattccagtttgaactaactttagaggaagatggtgagtcagacacggaaaaggacagtggcagtcaagtggaagaagacactagctgcagtgactccaagactctttgtactcaagactcagagtctactgaaattccccttgatgaacaggttgaagaggaggcagtaggggaagaagaggaaagccagcctgaagcctgtgtcatagatgatcgttctcctgacacgtaacagtgcaaaaactttcatgccttttttttttttaagtagaaaaattgtttccaaagtgcatgtcacatgccacaaccacggtcacacctcactgtcatctgccaggacgtttgttgaacaaaactgaccttgactactcagtccagcgctcaggaatatcgtaaccagttttttcacctccatgtcatccgagcaaggtggacatcttcacgaacagcgtttttaacaagatttcagcttggtagagctgacaaagcagataaaatctactccaaattattttcaagagagtgtgactcatcaggcagcccaaaagtttattggacttggggtttctattcctttttatttgtttgcaatattttcagaagaaaggcattgcacagagtgaacttaatggacgaagcaacaaatatgtcaagaacaggacatagcacgaatctgttaccagtaggaggaggatgagccacagaaattgcataattttctaatttcaagtcttcctgatacatgactgaatagtgtggttcagtgagctgcactgacctctacattttgtatgatatgtaaaacagattttttgtagagcttacttttattattaaatgtattgaggtattatatttaaaaaaaactatgttcagaacttcatctgccactggttatttttttctaaggagtaacttgcaagttttcagtacaaatctgtgctacactggataaaaatctaatttatgaattttacttgcaccttatagttcatagcaattaactgatttgtagtgattcattgtttgttttatataccaatgacttccatattttaaaagagaaaaacaactttatgttgcaggaaaccctttttgtaagtctttattatttactttgcattttgtttcactctttccagataagcagagttgctcttcaccagtgtttttcttcatgtgcaaagtgactatttgttctataatacttttatgtgtgttatatcaaatgtgtcttaagcttcatgcaaactcagtcatcagttcgtgttgtctgaagcaagtgggagatatataaatacccagtagctaaaatggtcagtcttttttagatgttttcctacttagtatctcctaataacgttttgctgtgtcactagatgttcatttcacaagtgcatgtctttctaataatccacacatttcatgctctaataatccacacatttcatgctcatttttattgtttttacagccagttatagtaagaaaaaggtttttccccttgtgctgctttataatttagcgtgtgtctgaaccttatccatgtttgctagatgaggtcttgtcaaatatatcactaccattgtcaccggtgaaaagaaacaggtagttaagttagggttaacattcatttcaaccacgaggttgtatatcatgactagcttttactcttggtttacagagaaaagttaaacagccaactaggcagtttttaagaatattaacaatatattaacaaacaccaatacaactaatcctatttggttttaatgatttcaccatgggattaagaactatatcaggaacatccctgagaaacggttttaagtgtagcaactactcttccttaatggacagccacataacgtgtaggaagtcctttatcacttatcctcgatccataagcatatcttgcagaggggaactacttctttaaacacatggagggaaagaagatgatgccactggcaccagagggttagtactgtgatgcatcctaaaatatttattatattggtaaaaattctggttaaataaaaaattagagatcactcttggctgatttcagcaccaggaactgtattacagttttagagattaattcctagtgtttacctgattatagcagttggcatcatggggcatttaattctgactttatccccacgtcagccttaataaagtcttctttaccttctctatgaagactttaaagcccaaataatcatttttcacattgatattcaagaattgagatagatagaagccaaagtgggtatctgacaagtggaaaatcaaacgtttaagaagaattacaactctgaaaagcatttatatgtggaacttctcaaggagcctcctggggactggaaagtaagtcatcagccaggcaaatgactcatgctgaagagagtccccatttcagtcccctgagatctagctgatgcttagatcctttgaaataaaaattatgtctttataactctgatcttttacataaagcagaagaggaatcaactagttaattgcaaggtttctactctgtttcctctgtaaagatcagatggtaatctttcaaataagaaaaaaataaagacgtatgtttgaccaagtagtttcacaagaatatttgggaacttgtttcttttaattttatttgtccctgagtgaagtctagaaagaaaggtaaagagtctagagtttattcctctttccaaaacattctcattcctctcctccctacacttagtatttcccccacagagtgcctagaatcttaataatgaataaaataaaaagcagcaatatgtcattaacaaatccagacctgaaagggtaaagggtttataactgcactaataaagagaggctctttttttttcttccagtttgttggtttttaatggtaccgtgttgtaaagatacccactaatggacaatcaaattgcagaaaaggctcaatatccaagagacagggactaatgcactgtacaatctgcttatccttgcccttctctcttgccaaagtgtgcttcagaaatatatactgctttaaaaaagaataaaagaatatccttttacaagtggctttacatttcctaaaatgccataagaaaatgcaatatctgggtactgtatggggaaaaaaatgtccaagtttgtgtaaaaccagtgcatttcagcttgcaagttactgaacacaataatgctgttttaattttgttttatatcagttaaaattcacaataatgtagatagaacaaattacagacaaggaaagaaaaaacttgaatgaaatggattttacagaaagctttatgataatttttgaatgcattatttattttttgtgccatgcattttttttctcaccaaatgaccttacctgtaatacagtcttgtttgtctgtttacaaccatgtatttattgcaatgtacatactgtaatgttaattgtaaattatctgttcttattaaaacatcatcccatgatgggatggtgttgatatatttggaaactcttggtgagagaatgaatggtgtgtatacatactctgtacatttttcttttctcctgtaatatagtcttgtcaccttagagcttgtttatggaagattcaagaaaactataaaatacttaaagatatataaatttaaaaaaacatagctgcaggtctttggtcccagggctgtgccttaactttaaccaatattttcttctgttttgctgcatttgaaaggtaacagtggagctagggctgggcattttacatccaggcttttaattgattagaattctgccaataggtggattttacaaaaccacagacaacctctgaaagattctgagacccttttgagacagaagctcttaagtacttcttgccagggagcagcactgcatgtgtgatggttgtttgccatctgttgatcaggaactacttcagctacttgcatttgattatttcctttttttttttttttaactcggaaacacaactggggaaatatattctttcccagtgattataaacaatctttttcttttttttaagtccttttggcttctagagctcataggaaaatggacttgatttgaaattggagccagagtttactcgtgttggttatctattcatcagcttcctgacatgttaagagaatacattaaagagaaaatactgttttttaatcctaaaatttttcttccactaagataaaccaaatgtccttacatatatgtaaacccatctatttaaacgcaaaggtgggttgatgtcagtttacatagcagaaagcattcactatcctctaagatttgtttctgcaaaactttcattgctttagaattttaaaatttcaccttgtacaatggccagcccctaaagcaggaaacatttataatggattatatggaaacatcctcccagtacttgcccagcccttgaatcatgtggcttttcagtgaaaggaaagattctttttctaggaaaaatgagcctattttattttattttattttattttttgacacaaactgtagattttagcagccctggcccaaaggaatttgattacttttgttttaaacagtacaaaggggacactataattacaaaaacatccttaactgatttgagttgtttttatttctttggatatattttcagagtggtaaattgtgtgtgagaattacaaatgattattcttttagtggtttcttagcctctcttacagcccacggggatagtactgtacatcaataccttcatatgaaatttttatatgcaatgaaaataaaagcatgggttgattctgcctatttatgactcaatcttttacaaataaaagattattcattttaaattatagttcaatcagcatgtctcttaggatactgaacgtggttgaaatgaaaggatagtgacatcataagttagtactgatattcataaccaaataaagccaacttgagtaattttgctacattaaaaattaccaaaattacttagatggcctataagattaagcatggtgttttctaagcaagctttgaaaggggccttccatacttacttaattgaatattctgggatattgaaaattattcagatacttgacaattatttttggttacctactccgcaaactacaaagttttaaggactcaacaataagttaatgagacacagtgtttgctttcatggagcttacagtctggaggggacaaaggcttaaacaatactcatataattatatatgtgatcagtacaatgaaggagctcagtggggtaaataagcaggaacctgaacttgatctgttccggagggccacagaaggcttccttgaggccttgagaaagtgatttgcatctgagttctgaaggattgtaagaggtaactagggaaaaagttgacaggaagaggaaggggatccagacaagaaacatttgcaaagatcttgaggcataaatgagcttgagacatctggagaaactgaggaaaagtgagagagtaggcagggcctggagccgcagagccattgctaaccatcctgtgtgagatatcccccattctgtagctttattctcataaccctgctcaattttctttataacacttctcacagatttatatacgtgtttgtttttgttatctgtctctcccaccagaccacagctccatgagagcaaggtctttgcttaccaatatatcactagcacttaaaactatgcctggtacacagtaggttcttaatatgtgttgaatatagccatcaaattgatattggatataattcaatctgataagatattttgagatattaaagagtttttaacttgatacc

SEQ ID NO: 15169 - DNA, 375 bp, Homo sapiens
  source 1..375: mol_type = unassigned DNA
gcctttcaggggagcaggagttttgatgtggacaatggcacatctgcgggacggagtcccttggatcccatgaccagcccaggatccgggctaattctccaagcaaattttgtccacagtcaacgacgggagtccttcctgtatcgatccgacagcgattatgacctctctccaaagtctatgtcccggaactcctccattgccagtgatatacacggagatgacttgattgtgactccatttgctcaggtcttggccagtctgcgaactgtacgaaacaactttgctgcattaactaatttgcaagatcgagcacctagcaaaagatcacccatgtgcaaccaaccatccatcaacaaagccaccataacaggt

SEQ ID NO: 15170 - DNA, 7154 bp, Homo sapiens
  source 1..7154: mol_type = unassigned DNA
gctgccgccgccgccgccgcctcctgggaaccaggggactgaagagcctgcgagagcggaacactgccggaccccgggtggggggggcgcagcagctgcgcctggccccgcccaccacacctgggcgcccgtagaaccgcgcggggcggggcggggcaggaggctggcctggcgctccggccgctttgtcgaaagccggcccgactggagcaggacgaagggggagggtctcgaggccgagtcctgttcttctgagggacggaccccagctggggtggaaaagcagtaccagagagcctccgaggcgcgcggtgccaaccatggagcgggccggccccagcttcgggcagcagcgacagcagcagcagccccagcagcagaagcagcagcagagggatcaggactcggtcgaagcatggctggacgatcactgggactttaccttctcatactttgttagaaaagccaccagagaaatggtcaatgcatggtttgctgagagagttcacaccatccctgtgtgcaaggaaggtatcagaggccacaccgaatcttgctcttgtcccttgcagcagagtcctcgtgcagataacagtgcccctggaacaccaaccaggaaaatctctgcctctgaatttgaccggcctcttagacccattgttgtcaaggattctgagggaactgtgagcttcctctctgactcagaaaagaaggaacagatgcctctaacccctccaaggtttgatcatgatgaaggggaccagtgctcaagactcttggaattagtgaaggatatttctagtcatttggatgtcacagccttatgtcacaaaattttcttgcatatccatggactgatatctgctgaccgctattccctgttccttgtctgtgaagacagctccaatgacaagtttcttatcagccgcctctttgatgttgctgaaggttcaacactggaagaagtttcaaataactgtatccgcttagaatggaacaaaggcattgtgggacatgtggcagcgcttggtgagcccttgaacatcaaagatgcatatgaggatcctcggttcaatgcagaagttgaccaaattacaggctacaagacacaaagcattctttgtatgccaattaagaatcatagggaagaggttgttggtgtagcccaggccatcaacaagaaatcaggaaacggtgggacatttactgaaaaagatgaaaaggactttgctgcttatttggcattttgtggtattgttcttcataatgctcagctctatgagacttcactgctggagaacaagagaaatcaggtgctgcttgaccttgctagtttaatttttgaagaacaacaatcattagaagtaattttgaagaaaatagctgccactattatctctttcatgcaagtgcagaaatgcaccattttcatagtggatgaagattgctccgattctttttctagtgtgtttcacatggagtgtgaggaattagaaaaatcatctgatacattaacaagggaacatgatgcaaacaaaatcaattacatgtatgctcagtatgtcaaaaatactatggaaccacttaatatcccagatgtcagtaaggataaaagatttccctggacaactgaaaatacaggaaatgtaaaccagcagtgcattagaagtttgctttgtacacctataaaaaatggaaagaagaataaagttataggggtttgccaacttgttaataagatggaggagaatactggcaaggttaagcctttcaaccgaaatgacgaacagtttctggaagcttttgtcatcttttgtggcttggggatccagaacacgcagatgtatgaagcagtggagagagccatggccaagcaaatggtcacattggaggttctgtcgtatcatgcttcagcagcagaggaagaaacaagagagctacagtcgttagcggctgctgtggtgccatctgcccagacccttaaaattactgactttagcttcagtgactttgagctgtctgatctggaaacagcactgtgtacaattcggatgtttactgacctcaaccttgtgcagaacttccagatgaaacatgaggttctttgcagatggattttaagtgttaagaagaattatcggaagaatgttgcctatcataattggagacatgcctttaatacagctcagtgcatgtttgctgctctaaaagcaggcaaaattcagaacaagctgactgacctggagatacttgcattgctgattgctgcactaagccacgatttggatcaccgtggtgtgaataactcttacatacagcgaagtgaacatccacttgcccagctttactgccattcaatcatggaacaccatcattttgaccagtgcctgatgattcttaatagtccaggcaatcagattctcagtggcctctccattgaagaatataagaccacgttgaaaataatcaagcaagctattttagctacagacctagcactgtacattaagaggcgaggagaattttttgaacttataagaaaaaatcaattcaatttggaagatcctcatcaaaaggagttgtttttggcaatgctgatgacagcttgtgatctttctgcaattacaaaaccctggcctattcaacaacggatagcagaacttgtagcaactgaattttttgatcaaggagacagagagagaaaagaactcaacatagaacccactgatctaatgaacagggagaagaaaaacaaaatcccaagtatgcaagttgggttcatagatgccatctgcttgcaactgtatgaggccctgacccacgtgtcagaggactgtttccctttgctagatggctgcagaaagaacaggcagaaatggcaggcccttgcagaacagcaggagaagatgctgattaatggggaaagcggccaggccaagcggaactgagtggcctatttcatgcagagttgaagtttacagagatggtgtgttctgcaatatgcctagtttcttacacactgtctgtatagtgtctgtatttggtatatactttgccactgctgtatttttatttttgcacaacttttgagagtatagcatgaatgtttttagaggactattacatattttttgtatatttgttttatgctactgaactgaaaggatcaacaacatccactgttagcacattgataaaagcattgtttgtgatatttcgtgtactgcaaagtgtatgcagtattcttgcactgaggtttttttgcttggggattattttaaataattggtttttgtgttttctgaattaccattttttcaagaatgtttggaatctttcctttttcaaaagtaggttaggagcaaattatcatacattctgtgacatttaaagcctttataggatagtgaaaaatgctggctgagtggattttaagagaaataattgtatttgttaacagtgtctttttttaaaaagttaaggcactctgaaacaaatggaaagtcctatgaaactgtattgtaaagaaaacattatttaattgatatgctgttttgtgagagaacaggcaagacagaactttgtcacttcagtgcagtacatttttctgaaagctacccataaaatcactttcatctcacctacctgatgcaaagcaggtgaaaccttaggagatgatccagtcactgacttgattgagggataagtgtgatttagaaatggaatggccttggatgtctatcagtgaagaaaaatgttctgttagaagatctctctaagagtttttttccttctgagcttccttttcaaaataaaagtgacaattgtagcattgacttgaagtgagacatggttatagataagagagtacaaaatgactctttttcctgtcaattgaaatttaaagaaaagttttaattatataaatagcaaagggctattgccaatactagggtcaaaaatgaatttgagggaacagtgggtaagaaactttatgcctgaataacatttagcagtattgtgattgaaaaattgccatattttgatgtataggacaagtcaactgagatccagagaatcctggatgtgaatgctaaacactggcccttaactcacattcaatgtattttcttcccataacatttagtatagttaatattttcttagaatttgagcccatttaagtggattaatattctacatgtgtgcccctaaagacacatttactcaatattggagaagtagataatgaattaagcaactggtctaggaaaggaaaatttgtttcaaatatgcaggaatgtttggatttggggagagtagaaggagagatttgcttgatttgttaacttctacctccaacccacaaaaaagatatttgatctgagtttctatcactaatttggatagaaaatttctaagggacatggtaatccagcattctcaaggacctttcgccaaaatgtgttttccatctatgtcccgattcccctaaattttgcctaaaattcagtatgttccttaagtttttaaaattctgagtgtgtacaaatatcttgacataatgcagttttatttttatcattctggtaaaaaaacaaaaaatagaagcaaaacacattgtattgccattattttgtatttggtaaaggttaatctaggaagttaccaactgtttaatgctatatgtattgtatacttgtattttcaggatattttattttttttgccatacagataaaatttgtaaggttgcccctttgtggcactggtgtgtaaaatacacagactatcactaaaataatagttatatatacatacaggtgtatacttatgcatgcatacataaatccttagtatagaaaaattgcataaagaatagcaatctttaataaacctttttattacattgtgatttagcagttatgctaaaatatgtacttatgctttagtagtttgtttggtcccctctagtatgtgtcactgagaaattttttaaagacatggtagatcgtgtttagaggctttgtatgtgtgtcattttaataagcaagaagatatatttagattagaaatggtttggtctgcctttgaatattgtttattttactttactagttgagacattaaaggaagctgggcaatgcctattttatttctttgttggatattttagttcatacaaagcagagtacttctttagggctggttaattggttcaaataatttttaatttcctttctagtatcttctcaagttggaaaaatatacatacagtcctccttcaccttactctgtatttatattacccataactagcaagaagttcttgttctagattttttgtttgtttagttataacagagtaacataccatttaattacaatttttagccagaaaagtccccactattttactaacttgttaaaagatatctatataattgcctggccttatatttttcagtagattagaccgtgccaatcacaatcctgggtggatttgtgtaagtcacttaacctctgtgtgcctaaacaagttgtgcttttttaaaaggagttatgtttgggcaaagcctttgtcttcaagcagaatgtcacagaaggcagctactttataagccccaatgggccatggagaccactgtcagaaatgggatattagtctagagagaaggtgatctattcccacatgtcatttctaatgttgagtttccatgactgaacaaagagaatatatttattcagcttcacttgcagatcactagtgaatgtgagatttagagctcattgagtatattgcttcaaggtacaaacccaggatgatgatgttgtcaccactgtctcttaattttgaataatagtttcctttaataggagtattagagataagaaagtatatgaaaatatactggaaatattggattcttggagaaaactgttcagtcacagatatattcttgcctagcagtgaagtgcctttattttcagcatagcaaataaatattagacctgttccaatttgatctacaatttttttctgtgtttttcaccagattgtactcctaaaacttaacaggccatcacaagcaattgtcttttgtttacaagattgatttaatatgagaggatacaaaatgtcatcgttatcctctcttatgaacaactgtagtcaaaataaggtggcacaatttaattgttttgtatcagaaatacactgacccaccttttattgagtcctgccacatgttaggtaccgtgctctgctgtggagacagagcagtgaccccaaggagctcacggtccctgaaggaggtgctagagaagagacttagcttctgatactgccaatttaatgtgagaacatggggtatactgcatcatttccattttcatcaataacatatgttttatgcaccttctttacctgaaacttactaagaatctaccagtaaacaaacatcctgtctttttgcaagtatgaatcacttaacctgctgatagttgaagaacactttaggagttttgtattcttgtatatagtttattttttccatgtgctagccaggtaaagattacacagttcttctggactgttaaattgtgcatggttttggaccccttctgctctactacagagagtgaagaagaaagtattaaagctcactttaccattccatatacttactaaaagcctgtgtaaacatgtcttaatgaatgttgttgaaagcaatgtaaatagttgaaaatataaatttatattacagtttaagaaaaccttatgaggcatcactagccactgttaatatctatttgtattcttataccttttcaatatatttgaacaaatatagtttctggcactatttttatactaggaaaaggagttactatgtatattatgcttagcttttaaggcattttaaataaccatgaatgttgatttcattactttcctttcctccatcacgagagtcatttcagatgactctttcatgacaaaatcactttaaaggaacacttacctccgattcctgtataaagtcatgagatggtcaaggtggttttccattgtgcaaattcttcacctgtcagtggtttcctcattttgccatgctttgtaaaaataaaaagaatgatcaagtaggtatgaa

SEQ ID NO: 15171 - DNA, 3020 bp, Homo sapiens
  source 1..3020: mol_type = unassigned DNA
gtggagcagagagtgcttggcgggcgggtgccccgaagcctgaggaattgatgcatagtcggggtgcgtggactccaggacgcgcccctttgcagaaagagtccgtgccccgctgccgcctgctctgggcagcggccgtcgggcagcgggtgctggccgtcttggccgggagggtgacacacgcccggcagtgatggtcgaggagcccgcccgggttcgacgcccgggtcccactcgccggcgcgcggccgcggctctgccggtcgctccccgccagggggcggcgcagcgcggggcgagcgggaggcgacgggcggcggcgcggaggccggggccgtgagggagctggttctgagtcgccgacctcacctcacctcacctgcgcgcgttgttgcccctacggagcctcctggagtccaggatcggcggagttcgaaaacgaacttcccacgtttgctatgttgccctttggagacaaaacaagagaaatggtcaatgcatggtttgctgagagagttcacaccatccctgtgtgcaaggaaggtatcagaggccacaccgaatcttgctcttgtcccttgcagcagagtcctcgtgcagataacagtgcccctggaacaccaaccaggaaaatctctgcctctgaatttgaccggcctcttagacccattgttgtcaaggattctgagggaactgtgagcttcctctctgactcagaaaagaaggaacagatgcctctaacccctccaaggtttgatcatgatgaaggggaccagtgctcaagactcttggaattagtgaaggatatttctagtcatttggatgtcacagccttatgtcacaaaattttcttgcatatccatggactgatatctgctgaccgctattccctgttccttgtctgtgaagacagctccaatgacaagtttcttatcagccgcctctttgatgttgctgaaggttcaacactggaagaagtttcaaataactgtatccgcttagaatggaacaaaggcattgtgggacatgtggcagcgcttggtgagcccttgaacatcaaagatgcatatgaggatcctcggttcaatgcagaagttgaccaaattacaggctacaagacacaaagcattctttgtatgccaattaagaatcatagggaagaggttgttggtgtagcccaggccatcaacaagaaatcaggaaacggtgggacatttactgaaaaagatgaaaaggactttgctgcttatttggcattttgtggtattgttcttcataatgctcagctctatgagacttcactgctggagaacaagagaaatcaggtgctgcttgaccttgctagtttaatttttgaagaacaacaatcattagaagtaattttgaagaaaatagctgccactattatctctttcatgcaagtgcagaaatgcaccattttcatagtggatgaagattgctccgattctttttctagtgtgtttcacatggagtgtgaggaattagaaaaatcatctgatacattaacaagggaacatgatgcaaacaaaatcaattacatgtatgctcagtatgtcaaaaatactatggaaccacttaatatcccagatgtcagtaaggataaaagatttccctggacaactgaaaatacaggaaatgtaaaccagcagtgcattagaagtttgctttgtacacctataaaaaatggaaagaagaataaagttataggggtttgccaacttgttaataagatggaggagaatactggcaaggttaagcctttcaaccgaaatgacgaacagtttctggaagcttttgtcatcttttgtggcttggggatccagaacacgcagatgtatgaagcagtggagagagccatggccaagcaaatggtcacattggaggttctgtcgtatcatgcttcagcagcagaggaagaaacaagagagctacagtcgttagcggctgctgtggtgccatctgcccagacccttaaaattactgactttagcttcagtgactttgagctgtctgatctggaaacagcactgtgtacaattcggatgtttactgacctcaaccttgtgcagaacttccagatgaaacatgaggttctttgcagatggattttaagtgttaagaagaattatcggaagaatgttgcctatcataattggagacatgcctttaatacagctcagtgcatgtttgctgctctaaaagcaggcaaaattcagaacaagctgactgacctggagatacttgcattgctgattgctgcactaagccacgatttggatcaccgtggtgtgaataactcttacatacagcgaagtgaacatccacttgcccagctttactgccattcaatcatggaacaccatcattttgaccagtgcctgatgattcttaatagtccaggcaatcagattctcagtggcctctccattgaagaatataagaccacgttgaaaataatcaagcaagctattttagctacagacctagcactgtacattaagaggcgaggagaattttttgaacttataagaaaaaatcaattcaatttggaagatcctcatcaaaaggagttgtttttggcaatgctgatgacagcttgtgatctttctgcaattacaaaaccctggcctattcaacaacggatagcagaacttgtagcaactgaattttttgatcaaggagacagagagagaaaagaactcaacatagaacccactgatctaatgaacagggagaagaaaaacaaaatcccaagtatgcaagttgggttcatagatgccatctgcttgcaactgtatgaggccctgacccacgtgtcagaggactgtttccctttgctagatggctgcagaaagaacaggcagaaatggcaggcccttgcagaacagcaggagaagatgctgattaatggggaaagcggccaggccaagcggaactgagtggcctatttcatgcagagttgaagtttacagagatggtgtgttctgcaatatgcctag

SEQ ID NO: 15172 - DNA, 892 bp, Homo sapiens
  source 1..892: mol_type = unassigned DNA
ctgcactaagccacgatttggatcaccgtggtgtgaataactcttacatacagcgaagtgaacatccacttgcccagctttactgccattcaatcatggaacaccatcattttgaccagtgcctgatgattcttaatagtccaggcaatcagattctcagtggcctctccattgaagaatataagaccacgttgaaaataatcaagcaagctattttagctacagacctagcactgtacattaagaggcgaggagaattttttgaacttataagaaaaaatcaattcaatttggaagatcctcatcaaaaggagttgtttttggcaatgctgatgacagcttgtgatctttctgcaattacaaaaccctggcctattcaacaacggatagcagaacttgtagcaactgaattttttgatcaaggagacagagagagaaaagaactcaacatagaacccactgatctaatgaacagggagaagaaaaacaaaatcccaagtatgcaagttgggttcatagatgccatctgcttgcaactgtatgaggtatttatatgaaaactactagacttgctaaacttggactgttgtgaattagaacctaaaattgaagagattaatattaggcgcctatattttgcttctaaatcaagaaataaaattattagcagtatggtttcttttactgatgaacatgtttgtattgaacaaggaacacatactaatatctattgagtgcctactatgtgctaatctccaacaaattgatttggggatgctaagaagaattatgtgccagtgttaccctcaaggagcaatactgtatatactatgcgttagcatattctttttttaagtctaaattttagcctaaataaagaaaagtaatccaa

SEQ ID NO: 15173 - DNA, 411 bp, Homo sapiens
  source 1..411: mol_type = unassigned DNA
taggaggcgaggagaattttttgaacttataagaaaaaatcaattcaatttggaagatcctcatcaaaaggagttgtttttggcaatgctgatgacagcttgtgatctttctgcaattacaaaaccctggcctattcaacaacggatagcagaacttgtagcaactgaattttttgatcaaggagacagagagagaaaagaactcaacatagaacccactgtaagtatgaaaccttgttggtaggaattattcaaattgttttttttttaattgtagactcctttttatggctctatgggatctttccttaggaccacaatttctcattttattttttaaaacttttttctcattggaagaattatacatgttcattacagaaagcaaaaccaataaaaggcataataaag

SEQ ID NO: 15174 - DNA, 738 bp, Homo sapiens
  source 1..738: mol_type = unassigned DNA
aaaaaataacctatatttagcttgagagtatattatgtaactttttaaagccaagttttcatttcaaatcattttctttctattgttttgcttgaattaacattgtctgcattccttaaggacacagcaactgatagcagagagtgaacagaatctgcagggaattaaaagaggaaaaaaacaattatttaaagtttattatgattatttcacataataattaagaattagcaatacttactataggtggacagattattaatttattgaggcatttcagcttttcctgttgataagtgacatttgtggtgatcccattctgaatgacaaaggacaactaattccctgaagaataggattctagggttagtcctttgtgactatagagaagtatgtatgtaaagcactgaggggaaaaaaaagattactgaaaagaggtaatataatgtccttcaccacattatatttgttctctctttcctccaatgtctttggtcatgcagaacaagctgactgacctggagatacttgcattgctgattgctgcactaagccacgatttggatcaccgtggtgtgaataactcttacatacagcgaagtgaacatccacttgcccagctttactgccattcaatcatggaacaccatcattttgaccagtgcctgatgattcttaatagtccaggcaatcagattctcagtggcctctccattgaagaatataagaccacgttga

SEQ ID NO: 15175 - DNA, 572 bp, Homo sapiens
  source 1..572: mol_type = unassigned DNA
agaattccaagcttgaagttctagtctacatgtggtagttctctcctgtgtaacctggacttcttttcctaccctgtaggttctgtcgtatcatgcttcagcagcagaggaagaaacaagagagctacagtcgttagcggctgctgtggtgccatctgcccagacccttaaaattactgactttagcttcagtgactttgagctgtctgatctggaaacagcactgtgtacaattcggatgtttactgacctcaaccttgtgcagaacttccagatgaaacatgaggttctttgcagatggattttaagtgttaagaagaattatcggaagaatgttgcctatcataattggagacatgcctttaatacagctcagtgcatgtttgctgctctaaaagcaggcaaaattcagaacaagctgactgacctggagatacttgcattgctgattgctgcactaagccacgatttggatcaccgtggtgtgaataactcttacatacagcgaaaattaccctgaaattaccttggaagaagatatttctccaatagaaagttgccccttgagtcat

SEQ ID NO: 15176 - DNA, 567 bp, Homo sapiens
  source 1..567: mol_type = unassigned DNA
aaaagattcttttctcttagtagagagagagattaggaattacagtagataatggaaagaggcacaagctatgctggcttccatcctgtagcttttagaatgttctttgtgaaaggaaagaaagaaaacttcctgctgtaagaataatgatgccctaaggaaaaaacatctgttctcctgtccattgcactgtattttaaggaaagcagctgttatctgctttgagttaaaaggctgctgtggtgccatctgcccagacccttaaaattactgactttagcttcagtgactttgagctgtctgatctggaaacagcactgtgtacaattcggatgtttactgacctcaaccttgtgcagaacttccagatgaaacatgaggttctttgcagatggattttaagtgttaagaagaattatcggaagaatgttgcctatcataattggagacatgcctttaatacagctcagtgcatgtttgctgctctaaaagcaggcaaaattcagaacaagctgactgacctggagatacttgcattgctgattgctgcactaagccacgatttgg

SEQ ID NO: 15177 - DNA, 648 bp, Homo sapiens
  source 1..648: mol_type = unassigned DNA
agttaagatttatcctaatgttgatgtaatcttccatttttattgactacgtgtttaacttttatttctaagtagtcatttttatttgcataattatttgcagaatcaaaagttttctgcaaatttgattctgttggatacagaggtgtagatttgaaatttgagactgcttatgtcagttgcctcctttctgcattctattttgggtttgccaacttgttaataagatggaggagaatactggcaaggttaagcctttcaaccgaaatgacgaacagtttctggaagcttttgtcatcttttgtggcttggggatccagaacacgcagatgtatgaagcagtggagagagccatggccaagcaaatggtcacattggaggttctgtcgtatcatgcttcagcagcagaggaagaaacaagagagctacagtcgttagcggctgctgtggtgccatctgcccagacccttaaaattactgactttagcttcagtgactttgagctgtctgatctggaaacagcactgtgtacaattcggatgtttactgacctcaaccttgtgcagaacttccagatgaaacatgaggttctttgcagatggattttaagtgttaagaagaattatcggaagaatgttgcctatcata

SEQ ID NO: 15178 - DNA, 371 bp, Homo sapiens
  source 1..371: mol_type = unassigned DNA
atcaacgaaaagcaggaagagttttaactcctggaatcatctgagaaactatttcaaactataaatttatataccctacttctgaaagttctgattcagcaagtcttgggtagaagctgggaatctgtatgactaccaagctcccccaggtgactctgaatgtgcaggtagcgagtgaagaaaccactggctcccagggactgaccgaggaacactctttctcacaaaggaccagccgactccaacagggttctgtcgtatcatgcttcagcagcagaggaagaaacaagagagctacagtcgttagcgggatgcaaagtcactgataatacaaagcaaaaggcattaaataacttatactgactgtgtaa

SEQ ID NO: 15179 - DNA, 514 bp, Homo sapiens
  source 1..514: mol_type = unassigned DNA
aggtgctgcttgaccttgctagtttaatttttgaagaacaacaatcattagaagtaattttgaagaaaatagctgccactattatctctttcatgcaagtgcagaaatgcaccattttcatagtggatgaagattgctccgattctttttctagtgtgtttcacatggagtgtgaggaattagaaaaatcatctgatacattaacaagggaacatgatgcaaacaaaatcaattacatgtatgctcagtatgtcaaaaatactatggaaccacttaatatcccagatgtcagtaaggataaaagatttccctggacaactgaaaatacaggaaatgtaaaccagcagtgcattagaagtttgctttgtacacctataaaaaatggaaagaagaataaagttataggtaaaacctttcctttaacctatactctaaacttatttttaaaaatgtattcccagctatacttctttctttcaaatgtaaagaataaaatgttttaaaaaagataaaa

SEQ ID NO: 15180 - DNA, 747 bp, Homo sapiens
  source 1..747: mol_type = unassigned DNA
gggcggggaagctggggtgagggacgagtccacgggacagcccaaaggcaacatgacggaaccttgccaaaagaaatggtcaatgcatggtttgctgagagagttcacaccatccctgtgtgcaaggaaggtatcagaggccacaccgaatcttgctcttgtcccttgcagcagagtcctcgtgcagataacagtgcccctggaacaccaaccaggaaaatctctgcctctgaatttgaccggcctcttagacccattgttgtcaaggattctgagggaactgtgagcttcctctctgactcagaaaagaaggaacagatgcctctaacccctccaaggtttgatcatgatgaaggggaccagtgctcaagactcttggaattagtgaaggatatttctagtcatttggatgtcacagccttatgtcacaaaattttcttgcatatccatggactgatatctgctgaccgctattccctgttccttgtctgtgaagacagctccaatgacaagtttcttatcagccgcctctttgatgttgctgaaggttcaacactggaagaagtttcaaataactgtatccgcttagaatggaacaaaggcattgtgggacatgtggcagcgcttggtgagcccttgaacatcaaagatgcatatgaggatcctcggttcaatgcagaagttgaccaaattacaggctacaagacacaaagcattctttgtatgccaattaagaatcatagggaa

SEQ ID NO: 15181 - DNA, 6770 bp, Homo sapiens
  source 1..6770: mol_type = unassigned DNA
cctcgccctggccctggctgggcggggaagctggggtgagggacgagtccacgggacagcccaaaggcaacatgacggaaccttgccaaaagaaatggtcaatgcatggtttgctgagagagttcacaccatccctgtgtgcaaggaaggtatcagaggccacaccgaatcttgctcttgtcccttgcagcagagtcctcgtgcagataacagtgcccctggaacaccaaccaggaaaatctctgcctctgaatttgaccggcctcttagacccattgttgtcaaggattctgagggaactgtgagcttcctctctgactcagaaaagaaggaacagatgcctctaacccctccaaggtttgatcatgatgaaggggaccagtgctcaagactcttggaattagtgaaggatatttctagtcatttggatgtcacagccttatgtcacaaaattttcttgcatatccatggactgatatctgctgaccgctattccctgttccttgtctgtgaagacagctccaatgacaagtttcttatcagccgcctctttgatgttgctgaaggttcaacactggaagaagtttcaaataactgtatccgcttagaatggaacaaaggcattgtgggacatgtggcagcgcttggtgagcccttgaacatcaaagatgcatatgaggatcctcggttcaatgcagaagttgaccaaattacaggctacaagacacaaagcattctttgtatgccaattaagaatcatagggaagaggttgttggtgtagcccaggccatcaacaagaaatcaggaaacggtgggacatttactgaaaaagatgaaaaggactttgctgcttatttggcattttgtggtattgttcttcataatgctcagctctatgagacttcactgctggagaacaagagaaatcaggtgctgcttgaccttgctagtttaatttttgaagaacaacaatcattagaagtaattttgaagaaaatagctgccactattatctctttcatgcaagtgcagaaatgcaccattttcatagtggatgaagattgctccgattctttttctagtgtgtttcacatggagtgtgaggaattagaaaaatcatctgatacattaacaagggaacatgatgcaaacaaaatcaattacatgtatgctcagtatgtcaaaaatactatggaaccacttaatatcccagatgtcagtaaggataaaagatttccctggacaactgaaaatacaggaaatgtaaaccagcagtgcattagaagtttgctttgtacacctataaaaaatggaaagaagaataaagttataggggtttgccaacttgttaataagatggaggagaatactggcaaggttaagcctttcaaccgaaatgacgaacagtttctggaagcttttgtcatcttttgtggcttggggatccagaacacgcagatgtatgaagcagtggagagagccatggccaagcaaatggtcacattggaggttctgtcgtatcatgcttcagcagcagaggaagaaacaagagagctacagtcgttagcggctgctgtggtgccatctgcccagacccttaaaattactgactttagcttcagtgactttgagctgtctgatctggaaacagcactgtgtacaattcggatgtttactgacctcaaccttgtgcagaacttccagatgaaacatgaggttctttgcagatggattttaagtgttaagaagaattatcggaagaatgttgcctatcataattggagacatgcctttaatacagctcagtgcatgtttgctgctctaaaagcaggcaaaattcagaacaagctgactgacctggagatacttgcattgctgattgctgcactaagccacgatttggatcaccgtggtgtgaataactcttacatacagcgaagtgaacatccacttgcccagctttactgccattcaatcatggaacaccatcattttgaccagtgcctgatgattcttaatagtccaggcaatcagattctcagtggcctctccattgaagaatataagaccacgttgaaaataatcaagcaagctattttagctacagacctagcactgtacattaagaggcgaggagaattttttgaacttataagaaaaaatcaattcaatttggaagatcctcatcaaaaggagttgtttttggcaatgctgatgacagcttgtgatctttctgcaattacaaaaccctggcctattcaacaacggatagcagaacttgtagcaactgaattttttgatcaaggagacagagagagaaaagaactcaacatagaacccactgatctaatgaacagggagaagaaaaacaaaatcccaagtatgcaagttgggttcatagatgccatctgcttgcaactgtatgaggccctgacccacgtgtcagaggactgtttccctttgctagatggctgcagaaagaacaggcagaaatggcaggcccttgcagaacagcaggagaagatgctgattaatggggaaagcggccaggccaagcggaactgagtggcctatttcatgcagagttgaagtttacagagatggtgtgttctgcaatatgcctagtttcttacacactgtctgtatagtgtctgtatttggtatatactttgccactgctgtatttttatttttgcacaacttttgagagtatagcatgaatgtttttagaggactattacatattttttgtatatttgttttatgctactgaactgaaaggatcaacaacatccactgttagcacattgataaaagcattgtttgtgatatttcgtgtactgcaaagtgtatgcagtattcttgcactgaggtttttttgcttggggattattttaaataattggtttttgtgttttctgaattaccattttttcaagaatgtttggaatctttcctttttcaaaagtaggttaggagcaaattatcatacattctgtgacatttaaagcctttataggatagtgaaaaatgctggctgagtggattttaagagaaataattgtatttgttaacagtgtctttttttaaaaagttaaggcactctgaaacaaatggaaagtcctatgaaactgtattgtaaagaaaacattatttaattgatatgctgttttgtgagagaacaggcaagacagaactttgtcacttcagtgcagtacatttttctgaaagctacccataaaatcactttcatctcacctacctgatgcaaagcaggtgaaaccttaggagatgatccagtcactgacttgattgagggataagtgtgatttagaaatggaatggccttggatgtctatcagtgaagaaaaatgttctgttagaagatctctctaagagtttttttccttctgagcttccttttcaaaataaaagtgacaattgtagcattgacttgaagtgagacatggttatagataagagagtacaaaatgactctttttcctgtcaattgaaatttaaagaaaagttttaattatataaatagcaaagggctattgccaatactagggtcaaaaatgaatttgagggaacagtgggtaagaaactttatgcctgaataacatttagcagtattgtgattgaaaaattgccatattttgatgtataggacaagtcaactgagatccagagaatcctggatgtgaatgctaaacactggcccttaactcacattcaatgtattttcttcccataacatttagtatagttaatattttcttagaatttgagcccatttaagtggattaatattctacatgtgtgcccctaaagacacatttactcaatattggagaagtagataatgaattaagcaactggtctaggaaaggaaaatttgtttcaaatatgcaggaatgtttggatttggggagagtagaaggagagatttgcttgatttgttaacttctacctccaacccacaaaaaagatatttgatctgagtttctatcactaatttggatagaaaatttctaagggacatggtaatccagcattctcaaggacctttcgccaaaatgtgttttccatctatgtcccgattcccctaaattttgcctaaaattcagtatgttccttaagtttttaaaattctgagtgtgtacaaatatcttgacataatgcagttttatttttatcattctggtaaaaaaacaaaaaatagaagcaaaacacattgtattgccattattttgtatttggtaaaggttaatctaggaagttaccaactgtttaatgctatatgtattgtatacttgtattttcaggatattttattttttttgccatacagataaaatttgtaaggttgcccctttgtggcactggtgtgtaaaatacacagactatcactaaaataatagttatatatacatacaggtgtatacttatgcatgcatacataaatccttagtatagaaaaattgcataaagaatagcaatctttaataaacctttttattacattgtgatttagcagttatgctaaaatatgtacttatgctttagtagtttgtttggtcccctctagtatgtgtcactgagaaattttttaaagacatggtagatcgtgtttagaggctttgtatgtgtgtcattttaataagcaagaagatatatttagattagaaatggtttggtctgcctttgaatattgtttattttactttactagttgagacattaaaggaagctgggcaatgcctattttatttctttgttggatattttagttcatacaaagcagagtacttctttagggctggttaattggttcaaataatttttaatttcctttctagtatcttctcaagttggaaaaatatacatacagtcctccttcaccttactctgtatttatattacccataactagcaagaagttcttgttctagattttttgtttgtttagttataacagagtaacataccatttaattacaatttttagccagaaaagtccccactattttactaacttgttaaaagatatctatataattgcctggccttatatttttcagtagattagaccgtgccaatcacaatcctgggtggatttgtgtaagtcacttaacctctgtgtgcctaaacaagttgtgcttttttaaaaggagttatgtttgggcaaagcctttgtcttcaagcagaatgtcacagaaggcagctactttataagccccaatgggccatggagaccactgtcagaaatgggatattagtctagagagaaggtgatctattcccacatgtcatttctaatgttgagtttccatgactgaacaaagagaatatatttattcagcttcacttgcagatcactagtgaatgtgagatttagagctcattgagtatattgcttcaaggtacaaacccaggatgatgatgttgtcaccactgtctcttaattttgaataatagtttcctttaataggagtattagagataagaaagtatatgaaaatatactggaaatattggattcttggagaaaactgttcagtcacagatatattcttgcctagcagtgaagtgcctttattttcagcatagcaaataaatattagacctgttccaatttgatctacaatttttttctgtgtttttcaccagattgtactcctaaaacttaacaggccatcacaagcaattgtcttttgtttacaagattgatttaatatgagaggatacaaaatgtcatcgttatcctctcttatgaacaactgtagtcaaaataaggtggcacaatttaattgttttgtatcagaaatacactgacccaccttttattgagtcctgccacatgttaggtaccgtgctctgctgtggagacagagcagtgaccccaaggagctcacggtccctgaaggaggtgctagagaagagacttagcttctgatactgccaatttaatgtgagaacatggggtatactgcatcatttccattttcatcaataacatatgttttatgcaccttctttacctgaaacttactaagaatctaccagtaaacaaacatcctgtctttttgcaagtatgaatcacttaacctgctgatagttgaagaacactttaggagttttgtattcttgtatatagtttattttttccatgtgctagccaggtaaagattacacagttcttctggactgttaaattgtgcatggttttggaccccttctgctctactacagagagtgaagaagaaagtattaaagctcactttaccattccatatacttactaaaagcctgtgtaaacatgtcttaatgaatgttgttgaaagcaatgtaaatagttgaaaatataaatttatattacagtttaagaaaaccttatgaggcatcactagccactgttaatatctatttgtattcttataccttttcaatatatttgaacaaatatagtttctggcactatttttatactaggaaaaggagttactatgtatattatgcttagcttttaaggcattttaaataaccatgaatgttgatttcattactttcctttcctccatcacgagagtcatttcagatgactctttcatgacaaaatcactttaaaggaacacttacctccgattcctgtataaagtcatgagatggtcaaggtggttttccattgtgcaaattcttcacctgtcagtggtttcctcattttgccatgctttgtaaaaataaaaagaatgatcaagtaggtatg

SEQ ID NO: 15182 - DNA, 3673 bp, Homo sapiens
  source 1..3673: mol_type = unassigned DNA
gctgctcctgagtcccgcgcgccctgggtctggccgctggctccagctgtcttttcttgcactgctttgctccgttcgtgctgcgctcgaactctgcagtccgggtacctgctcctctcggccgaggagccccagggcggcggggttccctttccgactttgcctgtgctggccccgcttgcaccccgtcccccctcgcctggagcgaggcgcgcgccggtcctggtaattggcgccgcggccgccgcggagccttcccgccggcggcccgagcggagggctggggttggggaggcgtgagcgcggcttcccagcccggggtcggtccccgcccgccctgcccccgtctcggcccggagcccccgagccgcggccccctcccactgcaggggccggcggccgcggcagggcgggcgccgcgcggaggcagggcgggcgtattcaatggaagtgtgttaccagctgccggtactgcccctggacaggccggtcccccagcacgtcctcagccgccgaggagccatcagcttcagctccagctccgctctcttcggctgccccaatccccggcagctctctcagaggcgtggagctatttcctatgacagttctgatcagactgcattatacattcgtatgctaggagatgtacgtgtaaggagccgagcaggatttgaatcagaaagaagaggttctcacccatatattgattttcgtattttccactctcaatctgaaattgaagtgtctgtctctgcaaggaatatcagaaggctactaagtttccagcgatatcttagatcttcacgcttttttcgtggtactgcggtttcaaattccctaaacattttagatgatgattataatggacaagccaagtgtatgctggaaaaagttggaaattggaattttgatatctttctatttgatagactaacaaatggaaatagtctagtaagcttaacctttcatttatttagtcttcatggattaattgagtacttccatttagatatgatgaaacttcgtagatttttagttatgattcaagaagattaccacagtcaaaatccttaccataacgcagtccacgctgcggatgttactcaggccatgcactgttacttaaaggaacctaagcttgccaattctgtaactccttgggatatcttgctgagcttaattgcagctgccactcatgatctggatcatccaggtgttaatcaacctttccttattaaaactaaccattacttggcaactttatacaagaatacctcagtactggaaaatcaccactggagatctgcagtgggcttattgagagaatcaggcttattctcacatctgccattagaaagcaggcaacaaatggagacacagataggtgctctgatactagccacagacatcagtcgccagaatgagtatctgtctttgtttaggtcccatttggatagaggtgatttatgcctagaagacaccagacacagacatttggttttacagatggctttgaaatgtgctgatatttgtaacccatgtcggacgtgggaattaagcaagcagtggagtgaaaaagtaacggaggaattcttccatcaaggagatatagaaaaaaaatatcatttgggtgtgagtccactttgcgatcgtcacactgaatctattgccaacatccagattggttttatgacttacctagtggagcctttatttacagaatgggccaggttttccaatacaaggctatcccagacaatgcttggacacgtggggctgaataaagccagctggaagggactgcagagagaacagtcgagcagtgaggacactgatgctgcatttgagttgaactcacagttattacctcaggaaaatcggttatcataacccccagaaccagtgggacaaactgcctcctggaggtttttagaaatgtgaaatggggtcttgaggtgagagaacttaactcttgactgccaaggtttccaagtgagtgatgccagccagcattatttatttccaagatttcctctgttggatcatttgaacccacttgttaattgcaagacccgaacatacagcaatatgaatttggctttcatgtgaaaccttgaatatgcaaagcccagcaggagagaatccgaaaggagtaacaaaggaagttttgatatgtgccacgactttttcaaagcatctaatcttcaaaacgtgaaacttgaattgttcagcaacaatctcttggaatttaaccagtctgatgcaacaatgtgtatcttgtaccttccactaagttctctctgagaaaatggaaatgtgaagtgcccagcctctgctgcctctggcaagacaatgtttacaaatcaactctgaaaatattggttctaaattgccttggagcatgattgtgaaggaaccactcaaacaaatttaaagatcaaactttagactgcagctctttccccctggtttgcctttttcttctttggatgccaccaaagcctcccatttgctatagttttatttcatgcactggaaactgagcatttatcgtagagtaccgccaagctttcactccagtgccgtttggcaatgcaattttttttagcaattagtttttaatttggggtgggaggggaagaacaccaatgtcctagctgtattatgattctgcagtgaagacattgcatgttgttttcactactgtacacttgacctgcacatgcgagaaaaaggtggaatgtttaaaacaccataatcagctcagggtatttgccaatctgaaataaaagtgggatgggagagtgtgtccttcagatcaagggtactaaagtccctttcgctgcagtgagtgagaggtatgttgtgtgtgaatgtacggatgtgtgtttgcgtgcatgtttgtgcatgtgtgactgtgcatgttatgtttctccatgtgggcaaagatttgaaatgtaagcttttatttattattttagaatgtgacataatgagcagccacactcgggggaggggaaggttggtaggtaagctgtaacagattgctccagttgccttaaactatgcacatagctaagtgaccaaacttcttgttttgatttgaaaaaagtgcattgttttcttgtccctccctttgatgaaacgttaccctttgacgggccttttgatgtgaacagatgttttctaggacaaactataaggactaattttaaacttcaaacattccacttttgtaatttgttttaaattgttttatgtatagtaagcacaactgtaatctagttttaagagaaaccggtgctttcttttagttcatttgtatttcccttgttactgtaaaagactgtttattaattgtttacagtttgttgcaacagccattttcttgggagaaagcttgagtgtaaagccatttgtaaaaggctttgccatactcattttaatatgtgcctgttgctgttaacttttgatgaataaaaacctatcttttcatatttttatctttgacatttaccttataactcaatcttttggaaaacacaatgctaaattacaaggaaatcaaagttagcttcttggctcttgtaattcatccctcagatgtttactcagtccgagcttatctactaatgactcaccttgcaagtgagtaagcagaagcccagtt

SEQ ID NO: 15183 - DNA, 2425 bp, Homo sapiens
  source 1..2425: mol_type = unassigned DNA
ggaaggcagctgcttgaggtccaaggcagtcagtgtcccctctcttttgcctcgggacagctggtatttatcagactcctaagaagttttccttgctccctagtagaagagagagattatgcagcgggcttttgattgatccaatgggaattacattgatctggtgtctggccttggttcttatcaagtggatcacctctaagaggcgtggagctatttcctatgacagttctgatcagactgcattatacattcgtatgctaggagatgtacgtgtaaggagccgagcaggatttgaatcagaaagaagaggttctcacccatatattgattttcgtattttccactctcaatctgaaattgaagtgtctgtctctgcaaggaatatcagaaggctactaagtttccagcgatatcttagatcttcacgcttttttcgtggtactgcggtttcaaattccctaaacattttagatgatgattataatggacaagccaagtgtatgctggaaaaagttggaaattggaattttgatatctttctatttgatagactaacaaatggaaatagtctagtaagcttaacctttcatttatttagtcttcatggattaattgagtacttccatttagatatgatgaaacttcgtagatttttagttatgattcaagaagattaccacagtcaaaatccttaccataacgcagtccacgctgcggatgttactcaggccatgcactgttacttaaaggaacctaagcttgccaattctgtaactccttgggatatcttgctgagcttaattgcagctgccactcatgatctggatcatccaggtgttaatcaacctttccttattaaaactaaccattacttggcaactttatacaagaatacctcagtactggaaaatcaccactggagatctgcagtgggcttattgagagaatcaggcttattctcacatctgccattagaaagcaggcaacaaatggagacacagataggtgctctgatactagccacagacatcagtcgccagaatgagtatctgtctttgtttaggtcccatttggatagaggtgatttatgcctagaagacaccagacacagacatttggttttacagatggctttgaaatgtgctgatatttgtaacccatgtcggacgtgggaattaagcaagcagtggagtgaaaaagtaacggaggaattcttccatcaaggagatatagaaaaaaaatatcatttgggtgtgagtccactttgcgatcgtcacactgaatctattgccaacatccagattggttttatgacttacctagtggagcctttatttacagaatgggccaggttttccaatacaaggctatcccagacaatgcttggacacgtggggctgaataaagccagctggaagggactgcagagagaacagtcgagcagtgaggacactgatgctgcatttgagttgaactcacagttattacctcaggaaaatcggttatcataacccccagaaccagtgggacaaactgcctcctggaggtttttagaaatgtgaaatggggtcttgaggtgagagaacttaactcttgactgccaaggtttccaagtgagtgatgccagccagcattatttatttccaagatttcctctgttggatcatttgaacccacttgttaattgcaagacccgaacatacagcaatatgaatttggctttcatgtgaaaccttgaatatgcaaagcccagcaggagagaatccgaaaggagtaacaaaggaagttttgatatgtgccacgactttttcaaagcatctaatcttcaaaacgtgaaacttgaattgttcagcaacaatctcttggaatttaaccagtctgatgcaacaatgtgtatcttgtaccttccactaagttctctctgagaaaatggaaatgtgaagtgcccagcctctgctgcctctggcaagacaatgtttacaaatcaactctgaaaatattggttctaaattgccttggagcatgattgtgaaggaaccactcaaacaaatttaaagatcaaactttagactgcagctctttccccctggtttgcctttttcttctttggatgccaccaaagcctcccatttgctatagttttatttcatgcactggaaactgagcatttatcgtagagtaccgccaagctttcactccagtgccgtttggcaatgcaattttttttagcaattagtttttaatttggggtgggaggggaagaacaccaatgtcctagctgtattatgattctgcagtgaagacattgcatgttgttttcactactgtacacttgacctgcacatgcgagaaaaaggtggaatgtttaaaacaccataatcagctcagggtatttgccaatctgaaataaaagtgggatggg

SEQ ID NO: 15184 - DNA, 2986 bp, Homo sapiens
  source 1..2986: mol_type = unassigned DNA
atggaagtgtgttaccagctgccggtactgcccctggacaggccggtcccccagcacgtcctcagccgccgaggagccatcagcttcagctccagctccgctctcttcggctgccccaatccccggcagctctctcagaggcgtggagctatttcctatgacagttctgatcagactgcattatacattcgtatgctaggagatgtacgtgtaaggagccgagcaggatttgaatcagaaagaagaggttctcacccatatattgattttcgtattttccactctcaatctgaaattgaagtgtctgtctctgcaaggaatatcagaaggctactaagtttccagcgatatcttagatcttcacgcttttttcgtggtactgcggtttcaaattccctaaacattttagatgatgattataatggacaagccaagtgtatgctggaaaaagttggaaattggaattttgatatctttctatttgatagactaacaaatggaaatagtctagtaagcttaacctttcatttatttagtcttcatggattaattgagtacttccatttagatatgatgaaacttcgtagatttttagttatgattcaagaagattaccacagtcaaaatccttaccataacgcagtccacgctgcggatgttactcaggccatgcactgttacttaaaggaacctaagcttgccaattctgtaactccttgggatatcttgctgagcttaattgcagctgccactcatgatctggatcatccaggtgttaatcaacctttccttattaaaactaaccattacttggcaactttatacaagaatacctcagtactggaaaatcaccactggagatctgcagtgggcttattgagagaatcaggcttattctcacatctgccattagaaagcaggcaacaaatggagacacagataggtgctctgatactagccacagacatcagtcgccagaatgagtatctgtctttgtttaggtcccatttggatagaggtgatttatgcctagaagacaccagacacagacatttggttttacagatggctttgaaatgtgctgatatttgtaacccatgtcggacgtgggaattaagcaagcagtggagtgaaaaagtaacggaggaattcttccatcaaggagatatagaaaaaaaatatcatttgggtgtgagtccactttgcgatcgtcacactgaatctattgccaacatccagattggtaactatacatatttagatatagctggttagaaaaatgccactgtttttatcaagaagggaaatatatttgaaatataaaatattaaaattatgctcatttctatttttaaaaataatttaagaaattttacccttgttttcccttgttatggctcttctaattctcatttaattttaggatgtaaaaagtatatttttgcagaacaggcagcagcaataacttgtttctgttcttatgtaaataagaatccattattcgctcatgtggaagcttcttttgcatcatttgggactgccatttaaaaaaggataggtaaacaaagaaatgacaaaaataaaataaataaaataaaaatggataggtggtgacccactgagcctgatcataatacgaagaccagcttctgccactgcctttccagactcttaccactgcctgttgattaaatctaactcttcaacatcctagacaggcccttataatcttgcttcaaatgctgtgcagccatcttgcctcaacttccctctcatttgcctacagcatctcgggacgcttctgtgtttcccaagtatacgctgttctttcgctctttgtgcctcgccagtgctttccatgtgcctcgtagagttatttttcttgaagaggcagctcaaatgtcaccttctccagaagctgctctccacttgctttaggcagagtcagtcacttttcttctagattccaaagtgcctgatccacttggttgtggattcctggagcctagcaccacaccagaagcacgaggcccttgagaactgtgtgttgagtgaactaataactgtattatagaaagcataatgaaaatgtcctgtgactgaagtatgtgtagcttgttgcaggagttcacaggaaagttgactaggattgagtgtgttgggctttgggtataaaggagggggattctacgggggcagtagctcaacaaggaatagagggaggagtgtaattttggtagctggtgttgaatagggcctttgagaatcagactgaacacagtgaaatatgtgcccaaagttcagaaagatgaagtttccagaaactaagaaggtagcacaatatgtggcatcatactcagaaaggaagaccatgccatggggccagaaattcagaaacgtaattcttacattgtgattgcaatggatactcatggaagaaagtgggtagtggccgatttgacttcagagtgacaggtagagaagggaagagcgtgtagaactgtggccagactttaggagtgtgagggatgctgaatctcccagagagctcacactggccaggaatgctgagagtagcagatgcttttcttttgggaggatagtaaaacaatttagaaccagatatgctttgtcttgattctcaagtagaataatcttcaaatgcaaaagaatacattagaaatggacaaaagtggccaggagcggtagctcatacttgtaacccagcactttgggaagccgaggcgggctgatcgcttgaggtcaggagttcgagaccagcctggccaaaatagtgaaactcacgtttctactaaaaatacaaaaattagctgggtgtgatggccacttgggaggctgagataggagaatcgcttgaacctgggaggcagaggttgcagtgagccaatatcgtgccactgcattccagcctgggtgacagaatgaaactccatcactccatctcaaaaaaaaaaaaaaaaaaaaa

SEQ ID NO: 15185 - DNA, 1081 bp, Homo sapiens
  source 1..1081: mol_type = unassigned DNA
gtcctaacgtaaacctaaataataccatgctctgatgagtggtattgtggcaggtcatgaggtgctgtgggaacacaaatctggccaagtttgccagaaaatgagaggcatttcatgaaaagcagatgatatagtcaaggtgatcttttttatcattgaacatttgtcagctaatcataaacttttatttattgtgattattaaataagtttggtaatgattattgagagtaaagttacaatttctggtgtgcaagattgctttccctgacatgaatacattgtatcattgttatgaatgtagccatccgttaggggaggattttatcacagacttgacatagacttccacttaacatgattactcagtagcctccttaaacatcaggactaaaggaataaccttacatcttagattacattattgaaatccaataaccaatttgttgataaataaacacccttaaaattttagatcttttgttcagtaatggctacagtaataaaaatgtgccaaactatgtttgtcattttaaagccattatttctcaaaaagaacggtttatgttttagctgccattttaattaagcttgttaaaaatgaaatggcctaaggatgaactctgtaaactccacatgggcagggccactgttgtatcatggctttgccagtgtggtgatgagatcaggacctggcagatgtgcttggtgaacctaatgaacaaccacctgaggaatgacgtgaagggggaggagattaccaccactaccattggctgctaattcaaaactactgtgatggcgtagagcttattttagatatatctgtgattcattattcttttgtcacacttcagcttgccaattctgtaactccttgggatatcttgctgagcttaattgcagctgccactcatgatctggatcatccaggtgttaatcaacctttccttattaaaactaaccattacttggcaactttatacaagaatacctcagtactggaaaatcaccactggagatctgcagtgggcttattgagagaatcaggcttattctcacatctgccattagaaagcagg

SEQ ID NO: 15186 - DNA, 802 bp, Homo sapiens
  source 1..802: mol_type = unassigned DNA
tctctctgccaacatccagcaagatgtaatacaaggaatatgttttctttcagtgtttctcatgtcaacacaaatgcagttttttccattttctttttactcttgggacacagtcatgttccagtccatctcaatctgaaattgaagtgtctgtctctgcaaggaatatcagaaggctactaagtttccagcgatatcttagatcttcacgcttttttcgtggtactgcggtttcaaattccctaaacattttagatgatgattataatggacaagccaagtgtatgctggaaaaagttggaaattggaattttgatatctttctatttgatagactaacaaatggaaatagtctagtaagcttaacctttcatttatttagtcttcatggattaattgagtacttccatttagatatgatgaaacttcgtagatttttagttatgattcaagaagattaccacagtcaaaatccttaccataacgcagtccacgctgcggatgttactcaggccatgcactgttacttaaaggaacctaaggctgaactcatgtggattataaagcattttgttcaagttgagcccaaagtctccttgattgattgacactgcttgccaattctgtaactccttgggatatcttgctgagcttaattgcagctgccactcatgatctggatcatccaggtgttaatcaacctttccttattaaaactaaccattacttggcaactttatacaagaatacctcagtactggaaaatcaccactggagatctgcagtgggcttattgagagaa

SEQ ID NO: 15187 - DNA, 685 bp, Homo sapiens
  source 1..685: mol_type = unassigned DNA
gcgcaaggtccgcggctgcaaagtgtgaattacgccgggctcgcgccggcggcggagtgaagtcaggctccgggggaggggaggagcaggactccggcggcggcggcggcggcggcggcggcggcccgagctggtcgctgctcctgagtcccgcgcgccctgggtctggccgctggctccagctgtcttttcttgcactgctttgctccgttcgtgctgcgctcgaactctgcagtccgggccggtcccccagcacgtcctcagccgccgaggagccatcagcttcagctccagctccgctctcttcggctgccccaatccccggcagctctctcagaggcgtggagctatttcctatgacagttctgatcagactgcattatacattcgtatgctagcatgaaggaatggccacaggacaggtgactagtcattgtgggatggaattatagtcgatgaagtgagccttggaggaagtcatggtcctactcagagaaacagagagatgtacgtgtaaggagccgagcaggatttgaatcagaaagaagaggttctcacccatatattgattttcgtattttccactctcaatctgaaattgaagtgtctgtctctgcaaggaatatcagaaggctactaagtttccagcgatatcttagatcttcacgcttttttcgtggtactg

SEQ ID NO: 15188 - DNA, 572 bp, Homo sapiens
  source 1..572: mol_type = unassigned DNA
agaagaaaaactcttagaagccagcaacttttacaagcaccctgggacatttagttgaggggcttgagtgttgtataacacaataatttttagtcagaataatgttaatagagcctgtttttaaaagttgaaagattcgtactgtttttttgtttttaaaaagatttccatgccaaagagttttaagtattgatgctgaactgaaatggacaagcttgagttacctggaaaattcatttatgtggatggaacaccagctcttccaaggatgccaatagaagagagagattatgcagcgggcttttgattgatccaatgggaattacattgatctggtgtctggccttggttcttatcaagtggatcacctctaagaggcgtggagctatttcctatgacagttctgatcagactgcattatacattcgtatgctaggagatgtacgtgtaaggagccgagcaggatttgaatcagaaagaagaggttctcacccatatattgattttcgtattttccactctcaatctgaaattgaagtgtctgtctctgcaaggaatatcagaaggctact

SEQ ID NO: 15189 - DNA, 522 bp, Homo sapiens
  source 1..522: mol_type = unassigned DNA
ctggcgaggagctagggaagggagtcacggcggggcgcgaagggaactgcggatgagatagatgggggaaaacgtttgtcgggaggcgactccaacagagccccagggtgcagaacacaaggaaggctactgtcgccctcggccgcttgccagtctccctgggcgctgcggcggcgcggggcgctgggcctgcggcgcggcgtcgtgacgtcacggtggcggcagccgtggttggcgcaaggccggtcccccagcacgtcctcagccgccgaggagccatcagcttcagctccagctccgctctcttcggctgccccaatccccggcagctctctcagaggcgtggagctatttcctatgacagttctgatcagactgcattatacattcgtatgctaggagatgtacgtgtaaggagccgagcaggatttgaatcagaaagaagaggttctcacccatatattgattttcgtattttccactctcaatctgaaattgaagtgtctgtctctgcaaggaata

SEQ ID NO: 15190 - DNA, 5390 bp, Homo sapiens
  source 1..5390: mol_type = unassigned DNA
cagtcagttggtctgggcactgcagcaggctcggctctgtcccagcacttgtctgggagaaaagtggtgttactcacccagggagagtctctctttctaccttccttctttctcgatctccttgtgtgcttttgtgtttctttatttcttttccttttttttctttttttttttttgttacttaattatattcctaatcctggatgaagttgctggattctgcagcacaagtcttcatgaacaagcagcaccgctcagagatttcacggcattcaaaggtcacagaactgccactatggttaaatgtcttgtttaatggttgagaggtgtggcgaaatcttgtttgagaaccccgatcagaatgccaaatgtgtttgcatgctgggagatatacgactaaggggtcagacgggggttcgtgctgaacgccgtggctcctacccattcattgacttccgcctacttaacagtacaacatactcaggggagattggcaccaagaaaaaggtgaaaagactattaagctttcaaagatacttccatgcatcaaggctgcttcgtggaattataccacaagcccctctgcacctgctggatgaagactaccttggacaagcaaggcatatgctctccaaagtgggaatgtgggattttgacattttcttgtttgatcgcttgacaaatggaaacagcctggtaacactgttgtgccacctcttcaatacccatggactcattcaccatttcaagttagatatggtgaccttacaccgatttttagtcatggttcaagaagattaccacagccaaaacccgtatcacaatgctgttcacgcagccgacgtcacccaggccatgcactgctacctgaaagagccaaagcttgccagcttcctcacgcctctggacatcatgcttggactgctggctgcagcagcacacgatgtggaccacccaggggtgaaccagccatttttgataaaaactaaccaccatcttgcaaacctatatcagaatatgtctgtgctggagaatcatcactggcgatctacaattggcatgcttcgagaatcaaggcttcttgctcatttgccaaaggaaatgacacaggatattgaacagcagctgggctccttgatcttggcaacagacatcaacaggcagaatgaatttttgaccagattgaaagctcacctccacaataaagacttaagactggaggatgcacaggacaggcactttatgcttcagatcgccttgaagtgtgctgacatttgcaatccttgtagaatctgggagatgagcaagcagtggagtgaaagggtctgtgaagaattctacaggcaaggtgaacttgaacagaaatttgaactggaaatcagtcctctttgtaatcaacagaaagattccatccctagtatacaaattggtttcatgagctacatcgtggagccgctcttccgggaatgggcccatttcacgggtaacagcaccctgtcggagaacatgctgggccacctcgcacacaacaaggcccagtggaagagcctgttgcccaggcagcacagaagcaggggcagcagtggcagcgggcctgaccacgaccacgcaggccaagggactgagagcgaggagcaggaaggcgacagcccctaggggccggcccaacttagacgcggctctcctccggcagggcccccagagggcagaagcagcgtggaggggccctcacgcagcagcccagccactttctgagtgttgtcctggggctctttggaacgccatcttcctcccacttacctgcctcccctccttttcgcaaatgtacagaagccatttgtcacctcagcattcgctgccgaaatgagcaactccattcagtaacgtgggagctgatcccacgggcaggctctccctgctccaggagaagactaggaggaagaatgaggtgctcctgccgtgtccgccttgttccgggtcgcactggaacaggcagcaattcctaagtccggagcgtttgagcgtttgctatctgactgctgatctgcgtgacagaaacaccagcatatttgcaacgccaaggatattggtcttaagtgcaagagcacaaatgagagtgtgagagaaagtaccttctattttaataataatattattataaaaataataaatctttttaacttttatattttatgcactagacaatggatctgcaactttggactaaggtcattcaatgtacccaaacttgaacagggggttcattgttttgctattgactttattatgccactttggggcagagacttggcatcttcgcagtttaagaaaccacgtttcctatccaatccgaagggaaggtgctgtacagttcattcctttgcaccattagccaatctgtcttttatggattctgtgacatgtttatattcacccatgtacattttctgtaaataccaaacgctactgattcccatgccaaaatacatgagtattatgggattgctacctgtataaacaatggcactgtgaaaatactgttagttttaatacaagagaatgcatttgtaaatatggtatagagtttattaatatactattgtttgcagataaaggccttaactttaaacatctttcatcttctgaaagctgcccaacttaaatcctcatagatgtctttctcaactgccttcccatgttcatctgtatgttttccagctaaggtcacaaaccaaaactgaataaagtctttgaggaaacattttggaaacttcacatgcattccgcttgagaccatagtgtttaatctatggcaccaagcatcgtttcctcagattaatgagacccttcaacaagcctgaatcagtcacttttcaacacagcgatgttttaacaagccagctgctaagcttgtgtttatgtgactcttgttacagatcatggcggtgcgtcagcctcacaggagacatagcaggtctcagaaaccttctatgaccctgtcatctaaccatcagggaattccctgctcccatgccacacatttgtctattatggctatagtaccaaagtacttttggtgtttggttggtgtgcatttctttagtgtcgatagtaactggatttttctttttccttaatctcatgtgaacaactacccaactgtttagctgaagttcatattatttaagtaaagaaaatatttcagttttataacagactttaccttcctggcaggtcattgtagttaattatgtctctagcttggagtgtcaccttggaatttcgttgccattttttctcagacacctggccgtaaaatcagtttgttacagcattcttctctaggctgctaaacgctgtgcattgaaccttttctttagaagtttcagcgtaactaatgttagatgaaaattgttgatgcccctttctttttactttaaacaatgtggtagtgggagaatgactgtttctgccactatcaacctgatcctcatgctgatagaatgacagctagcacttatttcctaagtgcaactgttttagagatttttctcctaacatgcaaaggaaatactgattggcctataataagttcctatagggagactgaggcttgcagaattaaggttcaggggaaattttggaaagttggttgtattttcattgaagtaggagagattatcagatggtgctaaagaaagtgtgaagatcttatgaaataggtggatggtaagttgaaattattgatgtgggtaagaagggaggttgtggaaagttaacactagctttgtatttttttttctgtaaaactgtgaactgatatattttcctttatcactttagtattctgcagttctcagcttggtgaggctccaaaagagaatatgtcagatgtattcctacttccaaacctgtcttactttggtttgatggtacacatagggcttttgaacagtctatttttaatgtatatgaggtcaaatcaaggaaggcaattgctggggacaagaaaagtagaggtaggaaagaagacactattttagctaatggggtttcttgggactaaaaaatggctttgtttaaattataattatataataatttaaataaatgagattggaggtattcttagtagttctgagttgatagtttacattacaattaggtcttgaagaagagctcacagagaaaaaactaccaaatatccaatgggtaagcccatgatgtagccactagtacaataaaaatctgaagtaaaatgaggcataaacttgatgcagctgcctccctcattcaactggggagttcttgagttcctcatttgttggtaaaaagaaaaagaatgtgaaaatgtctctttttttcttggctattagtggctgtcttgcaatatttcaataggagtccaattactagttaaaacactggcggggtgcggtggctcacgcctgtaatcctagcactttgggaggccaagttgggcagatcacaagttcaagagatcgagaccattctggccaacatggtgaaaccccgtctctactaaaaatacaaaaattagctgggcatggcagtgcgtgcctgcaatcccagctactcaggaagctgaggcaggagaatcgcttgaacctgggaggtggaagttgtagtgaactgagatcgcaccactgcactccagcctggcaacagagctagaatccgtctcaaacaaacaaacaaaaaatcccacagctattggatcatccacagattttttctttacaatcttgttctccttgtccatggaccatcaatagttgacttgccaggtttaattctttcattgcttgagaagaaaggaatcaaaggactgtgtgtagtaagctgacggtaaagttaagattaaattaagacagagagagaatacatatcactgccaggcctgataggaaaaatctgctcttccttttaataacagtgatgaattgtcaggaccttatttaggaaaccctgacctacccataactccctgctaggctaagtagaaaccaggttatttctccctgcttatggctccccgcaaagggacttgcagcgtgtcctgcaactttgtcttcagatagtgcttcctacaaaactaggtcttgttttgtaatcttttctcgtgttgaatcagatctgcttacttatttaggtttggttatgagcttgtatctcactgtatttctcatgctttgttcttttaaacaaatcctttaaactgtgtcattttgtatacacatgtgaggtttgaaaaaaaaaaaaaaaaaaaaaagaactaccttgtgagttttgctcaaaatgtggcctaagtagccattggcatgtctagatgaacaaataaaaataaagataatttctttaaaatatca

SEQ ID NO: 15191 - DNA, 711 bp, Homo sapiens
  source 1..711: mol_type = unassigned DNA
gcatatgctctccaaagtgggaatgtgggattttgacattttcttgtttgatcgcttgacaaatggaaacagcctggtaacactgttgtgccacctcttcaatacccatggactcattcaccatttcaagttagatatggtgaccttacaccgatttttagtcatggttcaagaagattaccacagccaaaacccgtatcacaatgctgttcacgcagccgacgtcacccaggccatgcactgctacctgaaagagccaaagcttgccagcttcctcacgcctctggacatcatgcttggactgctggctgcagcagcacacgatgtggaccacccaggggtgaaccagccatttttgataaaaactaaccaccatcttgcaaacctatatcaggtaagggagcccaacctggagccagccacagtatggtcaatcgccttaggcccggtgctcaagcctgaatcttgcccatggagaaagccttgttttagggtcctagaagttcaaagacgaatgaaacacaatctctgccctcaaaaatttgttcaaactcagatgctcaaaatgagcaaaatccaagcaaacttaatcccagtttgaaagaggtttgaggaattagctcatgtcgatacaattgttttttaaaatctctaaagagtaaatacttgtgctgttctttgtatccaaagaccttactagaataaagtgag

SEQ ID NO: 15192 - DNA, 5234 bp, Homo sapiens
  source 1..5234: mol_type = unassigned DNA
atgcctgtgctagagcgatatttccacccagcagagctaggcaggaggtggacaggcccagaaggtgtgctgccctcctccccgggaagccggccggggtgccagcaggggccgctgccctgggacttgccagagatgatcaggatggtaaagctggtttggaaatccaaaagtgagctgcaggcgaccaaacagagaggcattctggacaatgaagatgctctccgcagctttccaggagatatacgactaaggggtcagacgggggttcgtgctgaacgccgtggctcctacccattcattgacttccgcctacttaacagtacaacatactcaggggagattggcaccaagaaaaaggtgaaaagactattaagctttcaaagatacttccatgcatcaaggctgcttcgtggaattataccacaagcccctctgcacctgctggatgaagactaccttggacaagcaaggcatatgctctccaaagtgggaatgtgggattttgacattttcttgtttgatcgcttgacaaatggaaacagcctggtaacactgttgtgccacctcttcaatacccatggactcattcaccatttcaagttagatatggtgaccttacaccgatttttagtcatggttcaagaagattaccacagccaaaacccgtatcacaatgctgttcacgcagccgacgtcacccaggccatgcactgctacctgaaagagccaaagcttgccagcttcctcacgcctctggacatcatgcttggactgctggctgcagcagcacacgatgtggaccacccaggggtgaaccagccatttttgataaaaactaaccaccatcttgcaaacctatatcagaatatgtctgtgctggagaatcatcactggcgatctacaattggcatgcttcgagaatcaaggcttcttgctcatttgccaaaggaaatgacacaggatattgaacagcagctgggctccttgatcttggcaacagacatcaacaggcagaatgaatttttgaccagattgaaagctcacctccacaataaagacttaagactggaggatgcacaggacaggcactttatgcttcagatcgccttgaagtgtgctgacatttgcaatccttgtagaatctgggagatgagcaagcagtggagtgaaagggtctgtgaagaattctacaggcaaggtgaacttgaacagaaatttgaactggaaatcagtcctctttgtaatcaacagaaagattccatccctagtatacaaattggtttcatgagctacatcgtggagccgctcttccgggaatgggcccatttcacgggtaacagcaccctgtcggagaacatgctgggccacctcgcacacaacaaggcccagtggaagagcctgttgcccaggcagcacagaagcaggggcagcagtggcagcgggcctgaccacgaccacgcaggccaagggactgagagcgaggagcaggaaggcgacagcccctaggggccggcccaacttagacgcggctctcctccggcagggcccccagagggcagaagcagcgtggaggggccctcacgcagcagcccagccactttctgagtgttgtcctggggctctttggaacgccatcttcctcccacttacctgcctcccctccttttcgcaaatgtacagaagccatttgtcacctcagcattcgctgccgaaatgagcaactccattcagtaacgtgggagctgatcccacgggcaggctctccctgctccaggagaagactaggaggaagaatgaggtgctcctgccgtgtccgccttgttccgggtcgcactggaacaggcagcaattcctaagtccggagcgtttgagcgtttgctatctgactgctgatctgcgtgacagaaacaccagcatatttgcaacgccaaggatattggtcttaagtgcaagagcacaaatgagagtgtgagagaaagtaccttctattttaataataatattattataaaaataataaatctttttaacttttatattttatgcactagacaatggatctgcaactttggactaaggtcattcaatgtacccaaacttgaacagggggttcattgttttgctattgactttattatgccactttggggcagagacttggcatcttcgcagtttaagaaaccacgtttcctatccaatccgaagggaaggtgctgtacagttcattcctttgcaccattagccaatctgtcttttatggattctgtgacatgtttatattcacccatgtacattttctgtaaataccaaacgctactgattcccatgccaaaatacatgagtattatgggattgctacctgtataaacaatggcactgtgaaaatactgttagttttaatacaagagaatgcatttgtaaatatggtatagagtttattaatatactattgtttgcagataaaggccttaactttaaacatctttcatcttctgaaagctgcccaacttaaatcctcatagatgtctttctcaactgccttcccatgttcatctgtatgttttccagctaaggtcacaaaccaaaactgaataaagtctttgaggaaacattttggaaacttcacatgcattccgcttgagaccatagtgtttaatctatggcaccaagcatcgtttcctcagattaatgagacccttcaacaagcctgaatcagtcacttttcaacacagcgatgttttaacaagccagctgctaagcttgtgtttatgtgactcttgttacagatcatggcggtgcgtcagcctcacaggagacatagcaggtctcagaaaccttctatgaccctgtcatctaaccatcagggaattccctgctcccatgccacacatttgtctattatggctatagtaccaaagtacttttggtgtttggttggtgtgcatttctttagtgtcgatagtaactggatttttctttttccttaatctcatgtgaacaactacccaactgtttagctgaagttcatattatttaagtaaagaaaatatttcagttttataacagactttaccttcctggcaggtcattgtagttaattatgtctctagcttggagtgtcaccttggaatttcgttgccattttttctcagacacctggccgtaaaatcagtttgttacagcattcttctctaggctgctaaacgctgtgcattgaaccttttctttagaagtttcagcgtaactaatgttagatgaaaattgttgatgcccctttctttttactttaaacaatgtggtagtgggagaatgactgtttctgccactatcaacctgatcctcatgctgatagaatgacagctagcacttatttcctaagtgcaactgttttagagatttttctcctaacatgcaaaggaaatactgattggcctataataagttcctatagggagactgaggcttgcagaattaaggttcaggggaaattttggaaagttggttgtattttcattgaagtaggagagattatcagatggtgctaaagaaagtgtgaagatcttatgaaataggtggatggtaagttgaaattattgatgtgggtaagaagggaggttgtggaaagttaacactagctttgtatttttttttctgtaaaactgtgaactgatatattttcctttatcactttagtattctgcagttctcagcttggtgaggctccaaaagagaatatgtcagatgtattcctacttccaaacctgtcttactttggtttgatggtacacatagggcttttgaacagtctatttttaatgtatatgaggtcaaatcaaggaaggcaattgctggggacaagaaaagtagaggtaggaaagaagacactattttagctaatggggtttcttgggactaaaaaatggctttgtttaaattataattatataataatttaaataaatgagattggaggtattcttagtagttctgagttgatagtttacattacaattaggtcttgaagaagagctcacagagaaaaaactaccaaatatccaatgggtaagcccatgatgtagccactagtacaataaaaatctgaagtaaaatgaggcataaacttgatgcagctgcctccctcattcaactggggagttcttgagttcctcatttgttggtaaaaagaaaaagaatgtgaaaatgtctctttttttcttggctattagtggctgtcttgcaatatttcaataggagtccaattactagttaaaacactggcggggtgcggtggctcacgcctgtaatcctagcactttgggaggccaagttgggcagatcacaagttcaagagatcgagaccattctggccaacatggtgaaaccccgtctctactaaaaatacaaaaattagctgggcatggcagtgcgtgcctgcaatcccagctactcaggaagctgaggcaggagaatcgcttgaacctgggaggtggaagttgtagtgaactgagatcgcaccactgcactccagcctggcaacagagctagaatccgtctcaaacaaacaaacaaaaaatcccacagctattggatcatccacagattttttctttacaatcttgttctccttgtccatggaccatcaatagttgacttgccaggtttaattctttcattgcttgagaagaaaggaatcaaaggactgtgtgtagtaagctgacggtaaagttaagattaaattaagacagagagagaatacatatcactgccaggcctgataggaaaaatctgctcttccttttaataacagtgatgaattgtcaggaccttatttaggaaaccctgacctacccataactccctgctaggctaagtagaaaccaggttatttctccctgcttatggctccccgcaaagggacttgcagcgtgtcctgcaactttgtcttcagatagtgcttcctacaaaactaggtcttgttttgtaatcttttctcgtgttgaatcagatctgcttacttatttaggtttggttatgagcttgtatctcactgtatttctcatgctttgttcttttaaacaaatcctttaaactgtgtcattttgtatacacatgtgaggtttgaaaaaaaaaaaaaaaaaaaaaagaactaccttgtgagttttgctcaaaatgtggcctaagtagccattggcatgtctagatgaacaaataaaaataaagataatttcttt

SEQ ID NO: 15193 - DNA, 3984 bp, Homo sapiens
  source 1..3984: mol_type = unassigned DNA
agtagccgggccaaggcgggagcggctgcctctcagggtcgctccagggccgcgctaggaaagccgccgccgccgcagcgcccgcaccgcgataaaaggggcggccgcgtttcctgacgcgagatccgcgctcgccgccgcccgcccaggcggcgatgacacggcgcccgcggcggcccggaggcgccgggtgggccgtttgctgaccggatcgcggctacccgccagcgtgtccgcggcgccgccgccagcatgggctgtgccccgagcatccacatttccgagcgcctggtggccgaggacgcgcctagccccgcggcaccgccgctgtcgtccggcgggccgcgcctcccgcagggccagaagacggccgccttgccccggacccgcggcgccggcctcttggagtcggagcttcgcgacggcagcggcaagaaggtagcagtagctgatgtgcagtttggccccatgagatttcatcaagatcaacttcaggtacttttagtgtttaccaaagaagataaccaatgtaatggattctgcagggcatgtgaaaaagcagggtttaagtgtacagttaccaaggaggctcaggctgtccttgcctgtttcctggacaaacatcatgacattatcatcatagaccacagaaatcctcgacagctggatgcagaggcactgtgcaggtctatcagatcatcaaaactctcagaaaacacagttattgttggtgtagtacgcagggtggatagagaagagttgtccgtaatgcctttcatttctgctggatttacaaggaggtatgtagaaaaccccaacatcatggcctgctacaatgaactgctccagctggagtttggagaggtgcgatcacaactgaaactcagggcttgtaactcagtattcactgcattagaaaacagtgaagatgcaattgaaattacaagcgaagaccgttttatacagtatgcaaatcctgcatttgaaacaacaatgggctatcagtcaggtgaattaatagggaaggagttaggagaagtgcctataaatgaaaaaaaggctgacttgctcgatactataaattcatgcatcaggataggcaaggagtggcaaggaatttactatgccaaaaagaaaaacggagataatatacaacaaaatgtgaagataatacctgtcattggacagggaggaaaaattagacactatgtgtccattatcagagtgtgcaatggcaacaataaggctgagaaaatatccgaatgtgttcagtctgacactcatacagataatcagacaggcaaacataaagacaggagaaaaggctcactagacgtcaaagctgttgcctcccgtgcaactgaagtttccagccagagacgacactcttccatggcccggatacattccatgacaattgaggcgcccatcaccaaggtaatcaatattatcaatgctgcccaggaaagtagtcccatgcctgtgacagaagccctagaccgtgtgctggaaattctaagaaccactgagttatattcaccacagtttggtgctaaagatgatgatccccatgccaatgaccttgttgggggcttaatgtctgatggtttgcgaagactatcagggaatgaatatgttctttcaacaaaaaacactcaaatggtttcaagcaatataatcactcccatctcccttgatgatgtcccaccacggatagctcgggccatggaaaatgaggaatactgggactttgatatttttgaactggaggctgccacccacaataggcctttgatttatcttggtctcaaaatgtttgctcgctttggaatctgtgaattcttacactgctccgagtcaacgctaagatcatggttacaaattatcgaagccaattatcattcctccaatccctaccacaattctacacattctgctgatgtgcttcatgccactgcctattttctctccaaggagaggataaaggaaactttagatccaattgatgaggtcgctgcactcatcgcagccaccattcatgatgtggatcaccctgggagaaccaactccttcctgtgtaatgctggaagtgagctggccattttgtacaatgacactgctgtgctggagagccaccatgcggccttggccttccagctgaccactggagatgataaatgcaatatatttaaaaacatggagaggaatgattatcggacactgcgccaggggattatcgacatggtcttagccacagaaatgacaaagcactttgagcatgtcaacaaatttgtcaacagcatcaacaaacccttggcaacactagaagaaaatggggaaactgataaaaaccaggaagtgataaacactatgcttaggactccagagaaccggaccctaatcaaacgaatgctgattaaatgtgctgatgtgtccaatccctgccgacccctgcagtactgcatcgagtgggctgcacgcatttcggaagaatatttttctcagactgatgaagagaagcagcagggcttacctgtggtgatgccagtgtttgacagaaatacctgcagcatccccaaatcccaaatctctttcattgattacttcatcacagacatgtttgatgcttgggatgcctttgtagacctgcctgatttaatgcagcatcttgacaacaactttaaatactggaaaggactggacgaaatgaagctgcggaacctccgaccacctcctgaatagtgggagacaccacccagagccctgaagctttgttccttcggtcatttggaattcctgagggcagccagagctccttggtcctttcagtactaggcagaacagcccccgatctgcatagcctgtgaaagcccacggggacatcagtaaccttctgcagccaccatccaatgccattactgtcaagtgagacttggccactgtagcctgggcctgctgcaggagctcttcagaaaggcacatgaggaccacggtttgcctcagtttctggtaaaacacaaggtctggagtgcccctgcaaagggtattgatggacttcctgccagtgacagagcatgtctattgcaaacaattctctcagttacgttcagcacttaagaacggctaatggcaataggatctttagcaactttttcacatcatagaaggtgcaatcgctcacttgggaacactactgagagtgacttctcttttaaaattgagtagcagatgaaaaattaaaatttgaacttgattattaatatcaattaaaatgttttatttattttattaaaagctcaatattttctatgaattcaaaaatacttcagagccaaagccaacttcaaataccgtgaccaaatttacatgattcatattcattatgcattacttggtatacagacttattttcataatgcaaattaataaaatgacacttttactgcactatagaaatattcatgtatgttaaacttttctgattgaggctaactggaaaaagctggggtcgtattctaagtgctaaagaaggctgcttctactgtatagaacccagggctctgaaacagctctagccgcctaatgcacttcacaggtaactccccaaggtaaaactagactctcttgttggttcgcaaagaaaagttaggacttaacacttttttctaaaattttataattcaatttccaaaagtctactctattttatactgtttctacaaaatattccttataaaaacaaagaacaaaaattgaatatttaatgaattgacattttataaccaacctgtttttatctacggtgggaatctttgatgccagaaatttataaagaggttctgtatcttcacaccttgaataagcataataccataaaaaatgacacttgacatgtcaatgtatttgtcatttcattttaaactcgtatttgtggtttttttcccagataaaaatgaaattaaaccatttctttttaagaaatca

SEQ ID NO: 15194 - DNA, 3716 bp, Homo sapiens
  source 1..3716: mol_type = unassigned DNA
tcggagaggacaggaaggagccggctgcaccgcgccagggtctccgcaaaccgggagcccagggagggcgggaagactggcgggggtccgaggcagcccgctacaggatacgtgatggacgcccagagacaccgccctccagctggtgggggaggagccccagccaccaagaagtagcagtagctgatgtgcagtttggccccatgagatttcatcaagatcaacttcaggtacttttagtgtttaccaaagaagataaccaatgtaatggattctgcagggcatgtgaaaaagcagggtttaagtgtacagttaccaaggaggctcaggctgtccttgcctgtttcctggacaaacatcatgacattatcatcatagaccacagaaatcctcgacagctggatgcagaggcactgtgcaggtctatcagatcatcaaaactctcagaaaacacagttattgttggtgtagtacgcagggtggatagagaagagttgtccgtaatgcctttcatttctgctggatttacaaggaggtatgtagaaaaccccaacatcatggcctgctacaatgaactgctccagctggagtttggagaggtgcgatcacaactgaaactcagggcttgtaactcagtattcactgcattagaaaacagtgaagatgcaattgaaattacaagcgaagaccgttttatacagtatgcaaatcctgcatttgaaacaacaatgggctatcagtcaggtgaattaatagggaaggagttaggagaagtgcctataaatgaaaaaaaggctgacttgctcgatactataaattcatgcatcaggataggcaaggagtggcaaggaatttactatgccaaaaagaaaaacggagataatatacaacaaaatgtgaagataatacctgtcattggacagggaggaaaaattagacactatgtgtccattatcagagtgtgcaatggcaacaataaggctgagaaaatatccgaatgtgttcagtctgacactcatacagataatcagacaggcaaacataaagacaggagaaaaggctcactagacgtcaaagctgttgcctcccgtgcaactgaagtttccagccagagacgacactcttccatggcccggatacattccatgacaattgaggcgcccatcaccaaggtaatcaatattatcaatgctgcccaggaaagtagtcccatgcctgtgacagaagccctagaccgtgtgctggaaattctaagaaccactgagttatattcaccacagtttggtgctaaagatgatgatccccatgccaatgaccttgttgggggcttaatgtctgatggtttgcgaagactatcagggaatgaatatgttctttcaacaaaaaacactcaaatggtttcaagcaatataatcactcccatctcccttgatgatgtcccaccacggatagctcgggccatggaaaatgaggaatactgggactttgatatttttgaactggaggctgccacccacaataggcctttgatttatcttggtctcaaaatgtttgctcgctttggaatctgtgaattcttacactgctccgagtcaacgctaagatcatggttacaaattatcgaagccaattatcattcctccaatccctaccacaattctacacattctgctgatgtgcttcatgccactgcctattttctctccaaggagaggataaaggaaactttagatccaattgatgaggtcgctgcactcatcgcagccaccattcatgatgtggatcaccctgggagaaccaactccttcctgtgtaatgctggaagtgagctggccattttgtacaatgacactgctgtgctggagagccaccatgcggccttggccttccagctgaccactggagatgataaatgcaatatatttaaaaacatggagaggaatgattatcggacactgcgccaggggattatcgacatggtcttagccacagaaatgacaaagcactttgagcatgtcaacaaatttgtcaacagcatcaacaaacccttggcaacactagaagaaaatggggaaactgataaaaaccaggaagtgataaacactatgcttaggactccagagaaccggaccctaatcaaacgaatgctgattaaatgtgctgatgtgtccaatccctgccgacccctgcagtactgcatcgagtgggctgcacgcatttcggaagaatatttttctcagactgatgaagagaagcagcagggcttacctgtggtgatgccagtgtttgacagaaatacctgcagcatccccaaatcccaaatctctttcattgattacttcatcacagacatgtttgatgcttgggatgcctttgtagacctgcctgatttaatgcagcatcttgacaacaactttaaatactggaaaggactggacgaaatgaagctgcggaacctccgaccacctcctgaatagtgggagacaccacccagagccctgaagctttgttccttcggtcatttggaattcctgagggcagccagagctccttggtcctttcagtactaggcagaacagcccccgatctgcatagcctgtgaaagcccacggggacatcagtaaccttctgcagccaccatccaatgccattactgtcaagtgagacttggccactgtagcctgggcctgctgcaggagctcttcagaaaggcacatgaggaccacggtttgcctcagtttctggtaaaacacaaggtctggagtgcccctgcaaagggtattgatggacttcctgccagtgacagagcatgtctattgcaaacaattctctcagttacgttcagcacttaagaacggctaatggcaataggatctttagcaactttttcacatcatagaaggtgcaatcgctcacttgggaacactactgagagtgacttctcttttaaaattgagtagcagatgaaaaattaaaatttgaacttgattattaatatcaattaaaatgttttatttattttattaaaagctcaatattttctatgaattcaaaaatacttcagagccaaagccaacttcaaataccgtgaccaaatttacatgattcatattcattatgcattacttggtatacagacttattttcataatgcaaattaataaaatgacacttttactgcactatagaaatattcatgtatgttaaacttttctgattgaggctaactggaaaaagctggggtcgtattctaagtgctaaagaaggctgcttctactgtatagaacccagggctctgaaacagctctagccgcctaatgcacttcacaggtaactccccaaggtaaaactagactctcttgttggttcgcaaagaaaagttaggacttaacacttttttctaaaattttataattcaatttccaaaagtctactctattttatactgtttctacaaaatattccttataaaaacaaagaacaaaaattgaatatttaatgaattgacattttataaccaacctgtttttatctacggtgggaatctttgatgccagaaatttataaagaggttctgtatcttcacaccttgaataagcataataccataaaaaatgacacttgacatgtcaatgtatttgtcatttcattttaaactcgtatttgtggtttttttcccagataaaaatgaaattaaaccatttctttttaagaaa

SEQ ID NO: 15195 - DNA, 2663 bp, Homo sapiens
  source 1..2663: mol_type = unassigned DNA
cgccgcagcgcccgcaccgcgataaaaggggcggccgcgtttcctgacgcgagatccgcgctcgccgccgcccgcccaggcggcgatgacacggcgcccgcggcggcccggaggcgccgggtgggccgtttgctgaccggatcgcggctacccgccagcgtgtccgcggcgccgccgccagcatgggctgtgccccgagcatccacatttccgagcgcctggtggccgaggacgcgcctagccccgcggcaccgccgctgtcgtccggcgggccgcgcctcccgcagggccagaagacggccgccttgccccggacccgcggcgccggcctcttggagtcggagcttcgcgacggcagcggcaagaaggtagcagtagctgatgtgcagtttggccccatgagatttcatcaagatcaacttcaggtacttttagtgtttaccaaagaagataaccaatgtaatggattctgcagggcatgtgaaaaagcagggtttaagtgtacagttaccaaggaggctcaggctgtccttgcctgtttcctggacaaacatcatgacattatcatcatagaccacagaaatcctcgacagctggatgcagaggcactgtgcaggtctatcagatcatcaaaactctcagaaaacacagttattgttggtgtagtacgcagggtggatagagaagagttgtccgtaatgcctttcatttctgctggatttacaaggaggtatgtagaaaaccccaacatcatggcctgctacaatgaactgctccagctggagtttggagaggtgcgatcacaactgaaactcagggcttgtaactcagtattcactgcattagaaaacagtgaagatgcaattgaaattacaagcgaagaccgttttatacaggagtggcaaggaatttactatgccaaaaagaaaaacggagataatatacaacaaaatgtgaagataatacctgtcattggacagggaggaaaaattagacactatgtgtccattatcagagtgtgcaatggcaacaataaggctgagaaaatatccgaatgtgttcagtctgacactcatacagataatcagacaggcaaacataaagacaggagaaaaggctcactagacgtcaaagctgttgcctcccgtgcaactgaagtttccagccagagacgacactcttccatggcccggatacattccatgacaattgaggcgcccatcaccaaggtaatcaatattatcaatgctgcccaggaaagtagtcccatgcctgtgacagaagccctagaccgtgtgctggaaattctaagaaccactgagttatattcaccacagtttggtgctaaagatgatgatccccatgccaatgaccttgttgggggcttaatgtctgatggtttgcgaagactatcagggaatgaatatgttctttcaacaaaaaacactcaaatggtttcaagcaatataatcactcccatctcccttgatgatgtcccaccacggatagctcgggccatggaaaatgaggaatactgggactttgatatttttgaactggaggctgccacccacaataggcctttgatttatcttggtctcaaaatgtttgctcgctttggaatctgtgaattcttacactgctccgagtcaacgctaagatcatggttacaaattatcgaagccaattatcattcctccaatccctaccacaattctacacattctgctgatgtgcttcatgccactgcctattttctctccaaggagaggataaaggaaactttagatccaattgatgaggtcgctgcactcatcgcagccaccattcatgatgtggatcaccctgggagaaccaactccttcctgtgtaatgctggaagtgagctggccattttgtacaatgacactgctgtgctggagagccaccatgcggccttggccttccagctgaccactggagatgataaatgcaatatatttaaaaacatggagaggaatgattatcggacactgcgccaggggattatcgacatggtcttagccacagaaatgacaaagcactttgagcatgtcaacaaatttgtcaacagcatcaacaaacccttggcaacactagaagaaaatggggaaactgataaaaaccaggaagtgataaacactatgcttaggactccagagaaccggaccctaatcaaacgaatgctgattaaatgtgctgatgtgtccaatccctgccgacccctgcagtactgcatcgagtgggctgcacgcatttcggaagaatatttttctcagactgatgaagagaagcagcagggcttacctgtggtgatgccagtgtttgacagaaatacctgcagcatccccaaatcccaaatctctttcattgattacttcatcacagacatgtttgatgcttgggatgcctttgtagacctgcctgatttaatgcagcatcttgacaacaactttaaatactggaaaggactggacgaaatgaagctgcggaacctccgaccacctcctgaatagtgggagacaccacccagagccctgaagctttgttccttcggtcatttggaattcctgagggcagccagagctccttggtcctttcagtactaggcagaacagcccccgatctgcatagcctgtgaaagc

SEQ ID NO: 15196 - DNA, 2722 bp, Homo sapiens
  source 1..2722: mol_type = unassigned DNA
cgccgcagcgcccgcaccgcgataaaaggggcggccgcgtttcctgacgcgagatccgcgctcgccgccgcccgcccaggcggcgatgacacggcgcccgcggcggcccggaggcgccgggtgggccgtttgctgaccggatcgcggctacccgccagcgtgtccgcggcgccgccgccagcatgggctgtgccccgagcatccacatttccgagcgcctggtggccgaggacgcgcctagccccgcggcaccgccgctgtcgtccggcgggccgcgcctcccgcagggccagaagacggccgccttgccccggacccgcggcgccggcctcttggagtcggagcttcgcgacggcagcggcaagaaggtagcagtagctgatgtgcagtttggccccatgagatttcatcaagatcaacttcaggtacttttagtgtttaccaaagaagataaccaatgtaatggattctgcagggcatgtgaaaaagcagggtttaagtgtacagttaccaaggaggctcaggctgtccttgcctgtttcctggacaaacatcatgacattatcatcatagaccacagaaatcctcgacagctggatgcagaggcactgtgcaggtctatcagatcatcaaaactctcagaaaacacagttattgttggtgtagtacgcagggtggatagagaagagttgtccgtaatgcctttcatttctgctggatttacaaggaggtatgtagaaaaccccaacatcatggcctgctacaatgaactgctccagctggagtttggagaggtgcgatcacaactgaaactcagtatgcaaatcctgcatttgaaacaacaatgggctatcagtcaggtgaattaatagggaaggagttaggagaagtgcctataaatgaaaaaaaggctgacttgctcgatactataaattcatgcatcaggataggcaaggagtggcaaggaatttactatgccaaaaagaaaaacggagataatatacaacaaaatgtgaagataatacctgtcattggacagggaggaaaaattagacactatgtgtccattatcagagtgtgcaatggcaacaataaggctgagaaaatatccgaatgtgttcagtctgacactcatacagataatcagacaggcaaacataaagacaggagaaaaggctcactagacgtcaaagctgttgcctcccgtgcaactgaagtttccagccagagacgacactcttccatggcccggatacattccatgacaattgaggcgcccatcaccaaggtaatcaatattatcaatgctgcccaggaaagtagtcccatgcctgtgacagaagccctagaccgtgtgctggaaattctaagaaccactgagttatattcaccacagtttggtgctaaagatgatgatccccatgccaatgaccttgttgggggcttaatgtctgatggtttgcgaagactatcagggaatgaatatgttctttcaacaaaaaacactcaaatggtttcaagcaatataatcactcccatctcccttgatgatgtcccaccacggatagctcgggccatggaaaatgaggaatactgggactttgatatttttgaactggaggctgccacccacaataggcctttgatttatcttggtctcaaaatgtttgctcgctttggaatctgtgaattcttacactgctccgagtcaacgctaagatcatggttacaaattatcgaagccaattatcattcctccaatccctaccacaattctacacattctgctgatgtgcttcatgccactgcctattttctctccaaggagaggataaaggaaactttagatccaattgatgaggtcgctgcactcatcgcagccaccattcatgatgtggatcaccctgggagaaccaactccttcctgtgtaatgctggaagtgagctggccattttgtacaatgacactgctgtgctggagagccaccatgcggccttggccttccagctgaccactggagatgataaatgcaatatatttaaaaacatggagaggaatgattatcggacactgcgccaggggattatcgacatggtcttagccacagaaatgacaaagcactttgagcatgtcaacaaatttgtcaacagcatcaacaaacccttggcaacactagaagaaaatggggaaactgataaaaaccaggaagtgataaacactatgcttaggactccagagaaccggaccctaatcaaacgaatgctgattaaatgtgctgatgtgtccaatccctgccgacccctgcagtactgcatcgagtgggctgcacgcatttcggaagaatatttttctcagactgatgaagagaagcagcagggcttacctgtggtgatgccagtgtttgacagaaatacctgcagcatccccaaatcccaaatctctttcattgattacttcatcacagacatgtttgatgcttgggatgcctttgtagacctgcctgatttaatgcagcatcttgacaacaactttaaatactggaaaggactggacgaaatgaagctgcggaacctccgaccacctcctgaatagtgggagacaccacccagagccctgaagctttgttccttcggtcatttggaattcctgagggcagccagagctccttggtcctttcagtactaggcagaacagcccccgatctgcatagcctgtgaaagc

SEQ ID NO: 15197 - DNA, 2999 bp, Homo sapiens
  source 1..2999: mol_type = unassigned DNA
cgccgcagcgcccgcaccgcgataaaaggggcggccgcgtttcctgacgcgagatccgcgctcgccgccgcccgcccaggcggcgatgacacggcgcccgcggcggcccggaggcgccgggtgggccgtttgctgaccggatcgcggctacccgccagcgtgtccgcggcgccgccgccagcatgggctgtgccccgagcatccacatttccgagcgcctggtggccgaggacgcgcctagccccgcggcaccgccgctgtcgtccggcgggccgcgcctcccgcagggccagaagacggccgccttgccccggacccgcggcgccggcctcttggagtcggagcttcgcgacggcagcggcaagaaggtagcagtagctgatgtgcagtttggccccatgagatttcatcaagatcaacttcaggtacttttagtgtttaccaaagaagataaccaatgtaatggattctgcagggcatgtgaaaaagcagggtttaagtgtacagttaccaaggaggctcaggctgtccttgcctgtttcctggacaaacatcatgacattatcatcatagaccacagaaatcctcgacagctggatgcagaggcactgtgcaggtctatcagatcatcaaaactctcagaaaacacagttattgttggtgtagtacgcagggtggatagagaagagttgtccgtaatgcctttcatttctgctggatttacaaggaggtatgtagaaaaccccaacatcatggcctgctacaatgaactgctccagctggagtttggagaggtgcgatcacaactgaaactcagggcttgtaactcagtattcactgcattagaaaacagtgaagatgcaattgaaattacaagcgaagaccgttttatacagccctgttgtagcagctcctggtttggcgctgtgcacatcccttcctctgcccctgttgaagtgggagtgggcctgctgccctcctggagcctcaggagaacatagcagaaagcccagccgggtatcacccaagcagaagctcgtctgggctccagaattcttcgtgggttatgtgcttatggcttcacaactgccacgtatgcaaatcctgcatttgaaacaacaatgggctatcagtcaggtgaattaatagggaaggagttaggagaagtgcctataaatgaaaaaaaggctgacttgctcgatactataaattcatgcatcaggataggcaaggagtggcaaggaatttactatgccaaaaagaaaaacggagataatatacaacaaaatgtgaagataatacctgtcattggacagggaggaaaaattagacactatgtgtccattatcagagtgtgcaatggcaacaataaggctgagaaaatatccgaatgtgttcagtctgacactcatacagataatcagacaggcaaacataaagacaggagaaaaggctcactagacgtcaaagctgttgcctcccgtgcaactgaagtttccagccagagacgacactcttccatggcccggatacattccatgacaattgaggcgcccatcaccaaggtaatcaatattatcaatgctgcccaggaaagtagtcccatgcctgtgacagaagccctagaccgtgtgctggaaattctaagaaccactgagttatattcaccacagtttggtgctaaagatgatgatccccatgccaatgaccttgttgggggcttaatgtctgatggtttgcgaagactatcagggaatgaatatgttctttcaacaaaaaacactcaaatggtttcaagcaatataatcactcccatctcccttgatgatgtcccaccacggatagctcgggccatggaaaatgaggaatactgggactttgatatttttgaactggaggctgccacccacaataggcctttgatttatcttggtctcaaaatgtttgctcgctttggaatctgtgaattcttacactgctccgagtcaacgctaagatcatggttacaaattatcgaagccaattatcattcctccaatccctaccacaattctacacattctgctgatgtgcttcatgccactgcctattttctctccaaggagaggataaaggaaactttagatccaattgatgaggtcgctgcactcatcgcagccaccattcatgatgtggatcaccctgggagaaccaactccttcctgtgtaatgctggaagtgagctggccattttgtacaatgacactgctgtgctggagagccaccatgcggccttggccttccagctgaccactggagatgataaatgcaatatatttaaaaacatggagaggaatgattatcggacactgcgccaggggattatcgacatggtcttagccacagaaatgacaaagcactttgagcatgtcaacaaatttgtcaacagcatcaacaaacccttggcaacactagaagaaaatggggaaactgataaaaaccaggaagtgataaacactatgcttaggactccagagaaccggaccctaatcaaacgaatgctgattaaatgtgctgatgtgtccaatccctgccgacccctgcagtactgcatcgagtgggctgcacgcatttcggaagaatatttttctcagactgatgaagagaagcagcagggcttacctgtggtgatgccagtgtttgacagaaatacctgcagcatccccaaatcccaaatctctttcattgattacttcatcacagacatgtttgatgcttgggatgcctttgtagacctgcctgatttaatgcagcatcttgacaacaactttaaatactggaaaggactggacgaaatgaagctgcggaacctccgaccacctcctgaatagtgggagacaccacccagagccctgaagctttgttccttcggtcatttggaattcctgagggcagccagagctccttggtcctttcagtactaggcagaacagcccccgatctgcatagcctgtgaaagc

SEQ ID NO: 15198 - DNA, 2584 bp, Homo sapiens
  source 1..2584: mol_type = unassigned DNA
cgccgcagcgcccgcaccgcgataaaaggggcggccgcgtttcctgacgcgagatccgcgctcgccgccgcccgcccaggcggcgatgacacggcgcccgcggcggcccggaggcgccgggtgggccgtttgctgaccggatcgcggctacccgccagcgtgtccgcggcgccgccgccagcatgggctgtgccccgagcatccacatttccgagcgcctggtggccgaggacgcgcctagccccgcggcaccgccgctgtcgtccggcgggccgcgcctcccgcagggccagaagacggccgccttgccccggacccgcggcgccggcctcttggagtcggagcttcgcgacggcagcggcaagaaggtagcagtagctgatgtgcagtttggccccatgagatttcatcaagatcaacttcaggtacttttagtgtttaccaaagaagataaccaatgtaatggattctgcagggcatgtgaaaaagcagggtttaagtgtacagttaccaaggaggctcaggctgtccttgcctgtttcctggacaaacatcatgacattatcatcatagaccacagaaatcctcgacagctggatgcagaggcactgtgcaggtctatcagatcatcaaaactctcagaaaacacagttattgttggtgtagtacgcagggtggatagagaagagttgtccgtaatgcctttcatttctgctggatttacaaggaggtatgtagaaaaccccaacatcatggcctgctacaatgaactgctccagctggagtttggagaggtgcgatcacaactgaaactcaggagtggcaaggaatttactatgccaaaaagaaaaacggagataatatacaacaaaatgtgaagataatacctgtcattggacagggaggaaaaattagacactatgtgtccattatcagagtgtgcaatggcaacaataaggctgagaaaatatccgaatgtgttcagtctgacactcatacagataatcagacaggcaaacataaagacaggagaaaaggctcactagacgtcaaagctgttgcctcccgtgcaactgaagtttccagccagagacgacactcttccatggcccggatacattccatgacaattgaggcgcccatcaccaaggtaatcaatattatcaatgctgcccaggaaagtagtcccatgcctgtgacagaagccctagaccgtgtgctggaaattctaagaaccactgagttatattcaccacagtttggtgctaaagatgatgatccccatgccaatgaccttgttgggggcttaatgtctgatggtttgcgaagactatcagggaatgaatatgttctttcaacaaaaaacactcaaatggtttcaagcaatataatcactcccatctcccttgatgatgtcccaccacggatagctcgggccatggaaaatgaggaatactgggactttgatatttttgaactggaggctgccacccacaataggcctttgatttatcttggtctcaaaatgtttgctcgctttggaatctgtgaattcttacactgctccgagtcaacgctaagatcatggttacaaattatcgaagccaattatcattcctccaatccctaccacaattctacacattctgctgatgtgcttcatgccactgcctattttctctccaaggagaggataaaggaaactttagatccaattgatgaggtcgctgcactcatcgcagccaccattcatgatgtggatcaccctgggagaaccaactccttcctgtgtaatgctggaagtgagctggccattttgtacaatgacactgctgtgctggagagccaccatgcggccttggccttccagctgaccactggagatgataaatgcaatatatttaaaaacatggagaggaatgattatcggacactgcgccaggggattatcgacatggtcttagccacagaaatgacaaagcactttgagcatgtcaacaaatttgtcaacagcatcaacaaacccttggcaacactagaagaaaatggggaaactgataaaaaccaggaagtgataaacactatgcttaggactccagagaaccggaccctaatcaaacgaatgctgattaaatgtgctgatgtgtccaatccctgccgacccctgcagtactgcatcgagtgggctgcacgcatttcggaagaatatttttctcagactgatgaagagaagcagcagggcttacctgtggtgatgccagtgtttgacagaaatacctgcagcatccccaaatcccaaatctctttcattgattacttcatcacagacatgtttgatgcttgggatgcctttgtagacctgcctgatttaatgcagcatcttgacaacaactttaaatactggaaaggactggacgaaatgaagctgcggaacctccgaccacctcctgaatagtgggagacaccacccagagccctgaagctttgttccttcggtcatttggaattcctgagggcagccagagctccttggtcctttcagtactaggcagaacagcccccgatctgcatagcctgtgaaagc

SEQ ID NO: 15199 - DNA, 538 bp, Homo sapiens
  source 1..538: mol_type = unassigned DNA
gcggcaccgccgctgtcgtccggcgggccgcgcctcccgcagggccagaagacggccgccttgccccggacccgcggcgccggcctcttggagtcggagcttcgcgacggcagcggcaagaaggtagcagtagctgatgtgcagtttggccccatgagatttcatcaagatcaacttcaggtacttttagtgtttaccaaagaagataaccaatgtaatggattctgcagggcatgtgaaaaagcagggtttaagtgtacagttaccaaggaggctcaggctgtccttgcctgtttcctggacaaacatcatgacattatcatcatagaccacagaaatcctcgacagctggatgcagaggcactgtgcagaggtatgtagaaaaccccaacatcatggcctgctacaatgaactgctccagctggagtttggagaggtgcgatcacaactgaaactcagataatcagacaggcaaacataaagacaggagaaaaggctcactagacgtcaaagctgttgcctcccgtgcaactgaag

SEQ ID NO: 15200 - DNA, 4664 bp, Homo sapiens
  source 1..4664: mol_type = unassigned DNA
agaagtctcttcaactggagggggaatggcttgcaacaatgggagaaagtgcaacaatgcaccccttctttgtctgcacctctgtatcagtgatcagagcacagatccctgatatttggaggacatggttgtttttgccttccctgggtcctgcaagttgtgttcaggttgctttaggaacacatgcacagctgcccaccatgggcctgggtacctgctatgtgctaagagctaaaattaactgcggtttaccatccaagccttcccctggaagttgcacgtcttcaattgttcctaaaatagttgcatcagacatattctgccagtgcaatattgtctaggtggggaaacagattcctggtgcttcttactctactgtcttctctaaatccatcttttaagactctcctgtggacctcttggaccatcttccctcataaaaattctggctttggcatccagttacaccagtatgagactggcccatagttacacaactcaagagaataggtaataaccatgcactgtctgttctgactctttcaccctactgaagaatcttcctcctcagtctttggtctagaatattagggaccctcattctttttatgccttctgagagataaaattattgcagagcaatgcagaaactgagccagtggcccataattactagacatcagcttctcatggttaaaaatatatgtggatttttctcccatcactaagcaaacttcgtaatgtgtttactagaataggtcactgtttgaggggagagattggaggagggcagtcagttgggaaacattttgtaggaagtcttatggatctagttcttctgttgctgtgacgaatcataccatcacacagaggcccagattgggatctcatcaacacctacagagtcactgggcaaattacaaaatgtgtctcttcccctgggtagcagcccagtgccagaattcatcacctggagctggttttcagtcccaccttctcccttccttgggcccctttgtgttgtatacaggctattcaaatcttctggtggtcctgagtttacagcacagtgtatggagctaaacaaacctgggtggaatcccagcactaccacttgctgtgtggtcttaatgcagggtacttagaacttcagttttctagctataaactctcaccacattactatcagattcagtgaaataacatgtgcagcccttagcacagtaaccagaacacactaagtcttccattggtgctgtgattgttattactcactggggtttggttatgatattacatttatctttgatttagcattacattctcaaatggataagtacttacagtaagtgctattatgctcctctgtaaaatagaaagtgtcaaccatttttcaatgacattccatggttctgactgctggattgcattattcatgtgccatttgggtgtaagatttcattgtccatcaggaaaaaaatggaaataggcacagagggaatcagcgtttatttagtatctattattggggggctctctatattgtcatctcatttggcctttaacaaatgagaagttgaggctgaggaagattaattcacttaaagtcacatgtagctagtaaaaggcaaagccagaatcacattcattttatttgttcattttatttctcctttcctgctccccacttttcctgggggctataaggagatccttaggattcctcataatcatttcatttatctactatttactttatttgcctctagaatagaaattttgctttcatttttggcactgtttagagagagaaaaagttaagcttctctttctccgttgtcttttcatttttaagccaatctctttcttacaggtagcagtagctgatgtgcagtttggccccatgagatttcatcaagatcaacttcaggtacttttagtgtttaccaaagaagataaccaatgtaatggattctgcagggcatgtgaaaaagcagggtttaagtgtacagttaccaaggaggctcaggctgtccttgcctgtttcctggacaaacatcatgacattatcatcatagaccacagaaatcctcgacagctggatgcagaggcactgtgcaggtctatcagatcatcaaaactctcagaaaacacagttattgttggtgtagtacgcagggtggatagagaagagttgtccgtaatgcctttcatttctgctggatttacaaggaggtatgtagaaaaccccaacatcatggcctgctacaatgaactgctccagctggagtttggagaggtgcgatcacaactgaaactcaggagtggcaaggaatttactatgccaaaaagaaaaacggagataatatacaacaaaatgtgaagataatacctgtcattggacagggaggaaaaattagacactatgtgtccattatcagagtgtgcaatggcaacaataaggctgagaaaatatccgaatgtgttcagtctgacactcatacagataatcagacaggcaaacataaagacaggagaaaaggctcactagacgtcaaagctgttgcctcccgtgcaactgaagtttccagccagagacgacactcttccatggcccggatacattccatgacaattgaggcgcccatcaccaaggtaatcaatattatcaatgctgcccaggaaagtagtcccatgcctgtgacagaagccctagaccgtgtgctggaaattctaagaaccactgagttatattcaccacagtttggtgctaaagatgatgatccccatgccaatgaccttgttgggggcttaatgtctgatggtttgcgaagactatcagggaatgaatatgttctttcaacaaaaaacactcaaatggtttcaagcaatataatcactcccatctcccttgatgatgtcccaccacggatagctcgggccatggaaaatgaggaatactgggactttgatatttttgaactggaggctgccacccacaataggcctttgatttatcttggtctcaaaatgtttgctcgctttggaatctgtgaattcttacactgctccgagtcaacgctaagatcatggttacaaattatcgaagccaattatcattcctccaatccctaccacaattctacacattctgctgatgtgcttcatgccactgcctattttctctccaaggagaggataaaggaaactttagatccaattgatgaggtcgctgcactcatcgcagccaccattcatgatgtggatcaccctgggagaaccaactccttcctgtgtaatgctggaagtgagctggccattttgtacaatgacactgctgtgctggagagccaccatgcggccttggccttccagctgaccactggagatgataaatgcaatatatttaaaaacatggagaggaatgattatcggacactgcgccaggggattatcgacatggtcttagccacagaaatgacaaagcactttgagcatgtcaacaaatttgtcaacagcatcaacaaacccttggcaacactagaagaaaatggggaaactgataaaaaccaggaagtgataaacactatgcttaggactccagagaaccggaccctaatcaaacgaatgctgattaaatgtgctgatgtgtccaatccctgccgacccctgcagtactgcatcgagtgggctgcacgcatttcggaagaatatttttctcagactgatgaagagaagcagcagggcttacctgtggtgatgccagtgtttgacagaaatacctgcagcatccccaaatcccaaatctctttcattgattacttcatcacagacatgtttgatgcttgggatgcctttgtagacctgcctgatttaatgcagcatcttgacaacaactttaaatactggaaaggactggacgaaatgaagctgcggaacctccgaccacctcctgaatagtgggagacaccacccagagccctgaagctttgttccttcggtcatttggaattcctgagggcagccagagctccttggtcctttcagtactaggcagaacagcccccgatctgcatagcctgtgaaagcccacggggacatcagtaaccttctgcagccaccatccaatgccattactgtcaagtgagacttggccactgtagcctgggcctgctgcaggagctcttcagaaaggcacatgaggaccacggtttgcctcagtttctggtaaaacacaaggtctggagtgcccctgcaaagggtattgatggacttcctgccagtgacagagcatgtctattgcaaacaattctctcagttacgttcagcacttaagaacggctaatggcaataggatctttagcaactttttcacatcatagaaggtgcaatcgctcacttgggaacactactgagagtgacttctcttttaaaattgagtagcagatgaaaaattaaaatttgaacttgattattaatatcaattaaaatgttttatttattttattaaaagctcaatattttctatgaattcaaaaatacttcagagccaaagccaacttcaaataccgtgaccaaatttacatgattcatattcattatgcattacttggtatacagacttattttcataatgcaaattaataaaatgacacttttactgc

SEQ ID NO: 15201 - DNA, 575 bp, Homo sapiens
  source 1..575: mol_type = unassigned DNA
taccaaagaagataaccaatgtaatggattctgcagggcatgtgaaaaagcagggtttaagtgtacagttaccaaggaggctcaggctgtccttgcctgtttcctggacaaacatcatgacattatcatcatagaccacagaaatcctcgacagctggatgcagaggcactgtgcaggtctatcagatcatcaaaactctcagaaaacacagttattgttggtgtagtacgcagggtggatagagaagagttgtccgtaatgcctttcatttctgctggatttacaaggaggtatgtagaaaaccccaacatcatggcctgctacaatgaactgctccagctggagtttggagaggtgcgatcacaactgaaactcagaaaaattagacactatgtgtccattatcagagtgtgcaatggcaacaataaggctgagaaaatatccgaatgtgttcagtctgacactcatacagataatcagacaggcaaacataaagacaggagaaaaggctcactagacgtcaaagctgttgcctcccgtgcaactgaagtttccagccagagacgacactctt

SEQ ID NO: 15202 - DNA, 644 bp, Homo sapiens
  source 1..644: mol_type = unassigned DNA
ctattacctgaaatcagtttggggttgggatcattttttatcttaattgctttagcaatgtaagtgaatcagaactgaagtggaaaatgttcttgggtttatgttttcaacacaaagtatgacgatgcttacattccatttataggagtggcaaggaatttactatgccaaaaagaaaaacggagataatatacaacaaaatgtgaagataatacctgtcattggacagggaggaaaaattagacactatgtgtccattatcagagtgtgcaatggcaacaataaggctgagaaaatatccgaatgtgttcagtctgacactcatacagataatcagacaggcaaacataaagacaggagaaaaggctcactagacgtcaaagctgttgcctcccgtgcaactgaagtttccagccagagacgacactcttccatggcccggatacattccatgacaattgaggcgcccatcaccaaggtaatcaatattatcaatgctgcccaggaaagtagtcccatgcctgtgacagaagccctagaccgtgtgctggaaattctaagaaccactgagttatattcaccacagtttggtgctaaagatgatgatccccatgccaatgaccttgttgggggcttaatgtctg

SEQ ID NO: 15203 - DNA, 586 bp, Homo sapiens
  source 1..586: mol_type = unassigned DNA
atatgtatatttgattgtctcatgattaattgggaagaattttgtcatttttactgaagtcacttgtacagagacgccaaaggatgtttgtgatctcttctttatttattggtggccttggtcacagtgagaagaaatgttctcagagcgttttgtgtattgcaaaagggaggtgccattttcgtaatgaaaaattaacgacatatccatcaaattagagactcagaagagaaataatgcattgttttttacttgcagaaaaattagacactatgtgtccattatcagagtgtgcaatggcaacaataaggctgagaaaatatccgaatgtgttcagtctgacactcatacagataatcagacaggcaaacataaagacaggagaaaaggctcactagacgtcaaagctgttgcctcccgtgcaactgaagtttccagccagagacgacactcttccatggcccggatacattccatgacaattgaggcgcccatcaccaaggtaatcaatattatcaatgctgcccaggaaagtagtcccatgcctgtgacagaagccctagaccgtgtgctggaaattctaaga

SEQ ID NO: 15204 - DNA, 191 bp, Homo sapiens
  source 1..191: mol_type = unassigned DNA
tcagaagagaaataatgcattgttttttacttgcagaaaaattagacactatgtgtccattatcagagtgtgcaatggcaacaataaggctgagaaaatatccgaatgtgttcagtctgacactcatacaggtacggtgccccgtatttattcttagagttcattgagtttttggagaaaaaaaataaaaa

SEQ ID NO: 15205 - DNA, 558 bp, Homo sapiens
  source 1..558: mol_type = unassigned DNA
ctccagtaagtgactgaggtcagtggtcaatcacaggggtggacctgctgggcccagggcagccttgagtgcattggtggagagggctgccctgagttgtcctgtgggaggaccacctggagtttccaggaaggaaagaatagttgtgacttttctttttcttgtttccttgatttttatcaggatggtttgcgaagactatcagggaatgaatatgttctttcaacaaaaaacactcaaatggtttcaagcaatataatcactcccatctcccttgatgatgtcccaccacggatagctcgggccatggaaaatgaggaatactgggactttgatatttttgaactggaggctgccacccacaataggtgagttcatgcagagctcagcagcgggagaactagattcccagggcctgtgtgaggaggctacctgaggagtatggattgtgcacaagcctggtacctggtcagggtggggccctaaggaaggagtaacagggcaccaggtggctctgagtcaccagggcctgggggagagtctgctggccacagtgat

SEQ ID NO: 15206 - DNA, 543 bp, Homo sapiens
  source 1..543: mol_type = unassigned DNA
aaattagccaggcatggtggcaggtgcctgtaatcccactactcaggaggctgaggcaggagaatcacttgaacccgggaggcggaggttgcagtgagctgagactgtaccacaacactccagcctgggcaacagagtgagattccgtctcaaaaaaaaaaaaaaaagttaatcctttaaagcctatttgttctccaaattacatcactttacagacactcaaatggtttcaagcaatataatcactcccatctcccttgatgatgtcccaccacggatagctcgggccatggaaaatgaggaatactgggactttgatatttttgaactggaggctgccacccacaataggcctttgatttatcttggtctcaaaatgtttgctcgctttggaatctgtgaattcttacactgctccgagtcaacgctaagatcatggttacaaattatcgaagccaattatcattcctccaatccctaccacaattctacacattctgctgatgtgcttcatgccactgcctattttctctccaaggagag

SEQ ID NO: 15207 - DNA, 2601 bp, Homo sapiens
  source 1..2601: mol_type = unassigned DNA
tttaaattattatttaatttcttcaaaagttggctcctgacccagatggacaggtgaattctttagccctttaaggaatttttccatgttacataaaacttttcagagtcttgaaaaagatggaaaacttccagatcattttgtcaaactcacaaaactctgacatcaacctgacaaagatagcactaaaagggggaagaaaactaaatcaattcccagttaatgtaagtggtgcctattttaaattttatttaaaattgtttctctcctttattaatattagtttatgctggtctaagtcaatatctcagactaaggacttttttggtgatgggtctagagaaagactggctgaggaggtgactcctatctgttgagaacacctgtattttggtaagtccttaacttgtgtgagactaacaaatatgcagaaatataactgtttcagggtggagataggaaaactagatttgctcacgtagtatgcttttcttagaaatctgaaatattcttacctgaaagtaataggggagaaagaaaactatacagaaggcttccttgccttcagtgtcataccccagtttttaaaagctctcttgttttcaggaaactttagatccaattgatgaggtcgctgcactcatcgcagccaccattcatgatgtggatcaccctgggagaaccaactccttcctgtgtaatgctggaagtgagctggccattttgtacaatgacactgctgtgctggagagccaccatgcggccttggccttccagctgaccactggagatgataaatgcaatatatttaaaaacatggagaggaatgattatcggacactgcgccaggggattatcgacatggtcttagccacagaaatgacaaagcactttgagcatgtcaacaaatttgtcaacagcatcaacaaacccttggcaacactagaagaaaatggggaaactgataaaaaccaggaagtgataaacactatgcttaggactccagagaaccggaccctaatcaaacgaatgctgattaaatgtgctgatgtgtccaatccctgccgacccctgcagtactgcatcgagtgggctgcacgcatttcggaagaatatttttctcagactgatgaagagaagcagcagggcttacctgtggtgatgccagtgtttgacagaaatacctgcagcatccccaaatcccaaatctctttcattgattacttcatcacagacatgtttgatgcttgggatgcctttgtagacctgcctgatttaatgcagcatcttgacaacaactttaaatactggaaaggactggacgaaatgaagctgcggaacctccgaccacctcctgaatagtgggagacaccacccagagccctgaagctttgttccttcggtcatttggaattcctgagggcagccagagctccttggtcctttcagtactaggcagaacagcccccgatctgcatagcctgtgaaagcccacggggacatcagtaaccttctgcagccaccatccaatgccattactgtcaagtgagacttggccactgtagcctgggcctgctgcaggagctcttcagaaaggcacatgaggaccacggtttgcctcagtttctggtaaaacacaaggtctggagtgcccctgcaaagggtattgatggacttcctgccagtgacagagcatgtctattgcaaacaattctctcagttacgttcagcacttaagaacggctaatggcaataggatctttagcaactttttcacatcatagaaggtgcaatcgctcacttgggaacactactgagagtgacttctcttttaaaattgagtagcagatgaaaaattaaaatttgaacttgattattaatatcaattaaaatgttttatttattttattaaaagctcaatattttctatgaattcaaaaatacttcagagccaaagccaacttcaaataccgtgaccaaatttacatgattcatattcattatgcattacttggtatacagacttattttcataatgcaaattaataaaatgacacttttactgcactatagaaatattcatgtatgttaaacttttctgattgaggctaactggaaaaagctggggtcgtattctaagtgctaaagaaggctgcttctactgtatagaacccagggctctgaaacagctctagccgcctaatgcacttcacaggtaactccccaaggtaaaactagactctcttgttggttcgcaaagaaaagttaggacttaacacttttttctaaaattttataattcaatttccaaaagtctactctattttatactgtttctacaaaatattccttataaaaacaaagaacaaaaattgaatatttaatgaattgacattttataaccaacctgtttttatctacggtgggaatctttgatgccagaaatttataaagaggttctgtatcttcacaccttgaataagcataataccataaaaaatgacacttgacatgtcaatgtatttgtcatttcattttaaactcgtatttgtggtttttttcccagataaaaatgaaattaaaccatttctttttaagaaa

SEQ ID NO: 15208 - DNA, 3912 bp, Homo sapiens
  source 1..3912: mol_type = unassigned DNA
ccgccgccgccgcagcgcccgcaccgcgataaaaggggcggccgcgtttcctgacgcgagatccgcgctcgccgccgcccgcccaggcggcgatgacacggcgcccgcggcggcccggaggcgccgggtgggccgtttgctgaccggatcgcggctacccgccagcgtgtccgcggcgccgccgccagcatgggctgtgccccgagcatccacatttccgagcgcctggtggccgaggacgcgcctagccccgcggcaccgccgctgtcgtccggcgggccgcgcctcccgcagggccagaagacggccgccttgccccggacccgcggcgccggcctcttggagtcggagcttcgcgacggcagcggcaagaaggtagcagtagctgatgtgcagtttggccccatgagatttcatcaagatcaacttcaggtacttttagtgtttaccaaagaagataaccaatgtaatggattctgcagggcatgtgaaaaagcagggtttaagtgtacagttaccaaggaggctcaggctgtccttgcctgtttcctggacaaacatcatgacattatcatcatagaccacagaaatcctcgacagctggatgcagaggcactgtgcaggtctatcagatcatcaaaactctcagaaaacacagttattgttggtgtagtacgcagggtggatagagaagagttgtccgtaatgcctttcatttctgctggatttacaaggaggtatgtagaaaaccccaacatcatggcctgctacaatgaactgctccagctggagtttggagaggtgcgatcacaactgaaactcagggcttgtaactcagtattcactgcattagaaaacagtgaagatgcaattgaaattacaagcgaagaccgttttatacagtatgcaaatcctgcatttgaaacaacaatgggctatcagtcaggtgaattaatagggaaggagttaggagaagtgcctataaatgaaaaaaaggctgacttgctcgatactataaattcatgcatcaggataggcaaggagtggcaaggaatttactatgccaaaaagaaaaacggagataatatacaacaaaatgtgaagataatacctgtcattggacagggaggaaaaattagacactatgtgtccattatcagagtgtgcaatggcaacaataaggctgagaaaatatccgaatgtgttcagtctgacactcatacagataatcagacaggcaaacataaagacaggagaaaaggctcactagacgtcaaagctgttgcctcccgtgcaactgaagtttccagccagagacgacactcttccatggcccggatacattccatgacaattgaggcgcccatcaccaaggtaatcaatattatcaatgctgcccaggaaagtagtcccatgcctgtgacagaagccctagaccgtgtgctggaaattctaagaaccactgagttatattcaccacagtttggtgctaaagatgatgatccccatgccaatgaccttgttgggggcttaatgtctgatggtttgcgaagactatcagggaatgaatatgttctttcaacaaaaaacactcaaatggtttcaagcaatataatcactcccatctcccttgatgatgtcccaccacggatagctcgggccatggaaaatgaggaatactgggactttgatatttttgaactggaggctgccacccacaataggcctttgatttatcttggtctcaaaatgtttgctcgctttggaatctgtgaattcttacactgctccgagtcaacgctaagatcatggttacaaattatcgaagccaattatcattcctccaatccctaccacaattctacacattctgctgatgtgcttcatgccactgcctattttctctccaaggagaggataaaggaaactttagatccaattgatgaggtcgctgcactcatcgcagccaccattcatgatgtggatcaccctgggagaaccaactccttcctgtgtaatgctggaagtgagctggccattttgtacaatgacactgctgtgctggagagccaccatgcggccttggccttccagctgaccactggagatgataaatgcaatatatttaaaaacatggagaggaatgattatcggacactgcgccaggggattatcgacatggtcttagccacagaaatgacaaagcactttgagcatgtcaacaaatttgtcaacagcatcaacaaacccttggcaacactagaagaaaatggggaaactgataaaaaccaggaagtgataaacactatgcttaggactccagagaaccggaccctaatcaaacgaatgctgattaaatgtgctgatgtgtccaatccctgccgacccctgcagtactgcatcgagtgggctgcacgcatttcggaagaatatttttctcagactgatgaagagaagcagcagggcttacctgtggtgatgccagtgtttgacagaaatacctgcagcatccccaaatcccaaatctctttcattgattacttcatcacagacatgtttgatgcttgggatgcctttgtagacctgcctgatttaatgcagcatcttgacaacaactttaaatactggaaaggactggacgaaatgaagctgcggaacctccgaccacctcctgaatagtgggagacaccacccagagccctgaagctttgttccttcggtcatttggaattcctgagggcagccagagctccttggtcctttcagtactaggcagaacagcccccgatctgcatagcctgtgaaagcccacggggacatcagtaaccttctgcagccaccatccaatgccattactgtcaagtgagacttggccactgtagcctgggcctgctgcaggagctcttcagaaaggcacatgaggaccacggtttgcctcagtttctggtaaaacacaaggtctggagtgcccctgcaaagggtattgatggacttcctgccagtgacagagcatgtctattgcaaacaattctctcagttacgttcagcacttaagaacggctaatggcaataggatctttagcaactttttcacatcatagaaggtgcaatcgctcacttgggaacactactgagagtgacttctcttttaaaattgagtagcagatgaaaaattaaaatttgaacttgattattaatatcaattaaaatgttttatttattttattaaaagctcaatattttctatgaattcaaaaatacttcagagccaaagccaacttcaaataccgtgaccaaatttacatgattcatattcattatgcattacttggtatacagacttattttcataatgcaaattaataaaatgacacttttactgcactatagaaatattcatgtatgttaaacttttctgattgaggctaactggaaaaagctggggtcgtattctaagtgctaaagaaggctgcttctactgtatagaacccagggctctgaaacagctctagccgcctaatgcacttcacaggtaactccccaaggtaaaactagactctcttgttggttcgcaaagaaaagttaggacttaacacttttttctaaaattttataattcaatttccaaaagtctactctattttatactgtttctacaaaatattccttataaaaacaaagaacaaaaattgaatatttaatgaattgacattttataaccaacctgtttttatctacggtgggaatctttgatgccagaaatttataaagaggttctgtatcttcacaccttgaataagcataataccataaaaaatgacacttgacatgtcaatgtatttgtcatttcattttaaactcgtatttgtggtttttttcccagataaaaatgaaattaaaccatttcttttt

SEQ ID NO: 15209 - DNA, 736 bp, Homo sapiens
  source 1..736: mol_type = unassigned DNA
agcgagggagggaggggacgggcgcagaccgaaagtggggaaagaagagcggcgtgatctactgccgggactcggacgagtccagctcgccccgccagaccaccagcgtgtcgcagggcccggcggcacccctgcccggcctcttcgtccagaccgacgccgccgacgccatccccccgagccgcgcgtcgggaccccccagcgtagcccgcgtccgcagggcccgcaccgagctgggcagcggtagcagcgcgggttccgcagcccccgccgcgaccaccagcaggggccggaggcgccactgctgcagcagcgccgaggccgagactcagacctgctacaccagcgtgaagcaggtgtcttctgcggaggtgcgcatcgggcccatgagactgacgcaggaccctattcaggttttgctgatctttgcaaaggaagatagtcagagcgatggcttctggtgggcctgcgacagagctggttatagatgcaatattgctcggactccagagtcagcccttgaatgctttcttgataagcatcatgaaattattgtaattgatcatagacaaactcagaacttcgatgcagaagcagtgtgcaggtcgatccgggccacaaatccctccgagcacacggtgatcctcgcagtggtttcgcgagtatcggatgaccatgaagaggcgtcagtccttcctcttctccacgcaggcttcaacagggtatgtacaagata

SEQ ID NO: 15210 - DNA, 3426 bp, Homo sapiens
  source 1..3426: mol_type = unassigned DNA
gcggccgcgggcgcgggcgggcgcgcgggggagcccggccgagggatgggctgcgcccccagcatccatgtctcgcagagcggcgtgatctactgccgggactcggacgagtccagctcgccccgccagaccaccagcgtgtcgcagggcccggcggcacccctgcccggcctcttcgtccagaccgacgccgccgacgccatccccccgagccgcgcgtcgggaccccccagcgtagcccgcgtccgcagggcccgcaccgagctgggcagcggtagcagcgcgggttccgcagcccccgccgcgaccaccagcaggggccggaggcgccactgctgcagcagcgccgaggccgagactcagacctgctacaccagcgtgaagcaggtgtcttctgcggaggtgcgcatcgggcccatgagactgacgcaggaccctattcaggttttgctgatctttgcaaaggaagatagtcagagcgatggcttctggtgggcctgcgacagagctggttatagatgcaatattgctcggactccagagtcagcccttgaatgctttcttgataagcatcatgaaattattgtaattgatcatagacaaactcagaacttcgatgcagaagcagtgtgcaggtcgatccgggccacaaatccctccgagcacacggtgatcctcgcagtggtttcgcgagtatcggatgaccatgaagaggcgtcagtccttcctcttctccacgcaggcttcaacaggagatttatggagaatagcagcataattgcttgctataatgaactgattcaaatagaacatggggaagttcgctcccagttcaaattacgggcctgtaattcagtgtttacagcattagatcactgtcatgaagccatagaaataacaagcgatgaccacgtgattcaggagtggcagggggtttactatgccagacggaaatccggggacagcatccaacagcacgtgaagatcaccccagtgattggccaaggagggaaaattaggcattttgtctcgctcaagaaactgtgttgtaccactgacaataataagcagattcacaagattcatcgtgattcaggagacaattctcagacagagcctcattcattcagatataagaacaggaggaaagagtccattgacgtgaaatcgatatcatctcgaggcagtgatgcaccaagcctgcagaatcgtcgctatccgtccatggcgaggatccactccatgaccatcgaggctcccatcacaaaggttataaatataatcaatgcagcccaagaaaacagcccagtcacagtagcggaagccttggacagagttctagagattttacggaccacagaactgtactcccctcagctgggtaccaaagatgaagatccccacaccagtgatcttgttggaggcctgatgactgacggcttgagaagactgtcaggaaacgagtatgtgtttactaagaatgtgcaccagagtcacagtcaccttgcaatgccaataaccatcaatgatgttcccccttgtatctctcaattacttgataatgaggagagttgggacttcaacatctttgaattggaagccattacgcataaaaggccattggtttatctgggcttaaaggtcttctctcggtttggagtatgtgaatttttaaactgttctgaaaccactcttcgggcctggttccaagtgatcgaagccaactaccactcttccaatgcctaccacaactccacccatgctgccgacgtcctgcacgccaccgctttctttcttggaaaggaaagagtaaagggaagcctcgatcagttggatgaggtggcagccctcattgctgccacagtccatgacgtggatcacccgggaaggaccaactctttcctctgcaatgcaggcagtgagcttgctgtgctctacaatgacactgctgttctggagagtcaccacaccgccctggccttccagctcacggtcaaggacaccaaatgcaacattttcaagaatattgacaggaaccattatcgaacgctgcgccaggctattattgacatggttttggcaacagagatgacaaaacactttgaacatgtgaataagtttgtgaacagcatcaacaagccaatggcagctgagattgaaggcagcgactgtgaatgcaaccctgctgggaagaacttccctgaaaaccaaatcctgatcaaacgcatgatgattaagtgtgctgacgtggccaacccatgccgccccttggacctgtgcattgaatgggctgggaggatctctgaggagtattttgcacagactgatgaagagaagagacagggactacctgtggtgatgccagtgtttgaccggaatacctgtagcatccccaagtctcagatctctttcattgactacttcataacagacatgtttgatgcttgggatgcctttgcacatctgccagccctgatgcaacatttggctgacaactacaaacactggaagacactagatgacctaaagtgcaaaagtttgaggcttccatctgacagctaaagccaagccacagagggggcctcttgaccgacaaaggacactgtgaatcacagtagcgtaaacgagaggccttcctttctaatgacaatgacaggtattggtgaaggagctaatgtttaatatttgaccttgaatcattcaagtccccaaatttcattcttagaaagttatgttccatgaagaaaaatatatgttcttttgaatacttaatgacagaacaaatacttggcaaactcctttgctctgctgtcatcctgtgtacccttgtcaatccatggagctggttcactgtaactagcaggccacaggaagcaaagccttggtgcctgtgagctcatctcccaggatggtgactaagtagcttagctagtgatcagctcatcctttaccataaaagtcatcattgctgtttagcttgactgttttcctcaagaacatcgatctgaaggattcataaggagcttatctgaacagatttatctaagaaaaaaaaaaaacgacataaaataagtgaaacaactaggaccaaattacagataaactagttagcttcacagcctctatggctacatggttcttctggccgatggtatgacacctaagttagaacacagccttggctggtgggtgccctctctagactggtatcagcagcctgtgtaacccctttcctgtaaaaggggttcatcttaacaaagtcatccatgatgagggaaaaagtggcatttcatttttggggaatccatgagcttcctttatttctggctcacagaggcagccacgaggcactacaccaagtattatataaaagccattaaatttgaatgcccttggacaagcttttcttaaaaaaaaaaaaaaaaa

SEQ ID NO: 15211 - DNA, 3276 bp, Homo sapiens
  source 1..3276: mol_type = unassigned DNA
gcggccgcgggcgcgggcgggcgcgcgggggagcccggccgagggatgggctgcgcccccagcatccatgtctcgcagagcggcgtgatctactgccgggactcggacgagtccagctcgccccgccagaccaccagcgtgtcgcagggcccggcggcacccctgcccggcctcttcgtccagaccgacgccgccgacgccatccccccgagccgcgcgtcgggaccccccagcgtagcccgcgtccgcagggcccgcaccgagctgggcagcggtagcagcgcgggttccgcagcccccgccgcgaccaccagcaggggccggaggcgccactgctgcagcagcgccgaggccgagactcagacctgctacaccagcgtgaagcaggtgtcttctgcggaggtgcgcatcgggcccatgagactgacgcaggaccctattcaggttttgctgatctttgcaaaggaagatagtcagagcgatggcttctggtgggcctgcgacagagctggttatagatgcaatattgctcggactccagagtcagcccttgaatgctttcttgataagcatcatgaaattattgtaattgatcatagacaaactcagaacttcgatgcagaagcagtgtgcaggtcgatccgggccacaaatccctccgagcacacggtgatcctcgcagtggtttcgcgagtatcggatgaccatgaagaggcgtcagtccttcctcttctccacgcaggcttcaacaggagatttatggagaatagcagcataattgcttgctataatgaactgattcaaatagaacatggggaagttcgctcccagttcaaattacgggcctgtaattcagtgtttacagcattagatcactgtcatgaagccatagaaataacaagcgatgaccacgtgattcagattcacaagattcatcgtgattcaggagacaattctcagacagagcctcattcattcagatataagaacaggaggaaagagtccattgacgtgaaatcgatatcatctcgaggcagtgatgcaccaagcctgcagaatcgtcgctatccgtccatggcgaggatccactccatgaccatcgaggctcccatcacaaaggttataaatataatcaatgcagcccaagaaaacagcccagtcacagtagcggaagccttggacagagttctagagattttacggaccacagaactgtactcccctcagctgggtaccaaagatgaagatccccacaccagtgatcttgttggaggcctgatgactgacggcttgagaagactgtcaggaaacgagtatgtgtttactaagaatgtgcaccagagtcacagtcaccttgcaatgccaataaccatcaatgatgttcccccttgtatctctcaattacttgataatgaggagagttgggacttcaacatctttgaattggaagccattacgcataaaaggccattggtttatctgggcttaaaggtcttctctcggtttggagtatgtgaatttttaaactgttctgaaaccactcttcgggcctggttccaagtgatcgaagccaactaccactcttccaatgcctaccacaactccacccatgctgccgacgtcctgcacgccaccgctttctttcttggaaaggaaagagtaaagggaagcctcgatcagttggatgaggtggcagccctcattgctgccacagtccatgacgtggatcacccgggaaggaccaactctttcctctgcaatgcaggcagtgagcttgctgtgctctacaatgacactgctgttctggagagtcaccacaccgccctggccttccagctcacggtcaaggacaccaaatgcaacattttcaagaatattgacaggaaccattatcgaacgctgcgccaggctattattgacatggttttggcaacagagatgacaaaacactttgaacatgtgaataagtttgtgaacagcatcaacaagccaatggcagctgagattgaaggcagcgactgtgaatgcaaccctgctgggaagaacttccctgaaaaccaaatcctgatcaaacgcatgatgattaagtgtgctgacgtggccaacccatgccgccccttggacctgtgcattgaatgggctgggaggatctctgaggagtattttgcacagactgatgaagagaagagacagggactacctgtggtgatgccagtgtttgaccggaatacctgtagcatccccaagtctcagatctctttcattgactacttcataacagacatgtttgatgcttgggatgcctttgcacatctgccagccctgatgcaacatttggctgacaactacaaacactggaagacactagatgacctaaagtgcaaaagtttgaggcttccatctgacagctaaagccaagccacagagggggcctcttgaccgacaaaggacactgtgaatcacagtagcgtaaacgagaggccttcctttctaatgacaatgacaggtattggtgaaggagctaatgtttaatatttgaccttgaatcattcaagtccccaaatttcattcttagaaagttatgttccatgaagaaaaatatatgttcttttgaatacttaatgacagaacaaatacttggcaaactcctttgctctgctgtcatcctgtgtacccttgtcaatccatggagctggttcactgtaactagcaggccacaggaagcaaagccttggtgcctgtgagctcatctcccaggatggtgactaagtagcttagctagtgatcagctcatcctttaccataaaagtcatcattgctgtttagcttgactgttttcctcaagaacatcgatctgaaggattcataaggagcttatctgaacagatttatctaagaaaaaaaaaaaacgacataaaataagtgaaacaactaggaccaaattacagataaactagttagcttcacagcctctatggctacatggttcttctggccgatggtatgacacctaagttagaacacagccttggctggtgggtgccctctctagactggtatcagcagcctgtgtaacccctttcctgtaaaaggggttcatcttaacaaagtcatccatgatgagggaaaaagtggcatttcatttttggggaatccatgagcttcctttatttctggctcacagaggcagccacgaggcactacaccaagtattatataaaagccattaaatttgaatgcccttggacaagcttttcttaaaaaaaaaaaaaaaaa

SEQ ID NO: 15212 - DNA, 5956 bp, Homo sapiens
  source 1..5956: mol_type = unassigned DNA
gcggccgcgggcgcgggcgggcgcgcgggggagcccggccgagggatgggctgcgcccccagcatccatgtctcgcagagcggcgtgatctactgccgggactcggacgagtccagctcgccccgccagaccaccagcgtgtcgcagggcccggcggcacccctgcccggcctcttcgtccagaccgacgccgccgacgccatccccccgagccgcgcgtcgggaccccccagcgtagcccgcgtccgcagggcccgcaccgagctgggcagcggtagcagcgcgggttccgcagcccccgccgcgaccaccagcaggggccggaggcgccactgctgcagcagcgccgaggccgagactcagacctgctacaccagcgtgaagcaggtgtcttctgcggaggtgcgcatcgggcccatgagactgacgcaggaccctattcaggttttgctgatctttgcaaaggaagatagtcagagcgatggcttctggtgggcctgcgacagagctggttatagatgcaatattgctcggactccagagtcagcccttgaatgctttcttgataagcatcatgaaattattgtaattgatcatagacaaactcagaacttcgatgcagaagcagtgtgcaggtcgatccgggccacaaatccctccgagcacacggtgatcctcgcagtggtttcgcgagtatcggatgaccatgaagaggcgtcagtccttcctcttctccacgcaggcttcaacaggagatttatggagaatagcagcataattgcttgctataatgaactgattcaaatagaacatggggaagttcgctcccagttcaaattacgggcctgtaattcagtgtttacagcattagatcactgtcatgaagccatagaaataacaagcgatgaccacgtgattcagtatgtcaacccagccttcgaaaggatgatgggctaccacaaaggtgagctcctgggaaaagaactcgctgatctgcccaaaagcgataagaaccgggcagaccttctcgacaccatcaatacatgcatcaagaagggaaaggagtggcagggggtttactatgccagacggaaatccggggacagcatccaacagcacgtgaagatcaccccagtgattggccaaggagggaaaattaggcattttgtctcgctcaagaaactgtgttgtaccactgacaataataagcagattcacaagattcatcgtgattcaggagacaattctcagacagagcctcattcattcagatataagaacaggaggaaagagtccattgacgtgaaatcgatatcatctcgaggcagtgatgcaccaagcctgcagaatcgtcgctatccgtccatggcgaggatccactccatgaccatcgaggctcccatcacaaaggttataaatataatcaatgcagcccaagaaaacagcccagtcacagtagcggaagccttggacagagttctagagattttacggaccacagaactgtactcccctcagctgggtaccaaagatgaagatccccacaccagtgatcttgttggaggcctgatgactgacggcttgagaagactgtcaggaaacgagtatgtgtttactaagaatgtgcaccagagtcacagtcaccttgcaatgccaataaccatcaatgatgttcccccttgtatctctcaattacttgataatgaggagagttgggacttcaacatctttgaattggaagccattacgcataaaaggccattggtttatctgggcttaaaggtcttctctcggtttggagtatgtgaatttttaaactgttctgaaaccactcttcgggcctggttccaagtgatcgaagccaactaccactcttccaatgcctaccacaactccacccatgctgccgacgtcctgcacgccaccgctttctttcttggaaaggaaagagtaaagggaagcctcgatcagttggatgaggtggcagccctcattgctgccacagtccatgacgtggatcacccgggaaggaccaactctttcctctgcaatgcaggcagtgagcttgctgtgctctacaatgacactgctgttctggagagtcaccacaccgccctggccttccagctcacggtcaaggacaccaaatgcaacattttcaagaatattgacaggaaccattatcgaacgctgcgccaggctattattgacatggttttggcaacagagatgacaaaacactttgaacatgtgaataagtttgtgaacagcatcaacaagccaatggcagctgagattgaaggcagcgactgtgaatgcaaccctgctgggaagaacttccctgaaaaccaaatcctgatcaaacgcatgatgattaagtgtgctgacgtggccaacccatgccgccccttggacctgtgcattgaatgggctgggaggatctctgaggagtattttgcacagactgatgaagagaagagacagggactacctgtggtgatgccagtgtttgaccggaatacctgtagcatccccaagtctcagatctctttcattgactacttcataacagacatgtttgatgcttgggatgcctttgcacatctgccagccctgatgcaacatttggctgacaactacaaacactggaagacactagatgacctaaagtgcaaaagtttgaggcttccatctgacagctaaagccaagccacagagggggcctcttgaccgacaaaggacactgtgaatcacagtagcgtaaacgagaggccttcctttctaatgacaatgacaggtattggtgaaggagctaatgtttaatatttgaccttgaatcattcaagtccccaaatttcattcttagaaagttatgttccatgaagaaaaatatatgttcttttgaatacttaatgacagaacaaatacttggcaaactcctttgctctgctgtcatcctgtgtacccttgtcaatccatggagctggttcactgtaactagcaggccacaggaagcaaagccttggtgcctgtgagctcatctcccaggatggtgactaagtagcttagctagtgatcagctcatcctttaccataaaagtcatcattgctgtttagcttgactgttttcctcaagaacatcgatctgaaggattcataaggagcttatctgaacagatttatctaagaaaaaaaaaaaacgacataaaataagtgaaacaactaggaccaaattacagataaactagttagcttcacagcctctatggctacatggttcttctggccgatggtatgacacctaagttagaacacagccttggctggtgggtgccctctctagactggtatcagcagcctgtgtaacccctttcctgtaaaaggggttcatcttaacaaagtcatccatgatgagggaaaaagtggcatttcatttttggggaatccatgagcttcctttatttctggctcacagaggcagccacgaggcactacaccaagtattatataaaagccattaaatttgaatgcccttggacaagcttttcttaaaaaaaaaaaaaaaaagtttatatacatgtttaaaatttttattaaaatccaaattttctgggtgtaagcccatgcagtatgttgtgccatgcaccatctatacgtaatattttgggaggggataggggaagtttcaaggttcagatatttttaaccagtctatatttgaaatcatgccattagctttaacaatgttaaaattgtgtggtgtaaatatatcagaaaataggcatatggggaggcagtaaatactattttaagctattaattgtatgctaaaagcttctaaagcacaagtgcatatttttatactgctcttttcacaactccctgtgatctacataaagtcagactcgagattttcctttctcttttaccagctgatccttcctatgtattataaatattagactccgtaaacaaacttcatttttctttctctgtacttcatgctgcatttttaaaaggtataaacaaacagagactgaattaattgaatcagtaattacttttttccaatacaaattggaatgcagaatacttggaacttgtacatggggaaaaaatgacttatcactacataatgtgccaatgtttttttctatgttttgtaccaaaaatggaaaaatatgacaattccatgcaaagaaatgtatctaaattatttttgttagatgataagagaacttgcttggtcaggacagcagccagctttgtattgtaatgctatattatgtaaatgtgatgaaaatgtttttgtgaagtacttgtaactaaattcctacagccatttttcactcccaacagctgtttttattttacctctttggcctaaagttttcataatttcaaatttggggtttagtgtcctttatttcatgagtcacacactttgttttcagagcacattaaaatcaggatgccagaatcccatattaaggacctagctaacttgcctaggcttcagaagcttgcttgaggcaaggacaatctttttctgatcatctcactttcagttctatttggtaagtaacatttatcaggtgtcagacatcttctatatgaaatatttacagcttactcagttttatgtcaaatttcttgttaacttcaaactttttattagtaatgtgcaaatgtttaaaaatgctttaagacagctaggtactaaagcgtcaacaatttctgctctttaccagtgtaatctacggtataatcttctggcctgcgaactagtctattcttccacatagtcaacttgttagaaatacaggctttcagatgatatgtgtatcagatagtttatattatataaactattataactgcctcttacacagagttgtttacttaaatgtcatgtgctgaggagggccgtattaggaaaatgcaacactctctaataatttccgtgactagtaagagaaggaagccagttataaaacactgctggaccagaatgaccctataatttcctaagatcattctttatttctaatttaagatttttaaatttacttgccctccatgtcaggactggttagcattctgggcaaaaaaaaaacaagcctgtcagttcactcagaacctactcagctttagagagagaaacagaagggatgatcttgtgcccttgcgctatgtgaatatagccagagactgaggtaataaatatattttaaaataaaaatgacaagggatttgtacactgtaacactatgtagtgttacttctgctgttgcaagtatcttaactgttgaaagctaaactcaggaaatggagaaaatgtacataatatacattgacccattattttattctaaattgaaagtccaacttttagcagcagtctacctgcaactactgaacaccatcaggtttgagtccctaccagaatctcccatcatactgttatcccccatctctgtgaccttagggcatgcatgaaaacaaaagcaatctagtccctagggttggagactgccctctagacagtttttcatggcagaaaattagaatacaagtatacctcattttattgcattctgcttcattgtgcttcaaagatactgccttttctacaaattgagggcttgtggccaccctgcatagagcaagtctatcggggcattttcccagcatgggctcactttgtgtaagtgtcacattttggtaactcttagagtatttcaaatgtttttattcttgtatctgtcatggtggtctgtgatcagtgatctttgttactactgtaattgttttagggtactgcaaaccatgcccgtataagacagtgaacttaattgataaatcttgtgtatattctaactgttccaccaactagcggtttccagtctctccctcttcttagacctccctattccctgagacacaacaatatcga

SEQ ID NO: 15213 - DNA, 2677 bp, Homo sapiens
  source 1..2677: mol_type = unassigned DNA
atgggctgcgcccccagcatccatgtctcgcagagcggcgtgatctactgccgggactcggacgagtccagctcgccccgccagaccaccagcgtgtcgcagggcccggcggcacccctgcccggcctcttcgtccagaccgacgccgccgacgccatccccccgagccgcgcgtcgggaccccccagcgtagcccgcgtccgcagggcccgcaccgagctgggcagcggtagcagcgcgggttccgcagcccccgccgcgaccaccagcaggggccggaggcgccactgctgcagcagcgccgaggccgagactcagacctgctacaccagcgtgaaggttttgctgatctttgcaaaggaagatagtcagagcgatggcttctggtgggcctgcgacagagctggttatagatgcaatattgctcggactccagagtcagcccttgaatgctttcttgataagcatcatgaaattattgtaattgatcatagacaaactcagaacttcgatgcagaagcagtgtgcaggtcgatccgggccacaaatccctccgagcacacggtgatcctcgcagtggtttcgcgagtatcggatgaccatgaagaggcgtcagtccttcctcttctccacgcaggcttcaacaggagatttatggagaatagcagcataattgcttgctataatgaactgattcaaatagaacatggggaagttcgctcccagttcaaattacgggcctgtaattcagtgtttacagcattagatcactgtcatgaagccatagaaataacaagcgatgaccacgtgattcagtatgtcaacccagccttcgaaaggatgatgggctaccacaaaggtgagctcctgggaaaagaactcgctgatctgcccaaaagcgataagaaccgggcagaccttctcgacaccatcaatacatgcatcaagaagggaaaggagtggcagggggtttactatgccagacggaaatccggggacagcatccaacagcacgtgaagatcaccccagtgattggccaaggagggaaaattaggcattttgtctcgctcaagaaactgtgttgtaccactgacaataataagcagattcacaagattcatcgtgattcaggagacaattctcagacagagcctcattcattcagatataagaacaggaggaaagagtccattgacgtgaaatcgatatcatctcgaggcagtgatgcaccaagcctgcagaatcgtcgctatccgtccatggcgaggatccactccatgaccatcgaggctcccatcacaaaggttataaatataatcaatgcagcccaagaaaacagcccagtcacagtagcggaagccttggacagagttctagagattttacggaccacagaactgtactcccctcagctgggtaccaaagatgaagatccccacaccagtgatcttgttggaggcctgatgactgacggcttgagaagactgtcaggaaacgagtatgtgtttactaagaatgtgcaccagagtcacagtcaccttgcaatgccaataaccatcaatgatgttcccccttgtatctctcaattacttgataatgaggagagttgggacttcaacatctttgaattggaagccattacgcataaaaggccattggtttatctgggcttaaaggtcttctctcggtttggagtatgtgaatttttaaactgttctgaaaccactcttcgggcctggttccaagtgatcgaagccaactaccactcttccaatgcctaccacaactccacccatgctgccgacgtcctgcacgccaccgctttctttcttggaaaggaaagagtaaagggaagcctcgatcagttggatgaggtggcagccctcattgctgccacagtccatgacgtggatcacccgggaaggaccaactctttcctctgcaatgcaggcagtgagcttgctgtgctctacaatgacactgctgttctggagagtcaccacaccgccctggccttccagctcacggtcaaggacaccaaatgcaacattttcaagaatattgacaggaaccattatcgaacgctgcgccaggctattattgacatggttttggcaacagagatgacaaaacactttgaacatgtgaataagtttgtgaacagcatcaacaagccaatggcagctgagattgaaggcagcgactgtgaatgcaaccctgctgggaagaacttccctgaaaaccaaatcctgatcaaacgcatgatgattaagtgtgctgacgtggccaacccatgccgccccttggacctgtgcattgaatgggctgggaggatctctgaggagtattttgcacagactgatgaagagaagagacagggactacctgtggtgatgccagtgtttgaccggaatacctgtagcatccccaagtctcagatctctttcattgactacttcataacagacatgtttgatgcttgggatgcctttgcacatctgccagccctgatgcaacatttggctgacaactacaaacactggaagacactagatgacctaaagtgcaaaagtttgaggcttccatctgacagctaaagccaagccacagagggggcctcttgaccgacaaaggacactgtgaatcacagtagcgtaaacgagaggccttcctttc

SEQ ID NO: 15214 - DNA, 2572 bp, Homo sapiens
  source 1..2572: mol_type = unassigned DNA
atgggctgcgcccccagcatccatgtctcgcagagcggcgtgatctactgccgggactcggacgagtccagctcgccccgccagaccaccagcgtgtcgcagggcccggcggcacccctgcccggcctcttcgtccagaccgacgccgccgacgccatccccccgagccgcgcgtcgggaccccccagcgtagcccgcgtccgcagggcccgcaccgagctgggcagcggtagcagcgcgggttccgcagcccccgccgcgaccaccagcaggggccggaggcgccactgctgcagcagcgccgaggccgagactcagacctgctacaccagcgtgaagcaggtgtcttctgcggaggtgcgcatcgggcccatgagactgacgcaggaccctattcaggttttgctgatctttgcaaaggaagatagtcagagcgatggcttctggtgggcctgcgacagagctggttatagatgcaatattgctcggactccagagtcagcccttgaatgctttcttgataagcatcatgaaattattgtaattgatcatagacaaactcagaacttcgatgcagaagcagtgtgcaggtcgatccgggccacaaatccctccgagcacacggtgatcctcgcagtggtttcgcgagtatcggatgaccatgaagaggcgtcagtccttcctcttctccacgcaggcttcaacaggagatttatggagaatagcagcataattgcttgctataatgaactgattcaaatagaacatggggaagttcgctcccagttcaaattacgggcctgtaattcagtgtttacagcattagatcactgtcatgaagccatagaaataacaagcgatgaccacgtgattcagtatgtcaacccagccttcgaaaggatgatgggctaccacaaaggtgagctcctgggaaaagaactcgctgatctgcccaaaagcgataagaaccgggcagaccttctcgacaccatcaatacatgcatcaagaagggaaaggagtggcagggggtttactatgccagacggaaatccggggacagcatccaacagcacgtgaagatcaccccagtgattggccaaggagggaaaattaggcattttgtctcgctcaagaaactgtgttgtaccactgacaataataagcagattcacaagattcatcgtgattcaggagacaattctcagacagagcctcattcattcagatataagaacaggaggaaagagtccattgacgtgaaatcgatatcatctcgaggcagtgatgcaccaagcctgcagaatcgtcgctatccgtccatggcgaggatccactccatgaccatcgaggctcccatcacaaaggacggcttgagaagactgtcaggaaacgagtatgtgtttactaagaatgtgcaccagagtcacagtcaccttgcaatgccaataaccatcaatgatgttcccccttgtatctctcaattacttgataatgaggagagttgggacttcaacatctttgaattggaagccattacgcataaaaggccattggtttatctgggcttaaaggtcttctctcggtttggagtatgtgaatttttaaactgttctgaaaccactcttcgggcctggttccaagtgatcgaagccaactaccactcttccaatgcctaccacaactccacccatgctgccgacgtcctgcacgccaccgctttctttcttggaaaggaaagagtaaagggaagcctcgatcagttggatgaggtggcagccctcattgctgccacagtccatgacgtggatcacccgggaaggaccaactctttcctctgcaatgcaggcagtgagcttgctgtgctctacaatgacactgctgttctggagagtcaccacaccgccctggccttccagctcacggtcaaggacaccaaatgcaacattttcaagaatattgacaggaaccattatcgaacgctgcgccaggctattattgacatggttttggcaacagagatgacaaaacactttgaacatgtgaataagtttgtgaacagcatcaacaagccaatggcagctgagattgaaggcagcgactgtgaatgcaaccctgctgggaagaacttccctgaaaaccaaatcctgatcaaacgcatgatgattaagtgtgctgacgtggccaacccatgccgccccttggacctgtgcattgaatgggctgggaggatctctgaggagtattttgcacagactgatgaagagaagagacagggactacctgtggtgatgccagtgtttgaccggaatacctgtagcatccccaagtctcagatctctttcattgactacttcataacagacatgtttgatgcttgggatgcctttgcacatctgccagccctgatgcaacatttggctgacaactacaaacactggaagacactagatgacctaaagtgcaaaagtttgaggcttccatctgacagctaaagccaagccacagagggggcctcttgaccgacaaaggacactgtgaatcacagtagcgtaaacgagaggccttcctttc

SEQ ID NO: 15215 - DNA, 535 bp, Homo sapiens
  source 1..535: mol_type = unassigned DNA
aataattcatatgcagtacaatgatatcacatgggtttccatttctgaaaaagtttgccaatccctggtctactggagcaggttggagaagctgtgagctcgttgaggaaagtgactaagctttacaaaggaaaagagccagcaggcaacatggtgttcttgttggcaggtgtcttctgcggaggtgcgcatcgggcccatgagactgacgcaggaccctattcaggttttgctgatctttgcaaaggaagatagtcagagcgatggcttctggtgggcctgcgacagagctggttatagatgcaatattgctcggactccagagtcagcccttgaatgctttcttgataagcatcatgaaattattgtaattgatcatagacaaactcagaacttcgatgcagaagcagtgtgcaggtcgatccgggccacaaatccctccgagcacacggtgatcctcgcagtggtttcgcgagtatcggatgaccatgaagaggcgtcagtccttcctcttctccacgcaggcttcaacagg

SEQ ID NO: 15216 - DNA, 574 bp, Homo sapiens
  source 1..574: mol_type = unassigned DNA
gacaaactcagaacttcgatgcagaagcagtgtgcaggtcgatccgggccacaaatccctccgagcacacggtgatcctcgcagtggtttcgcgagttgtgaggaatcctggtttgtatctgctgagtgaccacattttctgctttgctgcagatcggatgaccatgaagaggcgtcagtccttcctcttctccacgcaggcttcaacaggagatttatggagaatagcagcataattgcttgctataatgaactgattcaaatagaacatggggaagttcgctcccagttcaaattacgggcctgtaattcagtgtttacagcattagatcactgtcatgaagccatagaaataacaagcgatgaccacgtgattcagtatgtcaacccagccttcgaaaggatgatgggctaccacaaaggtgagctcctgggaaaagaactcgctgatctgcccaaaagcgataagaaccgggcagaccttctcgacaccatcaatacatgcatcaagaagggaaaggagtggcagggggtttactatgccagacggaaatccggggacagcatccaacag

SEQ ID NO: 15217 - DNA, 3474 bp, Homo sapiens
  source 1..3474: mol_type = unassigned DNA
gtggcatgctggtgggcatagcttatggggaggtgcttctgccctgttctacctagtcctcaatttggccccatgtccgagtcccttctcctacctcactgccataccatcgtgggtttcctctccagagaatgctgtgaggaaccagtgagtgattccacctcaattttatgtggttttggggaagcggagcgagagaagagcaagtaaaaccaagaatctcttgccatacacacgttacaggcaggacaattgtggctgttgttacttctgtatttactcagtttttaaaattaagctcttggcctaaagatccaacatgtaacttcaggggagtccttcattaattaatactactttaaaccttagcacacatcgtctgggaatgacaaataagcatttctttttttttaaatttaattttattattattatactttaagttttagggtacatgtgcacaacgtgcaggtttgttacatatgtatacatgtgccatgttggtgtgcatttctaaatgacttttaagcaaagatctagatgattgaggtactcagagatcaaaggtggagggaaggaaactgagattcaggaacacttggggactagttcaagagccaggatatggccaagcattggaatttcgtccactctcttaacgctgcatctccaaggacctcaagcccagaaactcttctttaaaaggacggcttgagaagactgtcaggaaacgagtatgtgtttactaagaatgtgcaccagagtcacagtcaccttgcaatgccaataaccatcaatgatgttcccccttgtatctctcaattacttgataatgaggagagttgggacttcaacatctttgaattggaagccattacgcataaaaggccattggtttatctgggcttaaaggtcttctctcggtttggagtatgtgaatttttaaactgttctgaaaccactcttcgggcctggttccaagtgatcgaagccaactaccactcttccaatgcctaccacaactccacccatgctgccgacgtcctgcacgccaccgctttctttcttggaaaggaaagagtaaagggaagcctcgatcagttggatgaggtggcagccctcattgctgccacagtccatgacgtggatcacccgggaaggaccaactctttcctctgcaatgcaggcagtgagcttgctgtgctctacaatgacactgctgttctggagagtcaccacaccgccctggccttccagctcacggtcaaggacaccaaatgcaacattttcaagaatattgacaggaaccattatcgaacgctgcgccaggctattattgacatggttttggcaacagagatgacaaaacactttgaacatgtgaataagtttgtgaacagcatcaacaagccaatggcagctgagattgaaggcagcgactgtgaatgcaaccctgctgggaagaacttccctgaaaaccaaatcctgatcaaacgcatgatgattaagtgtgctgacgtggccaacccatgccgccccttggacctgtgcattgaatgggctgggaggatctctgaggagtattttgcacagactgatgaagagaagagacagggactacctgtggtgatgccagtgtttgaccggaatacctgtagcatccccaagtctcagatctctttcattgactacttcataacagacatgtttgatgcttgggatgcctttgcacatctgccagccctgatgcaacatttggctgacaactacaaacactggaagacactagatgacctaaagtgcaaaagtttgaggcttccatctgacagctaaagccaagccacagagggggcctcttgaccgacaaaggacactgtgaatcacagtagcgtaaacgagaggccttcctttctaatgacaatgacaggtattggtgaaggagctaatgtttaatatttgaccttgaatcattcaagtccccaaatttcattcttagaaagttatgttccatgaagaaaaatatatgttcttttgaatacttaatgacagaacaaatacttggcaaactcctttgctctgctgtcatcctgtgtacccttgtcaatccatggagctggttcactgtaactagcaggccacaggaagcaaagccttggtgcctgtgagctcatctcccaggatggtgactaagtagcttagctagtgatcagctcatcctttaccataaaagtcatcattgctgtttagcttgactgttttcctcaagaacatcgatctgaaggattcataaggagcttatctgaacagatttatctaagaaaaaaaaaaaacgacataaaataagtgaaacaactaggaccaaattacagataaactagttagcttcacagcctctatggctacatggttcttctggccgatggtatgacacctaagttagaacacagccttggctggtgggtgccctctctagactggtatcagcagcctgtgtaacccctttcctgtaaaaggggttcatcttaacaaagtcatccatgatgagggaaaaagtggcatttcatttttggggaatccatgagcttcctttatttctggctcacagaggcagccacgaggcactacaccaagtattatataaaagccattaaatttgaatgcccttggacaagcttttcttaaaaaaaaaaaaaaaaagtttatatacatgtttaaaatttttattaaaatccaaattttctgggtgtaagcccatgcagtatgttgtgccatgcaccatctatacgtaatattttgggaggggataggggaagtttcaaggttcagatatttttaaccagtctatatttgaaatcatgccattagctttaacaatgttaaaattgtgtggtgtaaatatatcagaaaataggcatatggggaggcagtaaatactattttaagctattaattgtatgctaaaagcttctaaagcacaagtgcatatttttatactgctcttttcacaactccctgtgatctacataaagtcagactcgagattttcctttctcttttaccagctgatccttcctatgtattataaatattagactccgtaaacaaacttcatttttctttctctgtacttcatgctgcatttttaaaaggtataaacaaacagagactgaattaattgaatcagtaattacttttttccaatacaaattggaatgcagaatacttggaacttgtacatggggaaaaaatgacttatcactacataatgtgccaatgtttttttctatgttttgtaccaaaaatggaaaaatatgacaattccatgcaaagaaatgtatctaaattatttttgttagatgataagagaacttgcttggtcaggacagcagccagctttgtattgtaatgctatattatgtaaatgtgatgaaaatgtttttgtgaagtacttgtaactaaattcctacagccatt

SEQ ID NO: 15218 - DNA, 1883 bp, Homo sapiens
  source 1..1883: mol_type = unassigned DNA
cctcccgcggcggctggcgtcgggaaagtacagtaaaaagtccgagtgcagccgccgggcgcaggatgggatccggctcctccagctaccggcccaaggccatctacctggacatcgatggacgcattcagaaggtaatcttcagcaagtactgcaactccagcgacatcatggacctgttctgcatcgccaccggcctgcctcggaacacgaccatctccctgctgaccaccgacgacgccatggtctccatcgaccccaccatgcccgcgaattcagaacgcactccgtacaaagtgagacctgtggccatcaagcaactctccgagagagaagaattaatccagagcgtgctggcgcaggttgcagagcagttctcaagagcattcaaaatcaatgaactgaaagctgaagttgcaaatcacttggctgtcctagagaaacgcgtggaattggaaggactaaaagtggtggagattgagaaatgcaagagtgacattaagaagatgagggaggagctggcggccagaagcagcaggaccaactgcccctgtaagtacagttttttggataaccacaagaagttgactcctcgacgcgatgttcccacttaccccaagtacctgctctctccagagaccatcgaggccctgcggaagccgacctttgacgtctggctttgggagcccaatgagatgctgagctgcctggagcacatgtaccacgacctcgggctggtcagggacttcagcatcaaccctgtcaccctcaggaggtggctgttctgcgtccacgacaactacagaaacaaccccttccacaacttccggcactgcttctgcgtggcccagatgatgtacagcatggtctggctctgcagtctccaggagaagttctcacaaacggatatcctgatcctaatgacagcggccatctgccacgatctggaccatcccggctacaacaacacgtaccagatcaatgcccgcacagagctggcggtccgctacaatgacatctcaccgctggagaaccaccactgcgccgtggccttccagatcctcgccgagcctgagtgcaacatcttctccaacatcccacctgatgggttcaagcagatccgacagggaatgatcacattaatcttggccactgacatggcaagacatgcagaaattatggattctttcaaagagaaaatggagaattttgactacagcaacgaggagcacatgaccctgctgaagatgattttgataaaatgctgtgatatctctaacgaggtccgtccaatggaagtcgcagagccttgggtggactgtttattagaggaatattttatgcagagcgaccgtgagaagtcagaaggccttcctgtggcaccgttcatggaccgagacaaagtgaccaaggccacagcccagattgggttcatcaagtttgtcctgatcccaatgtttgaaacagtgaccaagctcttccccatggttgaggagatcatgctgcagccactttgggaatcccgagatcgctacgaggagctgaagcggatagatgacgccatgaaagagttacagaagaagactgacagcttgacgtctggggccaccgagaagtccagagagagaagcagagatgtgaaaaacagtgaaggagactgtgcctgaggaaagcggggggcgtggctgcagttctggacgggctggccgagctgcgcgggatccttgtgcagggaagagctgccctgggcacctggcaccacaagaccatgttttctaagaaccattttgttcactgatacaaaaaaaaaaaaaggaattcatgatgctgtacagaattttatttttaaactgtcttttaaataatatattcttatacggaaa

SEQ ID NO: 15219 - DNA, 1954 bp, Homo sapiens
  source 1..1954: mol_type = unassigned DNA
cgcggcggctggcgtcgggaaagtacagtaaaaagtccgagtgcagccgccgggcgcaggatgggatccggctcctccagctaccggcccaaggccatctacctggacatcgatggacgcattcagaaggtaatcttcagcaagtactgcaactccagcgacatcatggacctgttctgcatcgccaccggcctgcctcggaacacgaccatctccctgctgaccaccgacgacgccatggtctccatcgaccccaccatgcccgcgaattcagaacggaatgagctcattctctatacatcactccgtaacttgttgtttttacctagtaaggagtcatgggcgtcccaccagcactccgtacaaagtgagacctgtggccatcaagcaactctccgagagagaagaattaatccagagcgtgctggcgcaggttgcagagcagttctcaagagcattcaaaatcaatgaactgaaagctgaagttgcaaatcacttggctgtcctagagaaacgcgtggaattggaaggactaaaagtggtggagattgagaaatgcaagagtgacattaagaagatgagggaggagctggcggccagaagcagcaggaccaactgcccctgtaagtacagttttttggataaccacaagaagttgactcctcgacgcgatgttcccacttaccccaagtacctgctctctccagagaccatcgaggccctgcggaagccgacctttgacgtctggctttgggagcccaatgagatgctgagctgcctggagcacatgtaccacgacctcgggctggtcagggacttcagcatcaaccctgtcaccctcaggaggtggctgttctgcgtccacgacaactacagaaacaaccccttccacaacttccggcactgcttctgcgtggcccagatgatgtacagcatggtctggctctgcagtctccaggagaagttctcacaaacggatatcctgatcctaatgacagcggccatctgccacgatctggaccatcccggctacaacaacacgtaccagatcaatgcccgcacagagctggcggtccgctacaatgacatctcaccgctggagaaccaccactgcgccgtggccttccagatcctcgccgagcctgagtgcaacatcttctccaacatcccacctgatgggttcaagcagatccgacagggaatgatcacattaatcttggccactgacatggcaagacatgcagaaattatggattctttcaaagagaaaatggagaattttgactacagcaacgaggagcacatgaccctgctgaagatgattttgataaaatgctgtgatatctctaacgaggtccgtccaatggaagtcgcagagccttgggtggactgtttattagaggaatattttatgcagagcgaccgtgagaagtcagaaggccttcctgtggcaccgttcatggaccgagacaaagtgaccaaggccacagcccagattgggttcatcaagtttgtcctgatcccaatgtttgaaacagtgaccaagctcttccccatggttgaggagatcatgctgcagccactttgggaatcccgagatcgctacgaggagctgaagcggatagatgacgccatgaaagagttacagaagaagactgacagcttgacgtctggggccaccgagaagtccagagagagaagcagagatgtgaaaaacagtgaaggagactgtgcctgaggaaagcggggggcgtggctgcagttctggacgggctggccgagctgcgcgggatccttgtgcagggaagagctgccctgggcacctggcaccacaagaccatgttttctaagaaccattttgttcactgatacaaaaaaaaaaaaaggaattcatgatgctgtacagaattttatttttaaactgtcttttaaataatatattcttatacggaaa

SEQ ID NO: 15220 - DNA, 2058 bp, Homo sapiens
  source 1..2058: mol_type = unassigned DNA
cgcggcggctggcgtcgggaaagtacagtaaaaagtccgagtgcagccgccgggcgcaggatgggatccggctcctccagctaccggcccaaggccatctacctggacatcgatggacgcattcagaaggtaatcttcagcaagtactgcaactccagcgacatcatggacctgttctgcatcgccaccggcctgcctcggaacacgaccatctccctgctgaccaccgacgacgccatggtctccatcgaccccaccatgcccgcgaattcagaacgcactccgtacaaagtgagacctgtggccatcaagcaactctccgctggtgtcgaggacaagagaaccacaagccgtggccagtctgctgagagaccactgagggacagacgggttgtgggcctggagcagccccggagggaaggagcatttgaaagtggacaggtagagcccaggcccagagagccccagggctgctaccaggaaggccagcgcatccctccagagagagaagaattaatccagagcgtgctggcgcaggttgcagagcagttctcaagagcattcaaaatcaatgaactgaaagctgaagttgcaaatcacttggctgtcctagagaaacgcgtggaattggaaggactaaaagtggtggagattgagaaatgcaagagtgacattaagaagatgagggaggagctggcggccagaagcagcaggaccaactgcccctgtaagtacagttttttggataaccacaagaagttgactcctcgacgcgatgttcccacttaccccaagtacctgctctctccagagaccatcgaggccctgcggaagccgacctttgacgtctggctttgggagcccaatgagatgctgagctgcctggagcacatgtaccacgacctcgggctggtcagggacttcagcatcaaccctgtcaccctcaggaggtggctgttctgcgtccacgacaactacagaaacaaccccttccacaacttccggcactgcttctgcgtggcccagatgatgtacagcatggtctggctctgcagtctccaggagaagttctcacaaacggatatcctgatcctaatgacagcggccatctgccacgatctggaccatcccggctacaacaacacgtaccagatcaatgcccgcacagagctggcggtccgctacaatgacatctcaccgctggagaaccaccactgcgccgtggccttccagatcctcgccgagcctgagtgcaacatcttctccaacatcccacctgatgggttcaagcagatccgacagggaatgatcacattaatcttggccactgacatggcaagacatgcagaaattatggattctttcaaagagaaaatggagaattttgactacagcaacgaggagcacatgaccctgctgaagatgattttgataaaatgctgtgatatctctaacgaggtccgtccaatggaagtcgcagagccttgggtggactgtttattagaggaatattttatgcagagcgaccgtgagaagtcagaaggccttcctgtggcaccgttcatggaccgagacaaagtgaccaaggccacagcccagattgggttcatcaagtttgtcctgatcccaatgtttgaaacagtgaccaagctcttccccatggttgaggagatcatgctgcagccactttgggaatcccgagatcgctacgaggagctgaagcggatagatgacgccatgaaagagttacagaagaagactgacagcttgacgtctggggccaccgagaagtccagagagagaagcagagatgtgaaaaacagtgaaggagactgtgcctgaggaaagcggggggcgtggctgcagttctggacgggctggccgagctgcgcgggatccttgtgcagggaagagctgccctgggcacctggcaccacaagaccatgttttctaagaaccattttgttcactgatacaaaaaaaaaaaaaggaattcatgatgctgtacagaattttatttttaaactgtcttttaaataatatattcttatacggaaa

SEQ ID NO: 15221 - DNA, 1865 bp, Homo sapiens
  source 1..1865: mol_type = unassigned DNA
cgcggcggctggcgtcgggaaagtacagtaaaaagtccgagtgcagccgccgggcgcaggatgggatccggctcctccagctaccggcccaaggccatctacctggacatcgatggacgcattcagaagctggtgtcgaggacaagagaaccacaagccgtggccagtctgctgagagaccactgagggacagacgggttgtgggcctggagcagccccggagggaaggagcatttgaaagtggacaggtagagcccaggcccagagagccccagggctgctaccaggaaggccagcgcatccctccagagagagaagaattaatccagagcgtgctggcgcaggttgcagagcagttctcaagagcattcaaaatcaatgaactgaaagctgaagttgcaaatcacttggctgtcctagagaaacgcgtggaattggaaggactaaaagtggtggagattgagaaatgcaagagtgacattaagaagatgagggaggagctggcggccagaagcagcaggaccaactgcccctgtaagtacagttttttggataaccacaagaagttgactcctcgacgcgatgttcccacttaccccaagtacctgctctctccagagaccatcgaggccctgcggaagccgacctttgacgtctggctttgggagcccaatgagatgctgagctgcctggagcacatgtaccacgacctcgggctggtcagggacttcagcatcaaccctgtcaccctcaggaggtggctgttctgcgtccacgacaactacagaaacaaccccttccacaacttccggcactgcttctgcgtggcccagatgatgtacagcatggtctggctctgcagtctccaggagaagttctcacaaacggatatcctgatcctaatgacagcggccatctgccacgatctggaccatcccggctacaacaacacgtaccagatcaatgcccgcacagagctggcggtccgctacaatgacatctcaccgctggagaaccaccactgcgccgtggccttccagatcctcgccgagcctgagtgcaacatcttctccaacatcccacctgatgggttcaagcagatccgacagggaatgatcacattaatcttggccactgacatggcaagacatgcagaaattatggattctttcaaagagaaaatggagaattttgactacagcaacgaggagcacatgaccctgctgaagatgattttgataaaatgctgtgatatctctaacgaggtccgtccaatggaagtcgcagagccttgggtggactgtttattagaggaatattttatgcagagcgaccgtgagaagtcagaaggccttcctgtggcaccgttcatggaccgagacaaagtgaccaaggccacagcccagattgggttcatcaagtttgtcctgatcccaatgtttgaaacagtgaccaagctcttccccatggttgaggagatcatgctgcagccactttgggaatcccgagatcgctacgaggagctgaagcggatagatgacgccatgaaagagttacagaagaagactgacagcttgacgtctggggccaccgagaagtccagagagagaagcagagatgtgaaaaacagtgaaggagactgtgcctgaggaaagcggggggcgtggctgcagttctggacgggctggccgagctgcgcgggatccttgtgcagggaagagctgccctgggcacctggcaccacaagaccatgttttctaagaaccattttgttcactgatacaaaaaaaaaaaaaggaattcatgatgctgtacagaattttatttttaaactgtcttttaaataatatattcttatacggaaa

SEQ ID NO: 15222 - DNA, 794 bp, Homo sapiens
  source 1..794: mol_type = unassigned DNA
acagtaaaaagtccgagtgcagccgccgggcgcaggatgggatccggctcctccagctaccggcccaaggccatctacctggacatcgatggacgcattcagaaggtaatcttcagcaagtactgcaactccagcgacatcatggacctgttctgcatcgccaccggcctgcctcggaacacgaccatctccctgctgaccaccgacgacgccatggtctccatcgaccccaccatgcccgcgaattcagaacgcactccgtacaaagtgagacctgtggccatcaagcaactctccgatattcatttctccagcaccatttgttgaaaagatgatcttttctcccactgaattaccatgacacctttgtggaaaatcgatgggccatgtatgtgtgagtctttttctggactccagatcctgtcgtgtgaatttacatgtcttaaaacaacagcacaccatcttgactaccgtagataaatagtaggtcttgaaatcaggtactctaagttatctctggtttcttttttctttttcaaaaatgttattgcttttattttcaaataaattttagaatcagtctatgaattgcttccaaaaaaacagtctgctaggattttgactgaagttgcattaaatatacagaccaatgtgggaagaattaatatcttaagaatgttgagtcttctggttcataaatatggtctatctccccattcatttgggtttcctttaatgtttctcaataatgtgttaccattgttaatatgaagtacttaataaatactgataaa

SEQ ID NO: 15223 - DNA, 1875 bp, Homo sapiens
  source 1..1875: mol_type = unassigned DNA
acagtaaaaagtccgagtgcagccgccgggcgcaggatgggatccggctcctccagctaccggcccaaggccatctacctggacatcgatggacgcattcagaaggtaatcttcagcaagtactgcaactccagcgacatcatggacctgttctgcatcgccaccggcctgcctcggaacacgaccatctccctgctgaccaccgacgacgccatggtctccatcgaccccaccatgcccgcgaattcagaacggaatgagctcattctctatacatcactccgtaacttgttgtttttacctagtaaggagtcatgggcgtcccaccagcactccgtacaaagtgagacctgtggccatcaagcaactctccgagcattcaaaatcaatgaactgaaagctgaagttgcaaatcacttggctgtcctagagaaacgcgtggaattggaaggactaaaagtggtggagattgagaaatgcaagagtgacattaagaagatgagggaggagctggcggccagaagcagcaggaccaactgcccctgtaagtacagttttttggataaccacaagaagttgactcctcgacgcgatgttcccacttaccccaagtacctgctctctccagagaccatcgaggccctgcggaagccgacctttgacgtctggctttgggagcccaatgagatgctgagctgcctggagcacatgtaccacgacctcgggctggtcagggacttcagcatcaaccctgtcaccctcaggaggtggctgttctgcgtccacgacaactacagaaacaaccccttccacaacttccggcactgcttctgcgtggcccagatgatgtacagcatggtctggctctgcagtctccaggagaagttctcacaaacggatatcctgatcctaatgacagcggccatctgccacgatctggaccatcccggctacaacaacacgtaccagatcaatgcccgcacagagctggcggtccgctacaatgacatctcaccgctggagaaccaccactgcgccgtggccttccagatcctcgccgagcctgagtgcaacatcttctccaacatcccacctgatgggttcaagcagatccgacagggaatgatcacattaatcttggccactgacatggcaagacatgcagaaattatggattctttcaaagagaaaatggagaattttgactacagcaacgaggagcacatgaccctgctgaagatgattttgataaaatgctgtgatatctctaacgaggtccgtccaatggaagtcgcagagccttgggtggactgtttattagaggaatattttatgcagagcgaccgtgagaagtcagaaggccttcctgtggcaccgttcatggaccgagacaaagtgaccaaggccacagcccagattgggttcatcaagtttgtcctgatcccaatgtttgaaacagtgaccaagctcttccccatggttgaggagatcatgctgcagccactttgggaatcccgagatcgctacgaggagctgaagcggatagatgacgccatgaaagagttacagaagaagactgacagcttgacgtctggggccaccgagaagtccagagagagaagcagagatgtgaaaaacagtgaaggagactgtgcctgaggaaagcggggggcgtggctgcagttctggacgggctggccgagctgcgcgggatccttgtgcagggaagagctgccctgggcacctggcaccacaagaccatgttttctaagaaccattttgttcactgatacaaaaaaaaaaaaaggaattcatgatgctgtacagaattttatttttaaactgtcttttaaataatatattcttatacggaaa

SEQ ID NO: 15224 - DNA, 1565 bp, Homo sapiens
  source 1..1565: mol_type = unassigned DNA
acagtaaaaagtccgagtgcagccgccgggcgcaggatgggatccggctcctccagctaccggcccaaggccatctacctggacatcgatggacgcattcagaagcactccgtacaaagtgagacctgtggccatcaagcaactctccgagcattcaaaatcaatgaactgaaagctgaagttgcaaatcacttggctgtcctagagaaacgcgtggaatgaccaactgcccctgtaagtacagttttttggataaccacaagaagttgactcctcgacgcgatgttcccacttaccccaagtacctgctctctccagagaccatcgaggccctgcggaagccgacctttgacgtctggctttgggagcccaatgagatgctgagctgcctggagcacatgtaccacgacctcgggctggtcagggacttcagcatcaaccctgtcaccctcaggaggtggctgttctgcgtccacgacaactacagaaacaaccccttccacaacttccggcactgcttctgcgtggcccagatgatgtacagcatggtctggctctgcagtctccaggagaagttctcacaaacggatatcctgatcctaatgacagcggccatctgccacgatctggaccatcccggctacaacaacacgtaccagatcaatgcccgcacagagctggcggtccgctacaatgacatctcaccgctggagaaccaccactgcgccgtggccttccagatcctcgccgagcctgagtgcaacatcttctccaacatcccacctgatgggttcaagcagatccgacagggaatgatcacattaatcttggccactgacatggcaagacatgcagaaattatggattctttcaaagagaaaatggagaattttgactacagcaacgaggagcacatgaccctgctgaagatgattttgataaaatgctgtgatatctctaacgaggtccgtccaatggaagtcgcagagccttgggtggactgtttattagaggaatattttatgcagagcgaccgtgagaagtcagaaggccttcctgtggcaccgttcatggaccgagacaaagtgaccaaggccacagcccagattgggttcatcaagtttgtcctgatcccaatgtttgaaacagtgaccaagctcttccccatggttgaggagatcatgctgcagccactttgggaatcccgagatcgctacgaggagctgaagcggatagatgacgccatgaaagagttacagaagaagactgacagcttgacgtctggggccaccgagaagtccagagagagaagcagagatgtgaaaaacagtgaaggagactgtgcctgaggaaagcggggggcgtggctgcagttctggacgggctggccgagctgcgcgggatccttgtgcagggaagagctgccctgggcacctggcaccacaagaccatgttttctaagaaccattttgttcactgatacaaaaaaaaaaaaaggaattcatgatgctgtacagaattttatttttaaactgtcttttaaataatatattcttatacggaaa

SEQ ID NO: 15225 - DNA, 1885 bp, Homo sapiens
  source 1..1885: mol_type = unassigned DNA
acagtaaaaagtccgagtgcagccgccgggcgcaggatgggatccggctcctccagctaccggcccaaggccatctacctggacatcgatggacgcattcagaagcactccgtacaaagtgagacctgtggccatcaagcaactctccgctggtgtcgaggacaagagaaccacaagccgtggccagtctgctgagagaccactgagggacagacgggttgtgggcctggagcagccccggagggaaggagcatttgaaagtggacaggtagagcccaggcccagagagccccagggctgctaccaggaaggccagcgcatccctccagagagagaagaattaatccagagcgtgctggcgcaggttgcagagcagttctcaagagcattcaaaatcaatgaactgaaagctgaagttgcaaatcacttggctgtcctagagaaacgcgtggaattggaaggactaaaagtggtggagattgagaaatgcaagagtgacattaagaagatgagggaggagctggcggccagaagcagcaggaccaactgcccctgtaagtacagttttttggataaccacaagaagttgactcctcgacgcgatgttcccacttaccccaagtacctgctctctccagagaccatcgaggccctgcggaagccgacctttgacgtctggctttgggagcccaatgagatgctgagctgcctggagcacatgtaccacgacctcgggctggtcagggacttcagcatcaaccctgtcaccctcaggaggtggctgttctgcgtccacgacaactacagaaacaaccccttccacaacttccggcactgcttctgcgtggcccagatgatgtacagcatggtctggctctgcagtctccaggagaagttctcacaaacggatatcctgatcctaatgacagcggccatctgccacgatctggaccatcccggctacaacaacacgtaccagatcaatgcccgcacagagctggcggtccgctacaatgacatctcaccgctggagaaccaccactgcgccgtggccttccagatcctcgccgagcctgagtgcaacatcttctccaacatcccacctgatgggttcaagcagatccgacagggaatgatcacattaatcttggccactgacatggcaagacatgcagaaattatggattctttcaaagagaaaatggagaattttgactacagcaacgaggagcacatgaccctgctgaagatgattttgataaaatgctgtgatatctctaacgaggtccgtccaatggaagtcgcagagccttgggtggactgtttattagaggaatattttatgcagagcgaccgtgagaagtcagaaggccttcctgtggcaccgttcatggaccgagacaaagtgaccaaggccacagcccagattgggttcatcaagtttgtcctgatcccaatgtttgaaacagtgaccaagctcttccccatggttgaggagatcatgctgcagccactttgggaatcccgagatcgctacgaggagctgaagcggatagatgacgccatgaaagagttacagaagaagactgacagcttgacgtctggggccaccgagaagtccagagagagaagcagagatgtgaaaaacagtgaaggagactgtgcctgaggaaagcggggggcgtggctgcagttctggacgggctggccgagctgcgcgggatccttgtgcagggaagagctgccctgggcacctggcaccacaagaccatgttttctaagaaccattttgttcactgatacaaaaaaaaaaaaaggaattcatgatgctgtacagaattttatttttaaactgtcttttaaataatatattcttatacggaaa

SEQ ID NO: 15226 - DNA, 1784 bp, Homo sapiens
  source 1..1784: mol_type = unassigned DNA
acagtaaaaagtccgagtgcagccgccgggcgcaggatgggatccggctcctccagctaccggcccaaggccatctacctggacatcgatggacgcattcagaagcactccgtacaaagtgagacctgtggccatcaagcaactctccgcaaaagaatgcagattttgcattatctaaagaggcggttccgtgagcccactgtgctgagtcacatatattccatcggtagagagaagaattaatccagagcgtgctggcgcaggttgcagagcagttctcaagagcattcaaaatcaatgaactgaaagctgaagttgcaaatcacttggctgtcctagagaaacgcgtggaattggaaggactaaaagtggtggagattgagaaatgcaagagtgacattaagaagatgagggaggagctggcggccagaagcagcaggaccaactgcccctgtaagtacagttttttggataaccacaagaagttgactcctcgacgcgatgttcccacttaccccaagtacctgctctctccagagaccatcgaggccctgcggaagccgacctttgacgtctggctttgggagcccaatgagatgctgagctgcctggagcacatgtaccacgacctcgggctggtcagggacttcagcatcaaccctgtcaccctcaggaggtggctgttctgcgtccacgacaactacagaaacaaccccttccacaacttccggcactgcttctgcgtggcccagatgatgtacagcatggtctggctctgcagtctccaggagaagttctcacaaacggatatcctgatcctaatgacagcggccatctgccacgatctggaccatcccggctacaacaacacgtaccagatcaatgcccgcacagagctggcggtccgctacaatgacatctcaccgctggagaaccaccactgcgccgtggccttccagatcctcgccgagcctgagtgcaacatcttctccaacatcccacctgatgggttcaagcagatccgacagggaatgatcacattaatcttggccactgacatggcaagacatgcagaaattatggattctttcaaagagaaaatggagaattttgactacagcaacgaggagcacatgaccctgctgaagatgattttgataaaatgctgtgatatctctaacgaggtccgtccaatggaagtcgcagagccttgggtggactgtttattagaggaatattttatgcagagcgaccgtgagaagtcagaaggccttcctgtggcaccgttcatggaccgagacaaagtgaccaaggccacagcccagattgggttcatcaagtttgtcctgatcccaatgtttgaaacagtgaccaagctcttccccatggttgaggagatcatgctgcagccactttgggaatcccgagatcgctacgaggagctgaagcggatagatgacgccatgaaagagttacagaagaagactgacagcttgacgtctggggccaccgagaagtccagagagagaagcagagatgtgaaaaacagtgaaggagactgtgcctgaggaaagcggggggcgtggctgcagttctggacgggctggccgagctgcgcgggatccttgtgcagggaagagctgccctgggcacctggcaccacaagaccatgttttctaagaaccattttgttcactgatacaaaaaaaaaaaaaggaattcatgatgctgtacagaattttatttttaaactgtcttttaaataatatattcttatacggaaa

SEQ ID NO: 15227 - DNA, 1783 bp, Homo sapiens
  source 1..1783: mol_type = unassigned DNA
acagtaaaaagtccgagtgcagccgccgggcgcaggatgggatccggctcctccagctaccggcccaaggccatctacctggacatcgatggacgcattcagaaggaacacgaccatctccctgctgaccaccgacgacgccatggtctccatcgaccccaccatgcccgcgaattcagaacgcactccgtacaaagtgagacctgtggccatcaagcaactctccgagagagaagaattaatccagagcgtgctggcgcaggttgcagagcagttctcaagagcattcaaaatcaatgaactgaaagctgaagttgcaaatcacttggctgtcctagagaaacgcgtggaattggaaggactaaaagtggtggagattgagaaatgcaagagtgacattaagaagatgagggaggagctggcggccagaagcagcaggaccaactgcccctgtaagtacagttttttggataaccacaagaagttgactcctcgacgcgatgttcccacttaccccaagtacctgctctctccagagaccatcgaggccctgcggaagccgacctttgacgtctggctttgggagcccaatgagatgctgagctgcctggagcacatgtaccacgacctcgggctggtcagggacttcagcatcaaccctgtcaccctcaggaggtggctgttctgcgtccacgacaactacagaaacaaccccttccacaacttccggcactgcttctgcgtggcccagatgatgtacagcatggtctggctctgcagtctccaggagaagttctcacaaacggatatcctgatcctaatgacagcggccatctgccacgatctggaccatcccggctacaacaacacgtaccagatcaatgcccgcacagagctggcggtccgctacaatgacatctcaccgctggagaaccaccactgcgccgtggccttccagatcctcgccgagcctgagtgcaacatcttctccaacatcccacctgatgggttcaagcagatccgacagggaatgatcacattaatcttggccactgacatggcaagacatgcagaaattatggattctttcaaagagaaaatggagaattttgactacagcaacgaggagcacatgaccctgctgaagatgattttgataaaatgctgtgatatctctaacgaggtccgtccaatggaagtcgcagagccttgggtggactgtttattagaggaatattttatgcagagcgaccgtgagaagtcagaaggccttcctgtggcaccgttcatggaccgagacaaagtgaccaaggccacagcccagattgggttcatcaagtttgtcctgatcccaatgtttgaaacagtgaccaagctcttccccatggttgaggagatcatgctgcagccactttgggaatcccgagatcgctacgaggagctgaagcggatagatgacgccatgaaagagttacagaagaagactgacagcttgacgtctggggccaccgagaagtccagagagagaagcagagatgtgaaaaacagtgaaggagactgtgcctgaggaaagcggggggcgtggctgcagttctggacgggctggccgagctgcgcgggatccttgtgcagggaagagctgccctgggcacctggcaccacaagaccatgttttctaagaaccattttgttcactgatacaaaaaaaaaaaaaggaattcatgatgctgtacagaattttatttttaaactgtcttttaaataatatattcttatacggaaa

SEQ ID NO: 15228 - DNA, 1776 bp, Homo sapiens
  source 1..1776: mol_type = unassigned DNA
acagtaaaaagtccgagtgcagccgccgggcgcaggatgggatccggctcctccagctaccggcccaaggccatctacctggacatcgatggacgcattcagaaggtaatcttcagcaagtactgcaactccagcgacatcatggacctgttctgcatcgccaccggcctgcctcgcactccgtacaaagtgagacctgtggccatcaagcaactctccgagagagaagaattaatccagagcgtgctggcgcaggttgcagagcagttctcaagagcattcaaaatcaatgaactgaaagctgaagttgcaaatcacttggctgtcctagagaaacgcgtggaattggaaggactaaaagtggtggagattgagaaatgcaagagtgacattaagaagatgagggaggagctggcggccagaagcagcaggaccaactgcccctgtaagtacagttttttggataaccacaagaagttgactcctcgacgcgatgttcccacttaccccaagtacctgctctctccagagaccatcgaggccctgcggaagccgacctttgacgtctggctttgggagcccaatgagatgctgagctgcctggagcacatgtaccacgacctcgggctggtcagggacttcagcatcaaccctgtcaccctcaggaggtggctgttctgcgtccacgacaactacagaaacaaccccttccacaacttccggcactgcttctgcgtggcccagatgatgtacagcatggtctggctctgcagtctccaggagaagttctcacaaacggatatcctgatcctaatgacagcggccatctgccacgatctggaccatcccggctacaacaacacgtaccagatcaatgcccgcacagagctggcggtccgctacaatgacatctcaccgctggagaaccaccactgcgccgtggccttccagatcctcgccgagcctgagtgcaacatcttctccaacatcccacctgatgggttcaagcagatccgacagggaatgatcacattaatcttggccactgacatggcaagacatgcagaaattatggattctttcaaagagaaaatggagaattttgactacagcaacgaggagcacatgaccctgctgaagatgattttgataaaatgctgtgatatctctaacgaggtccgtccaatggaagtcgcagagccttgggtggactgtttattagaggaatattttatgcagagcgaccgtgagaagtcagaaggccttcctgtggcaccgttcatggaccgagacaaagtgaccaaggccacagcccagattgggttcatcaagtttgtcctgatcccaatgtttgaaacagtgaccaagctcttccccatggttgaggagatcatgctgcagccactttgggaatcccgagatcgctacgaggagctgaagcggatagatgacgccatgaaagagttacagaagaagactgacagcttgacgtctggggccaccgagaagtccagagagagaagcagagatgtgaaaaacagtgaaggagactgtgcctgaggaaagcggggggcgtggctgcagttctggacgggctggccgagctgcgcgggatccttgtgcagggaagagctgccctgggcacctggcaccacaagaccatgttttctaagaaccattttgttcactgatacaaaaaaaaaaaaaggaattcatgatgctgtacagaattttatttttaaactgtcttttaaataatatattcttatacggaaa

SEQ ID NO: 15229 - DNA, 1721 bp, Homo sapiens
  source 1..1721: mol_type = unassigned DNA
acagtaaaaagtccgagtgcagccgccgggcgcaggatgggatccggctcctccagctaccggcccaaggccatctacctggacatcgatggacgcattcagaaggtaatcttcagcaagtactgcaactccagcgacatcatggacctgttctgcatcgccaccggcctgcctcgcactccgtacaaagtgagacctgtggccatcaagcaactctccgagcattcaaaatcaatgaactgaaagctgaagttgcaaatcacttggctgtcctagagaaacgcgtggaattggaaggactaaaagtggtggagattgagaaatgcaagagtgacattaagaagatgagggaggagctggcggccagaagcagcaggaccaactgcccctgtaagtacagttttttggataaccacaagaagttgactcctcgacgcgatgttcccacttaccccaagtacctgctctctccagagaccatcgaggccctgcggaagccgacctttgacgtctggctttgggagcccaatgagatgctgagctgcctggagcacatgtaccacgacctcgggctggtcagggacttcagcatcaaccctgtcaccctcaggaggtggctgttctgcgtccacgacaactacagaaacaaccccttccacaacttccggcactgcttctgcgtggcccagatgatgtacagcatggtctggctctgcagtctccaggagaagttctcacaaacggatatcctgatcctaatgacagcggccatctgccacgatctggaccatcccggctacaacaacacgtaccagatcaatgcccgcacagagctggcggtccgctacaatgacatctcaccgctggagaaccaccactgcgccgtggccttccagatcctcgccgagcctgagtgcaacatcttctccaacatcccacctgatgggttcaagcagatccgacagggaatgatcacattaatcttggccactgacatggcaagacatgcagaaattatggattctttcaaagagaaaatggagaattttgactacagcaacgaggagcacatgaccctgctgaagatgattttgataaaatgctgtgatatctctaacgaggtccgtccaatggaagtcgcagagccttgggtggactgtttattagaggaatattttatgcagagcgaccgtgagaagtcagaaggccttcctgtggcaccgttcatggaccgagacaaagtgaccaaggccacagcccagattgggttcatcaagtttgtcctgatcccaatgtttgaaacagtgaccaagctcttccccatggttgaggagatcatgctgcagccactttgggaatcccgagatcgctacgaggagctgaagcggatagatgacgccatgaaagagttacagaagaagactgacagcttgacgtctggggccaccgagaagtccagagagagaagcagagatgtgaaaaacagtgaaggagactgtgcctgaggaaagcggggggcgtggctgcagttctggacgggctggccgagctgcgcgggatccttgtgcagggaagagctgccctgggcacctggcaccacaagaccatgttttctaagaaccattttgttcactgatacaaaaaaaaaaaaaggaattcatgatgctgtacagaattttatttttaaactgtcttttaaataatatattcttatacggaaa

SEQ ID NO: 15230 - DNA, 1956 bp, Homo sapiens
  source 1..1956: mol_type = unassigned DNA
acagtaaaaagtccgagtgcagccgccgggcgcaggatgggatccggctcctccagctaccggcccaaggccatctacctggacatcgatggacgcattcagaaggtaatcttcagcaagtactgcaactccagcgacatcatggacctgttctgcatcgccaccggcctgcctcgcactccgtacaaagtgagacctgtggccatcaagcaactctccgctggtgtcgaggacaagagaaccacaagccgtggccagtctgctgagagaccactgagggacagacgggttgtgggcctggagcagccccggagggaaggagcatttgaaagtggacaggtagagcccaggcccagagagccccagggctgctaccaggaaggccagcgcatccctccagagagagaagaattaatccagagcgtgctggcgcaggttgcagagcagttctcaagagcattcaaaatcaatgaactgaaagctgaagttgcaaatcacttggctgtcctagagaaacgcgtggaattggaaggactaaaagtggtggagattgagaaatgcaagagtgacattaagaagatgagggaggagctggcggccagaagcagcaggaccaactgcccctgtaagtacagttttttggataaccacaagaagttgactcctcgacgcgatgttcccacttaccccaagtacctgctctctccagagaccatcgaggccctgcggaagccgacctttgacgtctggctttgggagcccaatgagatgctgagctgcctggagcacatgtaccacgacctcgggctggtcagggacttcagcatcaaccctgtcaccctcaggaggtggctgttctgcgtccacgacaactacagaaacaaccccttccacaacttccggcactgcttctgcgtggcccagatgatgtacagcatggtctggctctgcagtctccaggagaagttctcacaaacggatatcctgatcctaatgacagcggccatctgccacgatctggaccatcccggctacaacaacacgtaccagatcaatgcccgcacagagctggcggtccgctacaatgacatctcaccgctggagaaccaccactgcgccgtggccttccagatcctcgccgagcctgagtgcaacatcttctccaacatcccacctgatgggttcaagcagatccgacagggaatgatcacattaatcttggccactgacatggcaagacatgcagaaattatggattctttcaaagagaaaatggagaattttgactacagcaacgaggagcacatgaccctgctgaagatgattttgataaaatgctgtgatatctctaacgaggtccgtccaatggaagtcgcagagccttgggtggactgtttattagaggaatattttatgcagagcgaccgtgagaagtcagaaggccttcctgtggcaccgttcatggaccgagacaaagtgaccaaggccacagcccagattgggttcatcaagtttgtcctgatcccaatgtttgaaacagtgaccaagctcttccccatggttgaggagatcatgctgcagccactttgggaatcccgagatcgctacgaggagctgaagcggatagatgacgccatgaaagagttacagaagaagactgacagcttgacgtctggggccaccgagaagtccagagagagaagcagagatgtgaaaaacagtgaaggagactgtgcctgaggaaagcggggggcgtggctgcagttctggacgggctggccgagctgcgcgggatccttgtgcagggaagagctgccctgggcacctggcaccacaagaccatgttttctaagaaccattttgttcactgatacaaaaaaaaaaaaaggaattcatgatgctgtacagaattttatttttaaactgtcttttaaataatatattcttatacggaaa

SEQ ID NO: 15231 - DNA, 1728 bp, Homo sapiens
  source 1..1728: mol_type = unassigned DNA
acagtaaaaagtccgagtgcagccgccgggcgcaggatgggatccggctcctccagctaccggcccaaggccatctacctggacatcgatggacgcattcagaaggaacacgaccatctccctgctgaccaccgacgacgccatggtctccatcgaccccaccatgcccgcgaattcagaacgcactccgtacaaagtgagacctgtggccatcaagcaactctccgagcattcaaaatcaatgaactgaaagctgaagttgcaaatcacttggctgtcctagagaaacgcgtggaattggaaggactaaaagtggtggagattgagaaatgcaagagtgacattaagaagatgagggaggagctggcggccagaagcagcaggaccaactgcccctgtaagtacagttttttggataaccacaagaagttgactcctcgacgcgatgttcccacttaccccaagtacctgctctctccagagaccatcgaggccctgcggaagccgacctttgacgtctggctttgggagcccaatgagatgctgagctgcctggagcacatgtaccacgacctcgggctggtcagggacttcagcatcaaccctgtcaccctcaggaggtggctgttctgcgtccacgacaactacagaaacaaccccttccacaacttccggcactgcttctgcgtggcccagatgatgtacagcatggtctggctctgcagtctccaggagaagttctcacaaacggatatcctgatcctaatgacagcggccatctgccacgatctggaccatcccggctacaacaacacgtaccagatcaatgcccgcacagagctggcggtccgctacaatgacatctcaccgctggagaaccaccactgcgccgtggccttccagatcctcgccgagcctgagtgcaacatcttctccaacatcccacctgatgggttcaagcagatccgacagggaatgatcacattaatcttggccactgacatggcaagacatgcagaaattatggattctttcaaagagaaaatggagaattttgactacagcaacgaggagcacatgaccctgctgaagatgattttgataaaatgctgtgatatctctaacgaggtccgtccaatggaagtcgcagagccttgggtggactgtttattagaggaatattttatgcagagcgaccgtgagaagtcagaaggccttcctgtggcaccgttcatggaccgagacaaagtgaccaaggccacagcccagattgggttcatcaagtttgtcctgatcccaatgtttgaaacagtgaccaagctcttccccatggttgaggagatcatgctgcagccactttgggaatcccgagatcgctacgaggagctgaagcggatagatgacgccatgaaagagttacagaagaagactgacagcttgacgtctggggccaccgagaagtccagagagagaagcagagatgtgaaaaacagtgaaggagactgtgcctgaggaaagcggggggcgtggctgcagttctggacgggctggccgagctgcgcgggatccttgtgcagggaagagctgccctgggcacctggcaccacaagaccatgttttctaagaaccattttgttcactgatacaaaaaaaaaaaaaggaattcatgatgctgtacagaattttatttttaaactgtcttttaaataatatattcttatacggaaa

SEQ ID NO: 15232 - DNA, 1963 bp, Homo sapiens
  source 1..1963: mol_type = unassigned DNA
acagtaaaaagtccgagtgcagccgccgggcgcaggatgggatccggctcctccagctaccggcccaaggccatctacctggacatcgatggacgcattcagaaggaacacgaccatctccctgctgaccaccgacgacgccatggtctccatcgaccccaccatgcccgcgaattcagaacgcactccgtacaaagtgagacctgtggccatcaagcaactctccgctggtgtcgaggacaagagaaccacaagccgtggccagtctgctgagagaccactgagggacagacgggttgtgggcctggagcagccccggagggaaggagcatttgaaagtggacaggtagagcccaggcccagagagccccagggctgctaccaggaaggccagcgcatccctccagagagagaagaattaatccagagcgtgctggcgcaggttgcagagcagttctcaagagcattcaaaatcaatgaactgaaagctgaagttgcaaatcacttggctgtcctagagaaacgcgtggaattggaaggactaaaagtggtggagattgagaaatgcaagagtgacattaagaagatgagggaggagctggcggccagaagcagcaggaccaactgcccctgtaagtacagttttttggataaccacaagaagttgactcctcgacgcgatgttcccacttaccccaagtacctgctctctccagagaccatcgaggccctgcggaagccgacctttgacgtctggctttgggagcccaatgagatgctgagctgcctggagcacatgtaccacgacctcgggctggtcagggacttcagcatcaaccctgtcaccctcaggaggtggctgttctgcgtccacgacaactacagaaacaaccccttccacaacttccggcactgcttctgcgtggcccagatgatgtacagcatggtctggctctgcagtctccaggagaagttctcacaaacggatatcctgatcctaatgacagcggccatctgccacgatctggaccatcccggctacaacaacacgtaccagatcaatgcccgcacagagctggcggtccgctacaatgacatctcaccgctggagaaccaccactgcgccgtggccttccagatcctcgccgagcctgagtgcaacatcttctccaacatcccacctgatgggttcaagcagatccgacagggaatgatcacattaatcttggccactgacatggcaagacatgcagaaattatggattctttcaaagagaaaatggagaattttgactacagcaacgaggagcacatgaccctgctgaagatgattttgataaaatgctgtgatatctctaacgaggtccgtccaatggaagtcgcagagccttgggtggactgtttattagaggaatattttatgcagagcgaccgtgagaagtcagaaggccttcctgtggcaccgttcatggaccgagacaaagtgaccaaggccacagcccagattgggttcatcaagtttgtcctgatcccaatgtttgaaacagtgaccaagctcttccccatggttgaggagatcatgctgcagccactttgggaatcccgagatcgctacgaggagctgaagcggatagatgacgccatgaaagagttacagaagaagactgacagcttgacgtctggggccaccgagaagtccagagagagaagcagagatgtgaaaaacagtgaaggagactgtgcctgaggaaagcggggggcgtggctgcagttctggacgggctggccgagctgcgcgggatccttgtgcagggaagagctgccctgggcacctggcaccacaagaccatgttttctaagaaccattttgttcactgatacaaaaaaaaaaaaaggaattcatgatgctgtacagaattttatttttaaactgtcttttaaataatatattcttatacggaaa

SEQ ID NO: 15233 - DNA, 1908 bp, Homo sapiens
  source 1..1908: mol_type = unassigned DNA
acagtaaaaagtccgagtgcagccgccgggcgcaggatgggatccggctcctccagctaccggcccaaggccatctacctggacatcgatggacgcattcagaaggaacacgaccatctccctgctgaccaccgacgacgccatggtctccatcgaccccaccatgcccgcgaattcagaacgcactccgtacaaagtgagacctgtggccatcaagcaactctccgctggtgtcgaggacaagagaaccacaagccgtggccagtctgctgagagaccactgagggacagacgggttgtgggcctggagcagccccggagggaaggagcatttgaaagtggacaggtagagcccaggcccagagagccccagggctgctaccaggaaggccagcgcatccctccagagcattcaaaatcaatgaactgaaagctgaagttgcaaatcacttggctgtcctagagaaacgcgtggaattggaaggactaaaagtggtggagattgagaaatgcaagagtgacattaagaagatgagggaggagctggcggccagaagcagcaggaccaactgcccctgtaagtacagttttttggataaccacaagaagttgactcctcgacgcgatgttcccacttaccccaagtacctgctctctccagagaccatcgaggccctgcggaagccgacctttgacgtctggctttgggagcccaatgagatgctgagctgcctggagcacatgtaccacgacctcgggctggtcagggacttcagcatcaaccctgtcaccctcaggaggtggctgttctgcgtccacgacaactacagaaacaaccccttccacaacttccggcactgcttctgcgtggcccagatgatgtacagcatggtctggctctgcagtctccaggagaagttctcacaaacggatatcctgatcctaatgacagcggccatctgccacgatctggaccatcccggctacaacaacacgtaccagatcaatgcccgcacagagctggcggtccgctacaatgacatctcaccgctggagaaccaccactgcgccgtggccttccagatcctcgccgagcctgagtgcaacatcttctccaacatcccacctgatgggttcaagcagatccgacagggaatgatcacattaatcttggccactgacatggcaagacatgcagaaattatggattctttcaaagagaaaatggagaattttgactacagcaacgaggagcacatgaccctgctgaagatgattttgataaaatgctgtgatatctctaacgaggtccgtccaatggaagtcgcagagccttgggtggactgtttattagaggaatattttatgcagagcgaccgtgagaagtcagaaggccttcctgtggcaccgttcatggaccgagacaaagtgaccaaggccacagcccagattgggttcatcaagtttgtcctgatcccaatgtttgaaacagtgaccaagctcttccccatggttgaggagatcatgctgcagccactttgggaatcccgagatcgctacgaggagctgaagcggatagatgacgccatgaaagagttacagaagaagactgacagcttgacgtctggggccaccgagaagtccagagagagaagcagagatgtgaaaaacagtgaaggagactgtgcctgaggaaagcggggggcgtggctgcagttctggacgggctggccgagctgcgcgggatccttgtgcagggaagagctgccctgggcacctggcaccacaagaccatgttttctaagaaccattttgttcactgatacaaaaaaaaaaaaaggaattcatgatgctgtacagaattttatttttaaactgtcttttaaataatatattcttatacggaaa

SEQ ID NO: 15234 - DNA, 1684 bp, Homo sapiens
  source 1..1684: mol_type = unassigned DNA
acagtaaaaagtccgagtgcagccgccgggcgcaggatgggatccggctcctccagctaccggcccaaggccatctacctggacatcgatggacgcattcagaaggaacacgaccatctccctgctgaccaccgacgacgccatggtctccatcgaccccaccatgcccgcgaattcagaacgagcattcaaaatcaatgaactgaaagctgaagttgcaaatcacttggctgtcctagagaaacgcgtggaattggaaggactaaaagtggtggagattgagaaatgcaagagtgacattaagaagatgagggaggagctggcggccagaagcagcaggaccaactgcccctgtaagtacagttttttggataaccacaagaagttgactcctcgacgcgatgttcccacttaccccaagtacctgctctctccagagaccatcgaggccctgcggaagccgacctttgacgtctggctttgggagcccaatgagatgctgagctgcctggagcacatgtaccacgacctcgggctggtcagggacttcagcatcaaccctgtcaccctcaggaggtggctgttctgcgtccacgacaactacagaaacaaccccttccacaacttccggcactgcttctgcgtggcccagatgatgtacagcatggtctggctctgcagtctccaggagaagttctcacaaacggatatcctgatcctaatgacagcggccatctgccacgatctggaccatcccggctacaacaacacgtaccagatcaatgcccgcacagagctggcggtccgctacaatgacatctcaccgctggagaaccaccactgcgccgtggccttccagatcctcgccgagcctgagtgcaacatcttctccaacatcccacctgatgggttcaagcagatccgacagggaatgatcacattaatcttggccactgacatggcaagacatgcagaaattatggattctttcaaagagaaaatggagaattttgactacagcaacgaggagcacatgaccctgctgaagatgattttgataaaatgctgtgatatctctaacgaggtccgtccaatggaagtcgcagagccttgggtggactgtttattagaggaatattttatgcagagcgaccgtgagaagtcagaaggccttcctgtggcaccgttcatggaccgagacaaagtgaccaaggccacagcccagattgggttcatcaagtttgtcctgatcccaatgtttgaaacagtgaccaagctcttccccatggttgaggagatcatgctgcagccactttgggaatcccgagatcgctacgaggagctgaagcggatagatgacgccatgaaagagttacagaagaagactgacagcttgacgtctggggccaccgagaagtccagagagagaagcagagatgtgaaaaacagtgaaggagactgtgcctgaggaaagcggggggcgtggctgcagttctggacgggctggccgagctgcgcgggatccttgtgcagggaagagctgccctgggcacctggcaccacaagaccatgttttctaagaaccattttgttcactgatacaaaaaaaaaaaaaggaattcatgatgctgtacagaattttatttttaaactgtcttttaaataatatattcttatacggaaa

SEQ ID NO: 15235 - DNA, 1606 bp, Homo sapiens
  source 1..1606: mol_type = unassigned DNA
acagtaaaaagtccgagtgcagccgccgggcgcaggatgggatccggctcctccagctaccggcccaaggccatctacctggacatcgatggacgcattcagaagagcattcaaaatcaatgaactgaaagctgaagttgcaaatcacttggctgtcctagagaaacgcgtggaattggaaggactaaaagtggtggagattgagaaatgcaagagtgacattaagaagatgagggaggagctggcggccagaagcagcaggaccaactgcccctgtaagtacagttttttggataaccacaagaagttgactcctcgacgcgatgttcccacttaccccaagtacctgctctctccagagaccatcgaggccctgcggaagccgacctttgacgtctggctttgggagcccaatgagatgctgagctgcctggagcacatgtaccacgacctcgggctggtcagggacttcagcatcaaccctgtcaccctcaggaggtggctgttctgcgtccacgacaactacagaaacaaccccttccacaacttccggcactgcttctgcgtggcccagatgatgtacagcatggtctggctctgcagtctccaggagaagttctcacaaacggatatcctgatcctaatgacagcggccatctgccacgatctggaccatcccggctacaacaacacgtaccagatcaatgcccgcacagagctggcggtccgctacaatgacatctcaccgctggagaaccaccactgcgccgtggccttccagatcctcgccgagcctgagtgcaacatcttctccaacatcccacctgatgggttcaagcagatccgacagggaatgatcacattaatcttggccactgacatggcaagacatgcagaaattatggattctttcaaagagaaaatggagaattttgactacagcaacgaggagcacatgaccctgctgaagatgattttgataaaatgctgtgatatctctaacgaggtccgtccaatggaagtcgcagagccttgggtggactgtttattagaggaatattttatgcagagcgaccgtgagaagtcagaaggccttcctgtggcaccgttcatggaccgagacaaagtgaccaaggccacagcccagattgggttcatcaagtttgtcctgatcccaatgtttgaaacagtgaccaagctcttccccatggttgaggagatcatgctgcagccactttgggaatcccgagatcgctacgaggagctgaagcggatagatgacgccatgaaagagttacagaagaagactgacagcttgacgtctggggccaccgagaagtccagagagagaagcagagatgtgaaaaacagtgaaggagactgtgcctgaggaaagcggggggcgtggctgcagttctggacgggctggccgagctgcgcgggatccttgtgcagggaagagctgccctgggcacctggcaccacaagaccatgttttctaagaaccattttgttcactgatacaaaaaaaaaaaaaggaattcatgatgctgtacagaattttatttttaaactgtcttttaaataatatattcttatacggaaa

SEQ ID NO: 15236 - DNA, 1521 bp, Homo sapiens
  source 1..1521: mol_type = unassigned DNA
acagtaaaaagtccgagtgcagccgccgggcgcaggatgggatccggctcctccagctaccggcccaaggccatctacctggacatcgatggacgcattcagaagagcattcaaaatcaatgaactgaaagctgaagttgcaaatcacttggctgtcctagagaaacgcgtggaatgaccaactgcccctgtaagtacagttttttggataaccacaagaagttgactcctcgacgcgatgttcccacttaccccaagtacctgctctctccagagaccatcgaggccctgcggaagccgacctttgacgtctggctttgggagcccaatgagatgctgagctgcctggagcacatgtaccacgacctcgggctggtcagggacttcagcatcaaccctgtcaccctcaggaggtggctgttctgcgtccacgacaactacagaaacaaccccttccacaacttccggcactgcttctgcgtggcccagatgatgtacagcatggtctggctctgcagtctccaggagaagttctcacaaacggatatcctgatcctaatgacagcggccatctgccacgatctggaccatcccggctacaacaacacgtaccagatcaatgcccgcacagagctggcggtccgctacaatgacatctcaccgctggagaaccaccactgcgccgtggccttccagatcctcgccgagcctgagtgcaacatcttctccaacatcccacctgatgggttcaagcagatccgacagggaatgatcacattaatcttggccactgacatggcaagacatgcagaaattatggattctttcaaagagaaaatggagaattttgactacagcaacgaggagcacatgaccctgctgaagatgattttgataaaatgctgtgatatctctaacgaggtccgtccaatggaagtcgcagagccttgggtggactgtttattagaggaatattttatgcagagcgaccgtgagaagtcagaaggccttcctgtggcaccgttcatggaccgagacaaagtgaccaaggccacagcccagattgggttcatcaagtttgtcctgatcccaatgtttgaaacagtgaccaagctcttccccatggttgaggagatcatgctgcagccactttgggaatcccgagatcgctacgaggagctgaagcggatagatgacgccatgaaagagttacagaagaagactgacagcttgacgtctggggccaccgagaagtccagagagagaagcagagatgtgaaaaacagtgaaggagactgtgcctgaggaaagcggggggcgtggctgcagttctggacgggctggccgagctgcgcgggatccttgtgcagggaagagctgccctgggcacctggcaccacaagaccatgttttctaagaaccattttgttcactgatacaaaaaaaaaaaaaggaattcatgatgctgtacagaattttatttttaaactgtcttttaaataatatattcttatacggaaa

SEQ ID NO: 15237 - DNA, 1661 bp, Homo sapiens
  source 1..1661: mol_type = unassigned DNA
acagtaaaaagtccgagtgcagccgccgggcgcaggatgggatccggctcctccagctaccggcccaaggccatctacctggacatcgatggacgcattcagaagagagagaagaattaatccagagcgtgctggcgcaggttgcagagcagttctcaagagcattcaaaatcaatgaactgaaagctgaagttgcaaatcacttggctgtcctagagaaacgcgtggaattggaaggactaaaagtggtggagattgagaaatgcaagagtgacattaagaagatgagggaggagctggcggccagaagcagcaggaccaactgcccctgtaagtacagttttttggataaccacaagaagttgactcctcgacgcgatgttcccacttaccccaagtacctgctctctccagagaccatcgaggccctgcggaagccgacctttgacgtctggctttgggagcccaatgagatgctgagctgcctggagcacatgtaccacgacctcgggctggtcagggacttcagcatcaaccctgtcaccctcaggaggtggctgttctgcgtccacgacaactacagaaacaaccccttccacaacttccggcactgcttctgcgtggcccagatgatgtacagcatggtctggctctgcagtctccaggagaagttctcacaaacggatatcctgatcctaatgacagcggccatctgccacgatctggaccatcccggctacaacaacacgtaccagatcaatgcccgcacagagctggcggtccgctacaatgacatctcaccgctggagaaccaccactgcgccgtggccttccagatcctcgccgagcctgagtgcaacatcttctccaacatcccacctgatgggttcaagcagatccgacagggaatgatcacattaatcttggccactgacatggcaagacatgcagaaattatggattctttcaaagagaaaatggagaattttgactacagcaacgaggagcacatgaccctgctgaagatgattttgataaaatgctgtgatatctctaacgaggtccgtccaatggaagtcgcagagccttgggtggactgtttattagaggaatattttatgcagagcgaccgtgagaagtcagaaggccttcctgtggcaccgttcatggaccgagacaaagtgaccaaggccacagcccagattgggttcatcaagtttgtcctgatcccaatgtttgaaacagtgaccaagctcttccccatggttgaggagatcatgctgcagccactttgggaatcccgagatcgctacgaggagctgaagcggatagatgacgccatgaaagagttacagaagaagactgacagcttgacgtctggggccaccgagaagtccagagagagaagcagagatgtgaaaaacagtgaaggagactgtgcctgaggaaagcggggggcgtggctgcagttctggacgggctggccgagctgcgcgggatccttgtgcagggaagagctgccctgggcacctggcaccacaagaccatgttttctaagaaccattttgttcactgatacaaaaaaaaaaaaaggaattcatgatgctgtacagaattttatttttaaactgtcttttaaataatatattcttatacggaaa

SEQ ID NO: 15238 - DNA, 1616 bp, Homo sapiens
  source 1..1616: mol_type = unassigned DNA
ggatgggatccggctcctccagctaccggcccaaggccatctacctggacatcgatggacgcattcagaagcactccgtacaaagtgagacctgtggccatcaagcaactctccgagcattcaaaatcaatgaactgaaagctgaagttgcaaatcacttggctgtcctagagaaacgcgtggaattggaaggactaaaagtggtggagattgagaaatgcaagagtgacattaagaagatgagggaggagctggcggccagaagcagcaggaccaactgcccctgtaagtacagttttttggataaccacaagaagttgactcctcgacgcgatgttcccacttaccccaagtacctgctctctccagagaccatcgaggccctgcggaagccgacctttgacgtctggctttgggagcccaatgagatgctgagctgcctggagcacatgtaccacgacctcgggctggtcagggacttcagcatcaaccctgtcaccctcaggaggtggctgttctgcgtccacgacaactacagaaacaaccccttccacaacttccggcactgcttctgcgtggcccagatgatgtacagcatggtctggctctgcagtctccaggagaagttctcacaaacggatatcctgatcctaatgacagcggccatctgccacgatctggaccatcccggctacaacaacacgtaccagatcaatgcccgcacagagctggcggtccgctacaatgacatctcaccgctggagaaccaccactgcgccgtggccttccagatcctcgccgagcctgagtgcaacatcttctccaacatcccacctgatgggttcaagcagatccgacagggaatgatcacattaatcttggccactgacatggcaagacatgcagaaattatggattctttcaaagagaaaatggagaattttgactacagcaacgaggagcacatgaccctgctgaagatgattttgataaaatgctgtgatatctctaacgaggtccgtccaatggaagtcgcagagccttgggtggactgtttattagaggaatattttatgcagagcgaccgtgagaagtcagaaggccttcctgtggcaccgttcatggaccgagacaaagtgaccaaggccacagcccagattgggttcatcaagtttgtcctgatcccaatgtttgaaacagtgaccaagctcttccccatggttgaggagatcatgctgcagccactttgggaatcccgagatcgctacgaggagctgaagcggatagatgacgccatgaaagagttacagaagaagactgacagcttgacgtctggggccaccgagaagtccagagagagaagcagagatgtgaaaaacagtgaaggagactgtgcctgaggaaagcggggggcgtggctgcagttctggacgggctggccgagctgcgcgggatccttgtgcagggaagagctgccctgggcacctggcaccacaagaccatgttttctaagaaccattttgttcactgatacaaaaaaaaaaaaaggaattcatgatgctgtacagaattttatttttaaactgtcttttaaataatatattcttatacggaaa

SEQ ID NO: 15239 - DNA, 1671 bp, Homo sapiens
  source 1..1671: mol_type = unassigned DNA
ggatgggatccggctcctccagctaccggcccaaggccatctacctggacatcgatggacgcattcagaagcactccgtacaaagtgagacctgtggccatcaagcaactctccgagagagaagaattaatccagagcgtgctggcgcaggttgcagagcagttctcaagagcattcaaaatcaatgaactgaaagctgaagttgcaaatcacttggctgtcctagagaaacgcgtggaattggaaggactaaaagtggtggagattgagaaatgcaagagtgacattaagaagatgagggaggagctggcggccagaagcagcaggaccaactgcccctgtaagtacagttttttggataaccacaagaagttgactcctcgacgcgatgttcccacttaccccaagtacctgctctctccagagaccatcgaggccctgcggaagccgacctttgacgtctggctttgggagcccaatgagatgctgagctgcctggagcacatgtaccacgacctcgggctggtcagggacttcagcatcaaccctgtcaccctcaggaggtggctgttctgcgtccacgacaactacagaaacaaccccttccacaacttccggcactgcttctgcgtggcccagatgatgtacagcatggtctggctctgcagtctccaggagaagttctcacaaacggatatcctgatcctaatgacagcggccatctgccacgatctggaccatcccggctacaacaacacgtaccagatcaatgcccgcacagagctggcggtccgctacaatgacatctcaccgctggagaaccaccactgcgccgtggccttccagatcctcgccgagcctgagtgcaacatcttctccaacatcccacctgatgggttcaagcagatccgacagggaatgatcacattaatcttggccactgacatggcaagacatgcagaaattatggattctttcaaagagaaaatggagaattttgactacagcaacgaggagcacatgaccctgctgaagatgattttgataaaatgctgtgatatctctaacgaggtccgtccaatggaagtcgcagagccttgggtggactgtttattagaggaatattttatgcagagcgaccgtgagaagtcagaaggccttcctgtggcaccgttcatggaccgagacaaagtgaccaaggccacagcccagattgggttcatcaagtttgtcctgatcccaatgtttgaaacagtgaccaagctcttccccatggttgaggagatcatgctgcagccactttgggaatcccgagatcgctacgaggagctgaagcggatagatgacgccatgaaagagttacagaagaagactgacagcttgacgtctggggccaccgagaagtccagagagagaagcagagatgtgaaaaacagtgaaggagactgtgcctgaggaaagcggggggcgtggctgcagttctggacgggctggccgagctgcgcgggatccttgtgcagggaagagctgccctgggcacctggcaccacaagaccatgttttctaagaaccattttgttcactgatacaaaaaaaaaaaaaggaattcatgatgctgtacagaattttatttttaaactgtcttttaaataatatattcttatacggaaa

SEQ ID NO: 15240 - DNA, 803 bp, Homo sapiens
  source 1..803: mol_type = unassigned DNA
cttcagcaagtactgcaactccagcgacatcatggacctgttctgcatcgccaccggcctgcctcggaacacgaccatctccctgctgaccaccgacgacgccatggtctccatcgaccccaccatgcccgcgaattcagaacgcactccgtacaaagtgagacctgtggccatcaagcaactctccgagagagaagaattaatccagagcgtgctggcgcaggttgcagagcagttctcaagagcattcaaaatcaatgaactgaaagctgaagttgcaaatcacttggctgtcctagagaaacgcgtggaatgaccaactgcccctgtaagtacagttttttggataaccacaagaagttgactcctcgacgcgatgttcccacttaccccaagtacctgctctctccagagaccatcgaggccctgcggaagccgacctttgacgtctggctttgggagcccaatgagatgctgagctgcctggagcacatgtaccacgacctcgggctggtcagggacttcagcatcaaccctgtcaccctcaggaggtggctgttctgcgtccacgacaactacagaaacaaccccttccacaacttccggcactgcttctgcgtggcccagatgatgtacagcatggtctggctctgcagtctccaggagaagttctcacaaacggatatcctgatcctaatgacagcggccatctgccacgatctggaccatcccggctacaacaacacgtaccagatcaatgcccgcacagagctggcggtccgctacaatgacatctcaccgct

SEQ ID NO: 15241 - DNA, 1663 bp, Homo sapiens
  source 1..1663: mol_type = unassigned DNA
tgctttttatagctggtgtcgaggacaagagaaccacaagccgtggccagtctgctgagagaccactgagggacagacgggttgtgggcctggagcagccccggagggaaggagcatttgaaagtggacaggtagagcccaggcccagagagccccagggctgctaccaggaaggccagcgcatccctccagagagagaagaattaatccagagcgtgctggcgcaggttgcagagcagttctcaagagcattcaaaatcaatgaactgaaagctgaagttgcaaatcacttggctgtcctagagaaacgcgtggaatgaccaactgcccctgtaagtacagttttttggataaccacaagaagttgactcctcgacgcgatgttcccacttaccccaagtacctgctctctccagagaccatcgaggccctgcggaagccgacctttgacgtctggctttgggagcccaatgagatgctgagctgcctggagcacatgtaccacgacctcgggctggtcagggacttcagcatcaaccctgtcaccctcaggaggtggctgttctgcgtccacgacaactacagaaacaaccccttccacaacttccggcactgcttctgcgtggcccagatgatgtacagcatggtctggctctgcagtctccaggagaagttctcacaaacggatatcctgatcctaatgacagcggccatctgccacgatctggaccatcccggctacaacaacacgtaccagatcaatgcccgcacagagctggcggtccgctacaatgacatctcaccgctggagaaccaccactgcgccgtggccttccagatcctcgccgagcctgagtgcaacatcttctccaacatcccacctgatgggttcaagcagatccgacagggaatgatcacattaatcttggccactgacatggcaagacatgcagaaattatggattctttcaaagagaaaatggagaattttgactacagcaacgaggagcacatgaccctgctgaagatgattttgataaaatgctgtgatatctctaacgaggtccgtccaatggaagtcgcagagccttgggtggactgtttattagaggaatattttatgcagagcgaccgtgagaagtcagaaggccttcctgtggcaccgttcatggaccgagacaaagtgaccaaggccacagcccagattgggttcatcaagtttgtcctgatcccaatgtttgaaacagtgaccaagctcttccccatggttgaggagatcatgctgcagccactttgggaatcccgagatcgctacgaggagctgaagcggatagatgacgccatgaaagagttacagaagaagactgacagcttgacgtctggggccaccgagaagtccagagagagaagcagagatgtgaaaaacagtgaaggagactgtgcctgaggaaagcggggggcgtggctgcagttctggacgggctggccgagctgcgcgggatccttgtgcagggaagagctgccctgggcacctggcaccacaagaccatgttttctaagaaccattttgttcactgatacaaaaaaaaaaaaaggaattcatgatgctgtacagaattttatttttaaactgtcttttaaataatatattcttatacggaaa

SEQ ID NO: 15242 - DNA, 3412 bp, Homo sapiens
  source 1..3412: mol_type = unassigned DNA
ctgccgccacatgcgggaactgctggctccctcgtgcccgcccggggctgaggactgcacgtgcagccacagatgcatccggccctcctgccccacagcctctatgaaggccacataaatggcaccaagtgtctctgtctgccgatcagcatcccctcttggcttcacagcagacgcatctgcctttcaggactgccttgaacaacatctgggctggtcaggtggagagcgaggagtttccaggttgcagcccctatggtcctgagggctggcgtccaggatggtgggggtccagcagctctgggcagcgaggcccctggctgggtgatccaggtggcagctgaccagtggcctgggagccagccctcctgtcctcacgtggggccccatctccaaaagccagtgcagtgccctgcacattatccaacctacatctgtactgtctccccaaggaaaacgagtgtgtggttcacgtgctttaaggacgtttcccaggtgacattccaagctcccatctgtggccgcaagtgggggagtttccagttttccagatagattttctgccatgccagagaaccctccgcctccttcagagccatctcatcaatgcagtgatcgcaagcttcgatttacaaaaactcgcctcccttgcagcatttccaggtttcacacacagcgtaacaagtaaaaatggatttttgggcagcacgcctgtcctagtttgctgaggctgccataacaaagtaccagagactggggtggcgtcagcagcaaaagttgattcctcagttctggagctggaagtccaggatcaaggtgctgccaggttcggcttctccggaggcctcggtccctggtctgggaccttcttgctggggcctcggtccctggtgtgggaccttcttgctgggacctcggtccctggtgtgggaccttcttcctggccagcaagatggccgccttcttgctgggtcctcatgtggcctgttctctcggcacatgcatcccaggtgctcttcctcctctaatgaagacactagtcccatgggaccaaggcctcaccctgactagatggaaacttcattacctccgtaaaggccccgtctccaaatagccccactggggtcggggctttaccatgttgacctggggaagggggcagttcagttcgtaacatgcccttttgggaggagaaagtcaggcaatgagcagacacaggcaggaagccacgccgggctccagcagggatggcccagtgccctgtacaggcagcaggcagctgggctggaggtgggccctgggtggaggacacctaccaggtgtgtctaaactgcccctttcctacacatcttccttcgcactgggctcgccacccaagacctgctttttccagaaagcaaagcctactttggtcaaactctcatttttaaaaatcacttcatcttttcctccctaacttaattagctccaaagcactgagctgtattgaaatagatcaccacaatgacaatcctctttgggactgaaaacaaaatctatttcaacttgaacagggatattgatagaagacagggctccatgaaaaagggttaggaggagccgcttgctggggcaggggccgcatctgggcactgcagttaagatgttaaagtgtcttcggtcccagggggccgcagatgaacacagttcagcgtttctggatgtaaatcgtcaaagctccttcgatccccagcctcgggcaaggaaagggcctttctctctgtgatgccacctgtgctcaggtgtgcactggatggaactgtgtcctagacccctcagctgtgatattgatccgctgagattgtttttcatctgtagaaatcaataaattcctttttggtgcagtgttttgtgaacgggtgcactctctcacccggtcgctgtcctaagaattctccttgacttcggaactggccctccacgccccaggatccacctgccaggagacccccagtgtgctctcaaacccccacccatctgagtggcctggaaaggctggtctgaagacctctcttcccatgtctgccgaccaggctttgctctccagggactttctgggagggggagaacccacctcctgccaacggccctgctggcactccgaggacagcagagggaaggaagccaggggctggggagccggccacacaactgcccagtgcctatccttctcctgtgcccacagatgctgagctgcctggagcacatgtaccacgacctcgggctggtcagggacttcagcatcaaccctgtcaccctcaggaggtggctgttctgcgtccacgacaactacagaaacaaccccttccacaacttccggcactgcttctgcgtggcccagatgatgtacagcatggtctggctctgcagtctccaggagaagttctcacaaacggatatcctgatcctaatgacagcggccatctgccacgatctggaccatcccggctacaacaacacgtaccagatcaatgcccgcacagagctggcggtccgctacaatgacatctcaccgctggagaaccaccactgcgccgtggccttccagatcctcgccgagcctgagtgcaacatcttctccaacatcccacctgatgggttcaagcagatccgacagggaatgatcacattaatcttggccactgacatggcaagacatgcagaaattatggattctttcaaagagaaaatggagaattttgactacagcaacgaggagcacatgaccctgctgaagatgattttgataaaatgctgtgatatctctaacgaggtccgtccaatggaagtcgcagagccttgggtggactgtttattagaggaatattttatgcagagcgaccgtgagaagtcagaaggccttcctgtggcaccgttcatggaccgagacaaagtgaccaaggccacagcccagattgggttcatcaagtttgtcctgatcccaatgtttgaaacagtgaccaagctcttccccatggttgaggagatcatgctgcagccactttgggaatcccgagatcgctacgaggagctgaagcggatagatgacgccatgaaagagttacagaagaagactgacagcttgacgtctggggccaccgagaagtccagagagagaagcagagatgtgaaaaacagtgaaggagactgtgcctgaggaaagcggggggcgtggctgcagttctggacgggctggccgagctgcgcgggatccttgtgcagggaagagctgccctgggcacctggcaccacaagaccatgttttctaagaaccattttgttcactgatacaaaaaaaaaaaaaggaattcatgatgctgtacagaattttatttttaaactgtcttttaaataatatattcttatacggaaa

SEQ ID NO: 15243 - DNA, 365 bp, Homo sapiens
  source 1..365: mol_type = unassigned DNA
ctgatgggttcaagcagatccgacagggaatgatcacattaatcttggccactgacatggcaagacatgcagaaattatggattctttcaaagagaaaatggagaattttgactacagcaacgaggagcacatgaccctgctgaagatgattttgataaaatgctgtgatatctctaacgaggtccgtccaatggaagtcgcagagccttgggtggactgtttattagaggaatattttatgcaggtaagagtcttgcagagcaatcaagcctccagccactcttattagccccacttagtaagggtttgcgttaaacgagcacgcctgggtggtcccgcatattccccgggctgccgacagttc

SEQ ID NO: 15244 - DNA, 715 bp, Homo sapiens
  source 1..715: mol_type = unassigned DNA
tgcggcgcgcggcggcggctcccgggcgtcccgggcccggtggcggcgcggctgtggttggctgagcgccgcgggccgccccccgcccgccccctcccctgctcccctcccccgcctcccgcggcggctggcgtcgggaaagtacagtaaaaagtccgagtgcagccgccgggcgcaggatgggatccggctcctccagctaccggcccaaggccatctacctggacatcgatggacgcattcagaaggcatacagcgagcgccttgcagagtctcacagcggcactgtcttctcttttgcagcactccgtacaaagtgagacctgtggccatcaagcaactctccgagagagaagaattaatccagagcgtgctggcgcaggttgcagagcagttctcaagagcattcaaaatcaatgaactgaaagctgaagttgcaaatcacttggctgtcctagagaaacgcgtggaattggaaggactaaaagtggtggagattgagaaatgcaagagtgacattaagaagatgagggaggagctggcggccagaagcagcaggaccaactgcccctgtaagtacagttttttggataaccacaagaagttgactcctcgacgcgatgttcccacttaccccaagtacctgctctctccagagaccatcgaggccctgcggaagccgacctttgacgtctggctttgggagcccaatgag

SEQ ID NO: 15245 - DNA, 431 bp, Homo sapiens
  source 1..431: mol_type = unassigned DNA
gcctcccgcggcggctggcgtcgggaaagtacagtaaaaagtccgagtgcagccgccgggcgcaggatgggatccggctcctccagctaccggcccaaggccatctacctggacatcgatggacgcattcagaaggtaatcttcagcaagtactgcaactccagcgacatcatggacctgttctgcatcgccaccggcctgcctcggaacacgaccatctccctgctgaccaccgacgacgccatggtctccatcgaccccaccatgcccgcgaattcagaacggaatgagctcattctctatacatcactccgtaacttgttgtttttacctagtaaggagtcatgggcgtcccaccagcactccgtacaaagtgagacctgtggccatcaagcaactctccggtaaggccctgctgtcgttttttaaac

SEQ ID NO: 15246 - DNA, 4165 bp, Homo sapiens
  source 1..4165: mol_type = unassigned DNA
gcccggagagccgcatctattggcagctttgttattgatcagaaactgctcgccgccgacttggcttccagtctggctgcgggcaacccttgagttttcgcctctgtcctgtcccccgaactgacaggtgctcccagcaacttgctggggacttctcgccgctcccccgcgtccccaccccctcattcctccctcgccttcacccccacccccaccacttcgccacagctcaggatttgtttaaaccttgggaaactggttcaggtccaggttttgctttgatccttttcaaaaactggagacacagaagagggctctaggaaaaagttttggatgggattatgtggaaactaccctgcgattctctgctgccagagcaggctcggcgcttccaccccagtgcagccttcccctggcggtggtgaaagagactcgggagtcgctgcttccaaagtgcccgccgtgagtgagctctcaccccagtcagccaaatgagcctcttcgggcttctcctgctgacatctgccctggccggccagagacaggggactcaggcggaatccaacctgagtagtaaattccagttttccagcaacaaggaacagaacggagtacaagatcctcagcatgagagaattattactgtgtctactaatggaagtattcacagcccaaggtttcctcatacttatccaagaaatacggtcttggtatggagattagtagcagtagaggaaaatgtatggatacaacttacgtttgatgaaagatttgggcttgaagacccagaagatgacatatgcaagtatgattttgtagaagttgaggaacccagtgatggaactatattagggcgctggtgtggttctggtactgtaccaggaaaacagatttctaaaggaaatcaaattaggataagatttgtatctgatgaatattttccttctgaaccagggttctgcatccactacaacattgtcatgccacaattcacagaagctgtgagtccttcagtgctacccccttcagctttgccactggacctgcttaataatgctataactgcctttagtaccttggaagaccttattcgatatcttgaaccagagagatggcagttggacttagaagatctatataggccaacttggcaacttcttggcaaggcttttgtttttggaagaaaatccagagtggtggatctgaaccttctaacagaggaggtaagattatacagctgcacacctcgtaacttctcagtgtccataagggaagaactaaagagaaccgataccattttctggccaggttgtctcctggttaaacgctgtggtgggaactgtgcctgttgtctccacaattgcaatgaatgtcaatgtgtcccaagcaaagttactaaaaaataccacgaggtccttcagttgagaccaaagaccggtgtcaggggattgcacaaatcactcaccgacgtggccctggagcaccatgaggagtgtgactgtgtgtgcagagggagcacaggaggatagccgcatcaccaccagcagctcttgcccagagctgtgcagtgcagtggctgattctattagagaacgtatgcgttatctccatccttaatctcagttgtttgcttcaaggacctttcatcttcaggatttacagtgcattctgaaagaggagacatcaaacagaattaggagttgtgcaacagctcttttgagaggaggcctaaaggacaggagaaaaggtcttcaatcgtggaaagaaaattaaatgttgtattaaatagatcaccagctagtttcagagttaccatgtacgtattccactagctgggttctgtatttcagttctttcgatacggcttagggtaatgtcagtacaggaaaaaaactgtgcaagtgagcacctgattccgttgccttgcttaactctaaagctccatgtcctgggcctaaaatcgtataaaatctggatttttttttttttttttgctcatattcacatatgtaaaccagaacattctatgtactacaaacctggtttttaaaaaggaactatgttgctatgaattaaacttgtgtcgtgctgataggacagactggatttttcatatttcttattaaaatttctgccatttagaagaagagaactacattcatggtttggaagagataaacctgaaaagaagagtggccttatcttcactttatcgataagtcagtttatttgtttcattgtgtacatttttatattctccttttgacattataactgttggcttttctaatcttgttaaatatatctatttttaccaaaggtatttaatattcttttttatgacaacttagatcaactatttttagcttggtaaatttttctaaacacaattgttatagccagaggaacaaagatgatataaaatattgttgctctgacaaaaatacatgtatttcattctcgtatggtgctagagttagattaatctgcattttaaaaaactgaattggaatagaattggtaagttgcaaagactttttgaaaataattaaattatcatatcttccattcctgttattggagatgaaaataaaaagcaacttatgaaagtagacattcagatccagccattactaacctattccttttttggggaaatctgagcctagctcagaaaaacataaagcaccttgaaaaagacttggcagcttcctgataaagcgtgctgtgctgtgcagtaggaacacatcctatttattgtgatgttgtggttttattatcttaaactctgttccatacacttgtataaatacatggatatttttatgtacagaagtatgtctcttaaccagttcacttattgtactctggcaatttaaaagaaaatcagtaaaatattttgcttgtaaaatgcttaatatcgtgcctaggttatgtggtgactatttgaatcaaaaatgtattgaatcatcaaataaaagaatgtggctattttggggagaaaattatgtgtgtgtgtgctcaagatttatttcttggactctgagaaaatgaaagataaaattttctgttatgattttcatttagcaaaagcatatgtcaattcaaaagacaaaaaaagggaagatacctgtgagccttctctgcctcttgtttccaatgcctttgagcaatggttttatttttcttactggtcttaatacagatttctggtaatttaagtttcacctgacttgaaagttgtatggtttatgaaatgcttggtgataggtggtatggtagtatgaaactggaaaaaaacttgcaggtttccactcatgtcttcattgtcactggcaactactaaatggggtgagcataaattgatttggtgcatggattattgtacattgcacacttcaagatatggttcctcagttccagacatagattcctattcagggctggtatcttcagcatcctttcctcagcctttcaacttggcagagatgtctagtgtccagggccttctgtcttcagactgctcttcaggcaagcacccttttcctgtgctttgacacctgcagttctgccctgcctccaactatgtggaaaacaaagaaacaaaatgagcctatgtgttctgtcttacttccttaccttttcctggttttgtcctatccatatagaggccaactagatatatggaatatgcaacgtagtaagtagttggcagtttacaactttcattagtatagtaaagactactaagtcttagtaaatagcctgtttaactgtgtttaatccattgtttcccatctttgaacgaaatatattttcccttttttaatatttattttttgtttacttataaaatcttgacagccagaagagatcataagggtagcagtcctcagttgccagtcggtgagtggttaccatgtgaggactaaccactttataatcacttactcatagatcgtcctgtgtattttactaaacacacacacacacacacacacacataaatagcacatgaccctaatttctgagaagtacagtaagtattgactgtattgaccacacaccgttttgtgtatgatatctgtttcaagcctttgtccttgagacatgggctgttttgcccagtgatgtttactaaaataaaagcaagccttaaatgtca

SEQ ID NO: 15247 - DNA, 2987 bp, Homo sapiens
  source 1..2987: mol_type = unassigned DNA
cgggcaacccttgagttttcgcctctgtcctgtcccccgaactgacaggtgctcccagcaacttgctggggacttctcgccgctcccccgcgtccccaccccctcattcctccctcgccttcacccccacccccaccacttcgccacagctcaggatttgtttaaaccttgggaaactggttcaggtccaggttttgctttgatccttttcaaaaactggagacacagaagagggctctaggaaaaagttttggatgggattatgtggaaactaccctgcgattctctgctgccagagcaggctcggcgcttccaccccagtgcagccttcccctggcggtggtgaaagagactcgggagtcgctgcttccaaagtgcccgccgtgagtgagctctcaccccagtcagccaaatgagcctcttcgggcttctcctgctgacatctgccctggccggccagagacaggggactcaggcggaatccaacctgagtagtaaattccagttttccagcaacaaggaacagaacggtaggaactatatccaagcatctggactggcatagaaaagaggagaaagaacatttaaaaggagtacaagatcctcagcatgagagaattattactgtgtctactaatggaagtattcacagcccaaggtttcctcatacttatccaagaaatacggtcttggtatggagattagtagcagtagaggaaaatgtatggatacaacttacgtttgatgaaagatttgggcttgaagacccagaagatgacatatgcaagtatgattttgtagaagttgaggaacccagtgatggaactatattagggcgctggtgtggttctggtactgtaccaggaaaacagatttctaaaggaaatcaaattaggataagatttgtatctgatgaatattttccttctgaaccagggttctgcatccactacaacattgtcatgccacaattcacagaagctgtgagtccttcagtgctacccccttcagctttgccactggacctgcttaataatgctataactgcctttagtaccttggaagaccttattcgatatcttgaaccagagagatggcagttggacttagaagatctatataggccaacttggcaacttcttggcaaggcttttgtttttggaagaaaatccagagtggtggatctgaaccttctaacagaggaggtaagattatacagctgcacacctcgtaacttctcagtgtccataagggaagaactaaagagaaccgataccattttctggccaggttgtctcctggttaaacgctgtggtgggaactgtgcctgttgtctccacaattgcaatgaatgtcaatgtgtcccaagcaaagttactaaaaaataccacgaggtccttcagttgagaccaaagaccggtgtcaggggattgcacaaatcactcaccgacgtggccctggagcaccatgaggagtgtgactgtgtgtgcagagggagcacaggaggatagccgcatcaccaccagcagctcttgcccagagctgtgcagtgcagtggctgattctattagagaacgtatgcgttatctccatccttaatctcagttgtttgcttcaaggacctttcatcttcaggatttacagtgcattctgaaagaggagacatcaaacagaattaggagttgtgcaacagctcttttgagaggaggcctaaaggacaggagaaaaggtcttcaatcgtggaaagaaaattaaatgttgtattaaatagatcaccagctagtttcagagttaccatgtacgtattccactagctgggttctgtatttcagttctttcgatacggcttagggtaatgtcagtacaggaaaaaaactgtgcaagtgagcacctgattccgttgccttgcttaactctaaagctccatgtcctgggcctaaaatcgtataaaatctggatttttttttttttttttgctcatattcacatatgtaaaccagaacattctatgtactacaaacctggtttttaaaaaggaactatgttgctatgaattaaacttgtgtcgtgctgataggacagactggatttttcatatttcttattaaaatttctgccatttagaagaagagaactacattcatggtttggaagagataaacctgaaaagaagagtggccttatcttcactttatcgataagtcagtttatttgtttcattgtgtacatttttatattctccttttgacattataactgttggcttttctaatcttgttaaatatatctatttttaccaaaggtatttaatattcttttttatgacaacttagatcaactatttttagcttggtaaatttttctaaacacaattgttatagccagaggaacaaagatgatataaaatattgttgctctgacaaaaatacatgtatttcattctcgtatggtgctagagttagattaatctgcattttaaaaaactgaattggaatagaattggtaagttgcaaagactttttgaaaataattaaattatcatatcttccattcctgttattggagatgaaaataaaaagcaacttatgaaagtagacattcagatccagccattactaacctattccttttttggggaaatctgagcctagctcagaaaaacataaagcaccttgaaaaagacttggcagcttcctgataaagcgtgctgtgctgtgcagtaggaacacatcctatttattgtgatgttgtggttttattatcttaaactctgttccatacacttgtataaatacatggatatttttatgtacagaagtatgtctcttaaccagttcacttattgtactctggcaatttaaaagaaaatcagtaaaatattttgcttgtaaaatgcttaatatcgtgcctaggttatgtggtgactatttgaatcaaaaatgtattgaatcatcaaataaaagaatgtggctattttggggagaaaa

SEQ ID NO: 15248 - DNA, 786 bp, Homo sapiens
  source 1..786: mol_type = unassigned DNA
ttcttgcccatctcatctgtgtgaaaaagtatccttttttccaattcacagaagctgtgagtccttcagtgctacccccttcagctttgccactggacctgcttaataatgctataactgcctttagtaccttggaagaccttattcgatatcttgaaccagagagatggcagttggacttagaagatctatataggccaacttggcaacttcttggcaaggcttttgtttttggaagaaaatccagagtggtggatctgaaccttctaacagaggaggttgtctcctggttaaacgctgtggtgggaactgtgcctgttgtctccacaattgcaatgaatgtcaatgtgtcccaagcaaagttactaaaaaataccacgaggtccttcagttgagaccaaagaccggtgtcaggggattgcacaaatcactcaccgacgtggccctggagcaccatgaggagtgtgactgtgtgtgcagagggagcacaggaggatagccgcatcaccaccagcagctcttgcccagagctgtgcagtgcagtggctgattctattagagaacgtatgcgttatctccatccttaatctcagttgtttgcttcaaggacctttcatcttcaggatttacagtgcattctgaaagaggagacatcaaacagaattaggagttgtgcaacagctcttttgagaggaggcctaaaggacaggagaaaaggtcttcaatcgtggaaagaaaattaaatgttgtattaaatagatcaccagctagtttcagagttaccat

SEQ ID NO: 15249 - DNA, 1014 bp, Homo sapiens
  source 1..1014: mol_type = unassigned DNA
ttacgtttgatgaaagatttgggcttgaagacccagaagatgacatatgcaagtatgattttgtagaagttgaggaacccagtgatggaactatattagggcgctggtgtggttctgggttctgcatccactacaacattgtcatgccaaacctcccgtgagttgttcctggcaggcatttgtgtctgcatgccctgtctgctgcttaggctctttaaaagatttgtgtgatacttgtttggttacttgtgtgattcataatagcagattctcgttttggcaagagaaaactctcttctatgatgcagtatacttggcttctcacaaagcaattcacagaagctgtgagtccttcagtgctacccccttcagctttgccactggacctgcttaataatgctataactgcctttagtaccttggaagaccttattcgatatcttgaaccagagagatggcagttggacttagaagatctatataggccaacttggcaacttcttggcaaggcttttgtttttggaagaaaatccagagtggtggatctgaaccttctaacagaggaggtaagattatacagctgcacacctcgtaacttctcagtgtccataagggaagaactaaagagaaccgataccattttctggccaggttgtctcctggttaaacgctgtggtgggaactgtgcctgttgtctccacaattgcaatgaatgtcaatgtgtcccaagcaaagttactaaaaaataccacgaggtccttcagttgagaccaaagaccggtgtcaggggattgcacaaatcactcaccgacgtggccctggagcaccatgaggagtgtgactgtgtgtgcagagggagcacaggaggatagccgcatcaccaccagcagctcttgcccagagctgtgcagtgcagtggctgattctattagagaacgtatgcgttatctccatccttaatctcagttgtttgcttcaaggacctttcatcttcaggatttacagtgcattctg

SEQ ID NO: 15250 - DNA, 849 bp, Homo sapiens
  source 1..849: mol_type = unassigned DNA
atgagcctcttcgggcttctcctgctgacatctgccctggccggccagagacaggggactcaggcggaatccaacctgagtagtaaattccagttttccagcaacaaggaacagaacggagtacaagatcctcagcatgagagaattattactgtgtctactaatggaagtattcacagcccaaggtttcctcatacttatccaagaaatacggtcttggtatggagattagtagcagtagaggaaaatgtatggatacaacttacgtttgatgaaagatttgggcttgaagacccagaagatgacatatgcaagtatgattttgtagaagttgaggaacccagtgatggaactatattagggcgctggtgtggttctggtactgtaccaggaaaacagatttctaaaggaaatcaaattaggataagatttgtatctgatgaatattttccttctgaaccagggttctgcatccactacaacattgtcatgccacaattcacagaagctgtgagtccttcagtgctacccccttcagctttgccactggacctgcttaataatgctataactgcctttagtaccttggaagaccttattcgatatcttgaaccagagagatggcagttggacttagaagatctatataggccaacttggcaacttcttggcaaggcttttgtttttggaagaaaatccagagtggtggatctgaaccttctaacagaggaggtccttcagttgagaccaaagaccggtgtcaggggattgcacaaatcactcaccgacgtggccctggagcaccatgaggagtgtgactgtgtgtgcagagggagcacaggaggatag

SEQ ID NO: 15251 - DNA, 524 bp, Homo sapiens
  source 1..524: mol_type = unassigned DNA
caagccaagtgctcacagagcagcccacagagggctgtgggacagtgatgaccctgttgtgccaggtttcatggatgaattggatttttgaaaaggtcattgtaatgcaattcacagaagctgtgagtccttcagtgctacccccttcagctttgccactggacctgcttaataatgctataactgcctttagtaccttggaagaccttattcgatatcttgaaccagagagatggcagttggacttagaagatctatataggccaacttggcaacttcttggcaaggcttttgtttttggaagaaaatccagagtggtggatctgaaccttctaacagaggaggtaagattatacagctgcacacctcgtaacttctcagtgtccataagggaagaactaaagagaaccgataccattttctggccaggttgtctcctggttaaacgctgtggtgggaactgtgcctgttgtctccacaattgcaatgaatgtcaatgtgtcccaagcaaagttactaaaaaa

SEQ ID NO: 15252 - DNA, 725 bp, Homo sapiens
  source 1..725: mol_type = unassigned DNA
tgaatattttccttctgaaccagggttctgcatccactacaacattgtcatgccacaattcacagaagctgtgagtccttcagtgctacccccttcagctttgccactggacctgcttaataatgctataactgcctttagtaccttggaagaccttattcgatatcttgaaccagagagatggcagttggacttagaagatctatataggccaacttggcaacttcttggcaaggcttttgtttttggaagaaaatccagaggagataattatgaaaaggaaaaaaatctgaagaccaacttttacaaatatttggcagagggaaacttctttaatattattatagttaagctattcaaaaagtatcctttggtacattatctttctttcttcttttcctttttctctttatttgccttccccccccaaaagtactatacaatgtttcaagaatgtatgacatatgacttaacttaatgaagcttatatgcgtttgaagccttagcagtaggcagcataaatttcaaaatgaaatgccaaatttaaaatccttagttatatttttagaaaactgtggactgcataaatgctttacttttttttctttcactttcttcctctagttcagggttttcattcataccttgctactgctacaaaaaaatactgtattttctaagtcaagcttaactagtacgtaaaaagggcttttgacttttgtgtc

SEQ ID NO: 15253 - DNA, 522 bp, Homo sapiens
  source 1..522: mol_type = unassigned DNA
gcaggaaagacttgatagcttcagacaatttagtgagtaagggaacgatcttttggaggactgggatgtaggaactatatccaagcatctggactggcatagaaaagaggagaaagaacatttaaaaggagtacaagatcctcagcatgagagaattattactgtgtctactaatggaagtattcacagcccaaggtttcctcatacttatccaagaaatacggtcttggtatggagattagtagcagtagaggaaaatgtatggatacaacttacgtttgatgaaagatttgggcttgaagacccagaagatgacatatgcaagttatcagtacaccgaggtttatgttcctgttcccagtaattaaaatcccacaggagactctgaggagagaagattgttcttcatgcatcaagcaattcacagaagctgtgagtccttcagtgctacccccttcagctttgccactggacctgcttaataatgctataactgcctttagtaccttggaagaccttatt

SEQ ID NO: 15254 - DNA, 597 bp, Homo sapiens
  source 1..597: mol_type = unassigned DNA
gactcgggagtcgctgcttccaaagtgcccgccgtgagtgagctctcaccccagtcagccaaatgagcctcttcgggcttctcctgctgacatctgccctggccggccagagacaggggactcaggcggaatccaacctgagtagtaaattccagttttccagcaacaaggaacagaacgatgagaatgcctattgtggaatgattaagttctgggacggtgcttctgagttgtagcagaaagaatcatacacccaggaacaaaacaaaacctactttgtctgttgcatacagcacaaagagatgtcaatgacaaagttgttggtggaggaatgcctcttctacctgtgttgttggtgagtgatttttagtttactcatagattaagagcatgcgtatcatttttttctcattttctttagccattctgaattttgatttggaatatgccgctcttcgctacggttggtcttattaacatcagttattgtatgtgttctttttctcaagggcttttgtggcatgtggggcaatttactttggtctgctggtcgtgcccttttgccggtatcttgtgtttatggattttccatctctt

SEQ ID NO: 15255 - DNA, 620 bp, Homo sapiens
  source 1..620: mol_type = unassigned DNA
atctttgaggccgtaggagcccagggaacagtggtcctcgatgaggagtcgctccatgtggatgatctggatctcttcgacggggactctggactccgcttcgcagaggaccttgaagtttcggagctcaaagtcggggctgacctggagagagaaggtgacctcggagaggtccctccgcacgcagtacacgagagcaatcacctcacagacttgtaccgaagagatgagaccatccaggtgaaaggaaacggctacgtgcagagtcctagattcccgaacagctaccccaggaacctgctcctgacatggcggcttcactctcaggagaatacacggatacagctagtgtttgacaatcagtttggattagaggaagcagaaaatgatatctgtaggtatgattttgtggaagttgaagatatatccgaaaccagtaccattattagaggacgatggtgtggacacaaggaagttcctccaaggataaaatcaagaacgaaccaaattaaaatcacattcaagtccgatgactactttgtggctaaacctggattcaagatttattattctttgctggaagatttccaacccgcagcagcttcagagaccaactggga

SEQ ID NO: 15256 - DNA, 4052 bp, Homo sapiens
  source 1..4052: mol_type = unassigned DNA
ggcagagcaggtttaggcccggcctgggaaactggggagctgaggtgctcgcgccgccgctctgagcccgagtgcgcgcctctcaggggccgcggccggggctggagaacgctgctgctccgctcgcctgccccgctagattcggcgctgcccgccccctgcagcctgtgctgcagctgccggccaccggagggggcgaacaaacaaacgtcaacctgttgtttgtcccgtcaccatttatcagctcagcaccacaaggaagtgcggcacccacacgcgctcggaaagttcagcatgcaggaagtttggggagagctcggcgattagcacagcgacccgggccagcgcagggcgagcgcaggcggcgagagcgcagggcggcgcggcgtcggtcccgggagcagaacccggctttttcttggagcgacgctgtctctagtcgctgatcccaaatgcaccggctcatctttgtctacactctaatctgcgcaaacttttgcagctgtcgggacacttctgcaaccccgcagagcgcatccatcaaagctttgcgcaacgccaacctcaggcgagatgacttgtaccgaagagatgagaccatccaggtgaaaggaaacggctacgtgcagagtcctagattcccgaacagctaccccaggaacctgctcctgacatggcggcttcactctcaggagaatacacggatacagctagtgtttgacaatcagtttggattagaggaagcagaaaatgatatctgtaggtatgattttgtggaagttgaagatatatccgaaaccagtaccattattagaggacgatggtgtggacacaaggaagttcctccaaggataaaatcaagaacgaaccaaattaaaatcacattcaagtccgatgactactttgtggctaaacctggattcaagatttattattctttgctggaagatttccaacccgcagcagcttcagagaccaactgggaatctgtcacaagctctatttcaggggtatcctataactctccatcagtaacggatcccactctgattgcggatgctctggacaaaaaaattgcagaatttgatacagtggaagatctgctcaagtacttcaatccagagtcatggcaagaagatcttgagaatatgtatctggacacccctcggtatcgaggcaggtcataccatgaccggaagtcaaaagttgacctggataggctcaatgatgatgccaagcgttacagttgcactcccaggaattactcggtcaatataagagaagagctgaagttggccaatgtggtcttctttccacgttgcctcctcgtgcagcgctgtggaggaaattgtggctgtggaactgtcaactggaggtcctgcacatgcaattcagggaaaaccgtgaaaaagtatcatgaggtattacagtttgagcctggccacatcaagaggaggggtagagctaagaccatggctctagttgacatccagttggatcaccatgaacgatgtgattgtatctgcagctcaagaccacctcgataagagaatgtgcacatccttacattaagcctgaaagaacctttagtttaaggagggtgagataagagacccttttcctaccagcaaccaaacttactactagcctgcaatgcaatgaacacaagtggttgctgagtctcagccttgctttgttaatgccatggcaagtagaaaggtatatcatcaacttctatacctaagaatataggattgcatttaataatagtgtttgaggttatatatgcacaaacacacacagaaatatattcatgtctatgtgtatatagatcaaatgttttttttggtatatataaccaggtacaccagagcttacatatgtttgagttagactcttaaaatcctttgccaaaataagggatggtcaaatatatgaaacatgtctttagaaaatttaggagataaatttatttttaaattttgaaacacaaaacaattttgaatcttgctctcttaaagaaagcatcttgtatattaaaaatcaaaagatgaggctttcttacatatacatcttagttgattattaaaaaaggaaaaatatggtttccagagaaaaggccaatacctaagcattttttccatgagaagcactgcatacttacctatgtggactataataacctgtctccaaaaccatgccataataatataagtgctttagaaattaaatcattgtgttttttatgcattttgctgaggcatgcttattcatttaacacctatctcaaaaacttacttagaaggttttttattatagtcctacaaaagacaatgtataagctgtaacagaattttgaattgtttttctttgcaaaacccctccacaaaagcaaatcctttcaagaatggcatgggcattctgtatgaacctttccagatggtgttcagtgaaagatgtgggtagttgagaacttaaaaagtgaacattgaaacatcgacgtaactggaaattaggtgggatatttgataggatccatatctaataatggattcgaactctccaaactacaccaattaatttaatgtatcttgcttttgtgttcccgtctttttgaaatatagacatggatttataatggcattttatatttggcaggccatcatagattatttacaacctaaaagcttttgtgtatcaaaaaaatcacattttattaatgtaaatttctaatcgtatacttgctcactgttctgatttcctgtttctgaaccaagtaaaatcagtcctagaggctatggttcttaatctatggagcttgctttaagaagccagttgtcaattgtggtaacacaagtttggccctgctgtcctactgtttaatagaaaactgttttacattggttaatggtatttagagtaattttttctctctgcctcctttgtgtctgttttaaaggagactaactccaggagtaggaaatgattcatcatcctccaaagcaagaggcttaagagagaaacaccgaaattcagatagctcagggactgctaacagagaactacatttttcttattgccttgaaagttaaaaggaaagcagatttcttcagtgactttgtggtcctactaactacaaccagtttgggtgacagggctggtaaagtcccagtgttagatgagtgacctaaatatacttagatttctaagtatggtgctctcaggtccaagttcaactattcttaagcagtgcaattcttcccagttatttgagatgaaagatctctgcttattgaagatgtaccttctaaaactttcctaaaagtgtctgatgtttttactcaagaggggagtggtaaaattaaatactctattgttcaattctctaaaatcccagaacacaatcagaaatagctcaggcagacactaataattaagaacgctcttcctcttcataactgctttgcaagtttcctgtgaaaacatcagtttcctgtaccaaagtcaaaatgaacgttacatcactctaacctgaacagctcacaatgtagctgtaaatataaaaaatgagagtgttctacccagttttcaataaaccttccaggctgcaataaccagcaaggttttcagttaaagccctatctgcactttttatttattagctgaaatgtaagcaggcatattcactcacttttctttgcctttcctgagagttttattaaaacttctcccttggttacctgttatcttttgcacttctaacatgtagccaataaatctatttgatagccatcaaaggaataaaaagctggccgtacaaattacatttcaaaacaaaccctaataaatccacatttccgcatggctcattcacctggaataatgccttttattgaatatgttcttatagggcaaaacactttcataagtagagttttttatgttttttgtcatatcggtaacatgcagctttttcctctcatagcattttctatagcgaatgtaatatgcctcttatcttcatgaaaaataaatattgcttttgaacaaaa

SEQ ID NO: 15257 - DNA, 3801 bp, Homo sapiens
  source 1..3801: mol_type = unassigned DNA
acacgcgctcggaaagttcagcatgcaggaagtttggggagagctcggcgattagcacagcgacccgggccagcgcagggcgagcgcaggcggcgagagcgcagggcggcgcggcgtcggtcccgggagcagaacccggctttttcttggagcgacgctgtctctagtcgctgatcccaaatgcaccggctcatctttgtctacactctaatctgcgcaaacttttgcagctgtcgggacacttctgcaaccccgcagagcgcatccatcaaagctttgcgcaacgccaacctcaggcgagatgagagcaatcacctcacagacttgtaccgaagagatgagaccatccaggtgaaaggaaacggctacgtgcagagtcctagattcccgaacagctaccccaggaacctgctcctgacatggcggcttcactctcaggagaatacacggatacagctagtgtttgacaatcagtttggattagaggaagcagaaaatgatatctgtaggtatgattttgtggaagttgaagatatatccgaaaccagtaccattattagaggacgatggtgtggacacaaggaagttcctccaaggataaaatcaagaacgaaccaaattaaaatcacattcaagtccgatgactactttgtggctaaacctggattcaagatttattattctttgctggaagatttccaacccgcagcagcttcagagaccaactgggaatctgtcacaagctctatttcaggggtatcctataactctccatcagtaacggatcccactctgattgcggatgctctggacaaaaaaattgcagaatttgatacagtggaagatctgctcaagtacttcaatccagagtcatggcaagaagatcttgagaatatgtatctggacacccctcggtatcgaggcaggtcataccatgaccggaagtcaaaagttgacctggataggctcaatgatgatgccaagcgttacagttgcactcccaggaattactcggtcaatataagagaagagctgaagttggccaatgtggtcttctttccacgttgcctcctcgtgcagcgctgtggaggaaattgtggctgtggaactgtcaactggaggtcctgcacatgcaattcagggaaaaccgtgaaaaagtatcatgaggtattacagtttgagcctggccacatcaagaggaggggtagagctaagaccatggctctagttgacatccagttggatcaccatgaacgatgtgattgtatctgcagctcaagaccacctcgataagagaatgtgcacatccttacattaagcctgaaagaacctttagtttaaggagggtgagataagagacccttttcctaccagcaaccaaacttactactagcctgcaatgcaatgaacacaagtggttgctgagtctcagccttgctttgttaatgccatggcaagtagaaaggtatatcatcaacttctatacctaagaatataggattgcatttaataatagtgtttgaggttatatatgcacaaacacacacagaaatatattcatgtctatgtgtatatagatcaaatgttttttttggtatatataaccaggtacaccagagcttacatatgtttgagttagactcttaaaatcctttgccaaaataagggatggtcaaatatatgaaacatgtctttagaaaatttaggagataaatttatttttaaattttgaaacacaaaacaattttgaatcttgctctcttaaagaaagcatcttgtatattaaaaatcaaaagatgaggctttcttacatatacatcttagttgattattaaaaaaggaaaaatatggtttccagagaaaaggccaatacctaagcattttttccatgagaagcactgcatacttacctatgtggactataataacctgtctccaaaaccatgccataataatataagtgctttagaaattaaatcattgtgttttttatgcattttgctgaggcatgcttattcatttaacacctatctcaaaaacttacttagaaggttttttattatagtcctacaaaagacaatgtataagctgtaacagaattttgaattgtttttctttgcaaaacccctccacaaaagcaaatcctttcaagaatggcatgggcattctgtatgaacctttccagatggtgttcagtgaaagatgtgggtagttgagaacttaaaaagtgaacattgaaacatcgacgtaactggaaattaggtgggatatttgataggatccatatctaataatggattcgaactctccaaactacaccaattaatttaatgtatcttgcttttgtgttcccgtctttttgaaatatagacatggatttataatggcattttatatttggcaggccatcatagattatttacaacctaaaagcttttgtgtatcaaaaaaatcacattttattaatgtaaatttctaatcgtatacttgctcactgttctgatttcctgtttctgaaccaagtaaaatcagtcctagaggctatggttcttaatctatggagcttgctttaagaagccagttgtcaattgtggtaacacaagtttggccctgctgtcctactgtttaatagaaaactgttttacattggttaatggtatttagagtaattttttctctctgcctcctttgtgtctgttttaaaggagactaactccaggagtaggaaatgattcatcatcctccaaagcaagaggcttaagagagaaacaccgaaattcagatagctcagggactgctaacagagaactacatttttcttattgccttgaaagttaaaaggaaagcagatttcttcagtgactttgtggtcctactaactacaaccagtttgggtgacagggctggtaaagtcccagtgttagatgagtgacctaaatatacttagatttctaagtatggtgctctcaggtccaagttcaactattcttaagcagtgcaattcttcccagttatttgagatgaaagatctctgcttattgaagatgtaccttctaaaactttcctaaaagtgtctgatgtttttactcaagaggggagtggtaaaattaaatactctattgttcaattctctaaaatcccagaacacaatcagaaatagctcaggcagacactaataattaagaacgctcttcctcttcataactgctttgcaagtttcctgtgaaaacatcagtttcctgtaccaaagtcaaaatgaacgttacatcactctaacctgaacagctcacaatgtagctgtaaatataaaaaatgagagtgttctacccagttttcaataaaccttccaggctgcaataaccagcaaggttttcagttaaagccctatctgcactttttatttattagctgaaatgtaagcaggcatattcactcacttttctttgcctttcctgagagttttattaaaacttctcccttggttacctgttatcttttgcacttctaacatgtagccaataaatctatttgatagccatcaaaggaataaaaagctggccgtacaaattacatttcaaaacaaaccctaataaatccacatttccgcatggctcattcacctggaataatgccttttattgaatatgttcttatagggcaaaacactttcataagtagagttttttatgttttttgtcatatcggtaacatgcagctttttcctctcatagcattttctatagcgaatgtaatatgcctcttatcttcatgaaaaataaatattgcttttgaacaaaacta

SEQ ID NO: 15258 - DNA, 6576 bp, Homo sapiens
  source 1..6576: mol_type = unassigned DNA
aagagcaaaaagcgaaggcgcaatctggacactgggagattcggagcgcagggagtttgagagaaacttttattttgaagagaccaaggttgagggggggcttatttcctgacagctatttacttagagcaaatgattagttttagaaggatggactataacattgaatcaattacaaaacgcggtttttgagcccattactgttggagctacagggagagaaacagaggaggagactgcaagagatcattggaggccgtgggcacgctctttactccatgtgtgggacattcattgcggaataacatcggaggagaagtttcccagagctatggggacttcccatccggcgttcctggtcttaggctgtcttctcacagggctgagcctaatcctctgccagctttcattaccctctatccttccaaatgaaaatgaaaaggttgtgcagctgaattcatccttttctctgagatgctttggggagagtgaagtgagctggcagtaccccatgtctgaagaagagagctccgatgtggaaatcagaaatgaagaaaacaacagcggcctttttgtgacggtcttggaagtgagcagtgcctcggcggcccacacagggttgtacacttgctattacaaccacactcagacagaagagaatgagcttgaaggcaggcacatttacatctatgtgccagacccagatgtagcctttgtacctctaggaatgacggattatttagtcatcgtggaggatgatgattctgccattataccttgtcgcacaactgatcccgagactcctgtaaccttacacaacagtgagggggtggtacctgcctcctacgacagcagacagggctttaatgggaccttcactgtagggccctatatctgtgaggccaccgtcaaaggaaagaagttccagaccatcccatttaatgtttatgctttaaaagcaacatcagagctggatctagaaatggaagctcttaaaaccgtgtataagtcaggggaaacgattgtggtcacctgtgctgtttttaacaatgaggtggttgaccttcaatggacttaccctggagaagtgaaaggcaaaggcatcacaatgctggaagaaatcaaagtcccatccatcaaattggtgtacactttgacggtccccgaggccacggtgaaagacagtggagattacgaatgtgctgcccgccaggctaccagggaggtcaaagaaatgaagaaagtcactatttctgtccatgagaaaggtttcattgaaatcaaacccaccttcagccagttggaagctgtcaacctgcatgaagtcaaacattttgttgtagaggtgcgggcctacccacctcccaggatatcctggctgaaaaacaatctgactctgattgaaaatctcactgagatcaccactgatgtggaaaagattcaggaaataaggtatcgaagcaaattaaagctgatccgtgctaaggaagaagacagtggccattatactattgtagctcaaaatgaagatgctgtgaagagctatacttttgaactgttaactcaagttccttcatccattctggacttggtcgatgatcaccatggctcaactgggggacagacggtgaggtgcacagctgaaggcacgccgcttcctgatattgagtggatgatatgcaaagatattaagaaatgtaataatgaaacttcctggactattttggccaacaatgtctcaaacatcatcacggagatccactcccgagacaggagtaccgtggagggccgtgtgactttcgccaaagtggaggagaccatcgccgtgcgatgcctggctaagaatctccttggagctgagaaccgagagctgaagctggtggctcccaccctgcgttctgaactcacggtggctgctgcagtcctggtgctgttggtgattgtgatcatctcacttattgtcctggttgtcatttggaaacagaaaccgaggtatgaaattcgctggagggtcattgaatcaatcagcccagatggacatgaatatatttatgtggacccgatgcagctgccttatgactcaagatgggagtttccaagagatggactagtgcttggtcgggtcttggggtctggagcgtttgggaaggtggttgaaggaacagcctatggattaagccggtcccaacctgtcatgaaagttgcagtgaagatgctaaaacccacggccagatccagtgaaaaacaagctctcatgtctgaactgaagataatgactcacctggggccacatttgaacattgtaaacttgctgggagcctgcaccaagtcaggccccatttacatcatcacagagtattgcttctatggagatttggtcaactatttgcataagaatagggatagcttcctgagccaccacccagagaagccaaagaaagagctggatatctttggattgaaccctgctgatgaaagcacacggagctatgttattttatcttttgaaaacaatggtgactacatggacatgaagcaggctgatactacacagtatgtccccatgctagaaaggaaagaggtttctaaatattccgacatccagagatcactctatgatcgtccagcctcatataagaagaaatctatgttagactcagaagtcaaaaacctcctttcagatgataactcagaaggccttactttattggatttgttgagcttcacctatcaagttgcccgaggaatggagtttttggcttcaaaaaattgtgtccaccgtgatctggctgctcgcaacgtcctcctggcacaaggaaaaattgtgaagatctgtgactttggcctggccagagacatcatgcatgattcgaactatgtgtcgaaaggcagtacctttctgcccgtgaagtggatggctcctgagagcatctttgacaacctctacaccacactgagtgatgtctggtcttatggcattctgctctgggagatcttttcccttggtggcaccccttaccccggcatgatggtggattctactttctacaataagatcaagagtgggtaccggatggccaagcctgaccacgctaccagtgaagtctacgagatcatggtgaaatgctggaacagtgagccggagaagagaccctccttttaccacctgagtgagattgtggagaatctgctgcctggacaatataaaaagagttatgaaaaaattcacctggacttcctgaagagtgaccatcctgctgtggcacgcatgcgtgtggactcagacaatgcatacattggtgtcacctacaaaaacgaggaagacaagctgaaggactgggagggtggtctggatgagcagagactgagcgctgacagtggctacatcattcctctgcctgacattgaccctgtccctgaggaggaggacctgggcaagaggaacagacacagctcgcagacctctgaagagagtgccattgagacgggttccagcagttccaccttcatcaagagagaggacgagaccattgaagacatcgacatgatggatgacatcggcatagactcttcagacctggtggaagacagcttcctgtaactggcggattcgaggggttccttccacttctggggccacctctggatcccgttcagaaaaccactttattgcaatgcagaggttgagaggaggacttggttgatgtttaaagagaagttcccagccaagggcctcggggagcgttctaaatatgaatgaatgggatattttgaaatgaactttgtcagtgttgcctcttgcaatgcctcagtagcatctcagtggtgtgtgaagtttggagatagatggataagggaataataggccacagaaggtgaactttgtgcttcaaggacattggtgagagtccaacagacacaatttatactgcgacagaacttcagcattgtaattatgtaaataactctaaccaaggctgtgtttagattgtattaactatcttctttggacttctgaagagaccactcaatccatccatgtacttccctcttgaaacctgatgtcagctgctgttgaactttttaaagaagtgcatgaaaaaccatttttgaaccttaaaaggtactggtactatagcattttgctatcttttttagtgttaaagagataaagaataataattaaccaaccttgtttaatagatttgggtcatttagaagcctgacaactcattttcatattgtaatctatgtttataatactactactgttatcagtaatgctaaatgtgtaataatgtaacatgatttccctccagagaaagcacaatttaaaacaatccttactaagtaggtgatgagtttgacagtttttgacatttatattaaataacatgtttctctataaagtatggtaatagctttagtgaattaaatttagttgagcatagagaacaaagtaaaagtagtgttgtccaggaagtcagaatttttaactgtactgaataggttccccaatccatcgtattaaaaaacaattaactgccctctgaaataatgggattagaaacaaacaaaactcttaagtcctaaaagttctcaatgtagaggcataaacctgtgctgaacataacttctcatgtatattacccaatggaaaatataatgatcagcaaaaagactggatttgcagaagttttttttttttttttcttcatgcctgatgaaagctttggcgaccccaatatatgtattttttgaatctatgaacctgaaaagggtcagaaggatgcccagacatcagcctccttctttcaccccttaccccaaagagaaagagtttgaaactcgagaccataaagatattctttagtggaggctggatgtgcattagcctggatcctcagttctcaaatgtgtgtggcagccaggatgactagatcctgggtttccatccttgagattctgaagtatgaagtctgagggaaaccagagtctgtatttttctaaactccctggctgttctgatcggccagttttcggaaacactgacttaggtttcaggaagttgccatgggaaacaaataatttgaactttggaacagggttggcattcaaccacgcaggaagcctactatttaaatccttggcttcaggttagtgacatttaatgccatctagctagcaattgcgaccttaatttaactttccagtcttagctgaggctgagaaagctaaagtttggttttgacaggttttccaaaagtaaagatgctacttcccactgtatgggggagattgaactttccccgtctcccgtcttctgcctcccactccataccccgccaaggaaaggcatgtacaaaaattatgcaattcagtgttccaagtctctgtgtaaccagctcagtgttttggtggaaaaaacattttaagttttactgataatttgaggttagatgggaggatgaattgtcacatctatccacactgtcaaacaggttggtgtgggttcattggcattctttgcaatactgcttaattgctgataccatatgaatgaaacatgggctgtgattactgcaatcactgtgctatcggcagatgatgctttggaagatgcagaagcaataataaagtacttgactacctactggtgtaatctcaatgcaagccccaactttcttatccaactttttcatagtaagtgcgaagactgagccagattggccaattaaaaacgaaaacctgactaggttctgtagagccaattagacttgaaatacgtttgtgtttctagaatcacagctcaagcattctgtttatcgctcactctcccttgtacagccttattttgttggtgctttgcattttgatattgctgtgagccttgcatgacatcatgaggccggatgaaacttctcagtccagcagtttccagtcctaacaaatgctcccacctgaatttgtatatgactgcatttgtgtgtgtgtgtgtgttttcagcaaattccagatttgtttccttttggcctcctgcaaagtctccagaagaaaatttgccaatctttcctactttctatttttatgatgacaatcaaagccggcctgagaaacactatttgtgactttttaaacgattagtgatgtccttaaaatgtggtctgccaatctgtacaaaatggtcctatttttgtgaagagggacataagataaaatgatgttatacatcaatatgtatatatgtatttctatatagacttggagaatactgccaaaacatttatgacaagctgtatcactgccttcgtttatatttttttaactgtgataatccccacaggcacattaactgttgcacttttgaatgtccaaaatttatattttagaaataataaaaagaaagatacttacatgttcccaaaacaatggtgtggtgaatgtgtgagaaaaactaacttgatagggtctaccaatacaaaatgtattacgaatgcccctgttcatgtttttgttttaaaacgtgtaaatgaagatctttatatttcaataaatgatatataatttaaagttata

SEQ ID NO: 15259 - DNA, 2202 bp, Homo sapiens
  source 1..2202: mol_type = unassigned DNA
ggtttttgagcccattactgttggagctacagggagagaaacagaggaggagactgcaagagatcattggaggccgtgggcacgctctttactccatgtgtgggacattcattgcggaataacatcggaggagaagtttcccagagctatggggacttcccatccggcgttcctggtcttaggctgtcttctcacagggctgagcctaatcctctgccagctttcattaccctctatccttccaaatgaaaatgaaaaggttgtgcagctgaattcatccttttctctgagatgctttggggagagtgaagtgagctggcagtaccccatgtctgaagaagagagctccgatgtggaaatcagaaatgaagaaaacaacagcggcctttttgtgacggtcttggaagtgagcagtgcctcggcggcccacacagggttgtacacttgctattacaaccacactcagacagaagagaatgagcttgaaggcaggcacatttacatctatgtgccagacccagatgtagcctttgtacctctaggaatgacggattatttagtcatcgtggaggatgatgattctgccattataccttgtcgcacaactgatcccgagactcctgtaaccttacacaacagtgagggggtggtacctgcctcctacgacagcagacagggctttaatgggaccttcactgtagggccctatatctgtgaggccaccgtcaaaggaaagaagttccagaccatcccatttaatgtttatgctttaaaaggtacttgtatcatctccttccttctttaaataagagtaacaggcaaaatcataaggtgcgtgtaggatttttttttttttttaaatcatcatcactggtgatcctaaattctgatttggggatttaggaccccagctaatacaatgtctgtggctataataataagcttaaaattactaaaggccaaagcttgattacccatgcaagatttcatgtttcatcagttgacttcaaaatactgtaaggaattcttttcttacataagcctcttactttcattcacattcctgactatggcggccctaaaaacaaacatacacccagggggttagatgcctagattaattttagtaacttaagaaaagtgatttgaagaaagtagtttagacttcaaccctttgatgtccacagttagtacgcttggggaagtataatacatgctgaggtcaacagatatttcctgaacactatattacatggaggaatgggtagcagcaagagtacactgttttaaaatcagagcacagctaattttgtgccaggcactgtgctaggttctgggaaagtactgagaataactgaggagcagagtggaagagaagaagagaagaaacaattggatagaaacaaagtgtctagagcagtgtggatcagcaaatgttggttgattaaatgaataaatttattagtcaaggagattgtggacgagtataaccataactaacccactgctgaggaatgcggtgttctgtttgattggaatttatttttattgttattattttgtaattctgtattataactatatgcctaattgttgtacaccatctcacaatcaagccttgtgagattttccaaattttatcttgatcaaactggtttgcaaattatttttcagggttttcttaaaaaaaaaaaaaaaaacccaaactttataagatcctggctatcctgtggatttttaggcccttgtatttgttcttttttatagcaacatcagagctggatctagaaatggaagctcttaaaaccgtgtataagtcaggggaaacgattgtggtcacctgtgctgtttttaacaatgaggtggttgaccttcaatggacttaccctggagaagtggtaggtaccctcaaaacgtgcaatggcttggagcagagcaacagggctcagaagacctgcatttgagctcggtctgtcactgatgggcacatcactgagtttctctagaccttagcttcccacctctgggatgaacacatttgattaaatggcctttaggactccttgatcaatgggagagtttgaaatgatagttcctggaccaggcccttcagaatacataaagagtgtgccgtaagccttctttttcagaagtcagacagaaataggaaggttctctggctacaagatatcaaccaaaaaa

SEQ ID NO: 15260 - DNA, 2417 bp, Homo sapiens
  source 1..2417: mol_type = unassigned DNA
cattactgttggagctacagggagagaaacagaggaggagactgcaagagatcattggaggccgtgggcacgctctttactccatgtgtgggacattcattgcggaataacatcggaggagaagtttcccagagctatggggacttcccatccggcgttcctggtcttaggctgtcttctcacagacccagatgtagcctttgtacctctaggaatgacggattatttagtcatcgtggaggatgatgattctgccattataccttgtcgcacaactgatcccgagactcctgtaaccttacacaacagtgagggggtggtacctgcctcctacgacagcagacagggctttaatgggaccttcactgtagggccctatatctgtgaggccaccgtcaaaggaaagaagttccagaccatcccatttaatgtttatgctttaaaagcaacatcagagctggatctagaaatggaagctcttaaaaccgtgtataagtcaggggaaacgattgtggtcacctgtgctgtttttaacaatgaggtggttgaccttcaatggacttaccctggagaagtgaaaggcaaaggcatcacaatgctggaagaaatcaaagtcccatccatcaaattggtgtacactttgacggtccccgaggccacggtgaaagacagtggagattacgaatgtgctgcccgccaggctaccagggaggtcaaagaaatgaagaaagtcactatttctgtccatgagaaaggtttcattgaaatcaaacccaccttcagccagttggaagctgtcaacctgcatgaagtcaaacattttgttgtagaggtgcgggcctacccacctcccaggatatcctggctgaaaaacaatctgactctgattgaaaatctcactgagatcaccactgatgtggaaaagattcaggaaataaggtatcgaagcaaattaaagctgatccgtgctaaggaagaagacagtggccattatactattgtagctcaaaatgaagatgctgtgaagagctatacttttgaactgttaactcaagttccttcatccattctggacttggtcgatgatcaccatggctcaactgggggacagacggtgaggtgcacagctgaaggcacgccgcttcctgatattgagtggatgatatgcaaagatattaagaaatgtaataatgaaacttcctggactattttggccaacaatgtctcaaacatcatcacggagatccactcccgagacaggagtaccgtggagggccgtgtgactttcgccaaagtggaggagaccatcgccgtgcgatgcctggctaagaatctccttggagctgagaaccgagagctgaagctggtggctcccaccctgcgttctgaactcacggtggctgctgcagtcctggtgctgttggtgattgtgatcatctcacttattgtcctggttgtcatttggaaacagaaaccgaggtatgaaattcgctggagggtcattgaatcaatcagcccagatggacatgaatatatttatgtggacccgatgcagctgccttatgactcaagatgggagtttccaagagatggactagtgcttggtcgggtcttggggtctggagcgtttgggaaggtggttgaaggaacagcctatggattaagccggtcccaacctgtcatgaaagttgcagtgaagatgctaaaacccacggccagatccagtgaaaaacaagctctcatgtctgaactgaagataatgactcacctggggccacatttgaacattgtaaacttgctgggagcctgcaccaagtcaggccccatttacatcatcacagagtattgcttctatggagatttggtcaactatttgcataagaatagggatagcttcctgagccaccacccagagaagccaaagaaagagctggatatctttggattgaaccctgctgatgaaagcacacggagctatgttattttatcttttgaaaacaatggtgactacatggacatgaagcaggctgatactacacagtatgtccccatgctagaaaggaaagaggtttctaaatattccgacatccagagatcactctatgatcgtccagcctcatataagaagaaatctatgttaggtaaaagtgtctatactcactctgggtgttgggactttccagtggtttaatatgatacttaaagtatttagagggaagtgtatagggatggtaagtgaacctggcagcccacgtggtctctaaatgcaggtctgcacaaccagttctgtgacatgtttccaggtttgtggcctgtaaattgaaaagaataaaagctgacaatgtaacaaattttttaaactttaaatttaatagttttaaagaattttcttggtgtgttcctgcagtaaacatttt

SEQ ID NO: 15261 - DNA, 580 bp, Homo sapiens
  source 1..580: mol_type = unassigned DNA
attactgttggagctacagggagagaaacagaggaggagactgcaagagatcattggaggccgtgggcacgctctttactccatgtgtgggacattcattgcggaataacatcggaggagaagagacggggttttgccatgctgcctagactggtcttgaactcctgggctcaaatgatctgcctgcctcagcttcccaagtttcccagagctatggggacttcccatccggcgttcctggtcttaggctgtcttctcacagggctgagcctaatcctctgccagctttcattaccctctatccttccaaatgaaaatgaaaaggttgtgcagctgaattcatccttttctctgagatgctttggggagagtgaagtgagctggcagtaccccatgtctgaagaagagagctccgatgtggaaatcagaaatgaagaaaacaacagcggcctttttgtgacggtcttggaagtgagcagtgcctcggcggcccacacagggttgtacacttgctattacaaccacactcagacagaagagaatgagcttgaaggcaggcacatttacatctatgtgccag

SEQ ID NO: 15262 - DNA, 2991 bp, Homo sapiens
  source 1..2991: mol_type = unassigned DNA
gggagagaaacagaggaggagactgcaagagatcattggaggccgtgggcacgctctttactccatgtgtgggacattcattgcggaataacatcggaggagaagtttcccagagctatggggacttcccatccggcgttcctggtcttaggctgtcttctcacagggctgagcctaatcctctgccagctttcattaccctctatccttccaaatgaaaatgaaaaggttgtgcagctgaattcatccttttctctgagatgctttggggagagtgaagtgagctggcagtaccccatgtctgaagaagagagctccgatgtggaaatcagaaatgaagaaaacaacagcggcctttttgtgacggtcttggaagtgagcagtgcctcggcggcccacacagggttgtacacttgctattacaaccacactcagacagaagagaatgagcttgaaggcaggcacatttacatctatgtgccagacccagatgtagcctttgtacctctaggaatgacggattatttagtcatcgtggaggatgatgattctgccattataccttgtcgcacaactgatcccgagactcctgtaaccttacacaacagtgagggggtggtacctgcctcctacgacagcagacagggctttaatgggaccttcactgtagggccctatatctgtgaggccaccgtcaaaggaaagaagttccagaccatcccatttaatgtttatgctttaaaagcaacatcagagctggatctagaaatggaagctcttaaaaccgtgtataagtcaggggaaacgattgtggtcacctgtgctgtttttaacaatgaggtggttgaccttcaatggacttaccctggagaagtgaaaggcaaaggcatcacaatgctggaagaaatcaaagtcccatccatcaaattggtgtacactttgacggtccccgaggccacggtgaaagacagtggagattacgaatgtgctgcccgccaggctaccagggaggtcaaagaaatgaagaaagtcactatttctgtccatgagaaaggtttcattgaaatcaaacccaccttcagccagttggaagctgtcaacctgcatgaagtcaaacattttgttgtagaggtgcgggcctacccacctcccaggatatcctggctgaaaaacaatctgactctgattgaaaatctcactgagatcaccactgatgtggaaaagattcaggaaataaggtatcgaagcaaattaaagctgatccgtgctaaggaagaagacagtggccattatactattgtagctcaaaatgaagatgctgtgaagagctatacttttgaactgttaactcaagttccttcatccattctggacttggtcgatgatcaccatggctcaactgggggacagacggtgaggtgcacagctgaaggcacgccgcttcctgatattgagtggatgatatgcaaagatattaagaaatgtaataatgaaacttcctggactattttggccaacaatgtctcaaacatcatcacggagatccactcccgagacaggagtaccgtggagggccgtgtgactttcgccaaagtggaggagaccatcgccgtgcgatgcctggctaagaatctccttggagctgagaaccgagagctgaagctggtggctcccaccctgcgttctgaactcacggtggctgctgcagtcctggtgctgttggtgattgtgatcatctcacttattgtcctggttgtcatttggaaacagaaaccgaggtatgaaattcgctggagggtcattgaatcaatcagcccagatggacatgaatatatttatgtggacccgatgcagctgccttatgactcaagatgggagtttccaagagatggactagtgcttggtcgggtcttggggtctggagcgtttgggaaggtggttgaaggaacagcctatggattaagccggtcccaacctgtcatgaaagttgcagtgaagatgctaaaacccacggccagatccagtgaaaaacaagctctcatgtctgaactgaagataatgactcacctggggccacatttgaacattgtaaacttgctgggagcctgcaccaagtcaggccccatttacatcatcacagagtattgcttctatggagatttggtcaactatttgcataagaatagggatagcttcctgagccaccacccagagaagccaaagaaagagctggatatctttggattgaaccctgctgatgaaagcacacggagctctggccagggatgcttgagttctggaaccttgcaagaactgtctgtggatctccaagctcgaggtccttgctgaacctggacctataaatgacgtcaatgatagtgatccctactgcagaaatctacaagtggctataaagaactctgtagctatgttattttatcttttgaaaacaatggtgactacatggacatgaagcaggctgatactacacagtatgtccccatgctagaaaggaaagaggtttctaaatattccgacatccagagatcactctatgatcgtccagcctcatataagaagaaatctatgttaggctgggctggtggagttggcacgagatgtcagaggaacctgagtcatgctcaggcccaagccctgttggcaggcagaccactgctttctggccttccgtgactatctgaaaaaaatcgtgaatggctagagctactcttcacttgctgaacattttcaaaaagaattgagaacttctggattaaattgccttcttcctcgaaaaccctgggacccttccagatgggactaactggggaaagtggacaagttacaaacaaagaaactcaaaggaaagtcattggcactgatctctaagatgctatcacatgtgattggtggttgattttattaacaaattataagcaaagtactacaaaggtggctttaaaaagaaaataaagcaattcacagaaacta

SEQ ID NO: 15263 - DNA, 586 bp, Homo sapiens
  source 1..586: mol_type = unassigned DNA
gacaggttttaaatgagtgttttcattcctcgcctgcggtttggcgggacagcgctgcagcccatggtgtggagcgcggctgggggaccagggggagtttcccagagctatggggacttcccatccggcgttcctggtcttaggctgtcttctcacagggctgagcctaatcctctgccagctttcattaccctctatccttccaaatgaaaatgaaaaggttgtgcagctgaattcatccttttctctgagatgctttggggagagtgaagtgagctggcagtaccccatgtctgaagaagagagctccgatgtggaaatcagaaatgaagaaaacaacagcggcctttttgtgacggtcttggaagtgagcagtgcctcggcggcccacacagggttgtacacttgctattacaaccacactcagacagaagagaatgagcttgaaggcaggcacatttacatctatgtgccagacccagatgtagcctttgtacctctaggaatgacggattatttagtcatcgtggaggatgatgattctgccattataccttgtcgcacaactgatcccgagactcctgta

SEQ ID NO: 15264 - DNA, 771 bp, Homo sapiens
  source 1..771: mol_type = unassigned DNA
catttggccctgagtgaagaagtcgtcgtcgcctcgcattccagcaactgggatttgaggaatttcgaaccgcacaccaaggggccctcattgtgctccgtggcccccgcccccgcctgtcttcccgcgccccctcctcggtggaatcatttctgcattgcccgggggctctgctttcgctcagttctggccgcaggcaggaagagaggaaaggtctccaggaaggtgccgaacttcttgtgaggaagttagggacgacttggaactggggaaacttgtttgcagtttcccagagctatggggacttcccatccggcgttcctggtcttaggctgtcttctcacagggctgagcctaatcctctgccagctttcattaccctctatccttccaaatgaaaatgaaaaggttgtgcagctgaattcatccttttctctgagatgctttggggagagtgaagtgagctggcagtaccccatgtctgaagaagagagctccgatgtggaaatcagaaatgaagaaaacaacagcggcctttttgtgacggtcttggaagtgagcagtgcctcggcggcccacacagggttgtacacttgctattacaaccacactcagacagaagagaatgagcttgaaggcaggcacatttacatctatgtgccagacccagatgtagcctttgtacctctaggaatgacggattatttagtcatcgtggaggatgatgattctgccattataccttgtcgcacaactgatcccgagactcct

SEQ ID NO: 15265 - DNA, 573 bp, Homo sapiens
  source 1..573: mol_type = unassigned DNA
gaggttggagccaagatggctgaataggaacagctccggtctacagctcccagcatcagcgatgcagaagatgggtgatttctgcatttccatctgagtttcccagagctatggggacttcccatccggcgttcctggtcttaggctgtcttctcacagggctgagcctaatcctctgccagctttcattaccctctatccttccaaatgaaaatgaaaaggttgtgcagctgaattcatccttttctctgagatgctttggggagagtgaagtgagctggcagtaccccatgtctgaagaagagagctccgatgtggaaatcagaaatgaagaaaacaacagcggcctttttgtgacggtcttggaagtgagcagtgcctcggcggcccacacagggttgtacacttgctattacaaccacactcagacagaagagaatgagcttgaaggcaggcacatttacatctatgtgccagacccagatgtagcctttgtacctctaggaatgacggattatttagtcatcgtggaggatgatgattctgccattataccttgtcgcacaactgatc

SEQ ID NO: 15266 - DNA, 480 bp, Homo sapiens
  source 1..480: mol_type = unassigned DNA
accccgggaaatgtttctctcagggtcgggtcttggggtctggagcgtttgggaaggtggttgaaggaacagcctatggattaagccggtcccaacctgtcatgaaagttgcagtgaagatgctaaaacccacggccagatccagtgaaaaacaagctctcatgtctgaactgaagataatgactcacctggggccacatttgaacattgtaaacttgctgggagcctgcaccaagtcaggtgggctcactgacctggagtgaggattttcactggacacatgtggttgtgaaaactgttcaatcaggcttaaatcctccactctccatccccacacatggcagggaatagaagtcccttgaatggagctgactggtcccttgaattgatggaagctcattggtttttgagcaaaatctgttgccagtccagtcatagccattcatggctctttattaaaaaaaaaaaaaaaaaaaaaaa

SEQ ID NO: 15267 - DNA, 1146 bp, Homo sapiens
  source 1..1146: mol_type = unassigned DNA
tgcaagtgttattcgacaaaagcaattatgctaatttccttccctgtgggctcaattccttttttgacacgatgacttggaggagtcattatgattactccaaacaggaaagacactcgcccagctgtccgcccgcagagagctggctacggtgcagaaagctgaggaggcgtctggagtttttgggtgttaatgattctgcctgcccacaggtcgggtcttggggtctggagcgtttgggaaggtggttgaaggaacagcctatggattaagccggtcccaacctgtcatgaaagttgcagtgaagatgctaaaacccacggccagatccagtgaaaaacaagctctcatgtctgaactgaagataatgactcacctggggccacatttgaacattgtaaacttgctgggagcctgcaccaagtcaggccccatttacatcatcacagagtattgcttctatggagatttggtcaactatttgcataagaatagggatagcttcctgagccaccacccagagaagccaaagaaagagctggatatctttggattgaaccctgctgatgaaagcacacggagctatgttattttatcttttgaaaacaatggtgactacatggacatgaagcaggctgatactacacagtatgtccccatgctagaaaggaaagaggtttctaaatattccgacatccagagatcactctatgatcgtccagcctcatataagaagaaatctatgttaggctgggctggtggagttggcacgagatgtcagaggaacctgagtcatgctcaggcccaagccctgttggcaggcagaccactgctttctggccttccgtgactatctgaaaaaaatcgtgaatggctagagctactcttcacttgctgaacattttcaaaaagaattgagaacttctggattaaattgccttcttcctcgaaaaccctgggacccttccagatgggactaactggggaaagtggacaagttacaaacaaagaaactcaaaggaaagtcattggcactgatctctaagatgctatcacatgtgattggtggttgattttattaacaaattataagcaaagtactacaaaggtggctttaaaaagaaaataaagcaattcacagaaact

SEQ ID NO: 15268 - DNA, 6576 bp, Homo sapiens; identical to SEQ ID NO: 15258
  source 1..6576: mol_type = unassigned DNA

SEQ ID NO: 15269 - DNA, 2202 bp, Homo sapiens; identical to SEQ ID NO: 15259
  source 1..2202: mol_type = unassigned DNA

SEQ ID NO: 15270 - DNA, 2417 bp, Homo sapiens; identical to SEQ ID NO: 15260
  source 1..2417: mol_type = unassigned DNA

SEQ ID NO: 15271 - DNA, 580 bp, Homo sapiens; identical to SEQ ID NO: 15261
  source 1..580: mol_type = unassigned DNA

SEQ ID NO: 15272 - DNA, 2991 bp, Homo sapiens; identical to SEQ ID NO: 15262
  source 1..2991: mol_type = unassigned DNA

SEQ ID NO: 15273 - DNA, 586 bp, Homo sapiens; identical to SEQ ID NO: 15263
  source 1..586: mol_type = unassigned DNA

SEQ ID NO: 15274 - DNA, 771 bp, Homo sapiens; identical to SEQ ID NO: 15264
  source 1..771: mol_type = unassigned DNA

SEQ ID NO: 15275 - DNA, 573 bp, Homo sapiens; identical to SEQ ID NO: 15265
  source 1..573: mol_type = unassigned DNA

SEQ ID NO: 15276 - DNA, 480 bp, Homo sapiens; identical to SEQ ID NO: 15266
  source 1..480: mol_type = unassigned DNA

SEQ ID NO: 15277 - DNA, 1146 bp, Homo sapiens; identical to SEQ ID NO: 15267
  source 1..1146: mol_type = unassigned DNA

SEQ ID NO: 15278 - DNA, 5717 bp, Homo sapiens
  source 1..5717: mol_type = unassigned DNA
gctcctgaggctgccagcagccagcagtgactgcccgccctatctgggacccaggatcgctctgtgagcaacttggagccagagaggagatcaacaaggaggaggagagagccggcccctcagccctgctgcccagcagcagcctgtgctcgccctgcccaacgcagacagccagacccagggcggcccctctggcggctctgctcctcccgaaggatgcttggggagtgaggcgaagctgggccgctcctctcccctacagcagcccccttcctccatccctctgttctcctgagccttcaggagcctgcaccagtcctgcctgtccttctactcagctgttacccactctgggaccagcagtctttctgataactgggagagggcagtaaggaggacttcctggagggggtgactgtccagagcctggaactgtgcccacaccagaagccatcagcagcaaggacaccatgcggcttccgggtgcgatgccagctctggccctcaaaggcgagctgctgttgctgtctctcctgttacttctggaaccacagatctctcagggcctggtcgtcacacccccggggccagagcttgtcctcaatgtctccagcaccttcgttctgacctgctcgggttcagctccggtggtgtgggaacggatgtcccaggagcccccacaggaaatggccaaggcccaggatggcaccttctccagcgtgctcacactgaccaacctcactgggctagacacgggagaatacttttgcacccacaatgactcccgtggactggagaccgatgagcggaaacggctctacatctttgtgccagatcccaccgtgggcttcctccctaatgatgccgaggaactattcatctttctcacggaaataactgagatcaccattccatgccgagtaacagacccacagctggtggtgacactgcacgagaagaaaggggacgttgcactgcctgtcccctatgatcaccaacgtggcttttctggtatctttgaggacagaagctacatctgcaaaaccaccattggggacagggaggtggattctgatgcctactatgtctacagactccaggtgtcatccatcaacgtctctgtgaacgcagtgcagactgtggtccgccagggtgagaacatcaccctcatgtgcattgtgatcgggaatgaggtggtcaacttcgagtggacatacccccgcaaagaaagtgggcggctggtggagccggtgactgacttcctcttggatatgccttaccacatccgctccatcctgcacatccccagtgccgagttagaagactcggggacctacacctgcaatgtgacggagagtgtgaatgaccatcaggatgaaaaggccatcaacatcaccgtggttgagagcggctacgtgcggctcctgggagaggtgggcacactacaatttgctgagctgcatcggagccggacactgcaggtagtgttcgaggcctacccaccgcccactgtcctgtggttcaaagacaaccgcaccctgggcgactccagcgctggcgaaatcgccctgtccacgcgcaacgtgtcggagacccggtatgtgtcagagctgacactggttcgcgtgaaggtggcagaggctggccactacaccatgcgggccttccatgaggatgctgaggtccagctctccttccagctacagatcaatgtccctgtccgagtgctggagctaagtgagagccaccctgacagtggggaacagacagtccgctgtcgtggccggggcatgccccagccgaacatcatctggtctgcctgcagagacctcaaaaggtgtccacgtgagctgccgcccacgctgctggggaacagttccgaagaggagagccagctggagactaacgtgacgtactgggaggaggagcaggagtttgaggtggtgagcacactgcgtctgcagcacgtggatcggccactgtcggtgcgctgcacgctgcgcaacgctgtgggccaggacacgcaggaggtcatcgtggtgccacactccttgccctttaaggtggtggtgatctcagccatcctggccctggtggtgctcaccatcatctcccttatcatcctcatcatgctttggcagaagaagccacgttacgagatccgatggaaggtgattgagtctgtgagctctgacggccatgagtacatctacgtggaccccatgcagctgccctatgactccacgtgggagctgccgcgggaccagcttgtgctgggacgcaccctcggctctggggcctttgggcaggtggtggaggccacggctcatggcctgagccattctcaggccacgatgaaagtggccgtcaagatgcttaaatccacagcccgcagcagtgagaagcaagcccttatgtcggagctgaagatcatgagtcaccttgggccccacctgaacgtggtcaacctgttgggggcctgcaccaaaggaggacccatctatatcatcactgagtactgccgctacggagacctggtggactacctgcaccgcaacaaacacaccttcctgcagcaccactccgacaagcgccgcccgcccagcgcggagctctacagcaatgctctgcccgttgggctccccctgcccagccatgtgtccttgaccggggagagcgacggtggctacatggacatgagcaaggacgagtcggtggactatgtgcccatgctggacatgaaaggagacgtcaaatatgcagacatcgagtcctccaactacatggccccttacgataactacgttccctctgcccctgagaggacctgccgagcaactttgatcaacgagtctccagtgctaagctacatggacctcgtgggcttcagctaccaggtggccaatggcatggagtttctggcctccaagaactgcgtccacagagacctggcggctaggaacgtgctcatctgtgaaggcaagctggtcaagatctgtgactttggcctggctcgagacatcatgcgggactcgaattacatctccaaaggcagcacctttttgcctttaaagtggatggctccggagagcatcttcaacagcctctacaccaccctgagcgacgtgtggtccttcgggatcctgctctgggagatcttcaccttgggtggcaccccttacccagagctgcccatgaacgagcagttctacaatgccatcaaacggggttaccgcatggcccagcctgcccatgcctccgacgagatctatgagatcatgcagaagtgctgggaagagaagtttgagattcggccccccttctcccagctggtgctgcttctcgagagactgttgggcgaaggttacaaaaagaagtaccagcaggtggatgaggagtttctgaggagtgaccacccagccatccttcggtcccaggcccgcttgcctgggttccatggcctccgatctcccctggacaccagctccgtcctctatactgccgtgcagcccaatgagggtgacaacgactatatcatccccctgcctgaccccaaacccgaggttgctgacgagggcccactggagggttcccccagcctagccagctccaccctgaatgaagtcaacacctcctcaaccatctcctgtgacagccccctggagccccaggacgaaccagagccagagccccagcttgagctccaggtggagccggagccagagctggaacagttgccggattcggggtgccctgcgcctcgggcggaagcagaggatagcttcctgtagggggctggcccctaccctgccctgcctgaagctccccccctgccagcacccagcatctcctggcctggcctgaccgggcttcctgtcagccaggctgcccttatcagctgtccccttctggaagctttctgctcctgacgtgttgtgccccaaaccctggggctggcttaggaggcaagaaaactgcaggggccgtgaccagccctctgcctccagggaggccaactgactctgagccagggttcccccagggaactcagttttcccatatgtaaaatgggaaagttaggcttgatgacccagaatctaggattctctccctggctgacaggtggggagaccgaatccctccctgggaagattcttggagttactgaggtggtaaattaacttttttctgttcagccagctacccctcaaggaatcatagctctctcctcgcacttttatccacccaggagctagggaagagaccctagcctccctggctgctggctgagctagggcctagccttgagcagtgttgcctcatccagaagaaagccagtctcctccctatgatgccagtccctgcgttccctggcccgagctggtctggggccattaggcagcctaattaatgctggaggctgagccaagtacaggacacccccagcctgcagcccttgcccagggcacttggagcacacgcagccatagcaagtgcctgtgtccctgtccttcaggcccatcagtcctggggctttttctttatcaccctcagtcttaatccatccaccagagtctagaaggccagacgggccccgcatctgtgatgagaatgtaaatgtgccagtgtggagtggccacgtgtgtgtgccagtatatggccctggctctgcattggacctgctatgaggctttggaggaatccctcaccctctctgggcctcagtttccccttcaaaaaatgaataagtcggacttattaactctgagtgccttgccagcactaacattctagagtattccaggtggttgcacatttgtccagatgaagcaaggccatataccctaaacttccatcctgggggtcagctgggctcctgggagattccagatcacacatcacactctggggactcaggaaccatgccccttccccaggcccccagcaagtctcaagaacacagctgcacaggccttgacttagagtgacagccggtgtcctggaaagcccccagcagctgccccagggacatgggaagaccacgggacctctttcactacccacgatgacctccgggggtatcctgggcaaaagggacaaagagggcaaatgagatcacctcctgcagcccaccactccagcacctgtgccgaggtctgcgtcgaagacagaatggacagtgaggacagttatgtcttgtaaaagacaagaagcttcagatgggtaccccaagaaggatgtgagaggtgggcgctttggaggtttgcccctcacccaccagctgccccatccctgaggcagcgctccatgggggtatggttttgtcactgcccagacctagcagtgacatctcattgtccccagcccagtgggcattggaggtgccaggggagtcagggttgtagccaagacgcccccgcacggggagggttgggaagggggtgcaggaagctcaacccctctgggcaccaaccctgcattgcaggttggcaccttacttccctgggatccccagagttggtccaaggagggagagtgggttctcaatacggtaccaaagatataatcacctaggtttacaaatatttttaggactcacgttaactcacatttatacagcagaaatgctattttgtatgctgttgagtttttctatctgtgtacttttttttaagggaaagattttaatattaaacctggtgcttctcactcacaga

SEQ ID NO: 15279 - DNA, 406 bp, Homo sapiens
  source 1..406: mol_type = unassigned DNA
cgcatctgtgatgagaatgtaaatgtgccagtgtggagtggccacgtgtgtgtgccagtatatggccctggctctgcattggacctgctatgaggctttggaggaatccctcaccctctctgggcctcagtttccccttcaaaaaatgaataagtcggacttattaactctgagtgccttgccagcactaacattctagagtattccagagttggtccaaggagggagagtgggttctcaatacggtaccaaagatataatcacctaggtttacaaatatttttaggactcacgttaactcacatttatacagcagaaatgctattttgtatgctgttgagtttttctatctgtgtacttttttttaagggaaagattttaatattaaacctggtgcttctcactc

SEQ ID NO: 15280 - DNA, 3860 bp, Homo sapiens
  source 1..3860: mol_type = unassigned DNA
ctcctgaggctgccagcagccagcagtgactgcccgccctatctgggacccaggatcgctctgtgagcaacttggagccagagaggagatcaacaaggaggaggagagagccggcccctcagccctgctgcccagcagcagcctgtgctcgccctgcccaacgcagacagccagacccagggcggcccctctggcggctctgctcctcccgaaggatgcttggggagtgaggcgaagctgggccgctcctctcccctacagcagcccccttcctccatccctctgttctcctgagccttcaggagcctgcaccagtcctgcctgtccttctactcagctgttacccactctgggaccagcagtctttctgataactgggagagggcagtaaggaggacttcctggagggggtgactgtccagagcctggaactgtgcccacaccagaagccatcagcagcaaggacaccatgcggcttccgggtgcgatgccagctctggccctcaaaggcgagctgctgttgctgtctctcctgttacttctggaaccacagatctctcagggcctggtcgtcacacccccggggccagagcttgtcctcaatgtctccagcaccttcgttctgacctgctcgggttcagctccggtggtgtgggaacggatgtcccaggagcccccacaggaaatggccaaggcccaggatggcaccttctccagcgtgctcacactgaccaacctcactgggctagacacgggagaatacttttgcacccacaatgactcccgtggactggagaccgatgagcggaaacggctctacatctttgtgccagatcccaccgtgggcttcctccctaatgatgccgaggaactattcatctttctcacggaaataactgagatcaccattccatgccgagtaacagacccacagctggtggtgacactgcacgagaagaaaggggacgttgcactgcctgtcccctatgatcaccaacgtggcttttctggtatctttgaggacagaagctacatctgcaaaaccaccattggggacagggaggtggattctgatgcctactatgtctacagactccagggtgagccccctttctggcctgatgctcagcagagtgtcatccatcaacgtctctgtgaacgcagtgcagactgtggtccgccagggtgagaacatcaccctcatgtgcattgtgatcgggaatgaggtggtcaacttcgagtggacatacccccgcaaagaaagtgggcggctggtggagccggtgactgacttcctcttggatatgccttaccacatccgctccatcctgcacatccccagtgccgagttagaagactcggggacctacacctgcaatgtgacggagagtgtgaatgaccatcaggatgaaaaggccatcaacatcaccgtggttgagagcggctacgtgcggctcctgggagaggtgggcacactacaatttgctgagctgcatcggagccggacactgcaggtagtgttcgaggcctacccaccgcccactgtcctgtggttcaaagacaaccgcaccctgggcgactccagcgctggcgaaatcgccctgtccacgcgcaacgtgtcggagacccggtatgtgtcagagctgacactggttcgcgtgaaggtggcagaggctggccactacaccatgcgggccttccatgaggatgctgaggtccagctctccttccagctacagatcaatgtccctgtccgagtgctggagctaagtgagagccaccctgacagtggggaacagacagtccgctgtcgtggccggggcatgccccagccgaacatcatctggtctgcctgcagagacctcaaaaggtgtccacgtgagctgccgcccacgctgctggggaacagttccgaagaggagagccagctggagactaacgtgacgtactgggaggaggagcaggagtttgaggtggtgagcacactgcgtctgcagcacgtggatcggccactgtcggtgcgctgcacgctgcgcaacgctgtgggccaggacacgcaggaggtcatcgtggtgccacactccttgccctttaaggtggtggtgatctcagccatcctggccctggtggtgctcaccatcatctcccttatcatcctcatcatgctttggcagaagaagccacgttacgagatccgatggaaggtgattgagtctgtgagctctgacggccatgagtacatctacgtggaccccatgcagctgccctatgactccacgtgggagctgccgcgggaccagcttgtgctgggacgcaccctcggctctggggcctttgggcaggtggtggaggccacggctcatggcctgagccattctcaggccacgatgaaagtggccgtcaagatgcttaaatccacagcccgcagcagtgagaagcaagcccttatgtcggagctgaagatcatgagtcaccttgggccccacctgaacgtggtcaacctgttgggggcctgcaccaaaggaggacccatctatatcatcactgagtactgccgctacggagacctggtggactacctgcaccgcaacaaacacaccttcctgcagcaccactccgacaagcgccgcccgcccagcgcggagctctacagcaatgctctgcccgttgggctccccctgcccagccatgtgtccttgaccggggagagcgacggtggctacatggacatgagcaaggacgagtcggtggactatgtgcccatgctggacatgaaaggagacgtcaaatatgcagacatcgagtcctccaactacatggccccttacgataactacgttccctctgcccctgagaggacctgccgagcaactttgatcaacgagtctccagtgctaagctacatggacctcgtgggcttcagctaccaggtggccaatggcatggagtttctggcctccaagaactgcgtccacagagacctggcggctaggaacgtgctcatctgtgaaggcaagctggtcaagatctgtgactttggcctggctcgagacatcatgcgggactcgaattacatctccaaaggcagcacctttttgcctttaaagtggatggctccggagagcatcttcaacagcctctacaccaccctgagcgacgtgtggtccttcgggatcctgctctgggagatcttcaccttgggtggcaccccttacccagagctgcccatgaacgagcagttctacaatgccatcaaacggggttaccgcatggcccagcctgcccatgcctccgacgagatctatgagatcatgcagaagtgctgggaagagaagtttgagattcggccccccttctcccagctggtgctgcttctcgagagactgttgggcgaaggttacaaaaagaagtaccagcaggtggatgaggagtttctgaggagtgaccacccagccatccttcggtcccaggcccgcttgcctgggttccatggcctccgatctcccctggacaccagctccgtcctctatactgccgtgcagcccaatgagggtgacaacgactatatcatccccctgcctgaccccaaacccgaggttgctgacgagggcccactggagggttcccccagcctagccagctccaccctgaatgaagtcaacacctcctcaaccatctcctgtgacagccccctggagccccaggacgaaccagagccagagccccagcttgagctccaggtggagccggagccagagctggaacagttgccggattcggggtgccctgcgcctcgggcggaagcagaggatagcttcctgtagggggctggcccctaccctgccctgcctgaagctccc

SEQ ID NO: 15281 - DNA, 712 bp, Homo sapiens
  source 1..712: mol_type = unassigned DNA
ggttggttgaaaagtcttgatccacaggctttcctactgggatagactgaaggaagatgagtgagtgtgctctcctgtgatgctcctttacccccagccatgtgtccttgaccggggagagcgacggtggctacatggacatgagcaaggacgagtcggtggactatgtgcccatgctggacatgaaaggagacgtcaaatatgcagacatcgagtcctccaactacatggccccttacgataactacgttccctctgcccctgagaggacctgccgagcaactttgatcaacgagtctccagtgctaagctacatggacctcgtgggcttcagctaccaggtggccaatggcatggagtttctggcctccaagaactgcgtccacagagacctggcggctaggaacgtgctcatctgtgaaggcaagctggtcaagatctgtgactttggcctggctcgagacatcatgcgggactcgaattacatctccaaaggcagcacctttttgcctttaaagtggatggctccggagagcatcttcaacagcctctacaccaccctgagcgacgtgtggtccttcgggatcctgctctgggagatcttcaccttgggtggcaccccttacccagagctgcccatgaacgagcagttctacaatgccatcaaacggggttaccgcatggcccagcctgcccatgcctccgacgagat

SEQ ID NO: 15282 - DNA, 400 bp, Homo sapiens
  source 1..400: mol_type = unassigned DNA
attttggtagcctcagtgcccagcttggcccagcagccatgtgtccttgaccggggagagcgacggtggctacatggacatgagcaaggacgagtcggtggactatgtgcccatgctggacatgaaaggagacgtcaaatatgcagacatcgagtcctccaactacatggccccttacgataactacgttccctctgcccctgagaggacctgccgagcaactttgatcaacgagtctccagtgctaagctacatggacctcgtgggcttcagctaccaggtggccaatggcatggagtttctggcctccaagaactgcgtccacagagacctggcggctaggaacgtgctcatctgtgaaggcaagctggtcaagatctgtgactttggcctggctcga

SEQ ID NO: 15283 - DNA, 738 bp, Homo sapiens
  source 1..738: mol_type = unassigned DNA
gagtacatctacgtggaccccatgcagctgccctatgactccacgtgggagctgccgcgggaccagcttgtgctgggacgcaccctcggctctggggcctttgggcaggtggtggaggccacggctcatggcctgagccattctcaggccacgatgaaagtggccgtcaagatgcttaaatgtgagtagtccttggagccctccacatctgggccttcacctctccctgcccctccccacacacttagcctctcccagggtggcctgatgctgatttgcaggcactagaggggccatcacactgcagcaggcactgctcccgagtctgggtctggtttgggaaagagcgttcctctccctggcctcctcggcctgcttccccctaccctggcctcttcccctcctcagagtgtgggtgctcacccccgccaggctgcctgggtcttgcagcacagggcggggcagaagagtcagaataggctcctgtggtggggcctccatggagcctccatgactgggcctggcctggggcccccattttcctcagccacagcccgcagcagtgagaagcaagcccttatgtcggagctgaagatcatgagtcaccttgggccccacctgaacgtggtcaacctgttgggggcctgcaccaaaggaggtaccgagcccactgccccagaggcctcagggaaagtgcccaccaccaaggccaggccccgcctacccccccctcaggcc

SEQ ID NO: 15284 - DNA, 296 bp, Homo sapiens
  source 1..296: mol_type = unassigned DNA
tcagtcatcctttccctctctagccccctaccctatccccaagctgaagtgctagtggctggtggtgacttccccagacctaagccaatctctctctaccagtgtcatccatcaacgtctctgtgaacgcagtgcagactgtggtccgccagggtgagaacatcaccctcatgtgcattgtgatcgggaatgaggtggtcaacttcgagtggacatacccccgcaaagaaagtgggcggctggtggagccggtgactgacttcctcttggatatgccttaccacatccgctccatc

SEQ ID NO: 15285 - DNA, 822 bp, Homo sapiens
  source 1..822: mol_type = unassigned DNA
cgaagctgggccgctcctctcccctacagcagcccccttcctccatccctctgttctcctgagccttcaggagcctgcaccagtcctgcctgtccttctactcagctgttacccactctgggaccagcagtctttctgataactgggagagggcagtaaggaggacttcctggagggggtgactgtccagagcctggaactgtgcccacaccagaagccatcagcagcaaggcgagctgctgttgctgtctctcctgttacttctggaaccacagatctctcagggcctggtcgtcacacccccggggccagagcttgtcctcaatgtctccagcaccttcgttctgacctgctcgggttcagctccggtggtgtgggaacggatgtcccaggagcccccacaggaaatggccaaggcccaggatggcaccttctccagcgtgctcacactgaccaacctcactgggctagacacgggagaatacttttgcacccacaatgactcccgtggactggagaccgatgagcggaaacggctctacatctttgtgccagatcccaccgtgggcttcctccctaatgatgccgaggaactattcatctttctcacggaaataactgagatcaccattccatgccgagtaacagacccacagctggtggtgacactgcacgagaagaaaggggacgttgcactgcctgtcccctatgatcaccaacgtggcttttctggtatctttgaggacagaagctacatctgcaaaaccaccattggggacagggaggtggattctgatgcctactatgtctacagactccagg

SEQ ID NO: 15286 - DNA, 568 bp, Homo sapiens
  source 1..568: mol_type = unassigned DNA
attggaactgtcacccggaggacaggctgtcagagctggacaccatgcggcttccgggtgcgatgccagctctggccctcaaaggcgagctgctgttgctgtctctcctgttacttctggaaccacagatctctcagggcctggtcgtcacacccccggggccagagcttgtcctcaatgtctccagcaccttcgttctgacctgctcgggttcagctccggtggtgtgggaacggatgtcccaggagcccccacaggaaatggccaaggcccaggatggcaccttctccagcgtgctcacactgaccaacctcactgggctagacacgggagaatacttttgcacccacaatgactcccgtggactggagaccgatgagcggaaacggctctacatctttgtgccagatcccaccgtgggcttcctccctaatgatgccgaggaactattcatctttctcacggaaataactgagatcaccattccatgccgagtaacagacccacagctggtggtgacactgcacgagaagaaaggggacgttgcactgcctgtcccctatgatca

SEQ ID NO: 15287 - DNA, 611 bp, Homo sapiens
  source 1..611: mol_type = unassigned DNA
gctcctgaggctgccagcagccagcagtgactgcccgccctatctgggacccaggatcgctctgtgagcaacttggagccagagaggagatcaacaaggaggaggagagagccggcccctcagccctgctgcccagcagcagcctgtgctcgccctgcccaacgcagacagccagacccagggcggcccctctggcggctctgctcctcccgaaggatgcttggggagtgaggcgaagctgggccgctcctctcccctacagcagcccccttcctccatccctctgttctcctgagccttcaggagcctgcaccagtcctgcctgtccttctactcagctgttacccactctgggaccagcagtctttctgataactgggagagggcagtaaggaggacttcctggagggggtgactgtccagagcctggaactgtgcccacaccagaagccatcagcagcaagataagagcctggtattggaactgtcacccggaggacaggctgtcagagctggtaggctactggataccatccagcccaacttcccctccctcactgtacagacagggaaactaaggcacagagagagtctggggacgcagccgaggc

SEQ ID NO: 15288 - DNA, 1023 bp, Homo sapiens
  source 1..1023: mol_type = unassigned DNA
atagtggtgtgagctcctgaggctgccagcagccagcagtgactgcccgccctatctgggacccaggatcgctctgtgagcaacttggagccagagaggagatcaacaaggaggaggagagagccggcccctcagccctgctgcccagcagcagcctgtgctcgccctgcccaacgcagacagccagacccagggcggcccctctggcggctctgctcctcccgaaggatgcttggggagtgaggcgaagctgggccgctcctctcccctacagcagcccccttcctccatccctctgttctcctgagccttcaggagcctgcaccagtcctgcctgtccttctactcagctgttacccactctgggaccagcagtctttctgataactgggagagggcagtaaggaggacttcctggagggggtgactgtccagagcctggaactgtgcccacaccagaagccatcagcagcaagtgcccagccctggataggcagtgcggctgaaaaaatgtcctggtgaaagggaggaggagctcactgaagaccttctgctcccaagtgtgagactagaacccaggcctccagccttctcacaggtgcccttccaggacatcgtgtggctactccaggcagcattcctccattgcaagcagggaggagtatctctgcttccctctgtgacctcccaattgcacagaggcctctagtgacaagttctgaagtcatgcagtcctcccctgtctccaagcaggagaccctgaatccacagccttcagggacatacagtccctgaacacctacctcatgcaggcatagagcctggtacttcacacaccttggagtcctcatggcaagtttttgaaatcagtgttattacctactttttgtagatgaggaagctgagatctggagaggctaagtgactttcccagggccatacggtgagttaaggtggtgtttaggctgaagtctgcctgactctaaaggcttacctcgtgctccccgggaagctcccagtcag

SEQ ID NO: 15289 - DNA, 1809 bp, Homo sapiens
  source 1..1809: mol_type = unassigned DNA
gcgtacgtgcagcaaccgactccgcccagcgaggcggagcctagggaagccgcgggcggcccgccgctgtcctggagctgctgctgctgctgcggcggctgcaccggcggcgccgaggccgagatcgaggccggggtgcgcgcttcgcaaacgtgccctatccgtgcggcttggctgcgccagcccttgcggccacccgggcgtctaggcgggtctgtgcgccgcccgggcgaggatgcggctgttccggtggctgctgaagcagccggtgcccaagcagatcgagcgctactcgcgcttttcgccgtcgccgctctccatcaaacaattcctggacttcgggagagataatgcatgtgagaaaacttcatatatgtttctacgaaaggaacttcctgtgcggctggctaacacaatgagagaagttaatcttctgccggataatttacttaaccgcccttcagtgggattggttcagagttggtatatgcagagttttcttgaacttttagaatatgaaaataagagccctgaggatccacaggtcttggataactttctacaagttctgattaaagtcagaaatagacacaatgatgtggttcctacaatggcacaaggagtgattgaatacaaggagaagtttgggtttgatcctttcattagcactaacatccaatattttctggatcggttttataccaaccgcatctctttccgcatgcttattaatcagcacacacttctgtttgggggtgacactaatcctgttcatcctaaacacataggaagtatcgatcccacctgtaacgtggcggatgtggtgaaagatgcatatgaaacagccaagatgctgtgtgaacagtattacctggtagctccagagctggaagttgaagaattcaatgccaaagcgccagacaaacctattcaggtggtttatgtgccctcacatctgtttcatatgctatttgagttgttcaagaactcaatgagagcgacagttgaactctatgaagacagaaaagagggctaccctgctgttaaaaccctcgttactttgggtaaagaagacttatccattaagatcagtgacctaggtggtggtgtcccacttcgaaaaatagatcgtctttttaactacatgtattctactgctcctagacccagcctggagcctaccagagctgcccctttggctggatttggttatggtttgccaatttcccgtctgtatgctagatattttcaaggagatctgaaactgtattccatggaaggagtgggtactgatgctgtcatttatttgaaggctctttcaagtgagtcatttgagagacttccagtttttaataagtccgcatggcgccattacaagaccacgcctgaagccgatgattggagcaatcccagcagtgaacccagggatgcttcaaaatacaaagcaaaacagtaatataccaccttgatttccattacaaagtatctgatttgtctgaataaaggtgtcccactcactgttccaggaattcttgcagtgtagaggtattcacaacagcaagcagggatttggcctgccatcaattttatttaaaaagcaattaagtttgcagtttgtcctcataaacgttgtaggttgaaactgaaaaataagttaaaatgatcaatcaagataaaaggtgatctatccatccaatggaatattatttggccttaaaaaggaaggacattctgatatgtgctgcaacatgggtgaatcttgaagtcattatgctaagtgaaataaaccagacataaaaggacaaatac

SEQ ID NO: 15290 - DNA, 1921 bp, Homo sapiens
  source 1..1921: mol_type = unassigned DNA
atgcggctgttccggtggctgctgaagcagccggtgcccaagcagatcgagcgctactcgcgcttttcgccgtcgccgctctccatcaaacaattcctggacttcgggagagataatgcatgtgagaaaacttcatatatgtttctacgaaaggaacttcctgtgcggctggctaacacaatgagagaagttaatcttctgccggataatttacttaaccgcccttcagtgggattggttcagagttggtatatgcagagttttcttgaacttttagaatatgaaaataagagccctgaggatccacaggtcttggataactttctacaagttctgattaaagtcagaaatagacacaatgatgtggttcctacaatggcacaaggagtgattgaatacaaggagaagtttgggtttgatcctttcattagcactaacatccaatattttctggatcggttttataccaaccgcatctctttccgcatgcttattaatcagcacacacttctgtttgggggtgacactaatcctgttcatcctaaacacataggaagtatcgatcccacctgtaacgtggcggatgtggtgaaagatgcatatgaaacagccaagatgctgtgtgaacagtattacctggtagctccagagctggaagttgaagaattcaatgccaaagcgccagacaaacctattcaggtggtttatgtgccctcacatctgtttcatatgctatttgagttgttcaagaactcaatgagagcgacagttgaactctatgaagacagaaaagagggctaccctgctgttaaaaccctcgttactttgggtaaagaagacttatccattaagatcagtgacctaggtggtggtgtcccacttcgaaaaatagatcgtctttttaactacatgtattctactgctcctagacccagcctggagcctaccagagctgcccctttggctggatttggttatggtttgccaatttcccgtctgtatgctagatattttcaaggagatctgaaactgtattccatggaaggagtgggtactgatgctgtcatttatttgaaggctctttcaagtgagtcatttgagagacttccagtttttaataagtccgcatggcgccattacaagaccacgcctgaagccgatgattggagcaatcccagcagtgaacccagggatgcttcaaaatacaaagcaaaacaagacaagatcaagactaatagaactttctagaggactgaatgctgtggtcctctctgtgaagaaagattgccttctgcaagtcaaacagagagaactgctttctcccacctgctctgagcgtggcatcacagttattcctagtgcttaaatgtgtattttctctctaccacctggactttcccaaagagtttttcctgtagctactccagatcttccactaaagtagtaactttttaatgacatcttgctgtggtgtgattgatgcctgtcaccgaagagcacagagcctccttacagctcttgtgccctcgtactctccatcttgttatcatagcatctgatgtcttcagtccttccaggattctgtgcgcctttcccattccagatacagcagatcgtactgttgctccttgtgaccaaataccatatttgtcccaaacctccacctagggccctgggaccctgaaagtggaagacatcaggtggccatgccctgatgatttagtcccagagccctccgtctctcccgtgcctccctccgccactctatgatttagacttttgccttcttccatctgatcggattctcattgtgagatgtggtgactttcatgttagatcttcttcattgatgccttggttttattttaaaattcatttgtatatgtctgttgattaaagcattcgaaatgttatcttagaa

SEQ ID NO: 15291 - DNA, 396 bp, Homo sapiens
  source 1..396: mol_type = unassigned DNA
gggagagataatgcatgtgagaaaacttcatatatgtttctacgaaaggaacttcctgtgcggctggctaacacaatgagagaagttaatcttctgccggataatttacttaaccgcccttcagtgggattggttcagagttggtatatgcagagttttcttgaacttttagaatatgaaaataagagccctgaggatccacaggtcttggataagtaagtatggtaccacttagctgaaagtaaaaatatctaggtaagaaagattttggtaaatgtaattcaagtcattaagactcaaggagtatgaatgtggacaaaagcgttcattttcttaatgagtagtgactcaacattgagttttttttttttaattcgagctaagaatgtaacacaa

SEQ ID NO: 15292 - DNA, 1766 bp, Homo sapiens
  source 1..1766: mol_type = unassigned DNA
caggacgccgcccggcgcggagtggctgccctgcgcggggacacttagagcccggtgggcgggaggaaggcggcatgccccagacggtgatcctcccgggccctgcgccctggggcttcaggctctcagggggcatagacttcaaccagcctttggtcatcaccaggattacaccaggaagcaaggcggcagctgccaacctgtgtcctggagatgtcatcctggctattgacggctttgggacagagtccatgactcatgctgatgcgcaggacaggattaaagcagcagctcaccagctgtgtctcaaaattgacaggggagaaactcacttatggtctccacaagtatctgaagatgggaaagcccatcctttcaaaatcaacttagaatcagaaccacaggacgggaactactttgaacacaagcataatattcggcccaaacctttcgtgatcccgggccgaagcagtggatgcagcactccctccgggattgactgtggcagtggacgcagcaccccttcttctgtcagtactgttagtaccatttgcccaggtgacttgaaagttgcggctaagctggcccctaacattcctttggaaatggaacttcctggtgtgaagattgtacatgctcagtttaatacacctatgcagttgtactcagatgacaatattatggaaacactccagggtcaggtttcaacagccctaggggaaacacctttgatgagcgagcccacagcctcggtgccccccgagtcggacgtgtaccggatgctccacgacaatcggaatgagcccacacagcctcgccagtcgggctccttcagagtgctccagggaatggtggacgatggctctgatgaccgtccggctggaacgcggagtgtgagagctccggtgacgaaagtccatggcggttcaggcggggcacagaggatgccgctctgtgacaaatgtgggagtggcatagtcggtgctgtggtgaaggcgcgggataagtaccggcaccctgagtgcttcgtgtgtgccgactgcaacctcaacctcaagcaaaagggctacttcttcatagaaggggagctgtactgcgaaacccacgcaagagcccgcacaaagcccccagagggctatgacacggtcactctgtatcccaaagcttaagtctctgcaggcgtggcacgcacgcacgcacccacccacgcgcacttacacgagaagacattcatggctttgggcagaaggattgtgcagattgtcaactccaaatctaaagtcaaggctttagacctttatcctattgtttattgaggaaaaggaatgggaggcaaatgcctgctatgtgaaaaaaacatacacttagctatgttttgcaactctttttggggctagcaataatgatatttaaagcaataattttttgtatgtcatactccacaatttacatgtatattacagccatcaaacacataaacatcaagatatttgaaggactctaattgtctttccttgacaagttgattttgcaattgtggtaaatagcaaataacaatcttgtattctaacataatctgcagttgtctgtatgtgttttaactattacagtgcatgttagggagaaattccctgaatttctttagttttgtattcaaacaattatgccactcgatgcaacaaacataataaatacataaaagatttaaaaaatacctaatgaagtggcattcattgaattcaaataaaatcaacatttcaatgaga

SEQ ID NO: 15293 - DNA, 5137 bp, Homo sapiens
  source 1..5137: mol_type = unassigned DNA
tctgaatgtaaaatagaggttgttggtttttttttttaacaaattacacatttgtgatctttgcaatatatgtgtaaccaaaaccgaaaattgcaaagaaattgcttggagctgattaacttacatgctgctatttagaaattctactagagattattaatgcacaaatattttcagagaagttgccttatttacaggacaacactacctatatttaattatcatcttaaggctaagaagaaataagggcagaggtattttccataaagccattatattatgttagtttttattaattcaattctatttacaaagactttaaggcaggccttactttctttaaaaaaaaaaaaaaaaaaaaaaaaaaaaagctaagctccacaaaacttaagtgattcagtactgcctgattctttaattagcctgagagacttgtaatccaccaaaacttaactaggcagttaggcaattagtgtgctgtcttctctcatatcaaaaaggcttgaatcatggccattgtcattacttacaattatttctagtttttcatgccataataatggctaattatactggttaatcacaaaactcagccaatccaaattcactaataaatcagctaaaacaattagattgcaccatttataaatgtttagctacacacattttcacaggatctaggattaggcatttttctaaagctacatttgatggtttgggtcattctacctaagagcagctacaataatgttaatcaactccttggctgtgagccattattatgaaggaaaaaagttaagtgaacaaggtatcagcgaactcaatcacactacaaaatcatagactaaatggaattcaactcagaccttctttttgggttcaggaggctgttaacatatgctgtccaaggttggtgagagaaatgctgttctttaccccatcacagattctcagatcccctgagatttggggtgggtggagtcaaaggctcctaggctaggatttgaagctgtaccccattgccctggcataatttttgtttttttaagtgagctttgccaataggcctagatagtagaagaaggagtatactcagaagaactgaaagaaagcgttttgtagctggggtccctacaggaagttgttcatattctcaggcacaagaatcttctatgaaaaactctggtcttacacctagggaagagagacactctcttttctttcctcctcctttttcttctttttgtttttgacagtctgttttctaacagaaaagcataacccacaacttatctgaaatgaaaaggagaaaactaaatattacaggatcttttaatgttttaaagacgataatctctttccagtattatttcaaataattatatatgtttgtacgatttcaaatctggaacactggtgccacattcacgaaagtaaatgaagttgatgtgaatgtgtaagggaaaatactgttagaaagatttatcttactaattctgccaaatagaaagatttgggactgggcgcggtggctcatgcctataatcccagcactctgggaggccgaggcaagtggatcacctgaggtcaggagttcgagaccagcctggccaacgtggtgaaaccctgtctctactaaaaatacaaaaattatctgggtgtggtggcacacacctgtaatcccagctacttgggagactgaggcaggagaatcacctgaaccggggaggcggaggtttgagtgagccgagattgcgccattgcattctagcctgggcaacaagagtgaaactctgtctcataaataaataaatattaaaaaaaaagatttggaaagagaatcagctgacctgtaattgagcattcccttttggttttcttctgttgcttagaagaaaaaagttttaaaggctttacaaaattataaatctgtacaaaaactggaaaacatgattcccacgttaaaaaaaaaaattataggattttagatcattcagacatgtttcaaactcagggttgaggactctgctgtttggtccttttcccaaggaataaagtgaaaatcctcctgtgaaccatacacattttctctctctgaattactgactttaatcttttggggactagagtaaacatgaagaggtcttcaaacacacaacatgaaatcattacaataaagggaggggttgtatatgttattcccgctttcataaaaagagtctctcacttgtgttttctaaaattaagattatagcttaatccaagttaagaactttttgttaaaaggtgttttcaaaaacgagttttcacctggcttagtttaaatgattcagtgtagctaattattcgtaaatgctcattctccttgttttgttccctcatgtctcaaaatgggggaaagtttatcaatgtatcaatagaagagaaaccatatgtaaattctacttgagaaaacgttaagtatatttttcaagccaaaaatcccatttctgacacaaaatgtctgtattcaaatgagtcattagaatttcttaaagctatagatgaagaagtcaggggcagataagaggtgcaatgtttaaattattttataatatgttaaataaggtcagttccttttcaccttaacatttgatcggtgaatatagcacatgtaaagctcagagaaaaccatggaaaagtttatggctaactcctcctctaatctttccgtcaatctcgtcgtgggtaaagatgcctttattaacagtagtgatgctgttggtttcgctcactaatggctttcttgtgcgctgtgtggctgtgtattttgtctgccattgtacaggaattcaaacccattggtaccgcgcacaacagaagggcccagccttttgttgcagctgcaaacattgatgacaaaagacaggtagtgagcgcttcctataactcgccaattgggctctattcaactagcaatatacaagatgcgcttcacggacagctgcggggtctcattcctagctcacctcaaaagtaagtatccggctctgttctggccacagtgtacctaacagtgatagcatggtttcttttcttttcaaaagtccagctcttgctgttttatttttactttcctgaaggcactatcagatttctcttttaaagacaagcatctaaaacatgttctaattgttgtggggtccaatccgccagtgcctgaccgtttagcggatagatggttggaaagaagacatcgtcctggtcccgtcatcgcctttcttagttatgacagtagttggtggtaaatgatcctccctgtacaactatcgttcgtttaatcttatctgcaacagtgtccgccttccactgagggcctttttaacgctttgttttcacaggacgggaactactttgaacacaagcataatattcggcccaaacctttcgtgatcccgggccgaagcaggtcataagcgctgagactgtggagtttgcagtgcatgcttcttaaatcagttcttactaatcatcaagaaaagtaactggtagatgtttggagtggcttttctcattgcgaagcttatttcaaaagcaaaaagaaacaaactcacttggcagagaacagaagccaaataacttgcatttccaagagtaaatattgacaagatgacagagctgtgaaattgtatgcaatcaccacgtgtatttatagcgaacacccctgaggctctggggatcccatccagaacactgtgacctttgagtcgggcagtcagtatgtctatcccaggtcaggaaagccctgccagcaggagcgagcatggaaaccagccccggttaggaggaaggaatcaggtgaacaagccagaatgataaggagcaagctcttccttctcgtctctcagtagagaaactgatcatcttcagatcatccttttcaaatatcttctctagaaattgaactccaacctaaggggaaagaaaataatgccctgtattgccaaatcaggaaacagtgacttcaggaaacctctgttccatccttctgacctcagctaagccagtcagcccacaggaaggaagctggtggttagaccggattgattccgacaggaacattgaatatgatttaccgcagctgttgcaaactgatggcccataggtggatttatttcacagcgagcccacagcctcggtgccccccgagtcggacgtgtaccggatgctccacgacaatcggaatgagcccacacagcctcgccagtcgggctccttcagagtgctccagggaatggtggacgatggctctgatgaccgtccggctggaacgcggagtgtgagagctccggtgacgaaagtccatggcggttcaggcggggcacagaggatgccgctctgtgacaaatgtgggagtggcatagtcggtgctgtggtgaaggcgcgggataagtaccggcaccctgagtgcttcgtgtgtgccgactgcaacctcaacctcaagcaaaagggctacttcttcatagaaggggagctgtactgcgaaacccacgcaagagcccgcacaaagcccccagagggctatgacacggtcactctgtatcccaaagcttaagtctctgcaggcgtggcacgcacgcacgcacccacccacgcgcacttacacgagaagacattcatggctttgggcagaaggattgtgcagattgtcaactccaaatctaaagtcaaggctttagacctttatcctattgtttattgaggaaaaggaatgggaggcaaatgcctgctatgtgaaaaaaacatacacttagctatgttttgcaactctttttggggctagcaataatgatatttaaagcaataattttttgtatgtcatactccacaatttacatgtatattacagccatcaaacacataaacatcaagatatttgaaggactctaattgtctttccttgacaagttgattttgcaattgtggtaaatagcaaataacaatcttgtattctaacataatctgcagttgtctgtatgtgttttaactattacagtgcatgttagggagaaattccctgaatttctttagttttgtattcaaacaattatgccactcgatgcaacaaacataataaatacataaaagatttaaaaaa

SEQ ID NO: 15294 - DNA, 1672 bp, Homo sapiens
  source 1..1672: mol_type = unassigned DNA
cgcttccaaagttggagctctccggggtgggagggggcggggaggacggcggggcggtgacgtcacccccagcggggataaagcgcccccgcccgggtcggggccaggacgccgcccggcgcggagtggctgccctgcgcggggacacttagagcccggtgggcgggaggaaggcggcatgccccagacggtgatcctcccgggccctgcgccctggggcttcaggctctcagggggcatagacttcaaccagcctttggtcatcaccaggattacaccaggaagcaaggcggcagctgccaacctgtgtcctggagatgtcatcctggctattgacggctttgggacagagtccatgactcatgctgatgcgcaggacaggattaaagcagcagctcaccagctgtgtctcaaaattgacaggggagaaactcacttatggtctccacaagtatctgaagatgggaaagcccatcctttcaaaatcaacttagaatcagaaccacaggaattcaaacccattggtaccgcgcacaacagaagggcccagccttttgttgcagctgcaaacattgatgacaaaagacaggtagtgagcgcttcctataactcgccaattgggctctattcaactagcaatatacaagatgcgcttcacggacagctgcggggtctcattcctagctcacctcaaaacgagcccacagcctcggtgccccccgagtcggacgtgtaccggatgctccacgacaatcggaatgagcccacacagcctcgccagtcgggctccttcagagtgctccagggaatggtggacgatggctctgatgaccgtccggctggaacgcggagtgtgagagctccggtgacgaaagtccatggcggttcaggcggggcacagaggatgccgctctgtgacaaatgtgggagtggcatagtcggtgctgtggtgaaggcgcgggataagtaccggcaccctgagtgcttcgtgtgtgccgactgcaacctcaacctcaagcaaaagggctacttcttcatagaaggggagctgtactgcgaaacccacgcaagagcccgcacaaagcccccagagggctatgacacggtcactctgtatcccaaagcttaagtctctgcaggcgtggcacgcacgcacgcacccacccacgcgcacttacacgagaagacattcatggctttgggcagaaggattgtgcagattgtcaactccaaatctaaagtcaaggctttagacctttatcctattgtttattgaggaaaaggaatgggaggcaaatgcctgctatgtgaaaaaaacatacacttagctatgttttgcaactctttttggggctagcaataatgatatttaaagcaataattttttgtatgtcatactccacaatttacatgtatattacagccatcaaacacataaacatcaagatatttgaaggactctaattgtctttccttgacaagttgattttgcaattgtggtaaatagcaaataacaatcttgtattctaacataatctgcagttgtctgtatgtgttttaactattacagtgcatgttagggagaaattccctgaatttctttagttttgtattcaaacaattatgccactcgatgcaacaaacataataaatacataaaagatttaaaaaa

SEQ ID NO: 15295 - DNA, 906 bp, Homo sapiens
  source 1..906: mol_type = unassigned DNA
gaattttaccgacaatttgatgactgagaataatctgagtgctcactgctgcactttctgtcatgtgtatattgccttttctctgggaaaagttaattttgttcacatctatcattatgtatccatcagactcaagtcttgttcttcttaattactatttcctgacaattatcttttagtttccttccaaagtattttgccaagtggaggagtgtgggtgtgactccccgatttgttgttcaatgacatttccaaggcagccatttgaattcacattatgcttttaactatactagagattcacttgaaaatactagacctctgttcaggagtggctgtgcatagagtaatggctgagtattgatgtctctggcctcttgcacgtctggtgcctcccagcacctgacgatgctccccgccgtgcctgtgtttcagcgagcccacagcctcggtgccccccgagtcggacgtgtaccggatgctccacgacaatcggaatgagcccacacagcctcgccagtcgggctccttcagagtgctccagggaatggtggacgatggctctgatgaccgtccggctggaacgcggagtgtgagagctccggtgacgaaagtccatggcggttcaggcggggcacagaggatgccgctctgtgacaaatgtgggagtggcatagtcggtgctgtggtgaaggcgcgggataagtaccggcaccctgagtgcttcgtgtgtgccgactgcaacctcaacctcaagcaaaagggctacttcttcatagaaggggagctgtactgcgaaacccacgcaagagcccgcacaaagcccccagagggctatgacacggtcactctgtatcccaaagcttaagtctctgcaggcgtggcacgcacgcacgcacccaccca

SEQ ID NO: 15296 - DNA, 571 bp, Homo sapiens
  source 1..571: mol_type = unassigned DNA
acttagagcccggtgggcgggaggaaggcggcatgccccagacggtgatcctcccgggccctgcgccctggggcttcaggctctcagggggcatagacttcaaccagcctttggtcatcaccagggggagaaactcacttatggtctccacaagtatctgaagatgggaaagcccatcctttcaaaatcaacttagaatcagaaccacaggaattcaaacccattggtaccgcgcacaacagaagggcccagccttttgttgcagctgcaaacattgatgacaaaagacaggtagtgagcgcttcctataactcgccaattgggctctattcaactagcaatatacaagatgcgcttcacggacagctgcggggtctcattcctagctcacctcaaaacgagcccacagcctcggtgccccccgagtcggacgtgtaccggatgctccacgacaatcggaatgagcccacacagcctcgccagtcgggctccttcagagtgctccagggaatggtggacgatggctctgatgaccgtccggctggaacgcggagtgtgagagctccggtga

SEQ ID NO: 15297 - DNA, 581 bp, Homo sapiens
  source 1..581: mol_type = unassigned DNA
aggacgccgcccggcgcggagtggctgccctgcgcggggacacttagagcccggtgggcgggaggaaggcggcatgccccagacggtgatcctcccgggccctgcgccctggggcttcaggctctcagggggcatagacttcaaccagcctttggtcatcaccagggggagaaactcacttatggtctccacaagtatctgaagatgggaaagcccatcctttcaaaatcaacttagaatcagaaccacaggacgggaactactttgaacacaagcataatattcggcccaaacctttcgtgatcccgggccgaagcagtggatgcagcactccctccgggattgactgtggcagtggacgcagcaccccttcttctgtcagtactgttagtaccatttgcccaggtgacttgaaagttgcggctaagctggcccctaacattcctttggaaatggaacttcctggtgtgaagattgtacatgctcagtttaatacacctatgcagttgtactcagatgacaatattatggaaacactccagggtcaggtttcaacagccctaggggaaacacctttgatg

SEQ ID NO: 15298 - DNA, 2819 bp, Homo sapiens
  source 1..2819: mol_type = unassigned DNA
cggagtggctgccctgcgcggggacacttagagcccggtgggcgggaggaaggcggcatgccccagacggtgatcctcccgggccctgcgccctggggcttcaggctctcagggggcatagacttcaaccagcctttggtcatcaccaggattacaccaggaagcaaggcggcagctgccaacctgtgtcctggagatgtcatcctggctattgacggctttgggacagagtccatgactcatgctgatgcgcaggacaggattaaagcagcagctcaccagctgtgtctcaaaattgacaggggagaaactcacttatggtctccacaagtatctgaagatgggaaagcccatcctttcaaaatcaacttagaatcagaaccacaggaattcaaacccattggtaccgcgcacaacagaagggcccagccttttgttgcagctgcaaacattgatgacaaaagacaggtagtgagcgcttcctataactcgccaattgggctctattcaactagcaatatacaagatgcgcttcacggacagctgcggggtctcattcctagctcacctcaaaagacgggaactactttgaacacaagcataatattcggcccaaacctttcgtgatcccgggccgaagcaggtcataagcgctgagactgtggagtttgcagtgcatgcttcttaaatcagttcttactaatcatcaagaaaagtaactggtagatgtttggagtggcttttctcattgcgaagcttatttcaaaagcaaaaagaaacaaactcacttggcagagaacagaagccaaataacttgcatttccaagagtaaatattgacaagatgacagagctgtgaaattgtatgcaatcaccacgtgtatttatagcgaacacccctgaggctctggggatcccatccagaacactgtgacctttgagtcgggcagtcagtatgtctatcccaggtcaggaaagccctgccagcaggagcgagcatggaaaccagccccggttaggaggaaggaatcaggtgaacaagccagaatgataaggagcaagctcttccttctcgtctctcagtagagaaactgatcatcttcagatcatccttttcaaatatcttctctagaaattgaactccaacctaaggggaaagaaaataatgccctgtattgccaaatcaggaaacagtgacttcaggaaacctctgttccatccttctgacctcagctaagccagtcagcccacaggaaggaagctggtggttagaccggattgattccgacaggaacattgaatatgatttaccgcagctgttgcaaactgatggcccataggtggatttatttcacaggcatgttttatttaattcttttgtttaaaaaaaaaaaaagaatttaagtgcctttagacagaacatttaaactcaccatcttgtcaaaatgcacatcactcttaagtgtgtgagacacggcccattttcatacatgtgtgacctcctggcccctctagacacccgagcttatgactcctgtcataagctgcggatagcaggtcatcccttatgtatgatttccatgtccagacctttcaggaagctacaggcagagccaggtgattgtctcaaaatatgccagacaattcttgtgatatcagatccagaaaggagccctggaccagaggagcaggagaaaggcgttaagaaggcaaccatgagcaaacacatcttcccccccctagaacgtgagctcagtgtctgcaggggcctggtctgactggctcaacattatacccccagcacctagaaatgagacagaataaatgctcaataagcgaccatctacaaacagacaaaataaatgcccaataaatgctcactggataaaggaatcaaatcctgagggtgcacaacatttcccaagcaagtggcaagaagagtccagagccgtctcgctcccgatgctggcagctctgtgtcctctcctgcttctctctatgtgttccctcgttcatactctgttctcatctgcatcttttccgtttctccactttcaacagcttccccaccccaacccaaccccaataacaaaacactggatttaaagttaaaaggatatgatattttactgttgaatatatacaacttcccaaagaagcatagtaaaattaatcacttgcattcttttcaggttagtgtgactgagtccacccacacaagctctggggcttcagaaggcttgaataaagtgatacgttagagtaacacatatcctgcctttactaaaaacctataacatttaattttataaaaagtcaggaaagtcagagaatcctaggtatataatcaccttttaaaaaaatttttcattttaacttaaacatagggataatggcaagccactcataatgttgtcatttgaagatcacaccttttaatgtagctgaatttggaagagagaaggagagaaacagaaatgagaaggtttgcttaaaaaacagatgccagtgcacaaatcttaaagaattataaggcctggtgcgatggctcacacctgtaatcccagcactttgggagacagaggtgggcgaatcacaaggtcaggagttcgagaccatcctggccaacatggtgtaaccccatgtctaccaaaaatacaaaaaattagctgggcatggtggcgggcacctgtaatcccagctactggggaggctgaggcaggagaatcgcctgagcctgggaggcggaggttgtagtgagctgagatcatgccactgcaacaagcgtgagactccatctcaaaaaaaaaaaaaaaaaaa

SEQ ID NO: 15299 - DNA, 510 bp, Homo sapiens
  source 1..510: mol_type = unassigned DNA
aggacgccgcccggcgcggagtggctgccctgcgcggggacacttagagcccggtgggcgggaggaaggcggcatgccccagacggtgatcctcccgggccctgcgccctggggcttcaggctctcagggggcatagacttcaaccagcctttggtcatcaccaggattacaccaggaagcaaggcggcagctgccaacctgtgtcctggagatgtcatcctggctattgacggctttgggacagagtccatgactcatgctgatgcgcaggacaggattaaagcagcagctcaccagctgtgtctcaaaattgacaggacgggaactactttgaacacaagcataatattcggcccaaacctttcgtgatcccgggccgaagcaggtcataagcgctgagactgtggagtttgcagtgcatgcttcttaaatcagttcttactaatcatcaagaaaagtaactggtagatgtttggagtggcttttctcattgcgaagcttatttcaaa

SEQ ID NO: 15300 - DNA, 764 bp, Homo sapiens
  source 1..764: mol_type = unassigned DNA
tcatcctggctattgacggctttgggacagagtccatgactcatgctgatgcgcaggacaggattaaagcagcagctcaccagctgtgtctcaaaattgacaggggagaaactcacttatggtctccacaagtatctgaagatgggaaagcccatcctttcaaaatcaacttagaatcagaaccacaggaattcaaacccattggtaccgcgcacaacagaagggcccagccttttgttgcagctgcaaacattgatgacaaaagacaggtagtgagcgcttcctataactcgccaattgggctctattcaactagcaatatacaagatgcgcttcacggacagctgcggggtctcattcctagctcacctcaaaagtaagtatccggctctgttctggccacagtgtacctaacagtgatagcatggtttcttttcttttcaaaagtccagctcttgctgttttatttttactttcctgaaggcactatcagatttctcttttaaagacaagcatctaaaacatgttctaattgttgtggggtccaatccgccagtgcctgaccgtttagcggatagatggttggaaagaagacatcgtcctggtcccgtcatcgcctttcttagttatgacagtagttggtggtaaatgatcctccctgtacaactatcgttcgtttaatcttatctgcaacagtgtccgccttccactgagggcctttttaacgctttgttttcacaggacgggaactactttgaacacaa

SEQ ID NO: 15301 - DNA, 622 bp, Homo sapiens
  source 1..622: mol_type = unassigned DNA
aggacgccgcccggcgcggagtggctgccctgcgcggggacacttagagcccggtgggcgggaggaaggcggcatgccccagacggtgatcctcccgggccctgcgccctggggcttcaggctctcagggggcatagacttcaaccagcctttggtcatcaccaggattacaccaggaagcaaggcggcagctgccaacctgtgtcctggagatgtcatcctggctattgacggctttgggacagagtccatgactcatgctgatgcgcaggacaggattaaagcagcagctcaccagctgtgtctcaaaattgacaggggagaaactcacttatggtctccacaagtatctgaagatgggaaagcccatcctttcaaaatcaacttagaatcagaaccacaggtatgcgttttagagcaaatgatacacattgtatttccttttaaatcatggggatgccttccaaggggaggaagagacaaatagaaaaattggaacaagccacctatgaagctgttgtctgtcattcctctccgagattaatttatattatccgtgttttcttacatcaagaaaaagaagtgttcctatgtgaacatcttgttgaaagacaaaatatgc

SEQ ID NO: 15302 - DNA, 2352 bp, Homo sapiens
  source 1..2352: mol_type = unassigned DNA
cggtgacgtcacccccagcggggataaagcgcccccgcccgggtcggggccaggacgccgcccggcgcggagtggctgccctgcgcggggacacttagagcccggtgggcgggaggaaggcggcatgccccagacggtgatcctcccgggccctgcgccctggggcttcaggctctcagggggcatagacttcaaccagcctttggtcatcaccagggacgggaactactttgaacacaagcataatattcggcccaaacctttcgtgatcccgggccgaagcagcgagcccacagcctcggtgccccccgagtcggacgtgtaccggatgctccacgacaatcggaatgagcccacacagcctcgccagtcgggctccttcagagtgctccagggaatggtggacgatggctctgatgaccgtccggctggaacgcggagtgtgagagctccggtgacgaaagtccatggcggttcaggcggggcacagaggatgccgctctgtgacaaatgtgggagtggcatagtcggtgctgtggtgaaggcgcgggataagtaccggcaccctgagtgcttcgtgtgtgccgactgcaacctcaacctcaagcaaaagggctacttcttcatagaaggggagctgtactgcgaaacccacgcaagagcccgcacaaagcccccagagggctatgacacggtcactctgtatcccaaagcttaagtctctgcaggcgtggcacgcacgcacgcacccacccacgcgcacttacacgagaagacattcatggctttgggcagaaggattgtgcagattgtcaactccaaatctaaagtcaaggctttagacctttatcctattgtttattgaggaaaaggaatgggaggcaaatgcctgctatgtgaaaaaaacatacacttagctatgttttgcaactctttttggggctagcaataatgatatttaaagcaataattttttgtatgtcatactccacaatttacatgtatattacagccatcaaacacataaacatcaagatatttgaaggactctaattgtctttccttgacaagttgattttgcaattgtggtaaatagcaaataacaatcttgtattctaacataatctgcagttgtctgtatgtgttttaactattacagtgcatgttagggagaaattccctgaatttctttagttttgtattcaaacaattatgccactcgatgcaacaaacataataaatacataaaagatttaaaaaatacctaatgaagtggcattcattgaattcaaataaaatcaacatttcaatgagagaacccaatcatattttaacatgtacactaacaaatattttaagataaatgtggcttcttcaggttttataactcattactctttcttatgagcacaaaatttctgatgatagaagcgttgaaatttgctagttaaaggtagttcagtctctttcaaattaaaagtttcacttgcttcaacagagactctttcaatttaaatatctctttcagatcaatattcagtcaaattgaaggttcaaagtccatcactgctgtttcttaggctcaatggttcaccacctcctcctcttcccaagatggcatctccaggaagaaacaatttagacgacttcctaaggaaggcaggggctgctggtctcctggggtcctgcttgtatccactgttgaaatccttggtttcacttgtgatctgtggtctgttttcttgacatagttgaggccaggcaataataacacctccactaccacctccaaaactctcagctcagctttcctggagtcatggatcctctgtctgagacatgcactctgcctggccctggcgcaggcagcctaccttgcaggctctgcatggcgttaccttgcctctcacccagggtgcccatggcaatgctcctgacttgcatctctcacctactttccatgtcccccactggggacgtacaggaacttctgaaactgtcccctcaggttcaaaccatggggaaccagcagggtggggaccctcagaccctctgtctcaccaccttgtgtcacatggtcatctctaccacccctcaacccccacagctgctaacttctggcctgaaacaagtgttctcctcccataaggtcccaaatgggacacaagttttattgctctgggattcttccaaacttaactgactctgaccctgacctgttcaggattttgagaggagccaaaacacgtgcctggcccctgtaggcatttgacattgcaactcctgtgccaacacatgcattcactaacaaagctattaaaaaaataaaacagacttttgagatcaaagaaa

SEQ ID NO: 15303 - DNA, 2589 bp, Homo sapiens
  source 1..2589: mol_type = unassigned DNA
cggtgacgtcacccccagcggggataaagcgcccccgcccgggtcggggccaggacgccgcccggcgcggagtggctgccctgcgcggggacacttagagcccggtgggcgggaggaaggcggcatgccccagacggtgatcctcccgggccctgcgccctggggcttcaggctctcagggggcatagacttcaaccagcctttggtcatcaccaggattacaccaggaagcaaggcggcagctgccaacctgtgtcctggagatgtcatcctggctattgacggctttgggacagagtccatgactcatgctgatgcgcaggacaggattaaagcagcagctcaccagctgtgtctcaaaattgacaggggagaaactcacttatggtctccacaagtatctgaagatgggaaagcccatcctttcaaaatcaacttagaatcagaaccacaggacgggaactactttgaacacaagcataatattcggcccaaacctttcgtgatcccgggccgaagcagcgagcccacagcctcggtgccccccgagtcggacgtgtaccggatgctccacgacaatcggaatgagcccacacagcctcgccagtcgggctccttcagagtgctccagggaatggtggacgatggctctgatgaccgtccggctggaacgcggagtgtgagagctccggtgacgaaagtccatggcggttcaggcggggcacagaggatgccgctctgtgacaaatgtgggagtggcatagtcggtgctgtggtgaaggcgcgggataagtaccggcaccctgagtgcttcgtgtgtgccgactgcaacctcaacctcaagcaaaagggctacttcttcatagaaggggagctgtactgcgaaacccacgcaagagcccgcacaaagcccccagagggctatgacacggtcactctgtatcccaaagcttaagtctctgcaggcgtggcacgcacgcacgcacccacccacgcgcacttacacgagaagacattcatggctttgggcagaaggattgtgcagattgtcaactccaaatctaaagtcaaggctttagacctttatcctattgtttattgaggaaaaggaatgggaggcaaatgcctgctatgtgaaaaaaacatacacttagctatgttttgcaactctttttggggctagcaataatgatatttaaagcaataattttttgtatgtcatactccacaatttacatgtatattacagccatcaaacacataaacatcaagatatttgaaggactctaattgtctttccttgacaagttgattttgcaattgtggtaaatagcaaataacaatcttgtattctaacataatctgcagttgtctgtatgtgttttaactattacagtgcatgttagggagaaattccctgaatttctttagttttgtattcaaacaattatgccactcgatgcaacaaacataataaatacataaaagatttaaaaaatacctaatgaagtggcattcattgaattcaaataaaatcaacatttcaatgagagaacccaatcatattttaacatgtacactaacaaatattttaagataaatgtggcttcttcaggttttataactcattactctttcttatgagcacaaaatttctgatgatagaagcgttgaaatttgctagttaaaggtagttcagtctctttcaaattaaaagtttcacttgcttcaacagagactctttcaatttaaatatctctttcagatcaatattcagtcaaattgaaggttcaaagtccatcactgctgtttcttaggctcaatggttcaccacctcctcctcttcccaagatggcatctccaggaagaaacaatttagacgacttcctaaggaaggcaggggctgctggtctcctggggtcctgcttgtatccactgttgaaatccttggtttcacttgtgatctgtggtctgttttcttgacatagttgaggccaggcaataataacacctccactaccacctccaaaactctcagctcagctttcctggagtcatggatcctctgtctgagacatgcactctgcctggccctggcgcaggcagcctaccttgcaggctctgcatggcgttaccttgcctctcacccagggtgcccatggcaatgctcctgacttgcatctctcacctactttccatgtcccccactggggacgtacaggaacttctgaaactgtcccctcaggttcaaaccatggggaaccagcagggtggggaccctcagaccctctgtctcaccaccttgtgtcacatggtcatctctaccacccctcaacccccacagctgctaacttctggcctgaaacaagtgttctcctcccataaggtcccaaatgggacacaagttttattgctctgggattcttccaaacttaactgactctgaccctgacctgttcaggattttgagaggagccaaaacacgtgcctggcccctgtaggcatttgacattgcaactcctgtgccaacacatgcattcactaacaaagctattaaaaaaataaaacagacttttgagatcaaagaaa

SEQ ID NO: 15304 - DNA, 1016 bp, Homo sapiens
  source 1..1016: mol_type = unassigned DNA
aggacgccgcccggcgcggagtggctgccctgcgcggggacacttagagcccggtgggcgggaggaaggcggcatgccccagacggtgatcctcccgggccctgcgccctggggcttcaggctctcagggggcatagacttcaaccagcctttggtcatcaccagggggagaaactcacttatggtctccacaagtatctgaagatgggaaagcccatcctttcaaaatcaacttagaatcagaaccacaggacgggaactactttgaacacaagcataatattcggcccaaacctttcgtgatcccgggccgaagcagtggatgcagcactccctccgggattgactgtggcagtggacgcagcaccccttcttctgtcagtactgttagtaccatttgcccaggtgacttgaaagttgcggctaagctggcccctaacattcctttggaaatggaacttcctggtgtgaagattgtacatgctcagtttaatacacctatgcagttgtactcagatgacaatattatggaaacactccagggtcaggtttcaacagccctaggggaaacacctttgatgagcgagcccacagcctcggtgccccccgagtcggacgtgtaccggatgctccacgacaatcggaatgagcccacacagcctcgccagtcgggctccttcagagtgctccagggaatggtggacgatggctctgatgaccgtccggctggaacgcggagtgtgagagctccggtgacgaaagtccatggcggttcaggcggggcacagaggatgccgctctgtgacaaatgtgggagtggcatagtcggtgctgtggtgaaggcgcgggataagtaccggcaccctgagtgcttcgtgtgtgccgactgcaacctcaacctcaagcaaaagggctacttcttcatagaaggggagctgtactgcgaaacccacgcaagagcccgcacaaagcccccagagggctatgacacggtcactctgtatcccaaagcttaa

SEQ ID NO: 15305 - DNA, 2282 bp, Homo sapiens
  source 1..2282: mol_type = unassigned DNA
gctgcggcggcggcggctcctcctcagagtccggctcaggctccggctgcggctccagcccgcgatgccccattccgtgaccctgcgcgggccttcgccctggggcttccgcctggtgggcggccgggacttcagcgcgcccctcaccatctcacgggtccatgctggcagcaaggctgcattggctgccctgtgcccaggagacctgatccaggccatcaatggtgagagcacagagctcatgacacacctggaggcacagaaccgcatcaagggctgccacgatcacctcacactgtctgtgagcaggcctgagggtaggagctggcccagtgcccctgatgacagcaaggctcaggcacacaggatccacatcgatcctgagatccaggacggcagcccaacaaccagcaggcggccctcaggcaccgggactgggccagaagatggcagaccaagcctgggatctccatatggacaaccccctcgctttccagtccctcacaatggcagcagcgaggccaccctgccagcccagatgagcaccctgcatgtgtctccaccccccagcgctgacccagccagaggcctcccgcggagccgggactgcagagtcgacctgggctccgaggtgtacaggatgctgcgggagccagccgagcccgtggccgcggagcccaagcagtcaggctccttccgctacttgcagggcatgctagaggccggcgagggcggggattggcccgggcctggcggcccccggaacctcaagcccacggccagcaagctgggcgctccgctgagcggcctgcaggggctgcccgagtgcacgcgctgcggccacggcatcgtgggcaccatcgtcaaggcacgggacaagctctaccatcccgagtgcttcatgtgcagtgactgcggcctgaacctcaagcagcgtggttacttctttctggacgagcggctctactgtgagagccacgccaaggcgcgcgtgaagccgcccgagggctacgacgtggtggcggtgtaccccaatgccaaggtggaactcgtctgagctgggaccctgctcccacgcctgcttcttaaggtccctgctcggccggtgtaaatatgtttcaccctgtccctctaataaagctcctctgctccaccttgaacctgtcacctggcctgccaccctcctgcgcaggccatgcatggctcccgagtacagtagtatctgcttaggtgccaggcatgtcctaggctctgggtgcagtagtgagcaggacgggtaccatgctgccctgaagggggccacagcctgggtggaaggcagacctgaatcacaacgggccagctctagtaatacgaaggtgaggtctgggatgctgcgtgcggcgcgacgacaggaggtatgacctgggtggggtcagggaaagtcttagctgagaactaagagatgagggaggcacaaactctgcacgggggaactgtgtgtgcaaaggtgagctgggggcgagaaaggcctctgtggccgtcatcggcactagcgggttgggggtggtggtggggtgctggcagcctcaggagcgatcgctcccctggagagggtgattgagtgtggagatcaccggggccgccgcgggccgtctgcacttctgttccaggtttttctggcattttctgttccaggtttcttccacccacgagcactttattctcctccgagacccccttttcttccccttcctctctcccccaccagggggcgcgcttaaatttccagacagagaccagaaggaaggtttagaaagaaaagaacacttgcccagggcagctttgccctccaagaggctccctcctgtctctaagtcaattccacccctcctcgaagtcccggcttccacccctctcctcagagtcccggcgtttacctcgtggtgtgtttgccttgggcctttcatgccccggctgcacacatcgtctgtgaattgtggctgttcactcccgaggatgtgtcctagactccgggtcgcgtggatctaccctctagtttacttgctcgggagaagaaactgactcgttttatttagtgcctatttagcgagcccagagtaacgtacatttgtgctgttttcaattttgtgctatcgcaaatcacaaaaaaactgttatcaattcacattcatcatcagcacgagacccatttccttgtgctcctgccagctcaggatattatgtttcttttttcatttttgccagtctgttaagtaaaatgtcatatgcgtttgttttaa

SEQ ID NO: 15306 - DNA, 582 bp, Homo sapiens
  source 1..582: mol_type = unassigned DNA
agagtccggctcaggctccggctgcggctccagcccgcgatgccccattccgtgaccctgcgcgggccttcgccctggggcttccgcctggtgggcggccgggacttcagcgcgcccctcaccatctcacgggtccatgctggcagcaaggctgcattggctgccctgtgcccaggagacctgatccaggccatcaatggtgagagcacagagctcatgacacacctggaggcacagaaccgcatcaagggctgccacgatcacctcacactgtctgtgagcaggcctgagggtaggagctggcccagtgcccctgatgacagcaaggctcaggcacacaggatccacatcgatcctgagatccaggtatgtacagacactgcctggcctggcctggctcagagtgagcccagggcagaggggccagcatgcaggttcacctgcactgaatgtcctcactggggctctcagatacccaagacagagactgaagcagaagttttctctggaccacatccataccccatcccatgttcctcagatgatgagcacctggtgtgggctctgtctctactccgggca

SEQ ID NO: 15307 - DNA, 1084 bp, Homo sapiens
  source 1..1084: mol_type = unassigned DNA
ggctcaggctccggctgcggctccagcccgcgatgccccattccgtgaccctgcgcgggccttcgccctggggcttccgcctggtgggcggccgggacttcagcgcgcccctcaccatctcacgggacggcagcccaacaaccagcaggcggccctcaggcaccgggactgggccagaagatggcagaccaagcctgggatctccatatggacaaccccctcgctttccagtccctcacaatggcagcagcgaggccaccctgccagcccagatgagcaccctgcatgtgtctccaccccccaggtagcacagagatgccttcggtgccatgcccagaacccatcttaacccttgatccctcaaatctcacccagtcccactctgacccctgacacttgatccttgggtcttagctggttgcattctgactcataagccttaccagaccccaagtccacagggtgaaggctggaactgcatcccttcctcctctatttctttctccctcccagcgctgacccagccagaggcctcccgcggagccgggactgcagagtcgacctgggctccgaggtgtacaggatgctgcgggagccagccgagcccgtggccgcggagcccaagcagtcaggctccttccgctacttgcagggcatgctagaggccggcgagggcggtaagacgcctgccacctgtccccatctgccttcccactccctgcagtgcccaggttgccccctagcgaccccacgtcccgcctcgcagtcacctgccctcttcggtctctgcggcccggtcccacgcccttgctacaaccttgctacgccctggcttcccgattccctctccaccccctgtcgctgcccctcaccccacgcccgccaaacccgttccccagtctcgggtgccgatggcccgtctggcgcccaaccaaacaccccgcagaaatggagttctgacctcctcaccccgttcatgccacctacgctccgggtttcaggggattggcccgggcctggcggcccccggaacctcaagcccacggccagcaagctgggcgctccgctgagcggcctgcagggg

SEQ ID NO: 15308 - DNA, 1006 bp, Homo sapiens
  source 1..1006: mol_type = unassigned DNA
caggctccggctgcggctccagcccgcgatgccccattccgtgaccctgcgcgggccttcgccctggggcttccgcctggtgggcggccgggacttcagcgcgcccctcaccatctcacgggtccatgctggcagcaaggctgcattggctgccctgtgcccaggagacctgatccaggccatcaatggtgagagcacagagctcatgacacacctggaggcacagaaccgcatcaagggctgccacgatcacctcacactgtctgtgagcaggcctgagggtaggagctggcccagtgcccctgatgacagcaaggctcaggcacacaggatccacatcgatcctgagatccaggacggcagcccaacaaccagcaggcggccctcaggcaccgggactgggccagaagatggcagaccaagcctgggatctccatatggacaaccccctcgctttccagtccctcacaatggcagcagcgaggccaccctgccagcccagatgagcaccctgcatgtgtctccaccccccagcgctgacccagccagaggcctcccgcggagccgggactgcagagtcgacctgggctccgaggtgtacaggatgctgcgggagccagccgagcccgtggccgcggagcccaagcagtcaggctccttccgctacttgcagggcatgctagaggccggcgagggcggggcaccatcgtcaaggcacgggacaagctctaccatcccgagtgcttcatgtgcagtgactgcggcctgaacctcaagcagcgtggttacttctttctggacgagcggctctactgtgagagccacgccaaggcgcgcgtgaagccgcccgagggctacgacgtggtggcggtgtaccccaatgccaaggtggaactcgtctgagctgggaccctgctcccacgcctgcttcttaaggtccctgctcggccggtgtaaatatgtttcaccctgtccctctaataaagctcctctgctccaccttgaa

SEQ ID NO: 15309 - DNA, 538 bp, Homo sapiens
  source 1..538: mol_type = unassigned DNA
tccaggagttcccaccagtaggagctcccacccaaaagaatggggtcactggcagcttttgaaccagctgggcactggctggagaggctgggtccatgctggcagcaaggctgcattggctgccctgtgcccaggagacctgatccaggccatcaatggtgagagcacagagctcatgacacacctggaggcacagaaccgcatcaagggctgccacgatcacctcacactgtctgtgagcaggcctgagggtaggagctggcccagtgcccctgatgacagcaaggctcaggcacacaggatccacatcgatcctgagatccaggacggcagcccaacaaccagcaggcggccctcaggcaccgggactgggccagaagatggcagaccaagcctgggatctccatatggacaaccccctcgctttccagtccctcacaatggcagcagcgaggccaccctgccagcccagatgagcaccctgcatgtgtctccaccccccagcgctgacccagccagaggcctcccgcggagccgg

SEQ ID NO: 15310 - DNA, 456 bp, Homo sapiens
  source 1..456: mol_type = unassigned DNA
gtaggacaggagttacgttttttgagttcccagccatgggcctacccagtacccaccacagttcaggaaggacggcagcccaacaaccagcaggcggccctcaggcaccgggactgggccagaagatggcagaccaagcctgggatctccatatggacaaccccctcgctttccagtccctcacaatggcagcagcgaggccaccctgccagcccagatgagcaccctgcatgtgtctccaccccccagcgctgacccagccagaggcctcccgcggagccgggactgcagagtcgacctgggctccgaggtgtacaggatgctgcgggagccagccgagcccgtggccgcggagcccaagcagtcaggctccttccgctacttgcagggcatgctagaggccggcgagggcggggattggcccgggcctggcggcccccggaacctcaagcccac

SEQ ID NO: 15311 - DNA, 767 bp, Homo sapiens
  source 1..767: mol_type = unassigned DNA
ggcagaccaagcctgggatctccatatggacaaccccctcgctttccagtccctcacaatggcagcagcgaggccaccctgccagcccagatgagcaccctgcatgtgtctccaccccccagcgctgacccagccagaggcctcccgcggagccgggactgcagagtcgacctgggctccgaggtgtacaggatgctgcgggagccagccgagcccgtggccgcggagcccaagcagtcaggctccttccgctacttgcagggcatgctagaggccggcgagggcggtaagacgcctgccacctgtccccatctgccttcccactccctgcagtgcccaggttgccccctagcgaccccacgtcccgcctcgcagtcacctgccctcttcggtctctgcggcccggtcccacgcccttgctacaaccttgctacgccctggcttcccgattccctctccaccccctgtcgctgcccctcaccccacgcccgccaaacccgttccccagtctcgggtgccgatggcccgtctggcgcccaaccaaacaccccgcagaaatggagttctgacctcctcaccccgttcatgccacctacgctccgggtttcaggggattggcccgggcctggcggcccccggaacctcaagcccacggccagcaagctgggcgctccgctgagcggcctgcaggggctgcccgagtgcacgcgctgcggccacggcatcgtgggcaccatcgtcaaggcacgggacaagctctaccatcc

SEQ ID NO: 15312 - DNA, 624 bp, Homo sapiens
  source 1..624: mol_type = unassigned DNA
cttgtccctaccccgggcactgggttgctgatccagctatggagaaagccgcagtttatgccaatggaagaggcacatctggggagaagaatgtgactctcctcctctcacccacttctttgcccagtagatctgcaggacacagcctcgttaactctgaagtttaagtttaacccaaagctgggcattgataatcctgtcctctccctggccgaagaccacgacccctatggtaactccctcaccccctggcaaccattccctatccctggaggcaccacggctccacacggcctccgatctccttggtaaccactcactcggtctccctctgataacagccttggttgggagtagagataggaggggccgggtgttttctcctgtcccagtccctctgcccacgaaccccaccacccaacacccaaccaggcagaaactgcccagcaccctatcaggacacagggtctgccaggcacacggcgaacctgtacttgggctgtgccctctcctcccccttttctgctgcccacctcaccctccagatccctggagcctggagcggcctcgcttctgtttactgagcaaagaggagggcaagagttttggcttccacctgcagca

SEQ ID NO: 15313 - DNA, 583 bp, Homo sapiens
  source 1..583: mol_type = unassigned DNA
actgggttgctgatccagctatggagaaagccgcagatctgcaggacacagcctcgttaactctgaagtttaagtttaacccaaagctgggcattgataatcctgtcctctccctggccgaagaccacgacccctatggtaactccctcaccccctggcaaccattccctatccctggaggcaccacggctccacacggcctccgatctccttggtaaccactcactcggtctccctctgataacagccttggttgggagtagagataggaggggccgggtgttttctcctgtcccagtccctctgcccacgaaccccaccacccaacacccaaccaggcagaaactgcccagcaccctatcaggacacagggtctgccaggcacacggcgaacctgtacttgggctgtgccctctcctcccccttttctgctgcccacctcaccctccagatccctggagcctggagcggcctcgcttctgtttactgagcaaagaggagggcaagagttttggcttccacctgcagcaggagctgggcagggctgggcatgtggtgtgcagggtggacccaggcacctctg

SEQ ID NO: 15314 - DNA, 638 bp, Homo sapiens
  source 1..638: mol_type = unassigned DNA
actgggttgctgatccagctatggagaaagccgcagtagatctgcaggacacagcctcgttaactctgaagtttaagtttaacccaaagctgggcattgataatcctgtcctctccctggccgaagaccacgacccctatgatccctggagcctggagcggcctcgcttctgtttactgagcaaagaggagggcaagagttttggcttccacctgcagcaggagctgggcagggctgggcatgtggtgtgcagggtggacccaggcacctctgcccagcgccagggtcttcaggaaggagacaggatcctggcggtgaacaatgatgttgtggaacacgaagactatgcggtggtggtacgccgcatccgggccagcagccctcgggtgttgctgacagtattggcacggcatgcacatgacgtggcccgagctcagctgggagaagatgcccacctctgtcccaccctaggcccaggggtccggccccggctgtgccacatagtgaaagatgagggtggttttggcttcagtgtcacccatggcaatcagggtcctttctggttggtgctaagtactggaggagcagctgagcgggcaggggtgccccccggggcccggctgctggaagtgaatggg

SEQ ID NO: 15315 - DNA, 1882 bp, Homo sapiens
  source 1..1882: mol_type = unassigned DNA
actgggttgctgatccagctatggagaaagccgcagatctgcaggacacagcctcgttaactctgaagtttaagtttaacccaaagctgggcattgataatcctgtcctctccctggccgaagaccacgacccctatggtaactccctcaccccctggcaaccattccctatccctggaggcaccacggctccacacggcctccgatctccttgatccctggagcctggagcggcctcgcttctgtttactgagcaaagaggagggcaagagttttggcttccacctgcagcaggagctgggcagggctgggcatgtggtgtgcagggtggacccaggcacctctgcccagcgccagggtcttcaggaaggagacaggatcctggcggtgaacaatgatgttgtggaacacgaagactatgcggtggtggtacgccgcatccgggccagcagccctcgggtgttgctgacagtattggcacggcatgcacatgacgtggcccgagctcagctgggagaagatgcccacctctgtcccaccctaggcccaggggtccggccccggctgtgccacatagtgaaagatgagggtggttttggcttcagtgtcacccatggcaatcagggtcctttctggttggtgctaagtactggaggagcagctgagcgggcaggggtgccccccggggcccggctgctggaagtgaatggggtcagtgtggagaagttcactcacaaccaactcaccaggaagctttggcagagtggacagcaggtgaccttgctggtggcagggccagaggtggaagaacagtgtcgccagctgggattgcccctggctgcacccctggcagagggctgggcactgcccaccaagccccgctgcctgcacctggagaaagggccccagggttttgggttcctgctccgggaggaaaagggccttgacggtcgccctggacagttcctgtgggaggtggacccgggactgccagccaagaaggctgggatgcaggctggggaccggctggtggctgtggctggggagagcgtggaggggctgggccatgaggagacagtgtccaggatccaggggcagggctcctgtgtctccctcactgtcgtcgaccctgaggcggaccgcttcttcagcatggttcgcctgtccccactcctcttcttggagaacacagaggctcccgcctcgccccggggcagcagctcagcctcactggttgagacagaggacccttcacttgaagacacaagcgtgccttctgtccctcttggctcccgacagtgcttcctgtaccctgggcctggtggcagctatggcttccgactcagttgtgtggccagtgggcctcgtctcttcatctcccaggtgactccaggaggctcagctgcccgggctgggctgcaagtgggagacgtgattctggaagtgaacgggtatcctgttgggggacagaatgacctggagaggcttcagcagctgcctgaggctgagccacccctctgcctgaagctggcagccaggtctctgcggggcttggaagcctggattccccctggggctgcagaggactgggctctggcctcggatctactgtagagcacccctgcttggtacagacatactcaggggctaccgtgtcttcactctccagcctgaggtggtgaaggcaggatgctctctctaagccagaccagagggactcagacaccaccgatcacaggctggcccaggtgctccctcccttcctgcaggcccacctgccagcagagggtgtggttggaggcctcagacaggtccctgaaggagtctgaggctccagaggatgtcatatgggagttttagagagctgtgtcccaaggatgaa

SEQ ID NO: 15316 - DNA, 2652 bp, Homo sapiens
  source 1..2652: mol_type = unassigned DNA
actgggttgctgatccagctatggagaaagccgcagatctgcaggacacagcctcgttaactctgaagtttaagtttaacccaaagctgggcattgataatcctgtcctctccctggccgaagaccacgacccctatggtaactccctcaccccctggcaaccattccctatccctggaggcaccacggctccacacggcctccgatctccttggtaaccactcactcggtctccctctgataacagccttggttgggagtagagataggaggggccgggtgttttctcctgtcccagtccctctgcccacgaaccccaccacccaacacccaaccaggcagaaactgcccagcaccctatcaggacacagggtctgccaggcacacggcgaacctgtacttgggctgtgccctctcctcccccttttctgctgcccacctcaccctccagatccctggagcctggagcggcctcgcttctgtttactgagcaaagaggagggcaagagttttggcttccacctgcagcaggagctgggcagggctgggcatgtggtgtgcagggtggacccaggcacctctgcccagcgccagggtcttcaggaaggagacaggatcctggcggtgaacaatgatgttgtggaacacgaagactatgcggtggtggtacgccgcatccgggccagcagccctcgggtgttgctgacagtattggcacggcatgcacatgacgtggcccgagctcagctgggagaagatgcccacctctgtcccaccctaggcccaggggtccggccccggctgtgccacatagtgaaagatgagggtggttttggcttcagtgtcacccatggcaatcagggtcctttctggttggtgctaagtactggaggagcagctgagcgggcaggggtgccccccggggcccggctgctggaagtgaatggggtcagtgtggagaagttcactcacaaccaactcaccaggaagctttggcagagtggacagcaggtgaccttgctggtggcagggccagaggtggaagaacagtgtcgccagctgggattgcccctggctgcacccctggcagagggctgggcactgcccaccaagccccgctgcctgcacctggagaaagggccccagggttttgggttcctgctccgggaggaaaagggccttgacggtcgccctggtgagtgggagccctgggggcggtgggggaaggtgggccttggggtgggcacacaagcgtatatacacctttcagtgcaccgaagaggtgtccctgtctgagctctggccctgggccgcctcttcccgttcactctggggtcagtcccctggtgtgtacacagtggcctaggatagctggagaggagcagtgaggatgtctatgccccaggacagttcctgtgggaggtggacccgggactgccagccaagaaggctgggatgcaggctggggaccggctggtggctgtggctggggagagcgtggaggggctgggccatgaggagacagtgtccaggatccaggggcagggctcctgtgtctccctcactgtcgtcgaccctgaggcggaccgcttcttcagcatggttcgcctgtccccactcctcttcttggagaacacagaggctcccgcctcgccccggggcagcagctcagcctcactggttgagacagaggacccttcacttgaagacacaagcgtgccttctgtccctcttggctcccgacagtgcttcctgtaccctgggcctggtggcagctatggcttccgactcagttgtgtggccagtgggcctcgtctcttcatctcccaggtgactgatgccccatggatcttgaatcccttcgatcctttgctgcctgatcggtcttcctctgcttccctcccagagcctaaagccagcaaactttcccccggtgtcccctgttctgcatgcccccacaacaccaggtgactccaggaggctcagctgcccgggctgggctgcaagtgggagacgtgattctggaagtgaacgggtatcctgttgggggacagaatgacctggagaggcttcagcagctgcctgaggctgagccacccctctgcctgaagctggcagccaggtctctgcggggcttggaagcctggattccccctggggctgcagaggactgggctctggcctcggatctactgtagagcacccctgcttggtacagacatactcaggggctaccgtgtcttcactctccagcctgaggtggtgaaggcaggatgctctctctaagccagaccagagggactcagacaccaccgatcacaggctggcccaggtgctccctcccttcctgcaggcccacctgccagcagagggtgtggttggaggcctcagacaggtccctgaaggagtctgaggctccagaggatgtcatatgggagttttagagagctgtgtcccaaggatgaaggtgtggctgtgggtctggctaggattgaagccatctggaccttttctagatatgactccaggacccttgagtgtaatgcaaaaatttggagaccagctatgcctgccctctgtgggtgccttagcattgcgggagggtggtgcttggtcaccgttgcatttgttatagaaatggccattcgccat

SEQ ID NO: 15317 - DNA, 2532 bp, Homo sapiens
  source 1..2532: mol_type = unassigned DNA
actgggttgctgatccagctatggagaaagccgcagatctgcaggacacagcctcgttaactctgaagtttaagtttaacccaaagctgggcattgataatcctgtcctctccctggccgaagaccacgacccctatgatccctggagcctggagcggcctcgcttctgtttactgagcaaagaggagggcaagagttttggcttccacctgcagcaggagctgggcagggctgggcatgtggtgtgcagggtggacccaggcacctctgcccagcgccagggtcttcaggaaggagacaggatcctggcggtgaacaatgatgttgtggaacacgaagactatgcggtggtggtacgccgcatccgggccagcagccctcgggtgttgctgacagtattggcacggcatgcacatgacgtggcccgagctcagctgggagaagatgcccacctctgtcccaccctaggcccaggggtccggccccggctgtgccacatagtgaaagatgagggtggttttggcttcagtgtcacccatggcaatcagggtcctttctggttggtgctaagtactggaggagcagctgagcgggcaggggtgccccccggggcccggctgctggaagtgaatggggtcagtgtggagaagttcactcacaaccaactcaccaggaaggtgtgactgcctgtctcccactctcctcccccaatccgggcctgggccccacctcgggaagacgcctccttccccatgcgcctaacctccttatctggtctcctacctttatcaccatcctccccctctacagtttgtgccaggctccacttagtgcctgggaggaggggctgtggggggagcatacctcttctctccctgcccaggtgttatactgatgccctgctgggtccccacagctttggcagagtggacagcaggtgaccttgctggtggcagggccagaggtggaagaacagtgtcgccagctgggattgcccctggctgcacccctggcagagggctgggcactgcccaccaagccccgctgcctgcacctggagaaagggccccagggttttgggttcctgctccgggaggaaaagggccttgacggtcgccctggtgagtgggagccctgggggcggtgggggaaggtgggccttggggtgggcacacaagcgtatatacacctttcagtgcaccgaagaggtgtccctgtctgagctctggccctgggccgcctcttcccgttcactctggggtcagtcccctggtgtgtacacagtggcctaggatagctggagaggagcagtgaggatgtctatgccccaggacagttcctgtgggaggtggacccgggactgccagccaagaaggctgggatgcaggctggggaccggctggtggctgtggctggggagagcgtggaggggctgggccatgaggagacagtgtccaggatccaggggcagggctcctgtgtctccctcactgtcgtcgaccctgaggcggaccgcttcttcagcatggtgcgtgctgaggggcaggggctagggttggggcaggagtggggcagggctgaggtccgaaagatttgctctccctgccaccttccaggttcgcctgtccccactcctcttcttggagaacacagaggctcccgcctcgccccggggcagcagctcagcctcactggttgagacagaggacccttcacttgaagacacaagcgtgccttctgtccctcttggctcccgacagtgcttcctgtaccctgggcctggtggcagctatggcttccgactcagttgtgtggccagtgggcctcgtctcttcatctcccaggtgactccaggaggctcagctgcccgggctgggctgcaagtgggagacgtgattctggaagtgaacgggtatcctgttgggggacagaatgacctggagaggcttcagcagctgcctgaggctgagccacccctctgcctgaagctggcagccaggtctctgcggggcttggaagcctggattccccctggggctgcagaggactgggctctggcctcggatctactgtagagcacccctgcttggtacagacatactcaggggctaccgtgtcttcactctccagcctgaggtggtgaaggcaggatgctctctctaagccagaccagagggactcagacaccaccgatcacaggctggcccaggtgctccctcccttcctgcaggcccacctgccagcagagggtgtggttggaggcctcagacaggtccctgaaggagtctgaggctccagaggatgtcatatgggagttttagagagctgtgtcccaaggatgaaggtgtggctgtgggtctggctaggattgaagccatctggaccttttctagatatgactccaggacccttgagtgtaatgcaaaaatttggagaccagctatgcctgccctctgtgggtgccttagcattgcgggagggtggtgcttggtcaccgttgcatttgttatagaaatggccattcgccataaa

SEQ ID NO: 15318 - DNA, 2522 bp, Homo sapiens
  source 1..2522: mol_type = unassigned DNA
actgggttgctgatccagctatggagaaagccgcagtttatgccaatggaagaggcacatctggggagaagaatgtgactctcctcctctcacccacttctttgcccagtagatctgcaggacacagcctcgttaactctgaagtttaagtttaacccaaagctgggcattgataatcctgtcctctccctggccgaagaccacgacccctatgatccctggagcctggagcggcctcgcttctgtttactgagcaaagaggagggcaagagttttggcttccacctgcagcaggagctgggcagggctgggcatgtggtgtgcagggtggacccaggcacctctgcccagcgccagggtcttcaggaaggagacaggatcctggcggtgaacaatgatgttgtggaacacgaagactatgcggtggtggtacgccgcatccgggccagcagccctcgggtgttgctgacagtattggcacggcatgcacatgacgtggcccgagctcagctgggagaagatgcccacctctgtcccaccctaggcccaggggtccggccccggctgtgccacatagtgaaagatgagggtggttttggcttcagtgtcacccatggcaatcagggtcctttctggttggtgctaagtactggaggagcagctgagcgggcaggggtgccccccggggcccggctgctggaagtgaatggggtcagtgtggagaagttcactcacaaccaactcaccaggaagctttggcagagtggacagcaggtgaccttgctggtggcagggccagaggtggaagaacagtgtcgccagctgggattgcccctggctgcacccctggcagagggctgggcactgcccaccaagccccgctgcctgcacctggagaaagggccccagggttttgggttcctgctccgggaggaaaagggccttgacggtcgccctggtgagtgggagccctgggggcggtgggggaaggtgggccttggggtgggcacacaagcgtatatacacctttcagtgcaccgaagaggtgtccctgtctgagctctggccctgggccgcctcttcccgttcactctggggtcagtcccctggtgtgtacacagtggcctaggatagctggagaggagcagtgaggatgtctatgccccaggacagttcctgtgggaggtggacccgggactgccagccaagaaggctgggatgcaggctggggaccggctggtggctgtggctggggagagcgtggaggggctgggccatgaggagacagtgtccaggatccaggggcagggctcctgtgtctccctcactgtcgtcgaccctgaggcggaccgcttcttcagcatggttcgcctgtccccactcctcttcttggagaacacagaggctcccgcctcgccccggggcagcagctcagcctcactggttgagacagaggacccttcacttgaagacacaagcgtgccttctgtccctcttggctcccgacagtgcttcctgtaccctgggcctggtggcagctatggcttccgactcagttgtgtggccagtgggcctcgtctcttcatctcccaggtgactccaggaggctcagctgcccgggctgggctgcaagtgggagacgtgattctggaagtgaacgggtatcctgttgggggacagaatgacctggagaggcttcagcagctgcctgaggctgagccacccctctgcctgaagctggcagccaggtctctgcggggcttggaagcctggattccccctggggctgcagaggactgggctctggcctcggatctactgtagagcacccctgcttggtacagacatactcaggggctaccgtgtcttcactctccagcctgaggtggtgaaggcaggatgctctctctaagccagaccagagggactcagacaccaccgatcacaggctggcccaggtgctccctcccttcctgcaggcccacctgccagcagagggtgtggttggaggcctcagacaggtccctgaaggagtctgaggctccagaggatgtcatatgggagttttagagagctgtgtcccaaggatgaaggtgtggctgtgggtctggctaggattgaagccatctggaccttttctagatatgactccaggacccttgagtgtaatgcaaaaatttggagaccagctatgcctgccctctgtgggtgccttagcattgcgggagggtggtgcttggtcaccgttgcatttgttatagaaatggccattcgccataaatctgactgcctgtgtttgtgttggtgggggtaaggggcagtggtgtgaagggaccaaaagggcctcaggctcaaggggtgggatgcggctcctgcaggagagaggttgagacctggtcaaatttatttcctatcaatcactgaatctcagggataatgggtcaacccagaactgagatgtctgtatgacagccactcctaaaaataaacaacaacaaaaacaaaaaaagaagaaaactaaa

SEQ ID NO: 15319 - DNA, 2996 bp, Homo sapiens
  source 1..2996: mol_type = unassigned DNA
actgggttgctgatccagctatggagaaagccgcaggtaggaggccaggagaaatcctctgcaggggactttgggacaggcagggggccgacttggaggctgaagctttgggaccagggcacacttgattttggggcttggagccctgaggcaggtaaacaagtcaggagaaaagtaatgagttgatatgtctgtcttcctggtccacaccctgtactgatatgctcagatttatgtgccaaggacttggggggagagaaagggaggggaccgcacaatagtcctgtgtgtatggcagtgagaagagaagacccctttggagcagaaaggagggggcatgccctgagtttgggggtttccctgagtccttttagtttatgccaatggaagaggcacatctggggagaagaatgtgactctcctcctctcacccacttctttgcccagtagatctgcaggacacagcctcgttaactctgaagtttaagtttaacccaaagctgggcattgataatcctgtcctctccctggccgaagaccacgacccctatggtaactccctcaccccctggcaaccattccctatccctggaggcaccacggctccacacggcctccgatctccttggtaaccactcactcggtctccctctgataacagccttggttgggagtagagataggaggggccgggtgttttctcctgtcccagtccctctgcccacgaaccccaccacccaacacccaaccaggcagaaactgcccagcaccctatcaggacacagggtctgccaggcacacggcgaacctgtacttgggctgtgccctctcctcccccttttctgctgcccacctcaccctccagatccctggagcctggagcggcctcgcttctgtttactgagcaaagaggagggcaagagttttggcttccacctgcagcaggagctgggcagggctgggcatgtggtgtgcagggtggacccaggcacctctgcccagcgccagggtcttcaggaaggagacaggatcctggcggtgaacaatgatgttgtggaacacgaagactatgcggtggtggtacgccgcatccgggccagcagccctcgggtgttgctgacagtattggcacggcatgcacatgacgtggcccgagctcagctgggagaagatgcccacctctgtcccaccctaggcccaggggtccggccccggctgtgccacatagtgaaagatgagggtggttttggcttcagtgtcacccatggcaatcagggtcctttctggttggtgctaagtactggaggagcagctgagcgggcaggggtgccccccggggcccggctgctggaagtgaatggggtcagtgtggagaagttcactcacaaccaactcaccaggaagctttggcagagtggacagcaggtgaccttgctggtggcagggccagaggtggaagaacagtgtcgccagctgggattgcccctggctgcacccctggcagagggctgggcactgcccaccaagccccgctgcctgcacctggagaaagggccccagggttttgggttcctgctccgggaggaaaagggccttgacggtcgccctggacagttcctgtgggaggtggacccgggactgccagccaagaaggctgggatgcaggctggggaccggctggtggctgtggctggggagagcgtggaggggctgggccatgaggagacagtgtccaggatccaggggcagggctcctgtgtctccctcactgtcgtcgaccctgaggcggaccgcttcttcagcatggttcgcctgtccccactcctcttcttggagaacacagaggctcccgcctcgccccggggcagcagctcagcctcactggttgagacagaggacccttcacttgaagacacaagcgtgccttctgtccctcttggctcccgacagtgcttcctgtaccctgggcctggtggcagctatggcttccgactcagttgtgtggccagtgggcctcgtctcttcatctcccaggtgactccaggaggctcagctgcccgggctgggctgcaagtgggagacgtgattctggaagtgaacgggtatcctgttgggggacagaatgacctggagaggcttcagcagctgcctgaggctgagccacccctctgcctgaagctggcagccaggtctctgcggggcttggaagcctggattccccctggggctgcagaggactgggctctggcctcggatctactgtagagcacccctgcttggtacagacatactcaggggctaccgtgtcttcactctccagcctgaggtggtgaaggcaggatgctctctctaagccagaccagagggactcagacaccaccgatcacaggctggcccaggtgctccctcccttcctgcaggcccacctgccagcagagggtgtggttggaggcctcagacaggtccctgaaggagtctgaggctccagaggatgtcatatgggagttttagagagctgtgtcccaaggatgaaggtgtggctgtgggtctggctaggattgaagccatctggaccttttctagatatgactccaggacccttgagtgtaatgcaaaaatttggagaccagctatgcctgccctctgtgggtgccttagcattgcgggagggtggtgcttggtcaccgttgcatttgttatagaaatggccattcgccataaatctgactgcctgtgtttgtgttggtgggggtaaggggcagtggtgtgaagggaccaaaagggcctcaggctcaaggggtgggatgcggctcctgcaggagagaggttgagacctggtcaaatttatttcctatcaatcactgaatctcagggataatgggtcaacccagaactgagatgtctgtatgacagccactcctaaaaataaacaacaacaaaaacaaaaaaagaagaaaactaaataaaaataaaaataaaaataagatccacttctc

SEQ ID NO: 15320 - DNA, 573 bp, Homo sapiens
  source 1..573: mol_type = unassigned DNA
gttgctgatccagctatggagaaagccgcagatctgcaggacacagcctcgttaactctgaagtttaagtttaacccaaagctgggcattgataatcctgtcctctccctggccgaagaccacgacccctatgatccctggagcctggagcggcctcgcttctgtttactgagcaaagaggagggcaagagttttggcttccacctgcagcaggagctgggcagggctgggcatgtggtgtgcagggtggacccaggcacctctgcccagcgccagggtcttcaggaaggagacaggatcctggcggtgaacaatgatgttgtggaacacgaagactatgcggtggcaatcagggtcctttctggttggtgctaagtactggaggagcagctgagcgggcaggggtgccccccggggcccggctgctggaagtgaatggggtcagtgtggagaagttcactcacaaccaactcaccaggaagctttggcagagtggacagcaggtgaccttgctggtggcagggccagaggtggaagaacagtgtcgccagctgggattgcccctggctgcac

SEQ ID NO: 15321 - DNA, 2252 bp, Homo sapiens
  source 1..2252: mol_type = unassigned DNA
gttgctgatccagctatggagaaagccgcagatctgcaggacacagcctcgttaactctgaagtttaagtttaacccaaagctgggcattgataatcctgtcctctccctggccgaagaccacgacccctatgatccctggagcctggagcggcctcgcttctgtttactgagcaaagaggagggcaagagttttggcttccacctgcagcaggagctgggcagggctgggcatgtggtgtgcagggtggacccaggcacctctgcccagcgccagggtcttcaggaaggagacaggatcctggcggtgaacaatgatgttgtggaacacgaagactatgcggtggtggtacgccgcatccgggccagcagccctcgggtgttgctgacagtattggcacggcatgcacatgacgtggcccgagctcagctgggagaagatgcccacctctgtcccaccctaggcccaggggtccggccccggctgtgccacatagtgaaagatgagggtggttttggcttcagtgtcacccatggcaatcagggtcctttctggttggtgctaagtactggaggagcagctgagcgggcaggggtgccccccggggcccggctgctggaagtgaatggggtcagtgtggagaagttcactcacaaccaactcaccaggaagctttggcagagtggacagcaggtgaccttgctggtggcagggccagaggtggaagaacagtgtcgccagctgggattgcccctggctgcacccctggcagagggctgggcactgcccaccaagccccgctgcctgcacctggagaaagggccccagggttttgggttcctgctccgggaggaaaagggccttgacggtcgccctggacagttcctgtgggaggtggacccgggactgccagccaagaaggctgggatgcaggctggggaccggctggtggctgtggctggggagagcgtggaggggctgggccatgaggagacagtgtccaggatccaggggcagggctcctgtgtctccctcactgtcgtcgaccctgaggcggaccgcttcttcagcatggttcgcctgtccccactcctcttcttggagaacacagaggctcccgcctcgccccggggcagcagctcagcctcactggttgagacagaggacccttcacttgaagacacaagcgtgccttctgtccctcttggctcccgacagtgcttcctgtaccctgggcctggtggcagctatggcttccgactcagttgtgtggccagtgggcctcgtctcttcatctcccaggtgactccaggaggctcagctgcccgggctgggctgcaagtgggagacgtgattctggaagtgaacgggtatcctgttgggggacagaatgacctggagaggcttcagcagctgcctgaggctgagccacccctctgcctgaagctggcagccaggtctctgcggggcttggaagcctggattccccctggggctgcagaggactgggctctggcctcggatctactgtagagcacccctgcttggtacagacatactcaggggctaccgtgtcttcactctccagcctgaggtggtgaaggcaggatgctctctctaagccagaccagagggactcagacaccaccgatcacaggctggcccaggtgctccctcccttcctgcaggcccacctgccagcagagggtgtggttggaggcctcagacaggtccctgaaggagtctgaggctccagaggatgtcatatgggagttttagagagctgtgtcccaaggatgaaggtgtggctgtgggtctggctaggattgaagccatctggaccttttctagatatgactccaggacccttgagtgtaatgcaaaaatttggagaccagctatgcctgccctctgtgggtgccttagcattgcgggagggtggtgcttggtcaccgttgcatttgttatagaaatggccattcgccataaatctgactgcctgtgtttgtgttggtgggggtaaggggcagtggtgtgaagggaccaaaagggcctcaggctcaaggggtgggatgcggctcctgcaggagagaggttgagacctggtcaaatttatttcctatcaatcactgaatctcagggataatgggtcaacccagaactgagatgtctgtatgacagccactcctaaaaataaacaacaacaaaaacaaaaaaagaagaaaactaaataaaaataaaaataaaaataa

SEQ ID NO: 15322 - DNA, 573 bp, Homo sapiens
  source 1..573: mol_type = unassigned DNA
gctgatccagctatggagaaagccgcaggtaggaggccaggagaaatcctctgcaggggactttgggacaggcagggggccgacttggaggctgaagctttgggaccagggcacacttgattttggggcttggagccctgaggcagtttatgccaatggaagaggcacatctggggagaagaatgtgactctcctcctctcacccacttctttgcccagtagatctgcaggacacagcctcgttaactctgaagtttaagtttaacccaaagctgggcattgataatcctgtcctctccctggccgaagaccacgacccctatggtaactccctcaccccctggcaaccattccctatccctggaggcaccacggctccacacggcctccgatctccttggtaaccactcactcggtctccctctgataacagccttggttgggagtagagataggaggggccgggtgttttctcctgtcccagtccctctgcccacgaaccccaccacccaacacccaaccaggcagaaactgcccagcaccctatcaggacacagggtctgccaggcacac

SEQ ID NO: 15323 - DNA, 584 bp, Homo sapiens
  source 1..584: mol_type = unassigned DNA
gatccagctatggagaaagccgcaggtaggaggccaggagaaatcctctgcaggggactttgggacaggcagggggccgacttggaggctgaagctttgggaccagggcacacttgattttggggcttggagccctgaggcagtagatctgcaggacacagcctcgttaactctcgccagggtcttcaggaaggagacaggatcctggcggtgaacaatgatgttgtggaacacgaagactatgcggtggcaatcagggtcctttctggttggtgctaagtactggaggagcagctgagcgggcaggggtgccccccggggcccggctgctggaagtgaatggggtcagtgtggagaagttcactcacaaccaactcaccaggaagctttggcagagtggacagcaggtgaccttgctggtggcagggccagaggtggaagaacagtgtcgccagctgggattgcccctggctgcacccctggcagagggctgggcactgcccaccaagccccgctgcctgcacctggagaaagggccccagggttttgggttcctgctccgggaggaaaagggccttgacggt

SEQ ID NO: 15324 - DNA, 2204 bp, Homo sapiens
  source 1..2204: mol_type = unassigned DNA
gatccagctatggagaaagccgcagatctgcaggacacagcctcgttaactctgaagtttaagtttaacccaaagctgggcattgataatcctgtcctctccctggccgaagaccacgacccctatgatccctggagcctggagcggcctcgcttctgtttactgagcaaagaggagggcaagagttttggcttccacctgcagcaggagctgggcagggctgggcatgtggtgtgcagggtggacccaggcacctctgcccagcgccagggtcttcaggaaggagacaggatcctggcggtgaacaatgatgttgtggaacacgaagactatgcggtggtggtacgccgcatccgggccagcagccctcgggtgttgctgacagtattggcacggcatgcacatgacgtggcccgagctcagctgggagaagatgcccacctctgtcccaccctaggcccaggggtccggccccggctgtgccacatagtgaaagatgagggtggttttggcttcagtgtcacccatggcaatcagggtcctttctggttggtgctaagtactggaggagcagctgagcgggcaggggtgccccccggggcccggctgctggaagtgaatgggctttggcagagtggacagcaggtgaccttgctggtggcagggccagaggtggaagaacagtgtcgccagctgggattgcccctggctgcacccctggcagagggctgggcactgcccaccaagccccgctgcctgcacctggagaaagggccccagggttttgggttcctgctccgggaggaaaagggccttgacggtcgccctggacagttcctgtgggaggtggacccgggactgccagccaagaaggctgggatgcaggctggggaccggctggtggctgtggctggggagagcgtggaggggctgggccatgaggagacagtgtccaggatccaggggcagggctcctgtgtctccctcactgtcgtcgaccctgaggcggaccgcttcttcagcatggttcgcctgtccccactcctcttcttggagaacacagaggctcccgcctcgccccggggcagcagctcagcctcactggttgagacagaggacccttcacttgaagacacaagcgtgccttctgtccctcttggctcccgacagtgcttcctgtaccctgggcctggtggcagctatggcttccgactcagttgtgtggccagtgggcctcgtctcttcatctcccaggtgactccaggaggctcagctgcccgggctgggctgcaagtgggagacgtgattctggaagtgaacgggtatcctgttgggggacagaatgacctggagaggcttcagcagctgcctgaggctgagccacccctctgcctgaagctggcagccaggtctctgcggggcttggaagcctggattccccctggggctgcagaggactgggctctggcctcggatctactgtagagcacccctgcttggtacagacatactcaggggctaccgtgtcttcactctccagcctgaggtggtgaaggcaggatgctctctctaagccagaccagagggactcagacaccaccgatcacaggctggcccaggtgctccctcccttcctgcaggcccacctgccagcagagggtgtggttggaggcctcagacaggtccctgaaggagtctgaggctccagaggatgtcatatgggagttttagagagctgtgtcccaaggatgaaggtgtggctgtgggtctggctaggattgaagccatctggaccttttctagatatgactccaggacccttgagtgtaatgcaaaaatttggagaccagctatgcctgccctctgtgggtgccttagcattgcgggagggtggtgcttggtcaccgttgcatttgttatagaaatggccattcgccataaatctgactgcctgtgtttgtgttggtgggggtaaggggcagtggtgtgaagggaccaaaagggcctcaggctcaaggggtgggatgcggctcctgcaggagagaggttgagacctggtcaaatttatttcctatcaatcactgaatctcagggataatgggtcaacccagaactgagatgtctgtatgacagccactcctaaaaataaacaacaacaaaaacaaaaaaagaagaaaactaaataaaaataaaaataaaaataa

SEQ ID NO: 15325 - DNA, 566 bp, Homo sapiens
  source 1..566: mol_type = unassigned DNA
atccagctatggagaaagccgcagatctgcaggacacagcctcgttaactctgtaagtgccacgagggttggggcaaggggaggaaataattggaggcagcgaagcgcttcactgccattagcacctaaaggagatcctgggacccaagtccagctgccagcttgtacctgcttcccctgcctccttgcaggaagtttaagtttaacccaaagctgggcattgataatcctgtcctctccctggccgaagaccacgacccctatggtaactccctcaccccctggcaaccattccctatccctggaggcaccacggctccacacggcctccgatctccttggtaaccactcactcggtctccctctgataacagccttggttgggagtagagataggaggggccgggtgttttctcctgtcccagtccctctgcccacgaaccccaccacccaacacccaaccaggcagaaactgcccagcaccctatcaggacacagggtctgccaggcacacggcgaacctgtacttgggctgtgccctctcctcccccttttctgctgcccac

SEQ ID NO: 15326 - DNA, 4433 bp, Homo sapiens
  source 1..4433: mol_type = unassigned DNA
tgacaaggctggcggcgccacaccagcgaccaggcctggagctcacacttctgagaggcatcgcaagcgagggccttcacgttactgagaccccagccccgcacagaggctcatggagctcgaagcacgcagggctggcctctccagagctagcagattccttctggacctgtagggtgccgccctagcccagccgccatggcgcagggtttcgcagtgggcttcgacccactgggcctaggagacctgagctccggctctctgagctccctctcctcccgaggccacctaggcagcgactcaggctccaccgcaacgcgatacctgctaaggaagcaacaacggctgctgaacgggcccccccgcggaatccgagcctcatcgcccatgggacgcgtcatcctcatcaactcccccatcgaagccaacagtgatgaaagtgacatcatccattcagtccgggtggagaagagtccagcagggaggctgggcttcagcgtgcgcgggggctcagagcatggcctgggcatcttcgtcagcaaagtggaggaaggcagcagtgcaggtaagcagaacccccaggctgaagtccacgcttaggatgtgactccaatctcagtgaatggcaggggatgctgctgtcagggacagacggaagagtccccagctctggagggcctgattgatggggagacagggccaaccctcaagtcagaatggtttaagggacagatccctaggcactgggaacactcagcccctgctctgacaatcctcactctgattgagaagctcagtttgaccccagggagctccatctgatgggggaggctcagccccaccctggggacccatgccagccactcccatcctgtggtgcagagcgggctggcctgtgcgtgggggacaagatcacggaggtgaatgggctgagcctggagagcaccaccatgggtagcgccgtaaaggtgctgaccagcagcagccgcctgcacatgatggttcggcgcatgggccgtgtgccgggcatcaagttctccaaggagaagaccacgtgggtggatgtggtgaatcggcgcctggtagtggagaagtgcggttcaacaccctccgacaccagctcagaagatggtgtccggcgcatcgtccacctatacacaacctccgacgacttctgcctgggcttcaacatccgtgggggcaaggagtttggcctgggcatctatgtgtccaagtgagggctgaggcaggaagtgtcttcgggtagaactgagaatggggtctggagtggggcctaggctgggatgtggggatggtcagcaagtgaggcctggccaaccacctgtctcagtgagggcctgggagggggcgggaggccccagtaggagggtcaaggaccttgactggtgcagtcttgtgtccaagagaagggggtctggagtggggtaacggagggcaggccaggggcctatcagactgacgcctgtctggcctcagagtggaccatggtgggctggccgaggagaatggcatcaaggtgggggaccaggtcctggcagccaacggtgtcaggtttgacgacatcagccacagccaggccgtggaggtgctgaagggccaaacgcacatcatgctgaccatcaaggagaccggccggtatcctgcctacaaggagatggtttctgagtactgctggctggaccgactgagcaacggggtgctgcagcagctgtccccggcctctgagagcagctccagcgtctcttcgtgcgcctccagcgccccctacagctcgggctccctgccgtcggaccgcatggacatctgcctcgggcaggaggagcccggcagccgcggcccaggctgggggcgggcggacacagccatgcagacggagcccgatgcgggaggccgggtggagacctggtgcagcgtgcggcccacagtcatcctcagggacaccgccatccgctcggacggcccccatcccggccgccgccttgactctgcgctctctgagtctcccaagacggctttgctgctggccctcagccgaccccggccccccatcacgcgctcccagagctatctgaccttgtgggaggagaagcagcagcggaagaaggagaagtcggggtcccctggggagaagggtgccctgcagcgctccaagacgctgatgaacctcttcttcaagggagggcggcaggggaggctagcgcgggacgggcgcagagaggcctggacactggacagcgggagcctggccaaaacttaccctcgcctggacatagagaaagtatgtgcacgagggaggcatagaggacctggtgaggcccctgctggccatcctcgacaggccggagaagctgctactgctgcaggacatcaggagtgtggtggcccccacagacctgggccgcttcgacagcatggtgatgcttgtggagctggaggcttttgaggccctcaagagcagggcagtccggcctcctgctttgagaccagcccggcaggacacgccacccaagcgtcaccttatcacccccgtgcctgccgcggaggcttctacctgctgccggtgaacggcttcccggaagaggaagataatggggagctgagggagcggctgggggccctcaaggtctccccaagtgcctctgcccctcgccacccccataaagggatcccccctctacaagacgtgccagtagatgccttcacccccctccgaattgcctgcacaccccctccccagctaccccccgtggctccccggcccctgcggcctaactggctgctgacagaacccctgagccgagagcaccctccgcagagccagatccggggccgggctcagagccgtagccgcagccgtagccgcagccgcagccgcagcagccggggtcaaggcaagtctccaggtagacgctccccatccccggtgcctacccctgcccccagcatgaccaatgggcgctaccacaagcctcggaaggccagaccccctctgccacgacctctggatggggaggcagccaaggtgggggccaagcaagggccctcggagagtggaactgaggggacggccaaggaggcagccatgaagaaccccagtggcgagctgaagacagtgacactgtccaagatgaagcagtccttaggtatcagcatttctgggggcattgagtccaaggtgcagcccatggtgaagatagagaagatcttccctgggggggccgctttcctcagtggggccctgcaggctggcttcgagcttgtggcagtggacggagagaatctagagcaggtgacccaccagcgtgcagtagacaccatccgtcgggcttatcgaaacaaggcccgggagcccatggagcttgtggtcagggtccccgggcccagcccacggccctcaccctctgactcatcagcccttactgatgggggccttcctgctgaccacttgcctgcccaccaaccccttgatgctgctccagttcctgcccactggctcccagaacctcccaccaatccccagactcctcccactgatgccaggctcctccagccaactcccagcccagccccctccccagccctccagactcctgattctaagcccgcaccctccccacgcatcccatgaccctccccctaacctcagattcacccactgactccagcatcccgttatccccaggacctctcctaccaacttcttcaggactctccagctcctgcccaccctgcctcctcccagtgccacactggtggctcacatctttccactttcttccctcctcagctgtcattaaggctctgccttagtgtccaaggacaaggtgctagtgggcagcctgtgtcacctgcactcactgctccccaacctcccaagccaggatagggggtgagaaagccaaggtctggagcttgggattggtgggcactttctcacatgctgtcccttatgagtcgcccaagcctccagggacacagactctcagacagggccctgaaggggtcaatgcatccattcctcaaccccaagcagcattctgtgcaaggaaacggatgaaaggcttttctagtccctgaaatcctgagagatcatttcacgttggggtccactaagacctcagacattctactggatttgtccttcctccatcaccttttctccccaagagagctctatgagggggaggagaatagccagcaaatggtgggggggggggggtcaaacaagttcctgtactctttatccagcacattcacattatttttaaacaaaaaaattttttttaattttttctttgggtttgtacaagaaatttacagtgtgaaaaatatacaagtgaaaacgaggccataaacctgggtgaagggagaggctgcttggtcacaaacacaaataaacaagacatttctga

SEQ ID NO: 15327 - DNA, 624 bp, Homo sapiens
  source 1..624: mol_type = unassigned DNA
gaccccggccccccatcacgcgctcccagagctatctgaccttgtgggaggagaagcagcagcggaagaaggagaagtcggggtcccctggggagaagggtgccctgcagcgctccaagacgctgatgaacctcttcttcaagggagggcggcaggggaggctagcgcgggacgggcgcagagaggcctggacactggacagcgggagcctggccaaaacttaccctcgcctggacatagagaaagcagggggcgtgggcccggtacagaagtttgtcacctggagactgagacgtgaccaggagaggggccgggccctgctgtctgccaggtctgggagtccctccagccagctgcctaatgtggatgagcaggttcaggcctgggagagccggcggcccctcattcaggacctggcccagaggctgctgactgatgacgaggtgctggctgtcacccgccactgctcccggtatgtgcacgagggaggcatagaggacctggtgaggcccctgctggccatcctcgacaggccggagaagctgctactgctgcaggacatcaggagtgtggtggcccccacagacctgggccgcttcgacagcatggtgatgcttgtggagc

SEQ ID NO: 15328 - DNA, 2032 bp, Homo sapiens
  source 1..2032: mol_type = unassigned DNA
cggcagtagctctcgcctgcgggtggtttgacaaggctggcggcgccacaccagcgaccaggcctggagctcacacttctgagaggcatcgcaagcgagggccttcacgttactgagaccccagccccgcacagaggctcatggagctcgaagcacgcagggctggcctctccagagctagcagattccttctggacctgtagggtgccgccctagcccagccgccatggcgcagggtttcgcagtgggcttcgacccactgggcctaggagacctgagctccggctctctgagctccctctcctcccgaggccacctaggcagcgactcaggctccaccgcaacgcgatacctgctaaggaagcaacaacggctgctgaacgggcccccccgcggaatccgagcctcatcgcccatgggacgcgtcatcctcatcaactcccccatcgaagccaacagtgatgaaagtgacatcatccattcagtccgggtggagaagagtccagcagggaggctgggcttcagcgtgcgcgggggctcagagcatggcctgggcatcttcgtcagcaaagtggaggaaggcagcagtgcagagcgggctggcctgtgcgtgggggacaagatcacggaggtgaatgggctgagcctggagagcaccaccatgggtagcgccgtaaaggtgctgaccagcagcagccgcctgcacatgatggttcggcgcatgggccgtgtgccgggcatcaagttctccaaggagaagaccacgtgggtggatgtggtgaatcggcgcctggtagtggagaagtgcggttcaacaccctccgacaccagctcagaagatggtgtccggcgcatcgtccacctatacacaacctccgacgacttctgcctgggcttcaacatccgtgggggcaaggagtttggcctgggcatctatgtgtccaaagtggaccatggtgggctggccgaggagaatggcatcaaggtgggggaccaggtcctggcagccaacggtgtcaggtttgacgacatcagccacagccaggccgtggaggtgctgaagggccaaacgcacatcatgctgaccatcaaggagaccggccggtatcctgcctacaaggagatggtttctgagtactgctggctggaccgactgagcaacggggtgctgcagcagctgtccccggcctctgagagcagctccagcgtctcttcgtgcgcctccagcgccccctacagctcgggctccctgccgtcggaccgcatggacatctgcctcgggcaggaggagcccggcagccgcggcccaggctgggggcgggcggacacagccatgcagacggagcccgatgcgggaggccgggtggagacctggtgcagcgtgcggcccacagtcatcctcagggacaccgccatccgctcggacggcccccatcccggccgccgccttgactctgcgctctctgagtctcccaagacggctttgctgctggccctcagccgaccccggccccccatcacgcgctcccagagctatctgaccttgtgggaggagaagcagcagcggaagaaggagaagtcggggtcccctggggagaagggtgccctgcagcgctccaagacgctgatgaacctcttcttcaagggagggcggcaggggaggctagcgcgggacgggcgcagagaggcctggacactggacagcgggagcctggccaaaacttaccctcgcctggacatagagaaagagatgggggtttcaccctgttgcccaggctagtctcaaattcctggactgaagctatctacccgccttagtctcccaaagtgctaggattacagcgtgatctaccacacctggccaatcccaactactctggaagctgaagcagcaagatcacttgagcccaggagtttaagaccagcctgggcaacatagcaagaccctgtctctaaagaaaaaaaaaaagtaaaagaaaaataaagcacgtcttggctcagctgctgatttaagctgggtctaaacatctga

SEQ ID NO: 15329 - DNA, 1591 bp, Homo sapiens
  source 1..1591: mol_type = unassigned DNA
cctaggcagcgactcaggctccaccgcaacgcgatacctgctaaggaagcaacaacggctgctgaacgggcccccccgcggaatccgagcctcatcgcccatgggacgcgtcatcctcatcaactcccccatcgaagccaacagtgatgaaagtgacatcatccattcagtccgggtggagaagagtccagcagggaggctgggcttcagcgtgcgcgggggctcagagcatggcctgggcatcttcgtcagcaaagtggaggaaggcagcagtgcaggtaagcagaacccccaggctgaagtccacgcttaggatgtgactccaatctcagtgaatggcaggggatgctgctgtcagggacagacggaagagtccccagctctggagggcctgattgatggggagacagggccaaccctcaagtcagaatggtttaagggacagatccctaggcactgggaacactcagcccctgctctgacaatcctcactctgattgagaagctcagtttgaccccagggagctccatctgatgggggaggctcagccccaccctggggacccatgccagccactcccatcctgtggtgcagagcgggctggcctgtgcgtgggggacaagatcacggaggtgaatgggctgagcctggagagcaccaccatgggtagcgccgtaaaggtgctgaccagcagcagccgcctgcacatgatggttcggcgcatgggccgtgtgccgggcatcaagttctccaaggagaagaccacgtggtgagcagcaactccctcatcctagccctggccttgccccagcccaccccaaccctaccaacacccaaaacccactggcaggagaggcttctgttcctcctgctcgctggctcaggaaacgcaggggatccaaaggcctgacctcaaaataaggagaggctgcatctttcccctgccctcctccaatagctctgctctcccagatcccagtggttctgctgccacattgccgctgctcctgctgtgaaacccagaggcaaaacaccacctctctacaggggtgctgtaaggattagaaatggggcctagcctgggcaacatagcaagaccccttctctaaaaaaaaaaaaaaaaaaaaaaaaaaagccgggcatggtggctcaagcctgtaatcccagcactttgggaggctgaggcaggtggatcacctgaggttgggagttcaagaccagcctgaccaacatggagaaaccccgtctgtactaaaaataaaaaattaaccgagcgtggtggagcatgcctgtaatcccagctacttgagaggttgaggcaggagaatcacttgaacctgggaggcggaagttgcagtgagccgagatcataccattgcactctagcctgggcagcaggagtgaaactccatctcaaaaaacaaaacaaaacaaaaacaaaaaaactgggcatggtgggcatgtacctgtagtcccagccattcaagaggctgaggtggaaggactgcttgagcccaggaggttgaggctgcagtgagccatgatcacaccactgcactccagcatgggtggacagagcaagaccctgtc

SEQ ID NO: 15330 - DNA, 1057 bp, Homo sapiens
  source 1..1057: mol_type = unassigned DNA
cgggtggtttgacaaggctggcggcgccacaccagcgaccaggcctggagctcacacttctgagaggcatcgcaagcgagggccttcacgttactgagaccccagccccgcacagaggctcatggagctcgaagcacgcagggctggcctctccagagctagcagattccttctggacctgtagggtgccgccctagcccagccgccatggcgcagggtttcgcagtgggcttcgacccactgggcctaggagacctgagctccggctctctgagctccctctcctcccgaggccacctaggcagcgactcaggctccaccgcaacgcgatacctgctaaggaagcaacaacggctgctgaacgggcccccccgcggaatccgagcctcatcgcccatgggacgcgtcatcctcatcaactcccccatcgaagccaacagtgatgaaagtgacatcatccattcagtccgggtggagaagagtccagcagggaggctgggcttcagcgtgcgcgggggctcagagcatggcctgggcatcttcgtcagcaaagtggaggaaggcagcagtgcagagcgggctggcctgtgcgtgggggacaagatcacggaggtgaatgggctgagcctggagagcaccaccatgggtagcgccgtaaaggtgctgaccagcagcagccgcctgcacatgatggttcggcgcatgggccgtgtgccgggcatcaagttctccaaggagaagaccacgtggtgagcagcaactccctcatcctagccctggccttgccccagcccaccccaaccctaccaacacccaaaacccactggcaggagaggcttctgttcctcctgctcgctggctcaggaaacgcaggggatccaaaggcctgacctcaaaataaggagaggctgcatctttcccctgccctcctccaatagctctgctctcccagatcccagtggttctgctgccacattgccgctgctcctgctgtgaaacccagaggcaaaacaccacctctctacaggggtgctgtaaggattagaaatggggccta

SEQ ID NO: 15331 - DNA, 4135 bp, Homo sapiens
  source 1..4135: mol_type = unassigned DNA
agcgtgggtggggtttgccggctgcggcagtagctctcgcctgcgggtggtttgacaaggctggcggcgccacaccagcgaccaggcctggagctcacacttctgagaggcatcgcaagcgagggccttcacgttactgagaccccagccccgcacagaggctcatggagctcgaagcacgcagggctggcctctccagagctagcagattccttctggacctgtagggtgccgccctagcccagccgccatggcgcagggtttcgcagtgggcttcgacccactgggcctaggagacctgagctccggctctctgagctccctctcctcccgaggccacctaggcagcgactcaggctccaccgcaacgcgatacctgctaaggaagcaacaacggctgctgaacgggcccccccgcggaatccgagcctcatcgcccatgggacgcgtcatcctcatcaactcccccatcgaagccaacagtgatgaaagtgacatcatccattcagtccgggtggagaagagtccagcagggaggctgggcttcagcgtgcgcgggggctcagagcatggcctgggcatcttcgtcagcaaagtggaggaaggcagcagtgcagagcgggctggcctgtgcgtgggggacaagatcacggaggtgaatgggctgagcctggagagcaccaccatgggtagcgccgtaaaggtgctgaccagcagcagccgcctgcacatgatggttcggcgcatgggccgtgtgccgggcatcaagttctccaaggagaagaccacgtgggtggatgtggtgaatcggcgcctggtagtggagaagtgcggttcaacaccctccgacaccagctcagaagatggtgtccggcgcatcgtccacctatacacaacctccgacgacttctgcctgggcttcaacatccgtgggggcaaggagtttggcctgggcatctatgtgtccaaagtggaccatggtgggctggccgaggagaatggcatcaaggtgggggaccaggtcctggcagccaacggtgtcaggtttgacgacatcagccacagccaggccgtggaggtgctgaagggccaaacgcacatcatgctgaccatcaaggagaccggccggtatcctgcctacaaggagatggtttctgagtactgctggctggaccgactgagcaacggggtgctgcagcagctgtccccggcctctgagagcagctccagcgtctcttcgtgcgcctccagcgccccctacagctcgggctccctgccgtcggaccgcatggacatctgcctcgggcaggaggagcccggcagccgcggcccaggctgggggcgggcggacacagccatgcagacggagcccgatgcgggaggccgggtggagacctggtgcagcgtgcggcccacagtcatcctcagggacaccgccatccgctcggacggcccccatcccggccgccgccttgactctgcgctctctgagtctcccaagacggctttgctgctggccctcagccgaccccggccccccatcacgcgctcccagagctatctgaccttgtgggaggagaagcagcagcggaagaaggagaagtcggggtcccctggggagaagggtgccctgcagcgctccaagacgctgatgaacctcttcttcaagggagggcggcaggggaggctagcgcgggacgggcgcagagaggcctggacactggacagcgggagcctggccaaaacttaccctcgcctggacatagagaaagcagggggcgtgggcccggtacagaagtttgtcacctggagactgagacgtgaccaggagaggggccgggccctgctgtctgccaggtctgggagtccctccagccagctgcctaatgtggatgagcaggttcaggcctgggagagccggcggcccctcattcaggacctggcccagaggctgctgactgatgacgaggtgctggctgtcacccgccactgctcccggtatgtgcacgagggaggcatagaggacctggtgaggcccctgctggccatcctcgacaggccggagaagctgctactgctgcaggacatcaggagtgtggtggcccccacagacctgggccgcttcgacagcatggtgatgcttgtggagctggaggcttttgaggccctcaagagcagggcagtccggcctcctgctttgagaccagcccggcaggacacgccacccaagcgtcaccttatcacccccgtgcctgacagccgcggaggcttctacctgctgccggtgaacggcttcccggaagaggaagataatggggagctgagggagcggctgggggccctcaaggtctccccaagtgcctctgcccctcgccacccccataaagggatcccccctctacaagacgtgccagtagatgccttcacccccctccgaattgcctgcacaccccctccccagctaccccccgtggctccccggcccctgcggcctaactggctgctgacagaacccctgagccgagagcaccctccgcagagccagatccggggccgggctcagagccgtagccgcagccgtagccgcagccgcagccgcagcagccggggtcaaggcaagtctccaggtagacgctccccatccccggtgcctacccctgcccccagcatgaccaatgggcgctaccacaagcctcggaaggccagaccccctctgccacgacctctggatggggaggcagccaaggtgggggccaagcaagggccctcggagagtggaactgaggggacggccaaggaggcagccatgaagaaccccagtggcgagctgaagacagtgacactgtccaagatgaagcagtccttaggtatcagcatttctgggggcattgagtccaaggtgcagcccatggtgaagatagagaagatcttccctgggggggccgctttcctcagtggggccctgcaggctggcttcgagcttgtggcagtggacggagagaatctagagcaggtgacccaccagcgtgcagtagacaccatccgtcgggcttatcgaaacaaggcccgggagcccatggagcttgtggtcagggtccccgggcccagcccacggccctcaccctctgactcatcagcccttactgatgggggccttcctgctgaccacttgcctgcccaccaaccccttgatgctgctccagttcctgcccactggctcccagaacctcccaccaatccccagactcctcccactgatgccaggctcctccagccaactcccagcccagccccctccccagccctccagactcctgattctaagcccgcaccctccccacgcatcccatgaccctccccctaacctcagattcacccactgactccagcatcccgttatccccaggacctctcctaccaacttcttcaggactctccagctcctgcccaccctgcctcctcccagtgccacactggtggctcacatctttccactttcttccctcctcagctgtcattaaggctctgccttagtgtccaaggacaaggtgctagtgggcagcctgtgtcacctgcactcactgctccccaacctcccaagccaggatagggggtgagaaagccaaggtctggagcttgggattggtgggcactttctcacatgctgtcccttatgagtcgcccaagcctccagggacacagactctcagacagggccctgaaggggtcaatgcatccattcctcaaccccaagcagcattctgtgcaaggaaacggatgaaaggcttttctagtccctgaaatcctgagagatcatttcacgttggggtccactaagacctcagacattctactggatttgtccttcctccatcaccttttctccccaagagagctctatgagggggaggagaatagccagcaaatggtgggggggggggggtcaaacaagttcctgtactctttatccagcacattcacattatttttaaacaaaaaaattttttttaattttttctttgggtttgtacaagaaatttacagtgtgaaaaatatacaagtgaaaacgaggccataaacctgggtgaagggagaggctgcttggtcacaaacacaaataaacaagacatttctg

SEQ ID NO: 15332 - DNA, 3347 bp, Homo sapiens
  source 1..3347: mol_type = unassigned DNA
tccctaacatgggctttgccctggagcgcttcgcagaagccgtggacccggctctggagtgcaaactgtgcggccaggtgcttgaagagcccctgtgcacgccgtgcgggcacgtcttctgcgccagctgcctgttgccctgggcggtgcggaggcgccggtgcccgctgcagtgccagcccttggcgcccggcgagctgtaccgggtgctgccgctgcgcagcctcatccagaagctgcgagtccagtgcgactaccgcgcccgcggctgcggccactcggtcaggctgcacgagctggaggcgcacgtcgagcactgcgacttcggccctgcccgccggctccgcagccgcgggggctgcgcttcggggctgggcggtggtgaggtgcccgcgcgggggggctgcggtccgacacccagggctggccggggcgggggcgcgcgcggggggccgccgggcggccgctggggccgcgggcggggacccgggcctcgggtcctcgcctggaggcggcgcgagaaggcgctgctggcgcagctctgggcgctgcagggcgaggtgcagctcacggcgcgcaggtaccaggagaagttcacccaatacatggctcacgtccgcaacttcgtcggcgacctcggtggcggccaccgcagggatggagagcataagccattcactattgtgttagaaagagaaaatgacactttgggattcaatattataggaggtcgaccaaatcagaataatcaggaaggaacatcgactgaaggaatttacgtttcaaaaattttagaaaatggacctgctgacagagcagatggcctggagattcatgacaaaatcatggaggtcaatgggaaggatctttcaaaggccactcatgaagaggcagtggaagcttttcgcaatgccaaggagcccattgtggtgcaggtgttaaggcgaacacctcttagtagaccagcctatgggatggcttcagaagtgcagcttatgaatgccagcactcagacggacatcaccttcgaacacatcatggctctggccaagcttcgtccacctacccctccagtgccagacatctgtccattcctgctctcagacagctgccattctctacatccaatggagcatgaattttatgaggacaatgagtatatttccagcttgcctgctgatgcagacagaacagaagactttgaatatgaggaggtcgagttgtgtcgtgttagcagtcaagagaagctgggcctgacagtctgttaccgaacagatgatgaagaagacaccggcatttatgtcagcgaggttgacccaaatagcattgctgccaaagacggccggattcgagaaggggatcggattttgcaaataaatggggaagatgtccagaatcgagaagaagcagtggccttgctgtctaacgatgagtgtaagagaatcgtgctgcttgttgcaaggccagagattcagctggatgaaggctggctggaagatgaaaggaatgaattcttagaggagttaaacttggagatgttggaagaagagcataatgaagcaatgcagcccactgccaatgaggtggagcagccaaaaaagcaagaagaagaagaaggcacaacagacactgcaacatcctcatccaacaaccatgagaaggacagtggagtaggacgtacagatgaaagcttgcgaaatgatgagagctcagagcaggagaatgcagccgaggaccccaatagcacatctttgaagagcaagagagacctggggcagagccaagacactctgggaagtgttgaacttcagtacaatgagagcctcgtatctggtgaatacattgactcagactgcattggcaacccagatgaggactgtgaaagattcaggcagctcttggagctcaaatgcaagattcgaaatcatggagagtatgacctgtattactcaagcagcacaattgaatgcaatcaaggggagcaagagggagtggagcatgagctacagttgcttaatgaagaactgagaaacattgagcttgagtgtcagaatatcatgcaggctcacaggctccagaaagtgacagaccagtatggagacatctggacattgcatgatggaggattccggaattataacaccagcatagatatgcaaaggggaaagctagatgacatcatggagcatccagaaaagtctgacaaggacagttctagtgcttacaacacagctgagagctgcagaagtactccgctcactgtagaccgttcccctgacagttcccttccaagggtgatcaacctcaccaataagaaaaacctgagaagcacaatggcagccacccagtcctcttccggacagagcagtaaagagtcgacctccaccaaagccaaaaccactgagcaaggttgtagcgctgaaagcaaggagaaggttttagaaggcagcaagcttcctgatcaagagaaggcagtcagcgaacacatcccttacctctctccttaccacagctcctcatatagatatgcaaacatcccagcacacgcccggcattatcaaagctacatgcagttaattcaacagaaatctgcagtcgagtatgctcagagtcagctcagcttggtgagcatgtgcaaggagtctcagaagtgttcagagcccaagatggaatggaaggtgaaaattaggagcgacgggacacggtacatcacaaagagacccgtgcgagaccgaatcctgaaggaacgtgccttaaagatcaaggaagagcggagtggcatgaccacagacgatgacaccatgagcgagatgaaaatggggcgctactggagcaaagaggagagaaagcagcacctggttagggccaaagagcagcgccgtcgccgtgagttcatgatgcgaagcaggttagagtgtctcaaggagagccctcagagcggcagtgagggcaagaaggagatcaatatcattgaactgagtcacaaaaagatgatgaaaaagagaaacaagaaaattttggacaactggatgacaatccaagaactgatgacccatggggccaagtctccagatggcacgagagtccataatgccttcttgtcggtgaccactgtatgaccgaatgaatggaatgcatgcgactgattttaggaggatgctaccagtttcggtagagtatgattgcctcgttcaatgtggcgtttttatatatattttgtgactctttatagtttaaattttttgtaagcaaaaaatacctggtaatttttcatttgtttttcatatactggtaccttctttttggctgagatctttcttttacttgtgatatattcatattactcg

SEQ ID NO: 15333 - DNA, 3041 bp, Homo sapiens
  source 1..3041: mol_type = unassigned DNA
acgggggagtgttgccatgaactgactggaaactctgtgtgtgtatccgtgagtgcaagatacttagggaaagcgaagaagagcatgctgctacacaccactctggcttacgcttccagctaacagcggtttgtctgtgtttctggactgaagtgactgatgaaaaacagtagtcaagtctggagggtgattccctttcagttcacttgcctttcagttctggggaaattagaagatttgctctctctctctgcttcttagaatgggctgcaatttgtgcacttttcagaaaagagaggaacactacaaactgctgtatgaagtttcccaggtcaatgggaaggatctttcaaaggccactcatgaagaggcagtggaagcttttcgcaatgccaaggagcccattgtggtgcaggtgttaaggcgaacacctcttagtagaccagcctatgggatggcttcagaagtgcagcttatgaatgccagcactcagacggacatcaccttcgaacacatcatggctctggccaagcttcgtccacctacccctccagtgccagacatctgtccattcctgctctcagacagctgccattctctacatccaatggagcatgaattttatgaggacaatgagtatatttccagcttgcctgctgatgcagacagaacagaagactttgaatatgaggaggtcgagttgtgtcgtgttagcagtcaagagaagctgggcctgacagtctgttaccgaacagatgatgaagaagacaccggcatttatgtcagcgaggttgacccaaatagcattgctgccaaagacggccggattcgagaaggggatcggattttgcaaataaatggggaagatgtccagaatcgagaagaagcagtggccttgctgtctaacgatgagtgtaagagaatcgtgctgcttgttgcaaggccagagattcagctggatgaaggctggctggaagatgaaaggaatgaattcttagaggagttaaacttggagatgttggaagaagagcataatgaagcaatgcagcccactgccaatgaggtggagcagccaaaaaagcaagaagaagaagaaggcacaacagacactgcaacatcctcatccaacaaccatgagaaggacagtggagtaggacgtacagatgaaagcttgcgaaatgatgagagctcagagcaggagaatgcagccgaggaccccaatagcacatctttgaagagcaagagagacctggggcagagccaagacactctgggaagtgttgaacttcagtacaatgagagcctcgtatctggtgaatacattgactcagactgcattggcaacccagatgaggactgtgaaagattcaggcagctcttggagctcaaatgcaagattcgaaatcatggagagtatgacctgtattactcaagcagcacaattgaatgcaatcaaggggagcaagagggagtggagcatgagctacagttgcttaatgaagaactgagaaacattgagcttgagtgtcagaatatcatgcaggctcacaggctccagaaagtgacagaccagtatggagacatctggacattgcatgatggaggattccggaattataacaccagcatagatatgcaaaggggaaagctagatgacatcatggagcatccagaaaagtctgacaaggacagttctagtgcttacaacacagctgagagctgcagaagtactccgctcactgtagaccgttcccctgacagttcccttccaagggtgatcaacctcaccaataagaaaaacctgagaagcacaatggcagccacccagtcctcttccggacagagcagtaaagagtcgacctccaccaaagccaaaaccactgagcaaggttgtagcgctgaaagcaaggagaaggttttagaaggcagcaagcttcctgatcaagagaaggcagtcagcgaacacatcccttacctctctccttaccacagctcctcatatagatatgcaaacatcccagcacacgcccggcattatcaaagctacatgcagttaattcaacagaaatctgcagtcgagtatgctcagagtcagctcagcttggtgagcatgtgcaaggagtctcagaagtgttcagagcccaagatggaatggaaggtgaaaattaggagcgacgggacacggtacatcacaaagagacccgtgcgagaccgaatcctgaaggaacgtgccttaaagatcaaggaagagcggagtggcatgaccacagacgatgacaccatgagcgagatgaaaatggggcgctactggagcaaagaggagagaaagcagcacctggttagggccaaagagcagcgccgtcgccgtgagttcatgatgcgaagcaggttagagtgtctcaaggagagccctcagagcggcagtgagggcaagaaggagatcaatatcattgaactgagtcacaaaaagatgatgaaaaagagaaacaagaaaattttggacaactggatgacaatccaagaactgatgacccatggggccaagtctccagatggcacgagagtccataatgccttcttgtcggtgaccactgtatgaccgaatgaatggaatgcatgcgactgattttaggaggatgctaccagtttcggtagagtatgattgcctcgttcaatgtggcgtttttatatatattttgtgactctttatagtttaaattttttgtaagcaaaaaatacctggtaatttttcatttgtttttcatatactggtaccttctttttggctgagatctttcttttacttgtgatatattcatattactcgtttataaaaaatcaaaaacaaaaggaaagaaaacaaaaaaaacttgcacaaaaatactgaggagccaattaatttcctacttcaatgtatctaatgtaagtgaaaatctggatttatttctctagtttacttattttctactttaataataactcaatgccaaaatatttctatgcttgtttcttggcataatacattttaaatcaaacctgtt

SEQ ID NO: 15334 - DNA, 3411 bp, Homo sapiens
  source 1..3411: mol_type = unassigned DNA
aagatacttagggaaagcgaagaagagcatgctgctacacaccactctggcttacgcttccagctaacagcggtttgtctgtgtttctggactgaagtgactgatgaaaaacagtagtcaagtctggagggtgattccctttcagttcacttgcctttcagttctggggaaattagaagatttgctctctctctctgcttcttagaatgggctgcaatttgtgcacttttcagaaaagagaggaacactacaaactgctgtatgaagtttcccaggagctgtgacttgaacaatgctattctgcatgaaattgagaaattgccagtgttcccaacctgatggagagtatgtgtgggatcttagttctgcttcattaagctccttgtgaatgagtggtaagagacaatttttccttaaacctttggcattgttgacatgttggccatccactgtcaatgggaaggatctttcaaaggccactcatgaagaggcagtggaagcttttcgcaatgccaaggagcccattgtggtgcaggtgttaaggcgaacacctcttagtagaccagcctatgggatggcttcagaagtgcagcttatgaatgccagcactcagacggacatcaccttcgaacacatcatggctctggccaagcttcgtccacctacccctccagtgccagacatctgtccattcctgctctcagacagctgccattctctacatccaatggagcatgaattttatgaggacaatgagtatatttccagcttgcctgctgatgcagacagaacagaagactttgaatatgaggaggtcgagttgtgtcgtgttagcagtcaagagaagctgggcctgacagtctgttaccgaacagatgatgaagaagacaccggcatttatgtcagcgaggttgacccaaatagcattgctgccaaagacggccggattcgagaaggggatcggattttgcaaataaatggggaagatgtccagaatcgagaagaagcagtggccttgctgtctaacgatgagtgtaagagaatcgtgctgcttgttgcaaggccagagattcagctggatgaaggctggctggaagatgaaaggaatgaattcttagaggagttaaacttggagatgttggaagaagagcataatgaagcaatgcagcccactgccaatgaggtggagcagccaaaaaagcaagaagaagaagaaggcacaacagacactgcaacatcctcatccaacaaccatgagaaggacagtggagtaggacgtacagatgaaagcttgcgaaatgatgagagctcagagcaggagaatgcagccgaggaccccaatagcacatctttgaagagcaagagagacctggggcagagccaagacactctgggaagtgttgaacttcagtacaatgagagcctcgtatctggtgaatacattgactcagactgcattggcaacccagatgaggactgtgaaagattcaggcagctcttggagctcaaatgcaagattcgaaatcatggagagtatgacctgtattactcaagcagcacaattgaatgcaatcaaggggagcaagagggagtggagcatgagctacagttgcttaatgaagaactgagaaacattgagcttgagtgtcagaatatcatgcaggctcacaggctccagaaagtgacagaccagtatggagacatctggacattgcatgatggaggattccggaattataacaccagcatagatatgcaaaggggaaagctagatgacatcatggagcatccagaaaagtctgacaaggacagttctagtgcttacaacacagctgagagctgcagaagtactccgctcactgtagaccgttcccctgacagttcccttccaagggtgatcaacctcaccaataagaaaaacctgagaagcacaatggcagccacccagtcctcttccggacagagcagtaaagagtcgacctccaccaaagccaaaaccactgagcaaggttgtagcgctgaaagcaaggagaaggttttagaaggcagcaagcttcctgatcaagagaaggcagtcagcgaacacatcccttacctctctccttaccacagctcctcatatagatatgcaaacatcccagcacacgcccggcattatcaaagctacatgcagttaattcaacagaaatctgcagtcgagtatgctcagagtcagctcagcttggtgagcatgtgcaaggagtctcagaagtgttcagagcccaagatggaatggaaggtgaaaattaggagcgacgggacacggtacatcacaaagagacccgtgcgagaccgaatcctgaaggaacgtgccttaaagatcaaggaagagcggagtggcatgaccacagacgatgacaccatgagcgagatgaaaatggggcgctactggagcaaagaggagagaaagcagcacctggttagggccaaagagcagcgccgtcgccgtgagttcatgatgcgaagcaggttagagtgtctcaaggagagccctcagagcggcagtgagggcaagaaggagatcaatatcattgaactgagtcacaaaaagatgatgaaaaagagaaacaagaaaattttggacaactggatgacaatccaagaactgatgacccatggggccaagtctccagatggcacgagagtccataatgccttcttgtcggtgaccactgtatgaccgaatgaatggaatgcatgcgactgattttaggaggatgctaccagtttcggtagagtatgattgcctcgttcaatgtggcgtttttatatatattttgtgactctttatagtttaaattttttgtaagcaaaaaatacctggtaatttttcatttgtttttcatatactggtaccttctttttggctgagatctttcttttacttgtgatatattcatattactcgtttataaaaaatcaaaaacaaaaggaaagaaaacaaaaaaaacttgcacaaaaatactgaggagccaattaatttcctacttcaatgtatctaatgtaagtgaaaatctggatttatttctctagtttacttattttctactttaataataactcaatgccaaaatatttctatgcttgtttcttggcataatacattttaaatcaaacctgttcgtaataaatcatgtgccacatcttgtcttacacataaaagccactgcttttaacatcccattgtacatttaacacataaatggtgttaacatcccattgtacatttaacacataaatggccattgtctttgtctcagtaaagtgtaggtggacaatcttcctgtgatatgtagtgacattggtcatgtagctagataattatggtaattgtgacaattaaagagaaataaattattgattatccttcag

SEQ ID NO: 15335 - DNA, 2971 bp, Homo sapiens
  source 1..2971: mol_type = unassigned DNA
acatcagtctttccacagaatacaactctgaccataggcccttattcctagcattctctcagaaattgcaaattgatggacttcacgtagagggagaaagaaaagctattgcttttcctcagctgtagtttgtttaaagactagatcactacagatcttattccaaagcagagcaaactaaagtgaaattctaaaatcagttttaatctggaaaacaacccatttaatctattcctatcatattgctacattccccatagctgccattctctacatccaatggagcatgaattttatgaggacaatgagtatatttccagcttgcctgctgatgcagacagaacagaagactttgaatatgaggaggtcgagttgtgtcgtgttagcagtcaagagaagctgggcctgacagtctgttaccgaacagatgatgaagaagacaccggcatttatgtcagcgaggttgacccaaatagcattgctgccaaagacggccggattcgagaaggggatcggattttgcaaataaatggggaagatgtccagaatcgagaagaagcagtggccttgctgtctaacgatgagtgtaagagaatcgtgctgcttgttgcaaggccagagattcagctggatgaaggctggctggaagatgaaaggaatgaattcttagaggagttaaacttggagatgttggaagaagagcataatgaagcaatgcagcccactgccaatgaggtggagcagccaaaaaagcaagaagaagaagaaggcacaacagacactgcaacatcctcatccaacaaccatgagaaggacagtggagtaggacgtacagatgaaagcttgcgaaatgatgagagctcagagcaggagaatgcagccgaggaccccaatagcacatctttgaagagcaagagagacctggggcagagccaagacactctgggaagtgttgaacttcagtacaatgagagcctcgtatctggtgaatacattgactcagactgcattggcaacccagatgaggactgtgaaagattcaggcagctcttggagctcaaatgcaagattcgaaatcatggagagtatgacctgtattactcaagcagcacaattgaatgcaatcaaggggagcaagagggagtggagcatgagctacagttgcttaatgaagaactgagaaacattgagcttgagtgtcagaatatcatgcaggctcacaggctccagaaagtgacagaccagtatggagacatctggacattgcatgatggaggattccggaattataacaccagcatagatatgcaaaggggaaagctagatgacatcatggagcatccagaaaagtctgacaaggacagttctagtgcttacaacacagctgagagctgcagaagtactccgctcactgtagaccgttcccctgacagttcccttccaagggtgatcaacctcaccaataagaaaaacctgagaagcacaatggcagccacccagtcctcttccggacagagcagtaaagagtcgacctccaccaaagccaaaaccactgagcaaggttgtagcgctgaaagcaaggagaaggttttagaaggcagcaagcttcctgatcaagagaaggcagtcagcgaacacatcccttacctctctccttaccacagctcctcatatagatatgcaaacatcccagcacacgcccggcattatcaaagctacatgcagttaattcaacagaaatctgcagtcgagtatgctcagagtcagctcagcttggtgagcatgtgcaaggagtctcagaagtgttcagagcccaagatggaatggaaggtgaaaattaggagcgacgggacacggtacatcacaaagagacccgtgcgagaccgaatcctgaaggaacgtgccttaaagatcaaggaagagcggagtggcatgaccacagacgatgacaccatgagcgagatgaaaatggggcgctactggagcaaagaggagagaaagcagcacctggttagggccaaagagcagcgccgtcgccgtgagttcatgatgcgaagcaggttagagtgtctcaaggagagccctcagagcggcagtgagggcaagaaggagatcaatatcattgaactgagtcacaaaaagatgatgaaaaagagaaacaagaaaattttggacaactggatgacaatccaagaactgatgacccatggggccaagtctccagatggcacgagagtccataatgccttcttgtcggtgaccactgtatgaccgaatgaatggaatgcatgcgactgattttaggaggatgctaccagtttcggtagagtatgattgcctcgttcaatgtggcgtttttatatatattttgtgactctttatagtttaaattttttgtaagcaaaaaatacctggtaatttttcatttgtttttcatatactggtaccttctttttggctgagatctttcttttacttgtgatatattcatattactcgtttataaaaaatcaaaaacaaaaggaaagaaaacaaaaaaaacttgcacaaaaatactgaggagccaattaatttcctacttcaatgtatctaatgtaagtgaaaatctggatttatttctctagtttacttattttctactttaataataactcaatgccaaaatatttctatgcttgtttcttggcataatacattttaaatcaaacctgttcgtaataaatcatgtgccacatcttgtcttacacataaaagccactgcttttaacatcccattgtacatttaacacataaatggtgttaacatcccattgtacatttaacacataaatggccattgtctttgtctcagtaaagtgtaggtggacaatcttcctgtgatatgtagtgacattggtcatgtagctagataattatggtaattgtgacaattaaagagaaataaattattgattatccttcagaaaaatta

SEQ ID NO: 15336 - DNA, 2471 bp, Homo sapiens
  source 1..2471: mol_type = unassigned DNA
catcaccggccagccgggtggagtgagcggcgctgggctcgggctccggctccgcgggcggaagaggcggcggcggcggcagaagcggcggcggcggcggcgggagccgaggaggaggttccggacgctgcttaggaaccggggactcaggagtgcccgcgccctgagcgctcagctccagaggcgtcatggctgagtacgggaccctcctgcaagacctgaccaacaacatcacccttgaagatctagaacagctcaagtcggcctgcaaggaagacatccccagcgaaaagagtgaggagatcactactggcagtgcctggtttagcttcctggagagccacaacaagctggacaaagacaacctctcctacattgagcacatctttgagatctcccgccgtcctgacctactcactatggtggttgactacagaacccgtgtgctgaagatctctgaggaggatgagctggacaccaagctaacccgtatccccagtgccaagaagtacaaagacattatccggcagccctctgaggaagagatcatcaaattggctcccccaccgaagaaggcctgagcaagggggaggaagaggaggaaggttggaccttcatcagaccactcccttcccccatcctccaggagagggggcaagggcaacccaccatctacccacttactaacctggtcctaacccccttactgtgcgcgtgtgtgtgcgtgtgcgcacgctctggctgtttgtctatatgtctagctcatctagttcctcttcttaaggggatgggggtcaggggctaggggagggggctgagtttccccactttaggaggaggtgggggctatttctatgcaaatagaaatcagcacattcctcctacttccctttcctccactccccccatatctttaaagtgtggaagcagaaaggacctgcattttcctacattgaggagctgacataggggtaaggtatgggagaggtaggtggatccagggaaaagcagtggggacggaaggcaaagagaccactcaacccccacctggaaggggcaaagaaaagccagagttccatgtttgtactcctgtgctggactgtttcctgagtaccagcaggtccctttttgtctctcatgggcctagcataggtatgagccagggatcctttcctggtccctaagatcaaaccccatggagcagccagcgttagatgcccccacccacctgtactctggagagactgtgctgggaacatgtaccactgagcctgagatggggatgagggcagagagaggggagccccctcttccactcagttgttcctactcagactgttgcactctaaacctagggaggttgaagaatgagacccttaggttttaacacgaatcctgacaccaccatctatagggtcccaacttggttattgtaggcaaccttccctctctccttggtgaagaacatcccaagccagaaagaagttaactacagtgttttcctttgcaccgatccccaccccaattcaatcccggaagggacttacttaggaaacccttctttactagatatcctggccccctgggcttgtgaacacctcctagccacatcactacagtacagtgagtgaccccagcctcctgcctaccccaagatgcccctccccaccctgaccgtgctaactgtgtgtacatatatattctacatatatgtatattaaaactgcactgccatgtctgcccttttttgtggtgtctagcattaacttattgtctaggccagagcgggggtgggaggggaatgccacagtgaagggagtggcagaatcaaattgctacatagtccaaacaaaaaagaaggctttttcaaaaaacattaaattcacatgcagtctcagagactatttagacaaagttcaagttaggagcttttaggatgtgggagtaaaactttaatgggaggggagggctggctgctggaagaaggaagaagccagactggttagacagtactcttaactcctagcccagcctagcgtgccctgcccctctggccactgctgcagacacctgccttaacacacacacctctaggactccacagttttgccttaaaggaccttcccaagtctccctttccctgtctggcttctcccttaagaagagagagatacttgtagaattgggtggggggaatgagcatgaactgtccttccatttgggatatgttacattagagtgagagagagaataaggagcctttcttatggaagaaatgggagaagagagacagggttcttttcagcagagtctagtagtttctctgtaaggcaaaataatctaaaaagactaacctgcccacccactccttatattgctgtgagattgcccctatcttgtgctcttctgtctgcagtgtgcacggccttgttctaacccggaataaaggtgattgattgtattgcaactaa

SEQ ID NO: 15337 - DNA, 1021 bp, Homo sapiens
  source 1..1021: mol_type = unassigned DNA
ctccggctccgcgggcggaagaggcggcggcggcggcagaagcggcggcggcggcggcgggagccgaggaggaggttccggacgctgcttaggaaccggggactcaggagtgcccgcgccctgagcgctcagctccagaggcgtcatggctgagtacgggaccctcctgcaagacctgaccaacaacatcacccttgaagatctagaacagctcaagtcggcctgcaaggaagacatccccagcgaaaagaacaacctctcctacattgagcacatctttgagatctcccgccgtcctgacctactcactatggtggttgactacagaacccgtgtgctgaagatctctgaggaggatgagctggacaccaagctaacccgtatccccagtgccaagaagtacaaagacattatccggcagccctctgaggaagagatcatcaaattggctcccccaccgaagaaggcctgagcaagggggaggaagaggaggaaggttggaccttcatcagaccactcccttcccccatcctccaggagagggggcaagggcaacccaccatctacccacttactaacctggtcctaacccccttactgtgcgcgtgtgtgtgcgtgtgcgcacgctctggctgtttgtctatatgtctagctcatctagttcctcttcttaaggggatgggggtcaggggctaggggagggggctgagtttccccactttaggaggaggtgggggctatttctatgcaaatagaaatcagcacattcctcctacttccctttcctccactccccccatatctttaaagtgtggaagcagaaaggacctgcattttcctacattgaggagctgacataggggtaaggtatgggagaggtaggtggatccagggaaaagcagtggggacggaaggcaaagagaccactcaacccccacctggaaggggcaaagaaaagccagagttccatgtttgtactcctgtgctggactgtttcctgagtaccagcaggtcccttttt

SEQ ID NO: 15338 - DNA, 2694 bp, Homo sapiens
  source 1..2694: mol_type = unassigned DNA
gcggcggcggcggcggcgggagccgaggaggaggttccggacgctgcttaggaaccggggactcaggagtgcccgcgccctgagcgctcagctccagaggcgggatgctcaccccttcctaattgcagctccgaatattcagatggggacagtgaagcacagatctcaggagtcctaagtattcatggctaccactaagttggatagaatggcctccgcccagactgcctggtgatccctgagcagctctctgcactgctccagaaatcaggaggatttttcagagcccagagagcagatttctccacgagccctaaggaaatctgaatctctggtgaggaaagtgacatggaggatgaaggaaacaagctctgccaagccccaccatggccaggccagaccagcccagtcatggctgagtacgggaccctcctgcaagacctgaccaacaacatcacccttgaagatctagaacagctcaagtcggcctgcaaggaagacatccccagcgaaaagagtgaggagatcactactggcagtgcctggtttagcttcctggagagccacaacaagctggacaaagacaacctctcctacattgagcacatctttgagatctcccgccgtcctgacctactcactatggtggttgactacagaacccgtgtgctgaagatctctgaggaggatgagctggacaccaagctaacccgtatccccagtgccaagaagtacaaagacattatccggcagccctctgaggaagagatcatcaaattggctcccccaccgaagaaggcctgagcaagggggaggaagaggaggaaggttggaccttcatcagaccactcccttcccccatcctccaggagagggggcaagggcaacccaccatctacccacttactaacctggtcctaacccccttactgtgcgcgtgtgtgtgcgtgtgcgcacgctctggctgtttgtctatatgtctagctcatctagttcctcttcttaaggggatgggggtcaggggctaggggagggggctgagtttccccactttaggaggaggtgggggctatttctatgcaaatagaaatcagcacattcctcctacttccctttcctccactccccccatatctttaaagtgtggaagcagaaaggacctgcattttcctacattgaggagctgacataggggtaaggtatgggagaggtaggtggatccagggaaaagcagtggggacggaaggcaaagagaccactcaacccccacctggaaggggcaaagaaaagccagagttccatgtttgtactcctgtgctggactgtttcctgagtaccagcaggtccctttttgtctctcatgggcctagcataggtatgagccagggatcctttcctggtccctaagatcaaaccccatggagcagccagcgttagatgcccccacccacctgtactctggagagactgtgctgggaacatgtaccactgagcctgagatggggatgagggcagagagaggggagccccctcttccactcagttgttcctactcagactgttgcactctaaacctagggaggttgaagaatgagacccttaggttttaacacgaatcctgacaccaccatctatagggtcccaacttggttattgtaggcaaccttccctctctccttggtgaagaacatcccaagccagaaagaagttaactacagtgttttcctttgcaccgatccccaccccaattcaatcccggaagggacttacttaggaaacccttctttactagatatcctggccccctgggcttgtgaacacctcctagccacatcactacagtacagtgagtgaccccagcctcctgcctaccccaagatgcccctccccaccctgaccgtgctaactgtgtgtacatatatattctacatatatgtatattaaaactgcactgccatgtctgcccttttttgtggtgtctagcattaacttattgtctaggccagagcgggggtgggaggggaatgccacagtgaagggagtggcagaatcaaattgctacatagtccaaacaaaaaagaaggctttttcaaaaaacattaaattcacatgcagtctcagagactatttagacaaagttcaagttaggagcttttaggatgtgggagtaaaactttaatgggaggggagggctggctgctggaagaaggaagaagccagactggttagacagtactcttaactcctagcccagcctagcgtgccctgcccctctggccactgctgcagacacctgccttaacacacacacctctaggactccacagttttgccttaaaggaccttcccaagtctccctttccctgtctggcttctcccttaagaagagagagatacttgtagaattgggtggggggaatgagcatgaactgtccttccatttgggatatgttacattagagtgagagagagaataaggagcctttcttatggaagaaatgggagaagagagacagggttcttttcagcagagtctagtagtttctctgtaaggcaaaataatctaaaaagactaacctgcccacccactccttatattgctgtgagattgcccctatcttgtgctcttctgtctgcagtgtgcacggccttgttctaacccggaataaaggtgattgattgtattgcaactaa

SEQ ID NO: 15339 - DNA, 654 bp, Homo sapiens
  source 1..654: mol_type = unassigned DNA
agaagaaaaagatggtggggggaaggagtcatggctgagtacgggaccctcctgcaagacctgaccaacaacatcacccttgaagatctagaacagctcaagtcggcctgcaaggaagacatccccagcgaaaagagtgaggagatcactactggcagtgcctggtttagcttcctggagagccacaacaagctggacaaagacaacctctcctacattgagcacatctttgagatctcccgccgtcctgacctactcactatggtggttgactacagaacccgtgtgctgaagatctctgaggaggatgagctggacaccaagctaacccgtatccccagtgccaagaagtacaaagacattatccggcagccctctgaggaagagatcatcaaattggctcccccaccgaagaaggcctgagcaagggggaggaagaggaggaaggttggaccttcatcagaccactcccttcccccatcctccaggagagggggcaagggcaacccaccatctacccacttactaacctggtcctaacccccttactgtgcgcgtgtgtgtgcgtgtgcgcacgctctggctgtttgtctatatgtctagctcatctagttcctcttcttaaggggatgggggtcaggggctaggggaggg

SEQ ID NO: 15340 - DNA, 895 bp, Homo sapiens
  source 1..895: mol_type = unassigned DNA
cccaaagtacttgtgtccgggtggtggactggattagctgcggagccctggaagctgcctgtccttctccctgtgcttaaccagaggtgcccatgggttggacaatgaggctggtcacagcagcactgttactgggtctcatgatggtggtcactggagacgaggatgagaacagcccgtgtgcccatgaggccctcttggacgaggacaccctcttttgccagggccttgaagttttctacccagagttggggaacattggctgcaaggttgttcctgattgtaacaactacagacagaagatcacctcctggatggagccgatagtcaagttcccgggggccgtggacggcgcaacctatatcctggtgatggtggatccagatgcccctagcagagcagaacccagacagagattctggagacattggctggtaacagatatcaagggcgccgacctgaagaaagggaagattcagggccaggagttatcagcctaccaggctccctccccaccggcacacagtggcttccatcgctaccagttctttgtctatcttcaggaaggaaaagtcatctctctccttcccaaggaaaacaaaactcgaggctcttggaaaatggacagatttctgaaccgtttccacctgggcgaacctgaagcaagcacccagttcatgacccagaactaccaggactcaccaaccctccaggctcccagagaaagggccagcgagcccaagcacaaaaaccaggcggagatagctgcctgctagatagccggctttgccatccgggcatgtggccacactgcccaccaccgacgatgtgggtatggaaccccctctggatacagaaccccttcttttccaaataaaaaaaaaatcatccaggg

SEQ ID NO: 15341 - DNA, 475 bp, Homo sapiens
  source 1..475: mol_type = unassigned DNA
ccttcttttcctgcactctagtgtcccttctgcctgactctctgtgcatcttgaaaggagaaacggtgcccatgggttggacaatgaggctggtcacagcagcactgttactgggtctcatgatggtggtcactggagacgaggatgagaacagcccgtgtgcccatgaggccctcttggacgaggacaccctcttttgccagggccttgaagttttctacccagagttggggaacattggctgcaaggttgttcctgattgtaacaactacagacagaagatcacctcctggatggagccgatagtcaagttcccgggggccgtggacggcgcaacctatatcctggtgatggtggatccagatgcccctagcagagcagaacccagacagagattctggagacattggctggtaacagatatcaagatggggaaagcagagcccagagaagttgaatgatgccatctcttagc

SEQ ID NO: 15342 - DNA, 459 bp, Homo sapiens
  source 1..459: mol_type = unassigned DNA
gggacgacgccggcgccgccgcgctgctgctgggctccagcctcccggccagctcgcggccactcagaaactccggcagggcagcccaggccggacgtgggcccaggagcggacgcgcgcgctgcactgcagccgctgccccttccggatcagcatcgccccgcgcgccaggcgcccaatgtcacggcggcgcgcggagccgggctgcggaggcagcgggcggcgcgcaggggcgccgggagaggggcgaggccgccgccgctacgcgcccgggcccgcggcgaaggcgctgccgcgaagacgcctggcgctgcagtcccaggtgcccatgggttggacaatgaggctggtcacagcagcactgttactgggtctcatgatggtggtcactggagacgaggatgagaacagcccgtgtgcccatgaggccctcttggacgaggacaccctcttttgcca

SEQ ID NO: 15343 - DNA, 8723 bp, Homo sapiens
  source 1..8723: mol_type = unassigned DNA
gtttgggaggcgcgggagatgtccaccctgggctggtggcgccgccgggcgccgggcgccatgagggtgcgctaggcggctgttcgtgcccgaggctgcgcagcactgaggtgagctttgccttcttgatcttccgtccttcttggagacgactggcgagaggaagagggactaggtccaaacgctaggtggctgggtccagatacctgtgttttgactctgttcctgtggatagctgcttggtctgaagttccagaaaggatcctgttcccagacaggtccctgagtactgacggtcacaggctgccgcgtctttcctgttgactcatgtttggttcctccagtgaaaattttacttagagaaatgctgcctccaaagcacttgtctgccaccaaacctaagaagtcctgggccccaaatctgtatgagctagacagtgacttgactaaggagccggatgtcatcataggagaaggtccaactgactctgagttttttcatcagaggtttcggaacctaatctatgtggaatttgttgggcctcggaagaccctgatcaaactccgaaacctctgcctcgattggttgcagccggagacccgcaccaaggaggagatcatcgagctcttggtccttgagcagtacctgaccatcatccctgaaaagctcaagccttgggtgcgagcaaaaaagccggagaactgtgagaagctcgtcactctgctggagaattacaaggagatgtaccaaccagaagacgacaacaacagtgacgtgaccagcgacgacgacatgacccggaacagaagagagtcctcaccacctcactcagtccattctttcagtgaccgggactgggaccggaggggcagaagcagagacatggagccacgagaccgctggtcccacaccaggaacccaagaagcaggatgcctccgcgggatctttcccttcctgtggtggcgaaaacaagctttgaaatggacagagaggacgacagggactccagggcttatgagtcccgatctcaggatgctgaatcataccaaaatgtggtggacctcgctgaggacaggaaacctcacaacacaatccaggacaacatggaaaactacaggaagctgctctccctcgtgcagcttgctgaagacgatggccactcccacatgacgcagggccactcatcaagatccaagagaagtgcctacccaagcaccagtcgaggtctaaaaactatgcctgaagccaaaaaatcaacccaccggcgggggatttgtgaagatgaatcttcccacggagtgataatggaaaaattcatcaaggatgtgtcacgcagttccaaatcgggaagagcaagggagtcaagcgaccggtcacagagattccccagaatgtcagatgataactggaaggacatttcattgaacaagagggagtcagtgatccagcagcgggtttatgaagggaatgcatttaggggaggctttaggtttaattcaacccttgtttccagaaagagagttcttgaaagaaagaggcgctatcattttgacacagatgggaagggctcgattcacgatcaaaaaggctgtcccaggaagaagccctttgaatgtggtagtgagatgagaaaagccatgagcgtgagcagcctgagcagcctcagctccccctcctttaccgagtcacagccaattgattttggggcaatgccatatgtatgtgatgagtgtgggaggtcgttcagtgtcatctcagaatttgttgagcaccagatcatgcatactagagagaacctctatgagtatggtgagtcctttatccacagtgtggctgtcagtgaagttcagaaaagtcaggttggagggaaacgttttgaatgtaaggactgtggagagaccttcaataagagtgccgccttggctgaacatcggaagattcatgctagaggttatcttgtggaatgtaagaatcaggaatgtgaggaagccttcatgcctagccccacctttagtgagcttcagaaaatatatggcaaagacaaattctacgagtgcagggtgtgtaaggaaaccttccttcatagttctgccctgattgagcaccagaaaatccactttggggatgacaaagataatgagcgtgaacatgaacgtgaacgtgaacgtgagcgcggggaaacctttaggcccagcccagcccttaatgagtttcagaaaatgtatggtaaagagaaaatgtacgaatgtaaggtgtgtggggagactttccttcatagctcatccctgaaagaacatcagaaaatccatactagagggaacccatttgaaaacaagggtaaagtgtgtgaggaaacctttattcctggtcagtcccttaaaaggcgtcagaaaacttacaataaggagaagctctgtgactttacagatggccgggatgccttcatgcaaagctcagagctcagtgagcatcagaaaattcattctcgaaagaacctctttgaaggcagagggtatgagaaatctgtcattcatagtgggccattcactgaatctcagaagagtcatactataacaagacctcttgaaagtgatgaggacgaaaaggcgttcaccattagctctaacccctatgaaaaccagaagattcccactaaggaaaatgtctatgaggcaaaatcatatgagaggtctgttattcatagcttagcctctgtggaagctcagaaaagtcacagtgtagcagggcccagtaaaccaaaagtaatggcagagtctaccattcagagcttcgatgctatcaaccatcagagagttcgtgctggagggaacacctctgaaggaagggaatacagtaggtctgttatccatagcttagtggcttccaaacctccaagaagtcacaatggaaatgaattggtggaatctaatgagaagggagaatcctccatttatatctcagaccttaatgataagcgacagaagattcctgccagagagaacccttgtgaagggggcagtaagaatcgcaactatgaagactctgtcatacagagtgtattccgtgccaaacctcagaaaagtgttcctggagagggatctggtgagtttaagaaggatggcgaattctctgttcccagctcaaatgtccgtgaataccagaaggctcgtgctaaaaagaaatacattgagcataggagcaatgagacctctgtaattcactctctgccttttggtgaacaaacatttcgccctcgagggatgctctatgaatgtcaggagtgtggggagtgctttgctcatagctctgacctcactgagcaccagaagattcatgatagggagaagccctctggaagcagaaactatgaatggtctgtcattcgcagcttggcccctactgaccctcaaacaagttacgcccaagagcagtatgctaaagagcaagcgcggaacaaatgtaaggacttcagacaattttttgctaccagcgaagacctcaacacaaaccagaaaatctatgaccaagagaagtctcatggcgaggagtctcaaggcgagaatactgatggggaggagacccacagcgaggagacccatggtcaggagacaattgaagaccctgtcattcaaggctcagacatggaagaccctcagaaggatgaccctgatgacaaaatctatgaatgtgaggactgtggcctgggctttgtggatctcacagacctcacagaccatcagaaagtccacagcaggaagtgcctggttgacagtcgggagtacacacattctgtaattcacacccattccatcagcgagtatcagagagattacactggagagcagctgtatgaatgtccaaagtgtggggaatcttttattcatagctcattccttttcgagcatcagagaatccatgaacaagaccagttgtattccatgaaggggtgtgatgatggttttattgccctcttgcccatgaagccacggaggaatcgtgctgcagagaggaatcctgctcttgctgggtcggccattcgatgccttttgtgtggacaaggcttcattcatagctctgcccttaatgagcatatgagacttcatagggaagatgatttactggagcagagccagatggctgaggaagctatcattccaggcttagccctcactgagtttcagagaagtcagaccgaagagagactctttgaatgtgcagtctgtggagaatctttcgtcaacccagcagaacttgcagatcacgtaactgttcataagaatgagccctatgagtacgggtcctcctatactcacacctcatttcttactgagcccctcaaaggagctataccattctatgaatgcaaggattgtggtaagtcctttattcatagcacagtcctcactaaacataaggagcttcatctggaagaagaagaagaagatgaagcagcagcagctgcagcagcagcagcccaggaagttgaagccaatgtccatgttccacaagtagttctgaggattcagggcttaaacgtagaggctgctgagccagaagtggaggctgccgagccagaagtggaggctgctgagccagaagtggaggctgctgagccaaacggagaggctgaagggccagatggagaggctgcagagcccattggagaggctggacagccaaatggagaggccgagcagccaaatggggatgctgatgagccagatggtgcaggtattgaagacccagaagaaagagctgaagagccagagggaaaagctgaagagccagagggagatgccgacgagcctgacggtgtgggaattgaagacccagaagaaggtgaagatcaagagattcaggtagaagaaccatactatgactgccatgaatgcacagaaaccttcacttccagcacagcattcagtgaacacctgaaaactcatgccagcatgatcatatttgagcctgcaaatgcctttggggagtgctcaggctacatcgaacgtgccagcaccagcacaggtggtgccaatcaagctgatgagaagtacttcaaatgtgacgtctgtgggcagctcttcaatgaccgcctgtccctcgccagacaccagaatacccacactggctgagggcatggggtaaaggttagaaaaccttcacctaggacttgacccttaccaaaccacagagaatccaaaccaatccatgataatgtcagtaggagacttaaccttagtgtgttacacacctgacttaacatctctaaactcagattgaaaagagaccgaatgtgcagattccacagtcttaagctttccccttcagatgtcagtgtctgcatgtgggaaagccatagcacacatcttacctttccaagtaatcagattgagaaaaccctatgagtattccagactacagagtttgcccaaatcaactgtaaatgacacttgtgtaacgtatatatagtgtttcatgaggtgtatataaaatagcaaattatgacagaacagtgatcacatatatttggatttatatgatatacagttacagtttactctgcagaggtaccttacctggtattctttgaattttttttttttttggaggaggaagagagcaacaaatttgattatatttttaagtgtcttagatcctgagaaagatttattgtgcattatttgaaccctgtcaatatctttttgagtaattgttttgtttcttacccttaaatagtcttgtgaagctgtaggcatgatagataacatggcttttactccttactgtttgaaaagataagtactttagcttctttctgcagccatttcatctgcgccaacactttggaacctaatactgtgtaaggctttacaatatacggattggctttttgtgacccagattgattggttgccacatgttatgtttgttgaagtggttctcatgcaaaaatattacacatttgtgttctgggttttttttttttttaaccaactcaatatgtgtttgatgatagtgaattgataaaacccgaagcttttccctgtaaatcttacatctttgcctttaaagaatgggttacaaccatcactagatcacagtagtgcctaatgaaggttgagaaccgtaggagaggctctcatgctgtaaataatgttgcaggctaataacctttcatcacttcctttgtgcgcttcctgccttaagtgacaagtagcaacatggcttgggtcccctgtgcagcatcagcttatgctgccacaagtcagtttgcaccctaggtgcccaggagctagtatccttagatctttctatcgctaacttaattctcttcgttatttatctgaccctctaactccatgtctaacttgcattaaaaaaaaaaaaattctttacagtcaacccaagcttaacatggactcaggttccccagcagccttaatttgttttgttaacatctgttccttctttttcagctctcctagagtatttctgagtgttgtgttcatctaatcttagtattcttttaattacaaattgacctcacagcttgaggtttcttgtgtcctattctgtggactacctgtgctcctttgcttcccctcccctcgcataataactatattaagaaattttttttggccttgagttggctggaaaaaaaatataaaatttaaaaaatttaaaaaaaaagatttgcaaaatgtaagtgtagatcatttgaacaagcaaaattaaagtacccactgggggaaatgtgtctgaatcttactcttctggatctgcaggattagggcttggaagtatgtcaaagatgcagggagtgtcaaagtttaggaagattgtagagctgagagcaagaagcagaaatgagtgagtcaaagaagggagtcctaatatatcaccagatctaggaggggagaggagacagacagaagaaaacaccagaggcaagaactgtagaaggccaggtttctgagaatgaattgagcggggtgtcctgagcagtttggaaaaggagtttttgatggtatggtgtaggtgagggctggctgcataggaaggactgaggttggaacggacatcgggaaagctgaggggcagtgaggtttactacatgggaaaaggactcttgaaacgagaatcagtgttgatgtcggggtgaactttgtgggtacattacttggtgttaacattgttggcagtggtagccccttttcagaaagcaacttgctgtaagtcagggtgtccgttccaaccttcagctagtgaaaaggtagtaacaaatggtaaacaagagaatgattgtttaaacctatctgtggacacttaatgcaactgtttaaaaatgataatcacgagttatgtagcaacgtggaaatatatttacagaacattaagtggagaaagcaggacacgaaagtatatttatactacagttataactcaacagttcatttatatgctgttcatttaacagttcatttaaacagttcattataactgtttaaaaatatatatgcttatagtcaaaagctgttgtggtgttgttgttgtaggcttatagttgagcattattttcttaaatttcttgaatgttctttatggtagtgttactaaaaagtttatgatcacattttcattgtgaacataatttgaactcattatcacacacttggaaaatacagaaaagtggaggaaaaaaaatcatatccccaccatccaaagacatatactctcctcttatcttgttcattcttgtttctgtgcacaggtttatgattataactgtgtcaaaatgtatattcaaaatagctgttacattacctttgtggaattatggttaaatactttcactttaattttttcaaatgttccctataataatgtcctgataacagtgtattatgtgtgtctccattggtgtgcataatacatacccagaggaaaaattagaaaataaagtaaattattttaaaaaattacctatattcccaacacctaacaactactgctaacatcttgatctgtttcctctatcttgtttcagtgcacacgcttgtgataacagtgttaaatatgtgtgcataaagtcttaaatgaaaagatgtggaaaataactaaaatagtgttgtcattgtgggaatttggttaaatattttgtctcaaattccttaaataatctttggtgttttggtaataaattttatgtatgtattttccattacaaatataatacatactcatacaaaactttggaaattcagtaaagaaaattcacacatattcccaacacccaacaacaattaactgttaacatcttgatctgtgcactagtctgtgattattagggtgttagtgataagtatgcataaatgtcaaagatgggaagaaagatgaaaaacaagaaatagttgtgtggttgttgtgggattatggttattttgtttcggtttccttgaaaggtcatcattctagtgttttggtagtccacctttactacatatatttccattatatatgaaatgtgttcattatagaaactttgaagttacagaaatgtagaagagaaactcacccatgttttcaccatccaaagagtgtggttaacatcttgatatattttcttcatcttgtttctgtgcacaggtttttggtttgttaatatggttgtggtcattctatctgtaatagtgtcaacaataaaaataaagttaaaaataa

SEQ ID NO: 15344 - DNA, 318 bp, Homo sapiens
  source 1..318: mol_type = unassigned DNA
ttatagtcaaaagctgttgtggtgttgttgttgtaggcttatagttgagcattattttcttaaatttcttgaatgttctttatggtagtgttactaaaaagtttatgatcacattttcattgtgaacataatttgaactcattatcacacacttggaaaatacagaaaagtggaggaaaaaaaatcatatccccaccatccaaagacatatactctcctcttatcttgttcattcttgtttctgtgcacaggtttttggtttgttaatatggttgtggtcattctatctgtaatagtgtcaacaataaaaataaagtt

SEQ ID NO: 15345 - DNA, 5304 bp, Homo sapiens
  source 1..5304: mol_type = unassigned DNA
gcagaagtctgggcagctgcgggaggagaggtttgggaggcgcgggagatgtccaccctgggctggtggcgccgccgggcgccgggcgccatgagggtgcgctaggcggctgttcgtgcccgaggctgcgcagcactgaggtgagctttgccttcttgatcttccgtccttcttggagacgactggcgagaggaagagggactaggtccaaacgctaggtggctgggtccagccggagacccgcaccaaggaggagatcatcgagctcttggtccttgagcagtacctgaccatcatccctgaaaagctcaagccttgggtgcgagcaaaaaagccggagaactgtgagaagctcgtcactctgctggagaattacaaggagatgtaccaaccagaagacgacaacaacagtgacgtgaccagcgacgacgacatgacccggaacagaagagagtcctcaccacctcactcagtccattctttcagtggtgaccgggactgggaccggaggggcagaagcagagacatggagccacgagaccgctggtcccacaccaggaacccaagaagcaggatgcctccgcgggatctttcccttcctgtggtggcgaaaacaagctttgaaatggacagagaggacgacagggactccagggcttatgagtcccgatctcaggatgctgaatcataccaaaatgtggtggacctcgctgaggacaggaaacctcacaacacaatccaggacaacatggaaaactacaggaagctgctctccctcggagtgcagcttgctgaagacgatggccactcccacatgacgcagggccactcatcaagatccaagagaagtgcctacccaagcaccagtcgaggtctaaaaactatgcctgaagccaaaaaatcaacccaccggcgggggatttgtgaagatgaatcttcccacggagtgataatggaaaaattcatcaaggatgtgtcacgcagttccaaatcgggaagagcaagggagtcaagcgaccggtcacagagattccccagaatgtcagatgataactggaaggacatttcattgaacaagagggagtcagtgatccagcagcgggtttatgaagggaatgcatttaggggaggctttaggtttaattcaacccttgtttccagaaagagagttcttgaaagaaagaggcgctatcattttgacacagatgggaagggctcgattcacgatcaaaaaggctgtcccaggaagaagccctttgaatgtggtagtgagatgagaaaagccatgagcgtgagcagcctgagcagcctcagctccccctcctttaccgagtcacagccaattgattttggggcaatgccatatgtatgtgatgagtgtgggaggtcgttcagtgtcatctcagaatttgttgagcaccagatcatgcatactagagagaacctctatgagtatggtgagtcctttatccacagtgtggctgtcagtgaagttcagaaaagtcaggttggagggaaacgttttgaatgtaaggactgtggagagaccttcaataagagtgccgccttggctgaacatcggaagattcatgctagaggttatcttgtggaatgtaagaatcaggaatgtgaggaagccttcatgcctagccccacctttagtgagcttcagaaaatatatggcaaagacaaattctacgagtgcagggtgtgtaaggaaaccttccttcatagttctgccctgattgagcaccagaaaatccactttggggatgacaaagataatgagcgtgaacatgaacgtgaacgtgaacgtgagcgcggggaaacctttaggcccagcccagcccttaatgagtttcagaaaatgtatggtaaagagaaaatgtacgaatgtaaggtgtgtggggagactttccttcatagctcatccctgaaagaacatcagaaaatccatactagagggaacccatttgaaaacaagggtaaagtgtgtgaggaaacctttattcctggtcagtcccttaaaaggcgtcagaaaacttacaataaggagaagctctgtgactttacagatggccgggatgccttcatgcaaagctcagagctcagtgagcatcagaaaattcattctcgaaagaacctctttgaaggcagagggtatgagaaatctgtcattcatagtgggccattcactgaatctcagaagagtcatactataacaagacctcttgaaagtgatgaggacgaaaaggcgttcaccattagctctaacccctatgaaaaccagaagattcccactaaggaaaatgtctatgaggcaaaatcatatgagaggtctgttattcatagcttagcctctgtggaagctcagaaaagtcacagtgtagcagggcccagtaaaccaaaagtaatggcagagtctaccattcagagcttcgatgctatcaaccatcagagagttcgtgctggagggaacacctctgaaggaagggaatacagtaggtctgttatccatagcttagtggcttccaaacctccaagaagtcacaatggaaatgaattggtggaatctaatgagaagggagaatcctccatttatatctcagaccttaatgataagcgacagaagattcctgccagagagaacccttgtgaagggggcagtaagaatcgcaactatgaagactctgtcatacagagtgtattccgtgccaaacctcagaaaagtgttcctggagagggatctggtgagtttaagaaggatggcgaattctctgttcccagctcaaatgtccgtgaataccagaaggctcgtgctaaaaagaaatacattgagcataggagcaatgagacctctgtaattcactctctgccttttggtgaacaaacatttcgccctcgagggatgctctatgaatgtcaggagtgtggggagtgctttgctcatagctctgacctcactgagcaccagaagattcatgatagggagaagccctctggaagcagaaactatgaatggtctgtcattcgcagcttggcccctactgaccctcaaacaagttacgcccaagagcagtatgctaaagagcaagcgcggaacaaatgtaaggacttcagacaattttttgctaccagcgaagacctcaacacaaaccagaaaatctatgaccaagagaagtctcatggcgaggagtctcaaggcgagaatactgatggggaggagacccacagcgaggagacccatggtcaggagacaattgaagaccctgtcattcaaggctcagacatggaagaccctcagaaggatgaccctgatgacaaaatctatgaatgtgaggactgtggcctgggctttgtggatctcacagacctcacagaccatcagaaagtccacagcaggaagtgcctggttgacagtcgggagtacacacattctgtaattcacacccattccatcagcgagtatcagagagattacactggagagcagctgtatgaatgtccaaagtgtggggaatcttttattcatagctcattccttttcgagcatcagagaatccatgaacaagaccagttgtattccatgaaggggtgtgatgatggttttattgccctcttgcccatgaagccacggaggaatcgtgctgcagagaggaatcctgctcttgctgggtcggccattcgatgccttttgtgtggacaaggcttcattcatagctctgcccttaatgagcatatgagacttcatagggaagatgatttactggagcagagccagatggctgaggaagctatcattccaggcttagccctcactgagtttcagagaagtcagaccgaagagagactctttgaatgtgcagtctgtggagaatctttcgtcaacccagcagaacttgcagatcacgtaactgttcataagaatgagccctatgagtacgggtcctcctatactcacacctcatttcttactgagcccctcaaaggagctataccattctatgaatgcaaggattgtggtaagtcctttattcatagcacagtcctcactaaacataaggagcttcatctggaagaagaagaagaagatgaagcagcagcagctgcagcagcagcagcccaggaagttgaagccaatgtccatgttccacaagtagttctgaggattcagggcttaaacgtagaggctgctgagccagaagtggaggctgccgagccagaagtggaggctgctgagccagaagtggaggctgctgagccaaacggagaggctgaagggccagatggagaggctgcagagcccattggagaggctggacagccaaatggagaggccgagcagccaaatggggatgctgatgagccagatggtgcaggtattgaagacccagaagaaagagctgaagagccagagggaaaagctgaagagccagagggagatgccgacgagcctgacggtgtgggaattgaagacccagaagaaggtgaagatcaagagattcaggtagaagaaccatactatgactgccatgaatgcacagaaaccttcacttccagcacagcattcagtgaacacctgaaaactcatgccagcatgatcatatttgagcctgcaaatgcctttggggagtgctcaggctacatcgaacgtgccagcaccagcacaggtggtgccaatcaagctgatgagaagtacttcaaatgtgacgtctgtgggcagctcttcaatgaccgcctgtccctcgccagacaccagaatacccacactggctgagggcatggggtaaaggttagaaaaccttcacctaggacttgacccttaccaaaccacagagaatccaaaccaatccatgataatgtcagtaggagacttaaccttagtgtgttacacacctgacttaacatctctaaactcagattgaaaagagaccgaatgtgcagattccacagtcttaagctttccccttcagatgtcagtgtctgcatgtgggaaagccatagcacacatcttacctttccaagtaatcagattgagaaaaccctatgagtattccagactacagagtttgcccaaatcaactgtaaatgacacttgtgtaacgtatatatagtgtttcatgaggtgtatataaaatagcaaattatgacagaacagtgatcacatatatttggatttatatgatatacagttacagtttactctgcagaggtaccttacctggtattctttgaattttttttttttttggaggaggaagagagcaacaaatttgattatatttttaagtgtcttagatcctg

SEQ ID NO: 15346 - DNA, 4741 bp, Homo sapiens
  source 1..4741: mol_type = unassigned DNA
gtttgggaggcgcgggagatgtccaccctgggctggtggcgccgccgggcgccgggcgccatgagggtgcgctaggcggctgttcgtgcccgaggctgcgcagcactgaggtgagctttgccttcttgatcttccgtccttcttggagacgactggcgagaggaagagggactaggtccaaacgctaggtggctgggtccagccggagacccgcaccaaggaggagatcatcgagctcttggtccttgagcagtacctgaccatcatccctgaaaagctcaagccttgggtgcgagcaaaaaagccggagaactgtgagaagctcgtcactctgctggagaattacaaggagatgtaccaaccagaagacgacaacaacagtgacgtgaccagcgacgacgacatgacccggaacagaagagagtcctcaccacctcactcagtccattctttcagtgaccgggactgggaccggaggggcagaagcagagacatggagccacgagaccgctggtcccacaccaggaacccaagaagcaggatgcctccgcgggatctttcccttcctgtggtggcgaaaacaagctttgaaatggacagagaggacgacagggactccagggcttatgagtcccgatctcaggatgctgaatcataccaaaatgtggtggacctcgctgaggacaggaaacctcacaacacaatccaggacaacatggaaaactacaggaagctgctctccctcgtgcagcttgctgaagacgatggccactcccacatgacgcagggccactcatcaagatccaagagaagtgcctacccaagcaccagtcgaggtctaaaaactatgcctgaagccaaaaaatcaacccaccggcgggggatttgtgaagatgaatcttcccacggagtgataatggaaaaattcatcaaggatgtgtcacgcagttccaaatcgggaagagcaagggagtcaagcgaccggtcacagagattccccagaatgtcagatgataactggaaggacatttcattgaacaagagggagtcagtgatccagcagcgggtttatgaagggaatgcatttaggggaggctttaggtttaattcaacccttgtttccagaaagagagttcttgaaagaaagaggcgctatcattttgacacagatgggaagggctcgattcacgatcaaaaaggctgtcccaggaagaagccctttgaatgtggtagtgagatgagaaaagccatgagcgtgagcagcctgagcagcctcagctccccctcctttaccgagtcacagccaattgattttggggcaatgccatatgtatgtgatgagtgtgggaggtcgttcagtgtcatctcagaatttgttgagcaccagatcatgcatactagagagaacctctatgagtatggtgagtcctttatccacagtgtggctgtcagtgaagttcagaaaagtcaggttggagggaaacgttttgaatgtaaggactgtggagagaccttcaataagagtgccgccttggctgaacatcggaagattcatgctagaggttatcttgtggaatgtaagaatcaggaatgtgaggaagccttcatgcctagccccacctttagtgagcttcagaaaatatatggcaaagacaaattctacgagtgcagggtgtgtaaggaaaccttccttcatagttctgccctgattgagcaccagaaaatccactttggggatgacaaagataatgagcgtgaacatgaacgtgaacgtgaacgtgagcgcggggaaacctttaggcccagcccagcccttaatgagtttcagaaaatgtatggtaaagagaaaatgtacgaatgtaaggtgtgtggggagactttccttcatagctcatccctgaaagaacatcagaaaatccatactagagggaacccatttgaaaacaagggtaaagtgtgtgaggaaacctttattcctggtcagtcccttaaaaggcgtcagaaaacttacaataaggagaagctctgtgactttacagatggccgggatgccttcatgcaaagctcagagctcagtgagcatcagaaaattcattctcgaaagaacctctttgaaggcagagggtatgagaaatctgtcattcatagtgggccattcactgaatctcagaagagtcatactataacaagacctcttgaaagtgatgaggacgaaaaggcgttcaccattagctctaacccctatgaaaaccagaagattcccactaaggaaaatgtctatgaggcaaaatcatatgagaggtctgttattcatagcttagcctctgtggaagctcagaaaagtcacagtgtagcagggcccagtaaaccaaaagtaatggcagagtctaccattcagagcttcgatgctatcaaccatcagagagttcgtgctggagggaacacctctgaaggaagggaatacagtaggtctgttatccatagcttagtggcttccaaacctccaagaagtcacaatggaaatgaattggtggaatctaatgagaagggagaatcctccatttatatctcagaccttaatgataagcgacagaagattcctgccagagagaacccttgtgaagggggcagtaagaatcgcaactatgaagactctgtcatacagagtgtattccgtgccaaacctcagaaaagtgttcctggagagggatctggtgagtttaagaaggatggcgaattctctgttcccagctcaaatgtccgtgaataccagaaggctcgtgctaaaaagaaatacattgagcataggagcaatgagacctctgtaattcactctctgccttttggtgaacaaacatttcgccctcgagggatgctctatgaatgtcaggagtgtggggagtgctttgctcatagctctgacctcactgagcaccagaagattcatgatagggagaagccctctggaagcagaaactatgaatggtctgtcattcgcagcttggcccctactgaccctcaaacaagttacgcccaagagcagtatgctaaagagcaagcgcggaacaaatgtaaggacttcagacaattttttgctaccagcgaagacctcaacacaaaccagaaaatctatgaccaagagaagtctcatggcgaggagtctcaaggcgagaatactgatggggaggagacccacagcgaggagacccatggtcaggagacaattgaagaccctgtcattcaaggctcagacatggaagaccctcagaaggatgaccctgatgacaaaatctatgaatgtgaggactgtggcctgggctttgtggatctcacagacctcacagaccatcagaaagtccacagcaggaagtgcctggttgacagtcgggagtacacacattctgtaattcacacccattccatcagcgagtatcagagagattacactggagagcagctgtatgaatgtccaaagtgtggggaatcttttattcatagctcattccttttcgagcatcagagaatccatgaacaagaccagttgtattccatgaaggggtgtgatgatggttttattgccctcttgcccatgaagccacggaggaatcgtgctgcagagaggaatcctgctcttgctgggtcggccattcgatgccttttgtgtggacaaggcttcattcatagctctgcccttaatgagcatatgagacttcatagggaagatgatttactggagcagagccagatggctgaggaagctatcattccaggcttagccctcactgagtttcagagaagtcagaccgaagagagactctttgaatgtgcagtctgtggagaatctttcgtcaacccagcagaacttgcagatcacgtaactgttcataagaatgagccctatgagtacgggtcctcctatactcacacctcatttcttactgagcccctcaaaggagctataccattctatgaatgcaaggattgtggtaagtcctttattcatagcacagtcctcactaaacataaggagcttcatctggaagaagaagaagaagatgaagcagcagcagctgcagcagcagcagcccaggaagttgaagccaatgtccatgttccacaagtagttctgaggattcagggcttaaacgtagaggctgctgagccagaagtggaggctgccgagccagaagtggaggctgctgagccagaagtggaggctgctgagccaaacggagaggctgaagggccagatggagaggctgcagagcccattggagaggctggacagccaaatggagaggccgagcagccaaatggggatgctgatgagccagatggtgcaggtattgaagacccagaagaaagagctgaagagccagagggaaaagctgaagagccagagggagatgccgacgagcctgacggtgtgggaattgaagacccagaagaaggtgaagatcaagagattcaggtagaagaaccatactatgactgccatgaatgcacagaaaccttcacttccagcacagcattcagtgaacacctgaaaactcatgccagcatgatcatatttgagcctgcaaatgcctttggggagtgctcaggctacatcgaacgtgccagcaccagcacaggtggtgccaatcaagctgatgagaagtacttcaaatgtgacgtctgtgggcagctcttcaatgaccgcctgtccctcgccagacaccagaatacccacactggctga

SEQ ID NO: 15347 - DNA, 5115 bp, Homo sapiens
  source 1..5115: mol_type = unassigned DNA
acttctagggcattagacaagttgcccacagtcccaagttagtagcccaagttagtagccgagctaactcctcgagtaggtctctgtgaagcccagaggtcatgcttgtaactgctgtgctgaggccaactttgtgcggttgtttgcctatttactggggactcccatatcccaaaagcattgtcgatgcctctggtaaggtggcctccactgctgcctggtcttcaacttctgggacatgtgtatatctccttacgatccacaggtccctgagtactgacggtcacaggctgccgcgtctttcctgttgactcatgtttggttcctccagtgaaaattttacttagagaaatgctgcctccaaagcacttgtctgccaccaaacctaagaagtcctgggccccaaatctgtatgagctagacagtgacttgactaaggagccggatgtcatcataggagaaggtccaactgactctgagttttttcatcagaggtttcggaacctaatctatgtggaatttgttgggcctcggaagaccctgatcaaactccgaaacctctgcctcgattggttgcagccggagacccgcaccaaggaggagatcatcgagctcttggtccttgagcagtacctgaccatcatccctgaaaagctcaagccttgggtgcgagcaaaaaagccggagaactgtgagaagctcgtcactctgctggagaattacaaggagatgtaccaaccagaagacgacaacaacagtgacgtgaccagcgacgacgacatgacccggaacagaagagagtcctcaccacctcactcagtccattctttcagtgaccgggactgggaccggaggggcagaagcagagacatggagccacgagaccgctggtcccacaccaggaacccaagaagcaggatgcctccgcgggatctttcccttcctgtggtggcgaaaacaagctttgaaatggacagagaggacgacagggactccagggcttatgagtcccgatctcaggatgctgaatcataccaaaatgtggtggacctcgctgaggacaggaaacctcacaacacaatccaggacaacatggaaaactacaggaagctgctctccctcgtgcagcttgctgaagacgatggccactcccacatgacgcagggccactcatcaagatccaagagaagtgcctacccaagcaccagtcgaggtctaaaaactatgcctgaagccaaaaaatcaacccaccggcgggggatttgtgaagatgaatcttcccacggagtgataatggaaaaattcatcaaggatgtgtcacgcagttccaaatcgggaagagcaagggagtcaagcgaccggtcacagagattccccagaatgtcagatgataactggaaggacatttcattgaacaagagggagtcagtgatccagcagcgggtttatgaagggaatgcatttaggggaggctttaggtttaattcaacccttgtttccagaaagagagttcttgaaagaaagaggcgctatcattttgacacagatgggaagggctcgattcacgatcaaaaaggctgtcccaggaagaagccctttgaatgtggtagtgagatgagaaaagccatgagcgtgagcagcctgagcagcctcagctccccctcctttaccgagtcacagccaattgattttggggcaatgccatatgtatgtgatgagtgtgggaggtcgttcagtgtcatctcagaatttgttgagcaccagatcatgcatactagagagaacctctatgagtatggtgagtcctttatccacagtgtggctgtcagtgaagttcagaaaagtcaggttggagggaaacgttttgaatgtaaggactgtggagagaccttcaataagagtgccgccttggctgaacatcggaagattcatgctagaggttatcttgtggaatgtaagaatcaggaatgtgaggaagccttcatgcctagccccacctttagtgagcttcagaaaatatatggcaaagacaaattctacgagtgcagggtgtgtaaggaaaccttccttcatagttctgccctgattgagcaccagaaaatccactttggggatgacaaagataatgagcgtgaacatgaacgtgaacgtgaacgtgagcgcggggaaacctttaggcccagcccagcccttaatgagtttcagaaaatgtatggtaaagagaaaatgtacgaatgtaaggtgtgtggggagactttccttcatagctcatccctgaaagaacatcagaaaatccatactagagggaacccatttgaaaacaagggtaaagtgtgtgaggaaacctttattcctggtcagtcccttaaaaggcgtcagaaaacttacaataaggagaagctctgtgactttacagatggccgggatgccttcatgcaaagctcagagctcagtgagcatcagaaaattcattctcgaaagaacctctttgaaggcagagggtatgagaaatctgtcattcatagtgggccattcactgaatctcagaagagtcatactataacaagacctcttgaaagtgatgaggacgaaaaggcgttcaccattagctctaacccctatgaaaaccagaagattcccactaaggaaaatgtctatgaggcaaaatcatatgagaggtctgttattcatagcttagcctctgtggaagctcagaaaagtcacagtgtagcagggcccagtaaaccaaaagtaatggcagagtctaccattcagagcttcgatgctatcaaccatcagagagttcgtgctggagggaacacctctgaaggaagggaatacagtaggtctgttatccatagcttagtggcttccaaacctccaagaagtcacaatggaaatgaattggtggaatctaatgagaagggagaatcctccatttatatctcagaccttaatgataagcgacagaagattcctgccagagagaacccttgtgaagggggcagtaagaatcgcaactatgaagactctgtcatacagagtgtattccgtgccaaacctcagaaaagtgttcctggagagggatctggtgagtttaagaaggatggcgaattctctgttcccagctcaaatgtccgtgaataccagaaggctcgtgctaaaaagaaatacattgagcataggagcaatgagacctctgtaattcactctctgccttttggtgaacaaacatttcgccctcgagggatgctctatgaatgtcaggagtgtggggagtgctttgctcatagctctgacctcactgagcaccagaagattcatgatagggagaagccctctggaagcagaaactatgaatggtctgtcattcgcagcttggcccctactgaccctcaaacaagttacgcccaagagcagtatgctaaagagcaagcgcggaacaaatgtaaggacttcagacaattttttgctaccagcgaagacctcaacacaaaccagaaaatctatgaccaagagaagtctcatggcgaggagtctcaaggcgagaatactgatggggaggagacccacagcgaggagacccatggtcaggagacaattgaagaccctgtcattcaaggctcagacatggaagaccctcagaaggatgaccctgatgacaaaatctatgaatgtgaggactgtggcctgggctttgtggatctcacagacctcacagaccatcagaaagtccacagcaggaagtgcctggttgacagtcgggagtacacacattctgtaattcacacccattccatcagcgagtatcagagagattacactggagagcagctgtatgaatgtccaaagtgtggggaatcttttattcatagctcattccttttcgagcatcagagaatccatgaacaagaccagttgtattccatgaaggggtgtgatgatggttttattgccctcttgcccatgaagccacggaggaatcgtgctgcagagaggaatcctgctcttgctgggtcggccattcgatgccttttgtgtggacaaggcttcattcatagctctgcccttaatgagcatatgagacttcatagggaagatgatttactggagcagagccagatggctgaggaagctatcattccaggcttagccctcactgagtttcagagaagtcagaccgaagagagactctttgaatgtgcagtctgtggagaatctttcgtcaacccagcagaacttgcagatcacgtaactgttcataagaatgagccctatgagtacgggtcctcctatactcacacctcatttcttactgagcccctcaaaggagctataccattctatgaatgcaaggattgtggtaagtcctttattcatagcacagtcctcactaaacataaggagcttcatctggaagaagaagaagaagatgaagcagcagcagctgcagcagcagcagcccaggaagttgaagccaatgtccatgttccacaagtagttctgaggattcagggcttaaacgtagaggctgctgagccagaagtggaggctgccgagccagaagtggaggctgctgagccagaagtggaggctgctgagccaaacggagaggctgaagggccagatggagaggctgcagagcccattggagaggctggacagccaaatggagaggccgagcagccaaatggggatgctgatgagccagatggtgcaggtattgaagacccagaagaaagagctgaagagccagagggaaaagctgaagagccagagggagatgccgacgagcctgacggtgtgggaattgaagacccagaagaaggtgaagatcaagagattcaggtagaagaaccatactatgactgccatgaatgcacagaaaccttcacttccagcacagcattcagtgaacacctgaaaactcatgccagcatgatcatatttgagcctgcaaatgcctttggggagtgctcaggctacatcgaacgtgccagcaccagcacaggtggtgccaatcaagctgatgagaagtacttcaaatgtgacgtctgtgggcagctcttcaatgaccgcctgtccctcgccagacaccagaatacccacactggc

SEQ ID NO: 15348 - DNA, 5052 bp, Homo sapiens
  source 1..5052: mol_type = unassigned DNA
gtttgggaggcgcgggagatgtccaccctgggctggtggcgccgccgggcgccgggcgccatgagggtgcgctaggcggctgttcgtgcccgaggctgcgcagcactgaggtgagctttgccttcttgatcttccgtccttcttggagacgactggcgagaggaagagggactaggtccaaacgctaggtggctgggtccaggtccctgagtactgacggtcacaggctgccgcgtctttcctgttgactcatgtttggttcctccagtgaaaattttacttagagaaatgctgcctccaaagcacttgtctgccaccaaacctaagaagtcctgggccccaaatctgtatgagctagacagtgacttgactaaggagccggatgtcatcataggagaaggtccaactgactctgagttttttcatcagaggtttcggaacctaatctatgtggaatttgttgggcctcggaagaccctgatcaaactccgaaacctctgcctcgattggttgcagccggagacccgcaccaaggaggagatcatcgagctcttggtccttgagcagtacctgaccatcatccctgaaaagctcaagccttgggtgcgagcaaaaaagccggagaactgtgagaagctcgtcactctgctggagaattacaaggagatgtaccaaccagaagacgacaacaacagtgacgtgaccagcgacgacgacatgacccggaacagaagagagtcctcaccacctcactcagtccattctttcagtgaccgggactgggaccggaggggcagaagcagagacatggagccacgagaccgctggtcccacaccaggaacccaagaagcaggatgcctccgcgggatctttcccttcctgtggtggcgaaaacaagctttgaaatggacagagaggacgacagggactccagggcttatgagtcccgatctcaggatgctgaatcataccaaaatgtggtggacctcgctgaggacaggaaacctcacaacacaatccaggacaacatggaaaactacaggaagctgctctccctcgtgcagcttgctgaagacgatggccactcccacatgacgcagggccactcatcaagatccaagagaagtgcctacccaagcaccagtcgaggtctaaaaactatgcctgaagccaaaaaatcaacccaccggcgggggatttgtgaagatgaatcttcccacggagtgataatggaaaaattcatcaaggatgtgtcacgcagttccaaatcgggaagagcaagggagtcaagcgaccggtcacagagattccccagaatgtcagatgataactggaaggacatttcattgaacaagagggagtcagtgatccagcagcgggtttatgaagggaatgcatttaggggaggctttaggtttaattcaacccttgtttccagaaagagagttcttgaaagaaagaggcgctatcattttgacacagatgggaagggctcgattcacgatcaaaaaggctgtcccaggaagaagccctttgaatgtggtagtgagatgagaaaagccatgagcgtgagcagcctgagcagcctcagctccccctcctttaccgagtcacagccaattgattttggggcaatgccatatgtatgtgatgagtgtgggaggtcgttcagtgtcatctcagaatttgttgagcaccagatcatgcatactagagagaacctctatgagtatggtgagtcctttatccacagtgtggctgtcagtgaagttcagaaaagtcaggttggagggaaacgttttgaatgtaaggactgtggagagaccttcaataagagtgccgccttggctgaacatcggaagattcatgctagaggttatcttgtggaatgtaagaatcaggaatgtgaggaagccttcatgcctagccccacctttagtgagcttcagaaaatatatggcaaagacaaattctacgagtgcagggtgtgtaaggaaaccttccttcatagttctgccctgattgagcaccagaaaatccactttggggatgacaaagataatgagcgtgaacatgaacgtgaacgtgaacgtgagcgcggggaaacctttaggcccagcccagcccttaatgagtttcagaaaatgtatggtaaagagaaaatgtacgaatgtaaggtgtgtggggagactttccttcatagctcatccctgaaagaacatcagaaaatccatactagagggaacccatttgaaaacaagggtaaagtgtgtgaggaaacctttattcctggtcagtcccttaaaaggcgtcagaaaacttacaataaggagaagctctgtgactttacagatggccgggatgccttcatgcaaagctcagagctcagtgagcatcagaaaattcattctcgaaagaacctctttgaaggcagagggtatgagaaatctgtcattcatagtgggccattcactgaatctcagaagagtcatactataacaagacctcttgaaagtgatgaggacgaaaaggcgttcaccattagctctaacccctatgaaaaccagaagattcccactaaggaaaatgtctatgaggcaaaatcatatgagaggtctgttattcatagcttagcctctgtggaagctcagaaaagtcacagtgtagcagggcccagtaaaccaaaagtaatggcagagtctaccattcagagcttcgatgctatcaaccatcagagagttcgtgctggagggaacacctctgaaggaagggaatacagtaggtctgttatccatagcttagtggcttccaaacctccaagaagtcacaatggaaatgaattggtggaatctaatgagaagggagaatcctccatttatatctcagaccttaatgataagcgacagaagattcctgccagagagaacccttgtgaagggggcagtaagaatcgcaactatgaagactctgtcatacagagtgtattccgtgccaaacctcagaaaagtgttcctggagagggatctggtgagtttaagaaggatggcgaattctctgttcccagctcaaatgtccgtgaataccagaaggctcgtgctaaaaagaaatacattgagcataggagcaatgagacctctgtaattcactctctgccttttggtgaacaaacatttcgccctcgagggatgctctatgaatgtcaggagtgtggggagtgctttgctcatagctctgacctcactgagcaccagaagattcatgatagggagaagccctctggaagcagaaactatgaatggtctgtcattcgcagcttggcccctactgaccctcaaacaagttacgcccaagagcagtatgctaaagagcaagcgcggaacaaatgtaaggacttcagacaattttttgctaccagcgaagacctcaacacaaaccagaaaatctatgaccaagagaagtctcatggcgaggagtctcaaggcgagaatactgatggggaggagacccacagcgaggagacccatggtcaggagacaattgaagaccctgtcattcaaggctcagacatggaagaccctcagaaggatgaccctgatgacaaaatctatgaatgtgaggactgtggcctgggctttgtggatctcacagacctcacagaccatcagaaagtccacagcaggaagtgcctggttgacagtcgggagtacacacattctgtaattcacacccattccatcagcgagtatcagagagattacactggagagcagctgtatgaatgtccaaagtgtggggaatcttttattcatagctcattccttttcgagcatcagagaatccatgaacaagaccagttgtattccatgaaggggtgtgatgatggttttattgccctcttgcccatgaagccacggaggaatcgtgctgcagagaggaatcctgctcttgctgggtcggccattcgatgccttttgtgtggacaaggcttcattcatagctctgcccttaatgagcatatgagacttcatagggaagatgatttactggagcagagccagatggctgaggaagctatcattccaggcttagccctcactgagtttcagagaagtcagaccgaagagagactctttgaatgtgcagtctgtggagaatctttcgtcaacccagcagaacttgcagatcacgtaactgttcataagaatgagccctatgagtacgggtcctcctatactcacacctcatttcttactgagcccctcaaaggagctataccattctatgaatgcaaggattgtggtaagtcctttattcatagcacagtcctcactaaacataaggagcttcatctggaagaagaagaagaagatgaagcagcagcagctgcagcagcagcagcccaggaagttgaagccaatgtccatgttccacaagtagttctgaggattcagggcttaaacgtagaggctgctgagccagaagtggaggctgccgagccagaagtggaggctgctgagccagaagtggaggctgctgagccaaacggagaggctgaagggccagatggagaggctgcagagcccattggagaggctggacagccaaatggagaggccgagcagccaaatggggatgctgatgagccagatggtgcaggtattgaagacccagaagaaagagctgaagagccagagggaaaagctgaagagccagagggagatgccgacgagcctgacggtgtgggaattgaagacccagaagaaggtgaagatcaagagattcaggtagaagaaccatactatgactgccatgaatgcacagaaaccttcacttccagcacagcattcagtgaacacctgaaaactcatgccagcatgatcatatttgagcctgcaaatgcctttggggagtgctcaggctacatcgaacgtgccagcaccagcacaggtggtgccaatcaagctgatgagaagtacttcaaatgtgacgtctgtgggcagctcttcaatgaccgcctgtccctcgccagacaccagaatacccacactggc

SEQ ID NO: 15349 - DNA, 1558 bp, Homo sapiens
  source 1..1558: mol_type = unassigned DNA
ctccaaagcacttgtctgccaccaaacctaagaagtcctgggccccaaatctgtatgagctagacagtgacttgactaaggagccggatgtcatcataggagaaggtccaactgactctgagttttttcatcagaggtttcggaacctaatctatgtggaatttgttgggcctcggaagaccctgatcaaactccgaaacctctgcctcgattggttgcagccggagacccgcaccaaggaggagatcatcgagctcttggtccttgagcagtacctgaccatcatccctgaaaagctcaagccttgggtgcgagcaaaaaagccggagaactgtgagaagctcgtcactctgctggagaattacaaggagatgtaccaaccagaagacgacaacaacagtgacgtgaccagcgacgacgacatgacccggaacagaagagagtcctcaccacctcactcagtccattctttcagtggtgaccgggactgggaccggaggggcagaagcagagacatggagccacgagaccgctggtcccacaccaggaacccaagaagcaggatgcctccgcgggatctttcccttcctgtggtggcgaaaacaagctttgaaatggacagagaggacgacagggactccagggcttatgagtcccgatctcaggatgctgaatcataccaaaatgtggtggacctcgctgaggacaggaaacctcacaacacaatccaggacaacatggaaaactacaggaagctgctctccctcggtctaaaaactatgcctgaagccaaaaaatcaacccaccggcgggggatttgtgaagatgaatcttcccacggagtgataatggaaaaattcatcaaggatgtgtcacgcagttccaaatcgggaagagcaagggagtcaagcgaccggtcacagagattccccagaatgtcagatgataactggaaggacatttcattgaacaagagggagtcagtgatccagcagcgggtttatgaagggaatgcatttaggggaggctttaggtttaattcaacccttgtttccagaaagagagttcttgaaagaaagaggcgctatcattttgacacagatgggaagggctcgattcacgatcaaaaaggctgtcccaggaagaagccctttgaatgtggtagtgagatgagaaaagccatgagcgtgagcagcctgagcagcctcagctccccctcctttaccgagtcacagccaattgattttggggcaatgccatatgtatgtgatgagtgtgggaggtcgttcagtgtcatctcagaatttgttgagcaccagatcatgcatactagagagaacctctatgagtatggtgagtcctttatccacagtgtggctgtcagtgaagttcagaaaagtcaggttggagggaaacgttttgaatgtaaggactgtggagagaccttcaataagagtgccgccttggctgaacatcggaagattcatgctagaggttatcttgtggaatgtaagaatcaggaatgtgaggaagccttcatgcctagccccacctttag

SEQ ID NO: 15350 - DNA, 570 bp, Homo sapiens
  source 1..570: mol_type = unassigned DNA
ggtggcgccgccgggcgccgggcgccatgagggtgcgctaggcggctgttcgtgcccgaggctgcgcagcactgaggtgagctttgccttcttgatcttccgtccttcttggagacgactggcgagaggaagagggactaggtccaaacgctaggtggctgggtccaggtgattggaccagactggataccttagagcagtggttctcaaagaacagctcctggagtgattgtaggaatgcttctttcctggggaaccacagacctcctgagtcatcccacctggaaagagagaggcaggagaatggagcaaacaagaagagagacgagaccacacaccacgctgtccctgggagacgaagagagtaacctcctcggttcctgactttaaagttctcaattccagcccccttttaatgagccggagacccgcaccaaggaggagatcatcgagctcttggtccttgagcagtacctgaccatcatccctgaaaagctcaagccttgggtgcgagcaaaaaagccggagaactgtgagaagctcgtcactctgctggagaattacaaggag

SEQ ID NO: 15351 - DNA, 583 bp, Homo sapiens
  source 1..583: mol_type = unassigned DNA
gtgcagaagtctgggcagctgcgggaggagaggtttgggaggcgcgggagatgtccaccctgggctggtggcgccgccgggcgccgggcgccatgagggtgcgctaggcggctgttcgtgcccgaggctgcgcagcactgaggtgagctttgccttcttgatcttccgtccttcttggagacgactggcgagaggaagagggactaggtccaaacgctaggtggctgggtccagagagaggcaggagaatggagcaaacaagaagagagacgagaccacacaccacgctgtccctgggagacgaagagagtaacctcctcggttcctgactttaaagttctcaattccagcccccttttaatgagatacctgtgttttgactctgttcctgtggatagctgcttggtctgaagttccagaaaggatcctgttcccagacagccggagacccgcaccaaggaggagatcatcgagctcttggtccttgagcagtacctgaccatcatccctgaaaagctcaagccttgggtgcgagcaaaaaagccggagaactgtgagaagctcgtcactctgctggagaatt

SEQ ID NO: 15352 - DNA, 411 bp, Homo sapiens
  source 1..411: mol_type = unassigned DNA
tgcgggaggagaggtttgggaggcgcgggagatgtccaccctgggctggtggcgccgccgggcgccgggcgccatgagggtgcgctaggcggctgttcgtgcccgaggctgcgcagcactgaggtgagctttgccttcttgatcttccgtccttcttggagacgactggcgagaggaagagggactaggtccaaacgctaggtggctgggtccaggtccctgagtactgacggtcacaggctgccgcgtctttcctgttgactcatgtttggttcctccagtgaaaattttacttagagaaatgctgcctccaaagcacttgtctgccaccaaacctaagaagtcctgggccccaaatctgtatgagctagacagtgacttgactaaggagccggatgtcatcataggaga

SEQ ID NO: 15353 - DNA, 532 bp, Homo sapiens
  source 1..532: mol_type = unassigned DNA
ttcctgacactttgcacttggctgctgttgctcggccccgggctcctggcgaccgtgcgggccgaatgcagccaggattgcgcgacgtgcagctaccgcctagtgcgcccggccgacatcaacttcctgaagcacccccgcatagatcaattcattcattcaacaaatgaatatttgatggaagaggctccagatggagggaagagccagtgcaatgcctcaaaatggagacatggtgtattaatggagaagcagcaggacttgtgaaagcctgggacgagggcttggggttttattctcaatatgatagaaaatgattcaaggctgagagcaggagagtggcaggatatactgacttatttaaatctcactgtctcccacaaagaacaagttttatctctcctcatgctcctgagagaagaatgtactgcttatctaccatcatttctgcatccatcgaaacatctgggtttacctgaaaagaaattatataaaactttcagtgttttctaataaaaatgcaatgaataca

SEQ ID NO: 15354 - DNA, 438 bp, Homo sapiens
  source 1..438: mol_type = unassigned DNA
gcgatgccaaccaaggctgtgcgcccgccccgggcattacaggacgcaggaccccctcctccagaggtcctcagcaaagcacccccgcatagatcaattcattcattcaacaaatgaatatttgatggaagaggctccagatggagggaagagccagtgcaatgcctcaaaatggagacatggtgtattaatggagaagcagcaggacttgtgaaagcctgggacgagggcttggggttttattctcaatatgatagaaaatgattcaaggctgagagcaggagagtggcaggatatactgacttatttaaatctcactgtctcccacaaagaacaagttttatctctcctcatgctcctgagagaagaatgtactgcttatctaccatcatttctgcatccatcgaaacatctgggtttacctgaaaagaaattata

SEQ ID NO: 15355 - DNA, 1199 bp, Homo sapiens
  source 1..1199: mol_type = unassigned DNA
cggcgagggtcctgccgagggaccccgttctgcgcccaggcaggctcgaagcacgcgtccctctctcctcgcagtccatggcgcggttcctgacactttgcacttggctgctgttgctcggccccgggctcctggcgaccgtgcgggccgaatgcagccaggattgcgcgacgtgcagctaccgcctagtgcgcccggccgacatcaacttcctggcttgcgtaatggaatgtgaaggtaaactgccttctctgaaaatttgggaaacctgcaaggagctcctgcagctgtccaaaccagagcttcctcaagatggcaccagcaccctcagagaaaatagcaaaccggaagaaagccatttgctagccaaaaggtatgggggcttcatgaaaaggtatggaggcttcatgaagaaaatggatgagctttatcccatggagccagaagaagaggccaatggaagtgagatcctcgccaagcggtatgggggcttcatgaagaaggatgcagaggaggacgactcgctggccaattcctcagacctgctaaaagagcttctggaaacaggggacaaccgagagcgtagccaccaccaggatggcagtgataatgaggaagaagtgagcaagagatatgggggcttcatgagaggcttaaagagaagcccccaactggaagatgaagccaaagagctgcagaagcgatatgggggcttcatgagaagagtaggtcgcccagagtggtggatggactaccagaaacggtatggaggtttcctgaagcgctttgccgaggctctgccctccgacgaagaaggcgaaagttactccaaagaagttcctgaaatggaaaaaagatacggaggatttatgagattttaatatcttttcccactagtggccccaggccccagcaagcctccctccatcctccagtgggaaactgttgatggtgttttattgtcatgtgttgcttgccttgtatagttgacttcattgtctggataactatacaacctgaaaactgtcatttcaggttctgtgctctttttggagtctttaagctcagtattagtctattgcagctatctcgttttcatgctaaaatagtttttgttatcttgtctcttatttttgacaaacatcaataaatgcttacttgtatatagagataataaacctattaccccaagtgcataa

SEQ ID NO: 15356 - DNA, 1029 bp, Homo sapiens
  source 1..1029: mol_type = unassigned DNA
ctgcgtcagctgcagcccgccggcgattggggcgcgcgcgcctccttcggtttggggctaattataaagtggctccagcagccgttaagccccgggacggcgaggcaggcgctcagagccccgcagcctggcccgtgaccccgcagagacgctgaggaccgcgacgagtcgtgtctgaacccggcttttccaattggcctgctccatccgaacagcgtcaactccatggcgcggttcctgacactttgcacttggctgctgttgctcggccccgggctcctggcgaccgtgcgggccgaatgcagccaggattgcgcgacgtgcagctaccgcctagtgcgcccggccgacatcaacttcctggcttgcgtaatggaatgtgaaggtaaactgccttctctgaaaatttgggaaacctgcaaggagctcctgcagctgtccaaaccagagcttcctcaagatggcaccagcaccctcagagaaaatagcaaaccggaagaaagccatttgctagccaaaaggtatgggggcttcatgaaaaggtatggaggcttcatgaagaaaatggatgagctttatcccatggagccagaagaagaggccaatggaagtgagatcctcgccaagcggtatgggggcttcatgaagaaggatgcagaggaggacgactcgctggccaattcctcagacctgctaaaagagcttctggaaacaggggacaaccgagagcgtagccaccaccaggatggcagtgataatgaggaagaagtgagcaagagatatgggggcttcatgagaggcttaaagagaagcccccaactggaagatgaagccaaagagctgcagaagcgatatgggggcttcatgagaagagtaggtcgcccagagtggtggatggactaccagaaacggtatggaggtttcctgaagcgctttgccgaggctctgccctccgacgaagaaggcgaaagttactccaaagaagttcctgaaatggaaaaaagatacggaggatttatgagattttaa

SEQ ID NO: 15357 - DNA, 606 bp, Homo sapiens
  source 1..606: mol_type = unassigned DNA
cactgactgaagtcctgccctggctcttagcttcggggatccgcgactatctggggaccggcttgcgtaatggaatgtgaaggtaaactgccttctctgaaaatttgggaaacctgcaaggagctcctgcagctgtccaaaccagagcttcctcaagatggcaccagcaccctcagagaaaatagcaaaccggaagaaagccatttgctagccaaaaggtatgggggcttcatgaaaaggtatggaggcttcatgaagaaaatggatgagctttatcccatggagccagaagaagaggccaatggaagtgagatcctcgccaagcggtatgggggcttcatgaagaaggatgcagaggaggacgactcgctggccaattcctcagacctgctaaaagagcttctggaaacaggggacaaccgagagcgtagccaccaccaggatggcagtgataatgaggaagaagtgagcaagagatatgggggcttcatgagaggcttaaagagaagcccccaactggaagatgaagccaaagagctgcagaagcgatatgggggcttcatgagaagagtaggtcgcccagagtggtggatggactaccagaaa

SEQ ID NO: 15358 - DNA, 467 bp, Homo sapiens
  source 1..467: mol_type = unassigned DNA
gacggtgaggccctacgtccgccagcacacccgggcccgcttctccccgacgcccgccctcctcacacttgccttcttctcttccctctagagtcgtgtctgaacccggcttttccaattggcctgctccatccgaacagcgtcaactccatggcgcggttcctgacactttgcacttggctgctgttgctcggccccgggctcctggcgaccgtgcgggccgaatgcagccaggattgcgcgacgtgcagctaccgcctagtgcgcccggccgacatcaacttcctggcttgcgtaatggaatgtgaaggtaaactgccttctctgaaaatttgggaaacctgcaaggagctcctgcagctgtccaaaccagagcttcctcaagatggcaccagcaccctcagagaaaatagcaaaccggaagaaagccatttgctagccaaaaggtatgggggcttcatgaaaag

SEQ ID NO: 15359 - DNA, 772 bp, Homo sapiens
  source 1..772: mol_type = unassigned DNA
gggacggcgaggcaggcgctcagagccccgcagcctggcccgtgaccccgcagagacgctgaggaccgcgacgagtcgtgtctgaacccggcttttccaattggcctgctccatccgaacagcgtcaactccatggcgcggttcctgacactttgcacttggctgctgttgctcggccccgggctcctggcgaccgtgcgggccgaatgcagccaggattgcgcgacgtgcagctaccgcctagtgcgcccggccgacatcaacttcctggattgtgggggaggagaagaggaaggctgctctttccagaattttccatactgctttttatgctcttgttgttatcacttattactattatcattactttaatccaggtgatggaatggcacgtgtagtgttagcaacttgaaaaaaatagataataagcaaccatcaataaaaatagtcttatagaaaggcattttgcataataactgatttgcattggaccctacatttagggttgttattgtctcaatgacaaaaggtttacttagtgactgtctcgctagaattacaacattctgggattttggctcggatgcaaaagacatgtgagaaacgaggttgcctagccaaaattatgtagtgaaatcaatgtaacaaatatttactgagcttctaccatgagaaagacacttatgattggtactgtggtggatgcagagatgagcaggcgtgctatggctgatgtccagatagaatttcccatctaatgtgatcttgacca

SEQ ID NO: 15360 - DNA, 863 bp, Homo sapiens
  source 1..863: mol_type = unassigned DNA
gctccagcagccgttaagccccgggacggcgaggcaggcgctcagagccccgcagcctggcccgtgaccccgcagagacgctgaggaccgcgacgagtcgtgtctgaacccggcttttccaattggcctgctccatccgaacagcgtcaactccatggcgcggttcctgacactttgcacttggctgctgttgctcggccccgggctcctggcgaccgtgcgggccgaatgcagccaggattgcgcgacgtgcagctaccgcctagtgcgcccggccgacatcaacttcctggtgagtgttgcgcgcggcgagtgttgcgcaccttgtgagacagagtttccgcaacagtacgcggactgcctccggcccaccgcgcggcgcgtatggcggttcgcaccgggtcggagccgcagcggcgcgagcccgtggtgacctgggtgtctcagctgttcctggaacactgactgaagtcctgccctggctcttagcttcggggatccgcgactatctggggaccggtaagggtagcggtgtcgccgcacaaaccaagtttgttttaaccctgggaattcgggaaccccgagaagtcctctgttcagcacctcggatagcactgggttctctcctgggctgtcagaaggaagatggctgtcaccacaactcctaacatatcccagctaagggcccctccacacgcagtcatcttcccatctttcccacaaataatgtaattttttgttagtgacatttcggtgcctttctttagatttatgttccccagctctcttaacctcaggtccctcattccctaccctcacctgtaaataggagagagcaaagggatggaaaaggggtacgggga

SEQ ID NO: 15361 - DNA, 579 bp, Homo sapiens
  source 1..579: mol_type = unassigned DNA
ataaagtggctccagcagccgttaagccccgggacggcgaggcaggcgctcagagccccgcagcctggcccgtgaccccgcagagacgctgaggaccgcgacgagtcgtgtctgaacccggcttttccaattggcctgctccatccgaacagcgtcaacgtgagtgaatttgcccgaagcttgtctttgctgagcgggtttggggacgtctgcccgccctctttcccttcacatttcattgcatgggttccccaacagcgttccctggttcttctttgtgaccccagtcaatgtcctgcctcccccggctcccgctctctcgcccctggtctgcggcgttctctccggaatcttgccctgggccgcggacgcccaggaaaagagccgggtgccccaggcagcctcgcgttgggggcgaccgcgccatcccgggaaccgcgaggcgatctgagtcgcctccacgtctacctaaaagctgtcggccgggagggcggggccccagaaaggagcattcctgcgggcttttgctcgacgatcccctgctgaggctgtcgcggcgagggtcctgccgagggaccc

SEQ ID NO: 15362 - DNA, 4707 bp, Homo sapiens
  source 1..4707: mol_type = unassigned DNA
attatgcaacccgcctccccgcccgcccggtggagcttccactcggctgcgggctggagcggcggcgggcaggcgtgcggaggacactcctgcgaccaggtactggctgtgatcgaacttctcaaccctcagagacttagatcttccacctcactccctcagccaagcctccaggccccctcgtgcatccgtggtggcctctctgccttctctgttctgttctccccatggcccagacatgagtggccccctagaaggggctgatgggggaggggaccccaggcctggggaatcattttgtcctgggggcgtcccatcccctgggcccccacagcaccggccttgcccaggccccagcctggccgatgacaccgatgccaacagcaatggttcaagtggcaatgagtccaacgggcatgagtctagaggcgcatctcagcggagctcacacagctcctcctcaggcaacggcaaggactcagccctgctggagaccactgagagcagcaagagcacaaactctcagagcccatccccacccagcagttccattgcctacagcctcctgagtgccagctcagagcaggacaacccgtccaccagtggctgcagcagtgaacagtcagcccgggcaaggactcagaaggaactcatgacagcacttcgagagctcaagcttcgactgccgccagagcgccggggcaagggccgctctgggaccctggccacgctgcagtacgcactggcctgtgtcaagcaggtgcaggccaaccaggaatactaccagcagtggagcctggaggagggcgagccttgctccatggacatgtccacctataccctggaggagctggagcacatcacgtctgagtacacacttcagaaccaggataccttctcagtggctgtctccttcctgacgggccgaatcgtctacatttcggagcaggcagccgtcctgctgcgttgcaagcgggacgtgttccggggtacccgcttctctgagctcctggctccccaggatgtgggagtcttctatggttccactgctccatctcgcctgcccacctggggcacaggggcctcagcaggttcaggcctcagggactttacccaggagaagtccgtcttctgccgtatcagaggaggtcctgaccgggatccagggcctcggtaccagccattccgcctaaccccgtatgtgaccaagatccgggtctcagatggggcccctgcacagccgtgctgcctgctgattgcagagcgcatccattcgggttacgaagctccccggataccccctgacaagaggattttcactacgcggcacacacccagctgcctcttccaggatgtggatgaaagggctgcccccctgctgggctacctgccccaggacctcctgggggccccagtgctcctgttcctgcatcctgaggaccgacccctcatgctggctatccacaagaagattctgcagttggcgggccagccctttgaccactcccctatccgcttctgtgcccgcaacggggagtatgtcaccatggacaccagctgggctggctttgtgcacccctggagccgcaaggtagccttcgtgttgggccgccacaaagtacgcacggcccccctgaatgaggacgtgttcactcccccggcccccagcccagctccctccctggacactgatatccaggagctgtcagagcagatccaccggctgctgctgcagcccgtccacagccccagccccacgggactctgtggagtcggcgccgtgacatccccaggccctctccacagccctgggtcctccagtgatagcaacgggggtgatgcagaggggcctgggcctcctgcgccagtgactttccagcagatctgtaaggatgtgcatctggtgaagcaccagggccagcagctttttattgagtctcgggcccggcctcagtcccggccccgcctccctgctacaggcacgttcaaggccaaggcccttccctgccaatccccagacccagagctggaggcgggttctgctcccgtccaggccccactagccttggtccctgaggaggccgagaggaaagaagcctccagctgctcctaccagcagatcaactgcctggacagcatcctcaggtacctggagagctgcaacctccccagcaccactaagcgtaaatgtgcctcctcctcctcctataccacctcctcagcctctgacgacgacaggcagaggacaggtccagtctctgtggggaccaagaaagatccgccgtcagcagcgctgtctggggagggggccaccccacggaaggagccagtggtgggaggcaccctgagcccgctcgccctggccaataaggcggagagtgtggtgtccgtcaccagtcagtgtagcttcagctccaccatcgtccatgtgggagacaagaagcccccggagtcggacatcatcatgatggaggacctgcctggcctagccccaggcccagcccccagcccagcccccagccccacagtagcccctgacccagccccagacgcctaccgtccagtggggctgaccaaggccgtgctgtccctgcacacacagaaggaagagcaagccttcctcagccgcttccgagacctgggcaggctgcgtggactcgacagctcttccacagctccctcagcccttggcgagcgaggctgccaccacggccccgcacccccaagccgccgacaccactgccgatccaaagccaagcgctcacgccaccaccagaaccctcgggctgaagcgccctgctatgtctcacacccctcacccgtgccaccctccaccccctggcccaccccaccagccactacccccttcccagcggttgtccagccctaccctctcccagtgttctctcctcgaggaggcccccagcctcttccccctgctcccacatctgtgcccccagctgctttccccgcccctttggtgaccccaatggtggccttggtgctccctaactatctgttcccaaccccatccagctatccttatggggcactccagacccctgctgaagggcctcccactcctgcctcgcactccccttctccatccttgcccgccctcgccccgagtcctcctcaccgcccggactctccactgttcaactcgagatgcagctctccactccagctcaatctgctgcagctggaggagctcccccgtgctgagggggctgctgttgcaggaggccctgggagcagtgccgggcccccacctcccagtgcggaggctgctgagccagaggccagactggcggaggtcactgagtcctccaatcaggacgcactttccggctccagtgacctgctcgaacttctgctgcaagaggactcgcgctccggcacaggctccgcagcctcgggctccttgggctctggcttgggctctgggtctggttcaggctcccatgaagggggcagcacctcagccagcatcactcgcagcagccagagcagccacacaagcaaatactttggcagcatcgactcttccgaggctgaggctggggctgctcggggcggggctgagcctggggaccaggtgattaagtacgtgctccaggatcccatttggctgctcatggccaatgctgaccagcgcgtcatgatgacctaccaggtgccctccagggacatgacctctgtgctgaagcaggatcgggagcggctccgagccatgcagaagcagcagcctcggttttctgaggaccagcggcgggaactgggtgctgtgcactcctgggtccggaagggccaactgcctcgggctcttgatgtgatggcctgtgtggactgtgggagcagcacccaagatcctggtcaccctgatgacccactcttctcagagctggatggactggggctggagcccatggaagagggtggaggcgagcagggcagcagcggtggcggcagtggtgagggagagggctgcgaggaggcccaaggcggggccaaggcttcaagctctcaggacttggctatggaggaggaggaagaaggcaggagctcatccagtccagccttacctacagcaggaaactgcaccagctagactccattctgggaccatctccaggagtccatgagaggctttcttctcctatgtcccaattctcagaactcagatgtggctagaccaaccagtgggaaactgccccagcttctcccaccatagggggccggacccccatcaccagcctaggatccaggggctgcctctggcctcttagggagcagagagcagaactccgcagcccagcccagaggagtgtcacctcccacctttggagaggaatccttccctcccctggacaaagttgctgacaagctgctgaagtggcctctccatattccagctgagcctgaatctgactcttgagggttggggctgcacttatttattgcggggagacagctctctctcccacctcctccccagatgggaggagagcctgaggcccaagcaggacccgggggttccagcccctagctgctctggagtgggggaggttggtggaccatggagtccctggtgctgcccctcaggtgggacccaggcgttctcagctgtaccctctgccgatggcatttgtgtttttgatatttgtgtctgttactacttttttaatacaaaaagataaaaacgcc

SEQ ID NO: 15363 - DNA, 4521 bp, Homo sapiens
  source 1..4521: mol_type = unassigned DNA
tcgaacttctcaaccctcagagacttagatcttccacctcactccctcagccaagcctccaggccccctcgtgcatccgtggtggcctctctgccttctctgttctgttctccccatggcccagacatgagtggccccctagaaggggctgatgggggaggggaccccaggcctggggaatcattttgtcctgggggcgtcccatcccctgggcccccacagcaccggccttgcccaggccccagcctggccgatgacaccgatgccaacagcaatggttcaagtggcaatgagtccaacgggcatgagtctagaggcgcatctcagcggagctcacacagctcctcctcaggcaacggcaaggactcagccctgctggagaccactgagagcagcaagagcacaaactctcagagcccatccccacccagcagttccattgcctacagcctcctgagtgccagctcagagcaggacaacccgtccaccagtggctgcagcagtgaacagtcagcccgggcaaggactcagaaggaactcatgacagcacttcgagagctcaagcttcgactgccgccagagcgccggggcaagggccgctctgggaccctggccacgctgcagtacgcactggcctgtgtcaagcaggtgcaggccaaccaggaatactaccagcagtggagcctggaggagggcgagccttgctccatggacatgtccacctataccctggaggagctggagcacatcacgtctgagtacacacttcagaaccaggcagccgtcctgctgcgttgcaagcgggacgtgttccggggtacccgcttctctgagctcctggctccccaggatgtgggagtcttctatggttccactgctccatctcgcctgcccacctggggcacaggggcctcagcaggttcaggcctcagggactttacccaggagaagtccgtcttctgccgtatcagaggaggtcctgaccgggatccagggcctcggtaccagccattccgcctaaccccgtatgtgaccaagatccgggtctcagatggggcccctgcacagccgtgctgcctgctgattgcagagcgcatccattcgggttacgaagctccccggataccccctgacaagaggattttcactacgcggcacacacccagctgcctcttccaggatgtggatgaaagggctgcccccctgctgggctacctgccccaggacctcctgggggccccagtgctcctgttcctgcatcctgaggaccgacccctcatgctggctatccacaagaagattctgcagttggcgggccagccctttgaccactcccctatccgcttctgtgcccgcaacggggagtatgtcaccatggacaccagctgggctggctttgtgcacccctggagccgcaaggtagccttcgtgttgggccgccacaaagtacgcacggcccccctgaatgaggacgtgttcactcccccggcccccagcccagctccctccctggacactgatatccaggagctgtcagagcagatccaccggctgctgctgcagcccgtccacagccccagccccacgggactctgtggagtcggcgccgtgacatccccaggccctctccacagccctgggtcctccagtgatagcaacgggggtgatgcagaggggcctgggcctcctgcgccagtgactttccagcagatctgtaaggatgtgcatctggtgaagcaccagggccagcagctttttattgagtctcgggcccggcctcagtcccggccccgcctccctgctacaggcacgttcaaggccaaggcccttccctgccaatccccagacccagagctggaggcgggttctgctcccgtccaggccccactagccttggtccctgaggaggccgagaggaaagaagcctccagctgctcctaccagcagatcaactgcctggacagcatcctcaggtacctggagagctgcaacctccccagcaccactaagcgtaaatgtgcctcctcctcctcctataccacctcctcagcctctgacgacgacaggcagaggacaggtccagtctctgtggggaccaagaaagatccgccgtcagcagcgctgtctggggagggggccaccccacggaaggagccagtggtgggaggcaccctgagcccgctcgccctggccaataaggcggagagtgtggtgtccgtcaccagtcagtgtagcttcagctccaccatcgtccatgtgggagacaagaagcccccggagtcggacatcatcatgatggaggacctgcctggcctagccccaggcccagcccccagcccagcccccagccccacagtagcccctgacccagccccagacgcctaccgtccagtggggctgaccaaggccgtgctgtccctgcacacacagaaggaagagcaagccttcctcagccgcttccgagacctgggcaggctgcgtggactcgacagctcttccacagctccctcagcccttggctgccaccacggccccgcacccccaagccgccgacaccactgccgatccaaagccaagcgctcacgccaccaccagaaccctcgggctgaagcgccctgctatgtctcacacccctcacccgtgccaccctccaccccctggcccaccccaccagccactacccccttcccagcggttgtccagccctaccctctcccagtgttctctcctcgaggaggcccccagcctcttccccctgctcccacatctgtgcccccagctgctttccccgcccctttggtgaccccaatggtggccttggtgctccctaactatctgttcccaaccccatccagctatccttatggggcactccagacccctgctgaagggcctcccactcctgcctcgcactccccttctccatccttgcccgccctcgccccgagtcctcctcaccgcccggactctccactgttcaactcgagatgcagctctccactccagctcaatctgctgcagctggaggagctcccccgtgctgagggggctgctgttgcaggaggccctgggagcagtgccgggcccccacctcccagtgcggaggctgctgagccagaggccagactggcggaggtcactgagtcctccaatcaggacgcactttccggctccagtgacctgctcgaacttctgctgcaagaggactcgcgctccggcacaggctccgcagcctcgggctccttgggctctggcttgggctctgggtctggttcaggctcccatgaagggggcagcacctcagccagcatcactcgcagcagccagagcagccacacaagcaaatactttggcagcatcgactcttccgaggctgaggctggggctgctcggggcggggctgagcctggggaccaggtgattaagtacgtgctccaggatcccatttggctgctcatggccaatgctgaccagcgcgtcatgatgacctaccaggtgccctccagggacatgacctctgtgctgaagcaggatcgggagcggctccgagccatgcagaagcagcagcctcggttttctgaggaccagcggcgggaactgggtgctgtgcactcctgggtccggaagggccaactgcctcgggctcttgatgtgatggcctgtgtggactgtgggagcagcacccaagatcctggtcaccctgatgacccactcttctcagagctggatggactggggctggagcccatggaagagggtggaggcgagcagggcagcagcggtggcggcagtggtgagggagagggctgcgaggaggcccaaggcggggccaaggcttcaagctctcaggacttggctatggaggaggaggaagaaggcaggagctcatccagtccagccttacctacagcaggaaactgcaccagctagactccattctgggaccatctccaggagtccatgagaggctttcttctcctatgtcccaattctcagaactcagatgtggctagaccaaccagtgggaaactgccccagcttctcccaccatagggggccggacccccatcaccagcctaggatccaggggctgcctctggcctcttagggagcagagagcagaactccgcagcccagcccagaggagtgtcacctcccacctttggagaggaatccttccctcccctggacaaagttgctgacaagctgctgaagtggcctctccatattccagctgagcctgaatctgactcttgagggttggggctgcacttatttattgcggggagacagctctctctcccacctcctccccagatgggaggagagcctgaggcccaagcaggacccgggggttccagcccctagctgctctggagtgggggaggttggtggaccatggagtccctggtgctgcccctcaggtgggacccaggcgttctcagctgtaccctctgccgatggcatttgtgtttttgatatttgtgtctgttactacttttttaatacaaaaagataaaa

SEQ ID NO: 15364 - DNA, 3677 bp, Homo sapiens
  source 1..3677: mol_type = unassigned DNA
gcgaccaggtactggctgtgatcgaacttctcaaccctcagagacttagatcttccacctcactccctcagccaagcctccaggccccctcgtgcatccgtggtggcctctctgccttctctgttctgttctccccatggcccagacatgagtggccccctagaaggggctgatgggggaggggaccccaggcctggggaatcattttgtcctgggggcgtcccatcccctgggcccccacagcaccggccttgcccaggccccagcctggccgatgacaccgatgccaacagcaatggttcaagtggcaatgagtccaacgggcatgagtctagaggcgcatctcagcggagctcacacagctcctcctcaggcaacggcaaggactcagccctgctggagaccactgagagcagcaagagcacaaactctcagagcccatccccacccagcagttccattgcctacagcctcctgagtgccagctcagagcaggacaacccgtccaccagtggctgcagcagtgaacagtcagcccgggcaaggactcagaaggaactcatgacagcacttcgagagctcaagcttcgactgccgccagagcgccggggcaagggccgctctgggaccctggccacgctgcagtacgcactggcctgtgtcaagcaggtgcaggccaaccaggaatactaccagcagtggagcctggaggagggcgagccttgctccatggacatgtccacctataccctggaggagctggagcacatcacgtctgagtacacacttcagaaccaggataccttctcagtggctgtctccttcctgacgggccgaatcgtctacatttcggagcaggcagccgtcctgctgcgttgcaagcgggacgtgttccggggtacccgcttctctgagctcctggctccccaggatgtgggagtcttctatggttccactgctccatctcgcctgcccacctggggcacaggggcctcagcaggttcaggcctcagggactttacccaggagaagtccgtcttctgccgtatcagaggaggtcctgaccgggatccagggcctcggtaccagccattccgcctaaccccgtatgtgaccaagatccgggtctcagatggggcccctgcacagccgtgctgcctgctgattgcagagcgcatccattcgggttacgaagctccccggataccccctgacaagaggattttcactacgcggcacacacccagctgcctcttccaggatgtggatgaaagggctgcccccctgctgggctacctgccccaggacctcctgggggccccagtgctcctgttcctgcatcctgaggaccgacccctcatgctggctatccacaagaagattctgcagttggcgggccagccctttgaccactcccctatccgcttctgtgcccgcaacggggagtatgtcaccatggacaccagctgggctggctttgtgcacccctggagccgcaaggtagccttcgtgttgggccgccacaaagtacgcacggcccccctgaatgaggacgtgttcactcccccggcccccagcccagctccctccctggacactgatatccaggagctgtcagagcagatccaccggctgctgctgcagcccgtccacagccccagccccacgggactctgtggagtcggcgccgtgacatccccaggccctctccacagccctgggtcctccagtgatagcaacgggggtgatgcagaggggcctgggcctcctgcgccagtgactttccagcagatctgtaaggatgtgcatctggtgaagcaccagggccagcagctttttattgagtctcgggcccggcctcagtcccggccccgcctccctgctacaggcacgttcaaggccaaggcccttccctgccaatccccagacccagagctggaggcgggttctgctcccgtccaggccccactagccttggtccctgaggaggccgagaggaaagaagcctccagctgctcctaccagcagatcaactgcctggacagcatcctcaggtacctggagagctgcaacctccccagcaccactaagcgtaaatgtgcctcctcctcctcctataccacctcctcagcctctgacgacgacaggcagaggacaggtccagtctctgtggggaccaagaaagatccgccgtcagcagcgctgtctggggagggggccaccccacggaaggagccagtggtgggaggcaccctgagcccgctcgccctggccaataaggcggagagtgtggtgtccgtcaccagtcagtgtagcttcagctccaccatcgtccatgtgggagacaagaagcccccggagtcggacatcatcatgatggaggacctgcctggcctagccccaggcccagcccccagcccagcccccagccccacagtagcccctgacccagccccagacgcctaccgtccagtggggctgaccaaggccgtgctgtccctgcacacacagaaggaagagcaagccttcctcagccgcttccgagacctgggcaggctgcgtggactcgacagctcttccacagctccctcagcccttggcgagcgaggcggaggtcactgagtcctccaatcaggacgcactttccggctccagtgacctgctcgaacttctgctgcaagaggactcgcgctccggcacaggctccgcagcctcgggctccttgggctctggcttgggctctgggtctggttcaggctcccatgaagggggcagcacctcagccagcatcactcgcagcagccagagcagccacacaagcaaatactttggcagcatcgactcttccgaggctgaggctggggctgctcggggcggggctgagcctggggaccaggtgattaagtacgtgctccaggatcccatttggctgctcatggccaatgctgaccagcgcgtcatgatgacctaccaggtgccctccagggacatgacctctgtgctgaagcaggatcgggagcggctccgagccatgcagaagcagcagcctcggttttctgaggaccagcggcgggaactgggtgctgtgcactcctgggtccggaagggccaactgcctcgggctcttgatgtgatggcctgtgtggactgtgggagcagcacccaagatcctggtcaccctgatgacccactcttctcagagctggatggactggggctggagcccatggaagagggtggaggcgagcagggcagcagcggtggcggcagtggtgagggagagggctgcgaggaggcccaaggcggggccaaggcttcaagctctcaggacttggctatggaggaggaggaagaaggcaggagctcatccagtccagccttacctacagcaggaaactgcaccagctagactccattctgggaccatctccaggagtccatgagaggctttcttctcctatgtcccaattctcagaactcagatgtggctagaccaaccagtgggaaactgccccagcttctcccaccatagggggccggacccccatcaccagcctaggatccaggggctgcctctggcctcttagggagcagagagcagaactccgcagcccagcccagaggagtgtcacctcccacctttggagaggaatccttccctcccctggacaaagttg

SEQ ID NO: 15365 - DNA, 512 bp, Homo sapiens
  source 1..512: mol_type = unassigned DNA
ctgccctggataggataaacgtttctatctttcttcctgctccttggagccctgttactagttcctcccaggaggagagcaggtttcctggtcttggaagccttgacctcgcatagcactagtttaggggaggagcatgaggtgggaagctgtggtagaggaaggatgccagcttcatgggtcctggtccgggtcctggatcccagcctctgccttctgaaccccttcttgggcagggacatgacctctgtgctgaagcaggatcgggagcggctccgagccatgcagaagcagcagcctcggttttctgaggaccagcggcgggaactgggtgctgtgcactcctgggtccggaagggccaactgcctcgggctcttgatgtgatggcctgtgtggactgtgggagcagcacccaagatcctggtcaccctgatgacccactcttctcagagctggatggactggggctggagcccatggaagagggtggaggcgagcagggcagcagcgg

SEQ ID NO: 15366 - DNA, 461 bp, Homo sapiens
  source 1..461: mol_type = unassigned DNA
cccacttcacaggcagcagccagagcagccacacaagcaaatactttggcagcatcgactcttccgaggctgaggctggggctgctcggggcggggctgagcctggggaccaggtgattaagtacgtgctccaggatcccatttggctgctcatggccaatgctgaccagcgcgtcatgatgacctaccaggtgccctccagggacatgacctctgtgctgaagcaggatcgggagcggctccgagccatgcagaagcagcagcctcggttttctgaggaccagcggcgggaactgggtgctgtgcactcctgggtccggaagggccaactgcctcgggctcttgatgtgatggcctgtgtggactgtgggagcagcacccaagatcctggtcaccctgatgacccactcttctcagagctggatggactggggctggagcccatggaagagggtggaggc

SEQ ID NO: 15367 - DNA, 367 bp, Homo sapiens
  source 1..367: mol_type = unassigned DNA
tgctgttgcaggaggccctgggagcagtgccgggcccccacctcccagtgcggaggctgctgagccagaggccagactggcggaggtcactgagtcctccaatcaggacgcactttccggctccagtgacctgctcgaacttctgctgcaagaggactcgcgctccggcacaggctccgcagcctcgggctccttgggctctggcttgggctctgggtctggttcaggctcccatgaagggggcagcacctcagccagcatcactcgtgagtaccccgcctccagcatctcccagggtagggcagtgattggggagccgggagcccaggccccgtcttggcggagcttcctaaggccactgggatgg

SEQ ID NO: 15368 - DNA, 830 bp, Homo sapiens
  source 1..830: mol_type = unassigned DNA
gcaacctccccagcaccactaagcgtaaatgtgcctcctcctcctcctataccacctcctcagcctctgacgacgacaggcagaggacaggtccagtctctgtggggaccaagaaagatccgccgtcagcagcgctgtctggggagggggccaccccacggaaggagccagtggtgggaggcaccctgagcccgctcgccctggccaataaggcggagagtgtggtgtccgtcaccagtcagtgtagcttcagctccaccatcgtccatgtgggagacaagaagcccccggagtcggaaggaagagcaagccttcctcagccgcttccgagacctgggcaggctgcgtggactcgacagctcttccacagctccctcagcccttggcgagcgaggctgccaccacggccccgcacccccaagccgccgacaccactgccgatccaaagccaagcgctcacgccaccaccagaaccctcgggctgaagcgccctgctatgtctcacacccctcacccgtgccaccctccaccccctggcccaccccaccagccactacccccttcccagcggttgtccagccctaccctctcccagtgttctctcctcgaggaggcccccagcctcttccccctgctcccacatctgtgcccccagctgctttccccgcccctttggtgaccccaatggtggccttggtgctccctaactatctgttcccaaccccatccagctatccttatggggcactccagacccctgctgaagggcctcccactcctgcctcgcactccccttctccatccttgcccgccctcgccccgagtcctcc

SEQ ID NO: 15369 - DNA, 540 bp, Homo sapiens
  source 1..540: mol_type = unassigned DNA
aggacccagggccagccgttggcagagaggtgaccaagaaacgtacatggagaccaggcttggctgtggggcagagctgccaggggttggctaggctatcagacagggagggtgtggtatggatgtgttgacccctgaagtggttctgatgacctttccctatctcactctcctcagacatcatcatgatggaggacctgcctggcctagccccaggcccagcccccagcccagcccccagccccacagtagcccctgacccagccccagacgcctaccgtccagtggggctgaccaaggccgtgctgtccctgcacacacagaaggaagagcaagccttcctcagccgcttccgagacctgggcaggctgcgtggactcgacagctcttccacagctccctcagcccttggcgagcgaggctgccaccacggccccgcacccccaagccgccgacaccactgccgatccaaagccaagcgctcacgccaccaccagaaccctcgggctgaagcgccctgctatgtctcacacccctcac

SEQ ID NO: 15370 - DNA, 3115 bp, Homo sapiens
  source 1..3115: mol_type = unassigned DNA
agtgtaatgctagaagtcctagaagaaatttggagtgtgcgtgcgcgccgagcgcaccggccttgcccaggccccagcctggccgatgacaccgatgccaacagcaatggttcaagtggcaatgagtccaacgggcatgagtctagaggcgcatctcagcggagctcacacagctcctcctcaggcaacggcaaggactcagccctgctggagaccactgagagcagcaagagcacaaactctcagagcccatccccacccagcagttccattgcctacagcctcctgagtgccagctcagagcaggacaacccgtccaccagtggctgcagcagtgaacagtcagcccgggcaaggactcagaaggaactcatgacagcacttcgagagctcaagcttcgactgccgccagagcgccggggcaagggccgctctgggaccctggccacgctgcagtacgcactggcctgtgtcaagcaggtgcaggccaaccaggaatactaccagcagtggagcctggaggagggcgagccttgctccatggacatgtccacctataccctggaggagctggagcacatcacgtctgagtacacacttcagaaccaggataccttctcagtggctgtctccttcctgacgggccgaatcgtctacatttcggagcaggcagccgtcctgctgcgttgcaagcgggacgtgttccggggtacccgcttctctgagctcctggctccccaggatgtgggagtcttctatggttccactgctccatctcgcctgcccacctggggcacaggggcctcagcaggttcaggcctcagggactttacccaggagaagtccgtcttctgccgtatcagaggaggtcctgaccgggatccagggcctcggtaccagccattccgcctaaccccgtatgtgaccaagatccgggtctcagatggggcccctgcacagccgtgctgcctgctgattgcagagcgcatccattcgggttacgaagctccccggataccccctgacaagaggattttcactacgcggcacacacccagctgcctcttccaggatgtggatgaaagggctgcccccctgctgggctacctgccccaggacctcctgggggccccagtgctcctgttcctgcatcctgaggaccgacccctcatgctggctatccacaagaagattctgcagttggcgggccagccctttgaccactcccctatccgcttctgtgcccgcaacggggagtatgtcaccatggacaccagctgggctggctttgtgcacccctggagccgcaaggtagccttcgtgttgggccgccacaaagtacgcacggcccccctgaatgaggacgtgttcactcccccggcccccagcccagctccctccctggacactgatatccaggagctgtcagagcagatccaccggctgctgctgcagcccgtccacagccccagccccacgggactctgtggagtcggcgccgtgacatccccaggccctctccacagccctgggtcctccagtgatagcaacgggggtgatgcagaggggcctgggcctcctgcgccagtgactttccagcagatctgtaaggatgtgcatctggtgaagcaccagggccagcagctttttattgagtctcgggcccggcctcagtcccggccccgcctccctgctacaggcacgttcaaggccaaggcccttccctgccaatccccagacccagagctggaggcgggttctgctcccgtccaggccccactagccttggtccctgaggaggccgagaggaaagaagcctccagctgctcctaccagcagatcaactgcctggacagcatcctcaggtacctggagagctgcaacctccccagcaccactaagcgtaaatgtgcctcctcctcctcctataccacctcctcagcctctgacgacgacaggcagaggacaggtccagtctctgtggggaccaagaaagatccgccgtcagcagcgctgtctggggagggggccaccccacggaaggagccagtggtgggaggcaccctgagcccgctcgccctggccaataaggcggagagtgtggtgtccgtcaccagtcagtgtagcttcagctccaccatcgtccatgtgggagacaagaagcccccggagtcggacatcatcatgatggaggacctgcctggcctagccccaggcccagcccccagcccagcccccagccccacagtagcccctgacccagccccagacgcctaccgtccagtggggctgaccaaggccgtgctgtccctgcacacacagaaggaagagcaagccttcctcagccgcttccgagacctgggcaggctgcgtggactcgacagctcttccacagctccctcagcccttggcgagcgaggtagccacctggggcctcctggagcctgccctctgcccagtctaggactggattgttggggggtgggtcttaagggaggtgtttctgctccagggacccaggctggtgttgcttccaccactaggccctgcctagggacaggcccctcgctagcttctccccactaggatggggttccgggctgcagccagaggagggcagcctggggggatggcactgggatgggcaggcagaggtgctgtctccaggtaagcgacttcaggcctagcctgggggcaggggcaggaagtatgcccacttaggagtcagttgtcactgatgaagagacatgcatagattctgggccaactctgggtggggtctgggcttcaagggcaggtggaaggcagcccctccaggtgcctgagggagatcccctgcaggcagacgcaggactcaggactgggctttccagccccactcttcactccattgcaagctaggcagaatacggcctcgatgggcaggaggaatgcctaggctggcagtgcccacaggagtttggcggaccagagccatctgtccatgtgtccatggactcaccctgcttcctccatctgccagcatgcctccatcttccgcacacccccagctcgacccctcgtgtaacctctccctggccttgttcctttctcaataaatccccttgtccctggc

SEQ ID NO: 15371 - DNA, 523 bp, Homo sapiens
  source 1..523: mol_type = unassigned DNA
gtcaccagtcagtgtagcttcagctccaccatcgtccatgtgggagacaagaagcccccggagtcggacatcatcatgatggaggacctgcctggcctagccccaggcccagcccccagcccagcccccagccccacagtagcccctgacccagccccagacgcctaccgtccagtggggctgaccaaggccgtgctgtccctgcacacacagaaggaagagcaagccttcctcagccgcttccgagacctgggcaggctgcgtggactcgacagctcttccacagctccctcagcccttggcgagcgaggcagaatacggcctcgatgggcaggaggaatgcctaggctggcagtgcccacaggagtttggcggaccagagccatctgtccatgtgtccatggactcaccctgcttcctccatctgccagcatgcctccatcttccgcacacccccagctcgacccctcgtgtaacctctccctggccttgttcctttctcaataaatccccttgtccctgg

SEQ ID NO: 15372 - DNA, 3209 bp, Homo sapiens
  source 1..3209: mol_type = unassigned DNA
atgagaagacgatggcggccggaggtgccaatggaggctgtgcgggggccggcggctgcacgcggcacggggcatgggtcggcgcccctaagccaataagcgtggggggcgtggcagcccggcccgtgggcgggtttggaggagccagtgtaatgctagaagtcctagaagaaatttggagtgtgcgtgcgcgccgagcggtactggctgtgatcgaacttctcaaccctcagagacttagatcttccacctcactccctcagccaagcctccaggccccctcgtgcatccgtggtggcctctctgccttctctgttctgttctccccatggcccagacatgagtggccccctagaaggggctgatgggggaggggaccccaggcctggggaatcattttgtcctgggggcgtcccatcccctgggcccccacagcaccggccttgcccaggccccagcctggccgatgacaccgatgccaacagcaatggttcaagtggcaatgagtccaacgggcatgagtctagaggcgcatctcagcggagctcacacagctcctcctcaggcaacggcaaggactcagccctgctggagaccactgagagcagcaagagcacaaactctcagagcccatccccacccagcagttccattgcctacagcctcctgagtgccagctcagagcaggacaacccgtccaccagtggctgcagcagtgaacagtcagcccgggcaaggactcagaaggaactcatgacagcacttcgagagctcaagcttcgactgccgccagagcgccggggcaagggccgctctgggaccctggccacgctgcagtacgcactggcctgtgtcaagcaggtgcaggccaaccaggaatactaccagcagtggagcctggaggagggcgagccttgctccatggacatgtccacctataccctggaggagctggagcacatcacgtctgagtacacacttcagaaccaggataccttctcagtggctgtctccttcctgacgggccgaatcgtctacatttcggagcaggcagccgtcctgctgcgttgcaagcgggacgtgttccggggtacccgcttctctgagctcctggctccccaggatgtgggagtcttctatggttccactgctccatctcgcctgcccacctggggcacaggggcctcagcaggttcaggcctcagggactttacccaggagaagtccgtcttctgccgtatcagaggaggtcctgaccgggatccagggcctcggtaccagccattccgcctaaccccgtatgtgaccaagatccgggtctcagatggggcccctgcacagccgtgctgcctgctgattgcagagcgcatccattcgggttacgaagctccccggataccccctgacaagaggattttcactacgcggcacacacccagctgcctcttccaggatgtggatgaaagggctgcccccctgctgggctacctgccccaggacctcctgggggccccagtgctcctgttcctgcatcctgaggaccgacccctcatgctggctatccacaagaagattctgcagttggcgggccagccctttgaccactcccctatccgcttctgtgcccgcaacggggagtatgtcaccatggacaccagctgggctggctttgtgcacccctggagccgcaaggtagccttcgtgttgggccgccacaaagtacgcacggcccccctgaatgaggacgtgttcactcccccggcccccagcccagctccctccctggacactgatatccaggagctgtcagagcagatccaccggctgctgctgcagcccgtccacagccccagccccacgggactctgtggagtcggcgccgtgacatccccaggccctctccacagccctgggtcctccagtgatagcaacgggggtgatgcagaggggcctgggcctcctgcgccactacaggcacgttcaaggccaaggcccttccctgccaatccccagacccagagctggaggcgggttctgctcccgtccaggccccactagccttggtccctgaggaggccgagaggaaagaagcctccagctgctcctaccagcagatcaactgcctggacagcatcctcaggtacctggagagctgcaacctccccagcaccactaagcgtaaatgtgcctcctcctcctcctataccacctcctcagcctctgacgacgacaggcagaggacaggtccagtctctgtggggaccaagaaagacatcatcatgatggaggacctgcctggcctagccccaggcccagcccccagcccagcccccagccccacagtagcccctgacccagccccagacgcctaccgtccagtggggctgaccaaggccgtgctgtccctgcacacacagaaggaagagcaagccttcctcagccgcttccgagacctgggcaggctgcgtggactcgacagctcttccacagctccctcagcccttggcgagcgaggtagccacctggggcctcctggagcctgccctctgcccagtctaggactggattgttggggggtgggtcttaagggaggtgtttctgctccagggacccaggctggtgttgcttccaccactaggccctgcctagggacaggcccctcgctagcttctccccactaggatggggttccgggctgcagccagaggagggcagcctggggggatggcactgggatgggcaggcagaggtgctgtctccaggtaagcgacttcaggcctagcctgggggcaggggcaggaagtatgcccacttaggagtcagttgtcactgatgaagagacatgcatagattctgggccaactctgggtggggtctgggcttcaagggcaggtggaaggcagcccctccaggtgcctgagggagatcccctgcaggcagacgcaggactcaggactgggctttccagccccactcttcactccattgcaagctaggcagaatacggcctcgatgggcaggaggaatgcctaggctggcagtgcccacaggagtttggcggaccagagccatctgtccatgtgtccatggactcaccctgcttcctccatctgccagcatgcctccatcttccgcacacccccagctcgacccctcgtgtaacctctccctggccttgttcctttctcaataaatccccttgtccctgg

SEQ ID NO: 15373 - DNA, 691 bp, Homo sapiens
  source 1..691: mol_type = unassigned DNA
ccccggcccccagcccagctccctccctggacactgatatccaggagctgtcagagcagatccaccggctgctgctgcagcccgtccacagccccagccccacgggactctgtggagtcggcgccgtgacatccccaggccctctccacagccctgggtcctccagtgatagcaacgggggtgatgcagaggggcctgggcctcctgcgccagtgagtgacctgctcctacctcaccctctaatcgccctttcccctctccttcttggaaccagcactgccagtcccagagtcttgcccgatcctcctttgccctctccttcctgccttttccttcttgtcctgctcccatcaaggcgtctgtgcctccccactggtaccttcttgttttattgtgcccttggcccctgacactggcgacaccccctggttctgctcactgtggtgctgtgtcccacaggtgactttccagcagatctgtaaggatgtgcatctggtgaagcaccagggccagcagctttttattgagtctcgggcccggcctcagtcccggccccgcctccctgctacaggcacgttcaaggccaaggcccttccctgccaatccccagacccagagctggaggcgggttctgctcccgtccaggccccactagccttggtccctgaggaggccgagaggaaagaagcct

SEQ ID NO: 15374 - DNA, 626 bp, Homo sapiens
  source 1..626: mol_type = unassigned DNA
acagggcccccctgaatgaggacgtgttcactcccccggcccccagcccagctccctccctggacactgatatccaggagctgtcagagcagatccaccggctgctgctgcagcccgtccacagccccagccccacgggactctgtggagtcggcgccgtgacatccccaggccctctccacagccctgggtcctccagtgatagcaacgggggtgatgcagaggggcctgggcctcctgcgccagtgagtgacctgctcctacctcaccctctaatcgccctttcccctctccttcttggaaccagcactgccagtcccagagtcttgcccgatcctcctttgccctctccttcctgccttttccttcttgtcctgctcccatcaaggcgtctgtgcctccccactggtaccttcttgttttattgtgcccttggcccctgacactggcgacaccccctggttctgctcactgtggtgctgtgtcccacaggtgactttccagcagatctgtaaggatgtgcatctggtgaagcaccagggccagcagctttttattgagtctcgggcccggcctcagtcccggccccgcctccctggtgagttgatgatgatgtgtgggtgaag

SEQ ID NO: 15375 - DNA, 564 bp, Homo sapiens
  source 1..564: mol_type = unassigned DNA
acaagaagagtgagttcctctcgccctgctcgcccttcccactgtcctgggcttttgagtggctgcccttgtggttgtgtctcttggtgccttggtctcctggatctctagtggcatggcctccctcttactcagctctccctccctttgaccgctcctcctttcccacttccatcagttctgcagttggcgggccagccctttgaccactcccctatccgcttctgtgcccgcaacggggagtatgtcaccatggacaccagctgggctggctttgtgcacccctggagccgcaaggtagccttcgtgttgggccgccacaaagtacgcacggcccccctgaatgaggacgtgttcactcccccggcccccagcccagctccctccctggacactgatatccaggagctgtcagagcagatccaccggctgctgctgcagcccgtccacagccccagccccacgggactctgtggagtcggcgccgtgacatccccaggccctctccacagccctgggtcctccagtgatagcaacgggggtgatgcagaggggcctgggcct

SEQ ID NO: 15376 - DNA, 717 bp, Homo sapiens
  source 1..717: mol_type = unassigned DNA
ctcgaactcctgacctcaggtgatccgcctgccttggcctcccaaagtgctgggattaaaggcgtgagccaccgtgcccggcctacctctgcctcctcctgccccctccccagcgtctttgctgttgtctgctgtgaccttattgttggaggagtgggtggctctctgttgaaagtccctaatgctcctctctcctttgctagaggaggtcctgaccgggatccagggcctcggtaccagccattccgcctaaccccgtatgtgaccaagatccgggtctcagatggggcccctgcacagccgtgctgcctgctgattgcagagcgcatccattcgggttacgaagctccccggataccccctgacaagaggattttcactacgcggcacacacccagctgcctcttccaggatgtggatgaaagggctgcccccctgctgggctacctgccccaggacctcctgggggccccagtgctcctgttcctgcatcctgaggaccgacccctcatgctggctatccacaagaagattctgcagttggcgggccagccctttgaccactcccctatccgcttctgtgcccgcaacggggagtatgtcaccatggacaccagctgggctggctttgtgcacccctggagccgcaaggtagccttcgtgttgggccgccacaaagtacgcacggcccccctgaatgaggacgtgttcactccc

SEQ ID NO: 15377 - DNA, 1262 bp, Homo sapiens
  source 1..1262: mol_type = unassigned DNA
gctggagcggcggcgggcaggcgtgcggaggacactcctgcgaccaggtactggctgtgatcgaacttctcaaccctcagagacttagatcttccacctcactccctcagccaagcctccaggccccctcgtgcatccgtggtggcctctctgccttctctgttctgttctccccatggcccagacatgagtggccccctagaaggggctgatgggggaggggaccccaggcctggggaatcattttgtcctgggggcgtcccatcccctgggcccccacagcaccggccttgcccaggccccagcctggccgatgacaccgatgccaacagcaatggttcaagtggcaatgagtccaacgggcatgagtctagaggcgcatctcagcggagctcacacagctcctcctcaggcaacggcaaggactcagccctgctggagaccactgagagcagcaagagcacaaactctcagagcccatccccacccagcagttccattgcctacagcctcctgagtgccagctcagagcaggacaacccgtccaccagtggctgcagcagtgaacagtcagcccgggcaaggactcagaaggaactcatgacagcacttcgagagctcaagcttcgactgccgccagagcgccggggcaagggccgctctgggaccctggccacgctgcagtacgcactggcctgtgtcaagcaggtgcaggccaaccaggaatactaccagcagtggagcctggaggagggcgagccttgctccatggacatgtccacctataccctggaggagctggagcacatcacgtctgagtacacacttcagaaccaggataccttctcagtggctgtctccttcctgacgggccgaatcgtctacatttcggagcaggcagccgtcctgctgcgttgcaagcgggacgtgttccggggtacccgcttctctgagctcctggctccccaggatgtgggagtcttctatggttccactgctccatctcgcctgcccacctggggcacaggggcctcagcaggtgaggtgcccaagcgctgtggggaggcatgagcagtcccaggaaattcctgctgtgaggggccggggaacccagactttcccttagtggattcttcgcagcctagggaaggggcaggaagctgtgctcactcctctcctgtctgtcccaggttcaggcctcagggactttacccaggagaagtccgtcttctgccgtatcaggtaggtgaggggaactggag

SEQ ID NO: 15378 - DNA, 528 bp, Homo sapiens
  source 1..528: mol_type = unassigned DNA
attatgcaacccgcctccccgcccgcccggtggagcttccactcggctgcgggctggagcggcggcgggcaggcgtgcggaggacactcctgcgaccagcaccggccttgcccaggccccagcctggccgatgacaccgatgccaacagcaatggttcaagtggcaatgagtccaacgggcatgagtctagaggcgcatctcagcggagctcacacagctcctcctcaggcaacggcaaggactcagccctgctggagaccactgagagcagcaagagcacaaactctcagagcccatccccacccagcagttccattgcctacagcctcctgagtgccagctcagagcaggacaacccgtccaccagtggctgcagcagtgaacagtcagcccgggcaaggactcagaaggaactcatgacagcacttcgagagctcaagcttcgactgccgccagagcgccggggcaagggccgctctgggaccctggccacgctgcagtacgcactggcctgtgtcaagcaggtg

SEQ ID NO: 15379 - DNA, 589 bp, Homo sapiens
  source 1..589: mol_type = unassigned DNA
gtggggggcgtggcagcccggcccgtgggcgggtttggaggagccagtgtaatgctagaagtcctagaagaaatttggagtgtgcgtgcgcgccgagcggtactggctgtgatcgaacttctcaaccctcagagacttagatcttccacctcactccctcagccaagcctccaggccccctcgtgcatccgtggtggcctctctgccttctctgttctgttctccccatggcccagacatgagtggccccctagaaggggctgatgggggaggggaccccaggcctggggaatcattttgtcctgggggcgtcccatcccctgggcccccacagcaccggccttgcccaggccccagcctggccgatgacaccgatgccaacagcaatggttcaagtggcaatgagtccaacgggcatgagtctagaggcgcatctcagcggagctcacacagctcctcctcaggcaacggcaaggactcagccctgctggagaccactgagagcagcaagagcagtgaacagtcagcccgggcaaggactcagaaggaactcatgacagcacttcgagagctcaagcttcgactgccg

SEQ ID NO: 15380 - DNA, 576 bp, Homo sapiens
  source 1..576: mol_type = unassigned DNA
aatgctagaagtcctagaagaaatttggagtgtgcgtgcgcgccgagcgagacggggtttctccatgttggtcaggctggtctcgaactcgctacctcaggtactggctgtgatcgaacttctcaaccctcagagacttagatcttccacctcactccctcagccaagcctccaggccccctcgtgcatccgtggtggcctctctgccttctctgttctgttctccccatggcccagacatgagtggccccctagaaggggctgatgggggaggggaccccaggcctggggaatcattttgtcctgggggcgtcccatcccctgggcccccacagcaccggccttgcccaggccccagcctggccgatgacaccgatgccaacagcaatggttcaagtggcaatgagtccaacgggcatgagtctagaggcgcatctcagcggagctcacacagctcctcctcaggcaacggcaaggactcagccctgctggagaccactgagagcagcaagagcacaaactctcagagcccatccccacccagcagttccattgcctacagcctcctgagtgcca

SEQ ID NO: 15381 - DNA, 719 bp, Homo sapiens
  source 1..719: mol_type = unassigned DNA
agcttcagcaatggagcgtgcaaaacaccagtgagcttctgtcttgctggagggtcggctttgggcggaactggctttgttgaccgggagaaacgagatgggggtgaagctggagatatttcggatgataatctacctcactttccctgtggctatgttctgggtttccaatcaggccgagtggtttgaggacgatgtcatacagcgcaagagggagctgtggccacctgagaagcttcaagagatagaggaattcaaagagaggttacggaagcggcgggaggagaagctccttcgcgacgcccagcagaactcctgaggcctccaagtgggagtcctagcccctcccctgatgaaatatacatatactcagttccttgttattcatttaagtgttttattcttttatcagtttttgggggccgagtgagacccaggatgcctcaggccctcagggggcttgtgtcgggggctgggggctgctgttccgacggaagccgagagcggtcgggtcctgaggggtgagcaggggttggggactgagggtcccagctcgtttctgtgctccgtcctgtggatgaagaggggtcagccagggggagggctcaagggcagtgccggccacaggtggcgaacaatggagagagggtgcaggtagccaccgtgtcccacctcattgtgagcactggtctatgtttaccctcaatatctgccattta

SEQ ID NO: 15382 - DNA, 1815 bp, Homo sapiens
  source 1..1815: mol_type = unassigned DNA
ggctttgttgaccgggagaaacgagatgggggtgaagctggagatatttcgggtcagtggacacaggagtgggttgggaggctgggcaggggatcttcctggatctgaagatgaggttggaaatggggggacttcaaaggaagagggagctccaaggagaaagctcttaagatttgagaggaacctttctggttggaaatccaggagaggggacgctgggctgggggggttctcggatttgggcttctgggtttgggggctgtgagagggctggtccgaggaaggacctcagagaggggtgagctgagaagggggctctaaagaaggaagacttaagatcctgggggagctctcgggctcgtggtgggtgggtgtctatgacagggagattcctagacttcgagaagtggagttgaagagtgacgcctcctgggtttgggggtgctcccgggatcttaagtggggatgggtaatgaggtctcgaggagatgcttttgattgtagctggggcgtctgtgtgtctgtctgtgtttgagaggaagactccagctcagagggaactttcaggaatgaggcctcctggattataggagttaggttttagggtgcgaggtttctgtacccttggtgggagttctgggattcttgggtcggccgtaacgaggcgcttctggactctgcagtaggatgggtcccccaggctctgaggagcctctgcacattgcttggggggagctcacctcacccaccctctgccattccagatgataatctacctcactttccctgtggctatgttctgggtttccaatcaggccgagtggtttgaggacgatgtcatacagcgcaaggtgggcataagaggagtgtttgagggttcattccaggggtgggagagggtgtggggcagcagtctgctggggactaatgtctgcctcccataagccgaccctgccctgatgtggggctctggaggcctttggctcgtgtcccatttgtgacttttccttacagagggagctgtggccacctgagaaggtaagtgatctcttcttcctgccagagggatggaggaggctggattcttgtatccgggatgggttttagatgaaaattttaggccaggcgcagtggctcatgcttgtaatcccagggcatgggaggctgaggtgggtagatcacttgaggtcaggagttcaaaaccagcctggccaacatggcgaaaccccatgtctacagaaatacaaaacttagccaggcatggtggcaggcgcctataattccagctgcttgggaggctgagggagaagaatcacttgaacccaggaggtggaggttgcagtgagcccaagatcacgccactgcactccagcctgggcaatagagtgagactttgtctcaaaaagaaacattttactctcagccatgagtaaggaaccgagagcagaggagtagatggtttccttattgccttctcctggaagagtgaagcggatcccacgcggacccctttgtaattggcagggggcttccagtgaagacactgaaccctgaagccgtggtctggggcagggtggtgggagaggtgggcgggggggggtggtcccggctctgaggtgtgtgcccctccccccttcctgtcccacccgcttctccacccctagcttcaagagatagaggaattcaaagagaggttacggaagcggcgggaggagaagctccttcgcgacgcccagcagaactcctgaggcctccaagtgggagtcctagcccctcccctgatgaaatatacatatactcagttccttgttattc

SEQ ID NO: 15383 - DNA, 219 bp, Homo sapiens
  source 1..219: mol_type = unassigned DNA
tgttgaccgggagaaacgagatgggggtgaagctggagatatttcggagggagctgtggccacctgagaagcttcaagagatagaggaattcaaagagaggttacggaagcggcgggaggagaagctccttcgcgacgcccagcagaactcctgaggcctccaagtgggagtcctagcccctcccctgatgaaatatacatatactcagttccttgtta

SEQ ID NO: 15384 - DNA, 317 bp, Homo sapiens
  source 1..317: mol_type = unassigned DNA
gagaaacgagatgggggtgaagctggagatatttcggatgataatctacctcactttccctgtggctatgttctgggtttccaatcaggccgagtggtttgaggacgatgtcatacagcgcaaggtgggcataagaggagtgtttgagggttcattccaggggtgggagagggtgtggggcagcagtctgctggggactaatgtctgcctcccataagccgaccctgccctgatgtggggctctggaggcctttggctcgtgtcccatttgtgacttttccttacagagggagctgtggccacctgagaaggtaagt

SEQ ID NO: 15385 - DNA, 332 bp, Homo sapiens
  source 1..332: mol_type = unassigned DNA
gagaaacgagatgggggtgaagctggagatatttcggatgataatctacctcactttccctgtggctatgttctgggtttccaatcaggccgagtggtttgaggacgatgtcatacagcgcaagagggagctgtggccacctgagaaggtaagtgatctcttcttcctgccagagggatggaggaggctggattcttgtatccgggatgggttttagatgaaaattttaggccaggcgcagtggctcatgcttgtaatcccagggcatgggaggctgaggtgggtagatcacttgaggtcaggagttcaaaaccagcctggccaacatggcg

SEQ ID NO: 15386 - DNA, 375 bp, Homo sapiens
  source 1..375: mol_type = unassigned DNA
ggtgaagctggagatatttcggatgataatctacctcactttccctgtggctatgttctgggtttccaatcaggccgagtggtttgaggacgatgtcatacagcgcaagagggagctgtggccacctgagaagccatgagtaaggaaccgagagcagaggagtagatggtttccttattgccttctcctggaagagtgaagcggatcccacgcggacccctttcttcaagagatagaggaattcaaagagaggttacggaagcggcgggaggagaagctccttcgcgacgcccagcagaactcctgaggcctccaagtgggagtcctagcccctcccctgatgaaatatacatatactcagttccttgttattca

SEQ ID NO: 15387 - DNA, 474 bp, Homo sapiens
  source 1..474: mol_type = unassigned DNA
gcacattgcttggggggagctcacctcacccaccctctgccattccagatgataatctacctcactttccctgtggctatgttctgggtttccaatcaggccgagtggtttgaggacgatgtcatacagcgcaaggtgggcataagaggagtgtttgagggttcattccaggggtgggagagggtgtggggcagcagtctgctggggactaatgtctgcctcccataagccgaccctgccctgatgtggggctctggaggcctttggctcgtgtcccatttgtgacttttccttacagagggagctgtggccacctgagaagcttcaagagatagaggaattcaaagagaggttacggaagcggcgggaggagaagctccttcgcgacgcccagcagaactcctgaggcctccaagtgggagtcctagcccctcccctgatgaaatatacatatactcagttccttgttattca

SEQ ID NO: 15388 - DNA, 9082 bp, Homo sapiens
  source 1..9082: mol_type = unassigned DNA
gagaaagagttcggcgaagaaggagtgagttctagagacgccccgcgagcaggacccgcgcctgcaggagagcctggccgacccggctcctcgccttctctgcgcgctctcccgcgtccgctttcagcaccccgagcggagaacagttcccggcagcccgcagcgctgccgagtggccgccggccggccgagtacccggagctccagggggctcaggagcaccctctgagaacccgctgtgcacccaccttttcccctcttttggtgggcaagtaagcacgggggaaaagcatccggtggcctcagggagccctgaagaaaccgaagcagaatgtaccagggacacatgcagaaaagtaaagaacaaggatatggaaaactaagcagtgatgaagacctcgaaataattgttgatcaaaagcagggaaaaggctctagggcggcagataaggctgttgccatggtgatgaaggagataccgagggaggagtctgctgaagaaaagcccctccttactatgacatcacagctggtgaatgagcaacaagaaagcagacccctcctgagtccctccatcgatgactttctctgtgaaaccaaatcggaagcaatagcaaggccagtaacatccaatacagctgtattgaccactggcttagatctcctcgacctgagtgaaccagtctctcaaacccaaaccaaagccaagaagtcagagccctcatcaaaaacctcatccctcaagaaaaaggccgatggatctgacctcatcagcacggatgctgagcagagaggccagcctctcagagtcccggagacttcatccttagatctagacattcaaacacaactggaaaaatgggacgatgttaagtttcatggagatcgaaataccaagggacatccaatggcagagagaaaatcatcctcatctagaactggatcaaaagagctcttatggtcctcagaacacagatctcaaccagaactgagtggtggaaaaagcgccctcaactctgagtcggcttcagaattggaattagtggctccgactcaggctcgactgaccaaagaacatcgctggggaagcgcattactttctagaaaccactccttagaagaagagtttgaaagggcaaaagcagcagtggagtcagatacagagttttgggataagatgcaagcagaatgggaagaaatggctcggaggaactggatatctgagaaccaagaagcccagaaccaagtaaccatctcggctagtgagaagggatattactttcacactgaaaaccccttcaaggactggcctggagcatttgaagaaggcttaaaaaggctgaaggaaggggatctgccagtcaccatcctgttcatggaagcagcaattcttcaggaccctggagatgcagaggcatggcagttcctcgggataacccaggcggagaatgaaaatgaacaagcagctattgtcgccctccagaggtgcttagaattacagcccaacaacttaaaagctttgatggccttggctgtgagttatactaacactggccatcagcaggatgcctgtgacgctctgaagaattggattaagcaaaatccaaagtacaaataccttgtgaaaagcaagaagggatctccaggcctcacccggcggatgtctaagtccccagttgatagctctgttctggaaggggtgaaggaattatatctggaagctgcccaccaaaatggagatatgatcgacccagacctgcagacaggtctaggggttctgttccacctgagtggagaatttaatagagcaatagatgcatttaacgctgccttaactgttcggccagaggactattcactatggaaccgcctcggggcgaccttggcgaacggagaccgcagcgaggaagccgtggaggcctatacgcgagcactggagattcagccaggattcatccggtccagatacaacctaggaataagctgcatcaacctgggcgcctacagagaagcggtcagcaattttctcactgccctcagtttgcaaagaaagagcaggaatcagcagcaagttcctcatcctgcaatctctgggaatatctgggctgccctcagaattgcgctctctctgatggaccaaccagaactcttccaggcggctaatcttggtgacctggatgtcctcttaagagctttcaacttggatccttgaagaaagaataataccagtactaataatccctgatctgtgtgattgtactgaaaaatcaaaaactattttattatgaatttcaaaaggataaatcaaatattcaaaaggccatggtcatatagcccaaggaaattaattcctgtggacaatgcccagtctctgttcagatccaaaagcacaaaatgttgtatatagagtcaaagtcaggctcaaaagaagaattaagagactcaagacaaaccaagataaagtaactgtgtgttgaatactctttccacaagttgcaagcatattgcaacacatgttctttgggttttttgtctccccttgcagctgatgacacatctgaggaacttgttcatgggaaacatggaaaaagcactgcctcagattgggaaattctgactgtttctgaactgtcttcttttgcaagactgaacatagtttgggccattggtgcatgcacatatattaacttgtgactaaagacagacattgcttaaacctgttccaattttaacttttactgtagccctttgattccagagagggagctttgctggcaaaagcagtttttgcactagaaatttttgctgttcccaatctaaacttttctggtattgtatatatgcactttaatatcttatttatgccttgctggagttttgttttgttgctccaatttttaacttgggggtgaaagatttaagaactcagcctcactagatcaacggaccaaataaacaattcctgaagacagtttttcatagtgtaggattttgaagaagtgtttttcttaaagcagatacgatgacataaggcgtaaatatggcaaacagatcttttcattcacgtgctttctgggtctgtatgaacataagtaagacacaaggtactgtctcttcatgcattctctgcaggaagaaagtttgatggtatcgtgatttctattgagttcaaattaacttgcttaagtgtcatactttactggctttgccctgcacaccaatattccttttaaaccataaatattttaaataatatttcttaagagtgataaataacattttttcctaaaaattatgttttcttagtttcataataatctgcactgttcatccccttgcattctaagtgatagaagagcaacactttcaaaccaaatctcactgaatgccagtgatttcatatgaaagatgcatgcctctttggctctttgaacatttagcaagtattgggaattttctattagcagtggtgttttaattggttgaattccacttagttctccacagtgttttgtatgtgtttggggcttggtgattattttgaaagatacattttttaaagaattaggaacattttttgcaaaatgctaatcagaatataattttcccaatgtcaggtatagaagttatcccattcttctttacctggtctccttccttcgtctagaaccttccccacagtagctaatcctaacaactttttatttatgttctttgataataatagctcatcccgctcatgattatagctacccacaaaaaataaaacaacaacaacaaaaaagactccacagaattgggatcaaaacagtctaattggctggggaataagcttctactgaggagtaaatgtgcacacgtgcttatcaattgaatgcgaggtacaggaataaaatcctctcctctgttacatctgaagtccttgggttgtgagagggcctcaagttaacagaaaccacaagtccttgaggcttacatatgttataacctattctagtttataaagacaaaaagctgaggccactgtgaggagtgccaggttttgatagtcattgtcaaagttgacttgggccaggtggtagctccagctggtcagcagaaggcagaggcattcaggcactcatcatgggtagcagcgaccacccagtctcagaccgtgcttctctacagtctcagcagcaaagtaaagctcaacaatgctttcaagaatggtattgtaagaattgtagaattcgagaaacccagtctggtaaggactcttggggccagcctccaagccatggcagggcctgcttgaatatgcctgattaagcatcctttccttccctgctccttcctcctgccatctctgtaccttgaccagaaagtcggcatgaatagttcatggacaaaggattgaatagcctctgaacaaaggattcaaagcaaactttgtaagtgttctgtgatgccattctatactttgagcagcagctgaatctgcagcctggatttaaagcctgaaactagtataaatgtcaaataattaatttgttgctaaatggtggcaaattttgtggcccaagttttattttgctattggaacacaaactccaaggagctgttttagggaagactaaacaatcttccattcttaccattatttggcaatttgcagagcatttagtagtactttctctagtgtatgtagtatctgtcagatctaagatttttataggctgtcaagaagtccagaattacggcccaagaggaaaagagttgcatttttcaataatattttttataaaattaagttaaaaccattattaaaacatgagtgacaggccaggtgcggtggctcacgcctgtaatcctagcactttgggaggcagaggcgggcagaccacgaggtcaggagttcgagaccagcctgaccaacatggtgaaaccccgtctttattaagaatacaaaaattagccgggtgtagtggtatgcacctgtaataccagctactcaggaggctgaggcaggagaatcacttgaaccagggaggcggaggttgcagtgagccgagattgcaccgctgcactccagtctgggtgacagagcgagactccgtctcaaaaaaaacaaaaaagtgacagtttataggaatagagcaccaccaagaaatcagtagcaagactttagaacagtctttttgtataaatcatatacagtaaatgttttgtttcttagaagtgcatctactttattttttggcagaacaatttttggcatcttatcttcatggcatgaaattgtcatttaaattactctttccgtttgaaaggggagggtatccttatttcccttctgaggtactctgagaaggctttgagtttcctttttcatgtattaatgtataacagcctaacagctcctagaagagggtattcttactagaatggctacatacgggtgacttcagttacatacaggtgacttccagggactgacttcgcctgtagattggatgaaaataaagagaaagccagtgattattgctgagtttcaaaatataaccatttctagtaggctacttctacatgctgttgtaccttcctggtgaggaggagacagagggataggggagaggaggaggaataaaaatccctctcactgggccaatcatactgattcattccctttacttcctccaaaactcactccccatgactcctgaaaaatgggtagatctcgtccaccaggaaattttaatagaatactatgcaccgtgctttctcagtcaatctggattcctactagaacagaaaagtaaggaaacataactgggtaggaatgtccacttacgtttcacaaactcacttttagagtttcatgccactttcctcattcttctctttaagatactattatattgaacgtgggacccatgtctaaatacttgtatagataaatatttcttgtatattcttcccatacaagcaagacttgaatacagttgtagctagtcccacttttataataaaagcttccaaactctttatcataaactttgtctgtgagcttgggaatacagagaaagcaagttgatcattctgagacccttcctcatttgccctgaatcagttccccaagattggactgtactttaagctagttgttgtagcagtggtggttgttgttttatatcttgagatacttctagaacattctagaaacagggtattctaaaggcttactttatatgccatcctttttgaaccctcttattttagaaattattacacgtgcacacttatgatttcaaccttgtaaaataatttcaaattcatttcgtatccacattttactgcagtttccctatcatcatctcaatagttatagaactggttgaaattaaactgttttgaactaagaagtagatatatatatatatatatatatatatttttttttttttttttaaagagtgttcatagataaactctggcataaagtttgtaaaaaagcaattttttaaaagcaaaacgtataacctcaggtacaaaaatattgcatgcattagtattgcaaatttgcctactcaaatattaaccaaagcatgcaagataacttgactgaatttaaatttacacagtgcatgattaagtctcataggttagcctgttgttccttgcctctatacaagggagcatttttatgaactttgtgttacagtttttctatttgcttttcttatcctatccttgagattgttttcatgctatcacactgaactttacagatattcacacatctggtttctacagtgttaccagtgccaaactaatcctctgaagaatctgggacatctaaacactttttcaaaaaccagttgaggcacaacagatcccaaacttaaacaaatccaagtgtctgaatgctactaaactaaatcatgttgactgcctcagcacataaaggtttcgactttaaattcttaataatgcatttcaaaatttttctaaaagtttgggaataaattagaaaaactgatattctaaataaggcgaggaggttggggtaatgtcaggcacatcaaaatcatcacacaacgaagtagatatggggccttaattttcataaatgtcacatagcaagtgtgtggggtatcacaacattgttctgatacagccctgtttgtatggtagttgagctgcttgggctaaatgtcccttgagaaactggacttgatcaacaggtctaaaaacactgatatttagggagtgatgaggtgatttcacggtcactcagaaccaactctgaaatcttctcactgccttttcccataacccctattttatgaggagaccagaaagggagagagcaaagctcagtgagaccatgtggtcttacattagtaacagctttgttactcactccatataccccggtaccctcacacacataccatgaactcaaagacagaattctacacataacacacatagcaaagacgattgtggggaggcattaaacagttaagaggaaaaaaaaaaacacagaaaattaaactgtgaggtttaacaacctctcatgtggtattttgccttgaacgaagtttccactacctgcagcttctgcagaaataccaaaataacacagtctagagacaagtgtcccaatgtcagaactgttttctcaggaccttctctataagagaaaactaacttgcaatgctgcagaatgtcagagcaaaaccctgatgagctccgtgggatacttaatagaagcctgcactcaaaataatattaagatggaaacaacaacaacaattaggcagttctttgctcaactataaaatgtgtatcattcattgggggagggggaggggtcgtgttctttggatttcttggaaagggaaatggtataacacaaaaagactaagaggtatacacactcagctcggtaattcgagcatttggcattttcactgagatatatagcatttctgcatggataccatacaagaattctgccatgtgagaaatgtgttcatgatggactacattaccagtagttaagggaaatacagcaaacttaagtttttaccaacttcctttcatgttccctatatatcatctaacccaaactttcaatttacattgcccaaatttgtttacattggttgaaaaaaaactgattaatttattaaactttttacaaactgtaacaaacatttaactatttagaaaagacatttctacatattttatatatctatgaatattgcatctctaatctaatctaaaaatgttgttttgagacaattcttctgtgatgcttcctcctcatgctcataaatgtttaaagtcttgggatttcattttcaggctgaaatagataacaagaaaaaaatttaagtttaaatgtttacattgcgttactaaattaataccaattcaaattaagtgacctatagtaaattaatggcaatgggggggaggggattttaaagtgattggcatattatgtgatactgtatcagtgatttagtgaaataatatgtatcatagcacaactctgttgggtattaaggcttcatcttagtatttccctgcgttgctctttgaaataaaattactaccataaaaataacctcttatcatattgatgtgtttaatttactcagttggcttctaatttgcgtaacaagattaaggtagtatttttgtactattattggaagcatgccttccctttttcacattattaaattgtatttatatttgtgcaattttaaactatgttttcaaataaactttgtctgcggcttcgaggtcttttcaggaatctttcaaaatgggatttggggatcagaactccttctgatcaaatggaatccaatttgtactactggctaaaggtccttttattaaatattgaatatcactacatatgattttgcatgagctatctggaaatcaggaatgcatttttggatataaaacaaaactttaaaaatcttcctcctttgttaattttttaagactaaaatattatttaacctgaaattgaattttgtgattctttttagaataaaaatattaaaataaa

SEQ ID NO: 15389 - DNA, 2818 bp, Homo sapiens
  source 1..2818: mol_type = unassigned DNA
cagcgctgccgagtggccgccggccggccgagtacccggagctccagggggctcaggagcaccctctgagaacccgctgtgcacccaccttttcccctcttttggtgggcaagtaagcacgggggaaaagcatccggtggcctcagggagccctgaagaaaccgaagcagaatgtaccagggacacatgcaggtagtaggtgtaaccttgaagaaaaagtggcactgtcttcaaaaaagtgacctgaccctggctttgggaaaaggctctagggcggcagataaggctgttgccatggtgatgaaggagataccgagggaggagtctgctgaagaaaagcccctccttactatgacatcacagctggtgaatgagcaacaagaaagcagacccctcctgagtccctccatcgatgactttctctgtgaaaccaaatcggaagcaatagcaaggccagtaacatccaatacagctgtattgaccactggcttagatctcctcgacctgagtgaaccagtctctcaaacccaaaccaaagccaagaagtcagagccctcatcaaaaacctcatccctcaagaaaaaggccgatggatctgacctcatcagcacggatgctgagcagagaggccagcctctcagagtcccggagacttcatccttagatctagacattcaaacacaactggaaaaatgggacgatgttaagtttcatggagatcgaaataccaagggacatccaatggcagagagaaaatcatcctcatctagaactggatcaaaagagctcttatggtcctcagaacacagatctcaaccagaactgagtggtggaaaaagcgccctcaactctgagtcggcttcagaattggaattagtggctccgactcaggctcgactgaccaaagaacatcgctggggaagcgcattactttctagaaaccactccttagaagaagagtttgaaagggcaaaagcagcagtggagtcagatacagagttttgggataagatgcaagcagaatgggaagaaatggctcggaggaactggatatctgagaaccaagaagcccagaaccaagtaaccatctcggctagtgagaagggatattactttcacactgaaaaccccttcaaggactggcctggagcatttgaagaaggcttaaaaaggctgaaggaaggggatctgccagtcaccatcctgttcatggaagcagcaattcttcaggaccctggagatgcagaggcatggcagttcctcgggataacccaggcggagaatgaaaatgaacaagcagctattgtcgccctccagaggtgcttagaattacagcccaacaacttaaaagctttgatggccttggctgtgagttatactaacactggccatcagcaggatgcctgtgacgctctgaagaattggattaagcaaaatccaaagtacaaataccttgtgaaaagcaagaagggatctccaggcctcacccggcggatgtctaagtccccagttgatagctctgttctggaaggggtgaaggaattatatctggaagctgcccaccaaaatggagatatgatcgacccagacctgcagacaggtctaggggttctgttccacctgagtggagaatttaatagagcaatagatgcatttaacgctgccttaactgttcggccagaggactattcactatggaaccgcctcggggcgaccttggcgaacggagaccgcagcgaggaagccgtggaggcctatacgcgagcactggagattcagccaggattcatccggtccagatacaacctaggaataagctgcatcaacctgggcgcctacagagaagcggtcagcaattttctcactgccctcagtttgcaaagaaagagcaggaatcagcagcaagttcctcatcctgcaatctctgggaatatctgggctgccctcagaattgcgctctctctgatggaccaaccagaactcttccaggcggctaatcttggtgacctggatgtcctcttaagagctttcaacttggatccttgaagaaagaataataccagtactaataatccctgatctgtgtgattgtactgaaaaatcaaaaactattttattatgaatttcaaaaggataaatcaaatattcaaaaggccatggtcatatagcccaaggaaattaattcctgtggacaatgcccagtctctgttcagatccaaaagcacaaaatgttgtatatagagtcaaagtcaggctcaaaagaagaattaagagactcaagacaaaccaagataaagtaactgtgtgttgaatactctttccacaagttgcaagcatattgcaacacatgttctttgggttttttgtctccccttgcagctgatgacacatctgaggaacttgttcatgggaaacatggaaaaagcactgcctcagattgggaaattctgactgtttctgaactgtcttcttttgcaagactgaacatagtttgggccattggtgcatgcacatatattaacttgtgactaaagacagacattgcttaaacctgttccaattttaacttttactgtagccctttgattccagagagggagctttgctggcaaaagcagtttttgcactagaaatttttgctgttcccaatctaaacttttctggtattgtatatatgcactttaatatcttatttatgccttgctggagttttgttttgttgctccaatttttaacttgggggtgaaagatttaagaactcagcctcactagatcaacggaccaaataaacaattcctgaagacagtttttcatagtg

SEQ ID NO: 15390 - DNA, 2992 bp, Homo sapiens
  source 1..2992: mol_type = unassigned DNA
gagaacggcgcgcgccccgctcggcagctgcggcggcggctggtgtaggcgctcacgtcagggctgggaggagggggttcgcagctcagagagagagagacatgaggcaacctggcaggaagcgagaaagagttcggcgaagaaggagtgagttctagagacgccccgcgagcaggacccgcgcctgcaggagagcctggccgacccggctcctcgccttctctgcgcgctctcccgcgtccgctttcagcaccccgagcggagaacagttcccggcagcccgcagcgctgccgagtggccgccggccggccgagtacccggagctccagggggctcaggagcaccctctgagaacccgctgtgcacccaccttttcccctcttttggtgggcaagtaagcacgggggaaaagcatccggtggcctcagggagccctgaagaaaccgaagcagaatgtaccagggacacatgcagaaaagtaaagaacaaggatatggaaaactaagcagtgatgaagacctcgaaataattgttgatcaaaagcagctggtgaatgagcaacaagaaagcagacccctcctgagtccctccatcgatgactttctctgtgaaaccaaatcggaagcaatagcaaggccagtaacatccaatacagctgtattgaccactggcttagatctcctcgacctgagtgaaccagtctctcaaacccaaaccaaagccaagaagtcagagccctcatcaaaaacctcatccctcaagaaaaaggccgatggatctgacctcatcagcacggatgctgagcagagaggccagcctctcagagtcccggagacttcatccttagatctagacattcaaacacaactggaaaaatgggacgatgttaagtttcatggagatcgaaataccaagggacatccaatggcagagagaaaatcatcctcatctagaactggatcaaaagagctcttatggtcctcagaacacagatctcaaccagaactgagtggtggaaaaagcgccctcaactctgagtcggcttcagaattggaattagtggctccgactcaggctcgactgaccaaagaacatcgctggggaagcgcattactttctagaaaccactccttagaagaagagtttgaaagggcaaaagcagcagtggagtcagatacagagttttgggataagatgcaagcagaatgggaagaaatggctcggaggaactggatatctgagaaccaagaagcccagaaccaagtaaccatctcggctagtgagaagggatattactttcacactgaaaaccccttcaaggactggcctggagcatttgaagaaggcttaaaaaggctgaaggaaggggatctgccagtcaccatcctgttcatggaagcagcaattcttcaggaccctggagatgcagaggcatggcagttcctcgggataacccaggcggagaatgaaaatgaacaagcagctattgtcgccctccagaggtgcttagaattacagcccaacaacttaaaagctttgatggccttggctgtgagttatactaacactggccatcagcaggatgcctgtgacgctctgaagaattggattaagcaaaatccaaagtacaaataccttgtgaaaagcaagaagggatctccaggcctcacccggcggatgtctaagtccccagttgatagctctgttctggaaggggtgaaggaattatatctggaagctgcccaccaaaatggagatatgatcgacccagacctgcagacaggtctaggggttctgttccacctgagtggagaatttaatagagcaatagatgcatttaacgctgccttaactgttcggccagaggactattcactatggaaccgcctcggggcgaccttggcgaacggagaccgcagcgaggaagccgtggaggcctatacgcgagcactggagattcagccaggattcatccggtccagatacaacctaggaataagctgcatcaacctgggcgcctacagagaagcggtcagcaattttctcactgccctcagtttgcaaagaaagagcaggaatcagcagcaagttcctcatcctgcaatctctgggaatatctgggctgccctcagaattgcgctctctctgatggaccaaccagaactcttccaggcggctaatcttggtgacctggatgtcctcttaagagctttcaacttggatccttgaagaaagaataataccagtactaataatccctgatctgtgtgattgtactgaaaaatcaaaaactattttattatgaatttcaaaaggataaatcaaatattcaaaaggccatggtcatatagcccaaggaaattaattcctgtggacaatgcccagtctctgttcagatccaaaagcacaaaatgttgtatatagagtcaaagtcaggctcaaaagaagaattaagagactcaagacaaaccaagataaagtaactgtgtgttgaatactctttccacaagttgcaagcatattgcaacacatgttctttgggttttttgtctccccttgcagctgatgacacatctgaggaacttgttcatgggaaacatggaaaaagcactgcctcagattgggaaattctgactgtttctgaactgtcttcttttgcaagactgaacatagtttgggccattggtgcatgcacatatattaacttgtgactaaagacagacattgcttaaacctgttccaattttaacttttactgtagccctttgattccagagagggagctttgctggcaaaagcagtttttgcactagaaatttttgctgttcccaatctaaacttttctggtattgtatatatgcactttaatatcttatttatgccttgctggagttttgttttgttgctccaatttttaacttgggggtgaaagatttaagaactcagcctcactagatcaacggaccaaataaacaattcctgaagacagtt

SEQ ID NO: 15391 - DNA, 2309 bp, Homo sapiens
  source 1..2309: mol_type = unassigned DNA
cacttggaaggtggagagattagctttctttttccttctagttcagtcctttggctactgtgaaagaccacgcagaagctgtggacttgctttttgtgcttgacaaaagtgcatagatagaagacagggattcccggctgggaggagggaggagagctgaagatccctgcctgggctggctgagctaagcaaagtgggaagctgagtgcttgaaagaggattatgctcgcactagaaataagcaaaaagtaaagaacaaggatatggaaaactaagcagtgatgaagacctcgaaataattgttgatcaaaagcagctggtgaatgagcaacaagaaagcagacccctcctgagtccctccatcgatgactttctctgtgaaaccaaatcggaagcaatagcaaggccagtaacatccaatacagctgtattgaccactggcttagatctcctcgacctgagtgaaccagtctctcaaacccaaaccaaagccaagaagtcagagccctcatcaaaaacctcatccctcaagaaaaaggccgatggatctgacctcatcagcacggatgctgagcagagaggccagcctctcagagtcccggagacttcatccttagatctagacattcaaacacaactggaaaaatgggacgatgttaagtttcatggagatcgaaataccaagggacatccaatggcagagagaaaatcatcctcatctagaactggatcaaaagagctcttatggtcctcagaacacagatctcaaccagaactgagtggtggaaaaagcgccctcaactctgagtcggcttcagaattggaattagtggctccgactcaggctcgactgaccaaagaacatcgctggggaagcgcattactttctagaaaccactccttagaagaagagtttgaaagggcaaaagcagcagtggagtcagatacagagttttgggataagatgcaagcagaatgggaagaaatggctcggaggaactggatatctgagaaccaagaagcccagaaccaagtaaccatctcggctagtgagaagggatattactttcacactgaaaaccccttcaaggactggcctggagcatttgaagaaggcttaaaaaggctgaaggaaggggatctgccagtcaccatcctgttcatggaagcagcaattcttcaggaccctggagatgcagaggcatggcagttcctcgggataacccaggcggagaatgaaaatgaacaagcagctattgtcgccctccagaggtgcttagaattacagcccaacaacttaaaagctttgatggccttggctgtgagttatactaacactggccatcagcaggatgcctgtgacgctctgaagaattggattaagcaaaatccaaagtacaaataccttgtgaaaagcaagaagggatctccaggcctcacccggcggatgtctaagtccccagttgatagctctgttctggaaggggtgaaggaattatatctggaagctgcccaccaaaatggagatatgatcgacccagacctgcagacaggtctaggggttctgttccacctgagtggagaatttaatagagcaatagatgcatttaacgctgccttaactgttcggccagaggactattcactatggaaccgcctcggggcgaccttggcgaacggagaccgcagcgaggaagccgtggaggcctatacgcgagcactggagattcagccaggattcatccggtccagatacaacctaggaataagctgcatcaacctgggcgcctacagagaagcggtcagcaattttctcactgccctcagtttgcaaagaaagagcaggaatcagcagcaagttcctcatcctgcaatctctgggaatatctgggctgccctcagaattgcgctctctctgatggaccaaccagaactcttccaggcggctaatcttggtgacctggatgtcctcttaagagctttcaacttggatccttgaagaaagaataataccagtactaataatccctgatctgtgtgattgtactgaaaaatcaaaaactattttattatgaatttcaaaaggataaatcaaatattcaaaaggccatggtcatatagcccaaggaaattaattcctgtggacaatgcccagtctctgttcagatccaaaagcacaaaatgttgtatatagagtcaaagtcaggctcaaaagaagaattaagagactcaagacaaaccaagataaagtaactgtgtgttgaatactctttccacaagttgcaagcatattgcaacacatgttcttt

SEQ ID NO: 15392 - DNA, 2361 bp, Homo sapiens
  source 1..2361: mol_type = unassigned DNA
ctttggctactgtgaaagaccacgcagaagctgtggacttgctttttgtgcttgacaaaagtgcatagatagaagacagggattcccggctgggaggagggaggagagctgaagatccctgcctgggctggctgagctaagcaaagtgggaagctgagtgcttgaaagaggattatgctcgcactagaaataagcaaaaagtaaagaacaaggatatggaaaactaagcagtgatgaagacctcgaaataattgttgatcaaaagcagggaaaaggctctagggcggcagataaggctgttgccatggtgatgaaggagataccgagggaggagtctgctgaagaaaagcccctccttactatgacatcacagctggtgaatgagcaacaagaaagcagacccctcctgagtccctccatcgatgactttctctgtgaaaccaaatcggaagcaatagcaaggccagtaacatccaatacagctgtattgaccactggcttagatctcctcgacctgagtgaaccagtctctcaaacccaaaccaaagccaagaagtcagagccctcatcaaaaacctcatccctcaagaaaaaggccgatggatctgacctcatcagcacggatgctgagcagagaggccagcctctcagagtcccggagacttcatccttagatctagacattcaaacacaactggaaaaatgggacgatgttaagtttcatggagatcgaaataccaagggacatccaatggcagagagaaaatcatcctcatctagaactggatcaaaagagctcttatggtcctcagaacacagatctcaaccagaactgagtggtggaaaaagcgccctcaactctgagtcggcttcagaattggaattagtggctccgactcaggctcgactgaccaaagaacatcgctggggaagcgcattactttctagaaaccactccttagaagaagagtttgaaagggcaaaagcagcagtggagtcagatacagagttttgggataagatgcaagcagaatgggaagaaatggctcggaggaactggatatctgagaaccaagaagcccagaaccaagtaaccatctcggctagtgagaagggatattactttcacactgaaaaccccttcaaggactggcctggagcatttgaagaaggcttaaaaaggctgaaggaaggggatctgccagtcaccatcctgttcatggaagcagcaattcttcaggaccctggagatgcagaggcatggcagttcctcgggataacccaggcggagaatgaaaatgaacaagcagctattgtcgccctccagaggtgcttagaattacagcccaacaacttaaaagctttgatggccttggctgtgagttatactaacactggccatcagcaggatgcctgtgacgctctgaagaattggattaagcaaaatccaaagtacaaataccttgtgaaaagcaagaagggatctccaggcctcacccggcggatgtctaagtccccagttgatagctctgttctggaaggggtgaaggaattatatctggaagctgcccaccaaaatggagatatgatcgacccagacctgcagacaggtctaggggttctgttccacctgagtggagaatttaatagagcaatagatgcatttaacgctgccttaactgttcggccagaggactattcactatggaaccgcctcggggcgaccttggcgaacggagaccgcagcgaggaagccgtggaggcctatacgcgagcactggagattcagccaggattcatccggtccagatacaacctaggaataagctgcatcaacctgggcgcctacagagaagcggtcagcaattttctcactgccctcagtttgcaaagaaagagcaggaatcagcagcaagttcctcatcctgcaatctctgggaatatctgggctgccctcagaattgcgctctctctgatggaccaaccagaactcttccaggcggctaatcttggtgacctggatgtcctcttaagagctttcaacttggatccttgaagaaagaataataccagtactaataatccctgatctgtgtgattgtactgaaaaatcaaaaactattttattatgaatttcaaaaggataaatcaaatattcaaaaggccatggtcatatagcccaaggaaattaattcctgtggacaatgcccagtctctgttcagatccaaaagcacaaaatgttgtatatagagtcaaagtcaggctcaaaagaagaattaagagactcaagacaaaccaagataaagtaactgtgtgttgaatactctttccacaagttgcaagcatattgcaacacatgt

SEQ ID NO: 15393 - DNA, 1739 bp, Homo sapiens
  source 1..1739: mol_type = unassigned DNA
agtgctaaccagaacatgtcatctttgagtctgaagccactggtccaggtctcagtaggagcttttgtccagctggtgaatgagcaacaagaaagcagacccctcctgagtccctccatcgatgactttctctgtgaaaccaaatcggaagcaatagcaaggccagtaacatccaatacagctgacattcaaacacaactggaaaaatgggacgatgttaagtttcatggagatcgaaataccaagggacatccaatggcagagagaaaatcatcctcatctagaactggatcaaaagagctcttatggtcctcagaacacagatctcaaccagaactgagtggtggaaaaagcgccctcaactctgagtcggcttcagaattggaattagtggctccgactcaggctcgactgaccaaagaacatcgctggggaagcgcattactttctagaaaccactccttagaagaagagtttgaaagggcaaaagcagcagtggagtcagatacagagttttgggataagatgcaagcagaatgggaagaaatggctcggaggaactggatatctgagaaccaagaagcccagaaccaagtaaccatctcggctagtgagaagggatattactttcacactgaaaaccccttcaaggactggcctggagcatttgaagaaggcttaaaaaggctgaaggaaggggatctgccagtcaccatcctgttcatggaagcagcaattcttcaggaccctggagatgcagaggcatggcagttcctcgggataacccaggcggagaatgaaaatgaacaagcagctattgtcgccctccagaggtgcttagaattacagcccaacaacttaaaagctttgatggccttggctgtgagttatactaacactggccatcagcaggatgcctgtgacgctctgaagaattggattaagcaaaatccaaagtacaaataccttgtgaaaagcaagaagggatctccaggcctcacccggcggatgtctaagtccccagttgatagctctgttctggaaggggtgaaggaattatatctggaagctgcccaccaaaatggagatatgatcgacccagacctgcagacaggtctaggggttctgttccacctgagtggagaatttaatagagcaatagatgcatttaacgctgccttaactgttcggccagaggactattcactatggaaccgcctcggggcgaccttggcgaacggagaccgcagcgaggaagccgtggaggcctatacgcgagcactggagattcagccaggattcatccggtccagatacaacctaggaataagctgcatcaacctgggcgcctacagagaagcggtcagcaattttctcactgccctcagtttgcaaagaaagagcaggaatcagcagcaagttcctcatcctgcaatctctgggaatatctgggctgccctcagaattgcgctctctctgatggaccaaccagaactcttccaggcggctaatcttggtgacctggatgtcctcttaagagctttcaacttggatccttgaagaaagaataataccagtactaataatccctgatctgtgtgattgtactgaaaaatcaaaaactattttattatgaatttcaaaaggataaatcaaatattcaaaaggccatggtcatatagcccaaggaaattaattcctgtggacaatgcccagtctctgttcagatccaaaagcac

SEQ ID NO: 15394 - DNA, 2235 bp, Homo sapiens
  source 1..2235: mol_type = unassigned DNA
gagagacatgaggcaacctggcaggaagcgagaaagagttcggcgaagaaggagtgagttctagagacgccccgcgagcaggacccgcgcctgcaggagagcctggccgacccggctcctcgccttctctgcgcgctctcccgcgtccgctttcagcaccccgagcggagaacagttcccggcagcccgcagcgctgccgagtggccgccggccggccgagtacccggagctccagggggctcaggagcaccctctgagaacccgctgtgcacccaccttttcccctcttttggtgggcaagtaagcacgggggaaaagcatccggtggcctcagggagccctgaagaaaccgaagcagaatgtaccagggacacatgcagctggtgaatgagcaacaagaaagcagacccctcctgagtccctccatcgatgactttctctgtgaaaccaaatcggaagcaatagcaaggccagtaacatccaatacagctgtattgaccactggcttagatctcctcgacctgagtgaaccagtctctcaaacccaaaccaaagccaagaagtcagagccctcatcaaaaacctcatccctcaagaaaaaggccgatggatctgacctcatcagcacggatgctgagcagagaggccagcctctcagagtcccggagacttcatccttagatctagacattcaaacacaactggaaaaatgggacgatgttaagtttcatggagatcgaaataccaagggacatccaatggcagagagaaaatcatcctcatctagaactggatcaaaagagctcttatggtcctcagaacacagatctcaaccagaactgagtggtggaaaaagcgccctcaactctgagtcggcttcagaattggaattagtggctccgactcaggctcgactgaccaaagaacatcgctggggaagcgcattactttctagaaaccactccttagaagaagagtttgaaagggcaaaagcagcagtggagtcagatacagagttttgggataagatgcaagcagaatgggaagaaatggctcggaggaactggatatctgagaaccaagaagcccagaaccaagtaaccatctcggctagtgagaagggatattactttcacactgaaaaccccttcaaggactggcctggagcatttgaagaaggcttaaaaaggctgaaggaaggggatctgccagtcaccatcctgttcatggaagcagcaattcttcaggaccctggagatgcagaggcatggcagttcctcgggataacccaggcggagaatgaaaatgaacaagcagctattgtcgccctccagaggtgcttagaattacagcccaacaacttaaaagctttgatggccttggctgtgagttatactaacactggccatcagcaggatgcctgtgacgctctgaagaattggattaagcaaaatccaaagtacaaataccttgtgaaaagcaagaagggatctccaggcctcacccggcggatgtctaagtccccagttgatagctctgttctggaaggggtgaaggaattatatctggaagctgcccaccaaaatggagatatgatcgacccagacctgcagacaggtctaggggttctgttccacctgagtggagaatttaatagagcaatagatgcatttaacgctgccttaactgttcggccagaggactattcactatggaaccgcctcggggcgaccttggcgaacggagaccgcagcgaggaagccgtggaggcctatacgcgagcactggagattcagccaggattcatccggtccagatacaacctaggaataagctgcatcaacctgggcgcctacagagaagcggtcagcaattttctcactgccctcagtttgcaaagaaagagcaggaatcagcagcaagttcctcatcctgcaatctctgggaatatctgggctgccctcagaattgcgctctctctgatggaccaaccagaactcttccaggcggctaatcttggtgacctggatgtcctcttaagagctttcaacttggatccttgaagaaagaataataccagtactaataatccctgatctgtgtgattgtactgaaaaatcaaaaactattttattatgaatttcaaaaggataaatcaaatattcaaaaggccatggtcatatagcccaaggaaattaattcctgtggacaatgcccagtctctgttcagatcc

SEQ ID NO: 15395 - DNA, 1817 bp, Homo sapiens
  source 1..1817: mol_type = unassigned DNA
gagctaagcaaagtgggaagctgagtgcttgaaagaggattatgctcgcactagaaataagcaaaaagtaaagaacaaggatatggaaaactaagcagtgatgaagacctcgaaataattgttgatcaaaagcagggaaaaggctctagggcggcagataaggctgttgccatggtgatgaaggagataccgagggaggagtctgctgaagaaaagcccctccttactatgacatcacagctggtgaatgagcaacaagaaagcagacccctcctgagtccctccatcgatgactttctctgtgaaaccaaatcggaagcaatagcaaggccagtaacatccaatacagctgacattcaaacacaactggaaaaatgggacgatgttaagtttcatggagatcgaaataccaagggacatccaatggcagagagaaaatcatcctcatctagaactggatcaaaagagctcttatggtcctcagaacacagatctcaaccagaactgagtggtggaaaaagcgccctcaactctgagtcggcttcagaattggaattagtggctccgactcaggctcgactgaccaaagaacatcgctggggaagcgcattactttctagaaaccactccttagaagaagagtttgaaagggcaaaagcagcagtggagtcagatacagagttttgggataagatgcaagcagaatgggaagaaatggctcggaggaactggatatctgagaaccaagaagcccagaaccaagtaaccatctcggctagtgagaagggatattactttcacactgaaaaccccttcaaggactggcctggagcatttgaagaaggcttaaaaaggctgaaggaaggggatctgccagtcaccatcctgttcatggaagcagcaattcttcaggaccctggagatgcagaggcatggcagttcctcgggataacccaggcggagaatgaaaatgaacaagcagctattgtcgccctccagaggtgcttagaattacagcccaacaacttaaaagctttgatggccttggctgtgagttatactaacactggccatcagcaggatgcctgtgacgctctgaagaattggattaagcaaaatccaaagtacaaataccttgtgaaaagcaagaagggatctccaggcctcacccggcggatgtctaagtccccagttgatagctctgttctggaaggggtgaaggaattatatctggaagctgcccaccaaaatggagatatgatcgacccagacctgcagacaggtctaggggttctgttccacctgagtggagaatttaatagagcaatagatgcatttaacgctgccttaactgttcggccagaggactattcactatggaaccgcctcggggcgaccttggcgaacggagaccgcagcgaggaagccgtggaggcctatacgcgagcactggagattcagccaggattcatccggtccagatacaacctaggaataagctgcatcaacctgggcgcctacagagaagcggtcagcaattttctcactgccctcagtttgcaaagaaagagcaggaatcagcagcaagttcctcatcctgcaatctctgggaatatctgggctgccctcagaattgcgctctctctgatggaccaaccagaactcttccaggcggctaatcttggtgacctggatgtcctcttaagagctttcaacttggatccttgaagaaagaataataccagtactaataatccctgatctgtgtgattgtactgaaaaatcaaaaactattttattatgaatttcaaaaggat

SEQ ID NO: 15396 - DNA, 2147 bp, Homo sapiens
  source 1..2147: mol_type = unassigned DNA
aagagttcggcgaagaaggagtgagttctagagacgccccgcgagcaggacccgcgcctgcaggagagcctggccgacccggctcctcgccttctctgcgcgctctcccgcgtccgctttcagcaccccgagcggagaacagttcccggcagcccgcagcgctgccgagtggccgccggccggccgagtacccggagctccagggggctcaggagcaccctctgagaacccgctgtgcacccaccttttcccctcttttggtgggcaagtaagcacgggggaaaagcatccggtggcctcagggagccctgaagaaaccgaagcagaatgtaccagggacacatgcagggaaaaggctctagggcggcagataaggctgttgccatggtgatgaaggagataccgagggaggagtctgctgaagaaaagcccctccttactatgacatcacagctggtgaatgagcaacaagaaagcagacccctcctgagtccctccatcgatgactttctctgtgaaaccaaatcggaagcaatagcaaggccagtaacatccaatacagctgtattgaccactggcttagatctcctcgacctgagtgaaccagtctctcaaacccaaaccaaagccaagaagtcagagccctcatcaaaaacctcatccctcaagaaaaaggccgatggatctgacctcatcagcacggatgctgagcagagaggccagcctctcagagtcccggagacttcatccttagatctagacattcaaacacaactggaaaaatgggacgatgttaagtttcatggagatcgaaataccaagggacatccaatggcagagagaaaatcatcctcatctagaactggatcaaaagagctcttatggtcctcagaacacagatctcaaccagaactgagtggtggaaaaagcgccctcaactctgagtcggcttcagaattggaattagtggctccgactcaggctcgactgaccaaagaacatcgctggggaagcgcattactttctagaaaccactccttagaagaagagtttgaaagggcaaaagcagcagtggagtcagatacagagttttgggataagatgcaagcagaatgggaagaaatggctcggaggaactggatatctgagaaccaagaagcccagaaccaagtaaccatctcggctagtgagaagggatattactttcacactgaaaaccccttcaaggactggcctggagcatttgaagaaggcttaaaaaggctgaaggaaggggatctgccagtcaccatcctgttcatggaagcagcaattcttcaggaccctggagatgcagaggcatggcagttcctcgggataacccaggcggagaatgaaaatgaacaagcagctattgtcgccctccagaggtgcttagaattacagcccaacaacttaaaagctttgatggccttggctgtgagttatactaacactggccatcagcaggatgcctgtgacgctctgaagaattggattaagcaaaatccaaagtacaaataccttgtgaaaagcaagaagggatctccaggcctcacccggcggatgtctaagtccccagttgatagctctgttctggaaggggtgaaggaattatatctggaagctgcccaccaaaatggagatatgatcgacccagacctgcagacaggtctaggggttctgttccacctgagtggagaatttaatagagcaatagatgcatttaacgctgccttaactgttcggccagaggactattcactatggaaccgcctcggggcgaccttggcgaacggagaccgcagcgaggaagccgtggaggcctatacgcgagcactggagattcagccaggattcatccggtccagatacaacctaggaataagctgcatcaacctgggcgcctacagagaagcggtcagcaattttctcactgccctcagtttgcaaagaaagagcaggaatcagcagcaagttcctcatcctgcaatctctgggaatatctgggctgccctcagaattgcgctctctctgatggaccaaccagaactcttccaggcggctaatcttggtgacctggatgtcctcttaagagctttcaacttggatccttgaagaaagaataa

SEQ ID NO: 15397 - DNA, 543 bp, Homo sapiens
  source 1..543: mol_type = unassigned DNA
atcagccattttattcctccccagaagcctcttttatctattagggggggaagaaaaacacagatgatgtggcatgttcttaaatccatctccattcatttttcctgtctcccagtcagatacagagttttgggataagatgcaagcagaatgggaagaaatggctcggaggaactggatatctgagaaccaagaagcccagaaccaagtaaccatctcggctagtgagaagggatattactttcacactgaaaaccccttcaaggactggcctggagcatttgaagaaggcttaaaaaggctgaaggaaggggatctgccagtcaccatcctgttcatggaagcagcaattcttcaggaccctggagatgcagaggcatggcagttcctcgggataacccaggcggagaatgaaaatgaacaagcagctattgtcgccctccagaggtgcttagaattacagcccaacaacttaaaagctttgatggccttggctgtgagttatactaacactggccatcagcaggatgcctgtgacgctct

SEQ ID NO: 15398 - DNA, 545 bp, Homo sapiens
  source 1..545: mol_type = unassigned DNA
agcaccagcagaccaagtttgccataagcttacaagtgtgggcttggaaggcagatgaggttcggatcctgtgagtcctagctttgggaccataaccctccaggctctgttttctgctggcacagtgcttgacacagatcagatacagagttttgggataagatgcaagcagaatgggaagaaatggctcggaggaactggatatctgagaaccaagaagcccagaaccaagtaaccatctcggctagtgagaagggatattactttcacactgaaaaccccttcaaggactggcctggagcatttgaagaaggcttaaaaaggctgaaggaaggggatctgccagtcaccatcctgttcatggaagcagcaattcttcaggaccctggagatgcagaggcatggcagttcctcgggataacccaggcggagaatgaaaatgaacaagcagctattgtcgccctccagaggtgcttagaattacagcccaacaacttaaaagctttgatggccttggctgtgagttatactaacactggccatca

SEQ ID NO: 15399 - DNA, 472 bp, Homo sapiens
  source 1..472: mol_type = unassigned DNA
actatacacaagtggcttcttccctgctatgcaccagtggcatgcacaaaccaaaaagaagcagaatgatctgaaaaactggtgaatgagcaacaagaaagcagacccctcctgagtccctccatcgatgactttctctgtgaaaccaaatcggaagcaatagcaaggccagtaacatccaatacagctgacattcaaacacaactggaaaaatgggacgatgttaagtttcatggagatcgaaataccaagggacatccaatggcagagagaaaatcatcctcatctagaactggatcaaaagagctcttatggtcctcagaacacagatctcaaccagaactgagtggtggaaaaagcgccctcaactctgagtcggcttcagaattggaattagtggctccgactcaggctcgactgaccaaagaacatcgctggggaagcgcattactttctagaaaccactccttag

SEQ ID NO: 15400 - DNA, 563 bp, Homo sapiens
  source 1..563: mol_type = unassigned DNA
agaggaattaagccaaacatactctagtggagctgtctatattacaccaaacaaattgaataatgctgaagtgttggccagctggtgaatgagcaacaagaaagcagacccctcctgagtccctccatcgatgactttctctgtgaaaccaaatcggaagcaatagcaaggccagtaacatccaatacagctgtattgaccactggcttagatctcctcgacctgagtgaaccagtctctcaaacccaaaccaaagccaagaagtcagagccctcatcaaaaacctcatccctcaagaaaaaggccgatggatctgacctcatcagcacggatgctgagcagagaggccagcctctcagagtcccggagacttcatccttagatctagacattcaaacacaactggaaaaatgggacgatgttaagtttcatggagatcgaaataccaagggacatccaatggcagagagaaaatcatcctcatctagaactggatcaaaagagctcttatggtcctcagaacacagatctcaaccagaactgagtggtggaaaaagcgccct

SEQ ID NO: 15401 - DNA, 584 bp, Homo sapiens
  source 1..584: mol_type = unassigned DNA
gatgtctgacagtgaaatggatggaaggacccacattccatctctacttaatgcccttttgtccagaaaccgggtcatgcaaatgagctacttgaaaagtaaagaacaaggatatggaaaactaagcagtgatgaagacctcgaaataattgttgatcaaaagcagctggtgaatgagcaacaagaaagcagacccctcctgagtccctccatcgatgactttctctgtgaaaccaaatcggaagcaatagcaaggccagtaacatccaatacagctgtattgaccactggcttagatctcctcgacctgagtgaaccagtctctcaaacccaaaccaaagccaagaagtcagagccctcatcaaaaacctcatccctcaagaaaaaggccgatggatctgacctcatcagcacggatgctgagcagagaggccagcctctcagagtcccggagacttcatccttagatctagacattcaaacacaactggaaaaatgggacgatgttaagtttcatggagatcgaaataccaagggacatccaatggcagagagaaaatcatcctcatctagaactggatcaa

SEQ ID NO: 15402 - DNA, 874 bp, Homo sapiens
  source 1..874: mol_type = unassigned DNA
ctttggctactgtgaaagaccacgcagaagctgtggacttgctttttgtgcttgacaaaagtgcatagatagaagacagggattcccggctgggaggagggaggagagctgaagatccctgcctgggctggctgagctaagcaaagtgggaagctgagtgcttgaaagaggattatgctcgcactagaaataagcaatctgtggttctctggtcagcaagttctggcaaggaagccactgccagtggcataaagaattctgggatgtctgacagtgaaatggatggaaggacccacattccatctctacttaatgcccttttgtccagaaaccgggtcatgcaaatgagctacttgaaaagtaaagaacaaggatatggaaaactaagcagtgatgaagacctcgaaataattgttgatcaaaagcagggaaaaggctctagggcggcagataaggctgttgccatggtgatgaaggagataccgagggaggagtctgctgaagaaaagcccctccttactatgacatcacagctggtgaatgagcaacaagaaagcagacccctcctgagtccctccatcgatgactttctctgtgaaaccaaatcggaagcaatagcaaggccagtaacatccaatacagctgtattgaccactggcttagatctcctcgacctgagtgaaccagtctctcaaacccaaaccaaagccaagaagtcagagccctcatcaaaaacctcatccctcaagaaaaaggccgatggatctgacctcatcagcacggatgctgagcagagaggccagcctctcagagtcccggagacttcatccttagatctagacattcaaacacaactggaaaaatgggacgatgt

SEQ ID NO: 15403 - DNA, 601 bp, Homo sapiens
  source 1..601: mol_type = unassigned DNA
ggaggagggaggagagctgaagatccctgcctgggctggctgagctaagcaaagtgggaagctgagtgcttgaaagaggattatgctcgcactagaaataagcaatctgtggttctctggtcagcaagttctggcaaggaagccactgccagtggcataaagaattctgggatgtctgacagtgaaatggatggaaggacccacattccatctctacttaatgcccttttgtccagaaaccgggtcatgcaaatgagctacttgtaaagaacaaggatatggaaaactaagcagtgatgaagacctcgaaataattgttgatcaaaagcagctggtgaatgagcaacaagaaagcagacccctcctgagtccctccatcgatgactttctctgtgaaaccaaatcggaagcaatagcaaggccagtaacatccaatacagctgtattgaccactggcttagatctcctcgacctgagtgaaccagtctctcaaacccaaaccaaagccaagaagtcagagccctcatcaaaaacctcatccctcaagaaaaaggccgatggatctgacctcatcagcacggatgctgagcagagaggccag

SEQ ID NO: 15404 - DNA, 587 bp, Homo sapiens
  source 1..587: mol_type = unassigned DNA
gctcggcagctgcggcggcggctggtgtaggcgctcacgtcagggctgggaggagggggttcgcagctcagagagagagagacatgaggcaacctggcaggaagcgagaaagagttcggcgaagaaggagtgagttctagagacgccccgcgagcaggacccgcgcctgcaggagagcctggccgacccggctcctcgccttctctgcgcgctctcccgcgtccgctttcagcaccccgagcggagaacagttcccggcagcccgcagcgctgccgagtggccgccggccggccgagtacccggagctccagggggctcaggagcaccctctgagaacccgctgtgcacccaccttttcccctcttttggtgggcaagtaagcacgggggaaaagcatccggtggcctcagggagccctgaagaaaccgaagcagaatgtaccagggacacatgcagtaaagaacaaggatatggaaaactaagcagtgatgaagacctcgaaataattgttgatcaaaagcaggtagtaggtgtaaccttgaagaaaaagtggcactgtcttcaaaaaagtgacctgaccctggct

SEQ ID NO: 15405 - DNA, 8540 bp, Homo sapiens
  source 1..8540: mol_type = unassigned DNA
aacattagaatatcttgtaataaataataagttaaagatctctcctgacacagtcattgttgatttcactgttatagggaaaaggctctagggcggcagataaggctgttgccatggtgatgaaggagataccgagggaggagtctgctgaagaaaagcccctccttactatgacatcacagctggtgaatgagcaacaagaaagcagacccctcctgagtccctccatcgatgactttctctgtgaaaccaaatcggaagcaatagcaaggccagtaacatccaatacagctgacattcaaacacaactggaaaaatgggacgatgttaagtttcatggagatcgaaataccaagggacatccaatggcagagagaaaatcatcctcatctagaactggatcaaaagagctcttatggtcctcagaacacagatctcaaccagaactgagtggtggaaaaagcgccctcaactctgagtcggcttcagaattggaattagtggctccgactcaggctcgactgaccaaagaacatcgctggggaagcgcattactttctagaaaccactccttagaagaagagtttgaaagggcaaaagcagcagtggagtcagatacagagttttgggataagatgcaagcagaatgggaagaaatggctcggaggaactggatatctgagaaccaagaagcccagaaccaagtaaccatctcggctagtgagaagggatattactttcacactgaaaaccccttcaaggactggcctggagcatttgaagaaggcttaaaaaggctgaaggaaggggatctgccagtcaccatcctgttcatggaagcagcaattcttcaggaccctggagatgcagaggcatggcagttcctcgggataacccaggcggagaatgaaaatgaacaagcagctattgtcgccctccagaggtgcttagaattacagcccaacaacttaaaagctttgatggccttggctgtgagttatactaacactggccatcagcaggatgcctgtgacgctctgaagaattggattaagcaaaatccaaagtacaaataccttgtgaaaagcaagaagggatctccaggcctcacccggcggatgtctaagtccccagttgatagctctgttctggaaggggtgaaggaattatatctggaagctgcccaccaaaatggagatatgatcgacccagacctgcagacaggtctaggggttctgttccacctgagtggagaatttaatagagcaatagatgcatttaacgctgccttaactgttcggccagaggactattcactatggaaccgcctcggggcgaccttggcgaacggagaccgcagcgaggaagccgtggaggcctatacgcgagcactggagattcagccaggattcatccggtccagatacaacctaggaataagctgcatcaacctgggcgcctacagagaagcggtcagcaattttctcactgccctcagtttgcaaagaaagagcaggaatcagcagcaagttcctcatcctgcaatctctgggaatatctgggctgccctcagaattgcgctctctctgatggaccaaccagaactcttccaggcggctaatcttggtgacctggatgtcctcttaagagctttcaacttggatccttgaagaaagaataataccagtactaataatccctgatctgtgtgattgtactgaaaaatcaaaaactattttattatgaatttcaaaaggataaatcaaatattcaaaaggccatggtcatatagcccaaggaaattaattcctgtggacaatgcccagtctctgttcagatccaaaagcacaaaatgttgtatatagagtcaaagtcaggctcaaaagaagaattaagagactcaagacaaaccaagataaagtaactgtgtgttgaatactctttccacaagttgcaagcatattgcaacacatgttctttgggttttttgtctccccttgcagctgatgacacatctgaggaacttgttcatgggaaacatggaaaaagcactgcctcagattgggaaattctgactgtttctgaactgtcttcttttgcaagactgaacatagtttgggccattggtgcatgcacatatattaacttgtgactaaagacagacattgcttaaacctgttccaattttaacttttactgtagccctttgattccagagagggagctttgctggcaaaagcagtttttgcactagaaatttttgctgttcccaatctaaacttttctggtattgtatatatgcactttaatatcttatttatgccttgctggagttttgttttgttgctccaatttttaacttgggggtgaaagatttaagaactcagcctcactagatcaacggaccaaataaacaattcctgaagacagtttttcatagtgtaggattttgaagaagtgtttttcttaaagcagatacgatgacataaggcgtaaatatggcaaacagatcttttcattcacgtgctttctgggtctgtatgaacataagtaagacacaaggtactgtctcttcatgcattctctgcaggaagaaagtttgatggtatcgtgatttctattgagttcaaattaacttgcttaagtgtcatactttactggctttgccctgcacaccaatattccttttaaaccataaatattttaaataatatttcttaagagtgataaataacattttttcctaaaaattatgttttcttagtttcataataatctgcactgttcatccccttgcattctaagtgatagaagagcaacactttcaaaccaaatctcactgaatgccagtgatttcatatgaaagatgcatgcctctttggctctttgaacatttagcaagtattgggaattttctattagcagtggtgttttaattggttgaattccacttagttctccacagtgttttgtatgtgtttggggcttggtgattattttgaaagatacattttttaaagaattaggaacattttttgcaaaatgctaatcagaatataattttcccaatgtcaggtatagaagttatcccattcttctttacctggtctccttccttcgtctagaaccttccccacagtagctaatcctaacaactttttatttatgttctttgataataatagctcatcccgctcatgattatagctacccacaaaaaataaaacaacaacaacaaaaaagactccacagaattgggatcaaaacagtctaattggctggggaataagcttctactgaggagtaaatgtgcacacgtgcttatcaattgaatgcgaggtacaggaataaaatcctctcctctgttacatctgaagtccttgggttgtgagagggcctcaagttaacagaaaccacaagtccttgaggcttacatatgttataacctattctagtttataaagacaaaaagctgaggccactgtgaggagtgccaggttttgatagtcattgtcaaagttgacttgggccaggtggtagctccagctggtcagcagaaggcagaggcattcaggcactcatcatgggtagcagcgaccacccagtctcagaccgtgcttctctacagtctcagcagcaaagtaaagctcaacaatgctttcaagaatggtattgtaagaattgtagaattcgagaaacccagtctggtaaggactcttggggccagcctccaagccatggcagggcctgcttgaatatgcctgattaagcatcctttccttccctgctccttcctcctgccatctctgtaccttgaccagaaagtcggcatgaatagttcatggacaaaggattgaatagcctctgaacaaaggattcaaagcaaactttgtaagtgttctgtgatgccattctatactttgagcagcagctgaatctgcagcctggatttaaagcctgaaactagtataaatgtcaaataattaatttgttgctaaatggtggcaaattttgtggcccaagttttattttgctattggaacacaaactccaaggagctgttttagggaagactaaacaatcttccattcttaccattatttggcaatttgcagagcatttagtagtactttctctagtgtatgtagtatctgtcagatctaagatttttataggctgtcaagaagtccagaattacggcccaagaggaaaagagttgcatttttcaataatattttttataaaattaagttaaaaccattattaaaacatgagtgacaggccaggtgcggtggctcacgcctgtaatcctagcactttgggaggcagaggcgggcagaccacgaggtcaggagttcgagaccagcctgaccaacatggtgaaaccccgtctttattaagaatacaaaaattagccgggtgtagtggtatgcacctgtaataccagctactcaggaggctgaggcaggagaatcacttgaaccagggaggcggaggttgcagtgagccgagattgcaccgctgcactccagtctgggtgacagagcgagactccgtctcaaaaaaaacaaaaaagtgacagtttataggaatagagcaccaccaagaaatcagtagcaagactttagaacagtctttttgtataaatcatatacagtaaatgttttgtttcttagaagtgcatctactttattttttggcagaacaatttttggcatcttatcttcatggcatgaaattgtcatttaaattactctttccgtttgaaaggggagggtatccttatttcccttctgaggtactctgagaaggctttgagtttcctttttcatgtattaatgtataacagcctaacagctcctagaagagggtattcttactagaatggctacatacgggtgacttcagttacatacaggtgacttccagggactgacttcgcctgtagattggatgaaaataaagagaaagccagtgattattgctgagtttcaaaatataaccatttctagtaggctacttctacatgctgttgtaccttcctggtgaggaggagacagagggataggggagaggaggaggaataaaaatccctctcactgggccaatcatactgattcattccctttacttcctccaaaactcactccccatgactcctgaaaaatgggtagatctcgtccaccaggaaattttaatagaatactatgcaccgtgctttctcagtcaatctggattcctactagaacagaaaagtaaggaaacataactgggtaggaatgtccacttacgtttcacaaactcacttttagagtttcatgccactttcctcattcttctctttaagatactattatattgaacgtgggacccatgtctaaatacttgtatagataaatatttcttgtatattcttcccatacaagcaagacttgaatacagttgtagctagtcccacttttataataaaagcttccaaactctttatcataaactttgtctgtgagcttgggaatacagagaaagcaagttgatcattctgagacccttcctcatttgccctgaatcagttccccaagattggactgtactttaagctagttgttgtagcagtggtggttgttgttttatatcttgagatacttctagaacattctagaaacagggtattctaaaggcttactttatatgccatcctttttgaaccctcttattttagaaattattacacgtgcacacttatgatttcaaccttgtaaaataatttcaaattcatttcgtatccacattttactgcagtttccctatcatcatctcaatagttatagaactggttgaaattaaactgttttgaactaagaagtagatatatatatatatatatatatatatttttttttttttttttaaagagtgttcatagataaactctggcataaagtttgtaaaaaagcaattttttaaaagcaaaacgtataacctcaggtacaaaaatattgcatgcattagtattgcaaatttgcctactcaaatattaaccaaagcatgcaagataacttgactgaatttaaatttacacagtgcatgattaagtctcataggttagcctgttgttccttgcctctatacaagggagcatttttatgaactttgtgttacagtttttctatttgcttttcttatcctatccttgagattgttttcatgctatcacactgaactttacagatattcacacatctggtttctacagtgttaccagtgccaaactaatcctctgaagaatctgggacatctaaacactttttcaaaaaccagttgaggcacaacagatcccaaacttaaacaaatccaagtgtctgaatgctactaaactaaatcatgttgactgcctcagcacataaaggtttcgactttaaattcttaataatgcatttcaaaatttttctaaaagtttgggaataaattagaaaaactgatattctaaataaggcgaggaggttggggtaatgtcaggcacatcaaaatcatcacacaacgaagtagatatggggccttaattttcataaatgtcacatagcaagtgtgtggggtatcacaacattgttctgatacagccctgtttgtatggtagttgagctgcttgggctaaatgtcccttgagaaactggacttgatcaacaggtctaaaaacactgatatttagggagtgatgaggtgatttcacggtcactcagaaccaactctgaaatcttctcactgccttttcccataacccctattttatgaggagaccagaaagggagagagcaaagctcagtgagaccatgtggtcttacattagtaacagctttgttactcactccatataccccggtaccctcacacacataccatgaactcaaagacagaattctacacataacacacatagcaaagacgattgtggggaggcattaaacagttaagaggaaaaaaaaaaacacagaaaattaaactgtgaggtttaacaacctctcatgtggtattttgccttgaacgaagtttccactacctgcagcttctgcagaaataccaaaataacacagtctagagacaagtgtcccaatgtcagaactgttttctcaggaccttctctataagagaaaactaacttgcaatgctgcagaatgtcagagcaaaaccctgatgagctccgtgggatacttaatagaagcctgcactcaaaataatattaagatggaaacaacaacaacaattaggcagttctttgctcaactataaaatgtgtatcattcattgggggagggggaggggtcgtgttctttggatttcttggaaagggaaatggtataacacaaaaagactaagaggtatacacactcagctcggtaattcgagcatttggcattttcactgagatatatagcatttctgcatggataccatacaagaattctgccatgtgagaaatgtgttcatgatggactacattaccagtagttaagggaaatacagcaaacttaagtttttaccaacttcctttcatgttccctatatatcatctaacccaaactttcaatttacattgcccaaatttgtttacattggttgaaaaaaaactgattaatttattaaactttttacaaactgtaacaaacatttaactatttagaaaagacatttctacatattttatatatctatgaatattgcatctctaatctaatctaaaaatgttgttttgagacaattcttctgtgatgcttcctcctcatgctcataaatgtttaaagtcttgggatttcattttcaggctgaaatagataacaagaaaaaaatttaagtttaaatgtttacattgcgttactaaattaataccaattcaaattaagtgacctatagtaaattaatggcaatgggggggaggggattttaaagtgattggcatattatgtgatactgtatcagtgatttagtgaaataatatgtatcatagcacaactctgttgggtattaaggcttcatcttagtatttccctgcgttgctctttgaaataaaattactaccataaaaataacctcttatcatattgatgtgtttaatttactcagttggcttctaatttgcgtaacaagattaaggtagtatttttgtactattattggaagcatgccttccctttttcacattattaaattgtatttatatttgtgcaattttaaactatgttttcaaataaactttgtctgcggcttcgaggtcttttcaggaatctttcaaaatgggatttggggatcagaactccttctgatcaaatggaatccaatttgtactactggctaaaggtccttttattaaatattgaatatcactacatatgattttgcatgagctatctggaaatcaggaatgcatttttggatataaaacaaaactttaaaaatcttcctcctttgttaattttttaagactaaaatattatttaacctgaaattgaattttgtgattctttttagaataaaaatattaaaataaa

SEQ ID NO: 15406 - DNA, 3586 bp, Homo sapiens
  source 1..3586: mol_type = unassigned DNA
gggctgtcgcggcttgaggaggggcggggcccaaggggcgggacctcgggtggcccgaggtggcccggctgctgggttggaagcggcgcagtccgactcatcccggccccgggatggcgtccccacgggaattgacacagaaccccctgaagaagatctggatgccatacagcaatgggcggcccgctctgcacgcttgccagcgcggtgtgtgcatgaccaactgcccaactctcattgtcatggtgggcctgcccgccaggggcaagacctacatctccaagaagctgactcgatacctgaactggattggtgtgcccactcgggagttcaatgttggccagtatcgccgggacgtggtcaagacctacaaatcttttgaattttttctccccgacaatgaagagggcctgaaaatcaggaagcagtgtgccctggcagccctccgtgacgtccggcggttccttagtgaggaggggggacatgtggcggtttttgatgccacaaacaccacccgagaacggagagcgaccatctttaattttggagaacagaatggctacaagaccttttttgtcgagtccatctgtgtggatcctgaggtcatagctgccaacatcgtgcaagtgaaactgggcagccctgactatgtcaaccgcgacagtgatgaggctacggaggacttcatgaggcgcattgagtgctatgagaactcctacgagtcgctagatgaggacctggatagggacctgtcctatatcaagatcatggatgtgggccagagctacgtggtgaaccgtgtggctgaccacatccagagccgcatcgtatattacctcatgaacatccacgtgaccccccgctccatctacctctgccggcacggggagagcgagctcaacctcaagggccggattggcggggacccaggactgtcccctcggggcagggagtttgccaagagtctagcccagttcatcagtgaccaaaatatcaaggatctgaaggtctggacaagccagatgaagaggacaatccagacggctgaggcactgggtgtgccctatgaacagtggaaggtcctcaacgagatcgatgcgggcgtctgtgaggaaatgacctacgaggaaattcaggataattatccactggagttcgccctgcgggaccaggacaagtaccggtaccggtaccctaaaggggagtcctacgaggacctggtccagagactggagcctgtcatcatggagctggagaggcaagagaatgtgctggtcatctgccaccaggctgtgatgcgctgcctgctggcctacttcctcgacaaggcagcagaacagctgccctacctcaagtgtccgctgcacacagtcctgaagctgactcctgtggcatatggttgtaaagtggagtccatattcctgaacgtggctgctgtgaacacgcaccgggacaggcctcagaacgtggacatctcaagacctccagaggaagcccttgtcacggtgcctgctcaccagtgaccatgttcatccactgtgaccactaggcaggcactgctctctgcagagggggtcattccaggccctccagtgtgtgtgatagtcaccatgccatgcagggatattcttgaagccacacatggctggcggaacccagagcccccaccccagcccacctggctctttgttgacagtcggcgacaaggttgtgcgtggctcctgacctgctgctaagagtcacttgaccagactgcatctgcatgggctgcgcggaggttgcccagccccagtttcttccggcgcagctcttaggtgttcactctcgccagctcagttggctttgtgaagtgtgaaaccctacaatgtgaaaggaaagtgcttgctgtgatgttcctactgtggcccagctgcccagcatggacctggtgactctccacagggcctctaccatcctctctgtggccacttcctgagccagaggccaggtcttcatggggccctgagcttctgctgcctctggtgagagggagagcccttcccatccttacccaccaggaactagagccccaaccacagcagatgcttcctgggcagccactggccaggccgttgtatccatgtcacccttagttgtgggcattcatgaaagcaatgcgcttgcttcagcacattgggatgcacagaaacgtgagggcaggggggcagttgtggtcgcccctccccagttgtgcatgtacccggctacttaggtatgcttaggggagctggtggccaggggtgccccttcaggcctgctctcacagtgaaaccacttcaagacagggcaggaagttaccttcctggtgcacacaccgaagtgctcgagggagaggctgccgccccctctccccttccctggctgtggacactggcagccaatggggaggcggcctctcccctgttgctgcccgtgtccacacaggaatgtacactggtggcagaaacatgcatttgccataaataattcagaaacacttgtatggtcctgtaaaacttctctggtgtttgttgacttctgcctgtgggtctgaggaagggagaaggcagaacccataggcagtccctgggcaagggaggattttcccggccgcagcacagccttccattcatgtgcacgtgagtctggtgaaaatggccttgtgaagtccagtgtctgtcatgcccctgagttcttttggtcccagagaggcagcctgggcagtctgtttacagctggcaaacagactggctggcaagttgtggggctgggtcagaaagtgtctggacttgtaatcgggtgccctgctgtccacaggtggactctggggaagccaggcccctggatcccaagtcctttgtgtccggagcctttcctggcctgtgcctggagggtagcacatctttccagcctcccagggctttgcagcctgcagatgccacctgtccctgagagaagttagcgtccctggccctggccggtggtctctcatccttgtgtgctgctctgctaagagatgtccaaggcggagccggggcaagatccttccagactcatctgtcagagccccaagccctttagacccagagcccaaggaccatgcctttgggacattaggactgcagcctttgcttctgtgtattttggagttttggtgacttttgtcacctggacacactcatttgttagccatagtgggttcccttggtcagcaacagtgcatgtacctctggatgtcatctgaggtgagaccaccgaggccttttctctctgtgtacagaggggagttaggagttgctggactggatgcattacgaggactggggacagggtagagggacatccagggatcagggcatgagtgggggcaaccccccggcctctgccctggcatggtctccgcatgggctgaggtgtagctgattggctgccacatttcggccatgctggctggcgtgcccatgttgcagatattttcccgagttccccagaatggatggtattgaatctcagccacatgcaacactgtgtccagcattctttgcaataaatactttttaaaaaataa

SEQ ID NO: 15407 - DNA, 1575 bp, Homo sapiens
  source 1..1575: mol_type = unassigned DNA
gggctgtcgcggcttgaggaggggcggggcccaaggggcgggacctcgggtggcccgaggtggcccggctgctgggttggaagcggcgcagtccgactcatcccggccccgggatggcgtccccacgggaattgacacagaaccccctgaagaagatctggatgccatacagcaatgggcggcccgctctgcacgcttgccagcgcggtgtgtgcatgaccaactgcccaactctcattgtcatggtgggcctgcccgccaggggcaagacctacatctccaagaagctgactcgatacctgaactggattggtgtgcccactcgggagttcaatgttggccagtatcgccgggacgtggtcaagacctacaaatcttttgaattttttctccccgacaatgaagagggcctgaaaatcaggaagcagtgtgccctggcagccctccgtgacgtccggcggttccttagtgaggaggggggacatgtggcggtttttgatgccacaaacaccacccgagaacggagagcgaccatctttaattttggagaacagaatggctacaagaccttttttgtcgagtccatctgtgtggatcctgaggtcatagctgccaacatcgtgcaagtgaaactgggcagccctgactatgtcaaccgcgacagtgatgaggctacggaggacttcatgaggcgcattgagtgctatgagaactcctacgagtcgctagatgaggacctggatagggacctgtcctatatcaagatcatggatgtgggccagagctacgtggtgaaccgtgtggctgaccacatccagagccgcatcgtatattacctcatgaacatccacgtgaccccccgctccatctacctctgccggcacggggagagcgagctcaacctcaagggccggattggcggggacccaggactgtcccctcggggcagggagtttgccaagagtctagcccagttcatcagtgaccaaaatatcaaggatctgaaggtctggacaagccagatgaagaggacaatccagacggctgaggcactgggtgtgccctatgaacagtggaagggcgtctgtgaggaaatgacctacgaggaaattcaggataattatccactggagttcgccctgcgggaccaggacaagtaccggtaccggtaccctaaaggggagtcctacgaggacctggtccagagactggagcctgtcatcatggagctggagaggcaagagaatgtgctggtcatctgccaccaggctgtgatgcgctgcctgctggcctacttcctcgacaaggcagcagaacagctgccctacctcaagtgtccgctgcacacagtcctgaagctgactcctgtggcatatggttgtaaagtggagtccatattcctgaacgtggctgctgtgaacacgcaccgggacaggcctcagaacgtggacatctcaagacctccagaggaagcccttgtcacggtgcctgctcaccagtgaccatgttcatccactgtgaccactaggcaggcactgctctctgcagagggggtcattccaggccctccagtgt

SEQ ID NO: 15408 - DNA, 1744 bp, Homo sapiens
  source 1..1744: mol_type = unassigned DNA
gggctgtcgcggcttgaggaggggcggggcccaaggggcgggacctcgggtggcccgaggtggcccggctgctgggttggaagcggcgcagtccgactcatcccggccccgggatggcgtccccacgggaattgacacagaaccccctgaagaagatctggatgccatacagcaatgggcggcccgctctgcacgcttgccagcgcggtgaactttcaaaggtgggctagttttccaacaggaggaagggtgcctcttggccttaaagctgagcttgggcaggaacttcagcagagatgtgctcaggatagagacagaaaagtatgccgtgtgggcctgtgtctgtgtcccgggacattgtgcatgaccaactgcccaactctcattgtcatggtgggcctgcccgccaggggcaagacctacatctccaagaagctgactcgatacctgaactggattggtgtgcccactcgggagttcaatgttggccagtatcgccgggacgtggtcaagacctacaaatcttttgaattttttctccccgacaatgaagagggcctgaaaatcaggaagcagtgtgccctggcagccctccgtgacgtccggcggttccttagtgaggaggggggacatgtggcggtttttgatgccacaaacaccacccgagaacggagagcgaccatctttaattttggagaacagaatggctacaagaccttttttgtcgagtccatctgtgtggatcctgaggtcatagctgccaacatcgtgcaagtgaaactgggcagccctgactatgtcaaccgcgacagtgatgaggctacggaggacttcatgaggcgcattgagtgctatgagaactcctacgagtcgctagatgaggacctggatagggacctgtcctatatcaagatcatggatgtgggccagagctacgtggtgaaccgtgtggctgaccacatccagagccgcatcgtatattacctcatgaacatccacgtgaccccccgctccatctacctctgccggcacggggagagcgagctcaacctcaagggccggattggcggggacccaggactgtcccctcggggcagggagtttgccaagagtctagcccagttcatcagtgaccaaaatatcaaggatctgaaggtctggacaagccagatgaagaggacaatccagacggctgaggcactgggtgtgccctatgaacagtggaaggtcctcaacgagatcgatgcgggcgtctgtgaggaaatgacctacgaggaaattcaggataattatccactggagttcgccctgcgggaccaggacaagtaccggtaccggtaccctaaaggggagtcctacgaggacctggtccagagactggagcctgtcatcatggagctggagaggcaagagaatgtgctggtcatctgccaccaggctgtgatgcgctgcctgctggcctacttcctcgacaaggcagcagaacagctgccctacctcaagtgtccgctgcacacagtcctgaagctgactcctgtggcatatggttgtaaagtggagtccatattcctgaacgtggctgctgtgaacacgcaccgggacaggcctcagaacgtggacatctcaagacctccagaggaagcccttgtcacggtgcctgctcaccagtgaccatgttcatccactgtgaccactaggcaggcactgctctctgcagagggggtcattccaggccctccagtgt

SEQ ID NO: 15409 - DNA, 1733 bp, Homo sapiens
  source 1..1733: mol_type = unassigned DNA
gggctgtcgcggcttgaggaggggcggggcccaaggggcgggacctcgggtggcccgaggtggcccggctgctgggttggaagcggcgcagtccgactcatcccggccccgggatggcgtccccacgggaattgacacagaaccccctgaagaagatctggatgccatacagcaatgggcggcccgctctgcacgcttgccagcgcggtggtgggctagttttccaacaggaggaagggtgcctcttggccttaaagctgagcttgggcaggaacttcagcagagatgtgctcaggatagagacagaaaagtatgccgtgtgggcctgtgtctgtgtcccgggacattgtgcatgaccaactgcccaactctcattgtcatggtgggcctgcccgccaggggcaagacctacatctccaagaagctgactcgatacctgaactggattggtgtgcccactcgggagttcaatgttggccagtatcgccgggacgtggtcaagacctacaaatcttttgaattttttctccccgacaatgaagagggcctgaaaatcaggaagcagtgtgccctggcagccctccgtgacgtccggcggttccttagtgaggaggggggacatgtggcggtttttgatgccacaaacaccacccgagaacggagagcgaccatctttaattttggagaacagaatggctacaagaccttttttgtcgagtccatctgtgtggatcctgaggtcatagctgccaacatcgtgcaagtgaaactgggcagccctgactatgtcaaccgcgacagtgatgaggctacggaggacttcatgaggcgcattgagtgctatgagaactcctacgagtcgctagatgaggacctggatagggacctgtcctatatcaagatcatggatgtgggccagagctacgtggtgaaccgtgtggctgaccacatccagagccgcatcgtatattacctcatgaacatccacgtgaccccccgctccatctacctctgccggcacggggagagcgagctcaacctcaagggccggattggcggggacccaggactgtcccctcggggcagggagtttgccaagagtctagcccagttcatcagtgaccaaaatatcaaggatctgaaggtctggacaagccagatgaagaggacaatccagacggctgaggcactgggtgtgccctatgaacagtggaaggtcctcaacgagatcgatgcgggcgtctgtgaggaaatgacctacgaggaaattcaggataattatccactggagttcgccctgcgggaccaggacaagtaccggtaccggtaccctaaaggggagtcctacgaggacctggtccagagactggagcctgtcatcatggagctggagaggcaagagaatgtgctggtcatctgccaccaggctgtgatgcgctgcctgctggcctacttcctcgacaaggcagcagaacagctgccctacctcaagtgtccgctgcacacagtcctgaagctgactcctgtggcatatggttgtaaagtggagtccatattcctgaacgtggctgctgtgaacacgcaccgggacaggcctcagaacgtggacatctcaagacctccagaggaagcccttgtcacggtgcctgctcaccagtgaccatgttcatccactgtgaccactaggcaggcactgctctctgcagagggggtcattccaggccctccagtgt

SEQ ID NO: 15410 - DNA, 1491 bp, Homo sapiens
  source 1..1491: mol_type = unassigned DNA
gggctgtcgcggcttgaggaggggcggggcccaaggggcgggacctcgggtggcccgaggtggcccggctgctgggttggaagcggcgcagtccgactcatcccggccccgggatggcgtccccacgggaattgacacagaaccccctgaagaagatctggatgccatacagcaatgggcggcccgctctgcacgcttgccagcgcggtgtgtgcatgaccaactgcccaactctcattgtcatggtgggcctgcccgccaggggcaagacctacatctccaagaagctgactcgatacctgaactggattggtgtgcccactcgggagttcaatgttggccagtatcgccgggacgtggtcaagacctacaaatcttttgaattttttctccccgacaatgaagagggcctgaaaatcaggaagcagtgtgccctggcagccctccgtgacgtccggcggttccttagtgaggaggggggacatgtggcggtttttgatgccacaaacaccacccgagaacggagagcgaccatctttaattttggagaacagaatggctacaagaccttttttgtcgagtccatctgtgtggatcctgaggtcatagctgccaacatcgtgcaagtgaaactgggcagccctgactatgtcaaccgcgacagtgatgaggctacggaggacttcatgaggcgcattgagtgctatgagaactcctacgagtcgctagatgaggacctggatagggacctgtcctatatcaagatcatggatgtgggccagagctacgtggtgaaccgtgtggctgaccacatccagagccgcatcgtatattacctcatgaacatccacgtgaccccccgctccatctacctctgccggcacggggagagcgagctcaacctcaagggccggattggcggggacccaggactgtcccctcggggcagggagtttgccaagagtctagcccagttcatcagtgaccaaaatatcaaggatctgaaggtctggacaagccagatgaagaggacaatccagacggctgaggcactgggtgtgccctatgaacagtggaaggtcctcaacgagatcgatgcgtcctacgaggacctggtccagagactggagcctgtcatcatggagctggagaggcaagagaatgtgctggtcatctgccaccaggctgtgatgcgctgcctgctggcctacttcctcgacaaggcagcagaacagctgccctacctcaagtgtccgctgcacacagtcctgaagctgactcctgtggcatatggttgtaaagtggagtccatattcctgaacgtggctgctgtgaacacgcaccgggacaggcctcagaacgtggacatctcaagacctccagaggaagcccttgtcacggtgcctgctcaccagtgaccatgttcatccactgtgaccactaggcaggcactgctctctgcagagggggtcattccaggccctccagtgt

SEQ ID NO: 15411 - DNA, 1757 bp, Homo sapiens
  source 1..1757: mol_type = unassigned DNA
actctggggcgggacctgcgggaagatagacatgggctgtcgcggcttgaggaggggcggggcccaaggggcgggacctcgggtggcccgaggtggcccggctgctgggttggaagcggcgcagtccgactcatcccggccccgggatggcgtccccacgggaattgacacagaaccccctgaagaagatctggatgccatacagcaatgggcggcccgctctgcacgcttgccagcgcggtgtgtgcatgaccaactgcccaactctcattgtcatggtgggcctgcccgccaggggcaagacctacatctccaagaagctgactcgatacctgaactggattggtgtgcccactcgggagttcaatgttggccagtatcgccgggacgtggtcaagacctacaaatcttttgaattttttctccccgacaatgaagagggcctgaaaatcaggaaatgaggaaactgaggctcagacaggccaggagtctcgcacaaaatagcaagtttacatcagcgcccagacttgaatctaagcccatccaccgctaaaaagtgtccatcattccaatattcctcaataggcagtgtgccctggcagccctccgtgacgtccggcggttccttagtgaggaggggggacatgtggcggtttttgatgccacaaacaccacccgagaacggagagcgaccatctttaattttggagaacagaatggctacaagaccttttttgtcgagtccatctgtgtggatcctgaggtcatagctgccaacatcgtgcaagtgaaactgggcagccctgactatgtcaaccgcgacagtgatgaggctacggaggacttcatgaggcgcattgagtgctatgagaactcctacgagtcgctagatgaggacctggatagggacctgtcctatatcaagatcatggatgtgggccagagctacgtggtgaaccgtgtggctgaccacatccagagccgcatcgtatattacctcatgaacatccacgtgaccccccgctccatctacctctgccggcacggggagagcgagctcaacctcaagggccggattggcggggacccaggactgtcccctcggggcagggagtttgccaagagtctagcccagttcatcagtgaccaaaatatcaaggatctgaaggtctggacaagccagatgaagaggacaatccagacggctgaggcactgggtgtgccctatgaacagtggaaggtcctcaacgagatcgatgcgggcgtctgtgaggaaatgacctacgaggaaattcaggataattatccactggagttcgccctgcgggaccaggacaagtaccggtaccggtaccctaaaggggagtcctacgaggacctggtccagagactggagcctgtcatcatggagctggagaggcaagagaatgtgctggtcatctgccaccaggctgtgatgcgctgcctgctggcctacttcctcgacaaggcagcagaacagctgccctacctcaagtgtccgctgcacacagtcctgaagctgactcctgtggcatatggttgtaaagtggagtccatattcctgaacgtggctgctgtgaacacgcaccgggacaggcctcagaacgtggacatctcaagacctccagaggaagcccttgtcacggtgcctgctcaccagtgaccatgttcatccactgtgaccactaggcaggcactgctctctgcagagggggtcattccaggccctccagtgt

SEQ ID NO: 15412 - DNA, 579 bp, Homo sapiens
  source 1..579: mol_type = unassigned DNA
tttttttttttaatggcatttgtagaagatgatctatgctctgtgtgtgtgtgtgtatcccaaataacacaagtgaagttttccttcatagtttgcataacaacctacactcacaagtactatttccacagcacagaaaagaaaaaacacatagcatctctgtgtgtattggatgggtgatggataggtggacaagaccatcctggtagctttttacaagcaaggaaccaccaatgatcagtgttcctagaggtcctcccctccttagacaggtttctgttcccttcacccaggaaatgcccgtgaacttggtctcttctgcttgatgctgcctcaccccacatgtccccaaggctcatcttctgggcctgtaggaggtgtgatgactgtggtatctccctagggcgtctgtgaggaaatgacctacgaggaaattcaggataattatccactggagttcgccctgcgggaccaggacaagtaccggtaccggtaccctaaaggggagtcctacgaggacctggtccagagactggagcctgtcatcatggagctggagaggcaagagaatgtgctggt

SEQ ID NO: 15413 - DNA, 1011 bp, Homo sapiens
  source 1..1011: mol_type = unassigned DNA
gggttaccccactctggagctgcagggggcagtggccctggccagtttggttgcaggatggacagaggctcgttaggaggcagctccctgaccgacctggggccggggagcagcaggcgggtgtgcatgaccaactgcccaactctcattgtcatggtgggcctgcccgccaggggcaagacctacatctccaagaagctgactcgatacctgaactggattggtgtgcccactcgggagttcaatgttggccagtatcgccgggacgtggtcaagacctacaaatcttttgaattttttctccccgacaatgaagagggcctgaaaatcaggaagcagtgtgccctggcagccctccgtgacgtccggcggttccttagtgaggaggggggacatgtggcggtttttgatgccacaaacaccacccgagaacggagagcgaccatctttaattttggagaacagaatggctacaagaccttttttgtcgagtccatctgtgtggatcctgaggtcatagctgccaacatcgtgcaagtgaaactgggcagccctgactatgtcaaccgcgacagtgatgaggctacggaggacttcatgaggcgcattgagtgctatgagaactcctacgagtcgctagatgaggacctggatagggacctgtcctatatcaagatcatggatgtgggccagagctacgtggtgaaccgtgtggctgaccacatccagagccgcatcgtatattacctcatgaacatccacgtgaccccccgctccatctacctctgccggcacggggagagcgagctcaacctcaagggccggattggcggggacccaggactgtcccctcggggcagggagtttgccaagagtctagcccagttcatcagtgaccaaaatatcaaggatctgaaggtctggacaagccagatgaagaggacaatccagacggctgaggcactgggtgtgccctatgaacagtggaaggtcctcaacgagatcgatgcg

SEQ ID NO: 15414 - DNA, 576 bp, Homo sapiens
  source 1..576: mol_type = unassigned DNA
cccgacaatgaagagggcctgaaaatcaggaaatgaggaaactgaggctcagacaggccaggagtctcgcacaaaatagcaagtttacatcagcgcccagacttgaatctaagcccatccaccgctaaaaagtgtccatcattccaatattcctcaataggcagtgtgccctggcagccctccgtgacgtccggcggttccttagtgaggaggggggacatgtggcggtttttgatgccacaaacaccacccgagaacggagagcgaccatctttaattttggagaacagaatggctacaagaccttttttgtcgagtccatctgtgtggatcctgaggtcatagctgccaacatcgtgcaagtgaaactgggcagccctgactatgtcaaccgcgacagtgatgaggctacggaggacttcatgaggcgcattgagtgctatgagaactcctacgagtcgctagatgaggacctggatagacagtgtattgagagtgcggagataggccaacaggggccccagggacacatgagcagcggagaaagtcatgatgtgggacctgtcctatatcaag

SEQ ID NO: 15415 - DNA, 567 bp, Homo sapiens
  source 1..567: mol_type = unassigned DNA
gaactgggcccacttgttccaaaacgggcgggtagtgtgcatgaccaactgcccaactctcattgtcatggtgggcctgcccgccaggggcaagacctacatctccaagaagctgactcgatacctgaactggattggtgtgcccactcgggagttcaatgttggccagtatcgccgggacgtggtcaagacctacaaatcttttgaattttttctccccgacaatgaagagggcctgaaaatcaggaagcagtgtgccctggcagccctccgtgacgtccggcggttccttagtgaggaggggggacatgtggcggtttttgatgccacaaacaccacccgagaacggagagcgaccatctttaattttggagaacagaatggctacaagaccttttttgtcgagtccatctgtgtggatcctgaggtcatagctgccaacatcgtgcaagtgaaactgggcagccctgactatgtcaaccgcgacagtgatgaggctacggaggacttcatgaggcgcattgagtgctatgagaactcctacgagtcgctagatgaggacctgga

SEQ ID NO: 15416 - DNA, 553 bp, Homo sapiens
  source 1..553: mol_type = unassigned DNA
ctgaactggattggtgtgcccactcgggagttcaatgttggccagtatcgccgggacgtggtcaagacctacaaatcttttgaattttttctccccgacaatgaagagggcctgaaaatcaggaagcagtgtgccctggcagccctccgtgacgtccggcggttccttagtgaggaggggggacatgtggcggtttttgatgccacaaacaccacccgagaacggagagcgaccatctttaattttggagaacagaatggctacaaggtgaggcctccttggctcctctccttggcggaactgtggcatgtcccctgccctccagggctcctttcaccgcctgcttatgcatgaggggcatggggctggcatggctcctgagtgtaatttgggatgagaggggctgtctccacttggggtttgctttccagagggaagggggttttcgtgggagagtctaggagagggcagcacctgctttagctctggactccttgaccccgcctccagccctctgaagcagggtttcagggcctggctgcttgtcagcatg

SEQ ID NO: 15417 - DNA, 779 bp, Homo sapiens
  source 1..779: mol_type = unassigned DNA
ccagcctcgacccagggacatgcagggctcacaggagacagggctcaggctgccggagctccaaccaaactctgtcccacttcacgcacggactgtcctgggcaaaggtgttcacctttccgagcctcggtttccttatctgtaaagcaaagcgacaccagcaagcctgtgagcattgtgtatatagcagacatggaggtcctgcagcaggaggtgctcaataaacacaaagcgactgaaggatgggatgtgcgagaatcccagtggtgtgcacccaggccgcgacacatggtggtgtgcatgaccaactgcccaactctcattgtcatggtgggcctgcccgccaggggcaagacctacatctccaagaagctgactcgatacctgaactggattggtgtgcccactcgggagttcaatgttggccagtatcgccgggacgtggtcaagacctacaaatcttttgaattttttctccccgacaatgaagagggcctgaaaatcaggaaatgaggaaactgaggctcagacaggccaggagtctcgcacaaaatagcaagtttacatcagcgcccagacttgaatctaagcccatccaccgctaaaaagtgtccatcattccaatattcctcaataggcagtgtgccctggcagccctccgtgacgtccggcggttccttagtgaggaggggggacatgtggcggtttttgatgccacaaacaccacccgagaacggagagcgaccatctttaattttggagaacagaatggctacaag

SEQ ID NO: 15418 - DNA, 636 bp, Homo sapiens
  source 1..636: mol_type = unassigned DNA
gggactgggaagagtttgagctttgagaactggccaccacatggcttctaggctgggacactgggaggaagtccagtggtcagtgcagagggcaccctgggagccaaccagggtcaggccagccaggttcatggtgggcagaggctgagcagaacatgttcacacgtgtgtacagacatcccagcatacttcccacgcctgggacagaacagctggctcactttcggatatactgaggaggaaaaagccatgagggccagagattctaccgggcatccgctgatgctgagagagcagacgctgggacagcatctccatggagaggacacaggggagtgggagcacacatgtgaagtgtgcatgaccaactgcccaactctcattgtcatggtgggcctgcccgccaggggcaagacctacatctccaagaagctgactcgatacctgaactggattggtgtgcccactcgggagttcaatgttggccagtatcgccgggacgtggtcaagacctacaaatcttttgaattttttctccccgacaatgaagagggcctgaaaatcaggaagcagtgtgccctggcagccctccgtgacgtccggcggttccttagtgaggaggggggacatgtggcg

SEQ ID NO: 15419 - DNA, 849 bp, Homo sapiens
  source 1..849: mol_type = unassigned DNA
gtgtgcatgaccaactgcccaactctcattgtcatggtgggcctgcccgccaggggcaagacctacatctccaagaagctgactcgatacctgaactggattggtgtgcccactcgggagttcaatgttggccagtatcgccgggacgtggtcaagacctacaaatcttttgaattttttctccccgacaatgaagagggcctgaaaatcaggaaatgaggaaactgaggctcagacaggccaggagtctcgcacaaaatagcaagtttacatcagcgcccagacttgaatctaagcccatccaccgctaaaaagtgtccatcattccaatattcctcaataggttcaagcaattcttctgcctcagccaacaaccccaagctgtggacgctgatagcctactgtctgatcttcccagcagcttctgtggtgggcggtgcctcacttttccagatgctgggaccaaggccagaaagtgatgggggtgccttgggtcactcagggtttgaatttgaagtccgtcctgcctgaatccatagtgtttgtggggagagtctgccagctgttccactctggctgtccccctaaggtagggatatttgggattaattcaaatgaagagacctagactcagagaggttgggaagctagtccaaggtcaccctgcaacagaagctggggacaggctcattgctgcctttctgcaggcataccctctggctgccctagaaaccctctctgctgtatccgaatcctggctctggctgggccacagggccatctcctattaatcagcccaaaatttcccaattagcaaaataaaaggaccagagtttttaaaatggaaaa

SEQ ID NO: 15420 - DNA, 643 bp, Homo sapiens
  source 1..643: mol_type = unassigned DNA
aactcctggccaggccctgtcctccccacgtacccctgcatccccagcctcgacccagggacatgcagggctcacaggagacagggctcaggctgccggagctccaaccaaactctgtcccacttcacgcacggactgtcctgggcaaaggtgttcacctttccgagcctcggtttccttatctgtaaagcaaagcgacaccagcaagcctgtgagcattgtgtatatagcagacatggaggtcctgcagcaggaggtgctcaataaacacaaagcgactgaaggatgggaccagcaagcctgtgagcattgtgtatgtagcagacatggaggtcctgcagcaggaggtgctcaataaacacaaagcgactgaaggatgggatgtgcgagaatcccagtggtgtgcacccaggccgcgacacatggtggtgtgcatgaccaactgcccaactctcattgtcatggtgggcctgcccgccaggggcaagacctacatctccaagaagctgactcgatacctgaactggattggtgtgcccactcgggagttcaatgttggccagtatcgccgggacgtggtcaagacctacaaatcttttgaattttttctccccgacaatgaagagggcctgaaaatcaggaa

SEQ ID NO: 15421 - DNA, 762 bp, Homo sapiens
  source 1..762: mol_type = unassigned DNA
ggtagtagataaaaggctttatatgaatattacaagaatcaccaccactccaaatataataagtgtaccaaatatgaagtaaaatgactttaacaaggctgacttgaaagtgataaagaagcaagttactgctaacaagatagtggaaatactgcacaggcaccgataaacagaaatcaccaagctcaaggaaagagaaacgaggcatagatccagagatcacgttagggtacaccaagaaagagacggttcaagggaattaccaggaggcgatgagccagagtggatcatgacccatgaagagcaccatgcagccaaaaccctggggattggcaaagccattgctgtcttaacctctggtggagatgcccaaggtatgaatgctgctgtcagggctgtggttcgagttggtatcttcaccggtgcccgtgtcttctttgtccatgagggttatcaaggcctggtggatggtggagatcacatcaaggaagccacctgggagagcgtttcgatgatgcttcagctgggaggcacggtgattggaagtgcccggtgcaaggactttcgggaacgagaaggacgactccgagctgcctacaacctggtgaagcgtgggatcaccaatctctgtgtcattgggggtgatggcagcctcactggggctgacaccttccgttctgagtggagtgacttgttgagtgacctccagaaagcaggtaagatcacagatgaggaggctacgaagtccagctacctgaacat

SEQ ID NO: 15422 - DNA, 594 bp, Homo sapiens
  source 1..594: mol_type = unassigned DNA
tttctgatggtggcactagcgatatcacatctcagggagataccacagagtaggagagttggagaaatgtttacgtgagacgcagaagtagtcaagaaatatcactcgggtctcaaggaaggcgggagatgaagccggtaccacagaaagccgagcttcccggtgaaaacagctctccccagagaagacccagctctggcgggaaagccccggaatcgcaaccggcctttccccaaagtggatcatgacccatgaagagcaccatgcagccaaaaccctggggattggcaaagccattgctgtcttaacctctggtggagatgcccaaggtatgaatgctgctgtcagggctgtggttcgagttggtatcttcaccggtgcccgtgtcttctttgtccatgagggttatcaaggcctggtggatggtggagatcacatcaaggaagccacctgggagagcgtttcgatgatgcttcagctgggaggcacggtgattggaagtgcccggtgcaaggactttcgggaacgagaaggacgactccgagctgcctacaacctggtgaagcgtgggatcaccaatctctgtgtcattgg

SEQ ID NO: 15423 - DNA, 452 bp, Homo sapiens
  source 1..452: mol_type = unassigned DNA
accacagaaagccgagcttcccggtgaaaacagctctccccagagaagacccagctctggcgggaaagccccggaatcgcaaccggcctttccccaagtacggctgggcgctgggatggggcctgctgtaacggcagggagacggtctctccgcggcccaggagagagagaccagaaggaacggcctcagagtggatcatgacccatgaagagcaccatgcagccaaaaccctggggattggcaaagccattgctgtcttaacctctggtggagatgcccaaggtatgaatgctgctgtcagggctgtggttcgagttggtatcttcaccggtgcccgtgtcttctttgtccatgagggttatcaaggcctggtggatggtggagatcacatcaaggaagccacctgggagagcgtttcgatgatgcttcagctgggaggcacggtgattgg

SEQ ID NO: 15424 - DNA, 594 bp, Homo sapiens
  source 1..594: mol_type = unassigned DNA
acagtgctccccgcttccgcccagtccagcccgggccggctgaccgggtccgacacagtctcctggaccaggctccctccatcctcacccctcccccagcttcccgccgccactcaccgaaccggaaccggctgccatgcgaaggggtttccggccgggcgcggaacgcaaaacccgggaaccgccgcgaaccggaaccgccttcacagcaccggaagagtcgctagagtggatcatgacccatgaagagcaccatgcagccaaaaccctggggattggcaaagccattgctgtcttaacctctggtggagatgcccaaggtatgaatgctgctgtcagggctgtggttcgagttggtatcttcaccggtgcccgtgtcttctttgtccatgagggttatcaaggcctggtggatggtggagatcacatcaaggaagccacctgggagagcgtttcgatgatgcttcagctgggaggcacggtgattggaagtgcccggtgcaaggactttcgggaacgagaaggacgactccgagctgcctacaacctggtgaagcgtgggatcaccaatctctgtgtcattgggggtgatgg

SEQ ID NO: 15425 - DNA, 571 bp, Homo sapiens
  source 1..571: mol_type = unassigned DNA
gcttccgcccagtccagcccgggccggctgaccgggtccgacacagtctcctggaccaggctccctccatcctcacccctcccccagcttcccgccgccactcaccgaaccggaaccggctgccatgcgaaggggtttccggccgggcgcggaacgcaaaacccgggaaccgccgcgaaccggaaccgccttcacagcaccggaagagtcgctagctggggaagcttctacttccagcatgctcataccaaagccaccaccaaagacagacatcttgaagagtctagatactatggatgatccagacaccgtgggaagcatacctgttttcaaaactgagtggatcatgacccatgaagagcaccatgcagccaaaaccctggggattggcaaagccattgctgtcttaacctctggtggagatgcccaaggtatgaatgctgctgtcagggctgtggttcgagttggtatcttcaccggtgcccgtgtcttctttgtccatgagggttatcaaggcctggtggatggtggagatcacatcaaggaagccacctgggagagcgtttcgatg

SEQ ID NO: 15426 - DNA, 3176 bp, Homo sapiens
  source 1..3176: mol_type = unassigned DNA
gcttccgcccagtccagcccgggccggctgaccgggtccgacacagtctcctggaccaggctccctccatcctcacccctcccccagcttcccgccgccactcaccgaaccggaaccggctgccatgcgaaggggtttccggccgggcgcggaacgcaaaacccgggaaccgccgcgaaccggaaccgccttcacagcaccggaagagtcgctaggaggcagccatgcataaagacgagtttcatctgaaatttttcatgtgtgtgattcagtctcgccagttagtcaggactcctcagagaacagctggggaagcttctacttccagcatgctcataccaaagccaccaccaaagacagacatcttgaagagtctagatactatggatgatccagacaccgtgggaagcatacctgttttcaaaactgagtggatcatgacccatgaagagcaccatgcagccaaaaccctggggattggcaaagccattgctgtcttaacctctggtggagatgcccaaggtatgaatgctgctgtcagggctgtggttcgagttggtatcttcaccggtgcccgtgtcttctttgtccatgagggttatcaaggcctggtggatggtggagatcacatcaaggaagccacctgggagagcgtttcgatgatgcttcagctgggaggcacggtgattggaagtgcccggtgcaaggactttcgggaacgagaaggacgactccgagctgcctacaacctggtgaagcgtgggatcaccaatctctgtgtcattgggggtgatggcagcctcactggggctgacaccttccgttctgagtggagtgacttgttgagtgacctccagaaagcaggtaagatcacagatgaggaggctacgaagtccagctacctgaacattgtgggcctggttgggtcaattgacaatgacttctgtggcaccgatatgaccattggcactgactctgccctgcatcggatcatggaaattgtagatgccatcactaccactgcccagagccaccagaggacatttgtgttagaagtaatgggccgccactgtggatacctggcccttgtcacctctctgtcctgtggggccgactgggtttttattcctgaatgtccaccagatgacgactgggaggaacacctttgtcgccgactcagcgagacaaggacccgtggttctcgtctcaacatcatcattgtggctgagggtgcaattgacaagaatggaaaaccaatcacctcagaagacatcaagaatctggtggttaagcgtctgggatatgacacccgggttactgtcttggggcatgtgcagaggggtgggacgccatcagcctttgacagaattctgggcagcaggatgggtgtggaagcagtgatggcacttttggaggggaccccagataccccagcctgtgtagtgagcctctctggtaaccaggctgtgcgcctgcccctcatggaatgtgtccaggtgaccaaagatgtgaccaaggccatggatgagaagaaatttgacgaagccctgaagctgagaggccggagcttcatgaacaactgggaggtgtacaagcttctagctcatgtcagacccccggtatctaagagtggttcgcacacagtggctgtgatgaacgtgggggctccggctgcaggcatgaatgctgctgttcgctccactgtgaggattggccttatccagggcaaccgagtgctcgttgtccatgatggtttcgagggcctggccaaggggcagatagaggaagctggctggagctatgttgggggctggactggccaaggtggctctaaacttgggactaaaaggactctacccaagaagagctttgaacagatcagtgccaatataactaagtttaacattcagggccttgtcatcattgggggctttgaggcttacacagggggcctggaactgatggagggcaggaagcagtttgatgagctctgcatcccatttgtggtcattcctgctacagtctccaacaatgtccctggctcagacttcagcgttggggctgacacagcactcaatactatctgcacaacctgtgaccgcatcaagcagtcagcagctggcaccaagcgtcgggtgtttatcattgagactatgggtggctactgtggctacctggctaccatggctggactggcagctggggccgatgctgcctacatttttgaggagcccttcaccattcgagacctgcaggcaaatgttgaacatctggtgcaaaagatgaaaacaactgtgaaaaggggcttggtgttaaggaatgaaaagtgcaatgagaactataccactgacttcattttcaacctgtactctgaggaggggaagggcatcttcgacagcaggaagaatgtgcttggtcacatgcagcagggtgggagcccaaccccatttgataggaattttgccactaagatgggcgccaaggctatgaactggatgtctgggaaaatcaaagagagttaccgtaatgggcggatctttgccaatactccagattcgggctgtgttctggggatgcgtaagagggctctggtcttccaaccagtggctgagctgaaggaccagacagattttgagcatcgaatccccaaggaacagtggtggctgaaactgaggcccatcctcaaaatcctagccaagtacgagattgacttggacacttcagaccatgcccacctggagcacatcacccggaagcggtccggggaagctgccgtctaaacctctctggagtgaggggaatagattacctgatcatggtcagctcacaccctaataagtccacatcttctcagtgttttagctgtttttttcattaggtttccttttattctgtaccttgcagccatgaccagttctggccaggagctggaggagcaggcagtgggtgggagctccttttaggtagaatttaacatgacttctgccccagctttatctgtcacacaaggctgggcacctctagtgctactgctagatatcacttactcagttagaattttcctaaaaataagctttatttatttctttgtgataacaaagagtcttggttcctctactacttttactacagtgacaaattgtaactacactaataaatgccaactggtcactgtg

SEQ ID NO: 15427 - DNA, 3579 bp, Homo sapiens
  source 1..3579: mol_type = unassigned DNA
aaccgccttcacagcaccggaagagtcgctaggaggcagccatgcataaagacgagtttcatctgaaatttttcatgtgtgtgattcagtctcgccagttagtcaggactcctcagagaacagctggggaagcttctacttccagcatgctcataccaaagccaccaccaaagacagacatcttgaagagtctagatactatggatgatccagacaccgtgggaagcatacctgttttcaaaactgaatgtgcagaggtagagatacaagtaagcaagaggaagagggcagtggtaaaagcaagaggagacccgactgtggagacaatgaagcaaagggaagagtggatcatgacccatgaagagcaccatgcagccaaaaccctggggattggcaaagccattgctgtcttaacctctggtggagatgcccaagagatgggacgggatcggccaggtgcagtggctcacacctgtaatcccaggactttgggaggccgaggcgggcagatcacccgaggttgggagttcgagaccagcctgaccaacatggagaaaccccgtctctactaaaaatacaaaattagctgggcgtggtggtgcatgcctgtaatcccagccacttgggaggctgaggcaggagaatcgcttgaacccgggaggcagaggttgcggtatgaatgctgctgtcagggctgtggttcgagttggtatcttcaccggtgcccgtgtcttctttgtccatgagggttatcaaggcctggtggatggtggagatcacatcaaggaagccacctgggagagcgtttcgatgatgcttcagctgggaggcacggtgattggaagtgcccggtgcaaggactttcgggaacgagaaggacgactccgagctgcctacaacctggtgaagcgtgggatcaccaatctctgtgtcattgggggtgatggcagcctcactggggctgacaccttccgttctgagtggagtgacttgttgagtgacctccagaaagcaggtaagatcacagatgaggaggctacgaagtccagctacctgaacattgtgggcctggttgggtcaattgacaatgacttctgtggcaccgatatgaccattggcactgactctgccctgcatcggatcatggaaattgtagatgccatcactaccactgcccagagccaccagaggacatttgtgttagaagtaatgggccgccactgtggatacctggcccttgtcacctctctgtcctgtggggccgactgggtttttattcctgaatgtccaccagatgacgactgggaggaacacctttgtcgccgactcagcgagacaaggacccgtggttctcgtctcaacatcatcattgtggctgagggtgcaattgacaagaatggaaaaccaatcacctcagaagacatcaagaatgttcgtatgaatgaagccagagaggccttagaatccatagcccattcccttctggcttctgagtctcctgacattgcttctccccttggtccttctgcacatctctccctggttccctgcccctgattgcctcccacaaagaaccattacaagacaagaggctgagctgtccatggtttacccaagtctctgcttgttttcttcctttgactctgcgtaaccctctctctgtccctctgttggtcccttcagctggtggttaagcgtctgggatatgacacccgggttactgtcttggggcatgtgcagaggggtgggacgccatcagcctttgacagaattctgggcagcaggatgggtgtggaagcagtgatggcacttttggaggggaccccagataccccagcctgtgtagtgagcctctctggtaaccaggctgtgcgcctgcccctcatggaatgtgtccaggtgaccaaagatgtgaccaaggccatggatgagaagaaatttgacgaagccctgaagctgagaggccggagcttcatgaacaactgggaggtgtacaagcttctagctcatgtcagacccccggtatctaagagtggttcgcacacagtggctgtgatgaacgtgggggctccggctgcaggcatgaatgctgctgttcgctccactgtgaggattggccttatccagggcaaccgagtgctcgttgtccatgatggtttcgagggcctggccaaggggcagatagaggaagctggctggagctatgttgggggctggactggccaaggtggctctaaacttgggactaaaaggactctacccaagaagagctttgaacagatcagtgccaatataactaagtttaacattcagggccttgtcatcattgggggctttgaggcttacacagggggcctggaactgatggagggcaggaagcagtttgatgagctctgcatcccatttgtggtcattcctgctacagtctccaacaatgtccctggctcagacttcagcgttggggctgacacagcactcaatactatctgcacaacctgtgaccgcatcaagcagtcagcagctggcaccaagcgtcgggtgtttatcattgagactatgggtggctactgtggctacctggctaccatggctggactggcagctggggccgatgctgcctacatttttgaggagcccttcaccattcgagacctgcaggcaaatgttgaacatctggtgcaaaagatgaaaacaactgtgaaaaggggcttggtgttaaggaatgaaaagtgcaatgagaactataccactgacttcattttcaacctgtactctgaggaggggaagggcatcttcgacagcaggaagaatgtgcttggtcacatgcagcagggtgggagcccaaccccatttgataggaattttgccactaagatgggcgccaaggctatgaactggatgtctgggaaaatcaaagagagttaccgtaatgggcggatctttgccaatactccagattcgggctgtgttctggggatgcgtaagagggctctggtcttccaaccagtggctgagctgaaggaccagacagattttgagcatcgaatccccaaggaacagtggtggctgaaactgaggcccatcctcaaaatcctagccaagtacgagattgacttggacacttcagaccatgcccacctggagcacatcacccggaagcggtccggggaagctgccgtctaaacctctctggagtgaggggaatagattacctgatcatggtcagctcacaccctaataagtccacatcttctcagtgttttagctgtttttttcattaggtttccttttattctgtaccttgcagccatgaccagttctggccaggagctggaggagcaggcagtgggtgggagctccttttaggtagaatttaacatgacttctgccccagctttatctgtcacacaaggctgggcacctctagtgctactgctagatatcacttactcagttagaattttcctaaaaataagctttatttatttctttgtgataacaaagagtcttggttcctctactacttttactacagtgacaaattgtaactacactaataaatgccaactggtcactgtg

SEQ ID NO: 15428 - DNA, 590 bp, Homo sapiens
  source 1..590: mol_type = unassigned DNA
accgccttcacagcaccggaagagtcgctaggtggctgaagaggagggggctggggcaggaggtcaaagaacagagttaaggaccagtggggcgcctgcgcggtgtggcgaggcccgagaagcgaagggagcatttaagactagtcgtaatttctcagtacccttttcagtctgggctttttcgctttctcgtactcggaatactgaggcagccatgcataaagacgagtttcatctgaaatttttcatgtgtgtgattcagtctcgccagttagtcaggactcctcagagaacagctggggaagcttctacttccagcatgctcataccaaagccaccaccaaagacagacatcttgaagagtctagatactatggatgatccagacaccgtgggaagcatacctgttttcaaaactgaatgtgcagaggtagagatacaagtaagcaagaggaagagggcagtggtaaaagcaagaggagacccgactgtggagacaatgaagcaaagggaagagtggatcatgacccatgaagagcaccatgcagccaaaaccctggggattggcaaagccattgctgtcttaacct

SEQ ID NO: 15429 - DNA, 570 bp, Homo sapiens
  source 1..570: mol_type = unassigned DNA
acagcaccggaagagtcgctaggtggctgaagaggagggggctggggcaggaggtcaaagaacagagaggcagccatgcataaagacgagtttcatctgaaatttttcatgtgtgtgattcagtctcgccagttagtcaggactcctcagagaacagctggggaagcttctacttccagcatgctcataccaaagccaccaccaaagacagacatcttgaagagtctagatactatggatgatccagacaccgtgggaagcatacctgttttcaaaactgaatgtgcagaggtagagatacaagtaagcaagaggaagagggcagtggtaaaagcaagaggagacccgactgtggagacaatgaagcaaagggaagagtggatcatgacccatgaagagcaccatgcagccaaaaccctggggattggcaaagccattgctgtcttaacctctggtggagatgcccaaggtatgaatgctgctgtcagggctgtggttcgagttggtatcttcaccggtgcccgtgtcttctttgtccatgagggttatcaaggcctggtggatggtgga

SEQ ID NO: 15430 - DNA, 626 bp, Homo sapiens
  source 1..626: mol_type = unassigned DNA
gaagaggagggggctggggcaggaggtcaaagaacagagttaaggaccagtggggcgcctgcgcggtgtggcgaggcccgagaagcgaagggagcatttaagactagtcgtaatttctcagtacccttttcagtctgggctttttcgctttctcgtactcggaatactgaggcagccatgcataaagacgagtttcatctgaaatttttcatgtgtgtgattcagtctcgccagttagtcaggactcctcagagaacagctggggaagcttctacttccagcatgctcataccaaagccaccaccaaagacagacatcttgaagagtctagatactatggatgatccagacaccgtgggaagcatacctgttttcaaaactgagtggatcatgacccatgaagagcaccatgcagccaaaaccctggggattggcaaagccattgctgtcttaacctctggtggagatgcccaaggtatgaatgctgctgtcagggctgtggttcgagttggtatcttcaccggtgcccgtgtcttctttgtccatgagggttatcaaggcctggtggatggtggagatcacatcaaggaagccacctgggagagcgtttcgatgatgcttcagct

SEQ ID NO: 15431 - DNA, 582 bp, Homo sapiens
  source 1..582: mol_type = unassigned DNA
gagttttgcttgcttgcgttccagtttccatggcagcttttcgcggtggccctaaatctgcggaaacctgtggcttcccccgacagatagggacctgagatctaaatcgatctcaggctatctcgtgttttattgagaatcacagaacgaggcagccatgcataaagacgagtttcatctgaaatttttcatgtgtgtgattcagtctcgccagttagtcaggactcctcagagaacagctggggaagcttctacttccagcatgctcataccaaagccaccaccaaagacagacatcttgaagagtctagatactatggatgatccagacaccgtgggaagcatacctgttttcaaaactgagtggatcatgacccatgaagagcaccatgcagccaaaaccctggggattggcaaagccattgctgtcttaacctctggtggagatgcccaaggtatgaatgctgctgtcagggctgtggttcgagttggtatcttcaccggtgcccgtgtcttctttgtccatgagggttatcaaggcctggtggatggtggagatcacatcaaggaagccacctggga

SEQ ID NO: 15432 - DNA, 3228 bp, Homo sapiens
  source 1..3228: mol_type = unassigned DNA
aagcaggaggaggcggagccttcttgtcagcatctgttagtggaggttgggaagcctctcctccttccccctccctctttgcctccacctggctcctccccatgttcgtccatcacccctcccccctttcccaaggacaatctgcaagaaagcagcggcggaggagagctaagactaaaagagtggatcatgacccatgaagagcaccatgcagccaaaaccctggggattggcaaagccattgctgtcttaacctctggtggagatgcccaaggtatgaatgctgctgtcagggctgtggttcgagttggtatcttcaccggtgcccgtgtcttctttgtccatgagggttatcaaggcctggtggatggtggagatcacatcaaggaagccacctgggagagcgtttcgatgatgcttcagctgggaggcacggtgattggaagtgcccggtgcaaggactttcgggaacgagaaggacgactccgagctgcctacaacctggtgaagcgtgggatcaccaatctctgtgtcattgggggtgatggcagcctcactggggctgacaccttccgttctgagtggagtgacttgttgagtgacctccagaaagcaggtaagatcacagatgaggaggctacgaagtccagctacctgaacattgtgggcctggttgggtcaattgacaatgacttctgtggcaccgatatgaccattggcactgactctgccctgcatcggatcatggaaattgtagatgccatcactaccactgcccagagccaccagaggacatttgtgttagaagtaatgggccgccactgtggatacctggcccttgtcacctctctgtcctgtggggccgactgggtttttattcctgaatgtccaccagatgacgactgggaggaacacctttgtcgccgactcagcgagacaaggacccgtggttctcgtctcaacatcatcattgtggctgagggtgcaattgacaagaatggaaaaccaatcacctcagaagacatcaagaatctggtggttaagcgtctgggatatgacacccgggttactgtcttggggcatgtgcagaggggtgggacgccatcagcctttgacagaattctgggcagcaggatgggtgtggaagcagtgatggcacttttggaggggaccccagataccccagcctgtgtagtgagcctctctggtaaccaggctgtgcgcctgcccctcatggaatgtgtccaggtgaccaaagatgtgaccaaggccatggatgagaagaaatttgacgaagccctgaagctgagaggccggagcttcatgaacaactgggaggtgtacaagcttctagctcatgtcagacccccggtatctaagagtggttcgcacacagtggctgtgatgaacgtgggggctccggctgcaggcatgaatgctgctgttcgctccactgtgaggattggccttatccagggcaaccgagtgctcgttgtccatgatggtttcgagggcctggccaaggggcagatagaggaagctggctggagctatgttgggggctggactggccaaggtggctctaaacttgggactaaaaggactctacccaagaagagctttgaacagatcagtgccaatataactaagtttaacattcagggccttgtcatcattgggggctttgaggcttacacagggggcctggaactgatggagggcaggaagcagtttgatgagctctgcatcccatttgtggtcattcctgctacagtctccaacaatgtccctggctcagacttcagcgttggggctgacacagcactcaatactatctgcacaacctgtgaccgcatcaagcagtcagcagctggcaccaagcgtcgggtgtttatcattgagactatgggtggctactgtggctacctggctaccatggctggactggcagctggggccgatgctgcctacatttttgaggagcccttcaccattcgagacctgcaggcaaatgttgaacatctggtgcaaaagatgaaaacaactgtgaaaaggggcttggtgttaaggaatgaaaagtgcaatgagaactataccactgacttcattttcaacctgtactctgaggaggggaagggcatcttcgacagcaggaagaatgtgcttggtcacatgcagcagggtgggagcccaaccccatttgataggaattttgccactaagatgggcgccaaggctatgaactggatgtctgggaaaatcaaagagagttaccgtaatgggcggatctttgccaatactccagattcgggctgtgttctggggatgcgtaagagggctctggtcttccaaccagtggctgagctgaaggaccagacagattttgagcatcgaatccccaaggaacagtggtggctgaaactgaggcccatcctcaaaatcctagccaagtacgagattgacttggacacttcagaccatgcccacctggagcacatcacccggaagcggtccggggaagctgccgtctaaacctctctggagtgaggggaatagattacctgatcatggtcagctcacaccctaataagtccacatcttctcagtgttttagctgtttttttcattaggtttccttttattctgtaccttgcagccatgaccagttctggccaggagctggaggagcaggcagtgggtgggagctccttttaggtagaatttaacatgacttctgccccagctttatctgtcacacaaggctgggcacctctagtgctactgctagatatcacttactcagttagaattttcctaaaaataagctttatttatttctttgtgataacaaagagtcttggttcctctactacttttactacagtgacaaattgtaactacactaataaatgccaactggtcactgtgcttttgcttctcctgttatcatcttcctaagtggaatgtaatactgtcagccccatgtatcagacacttgtctgatgaagcagtaaagacgttaagggtatcacagggggtggaggaagggattatctctagtacactacttgctggctgtctgaaaaattgtcactgccaaactctaaaaacagttctaaatagtgactgagaaggtttgttgctggagtcagggaataaggcagccaaatactctttgcacagttctttagtgggaagagaaattaacaataaatatcaagcactgtg

SEQ ID NO: 15433 - DNA, 616 bp, Homo sapiens
  source 1..616: mol_type = unassigned DNA
agtggaggttgggaagcctctcctccttccccctccctctttgcctccacctggctcctccccatgttcgtccatcacccctcccccctttcccaaggacaatctgcaagaaagcagcggcggaggagagctaagactaaaagagtggatcatgacccatgaagagcaccatgcagccaaaaccctggggattggcaaagccattgctgtcttaacctctggtggagatgcccaagagatgggacgggatcggccaggtgcagtggctcacacctgtaatcccaggactttgggaggccgaggcgggcagatcacccgaggttgggagttcgagaccagcctgaccaacatggagaaaccccgtctctactaaaaatacaaaattagctgggcgtggtggtgcatgcctgtaatcccagccacttgggaggctgaggcaggagaatcgcttgaacccgggaggcagaggttgcggtatgaatgctgctgtcagggctgtggttcgagttggtatcttcaccggtgcccgtgtcttctttgtccatgagggttatcaaggcctggtggatggtggagatcacatcaaggaagccacctgggagagcgtttcgatgat

SEQ ID NO: 15434 - DNA, 3063 bp, Homo sapiens
  source 1..3063: mol_type = unassigned DNA
cctcccccctttcccaaggacaatctgcaagaaagcagcggcggaggagagctaagactaaaagagtggatcatgacccatgaagagcaccatgcagccaaaaccctggggattggcaaagccattgctgtcttaacctctggtggagatgcccaaggtatgaatgctgctgtcagggctgtggttcgagttggtatcttcaccggtgcccgtgtcttctttgtccatgagggttatcaaggcctggtggatggtggagatcacatcaaggaagccacctgggagagcgtttcgatgatgcttcagctgggaggcacggtgattggaagtgcccggtgcaaggactttcgggaacgagaaggacgactccgagctgcctacaacctggtgaagcgtgggatcaccaatctctgtgtcattgggggtgatggcagcctcactggggctgacaccttccgttctgagtggagtgacttgttgagtgacctccagaaagcaggtaagatcacagatgaggaggctacgaagtccagctacctgaacattgtgggcctggttgggtcaattgacaatgacttctgtggcaccgatatgaccattggcactgactctgccctgcatcggatcatggaaattgtagatgccatcactaccactgcccagagccaccagaggacatttgtgttagaagtaatgggccgccactgtggatacctggcccttgtcacctctctgtcctgtggggccgactgggtttttattcctgaatgtccaccagatgacgactgggaggaacacctttgtcgccgactcagcgagacaaggacccgtggttctcgtctcaacatcatcattgtggctgagggtgcaattgacaagaatggaaaaccaatcacctcagaagacatcaagaatgttcgtatgaatgaagccagagaggccttagaatccatagcccattcccttctggcttctgagtctcctgacattgcttctccccttggtccttctgcacatctctccctggttccctgcccctgattgcctcccacaaagaaccattacaagacaagaggctgagctgtccatggtttacccaagtctctgcttgttttcttcctttgactctgcgtaaccctctctctgtccctctgttggtcccttcagctggtggttaagcgtctgggatatgacacccgggttactgtcttggggcatgtgcagaggggtgggacgccatcagcctttgacagaattctgggcagcaggatgggtgtggaagcagtgatggcacttttggaggggaccccagataccccagcctgtgtagtgagcctctctggtaaccaggctgtgcgcctgcccctcatggaatgtgtccaggtgaccaaagatgtgaccaaggccatggatgagaagaaatttgacgaagccctgaagctgagaggccggagcttcatgaacaactgggaggtgtacaagcttctagctcatgtcagacccccggtatctaagagtggttcgcacacagtggctgtgatgaacgtgggggctccggctgcaggcatgaatgctgctgttcgctccactgtgaggattggccttatccagggcaaccgagtgctcgttgtccatgatggtttcgagggcctggccaaggggcagatagaggaagctggctggagctatgttgggggctggactggccaaggtggctctaaacttgggactaaaaggactctacccaagaagagctttgaacagatcagtgccaatataactaagtttaacattcagggccttgtcatcattgggggctttgaggcttacacagggggcctggaactgatggagggcaggaagcagtttgatgagctctgcatcccatttgtggtcattcctgctacagtctccaacaatgtccctggctcagacttcagcgttggggctgacacagcactcaatactatctgcacaacctgtgaccgcatcaagcagtcagcagctggcaccaagcgtcgggtgtttatcattgagactatgggtggctactgtggctacctggctaccatggctggactggcagctggggccgatgctgcctacatttttgaggagcccttcaccattcgagacctgcaggcaaatgttgaacatctggtgcaaaagatgaaaacaactgtgaaaaggggcttggtgttaaggaatgaaaagtgcaatgagaactataccactgacttcattttcaacctgtactctgaggaggggaagggcatcttcgacagcaggaagaatgtgcttggtcacatgcagcagggtgggagcccaaccccatttgataggaattttgccactaagatgggcgccaaggctatgaactggatgtctgggaaaatcaaagagagttaccgtaatgggcggatctttgccaatactccagattcgggctgtgttctggggatgcgtaagagggctctggtcttccaaccagtggctgagctgaaggaccagacagattttgagcatcgaatccccaaggaacagtggtggctgaaactgaggcccatcctcaaaatcctagccaagtacgagattgacttggacacttcagaccatgcccacctggagcacatcacccggaagcggtccggggaagctgccgtctaaacctctctggagtgaggggaatagattacctgatcatggtcagctcacaccctaataagtccacatcttctcagtgttttagctgtttttttcattaggtttccttttattctgtaccttgcagccatgaccagttctggccaggagctggaggagcaggcagtgggtgggagctccttttaggtagaatttaacatgacttctgccccagctttatctgtcacacaaggctgggcacctctagtgctactgctagatatcacttactcagttagaattttcctaaaaataagctttatttatttctttgtgataacaaagagtcttggttcctctactacttttactacagtgacaaattgtaactacactaataaatgccaactggtcactgtg

SEQ ID NO: 15435 - DNA, 630 bp, Homo sapiens
  source 1..630: mol_type = unassigned DNA
cccctttcccaaggacaatctgcaagaaagcagcggcggaggagagctaagactaaaagagtggatcatgacccatgaagagcaccatgcagccaaaaccctggggattggcaaagccattgctgtcttaacctctggtggagatgcccaaggtatgaatgctgctgtcagggctgtggttcgagttggtatcttcaccggtgcccgtgtcttctttgtccatgagggttatcaaggcctggtggatggtggagatcacatcaaggaagccacctgggagagcgtttcgatgatgcttcagctggtatgttccagagaactccctgtcccatatttgctctgtccttgtttcatcccactctgttttgggctcatggtctcctaaattccctgtcatgtggtttcatgggaaggaattcagtgacaagagagggaccctatttgccctttactcttagcatttgaaaataccaccctggtttcctggggcagggagagggtggaggagtgatcacaggatgctttgctctttatggaaaggtcataaacaagactatggggactgacacataagcagatcttactctagggtcacagggaaggtctggccctgaaaataaccttaccaga

SEQ ID NO: 15436 - DNA, 580 bp, Homo sapiens
  source 1..580: mol_type = unassigned DNA
ctttcccaaggacaatctgcaagaaagcagcggcggaggagagctaagactaaaagagtggatcatgacccatgaagagcaccatgcagccaaaaccctggggattggcaaagccattgctgtcttaacctctggtggagatgcccaagaggacatttgtgttagaagtaatgggccgccactgtggatacctggcccttgtcacctctctgtcctgtggggccgactgggtttttattcctgaatgtccaccagatgacgactgggaggaacacctttgtcgccgactcagcgagacaaggacccgtggttctcgtctcaacatcatcattgtggctgagggtgcaattgacaagaatggaaaaccaatcacctcagaagacatcaagaatctggtggttaagcgtctgggatatgacacccgggttactgtcttggggcatgtgcagaggggtgggacgccatcagcctttgacagaattctgggcagcaggatgggtgtggaagcagtgatggcacttttggaggggaccccagataccccagcctgtgtagtgagcctctctggtaaccaggctgt

SEQ ID NO: 15437 - DNA, 542 bp, Homo sapiens
  source 1..542: mol_type = unassigned DNA
tttcccaaggacaatctgcaagaaagcagcggcggaggagagctaagactaaaagagtggatcatgacccatgaagagcaccatgcagccaaaaccctggggattggcaaagccattgctgtcttaacctctggtggagatgcccaaggtatgaatgctgctgtcagggctgtggttcgagttggtatcttcaccggtgcccgtgtcttctttgtccatgagggttatcaaggcctggtggatggtggagatcacatcaaggaagccacctgggagagcgtttcgatgatgcttcagctgggtcacagggaaggtctggccctgaaaataaccttaccagaggactggagccagagccagaagtggagctgaaatctgccagtcctcatgtgatggagatgaggtgacctgaaaccagaccacttaaaggacgaaggaactgagacagcctttcggagtctcaaaaaaatcctaagagtatcctgaggatttccacagtcctttatgctacttgctccatgttgttttaggcttctcatgtg

SEQ ID NO: 15438 - DNA, 689 bp, Homo sapiens
  source 1..689: mol_type = unassigned DNA
tttcccaaggacaatctgcaagaaagcagcggcggaggagagctaagactaaaagagtggatcatgacccatgaagagcaccatgcagccaaaaccctggggattggcaaagccattgctgtcttaacctctggtggagatgcccaaggtatgaatgctgctgtcagggctgtggttcgagttggtatcttcaccggtgcccgtgtcttctttgtccatgagggttatcaaggcctggtggatggtggagatcacatcaaggaagccacctgggagagcgtttcgatgatgcttcagctgctcagttccctaaaaatccatgggcaaaaatttaatatgcagtgtctagtgaaggctctacctaggtgctaagtaatggtgcctgccataaagtggtctgagaatgagccagaattctccaccagtatcccaaagtcatggctgcccaggagtacatatgatatgaaaacctaagtatacttacctctctcagggaggcacggtgattggaagtgcccggtgcaaggactttcgggaacgagaaggacgactccgagctgcctacaacctggtgaagcgtgggatcaccaatctctgtgtcattgggggtgatggcagcctcactggggctgacaccttccgttctgagtggagtgacttgttgagtgacctccagaaagcaggtaaga

SEQ ID NO: 15439 - DNA, 526 bp, Homo sapiens
  source 1..526: mol_type = unassigned DNA
aatctgcaagaaagcagcggcggaggagagctaagactaaaaggcaagaggggccattgagtgaagagcaagggggagagctgggagtgaggtgggaagagtggatcatgacccatgaagagcaccatgcagccaaaaccctggggattggcaaagccattgctgtcttaacctctggtggagatgcccaaggtatgaatgctgctgtcagggctgtggttcgagttggtatcttcaccggtgcccgtgtcttctttgtccatgagggttatcaaggcctggtggatggtggagatcacatcaaggaagccacctgggagagcgtttcgatgatgcttcagctgggaggcacggtgattggaagtgcccggtgcaaggactttcgggaacgagaaggacgactccgagctgcctacaacctggtgaagcgtgggatcaccaatctctgtgtcattgggggtgatggcagcctcactggggctgacaccttccgttctgagtggagtgacttgttgagtgacctcca

SEQ ID NO: 15440 - DNA, 492 bp, Homo sapiens
  source 1..492: mol_type = unassigned DNA
gagctaagactaaaagagtggatcatgacccatgaagagcaccatgcagccaaaaccctggggattggcaaagccattgctgtcttaacctctggtggagatgcccaaggtatgaatgctgctgtcagggctgtggttcgagttggtatcttcaccggtgcccgtgtcttctttgtccatgagggttatcaaggcctggtggatggtggagatcacatcaaggaagccacctgggagagcgtttcgatgatgcttcagctgggaggcacggtgattggaagtgcccggtgcaaggactttcgggaacgagaaggacgactccgagctgcctacaacctggtgaagcgtgggatcaccaatctctgtgtcattgggggtgatggcagcctcactggggctgacaccttccgttctgagtggagtgacttgttgagtgacctccagaaagcagatgacgactgggaggaacacctttgtcgccgactcagcgag

SEQ ID NO: 15441 - DNA, 2797 bp, Homo sapiens
  source 1..2797: mol_type = unassigned DNA
aatatctgtctgtttttgtctacgtgcgtgtcattgtgggtctgtaagggatgcttatacatgagtctgcatgaatttctgtgtcctgtgcctctataactgtcttagagatttcaggagaagaatatgagcggtttttacagagtggatcatgacccatgaagagcaccatgcagccaaaaccctggggattggcaaagccattgctgtcttaacctctggtggagatgcccaaggtatgaatgctgctgtcagggctgtggttcgagttggtatcttcaccggtgcccgtgtcttctttgtccatgagggttatcaaggcctggtggatggtggagatcacatcaaggaagccacctgggagagcgtttcgatgatgcttcagctgggaggcacggtgattggaagtgcccggtgcaaggactttcgggaacgagaaggacgactccgagctgcctacaacctggtgaagcgtgggatcaccaatctctgtgtcattgggggtgatggcagcctcactggggctgacaccttccgttctgagtggagtgacttgttgagtgacctccagaaagcaggtaagatcacagatgaggaggctacgaagtccagctacctgaacattgtgggcctggttgggtcaattgacaatgacttctgtggcaccgatatgaccattggcactgactctgccctgcatcggatcatggaaattgtagatgccatcactaccactgcccagagccaccagaggacatttgtgttagaagtaatgggccgccactgtggatacctggcccttgtcacctctctgtcctgtggggccgactgggtttttattcctgaatgtccaccagatgacgactgggaggaacacctttgtcgccgactcagcgagacaaggacccgtggttctcgtctcaacatcatcattgtggctgagggtgcaattgacaagaatggaaaaccaatcacctcagaagacatcaagaatggcagcaggatgggtgtggaagcagtgatggcacttttggaggggaccccagataccccagcctgtgtagtgagcctctctggtaaccaggctgtgcgcctgcccctcatggaatgtgtccaggtgaccaaagatgtgaccaaggccatggatgagaagaaatttgacgaagccctgaagctgagaggccggagcttcatgaacaactgggaggtgtacaagcttctagctcatgtcagacccccggtatctaagagtggttcgcacacagtggctgtgatgaacgtgggggctccggctgcaggcatgaatgctgctgttcgctccactgtgaggattggccttatccagggcaaccgagtgctcgttgtccatgatggtttcgagggcctggccaaggggcagatagaggaagctggctggagctatgttgggggctggactggccaaggtggctctaaacttgggactaaaaggactctacccaagaagagctttgaacagatcagtgccaatataactaagtttaacattcagggccttgtcatcattgggggctttgaggcttacacagggggcctggaactgatggagggcaggaagcagtttgatgagctctgcatcccatttgtggtcattcctgctacagtctccaacaatgtccctggctcagacttcagcgttggggctgacacagcactcaatactatctgcacaacctgtgaccgcatcaagcagtcagcagctggcaccaagcgtcgggtgtttatcattgagactatgggtggctactgtggctacctggctaccatggctggactggcagctggggccgatgctgcctacatttttgaggagcccttcaccattcgagacctgcaggcaaatgttgaacatctggtgcaaaagatgaaaacaactgtgaaaaggggcttggtgttaaggaatgaaaagtgcaatgagaactataccactgacttcattttcaacctgtactctgaggaggggaagggcatcttcgacagcaggaagaatgtgcttggtcacatgcagcagggtgggagcccaaccccatttgataggaattttgccactaagatgggcgccaaggctatgaactggatgtctgggaaaatcaaagagagttaccgtaatgggcggatctttgccaatactccagattcgggctgtgttctggggatgcgtaagagggctctggtcttccaaccagtggctgagctgaaggaccagacagattttgagcatcgaatccccaaggaacagtggtggctgaaactgaggcccatcctcaaaatcctagccaagtacgagattgacttggacacttcagaccatgcccacctggagcacatcacccggaagcggtccggggaagctgccgtctaaacctctctggagtgaggggaatagattacctgatcatggtcagctcacaccctaataagtccacatcttctcagtgttttagctgtttttttcattaggtttccttttattctgtaccttgcagccatgaccagttctggccaggagctggaggagcaggcagtgggtgggagctccttttaggtagaatttaacatgacttctgccccagctttatctgtcacacaaggctgggcacctctagtgctactgctagatatcacttactcagttagaattttcctaaaaataagctttatttatttctttgtgataacaaagagtcttggttcctctactacttttactacagtgacaaattgtaactacactaataaatgccaactggtcactgtg

SEQ ID NO: 15442 - DNA, 571 bp, Homo sapiens
  source 1..571: mol_type = unassigned DNA
atttcagcttgtcagtctacaagggtgtggctttcctctggaagaagtccaaagctctcaggctgcaaagctcagacttgagtggatcatgacccatgaagagcaccatgcagccaaaaccctggggattggcaaagccattgctgtcttaacctctggtggagatgcccaaggtatgaatgctgctgtcagggctgtggttcgagttggtatcttcaccggtgcccgtgtcttctttgtccatgagggttatcaaggcctggtggatggtggagatcacatcaaggaagccacctgggagagcgtttcgatgatgcttcagctgggaggcacggtgattggaagtgcccggtgcaaggactttcgggaacgagaaggacgactccgagctgcctacaacctggtgaagcgtgggatcaccaatctctgtgtcattgggggtgatggcagcctcactggggctgacaccttccgttctgagtggagtgacttgttgagtgacctccagaaagcaggtaagatcacagatgaggaggctacgaagtccagctacctgaacattgtgggcctg

SEQ ID NO: 15443 - DNA, 2867 bp, Homo sapiens
  source 1..2867: mol_type = unassigned DNA
agacttggtatagtgggagagcctgactgaggtggctctagccagtctaattgccgttcctttagctagtggcatcttgattcctgctgtgtcttaactgaccattgtcttaaattctagagtggatcatgacccatgaagagcaccatgcagccaaaaccctggggattggcaaagccattgctgtcttaacctctggtggagatgcccaaggtatgaatgctgctgtcagggctgtggttcgagttggtatcttcaccggtgcccgtgtcttctttgtccatgagggttatcaaggcctggtggatggtggagatcacatcaaggaagccacctgggagagcgtttcgatgatgcttcagctgggaggcacggtgattggaagtgcccggtgcaaggactttcgggaacgagaaggacgactccgagctgcctacaacctggtgaagcgtgggatcaccaatctctgtgtcattgggggtgatggcagcctcactggggctgacaccttccgttctgagtggagtgacttgttgagtgacctccagaaagcaggtaagatcacagatgaggaggctacgaagtccagctacctgaacattgtgggcctggttgggtcaattgacaatgacttctgtggcaccgatatgaccattggcactgactctgccctgcatcggatcatggaaattgtagatgccatcactaccactgcccagagccaccagaggacatttgtgttagaagtaatgggccgccactgtggatacctggcccttgtcacctctctgtcctgtggggccgactgggtttttattcctgaatgtccaccagatgacgactgggaggaacacctttgtcgccgactcagcgagacaaggacccgtggttctcgtctcaacatcatcattgtggctgagggtgcaattgacaagaatggaaaaccaatcacctcagaagacatcaagaatctggtggttaagcgtctgggatatgacacccgggttactgtcttggggcatgtgcagaggggtgggacgccatcagcctttgacagaattctgggcagcaggatgggtgtggaagcagtgatggcacttttggaggggaccccagataccccagcctgtgtagtgagcctctctggtaaccaggctgtgcgcctgcccctcatggaatgtgtccaggtgaccaaagatgtgaccaaggccatggatgagaagaaatttgacgaagccctgaagctgagaggccggagcttcatgaacaactgggaggtgtacaagcttctagctcatgtcagacccccggtatctaagagtggttcgcacacagtggctgtgatgaacgtgggggctccggctgcaggcatgaatgctgctgttcgctccactgtgaggattggccttatccagggcaaccgagtgctcgttgtccatgatggtttcgagggcctggccaaggggcagatagaggaagctggctggagctatgttgggggctggactggccaaggtggctctaaacttgggactaaaaggactctacccaagaagagctttgaacagatcagtgccaatataactaagtttaacattcagggccttgtcatcattgggggctttgaggcttacacagggggcctggaactgatggagggcaggaagcagtttgatgagctctgcatcccatttgtggtcattcctgctacagtctccaacaatgtccctggctcagacttcagcgttggggctgacacagcactcaatactatctgcacaacctgtgaccgcatcaagcagtcagcagctggcaccaagcgtcgggtgtttatcattgagactatgggtggctactgtggctacctggctaccatggctggactggcagctggggccgatgctgcctacatttttgaggagcccttcaccattcgagacctgcaggcaaatgttgaacatctggtgcaaaagatgaaaacaactgtgaaaaggggcttggtgttaaggaatgaaaagtgcaatgagaactataccactgacttcattttcaacctgtactctgaggaggggaagggcatcttcgacagcaggaagaatgtgcttggtcacatgcagcagggtgggagcccaaccccatttgataggaattttgccactaagatgggcgccaaggctatgaactggatgtctgggaaaatcaaagagagttaccgtaatgggcggatctttgccaatactccagattcgggctgtgttctggggatgcgtaagagggctctggtcttccaaccagtggctgagctgaaggaccagacagattttgagcatcgaatccccaaggaacagtggtggctgaaactgaggcccatcctcaaaatcctagccaagtacgagattgacttggacacttcagaccatgcccacctggagcacatcacccggaagcggtccggggaagctgccgtctaaacctctctggagtgaggggaatagattacctgatcatggtcagctcacaccctaataagtccacatcttctcagtgttttagctgtttttttcattaggtttccttttattctgtaccttgcagccatgaccagttctggccaggagctggaggagcaggcagtgggtgggagctccttttaggtagaatttaacatgacttctgccccagctttatctgtcacacaaggctgggcacctctagtgctactgctagatatcacttactcagttagaattttcctaaaaataagctttatttatttctttgtgataacaaagagtcttggttcctctactacttttactacagtgacaaattgtaactacactaataaatgccaactggtcactgtg

SEQ ID NO: 15444 - DNA, 585 bp, Homo sapiens
  source 1..585: mol_type = unassigned DNA
atcttgattcctgctgtgtcttaactgaccattgtcttaaattctagagtggatcatgacccatgaagagcaccatgcagccaaaaccctggggattggcaaagccattgctgtcttaacctctggtggagatgcccaaggcatgaatgctgctgttcgctccactgtgaggattggccttatccagggcaaccgagtgctcgttgtccatgatggtttcgagggcctggccaaggggcagatagaggaagctggctggagctatgttgggggctggactggccaaggtggctctaaacttgggactaaaaggactctacccaagaagagctttgaacagatcagtgccaatataactaagtttaacattcagggccttgtcatcattgggggctttgaggcttacacagggggcctggaactgatggagggcaggaagcagtttgatgagctctgcatcccatttgtggtcattcctgctacagtctccaacaatgtccctggctcagacttcagcgttggggctgacacagcactcaatactatctgcacaacctgtgaccgcatcaagcagtcagcagctgg

SEQ ID NO: 15445 - DNA, 775 bp, Homo sapiens
  source 1..775: mol_type = unassigned DNA
ttagacactcagtttaaaccctcttatcctatcttcactggaagagcaaagcaatctcctaccttgttttgtcaataagaagggaatattattaagccccagtaatcctgttgattaccatagtgggcatgtttctctagaagtaagtagaatctttggggttccgatggcaagaatacagagtcatcaagctttagatgaaatctgtttggggaggtaaagcccagtaagttctttgctgcagttcttaattgtgagactcagtcttgtgatttggaaaagggctcgagtatcctgactctctaggctgagccaagatggggcagcctgagccagactgtctttgttctctgggctcctgcagggcagcaggatgggtgtggaagcagtgatggcacttttggaggggaccccagataccccagcctgtgtagtgagcctctctggtaaccaggctgtgcgcctgcccctcatggaatgtgtccaggtgaccaaagatgtgaccaaggccatggatgagaagaaatttgacgaagccctgaagctgagaggccggagcttcatgaacaactgggaggtgtacaagcttctagctcatgtcagacccccggtatctaagagtggttcgcacacagtggctgtgatgaacgtgggggctccggctgcaggcatgaatgctgctgttcgctccactgtgaggattggccttatccagggcaaccgagtgctcgttgtccatgatggtttcgagggcctggccaaggggcagatagag

SEQ ID NO: 15446 - DNA, 887 bp, Homo sapiens
  source 1..887: mol_type = unassigned DNA
tgagcctctctggtaaccaggctgtgcgcctgcccctcatggaatgtgtccaggtgaccaaagatgtgaccaaggccatggatgagaagaaatttgacgaagccctgaagctgagaggccggtgaggagatgacgggaagctcactagctacagaaatcagaggcgtgaacgaagccaaagatctccatggctccaggcccaaaacatgagcttctgctgcttccttttctgattctctctgcagcaagttcctgcccaagaaaattagttgtgaggagcttcatgaacaactgggaggtgtacaagcttctagctcatgtcagacccccggtatctaagagtggttcgcacacagtggctgtgatgaacgtgggggctccggctgcaggcatgaatgctgctgttcgctccactgtgaggattggccttatccagggcaaccgagtgctcgttgtccatgatggtttcgagggcctggccaaggggcagatagaggaagctggctggagctatgttgggggctggactggccaaggtggctctaaacttgggactaaaaggactctacccaagaagagctttgaacagatcagtgccaatataactaagtttaacattcagggccttgtcatcattgggggctttgaggcttacacagggggcctggaactgatggagggcaggaagcagtttgatgagctctgcatcccatttgtggtcattcctgctacagtctccaacaatgtccctggctcagacttcagcgttggggctgacacagcactcaatactatctgcacaacctgtgaccgcatcaagcagtcagcagctggcaccaagcgtcgggtgtttatcattgagactatgggtggctactgtggctacc

SEQ ID NO: 15447 - DNA, 626 bp, Homo sapiens
  source 1..626: mol_type = unassigned DNA
gggggctggactggccaaggtggctctaaacttgggactaaaaggactctacccaagaagagctttgaacagatcagtgccaatataactaagtttaacattcagggccttgtcatcattgggggctttgaggtgagtgcctgccaccatttcttcctctctccctcctacctcctctccctctccccaatcctgcccttgtgctctcttcttcttaggcttacacagggggcctggaactgatggagggcaggaagcagtttgatgagctctgcatcccatttgtggtcattcctgctacagtctccaacaatgtccctggctcagacttcagcgttggggctgacacagcactcaatactatctgcacaacctgtgaccgcatcaagcagtcagcagctggcaccaagcgtcgggtgtttatcattgagactatgggtggctactgtggctacctggctaccatggctggactggcagctggggccgatgctgcctacatttttgaggagcccttcaccattcgagacctgcaggcaaatgttgaacatctggtgcaaaagatgaaaacaactgtgaaaaggggcttggtgttaaggaatgaaaagtgcaatgagaactatacc

SEQ ID NO: 15448 - DNA, 425 bp, Homo sapiens
  source 1..425: mol_type = unassigned DNA
ctcaattttcctgtctcttccccaaattccaattccccttcccctccccgccatcactgatcaactaggactctacccaagaagagctttgaacagatcagtgccaatataactaagtttaacattcagggccttgtcatcattgggggctttgaggcttacacagggggcctggaactgatggagggcaggaagcagtttgatgagctctgcatcccatttgtggtcattcctgctacagtctccaacaatgtccctggctcagacttcagcgttggggctgacacagcactcaatactatctgcacaacctgtgaccgcatcaagcagtcagcagctggcaccaagcgtcgggtgtttatcattgagactatgggtggctactgtggctacctggctaccatggctggactggcagctggggc

SEQ ID NO: 15449 - DNA, 588 bp, Homo sapiens
  source 1..588: mol_type = unassigned DNA
tccccttcccctccccgccatcactgatcaactaggactctacccaagaagagctttgaacagatcagtgccaatataactaagtttaacattcagggccttgtcatcattgggggctttgaggcttacacagggggcctggaactgatggagggcaggaagcagtttgatgagctctgcatcccatttgtggtcattcctgctacagtctccaacaatgtccctggctcagacttcagcgttggggctgacacagcactcaatactatctgcacagtgagagcctatcaccacttcccatcccttttggccaggattataatccttaaactgagtgtggtcccaaacagtgagctactctttatatcaagcaaatgggaatgtttgaaaatgattcttcagctgggcatggtggctcacacttctaatcccagcactttgggaggccaaggcaggcagatcacttggggtcaggagttcaagagcagcctggccaacatggtgaaaccccatctctactaaaaatacaaaaactagctgggtgtggtggtaggcgcctgtaatcccagctacttgggaggctgaggc

SEQ ID NO: 15450 - DNA, 289 bp, Homo sapiens
  source 1..289: mol_type = unassigned DNA
cccatttgtggtcattcctgctacagtctccaacaatgtccctggctcagacttcagcgttggggctgacacagcactcaatactatctgcacagcaaatgttgaacatctggtgcaaaagatgaaaacaactgtgaaaaggggcttggtgttaaggaatgaaaagtgcaatgagaactataccactgacttcattttcaacctgtactctgaggaggggaagggcatcttcgacagcaggaagaatgtgcttggtcacatgcagcagggtgggagcccaaccccattt

SEQ ID NO: 15451 - DNA, 3078 bp, Homo sapiens
  source 1..3078: mol_type = unassigned DNA
agacttggtatagtgggagagcctgactgagagtggatcatgacccatgaagagcaccatgcagccaaaaccctggggattggcaaagccattgctgtcttaacctctggtggagatgcccaaggtatgaatgctgctgtcagggctgtggttcgagttggtatcttcaccggtgcccgtgtcttctttgtccatgagggttatcaaggcctggtggatggtggagatcacatcaaggaagccacctgggagagcgtttcgatgatgcttcagctgggaggcacggtgattggaagtgcccggtgcaaggactttcgggaacgagaaggacgactccgagctgcctacaacctggtgaagcgtgggatcaccaatctctgtgtcattgggggtgatggcagcctcactggggctgacaccttccgttctgagtggagtgacttgttgagtgacctccagaaagcaggtaagatcacagatgaggaggctacgaagtccagctacctgaacattgtgggcctggttgggtcaattgacaatgacttctgtggcaccgatatgaccattggcactgactctgccctgcatcggatcatggaaattgtagatgccatcactaccactgcccagagccaccagaggacatttgtgttagaagtaatgggccgccactgtggatacctggcccttgtcacctctctgtcctgtggggccgactgggtttttattcctgaatgtccaccagatgacgactgggaggaacacctttgtcgccgactcagcgagacaaggacccgtggttctcgtctcaacatcatcattgtggctgagggtgcaattgacaagaatggaaaaccaatcacctcagaagacatcaagaatctggtggttaagcgtctgggatatgacacccgggttactgtcttggggcatgtgcagaggggtgggacgccatcagcctttgacagaattctgggcagcaggatgggtgtggaagcagtgatggcacttttggaggggaccccagataccccagcctgtgtagtgagcctctctggtaaccaggctgtgcgcctgcccctcatggaatgtgtccaggtgaccaaagatgtgaccaaggccatggatgagaagaaatttgacgaagccctgaagctgagaggccggagcttcatgaacaactgggaggtgtacaagcttctagctcatgtcagacccccggtatctaagagtggttcgcacacagtggctgtgatgaacgtgggggctccggctgcaggcatgaatgctgctgttcgctccactgtgaggattggccttatccagggcaaccgagtgctcgttgtccatgatggtttcgagggcctggccaaggggcagatagaggaagctggctggagctatgttgggggctggactggccaaggtggctctaaacttgggactaaaaggactctacccaagaagagctttgaacagatcagtgccaatataactaagtttaacattcagggccttgtcatcattgggggctttgaggcttacacagggggcctggaactgatggagggcaggaagcagtttgatgagctctgcatcccatttgtggtcattcctgctacagtctccaacaatgtccctggctcagacttcagcgttggggctgacacagcactcaatactatctgcacaacctgtgaccgcatcaagcagtcagcagctggcaccaagcgtcgggtgtttatcattgagactatgggtggctactgtggctacctggctaccatggctggactggcagctggggccgatgctgcctacatttttgaggagcccttcaccattcgagacctgcaggcaaatgttgaacatctggtgcaaaagatgaaaacaactgtgaaaaggggcttggtgttaaggaatgaaaagtgcaatgagaactataccactgacttcattttcaacctgtactctgaggaggggaagggcatcttcgacagcaggaagaatgtgcttggtcacatgcagcagggtgggagcccaaccccatttgataggaattttgccactaagatgggcgccaaggctatgaactggatgtctgggaaaatcaaagagagttaccgtaatgggcggatctttgccaatactccagattcgggctgtgttctggggatgcgtaagagggctctggtcttccaaccagtggctgagctgaaggaccagacagattttgagcatcgaatccccaaggaacagtggtggctgaaactgaggcccatcctcaaaatcctagccaagtacgagattgacttggacacttcagaccatgcccacctggagcacatcacccggaagcggtccggggaagctgccgtctaaacctctctggagtgaggggaatagattacctgatcatggtcagctcacaccctaataagtccacatcttctcagtgttttagctgtttttttcattaggtttccttttattctgtaccttgcagccatgaccagttctggccaggagctggaggagcaggcagtgggtgggagctccttttaggtagaatttaacatgacttctgccccagctttatctgtcacacaaggctgggcacctctagtgctactgctagatatcacttactcagttagaattttcctaaaaataagctttatttatttctttgtgataacaaagagtcttggttcctctactacttttactacagtgacaaattgtaactacactaataaatgccaactggtcactgtgcttttgcttctcctgttatcatcttcctaagtggaatgtaatactgtcagccccatgtatcagacacttgtctgatgaagcagtaaagacgttaagggtatcacagggggtggaggaagggattatctctagtacactacttgctggctgtctgaaaaattgtcactgccaaactctaaaaacagttctaaatagtgactgagaaggtttgttgctggagtcagggaataaggcagccaaatactctttgcacagttctttagtgggaagagaaattaacaataaatatcaagcactgtg

SEQ ID NO: 15452 - DNA, 381 bp, Homo sapiens
  source 1..381: mol_type = unassigned DNA
cctcccccctttcccaaggacaatctgcaagaaagcagcggcggaggagagctaagactaaaagagtggatcatgacccatgaagagcaccatgcagccaaaaccctggggattggcaaagccattgctgtcttaacctctggtggagatgcccaaggtatgaatgctgctgtcagggctgtggttcgagttggtatcttcaccggtgcccgtgtcttctttgtccatgagggttatcaaggcctggtggatggtggagatcacatcaaggaagccacctgggagagcgtttcgatgatgcttcagctgctcagttccctaaaaatccatgggcaaaaatttaatatgcagtgtctagtgaaggctctacctaggtgctaa

SEQ ID NO: 15453 - DNA, 432 bp, Homo sapiens
  source 1..432: mol_type = unassigned DNA
gcttctatgggggctgccccctctcccatcgcagggtaactggcaccaggctgttaagctgtggatgggcaaccgcacagtgcattggatgtatgaacgctgccgtccgtgccgtggtgcgcatgggtatctacgtgggggccaaggtgtacttcatctacgagggctaccagggcatggtggacggaggctcaaacatcgcagaggccgactgggagagtgtctccagcatcctgcaagtgggcgggacgatcattggcagtgcgcggtgccaggccttccgcacgcgggaaggccgcctgaaggctgcttgcaacctgctgcagcgcggcatcaccaacctgtgtgtgatcggcggggacgggagcctcaccggggccaacctcttccggaaggagtggagtgggctgctggaggagctggccaggaacg

SEQ ID NO: 15454 - DNA, 2654 bp, Homo sapiens
  source 1..2654: mol_type = unassigned DNA
gagtcaggcgcgcgcgggcagggtccccattgcctgctgcgcacccggacgtgcggctcccctcggcctcctcgccatggacgcggacgactcccgggcccccaagggctccttgcggaagttcctggagcacctctccggggccggcaaggccatcggcgtgctgaccagcggcggggatgctcaaggtatgaacgctgccgtccgtgccgtggtgcgcatgggtatctacgtgggggccaaggtgtacttcatctacgagggctaccagggcatggtggacggaggctcaaacatcgcagaggccgactgggagagtgtctccagcatcctgcaagtgggcgggacgatcattggcagtgcgcggtgccaggccttccgcacgcgggaaggccgcctgaaggctgcttgcaacctgctgcagcgcggcatcaccaacctgtgtgtgatcggcggggacgggagcctcaccggggccaacctcttccggaaggagtggagtgggctgctggaggagctggccaggaacggccagatcgataaggaggccgtgcagaagtacgcctacctcaacgtggtgggcatggtgggctccatcgacaatgatttctgcggcaccgacatgaccatcggcacggactccgccctgcacaggatcatcgaggtcgtcgacgccatcatgaccacggcccagagccaccagaggaccttcgttctggaggtgatgggacgacactgtgggtacctggccctggtgagtgccttggcctgcggtgcggactgggtgttccttccagaatctccaccagaggaaggctgggaggagcagatgtgtgtcaaactctcggagaaccgtgcccggaaaaaaaggctgaatattattattgtggctgaaggagcaattgatacccaaaataaacccatcacctctgagaaaatcaaagagcttgtcgtcacgcagctgggctatgacacacgtgtgaccatcctcgggcacgtgcagagaggagggaccccttcggcattcgacaggatcttggccagccgcatgggagtggaggcagtcatcgccttgctagaggccaccccggacaccccagcttgcgtcgtgtcactgaacgggaaccacgccgtgcgcctgccgctgatggagtgcgtgcagatgactcaggatgtgcagaaggcgatggacgagaggagatttcaagatgcggttcgactccgagggaggagctttgcgggcaacctgaacacctacaagcgacttgccatcaagctgccggatgatcagatcccaaagaccaattgcaacgtagctgtcatcaacgtgggggcacccgcggctgggatgaacgcagccgtacgctcagctgtgcgcgtgggcattgccgacggccacaggatgctcgccatctatgatggctttgacggcttcgccaagggccagatcaaagaaatcggctggacagatgtcgggggctggaccggccaaggaggctccattcttgggacaaaacgcgttctcccggggaagtacttggaagagatcgccacacagatgcgcacgcacagcatcaacgcgctgctgatcatcggtggattcgaggcctacctgggactcctggagctgtcagccgcccgggagaagcacgaggagttctgtgtccccatggtcatggttcccgctactgtgtccaacaatgtgccgggttccgatttcagcatcggggcagacaccgccctgaacactatcaccgacacctgcgaccgcatcaagcagtccgccagcggaaccaagcggcgcgtgttcatcatcgagaccatgggcggctactgtggctacctggccaacatgggggggctcgcggccggagctgatgccgcatacattttcgaagagcccttcgacatcagggatctgcagtccaacgtggagcacctgacggagaaaatgaagaccaccatccagagaggccttgtgctcagaaatgagagctgcagtgaaaactacaccaccgacttcatttaccagctgtattcagaagagggcaaaggcgtgtttgactgcaggaagaacgtgctgggtcacatgcagcagggtggggcaccctctccatttgatagaaactttggaaccaaaatctctgccagagctatggagtggatcactgcaaaactcaaggaggcccggggcagaggaaaaaaatttaccaccgatgattccatttgtgtgctgggaataagcaaaagaaacgttatttttcaacctgtggcagagctgaagaagcaaacggattttgagcacaggattcccaaagaacagtggtggctcaagctacggcccctcatgaaaatcctggccaagtacaaggccagctatgacgtgtcggactcaggccagctggaacatgtgcagccctggagtgtctgacccagtcccgcctgcatgtgcctgcagccaccgtggactgtctgtttttgtaacacttaagttattttatcagcactttatgcacgtattattgacattaatacctaatcggcgagtgcccatctgccccacctgctccagtgcgtgctgtctgtggagtgtgtctcatgctttcagatgtgcatatgagcagaattaattaaacatttgcctatgactccaa

SEQ ID NO: 15455 - DNA, 143 bp, Homo sapiens
  source 1..143: mol_type = unassigned DNA
ccatcggcgtgctgaccagcggcggggatgctcaagggctgggttctcagagaaagaaaacgtgatgcagcagaggatgggattgaagaaacaggagagtgaagtggaaatagcctggcccgcgtgacttaaaccggcccgga

SEQ ID NO: 15456 - DNA, 2769 bp, Homo sapiens
  source 1..2769: mol_type = unassigned DNA
atttaacattgaagagcggaaggtggcggagactcggcgcgccccaggccccgggtgcacgtgggggcgccggtgcccggatgatggagtgtcccgatccgtgcaatccctggcggggctgggttctcagagaaagaaaacgtgatgcagcagaggatgggattgaagaaacaggagagtgaagtggaaatagcctggcccgcgtgacttaaaccggcccggagatgtgcgggtatgaacgctgccgtccgtgccgtggtgcgcatgggtatctacgtgggggccaaggtgtacttcatctacgagggctaccagggcatggtggacggaggctcaaacatcgcagaggccgactgggagagtgtctccagcatcctgcaagtggtgctgtaaggggtgactggagggagaagcctggctgctggtcacaccgcttcccttgtcctggccggcatgctctggtgggcgggacgatcattggcagtgcgcggtgccaggccttccgcacgcgggaaggccgcctgaaggctgcttgcaacctgctgcagcgcggcatcaccaacctgtgtgtgatcggcggggacgggagcctcaccggggccaacctcttccggaaggagtggagtgggctgctggaggagctggccaggaacggccagatcgataaggaggccgtgcagaagtacgcctacctcaacgtggtgggcatggtgggctccatcgacaatgatttctgcggcaccgacatgaccatcggcacggactccgccctgcacaggatcatcgaggtcgtcgacgccatcatgaccacggcccagagccaccagaggaccttcgttctggaggtgatgggacgacactgtgggtacctggccctggtgagtgccttggcctgcggtgcggactgggtgttccttccagaatctccaccagaggaaggctgggaggagcagatgtgtgtcaaactctcggagaaccgtgcccggaaaaaaaggctgaatattattattgtggctgaaggagcaattgatacccaaaataaacccatcacctctgagaaaatcaaagagcttgtcgtcacgcagctgggctatgacacacgtgtgaccatcctcgggcacgtgcagagaggagggaccccttcggcattcgacaggatcttggccagccgcatgggagtggaggcagtcatcgccttgctagaggccaccccggacaccccagcttgcgtcgtgtcactgaacgggaaccacgccgtgcgcctgccgctgatggagtgcgtgcagatgactcaggatgtgcagaaggcgatggacgagaggagatttcaagatgcggttcgactccgagggaggagctttgcgggcaacctgaacacctacaagcgacttgccatcaagctgccggatgatcagatcccaaagaccaattgcaacgtagctgtcatcaacgtgggggcacccgcggctgggatgaacgcagccgtacgctcagctgtgcgcgtgggcattgccgacggccacaggatgctcgccatctatgatggctttgacggcttcgccaagggccagatcaaagaaatcggctggacagatgtcgggggctggaccggccaaggaggctccattcttgggacaaaacgcgttctcccggggaagtacttggaagagatcgccacacagatgcgcacgcacagcatcaacgcgctgctgatcatcggtggattcgaggcctacctgggactcctggagctgtcagccgcccgggagaagcacgaggagttctgtgtccccatggtcatggttcccgctactgtgtccaacaatgtgccgggttccgatttcagcatcggggcagacaccgccctgaacactatcaccgacacctgcgaccgcatcaagcagtccgccagcggaaccaagcggcgcgtgttcatcatcgagaccatgggcggctactgtggctacctggccaacatgggggggctcgcggccggagctgatgccgcatacattttcgaagagcccttcgacatcagggatctgcagtccaacgtggagcacctgacggagaaaatgaagaccaccatccagagaggccttgtgctcagaaatgagagctgcagtgaaaactacaccaccgacttcatttaccagctgtattcagaagagggcaaaggcgtgtttgactgcaggaagaacgtgctgggtcacatgcagcagggtggggcaccctctccatttgatagaaactttggaaccaaaatctctgccagagctatggagtggatcactgcaaaactcaaggaggcccggggcagaggaaaaaaatttaccaccgatgattccatttgtgtgctgggaataagcaaaagaaacgttatttttcaacctgtggcagagctgaagaagcaaacggattttgagcacaggattcccaaagaacagtggtggctcaagctacggcccctcatgaaaatcctggccaagtacaaggccagctatgacgtgtcggactcaggccagctggaacatgtgcagccctggagtgtctgacccagtcccgcctgcatgtgcctgcagccaccgtggactgtctgtttttgtaacacttaagttattttatcagcactttatgcacgtattattgacattaatacctaatcggcgagtgcccatctgccccacctgctccagtgcgtgctgtctgtggagtgtgtctcatgctttcagatgtgcatatgagcagaattaattaaacatttgccta

SEQ ID NO: 15457 - DNA, 658 bp, Homo sapiens
  source 1..658: mol_type = unassigned DNA
attccagtaaaaggaccccagcatcaacgttcttcctgcagggctgggttctcagagaaagaaaacgtgatgcagcagaggatgggattgaagaaacaggagagtgaagtggaaatagcctggcccgcgtgacttaaaccggcccggagatgtgcgggtatgaacgctgccgtccgtgccgtggtgcgcatgggtatctacgtgggggccaaggtgtacttcatctacgagggctaccagggcatggtggacggaggctcaaacatcgcagaggccgactgggagagtgtctccagcatcctgcaagtgggcgggacgatcattggcagtgcgcggtgccaggccttccgcacgcgggaaggccgcctgaaggctgcttgcaacctgctgcagcgcggcatcaccaacctgtgtgtgatcggcggggacgggagcctcaccggggccaacctcttccggaaggagtggagtgggctgctggaggagctggccaggaacggccagatcgataaggaggccgtgcagaagtacgcctacctcaacgtggtgggcatggtgggctccatcgacaatgatttctgcggcaccgacatgaccatcggcacggactccgccctgcacaggatcatcgaggtcgtcgacgccatcatgaccacgg

SEQ ID NO: 15458 - DNA, 705 bp, Homo sapiens
  source 1..705: mol_type = unassigned DNA
ttaaggaagttcacctccagatgtactcagagggcctggtcttagctgccacagatttacaaacccttacagtatgaacgctgccgtccgtgccgtggtgcgcatgggtatctacgtgggggccaaggtgtacttcatctacgagggctaccagggcatggtggacggaggctcaaacatcgcagaggccgactgggagagtgtctccagcatcctgcaagtgggcgggacgatcattggcagtgcgcggtgccaggccttccgcacgcgggaaggccgcctgaaggctgcttgcaacctgctgcagcgcggcatcaccaacctgtgtgtgatcggcggggacgggagcctcaccggggccaacctcttccggaaggagtggagtgggctgctggaggagctggccaggaacggccagatcgataaggaggccgtgcagaagtacgcctacctcaacgtggtgggcatggtgggctccatcgacaatgatttctgcggcaccgacatgaccatcggcacggactccgccctgcacaggatcatcgaggtcgtcgacgccatcatgaccacggcccagagccaccagaggaccttcgttctggaggtgatgggacgacactgtgggtacctggccctggtgagtgccttggcctgcggtgcggactgggtgttccttccagaatctccaccagaggaaggctggga

SEQ ID NO: 15459 - DNA, 1140 bp, Homo sapiens
  source 1..1140: mol_type = unassigned DNA
gtttccgtgggagagatccagccgtggctgtcgacagcagctgccgactgtgcccaatagagaaggtatctgggaaagagcccagcacggggccggggagtgtgagtgtgtcctggcacaggcaggcagaaggtgtccaacgtgcaactggagagcgcagaggtggctcaagtccccttcctcgcaggagtctggaaggctactgcatagcgtttgccttagtagaaaatggaccatttttgaagcctaggtccctgcaggcctcctggctaactcggctgtcaaagccccttttctctgctttctgagctgtttccaggactgagtgggtgctccctctgtttctctgctttctgagctgtgtccggggctccctctgtttctcttccagccaccagaggaccttcgttctggaggtgatgggacgacactgtgggtacctggccctggtgagtgccttggcctgcggtgcggactgggtgttccttccagaatctccaccagaggaaggctgggaggagcagatgtgtgtcaaactctcggagaaccgtgcccggaaaaaaaggctgaatattattattgtggctgaaggagcaattgatacccaaaataaacccatcacctctgagaaaatcaaagagcttgtcgtcacgcagctgggctatgacacacgtgtgaccatcctcgggcacgtgcagagaggagggaccccttcggcattcgacaggatcttggccagccgcatgggagtggaggcagtcatcgccttgctagaggccaccccggacaccccagcttgcgtcgtgtcactgaacgggaaccacgccgtgcgcctgccgctgatggagtgcgtgcagatgactcaggatgtgcagaaggcgatggacgagaggagatttcaagatgcggttcgactccgagggaggagctttgcgggcaacctgaacacctacaagcgacttgccatcaagctgccggatgatcagatcccaaagaccaattgcaacgtagctgtcatcaacgtgggggcacccgcggctgggatgaacgcagccgtacgctcagctgtgcgcgtgggcattgccgacggccacaggatgctcgccatctatgatggctttgacggcttcgccaagggcc

SEQ ID NO: 15460 - DNA, 425 bp, Homo sapiens
  source 1..425: mol_type = unassigned DNA
gtggctgtcgacagcagctgccgactgtgcccaatagagaagccaccagaggaccttcgttctggaggtgatgggacgacactgtgggtacctggccctggtgagtgccttggcctgcggtgcggactgggtgttccttccagaatctccaccagaggaaggctgggaggagcagatgtgtgtcaaactctcggagaaccgtgcccggaaaaaaaggctgaatattattattgtggctgaaggagcaattgatacccaaaataaacccatcacctctgagaaaatcaaagagcttgtcgtcacgcagctgggctatgacacacgtgtgaccatcctcgggcacgtgcagagaggagggaccccttcggcattcgacaggatcttggccagccgcatgggagtggaggcagtcatcgccttgctag

SEQ ID NO: 15461 - DNA, 552 bp, Homo sapiens
  source 1..552: mol_type = unassigned DNA
cgcagaggtggctcaagtccccttcctcgcaggagtctggaaggctactgcatagcgtttgccttagtagaaaatggaccatttttgaagcctaggtccctgcaggcctcctggctaactcggctgtcaaagccccttttctctgctttctgagctgtttccaggactgagtgggtgctccctctgtttctctgctttctgagctgtgtccggggctccctctgtttctcttccagccaccagaggaccttcgttctggaggtgatgggacgacactgtgggtacgtacctgcggtgggtccggtggacgcggttcaggtgggggaccctcagcatcatctccctgaggctgcaccccacatcctgaatgctcccgtggaaagtcctgaaggggccggcatcccgcttcatacctggcgttaggtacctggccctggtgagtgccttggcctgcggtgcggactgggtgttccttccagaatctccaccagaggaaggctgggaggagcagatgtgtgtcaaactctcggagaaccgtgcccggaaaaaaag

SEQ ID NO: 15462 - DNA, 496 bp, Homo sapiens
  source 1..496: mol_type = unassigned DNA
tgccgacggccacaggatgctcgccatctatgatggctttgacggcttcgccaagggccagatcaaagaaatcggctggacagatgtcgggggctggaccggccaaggaggctccattcttgggacaaaacgcgttctcccggggaagtacttggaagagatcgccacacagatgcgcacgcacagcatcaacgcgctgctgatcatcggtggattcgaggcttacaagagtgcgtgcgacatggccgaggcacgaggccgccaccaggagctttgcatccccctgtgtgtggtgccggccacgattagcaacaatgtcccaggcacagaaataagcctgggctccgacactggcctgaatgctgttgttgagacctgcgaccgcatcaagcagtccgccagcggaaccaagcggcgcgtgttcatcatcgagaccatgggcggctactgtggctacctggccaacatgggggggctcgcggccggagctgatgcc

SEQ ID NO: 15463 - DNA, 1698 bp, Homo sapiens
  source 1..1698: mol_type = unassigned DNA
gaactggatcagatttatgttttttatagatggggtcctttctgtgtgaacggattggagggtcccggggtgggagctgaggcccaggaagagggcgttgcagccggactgatgtatgggtgggaaggcggccgatgcatttctttgccatttttctccccgccgagcttgggtcctcatggagggcggatggcagacatttcactctgggatccgatgcctgtgcatctggaagacttccccaggtgcctgggtctaagaaccaccatctgcctttgagtagagtttccataaatgtaacattcgccaatggatggaagatggccgcacctctaaaatcacagggagcttttcagaagaaaatagaatagcacagcggttctcacggactaagctggcaggggacagtcccctaacatctcagctaacacctaacggtgtctgtgtccggtgaaagcggcttcagcagggacagtcacagagcagcgtggagtgagctggcttgtggggtcgtcttttccgtccccttctatggggcctgggagaagggagcggcagatggccaggcccccaaaacgggacatcgaggtcacctccaggtggctgccatggtggggttgcgggggaccacgttcacacccactccgagggcacatcctggctgctgcacacccttcacctctgcgggatgctgggaccgcatgtttgggcgcggtgggggggccttgctgcactcactcttgggggagctctgggatggtgggcgcgccccgggcctgggctggagtgactgatcgcttctctgtgaccagacctgcgaccgcatcaagcagtccgccagcggaaccaagcggcgcgtgttcatcatcgagaccatgggcggctactgtggctacctggccaacatgggggggctcgcggccggagctgatgccgcatacattttcgaagagcccttcgacatcagggatctgcagtccaacgtggagcacctgacggagaaaatgaagaccaccatccagagaggccttgtgctcagaaatgagagctgcagtgaaaactacaccaccgacttcatttaccagctgtattcagaagagggcaaaggcgtgtttgactgcaggaagaacgtgctgggtcacatgcagcagggtggggcaccctctccatttgatagaaactttggaaccaaaatctctgccagagctatggagtggatcactgcaaaactcaaggaggcccggggcagaggaaaaaaatttaccaccgatgattccatttgtgtgctgggaataagcaaaagaaacgttatttttcaacctgtggcagagctgaagaagcaaacggattttgagcacaggattcccaaagaacagtggtggctcaagctacggcccctcatgaaaatcctggccaagtacaaggccagctatgacgtgtcggactcaggccagctggaacatgtgcagccctggagtgtctgacccagtcccgcctgcatgtgcctgcagccaccgtggactgtctgtttttgtaacacttaagttattttatcagcactttatgcacgtattattgacattaatacctaatcggcgagtgcccatctgccccacctgctccagtgcgtgctgtctgtggagtgtgtctcatgctttcagatgtgcatatgagcagaattaattaaacatttgccta

SEQ ID NO: 15464 - DNA, 453 bp, Homo sapiens
  source 1..453: mol_type = unassigned DNA
acttcatttaccagctgtattcagaagagggcaaaggcgtgtttgactgcaggaagaacgtgctgggtcacatgcagcagggtggggcaccctctccatttgatagaaactttggaaccaaaatctctgccagagctatggagtggatcactgcaaaactcaaggaggcccggggcagaggaaaaaaatttaccaccgatgattccatttgtgtgctgggaataagcaaaagaaacgttatttttcaacctgtggcagagctgaagaagcaaacggattttgagacggtttccatgcagccgccgcggtgaactcccgtctggtggacactcccccagggcctcggtgtgatggagtttcctgaatcagcgcaggcagacgtgggacacccttgtgcaccttttcattttacttctgtttttaaataaaggccctaaatgctgcttaaaataa

SEQ ID NO: 15465 - DNA, 4418 bp, Homo sapiens
  source 1..4418: mol_type = unassigned DNA
cctggtggcgcggcagccgggcggctcctccttcctcccggccctggcgtggagcagagggacacaggttcccacgctggcgcccggcgaccgggtggggctgcggcccagcagctccatggaggacgccggcgaggaccccaccacgtttgctgcccactctctgcccagtgacccccgtctcttggccactgtgaccaacgcatacctgggcacacgagtgtttcacgacacgctgcacgtgagcggcgtgtacaatggggctggcggggacacgcaccgggccatgctgcccagccccctcaacgtccggctggaggcccctgcagggatgggggagcagctgaccgagaccttcgccctggacaccaacacaggctcctttcttcacaccctggagggcccccgcttccgggcctcccagtgcatctatgcgcatcgcacgctgccccacgtgctggctttccgagtgtccatcgcccgcctggccccggggagcgggcccatcacgctgctcctgcggtcagccttctccccagaaagcccagacctggacctgcatcagggtcctgacttccagggagcccggtacctgtatggccacaccctcacccctgagcagcccggggggccacagcaagaggtacacatgctgtggacaccagcacccccagacctgacccttggggaaggtgaggaggctaggacgtgggacttcctgacagcagtgggcggcagccaggctgaggctcaggcctgcctcactgaggccctgcagctgcaggccaggggagctctgtatacggctcacgcacaggcctgggcccagctctgggtagaatgtggcttggacgtggtggggcccctgcagctgcgccaggccctgcgtggctccctctactacctgctcagtgccctgccccagcccaaggccccaggatacatctgccatggcctcagtcctgggggcctctccaatgggagccgtgaggaatgctactggggccacgtcttctgggaccaggtgagcactgtacacccagcaccagccacacagcaggcgacacatggaggtccacggtctctgccctccctgggaccagggctatggttggggaagcacagggactgtggcaaaagggaagaggcctggaaggtgtgcaggagtttggtagaggagtgatctaggtgaggggaatggaaggtgcagagaccagagctgagagggcctgaggcactttccagagcgtggggaggggcctccaccaaggcgagaagggctgcaggtccagatcaccagcgtttgtagacagtagtgtggcgcttggagtttacctgagggccagtggagctccagggacctatcaggacggggacctgtggggactgggaaggcctgtggggctgcgtggagcccggtactggaggccgacgggggtgacggggacgctgagggcacagagcggaggggcatgatggctgctgggcgtggaggtgtcgagagtgactgtgctggggctgctccatcgttgtctgagcctcccggtgctgccgctgtggccgtttctttgatgaggctctcagaggccgagtcattcactgccagcctgaagctgcccatgcgcatattcgggctggagcctctgaggccacacaaacgccggctggggaggcgaagtgtggggctgagcaccagaactccaggagcgtctgggctggagacagaactgggtgggcaggtggggagggcctgcagatctgagtgggcagccgaggaggaacccagaagacgccagcgatggagctctgccggggcggaatgtggccaggaggggcgggagcagtgacggcctgtccggcgctagaacgagggaccgtgctctcaggacctctggatgttcccgagtatcctgatgttccacccagaagccgccagggccatcctggagtaccgcatccgcacgctggacggggccctggagaacgcccagaacctgggctaccagggagccaagtttgcctgggagagtgcagactccggcctagaggtttgccctgaggacatttacggagtccaggaggtccacgtcaacggggccgtggtgttggccttcgagctgtactaccataccacccaggacctgcagctatttcgagaggctggtggctgggacgtggtcagggctgtggccgagttttggtgcagtcgtgttgagtggagccccagggaggaaaagtaccacctgaggggtgaggccatggtggggaggggctcggggaggaagggtggatgctcccagactcagcagatgattttcagacacctcacgtgtgccagccccacgctgaccaccggcgtggagggaaggcctctgagactctgcactgagcaccatcttggacttgtgtgtccaggagtcatgtcccccgacgagtaccattcaggggtcaacaactctgtgtacaccaacgtcctggtccagaacaggtcagacacaagatcccctcacctcaccccacccccgccccagctggagacctgccccggtgcccccactaggcaggcagcagctggaagtgtaggggttgcagcctcccccacctacctccacctccagcctgcgctttgctgctgccctggcccaggacctgggtcttcccatccccagccagtggctggcggtggctgacaagatcaaggtaccctttgacgtggagcagaacttccacccggagttcgatgggtatgagcctggagaggtggtgaagcaggcagacgtcgtgctcctgggatacccagtccccttctccctgagtcctgatgttcgcaggaaaaatctggagatttacgaggctgtgacgtccccccagggccccgccatgacctggagcatgtttgctgtgggctggatggagctgaaggacgcagtgcgggcccggggcctcctggacaggagctttgccaacatggctgaacccttcaaggtgtggacggagaatgcagacgggtcaggcgctgtgaacttcctgacaggcatggggggcttcctgcaggcggtggtcttcgggtgcacggggttcagggtcacccgagcgggtgtgacctttgaccctgtgtgtctgtcggggatctccagagtgagcgtctccggcatcttctaccaggggaacaagctcaacttctctttttccgaggactccgtgaccgtggaggtcacagctcgagcagggccctgggctcctcacctggaggctgagctgtggccatcccagtcccggctctccctgttgccaggacacaaggtctcctttccccgctcggctggccggatacaaatgtcacccccgaagctgcctggaagttccagctccgagttccctgggaggactttttcagatgttagggacccgctccagagccccctctgggtcaccctgggttcctccagccccaccgagtcactcactgtggaccctgcctctgaataatcaggaacggtggcttcagagacgtctcttgggccttccctctggccacgtctgcacccacccctcctgggcaccctcctagcctgccatccctcacctgcagccaggctctcagggaaggtccatgctgcttggcctgagttcaaggctttctgcctgtagcctggactcccgtggacccccgtgggcaggtggcttccccgtggcatctccacaccgcctctgcctgcccctgtggactgatgctatcgcgcaccgtcccacgaccccaccccgagctcctgaagccggggtctgagcctgcatcacctctggcctctcatcccccactctcctgagagcagtggtcacagcggccggccgctctgctgagaaggcagagaggcaggctcaggcctcagcgtggacagcagggataaggggcacgaaggacggggactcggccccttcagaattcctcaggactctcaggtgcagctttgccaaaaaggaacttttcatgtcatgcagttgaggggacttagtctcaatcccaggctcctcttgactctgggcagctttaatcaggttgggcagcctctgctacagcgtggggtgggatggctctcttccctcagccacgccgcttgtgaggacagaggtgggggagtgggaagtgggaagtcaccagagaacaggagagggatttgagggcgagaccccagcgctctccacggaccagccagagggactggagccaggtgtgcatgggttcaaggccctggccctgcccagcctttgtcttgggagctcagccccagggttcggtcgtcagcagtttcccaagaacaagatgtgatggcatctgctgctgaaaccctgatgaggaccaggccccctgcaccgctgtcagcctgaggaattaaagctttggtgctggggagagcatt

SEQ ID NO: 15466 - DNA, 3687 bp, Homo sapiens
  source 1..3687: mol_type = unassigned DNA
ggtggcgcggcagccgggcggctcctccttcctcccggccctggcgtggagcagagggacacaggttcccacgctggcgcccggcgaccgggtggggctgcggcccagcagctccatggaggacgccggcgaggaccccaccacgtttgctgcccactctctgcccagtgacccccgtctcttggccactgtgaccaacgcatacctgggcacacgagtgtttcacgacacgctgcacgtgagcggcgtgtacaatggggctggcggggacacgcaccgggccatgctgcccagccccctcaacgtccggctggaggcccctgcagggatgggggagcagctgaccgagaccttcgccctggacaccaacacaggctcctttcttcacaccctggagggcccccgcttccgggcctcccagtgcatctatgcgcatcgcacgctgccccacgtgctggctttccgagtgtccatcgcccgcctggccccggggagcgggcccatcacgctgctcctgcggtcagccttctccccagaaagcccagacctggacctgcatcagggtcctgacttccagggagcccggtacctgtatggccacaccctcacccctgagcagcccggggggccacagcaagaggtacacatgctgtggacaccagcacccccagacctgacccttggggaaggtgaggaggctaggacgtgggacttcctgacagcagtgggcggcagccaggctgaggctcaggcctgcctcactgaggccctgcagctgcaggccaggggagctctgtatacggctcacgcacaggcctgggcccagctctgggtagaatgtggcttggacgtggtggggcccctgcagctgcgccaggccctgcgtggctccctctactacctgctcagtgccctgccccagcccaaggccccaggatacatctgccatggcctcagtcctgggggcctctccaatgggagccgtgaggaatgctactggggccacgtcttctgggaccaggacctctggatgttcccgagtatcctgatgttccacccagaagccgccagggccatcctggagtaccgcatccgcacgctggacggggccctggagaacgcccagaacctgggctaccagggagccaagtttgcctgggagagtgcagactccggcctagaggtttgccctgaggacatttacggagtccaggaggtccacgtcaacggggccgtggtgttggccttcgagctgtactaccataccacccaggacctgcagctatttcgagaggctggtggctgggacgtggtcagggctgtggccgagttttggtgcagtcgtgttgagtggagccccagggaggaaaagtaccacctgaggggagtcatgtcccccgacgagtaccattcaggggtcaacaactctgtgtacaccaacgtcctggtccagaacagcctgcgctttgctgctgccctggcccaggacctgggtcttcccatccccagccagtggctggcggtggctgacaagatcaaggtaccctttgacgtggagcagaacttccacccggagttcgatgggtatgagcctggagaggtggtgaagcaggcagacgtcgtgctcctgggatacccagtccccttctccctgagtcctgatgttcgcaggaaaaatctggagatttacgaggctgtgacgtccccccagggccccgccatgacctggagcatgtttgctgtgggctggatggagctgaaggacgcagtgcgggcccggggcctcctggacaggagctttgccaacatggctgaacccttcaaggtgtggacggagaatgcagacgggtcaggcgctgtgaacttcctgacaggcatggggggcttcctgcaggcggtggtcttcgggtgcacggggttcagggtcacccgagcgggtgtgacctttgaccctgtgtgtctgtcggggatctccagagtgagcgtctccggcatcttctaccaggggaacaagctcaacttctctttttccgaggactccgtgaccgtggaggtcacagctcgagcagggccctgggctcctcacctggaggctgagctgtggccatcccagtcccggctctccctgttgccaggacacaaggtctcctttccccgctcggctggccggatacaaatgtcacccccgaagctgcctggaagttccagctccgagttccctgggaggactttttcagatgttagggacccgctccagagccccctctgggtcaccctgggttcctccagccccaccgagtcactcactgtggaccctgcctctgaataatcaggaacggtggcttcagagacgtctcttgggccttccctctggccacgtctgcacccacccctcctgggcaccctcctagcctgccatccctcacctgcagccaggctctcagggaaggtccatgctgcttggcctgagttcaaggctttctgcctgtagcctggactcccgtggacccccgtgggcaggtggcttccccgtggcatctccacaccgcctctgcctgcccctgtggactgatgctatcgcgcaccgtcccacgaccccaccccgagctcctgaagccggggtctgagcctgcatcacctctggcctctcatcccccactctcctgagagcagtggtcacagcggccggccgctctgctgagaaggcagagaggcaggctcaggcctcagcgtggacagcagggataaggggcacgaaggacggggactcggccccttcagaattcctcaggactctcaggtgcagctttgccaaaaaggaacttttcatgtcatgcagttgaggggacttagtctcaatcccaggctcctcttgactctgggcagctttaatcaggttgggcagcctctgctacagcgtggggtgggatggctctcttccctcagccacgccgcttgtgaggacagaggtgggggagtgggaagtgggaagtcaccagagaacaggagagggatttgagggcgagaccccagcgctctccacggaccagccagagggactggagccaggtgtgcatgggttcaaggccctggccctgcccagcctttgtcttgggagctcagccccagggttcggtcgtcagcagtttcccaagaacaagatgtgatggcatctgctgctgaaaccctgatgaggaccaggccccctgcaccgctgtcagcctgaggaattaaagctttggtgctggggagagcattattcctctgaggagccgctgtgcttccttctgaagtgagggccgtgccccgggtcccatttctcctttcacttgagtcgggaagcacagcaactttaaggctcgcgcccagcaacatggctcccctcgcatctgcatctccctcctgctctggtgttgccgctgcaccctgtcctcggaggacagcagaggtttggacggagactcagggagggagggaaggaggcaaggacgcctgtggaaacatctttcaggcagctctagggtctgggggccaggatgcctgggtctcccaaggcctgtctgctgtctctgccaccctcagcggctgccagaagcagcgtgtgggggaggcatgtgctgcagcacacctgcggccgagaccagcactcagaggtcggctcccctgacaggaaccgtgtagggtgca

SEQ ID NO: 15467 - DNA, 2963 bp, Homo sapiens
  source 1..2963: mol_type = unassigned DNA
ccggccctggcgtggagcagagggacacaggttcccacgctggcgcccggcgaccgggtggggctgcgtgacccccgtctcttggccactgtgaccaacgcatacctgggcacacgagtgtttcacgacacgctgcacgtgagcggcgtgtacaatggggctggcggggacacgcaccgggccatgctgcccagccccctcaacgtccggctggaggcccctgcagggatgggggagcagctgaccgagaccttcgccctggacaccaacacaggctcctttcttcacaccctggagggcccccgcttccgggcctcccagtgcatctatgcgcatcgcacgctgccccacgtgctggctttccgagtgtccatcgcccgcctggccccggggagcgggcccatcacgctgctcctgcggtcagccttctccccagaaagcccagacctggacctgcatcagggtcctgacttccagggagcccggcatggccacgctctcacaggtacctgtatggccacaccctcacccctgagcagcccggggggccacagcaagaggtacacatgctgtggacaccagcacccccagacctgacccttggggaaggtgaggaggctaggacgtgggacttcctgacagcagtgggcggcagccaggctgaggctcaggcctgcctcactgaggccctgcagctgcaggccaggggagctctgtatacggctcacgcacaggcctgggcccagctctgggtagaatgtggcttggacgtggtggggcccctgcagctgcgccaggccctgcgtggctccctctactacctgctcagtgccctgccccagcccaaggccccaggatacatctgccatggcctcagtcctgggggcctctccaatgggagccgtgaggaatgctactggggccacgtcttctgggaccaggacctctggatgttcccgagtatcctgatgttccacccagaagccgccagggccatcctggagtaccgcatccgcacgctggacggggccctggagaacgcccagaacctgggctaccagggagccaagtttgcctgggagagtgcagactccggcctagaggtttgccctgaggacatttacggagtccaggaggtccacgtcaacggggccgtggtgttggccttcgagctgtactaccataccacccaggacctgcagctatttcgagaggctggtggctgggacgtggtcagggctgtggccgagttttggtgcagtcgtgttgagtggagccccagggaggaaaagtaccacctgaggggagtcatgtcccccgacgagtaccattcaggggtcaacaactctgtgtacaccaacgtcctggtccagaacaggaaaaatctggagatttacgaggctgtgacgtccccccagggccccgccatgacctggagcatgtttgctgtgggctggatggagctgaaggacgcagtgcgggcccggggcctcctggacaggagctttgccaacatggctgaacccttcaaggtgtggacggagaatgcagacgggtcaggcgctgtgaacttcctgacaggcatggggggcttcctgcaggcggtggtcttcgggtgcacggggttcagggtcacccgagcgggtgtgacctttgaccctgtgtgtctgtcggggatctccagagtgagcgtctccggcatcttctaccaggggaacaagctcaacttctctttttccgaggactccgtgaccgtggaggtcacagctcgagcagggccctgggctcctcacctggaggctgagctgtggccatcccagtcccggctctccctgttgccaggacacaaggtctcctttccccgctcggctggccggatacaaatgtcacccccgaagctgcctggaagttccagctccgagttccctgggaggactttttcagatgttagggacccgctccagagccccctctgggtcaccctgggttcctccagccccaccgagtcactcactgtggaccctgcctctgaataatcaggaacggtggcttcagagacgtctcttgggccttccctctggccacgtctgcacccacccctcctgggcaccctcctagcctgccatccctcacctgcagccaggctctcagggaaggtccatgctgcttggcctgagttcaaggctttctgcctgtagcctggactcccgtggacccccgtgggcaggtggcttccccgtggcatctccacaccgcctctgcctgcccctgtggactgatgctatcgcgcaccgtcccacgaccccaccccgagctcctgaagccggggtctgagcctgcatcacctctggcctctcatcccccactctcctgagagcagtggtcacagcggccggccgctctgctgagaaggcagagaggcaggctcaggcctcagcgtggacagcagggataaggggcacgaaggacggggactcggccccttcagaattcctcaggactctcaggtgcagctttgccaaaaaggaacttttcatgtcatgcagttgaggggacttagtctcaatcccaggctcctcttgactctgggcagctttaatcaggttgggcagcctctgctacagcgtggggtgggatggctctcttccctcagccacgccgcttgtgaggacagaggtgggggagtgggaagtgggaagtcaccagagaacaggagagggatttgagggcgagaccccagcgctctccacggaccagccagagggactggagccaggtgtgcatgggttcaaggccctggccctgcccagcctttgtcttgggagctcagccccagggttcggtcgtcagcagtttcccaagaacaagatgtgatggcatctgctgctgaaaccctgatgaggaccaggccccctgcaccgctgtcagcctgaggaattaaagctttggtgctggggagagca

SEQ ID NO: 15468 - DNA, 745 bp, Homo sapiens
  source 1..745: mol_type = unassigned DNA
ctggcgtggagcagagggacacaggttcccacgctggcgcccggcgaccgggtggggctgcggcccagcagctccatggaggacgccggcgaggaccccaccacgtttgctgcccactctctgcccagtgacccccgtctcttggccactgtgaccaacgcatacctgggcacacgagtgtttcacgacacgctgcacgtgagcggcgtgtacaatggggctggcggggacacgcaccgggccatgctgcccagccccctcaacgtccggctggaggcccctgcagggatgggggagcagctgaccgagaccttcgccctggacaccaacacaggctcctttcttcacaccctggagggcccccgcttccgggcctcccagtgcatctatgcgcatcgcacgctgccccacgtgctggctttccgagtgtccatcgcccgcctggccccggggagcgggcccatcacgctgctcctgcggtcagccttctccccagaaagcccagacctggacctgcatcagggtcctgacttccagggagcccggtaaggagggggctggatttgcagccagggagtccagggagggagctcatccctgaggcatggccacgctctcacaggtacctgtatggccacaccctcacccctgagcagcccggggggccacagcaagaggtacacatgctgtggacaccagcacccccagacctgacccttggggaaggtgaggaggctaggacgtg

SEQ ID NO: 15469 - DNA, 3062 bp, Homo sapiens
  source 1..3062: mol_type = unassigned DNA
gggagagacacactcaggggctcagctgggttcctggagatcaacctttggggtctgagcccctctgagagtcgagctcctttcctgcgaggccccgtctaggaggggcctcaggaaaatcggggctgcccagctggttccgcaactccccccagttctgagggaggcttcaggggattacagacggtctcaagagggaggcccagccagtcccgcggcccctgacaccccatcaggccgctcaggcccagcagctccatggaggacgccggcgaggaccccaccacgtttgctgcccactctctgcccagtgacccccgtctcttggccactgtgaccaacgcatacctgggcacacgagtgtttcacgacacgctgcacgtgagcggcgtgtacaatggggctggcggggacacgcaccgggccatgctgcccagccccctcaacgtccggctggaggcccctgcagggatgggggagcagctgaccgagaccttcgccctggacaccaacacaggctcctttcttcacaccctggagggcccccgcttccgggcctcccagtgcatctatgcgcatcgcacgctgccccacgtgctggctttccgagtgtccatcgcccgcctggccccggggagcgggcccatcacgctgctcctgcggtcagccttctccccagaaagcccagacctggacctgcatcagggtcctgacttccagggagcccggtacctgtatggccacaccctcacccctgagcagcccggggggccacagcaagaggtacacatgctgtggacaccagcacccccagacctgacccttggggaaggtgaggaggctaggacgtgggacttcctgacagcagtgggcggcagccaggctgaggctcaggcctgcctcactgaggccctgcagctgcaggccaggggagctctgtatacggctcacgcacaggcctgggcccagctctgggtagaatgtggcttggacgtggtggggcccctgcagctgcgccaggccctgcgtggctccctctactacctgctcagtgccctgccccagcccaaggccccaggatacatctgccatggcctcagtcctgggggcctctccaatgggagccgtgaggaatgctactggggccacgtcttctgggaccaggacctctggatgttcccgagtatcctgatgttccacccagaagccgccagggccatcctggagtaccgcatccgcacgctggacggggccctggagaacgcccagaacctgggctaccagggagccaagtttgcctgggagagtgcagactccggcctagaggtttgccctgaggacatttacggagtccaggaggtccacgtcaacggggccgtggtgttggccttcgagctgtactaccataccacccaggacctgcagctatttcgagaggctggtggctgggacgtggtcagggctgtggccgagttttggtgcagtcgtgttgagtggagccccagggaggaaaaacacctcacgtgtgccagccccacgctgaccaccggcgtggagggaaggcctctgagactctgcactgagcaccatcttggacttgtgtgtccaggagtcatgtcccccgacgagtaccattcaggggtcaacaactctgtgtacaccaacgtcctggtccagaacagcctgcgctttgctgctgccctggcccaggacctgggtcttcccatccccagccagtggctggcggtggctgacaagatcaaggtaccctttgacgtggagcagaacttccacccggagttcgatgggtatgagcctggagaggtggtgaagcaggcagacgtcgtgctcctgggatacccagtccccttctccctgagtcctgatgttcgcaggaaaaatctggagatttacgaggctgtgacgtccccccagggccccgccatgacctggagcatgtttgctgtgggctggatggagctgaaggacgcagtgcgggcccggggcctcctggacaggagctttgccaacatggctgaacccttcaaggtgtggacggagaatgcagacgggtcaggcgctgtgaacttcctgacaggcatggggggcttcctgcaggcggtggtcttcgggtgcacggggttcagggtcacccgagcgggtgtgacctttgaccctgtgtgtctgtcggggatctccagagtgagcgtctccggcatcttctaccaggggaacaagctcaacttctctttttccgaggactccgtgaccgtggaggtcacagctcgagcagggccctgggctcctcacctggaggctgagctgtggccatcccagtcccggctctccctgttgccaggacacaaggtctcctttccccgctcggctggccggatacaaatgtcacccccgaagctgcctggaagttccagctccgagttccctgggaggactttttcagatgttagggacccgctccagagccccctctgggtcaccctgggttcctccagccccaccgagtcactcactgtggaccctgcctctgaataatcaggaacggtggcttcagagacgtctcttgggccttccctctggccacgtctgcacccacccctcctgggcaccctcctagcctgccatccctcacctgcagccaggctctcagggaaggtccatgctgcttggcctgagttcaaggctttctgcctgtagcctggactcccgtggacccccgtgggcaggtggcttccccgtggcatctccacaccgcctctgcctgcccctgtggactgatgctatcgcgcaccgtcccacgaccccaccccgagctcctgaagccggggtctgagcctgcatcacctctggcctctcatcccccactctcctgagagcagtggtcacagcggccggccgctctgctgagaaggcagagaggcaggctcaggcctcagcgtggacagcagggataaggggcacgaaggacggggactcggccccttcagaattcctcaggactctcaggtgcagctttgccaaaaaggaacttttcatgtcatgca

SEQ ID NO: 15470 - DNA, 734 bp, Homo sapiens
  source 1..734: mol_type = unassigned DNA
tgtttcacgacacgctgcacgtgagcggcgtgtacaatggggctggcggggacacgcaccgggccatgctgcccagccccctcaacgtccggctggaggcccctgcagggatgggggagcagctgaccgagaccttcgccctggacaccaacacaggctcctttcttcacaccctggagggcccccgcttccgggcctcccagtgcatctatgcgcatcgcacgctgccccacgtgctggctttccgagtgtccatcgcccgcctggccccggggagcgggcccatcacgctgctcctgcggtcagccttctccccagaaagcccagacctggacctgcatcagggtcctgacttccagggagcccggtacctgtatggccacaccctcacccctgagcagcccggggggccacagcaagaggtacacatgctgtggacaccagcacccccagacctgacccttggggaagtgccctgccccagcccaaggccccaggatacatctgccatggcctcagtcctgggggcctctccaatgggagccgtgaggaatgctactggggccacgtcttctgggaccaggacctctggatgttcccgagtatcctgatgttccacccagaagccgccagggccatcctggagtaccgcatccgcacgctggacggggccctggagaacgcccagaacctgggctaccagggagccaagtttgcctgggagagtgcagact

SEQ ID NO: 15471 - DNA, 2879 bp, Homo sapiens
  source 1..2879: mol_type = unassigned DNA
gcatgatggctgctgggcgtggaggtgtcgagagtgactgtgctggggctgctccatcgttgtctgagcctcccggtgctgccgctgtggccgtttctttgatgaggctctcagaggccgagtcattcactgccagcctgaagctgcccatgcgcatattcgggctggagcctctgaggccacacaaacgccggctggggaggcgaagtgtggggctgagcaccagaactccaggagcgtctgggctggagacagaactgggtgggcaggtggggagggcctgcagatctgagtgggcagccgaggaggaacccagaagacgccagcgatggagctctgccggggcggaatgtggccaggaggggcgggagcagtgacggcctgtccggcgctagaacgagggaccgtgctctcaggacctctggatgttcccgagtatcctgatgttccacccagaagccgccagggccatcctggagtaccgcatccgcacgctggacggggccctggagaacgcccagaacctgggctaccagggagccaagtttgcctgggagagtgcagactccggcctagaggtttgccctgaggacatttacggagtccaggaggtccacgtcaacggggccgtggtgttggccttcgagctgtactaccataccacccaggacctgcagctatttcgagaggctggtggctgggacgtggtcagggctgtggccgagttttggtgcagtcgtgttgagtggagccccagggaggaaaagtaccacctgaggggagtcatgtcccccgacgagtaccattcaggggtcaacaactctgtgtacaccaacgtcctggtccagaacaggtcagacacaagatcccctcacctcaccccacccccgccccagctggagacctgccccggtgcccccactaggcaggcagcagctggaagtgtaggggttgcagcctcccccacctacctccacctccagcctgcgctttgctgctgccctggcccaggacctgggtcttcccatccccagccagtggctggcggtggctgacaagatcaaggtaccctttgacgtggagcagaacttccacccggagttcgatgggtatgagcctggtgagtggaccccttcaagggctcctcccctgccgtcgagaccctcgagtctgtcctggaacaccttccagtcagcggcacctccctgtaggagaggtggtgaagcaggcagacgtcgtgctcctgggatacccagtccccttctccctgagtcctgatgttcgcaggaaaaatctggagatttacgaggctgtgacgtccccccagggccccgccatgacctggagcatgtttgctgtgggctggatggagctgaaggacgcagtgcgggcccggggcctcctggacaggagctttgccaacatggctgaacccttcaaggtgtggacggagaatgcagacgggtcaggcgctgtgaacttcctgacaggcatggggggcttcctgcaggcggtggtcttcgggtgcacggggttcagggtcacccgagcgggtgtgacctttgaccctgtgtgtctgtcggggatctccagagtgagcgtctccggcatcttctaccaggggaacaagctcaacttctctttttccgaggactccgtgaccgtggaggtcacagctcgagcagggccctgggctcctcacctggaggctgagctgtggccatcccagtcccggctctccctgttgccaggacacaaggtctcctttccccgctcggctggccggatacaaatgtcacccccgaagctgcctggaagttccagctccgagttccctgggaggactttttcagatgttagggacccgctccagagccccctctgggtcaccctgggttcctccagccccaccgagtcactcactgtggaccctgcctctgaataatcaggaacggtggcttcagagacgtctcttgggccttccctctggccacgtctgcacccacccctcctgggcaccctcctagcctgccatccctcacctgcagccaggctctcagggaaggtccatgctgcttggcctgagttcaaggctttctgcctgtagcctggactcccgtggacccccgtgggcaggtggcttccccgtggcatctccacaccgcctctgcctgcccctgtggactgatgctatcgcgcaccgtcccacgaccccaccccgagctcctgaagccggggtctgagcctgcatcacctctggcctctcatcccccactctcctgagagcagtggtcacagcggccggccgctctgctgagaaggcagagaggcaggctcaggcctcagcgtggacagcagggataaggggcacgaaggacggggactcggccccttcagaattcctcaggactctcaggtgcagctttgccaaaaaggaacttttcatgtcatgcagttgaggggacttagtctcaatcccaggctcctcttgactctgggcagctttaatcaggttgggcagcctctgctacagcgtggggtgggatggctctcttccctcagccacgccgcttgtgaggacagaggtgggggagtgggaagtgggaagtcaccagagaacaggagagggatttgagggcgagaccccagcgctctccacggaccagccagagggactggagccaggtgtgcatgggttcaaggccctggccctgcccagcctttgtcttgggagctcagccccagggttcggtcgtcagcagtttcccaagaacaagatgtgatggcatctgctgctgaaaccctgatgaggaccaggccccctgcaccgctgtcagcctgaggaattaaagctttggtgctggggagagcattattcc

SEQ ID NO: 15472 - DNA, 578 bp, Homo sapiens
  source 1..578: mol_type = unassigned DNA
ggagatttacgaggctgtgacgtccccccagggccccgccatgacctggagcatgtttgctgtgggctggatggagctgaaggacgcagtgcgggcccggggcctcctggacaggagctttgccaacatggctgaacccttcaaggtgtggacggagaatgcagacgggtcaggcgctgtgaacttcctgacaggcatggggggcttcctgcaggcggtggtcttcgggtgcacggggttcagagtgagcgtctccggcatcttctaccaggggaacaagctcaacttctctttttccgaggactccgtgaccgtggaggtcacagctcgagcagggccctgggctcctcacctggaggctgagctgtggccatcccagtcccggctctccctgttgccaggacacaaggtctcctttccccgctcggctggccggatacaaatgtcacccccgaagctgcctggaagttccagctccgagttccctgggaggactttttcagatgttagggacccgctccagagccccctctgggtcaccctgggttcctccagccccaccgagtcactcactgtgg

SEQ ID NO: 15473 - DNA, 8515 bp, Homo sapiens
  source 1..8515: mol_type = unassigned DNA
gggcgggcggcggcggcggcggcggagccaggacccagacatctgggactgttgttctctcgcggcgcgaccgcctcagtcacttcgcccagagacccggacctggtccgctggggagcaggcggccataaaccccctctctcccggttccctgacgccgcggcaggagctgttacgaacaccctgcggttggtctccgatgcccttcagtgaggtggggacgcctggaccctggtgagcgaaccccaagccaccccccaccccaactcagtgtcttcgccggcccccggcccgtacgcctgtctggtcgccatggctgaaaacacagagggggatctgaactccaacctgctccacgccccctaccacaccggggaccctcagctggacacggccatcgggcagtggctccgctgggataagaatcccaaaacaaaagagcagattgaaaacctgttacggaatgggatgaacaaggagctgcgagatcgtctttgttgccgaatgacttttgggactgcaggacttcgttctgccatgggggcagggttttgctatattaatgaccttacagtaatacagtcaacacaggggatgtacaaataccttgagagatgtttctcagacttcaagcagagaggctttgtggttgggtatgacactcggggtcaagtaactagcagctgcagcagccagaggcttgctaaactcactgctgcagtcttgctggccaaagatgttcctgtgtaccttttttcaagatatgttcctacaccttttgtaccatatgcagttcagaagctcaaagcagttgcaggtgtgatgattactgcctctcacaaccgcaaggaagacaatggatacaaggtttactgggaaactggtgctcagatcacatctcctcatgataaagaaattctaaaatgtatagaagaatgtgtggaaccctggaatggttcctggaatgataatttagtggataccagcccgctgaagagagaccctctgcaggacatttgcaggagatacatggaagatctgaaaaagatctgtttttacagggagttaaactcgaagaccaccttgaaatttgtgcacacatcttttcatggggtcggacatgactatgtgcagttggcttttaaagtgtttggttttaagcctccaattccagtaccagaacaaaaagatcctgatccagacttttctaccgttaaatgtccaaatcctgaagaaggagaatctgtgctggaactttccttgagactggcagagaaagaaaatgcccgggtagtgctagccacagatcctgatgcagacagactggcagcagcagaacttcaggagaatggttgttggaaagttttcacagggaatgagttggcagctttgtttggatggtggatgtttgattgctggaagaaaaataaatcaagaaatgctgatgtgaagaacgtttatatgttagccaccacagtctcttctaaaattctgaaggcaattgcacttaaagaaggatttcattttgaagaaacattaccaggttttaaatggattggaagtaggataatagacctcctggaaaatgggaaagaagtcctttttgcatttgaagagtctattggttttctctgtggaacttcagttttggataaagatggggtgagtgcagctgttgtggttgctgagatggcatcttacctggaaaccatgaatataacattgaaacagcaactggttaaggtttatgaaaaatatggttatcatatttcaaaaacttcctatttcttgtgttatgaaccacctaccatcaaaagtatatttgaaaggcttcgtaattttgattctccaaaagaatatccaaaattttgtggaacatttgctatattgcatgtacgggacgttaccactggatatgacagtagccagcctaataagaaatcagtgctgcctgtgagtaaaaacagccaaatgattacatttacttttcaaaatggctgtgttgctacccttcggacaagtggaacagaaccaaagataaagtattatgcagagatgtgtgcgtcacctgaccagagtgacactgctttactggaggaagaactgaagaaactcattgatgctctgatagagaattttcttcagcctagtaagaatggactgatctggcgttctgtttaggggtacaccaatatgtcatgacactgtgtgggcatatggaacagagcaaccgagaactgcatacattgaaccttgtgttagcattctctctctatctcatctggccgagtatctttttccttttattttctttctttttggtcaactggctagactaaacaaagtataagtttgaaatgaaatggtctagagggaaatgattcaaattttttcataattcaaacaaaagttattacactaaaagtattatagtaacgtattgtccttccgttaacagaaacatcacaattcaaaagtgagttttcttattatagtgtgattaagcctagttctgtatctcgtaattgtgtatagcatggtaaaagaaaaaaaaaaagacaggtaaatgttatataattgtagggttagttaaggaaattagtccataaaattggcaagaaaatggtactttccttgattgttatgaaaaagtgtcattgtgacatcacaggtattaatttacaaattagagtatttgaaataggatatttagcatttctgtagtttagaacagatgttacagtgtgtggttttggcatgtctgtttcaggtgcccttggtgcagtataaatttactgtatgtatttaaaattctgatgtttactgaacataaaacaatagtggcaacactcctattggctttgttcttatcaaatttctcagtgccttctcagggtctggtgtgaacagaaaaaacagtgttcctgcatttaccataatttaatcagtcaatttgcagatagctaaggaaaatcttccaaaatctgtaggtgcttcctctatatcaagtgagtttgctgattttaaaatcttaggaatataaataaagatcttaataaaagcaagcttaatgtagttaaggatcttcatattagaattgtgtcatttatcaaaccttttattacagaaaaaaatctgaactgagaaaggagctctgaatttatttgacagtctaacttttgaattacatttttgtaagtagatttattcttttattttatgaagtaatgttaattttactaagaataaaacatccaaattttaagtattatgaaatactaaaactacatgttttaaaacagaggtccagtttattctaacatcttgctgacttctgtagaatttctgattgcatgactattatttatcttcttttagtgtagaaaataattttttacaaaaagtcacttttgggctgggcgcagtggctcacgcctgtaatcccagcactttgggaggctgaggcaggtggatcacaatgtcaggagtttgagactagcctggccaatatggtgaaaccctgtctctactaaaaatacaaaaattagccgggtgtggtggtgggcacctgtagtcccagctactcgggaggctgaggcaggagaattgcttgaacctaggaggctgagattgcagtgagccgaaatcacgccactacactccagcctgggcaacagagggagactccatctcaaaaaaaaaaaaagtcacttttggctaatcatgcagtcttctgaaaaggtttaatagagaaatgctgtttaggctgggcttggtggctcacatctgtaataccagcgctttgggaggctgaggcaggaggattgcttgaggccaggagtttaagttacagaactatgatcacactgccgcactgaagcctggatgacagagtgagaccttatctcaaaaaaaaaaaaaaaaagagagagagagagaaaaagaaatgctgtgtttaatcttcttaaaatgtatcttgtcctacatagttctcagaatacatatggggtatagttaggagataacaataacaagacctaaacaaattgcttatgggagatagcactgtaattagagaatttatttcatataaaataataatataaagtttgaactgattagaatgttccttaaatcatggtttcgtttgttgcagctgtcagctaacatttggttgagctcatataatccaaacctaattgtccaactattgtattgccactattgttaatttgttccttccttactttcttattgttggatcttatatgactgtatgactgtagataatagacagctagctaaatgtagagcaccatttttctcaatgagtttgttttcaaaggctttgcactggagaagatatgtgtagaatttttgttttatttttaaaatgtgtaaaacatcttttgttttatatgcttttaagaatgtagattgtaatttaggaaatggcatatattctgcaaagtggtataatgttgtatatatgaaaaacaggtatatttggtttagttctgtgtttcagtgactgataaacaaaaatgaagctaaaatgaatcaacggctcattcatagttactaaagccatgtcatgactgtcattctattatgaagaaaacagttttatttgagtgctttaatataatgcaacatttaagtcatcttaaggtgaaaagttattgaagtgttcttctctcaagttaacaaaattttacaaatgttcctgaagtgtatcgattgagggaattattttattctagcctgtcatgagtctgtctgagcatgatacttaacatgaacttgatgtagtaggtgcacatttgcctaacaggataaattcagtgatagcccaagctggtcaggagagacagaagtgctggctaggaggtctcagcctcgggcactacaatgtttatctttttctttttgaacaatattgtgaaaatgattgcattctcattgagcatgaaagtcaaaactggaattttctaaagctttggagaaaaggagagaattagtagggcaagatcaaagcatacattggaaataaacagtagaaataagcaaacaatataaagagacacgggaaatgcttctcgtgaagggcaaatgtaacaccataacagtagggaataaactgtgtcccacctgtttacttgtgtttatttgttgttatgatgagtatgcacctaccattttcctttattgtgatcactaaaatgaggccaaggtttaggaggtgagaaaaagtatcccttttacggattcagttcctgctaggatgttgtatcagaatcatgtgagaactcaggaagaggtagagcagaaataaaaaggaagaaaatgtagattagaaaataagacttctgagaaaaagttcaaggaataaagattgtttgactctggagaggagaaagctgttgagatagtttgctaagtttgctaataaagctttattgagtcttttattgaagggttcaaagtaagaaatactatgccatagtgttctccatctctagtgaagacagaaccagagggaataaggatcttttttttaaagacagcatggaaagtttaagatttaggaacttcttgagaaatcttcataatatcttctattcaaaatcttttttttatttttaagggaataaaaattttaaaaattaagagatatacagatgactttttaagggtccttctttccagcacattttttttaaaaactcaggttagaacaaaaatgtcataaagggcactaaaagtaacatttgggtttcactccatatctagaagaatttagctcacaaaacaatttttgtgtgttttgagtaactgatgcataagtgcaatgaataattttcctgcttcactgttatttttaatttaacctggcaaattaagtgagacttgaacaaaattttgttcatcttgaagaatgtatagtggcttaggttatttgaggttttcgttttgaatatatatgttgttattttgatgtagatacgttagcagatggagaggttctaagagattggatactttggaatgtctttatataggaaatagacctcccatttcttaagcaagttgcttctggaattgatgcaacagggatattagctgtagtttaatggataagttgttctatgagctgctgctatcagtacttttttccacattttccattgatatttgtgatgcttgaaaaatccaaacttcacttggatacatttaattttatgcctttttctctctacctcccacttttcctaggcacccttgcacattttgttactgtgaaggactattgccctgttacctcactgataagaaatctcaactgtattcattcagaatgctttaagcttagtcataaactacatttgcctatggacctttggttattttgttaatgttgtcattatatttaagacttattgtaggaagtaattttaaatctatttcataacctgttttgatctgtctgcatactgctatatgttaatttattacggccttttacaattcacttgtcatctgagattgttctagaaactgatgaggaaagagtcgtactaaccaaaatgaatgggcaattgacataacattctatttcaggtttccttgtacttggggagccaaagcacaagatctaaggaaatcttattcacatttgtccctcagagcatcttaccctaagccatagaggtataaatagtaagatgagaattgctcattgtctgactccttgcacagcatgaatttaattctagttggaaacaaagttagtgttgactactggttaccttaaagtattcaccatactatatatttattagaccatctttcctctttgtttattcaagactatgtacttataaaagagaacctataagaatgtgtagagtgaccaaatagggacaaagtgacatacctagagtttgctgctcaaatttttccactagcgtaaccctaaagcagaggggcatgatgaagggggaaggggttctgagagcaaaatcagaatcagcctaccactgacatgaagtgtgttctgtctttaaaatgtaagtgaattttgcattctttataataaaacttttaatataaaaatgatatgtttaatctttactgaaacttatgccaccacaaaggagcaccatgttcatcacgtggctgctcagttttctcccccagtgccctcacccccagtggaggcaagtccttgagctacacacactggctgtagtgcaagatatataaacataggccgggctcggtggctcatgcctgtaatcctagcactttgggaggccgaagcaggtggatcatctgaggtcgggagattgagactagcctgaccgacatggagaaaccctgtgtccactaaaaatacaaaattagccgggtgtggtggcacatgcctgtaatcccagctactcgggaggctgaggcaggagaatcacttgaacccaggaggtggaggttgtggtgagccaagatcgcgccgttgcactccagcctgggcaacaagagtgaaactccatctcaaaaaaaaaaaaaaaagatatataaacatagaacatatccagactatttcctgcccttggaatctgaccttcagaaggattaatgccaaactaaactgacctgaaacagttttgttactattggcattccttgactaaaaaggaccacctgatgctcagtcccgagagtaggaatcgtggtttattatttttcatatccataccacctagttcagtacctgttatagagtgtttaattgctgatactaggaattaagggattttttaaaagtagcaaatagtttaaggaacaatcaaaaaatgaattttctaattcagttttttcaatgaagtcccatcactgaactttataatgtaatgtttattaagcagacatccccttaaatactcagtttctttggagagagcaaagcatatctctctgtggaaattatatataatgcctggtattttacactcaaagcaaggtgttggccaggaaggtaaagaaatggtgtctatgtagacttaatatcactagtctaagtgtcattttgagcctagtagcactaccttccaagtgagtcacaacaaatttgatcctatttggtatgtttttgtccactgttatgattcatcatgtatcttacaagagccactcaagcaagactctgcttctatgtatggtgaggccttgttgttctaggctagaataaactctttgtatgcctcattgaatatgccaggtaaaatttatgcagtcaagaatgaattatttttctgactaaagtgtgtagcagtagttcaaaattgtgcccttgttttaacagtttctgtcaacatcttctcatttttccctacaaaaacaccagggtgtattataagtactgcctgtgagaatttgcactttatgtatttgtgtgtggatttcttgtggttttagccaaatgaagtgttatcagtaataaacaggtctcttcata

SEQ ID NO: 15474 - DNA, 663 bp, Homo sapiens
  source 1..663: mol_type = unassigned DNA
cgcgaccgcctcagtcacttcgcccagagacccggacctggtccgctggggagcaggcggccataaaccccctctctcccggttccctgacgccgcggcaggagctgttacgaacaccctgcggttggtctccgatgcccttcagtgaggtggggacgcctggaccctggtgagcgaaccccaagccaccccccaccccaactcagtgtcttcgccggcccccggcccgtacgcctgtctggtcgccatggctgaaaacacagagggggatctgaactccaacctgctccacgccccctaccacaccggggaccctcagctggacacggccatcgggcagtggctccgctgggataaggtgggtacctggtcagcccggcaaacgccgtcgcctcccccacacagtctgctctttcctgtgcccacccagcgccccgcgggctgcagaggagatggctcgggacaccgagcggggggcagcggagcagggcgttgccacccacctatgcgtggggttgctccttcggactgccagagccgggcggcaacatctgcatcgcttccttctgcagtgctctcaattgtaacctcccttcctcttctttaccctctttcctttcaagtgctgtcttccctctttcttcaaaaaaaaaaaaaaaaaaa

SEQ ID NO: 15475 - DNA, 1699 bp, Homo sapiens
  source 1..1699: mol_type = unassigned DNA
tctaaaatagctgttaagcaaagagaaaattgggcctgatagggtgagaatcacagctctaatacctagagtgaccttataatgtattgtccaaaggagatatttttgacagtgaaagagggtgttgttagtaattatatcaggaccatggcctaaaccaggactatcccaggaagcctgggacatatttgtaccccatctctatttaatgcctttatacaattctttacttaattctaccagcctttattgagcctgctttctttgtctagctgagtgccacgtgctgacgtcactaagatcaatacagcaaactctgaaagatggacagagagacaggagatggtcctttataatgcagtgtgatctgtgctgcaatagagatggaagagtgttctgattggctggaaaacaatgcacatgggaagctgtacagaaatgagtggggaaagggtcttgctctgttgaccagaccgtgacctcctgggttcaagcgaggactcagcctcctgagtagccgggactacagataaagatgcagagcctcagagaagttaaatgattgatcctatgtcaggggatagtcaagactcatacctatgccttttaacttcaaattggacgactgattattggacagaatggcatcttgtcgacacctgcggtctcctgcattatcaggaagatcaaggcagctggtggaatcattctaacagccagccactgccctggaggaccagggggagagtttggagtgaagtttaatgttgccaatggaggtcctgcacccgatgttgtctcagacaaaatctaccaaatcagcaaaacgattgaggaatatgctatatgtcctgatctccgaatcgacctatctcgactaggaagacaagaatttgacctagaaaacaaattcaaaccattcagagtggagatagtggacccagtggatatctatcttaacctccttcggaccatctttgactttcatgccatcaagggtttgctgactggacccagccaactgaagattcgcattgacgcaatgcacggagttatgggaccttatgtgagaaaagttctgtgtgatgagctgggggccccagccaattctgcaataaactgtgttcccctggaagactttggagggcagcaccctgacccaaacctgacatatgcaacgactcttctggaagcaatgaaaggaggagaatatggatttggagctgcatttgatgctgatggggaccgttatatgatcctaggccaaaatggcttctttgtgagcccttctgactccctggccatcattgctgccaacctctcttgcattccatatttccgtcagatgggggtccgcgggtttgggaggagtatgccaaccagcatggccctggacaggctctgagcctctgactttctggtccaggtagcaagtgtctgcaggatttctagaccccatgctcttacaccagcttgtctatgaagatggaagacaaagcttttctttccaagaagaaactgaaaacatcaactcaagtcttgactttggttgggaaagagtaactgcagtaattaggacccaattgatggcaaaggggtatgatctagaatacctgaaacttggtaatttatgaagaaaaggaattcatttcttacagttatggaggctgagaagtccaaggtccaggggcataacagg

SEQ ID NO: 15476 - DNA, 1782 bp, Homo sapiens
  source 1..1782: mol_type = unassigned DNA
ggaaggcagaagcaatctctgccgagagagtcagccgagcggccgcgcggagaggaggggcgggcggtccccaggcgggcgggtgcagggcgcagggcgccgacctgctggagagggggcccgggcgcgaggcggagtcccggcgcgcagccaggctggtggaggcccccggcaggctgcagattccctccggctccgggagccgcagcaggaccggccaggaggcgccatggaggggagccccatcccggtgctgacagtgcccaccgcgccctacgaggaccagcggccggccggcggcgggggtctgcggcgacccaccggcctcttcgagggccagcgcaactacctgcccaactttatccagagcgtgctgtcgtccatcgacctgcgcgaccgtcagggctgcaccatggtggtgggcagcgacggcaggtactttagcaggacggccatcgagatcgtggtgcagatggccgcggccaacgggattggacgactgattattggacagaatggcatcttgtcgacacctgcggtctcctgcattatcaggaagatcaaggcagctggtggaatcattctaacagccagccactgccctggaggaccagggggagagtttggagtgaagtttaatgttgccaatggaggtcctgcacccgatgttgtctcagacaaaatctaccaaatcagcaaaacgattgaggaatatgctatatgtcctgatctccgaatcgacctatctcgactaggaagacaagaatttgacctagaaaacaaattcaaaccattcagagtggagatagtggacccagtggatatctatcttaacctccttcggaccatctttgactttcatgccatcaagggtttgctgactggacccagccaactgaagattcgcattgacgcaatgcacggagttatgggaccttatgtgagaaaagttctgtgtgatgagctgggggccccagccaattctgcaataaactgtgttcccctggaagactttggagggcagcaccctgacccaaacctgacatatgcaacgactcttctggaagcaatgaaaggaggagaatatggatttggagctgcatttgatgctgatggggaccgttatatgatcctaggccaaaatggcttctttgtgagcccttctgactccctggccatcattgctgccaacctctcttgcattccatatttccgtcagatgggggtccgcgggtttgggaggagtatgccaaccagcatggccctggacagagtggccaaatcaatgaaggtccctgtatatgagaccccagctggatggagattcttctcaaatctgatggactcaggacgttgcaatctgtgtggggaagagagctttggcactgtttagatcgtctctattggaacatctttaagttcactgattctttccttagctgtgtccaatctgctgatgagcctgttgaaggaattcttcttctccgatactgtgtgttttttttttttttttagcatttctctttgactcttttaaaatagtttttagttctctgaaattccccatctgtttatgtaattgtttatctttttcattagatcatttaacatattagacatggttgttttaaacaccctgtctgatagttccaatctctggttcatctctgactttggttcagctgattgctttatctcttgacaatggtttgggttttcctgttttttgtagatctcataaatttttattgaatgctgaataatatgtggataagaacagta

SEQ ID NO: 15477 - DNA, 3338 bp, Homo sapiens
  source 1..3338: mol_type = unassigned DNA
ggaaggcagaagcaatctctgccgagagagtcagccgagcggccgcgcggagaggaggggcgggcggtccccaggcgggcgggtgcagggcgcagggcgccgacctgctggagagggggcccgggcgcgaggcggagtcccggcgcgcagccaggctggtggaggcccccggcaggctgcagattccctccggctccgggagccgcagcaggaccggccaggaggcgccatggaggggagccccatcccggtgctgacagtgcccaccgcgccctacgaggaccagcggccggccggcggcgggggtctgcggcgacccaccggcctcttcgagggccagcgcaactacctgcccaactttatccagagcgtgctgtcgtccatcgacctgcgcgaccgtcagggctgcaccatggtggtgggcagcgacggcaggtactttagcaggacggccatcgagatcgtggtgcagatggccgcggccaacgggattggacgactgattattggacagaatggcatcttgtcgacacctgcggtctcctgcattatcaggaagatcaaggcagctggtggaatcattctaacagccagccactgccctggaggaccagggggagagtttggagtgaagtttaatgttgccaatggaggtcctgcacccgatgttgtctcagacaaaatctaccaaatcagcaaaacgattgaggaatatgctatatgtcctgatctccgaatcgacctatctcgactaggaagacaagaatttgacctagaaaacaaattcaaaccattcagagtggagatagtggacccagtggatatctatcttaacctccttcggaccatctttgactttcatgccatcaagggtttgctgactggacccagccaactgaagattcgcattgacgcaatgcacggagttatgggaccttatgtgagaaaagttctgtgtgatgagctgggggccccagccaattctgcaataaactgtgttcccctggaagactttggagggcagcaccctgacccaaacctgacatatgcaacgactcttctggaagcaatgaaaggaggagaatatggatttggagctgcatttgatgctgatggggaccgttatatgatcctaggccaaaatggcttctttgtgagcccttctgactccctggccatcattgctgccaacctctcttgcattccatatttccgtcagatgggggtccgcgggtttgggaggagtatgccaaccagcatggccctggacagagtggccaaatcaatgaaggtccctgtatatgagaccccagctggatggagattcttctcaaatctgatggactcaggacgttgcaatctgtgtggggaagagagctttggcactggctctgaccacctccgagagaaggatggcctgtgggctgtcttggtctggctctccattattgctgcccggaagcagagtgtggaggaaattgtccgagatcactgggccaaatttggccgccactactattgcaggtttgactatgaggggttggatcccaagacgacatattatatcatgagggacctggaggccctggtcacagacaaatccttcattggccagcagtttgctgtggggagccatgtctacagcgtggcgaagacggatagttttgaatacgtggaccctgtggatggcactgtgaccaagaaacagggcctaaggatcattttctcggatgcatcacggctcatcttccggctcagttcctccagtggtgtgcgggccaccctcagactgtacgcagagagctacgagagggatcccagcggccatgaccaggagccacaggcagtgctgagccctctcatagccatcgcactgaaaatatcccagattcatgagagaactggccggaggggacccactgtcatcacctgaatagaggaaagatcactcaccagggccaaagagagtgctcagcgggagatgcttcactgatgccttcttgctacctgtttgtgcctcttatgactttggaaaaacaaaagatattttgcttttgggggatagagggtgggtgggaaaagaaaaaaaatccatttggttttggttttgtcctattcctccaaatgcagcagggcctttagttgtctgttaaagctgcactataatttggtatctacattttatcacacaaaggaacctccccttttgacaacaactgggctaggcagctgttaatcacaacatttgtgcatcacttgtgccaagtgagaaaatgttctaaaatcacaagagagaacagtgccagaatgaaactgaccctaagtcccaggtgcccctgggcaggcagaaggagacactcccagcatggaggagggtttatcttttcatcctaggtcaggtctacaatgggggaaggttttattatagaactcccaacagcccacctcactcctgccacccacccgatggccctgcctcccccatcccatccccaacatccctgtaccaccttctctcacatcttctaaagctttgtacaaatcacaatggtgcacttccaacaaaatatatcaataggtgttttcctctcttattttgtaaatagtattattttagctattaagctggataccttctttcaaattcagccattcagttgtaaagttgggaagaagtttcttgacaagactctgcaattaaatgcttaaaatttggaggggatccttccttgattacatcaagtatgttggtacatgggtttatacaagttcctcttgagaaggcaaaaagaccaccatgtgtgagagctctttgacttggccaataggggcctatcttaatgcacttgtttggacacatttctgatcttatttgtaaaggctgcaaaaggagaggatgaaatgctgtaaaagtaggaaatgaagtggaagctggaagaaaatgtaattggtggtacagctatgggccagatggtggaggggagggtggggacccctgccggcaagcagagtgtcacagctggctttcctcacttgggaaaagggtactgccggtctagcagcctcctctgtactcagccaggacacccagcgcgtgggacctgtttgtgtctgttttgcttccttgggaacggcacagtcactcaccctgccatttgcggaaatgacctggtgcactttgactgttaagcaatgcgttattgctgtagtcaaggttagtgcaagcaaggaaacattcccagtaaggtatttgtttccattttctgtctgtgcttctgtcagaaacttgctaggacatttagtggccaataaaaaagaaattcctaatttcaacctta

SEQ ID NO: 15478 - DNA, 616 bp, Homo sapiens
  source 1..616: mol_type = unassigned DNA
gagggccagcgcaactacctgcccaactttatccagagcgtgctgtcgtccatcgacctgcgcgaccgtcagggctgcaccatggtggtgggcagcgacggcaggtactttagcaggacggccatcgagatcgtggtgcagatggccgcggccaacgggattggacgactgattattggacagaatggcatcttgtcgacacctgcggtctcctgcattatcaggaagatcaaggcagctggtggaatcattctaacagccagccactgccctggaggaccagggggagagtttggagtgaagtttaatgttgccaatggagtggagatagtggacccagtggatatctatcttaacctccttcggaccatctttgactttcatgccatcaagggtttgctgactggacccagccaactgaagattcgcattgacgcaatgcacggagttatgggaccttatgtgagaaaagttctgtgtgatgagctgggggccccagccaattctgcaataaactgtgttcccctggaagactttggagggcagcaccctgacccaaacctgacatatgcaacgactcttctggaagcaatgaaaggaggagaatatggatttg

SEQ ID NO: 15479 - DNA, 599 bp, Homo sapiens
  source 1..599: mol_type = unassigned DNA
aaatctctgtttcagtcagaaaccagaggccttgcttagaaatttcacaaaggacctgttctgatatagacatctggtgatactatctgttgattgcaaagaaaaatatacctgactaataagaagaaaatgaatggtgcataatgacccaatctcctttggatataataaaactatgcctgatttgtggttttcgtttacatttaggggcaagaatcattgctctctttgaatgactctagttcccagcatagaggtttgtatttactagaccaccaataaacattggttaggttcaggctctgagcctctgactttctggtccaggtagcaagtgtctgcaggatttctagaccccatgctcttacaccagcttgtctatgaagatggaagacaaagcttttctttccaagaagaaactgaaaacatcaactcaagtcttgactttggttgggaaagagtaactgcagtaattaggacccaattgatggcaaaggggtatgatctagaatacctgaaacttggtaatttatgaagaaaaggaattcatttcttacagttatggaggctgagaagtccaaggtccaggggcataacag

SEQ ID NO: 15480 - DNA, 571 bp, Homo sapiens
  source 1..571: mol_type = unassigned DNA
gggtgacacatttctctttggcagagaacaggggccacatctgcgagctgtcagcaatcagccttcctagtagctgagtggccaaatcaatgaaggtccctgtatatgagaccccagctggatggagattcttctcaaatctgatggactcaggacgttgcaatctgtgtggggaagagagctttggcactggctctgaccacctccgagagaaggatggcctgtgggctgtcttggtctggctctccattattgctgcccggaagcagagtgtggaggaaattgtccgagatcactgggccaaatttggccgccactactattgcaggtttgactatgaggggttggatcccaagacgacatattatatcatgagggacctggaggccctggtcacagacaaatccttcattggccagcagtttgctgtggggagccatgtctacagcgtggcgaagacggatagttttgaatacgtggaccctgtggatggcactgtgaccaagaaacagggcctaaggatcattttctcggatgcatcacggctcatcttccggctcagttcctccag

SEQ ID NO: 15481 - DNA, 4032 bp, Homo sapiens
  source 1..4032: mol_type = unassigned DNA
cttcaaagggttgagtctgggggctcatcagaagaggtaatcccaagtgacttggaatctgcaacaggtgggttaggacctcatccttagatattgctttaaccaatttatgggtaagccatagttctgagcagagtcacgtgctcacgcgccccacgtgtagtgacaacgggaatgtaggcttaaacataggtaacagcttcaaaagagtttgtaaaaacaaggctgtgaatatcaatataattgtgagacttttggggatttattgtaggtttgaacgtaacttgaaatacagtgatttgtagacagtcagtaattgcttcacttgctccatttggaattttgtaactattcacttctccagcagcataaggtggttaagaagacagtttctgttcgttgtaaaaaattactccaggcttaaggaggacaactattgtgtctttatattcatatacccaggatttagcacagtgcctaatccataagggccacactaaaatgtttgcccagtgaataaatcctggataatatcatcctgtctgcaaagccagtattacagagtgattggttgccagtaggggagatagctccctttggttacacaaattgtggcagacattgaaccactccaaaagaaactaaagctatttatttggggattgaaacaaaaaagcctacacaacttgaaaaaagcataaagacactcagatggaaccatagtgtctcccagcagatatcaccagatgggggtgggggtaaataattgcagtcacatatgcagcaggtatatatatttttactaatggcttattcttaaacaggacttgaggccagagaaatttcaaggataaattgctttgggagaatgcctgatatcaatgtctcctgagacatagaagttttccaaaataacaaatcaccagatatattattttgttgcctcctcttccttcccctggcccctgccaatatgcttatttacaagagttaccttatcagttgtcttaggagaacacatttccttcaacagaagtcacagtatcatcttatggtcataattttacaatatccctgcctctactgagaagagatacatagcgaatggagatgtgctgagccaatgaggaattaatcctaggcagcactagtagatgtggccacagctctggccccaccccactctggtggtcaggccaaaaaagaagtcaggtaagaagtgtgaaaggaaattcaatcttgggacccccaaactcattaagccacagggaaaattcaagctgggaactgggtcacgcaaacatgcctcccccttttggttcctaaataagatggctacaagatgaaaagctacatgcctcccccatattttgcccacaagggaattcccagtgagctgctagatctttacactaaaggtgtttctattaaaatttcaccatggcaatataaattgatagtttatagatgcagtcacccctggcccaccagacacaaatgcatatctgattgttcccctggcccagttttgtctgttatcttatataaaatgcagattccctgcaattttcctctgcctcatttgtctgtgtcatcttatgttaaaaaaaaatgcagattcactgagccagacaaaggcatgaatgactgtttttccctacccacctcttacatgaaaattgtgtacttctcaatatcctgccctttcccctttaaatttggagccttcaaaatcatctttggagaaaggcatagacctgtctcctaggtgtgcatccttaactttggcaaataaacctcctaaaataattgagacttgtcatttttctcgattgacagaagaaaagacagagccaagaggatggcagtgtacttggctacccccagagcctagctgaggctccagccctgggcacttcactggagcattcccttgccagcagaggaacctgcagcctaacctcatgctggggtaaccttaatgtgggcaatccgtcttactgtaatagacaaattgcctgctttcacttaatccacagatttacaagggacaaactttggccctaggaatatttattgaatatcatttcatccctgtgacttccacttctttctgattcccatatcaccagcccaagagaacttgagtatctgttcacagctttgctcctctttccccacattaaccacaaagcaacggaaatagaataaagagacaaatgggtaactctaagtaggttcatcacattcattacatgccctgtatccagagccaatataaatggtcttgattctgattgtgttgaggtataaaaacatgctgatttctgtggcaggtattaatgattattacttgtgtattcatttgctcactgctccattctggatgttcttggtctcagggcctaaggatcattttctcggatgcatcacggctcatcttccggctcagttcctccagtggtgtgcgggccaccctcagactgtacgcagagagctacgagagggatcccagcggccatgaccaggagccacaggcagtgctgagccctctcatagccatcgcactgaaaatatcccagattcatgagagaactggccggaggggacccactgtcatcacctgaatagaggaaagatcactcaccagggccaaagagagtgctcagcgggagatgcttcactgatgccttcttgctacctgtttgtgcctcttatgactttggaaaaacaaaagatattttgcttttgggggatagagggtgggtgggaaaagaaaaaaaatccatttggttttggttttgtcctattcctccaaatgcagcagggcctttagttgtctgttaaagctgcactataatttggtatctacattttatcacacaaaggaacctccccttttgacaacaactgggctaggcagctgttaatcacaacatttgtgcatcacttgtgccaagtgagaaaatgttctaaaatcacaagagagaacagtgccagaatgaaactgaccctaagtcccaggtgcccctgggcaggcagaaggagacactcccagcatggaggagggtttatcttttcatcctaggtcaggtctacaatgggggaaggttttattatagaactcccaacagcccacctcactcctgccacccacccgatggccctgcctcccccatcccatccccaacatccctgtaccaccttctctcacatcttctaaagctttgtacaaatcacaatggtgcacttccaacaaaatatatcaataggtgttttcctctcttattttgtaaatagtattattttagctattaagctggataccttctttcaaattcagccattcagttgtaaagttgggaagaagtttcttgacaagactctgcaattaaatgcttaaaatttggaggggatccttccttgattacatcaagtatgttggtacatgggtttatacaagttcctcttgagaaggcaaaaagaccaccatgtgtgagagctctttgacttggccaataggggcctatcttaatgcacttgtttggacacatttctgatcttatttgtaaaggctgcaaaaggagaggatgaaatgctgtaaaagtaggaaatgaagtggaagctggaagaaaatgtaattggtggtacagctatgggccagatggtggaggggagggtggggacccctgccggcaagcagagtgtcacagctggctttcctcacttgggaaaagggtactgccggtctagcagcctcctctgtactcagccaggacacccagcgcgtgggacctgtttgtgtctgttttgcttccttgggaacggcacagtcactcaccctgccatttgcggaaatgacctggtgcactttgactgttaagcaatgcgttattgctgtagtcaaggttagtgcaagcaaggaaacattcccagtaaggtatttgtttccattttctgtctgtgcttctgtcagaaacttgctaggacatttagtggccaataaaaaagaaattcctaatttcaacctta

SEQ ID NO: 15482 - DNA, 13748 bp, Homo sapiens
  source 1..13748: mol_type = unassigned DNA
ggatccattttataagctcaaagataattacttttcagactaagaatatttagggtaaaaagtactgttcaacatctctactgaggatgttatgatgtagcacactgtataagctggagctaaaggaaactttccttaaagtgctatttactaaaaattggaacacattccttaagacaaatcgaagtgtggcacacaacatccaaacttccatcatagatacagaggtgttaccatctcccactcccaaatttctttgtcacgctgaggatactcaagaggagcaggacatgttggtcgcagcaggagaaacttgaaagcattcacttttatggaactcataagggagagaatctcttatttagtatcgtccttgatacatttattattttaaaagataatgtagccaaatgtcttcctctgtgttaaatctttacaaaactgaaatcttaaaatggtgacaaaaattctacttctgatagaatctattcatttttccaattagatagggcataattcttaatttgcaaaacaaaacgtaatatgcttatgaggttccatcccaaagaacctgctattgagagtagcattcagaataacgggtggaaatgccaactccagagtttcagatcctaccggtaattggggtagggaggggctttgggcggggcctccctagaggaggaggcgttgttagaaagctgtctggccagtccacagctgtcactaatcggggtaagccttgttgtatttgtgcgtgtgggtggcattctcaatgagaactagcttcacttgtcatttgagtgaaatctacaacccgaggcggctagtgctcccgcactactgggatctgagatcttcggagatgactgtcgcccgcagtacggagccagcagaagtccgacccttcctgggaatgggctgtaccgagaggtccgactagccccagggttttagtgagggggcagtggaactcagcgagggactgagagcttcacagcatgcacgagtttgatgccagagaaaaagtcgggagataaaggagccgcgtgtcactaaattgccgtcgcagccgcagccactcaagtgccggacttgtgagtactctgcgtctccagtcctcggacagaagttggagaactctcttggagaactccccgagttaggagacgagatctcctaacaattactactttttcttgcgctccccacttgccgctcgctgggacaaacgacagccacagttcccctgacgacaggatggaggccaagggcaggagctgaccagcgccgccctcccccgcccccgacccaggaggtggagatccctccggtccagccacattcaacacccactttctcctccctctgcccctatattcccgaaaccccctcctccttcccttttccctcctcctggagacgggggaggagaaaaggggagtccagtcgtcatgactgagctgaaggcaaagggtccccgggctccccacgtggcgggcggcccgccctcccccgaggtcggatccccactgctgtgtcgcccagccgcaggtccgttcccggggagccagacctcggacaccttgcctgaagtttcggccatacctatctccctggacgggctactcttccctcggccctgccagggacaggacccctccgacgaaaagacgcaggaccagcagtcgctgtcggacgtggagggcgcatattccagagctgaagctacaaggggtgctggaggcagcagttctagtcccccagaaaaggacagcggactgctggacagtgtcttggacactctgttggcgccctcaggtcccgggcagagccaacccagccctcccgcctgcgaggtcaccagctcttggtgcctgtttggccccgaacttcccgaagatccaccggctgcccccgccacccagcgggtgttgtccccgctcatgagccggtccgggtgcaaggttggagacagctccgggacggcagctgcccataaagtgctgccccggggcctgtcaccagcccggcagctgctgctcccggcctctgagagccctcactggtccggggccccagtgaagccgtctccgcaggccgctgcggtggaggttgaggaggaggatggctctgagtccgaggagtctgcgggtccgcttctgaagggcaaacctcgggctctgggtggcgcggcggctggaggaggagccgcggctgtcccgccgggggcggcagcaggaggcgtcgccctggtccccaaggaagattcccgcttctcagcgcccagggtcgccctggtggagcaggacgcgccgatggcgcccgggcgctccccgctggccaccacggtgatggatttcatccacgtgcctatcctgcctctcaatcacgccttattggcagcccgcactcggcagctgctggaagacgaaagttacgacggcggggccggggctgccagcgcctttgccccgccgcggagttcaccctgtgcctcgtccaccccggtcgctgtaggcgacttccccgactgcgcgtacccgcccgacgccgagcccaaggacgacgcgtaccctctctatagcgacttccagccgcccgctctaaagataaaggaggaggaggaaggcgcggaggcctccgcgcgctccccgcgttcctaccttgtggccggtgccaaccccgcagccttcccggatttcccgttggggccaccgcccccgctgccgccgcgagcgaccccatccagacccggggaagcggcggtgacggccgcacccgccagtgcctcagtctcgtctgcgtcctcctcggggtcgaccctggagtgcatcctgtacaaagcggagggcgcgccgccccagcagggcccgttcgcgccgccgccctgcaaggcgccgggcgcgagcggctgcctgctcccgcgggacggcctgccctccacctccgcctctgccgccgccgccggggcggcccccgcgctctaccctgcactcggcctcaacgggctcccgcagctcggctaccaggccgccgtgctcaaggagggcctgccgcaggtctacccgccctatctcaactacctgaggccggattcagaagccagccagagcccacaatacagcttcgagtcattacctcagaagatttgtttaatctgtggggatgaagcatcaggctgtcattatggtgtccttacctgtgggagctgtaaggtcttctttaagagggcaatggaagggcagcacaactacttatgtgctggaagaaatgactgcatcgttgataaaatccgcagaaaaaactgcccagcatgtcgccttagaaagtgctgtcaggctggcatggtccttggaggtcgaaaatttaaaaagttcaataaagtcagagttgtgagagcactggatgctgttgctctcccacagccagtgggcgttccaaatgaaagccaagccctaagccagagattcactttttcaccaggtcaagacatacagttgattccaccactgatcaacctgttaatgagcattgaaccagatgtgatctatgcaggacatgacaacacaaaacctgacacctccagttctttgctgacaagtcttaatcaactaggcgagaggcaacttctttcagtagtcaagtggtctaaatcattgccaggttttcgaaacttacatattgatgaccagataactctcattcagtattcttggatgagcttaatggtgtttggtctaggatggagatcctacaaacacgtcagtgggcagatgctgtattttgcacctgatctaatactaaatgaacagcggatgaaagaatcatcattctattcattatgccttaccatgtggcagatcccacaggagtttgtcaagcttcaagttagccaagaagagttcctctgtatgaaagtattgttacttcttaatacaattcctttggaagggctacgaagtcaaacccagtttgaggagatgaggtcaagctacattagagagctcatcaaggcaattggtttgaggcaaaaaggagttgtgtcgagctcacagcgtttctatcaacttacaaaacttcttgataacttgcatgatcttgtcaaacaacttcatctgtactgcttgaatacatttatccagtcccgggcactgagtgttgaatttccagaaatgatgtctgaagttattgctgcacaattacccaagatattggcagggatggtgaaaccccttctctttcataaaaagtgaatgtcatctttttcttttaaagaattaaattttgtggtatgtctttttgttttggtcaggattatgaggtcttgagtttttataatgttcttctgaaagccttacatttataacatcatagtgtgtaaatttaaaagaaaaattgtgaggttctaattattttcttttataaagtataattagaatgtttaactgttttgtttacccatattttcttgaagaatttacaagattgaaaaagtactaaaattgttaaagtaaactatcttatccatattatttcataccatgtaggtgaggatttttaacttttgcatctaacaaatcatcgacttaagagaaaaaatcttacatgtaataacacaaagctattatatgttatttctaggtaactccctttgtgtcaattatatttccaaaaatgaacctttaaaatggtatgcaaaattttgtctatatatatttgtgtgaggaggaaattcataactttcctcagattttcaaaagtatttttaatgcaaaaaatgtagaaagagtttaaaaccactaaaatagattgatgttcttcaaactaggcaaaacaactcatatgttaagaccattttccagattggaaacacaaatctcttaggaagttaataagtagattcatatcattatgcaaatagtattgtgggttttgtaggtttttaaaataaccttttttggggagagaattgtcctctaatgaggtattgcgagtggacataagaaatcagaagattatggcctaactgtactccttaccaactgtggcatgctgaaagttagtcactcttactgattctcaattctctcacctttgaaagtagtaaaatatctttcctgccaattgctcctttgggtcagagcttattaacatcttttcaaatcaaaggaaagaagaaagggagaggaggaggagggaggtatcaattcacatacctttctcctctttatcctccactatcatgaattcatattatgtttcagccatgcaaatctttttaccatgaaatttcttccagaattttccccctttgacacaaattccatgcatgtttcaaccttcgagactcagccaaatgtcatttctgtaaaatcttccctgagtcttccaagcagtaatttgccttctcctagagtttacctgccattttgtgcacatttgagttacagtagcatgttattttacaattgtgactctcctgggagtctgggagccatataaagtggtcaatagtgtttgctgactgagagttgaatgacattttctctctgtcttggtattactgtagatttcgatcattctttggttacatttctgcatatttctgtacccatgactttatcactttcttctcccatgctttatctccatcaattatcttcattacttttaaattttccacctttgcttcctactttgtgagatctctccctttactgactataacatagaagaatagaagtgtattttatgtgtcttaaggacaatactttagattccttgttctaagtttttaaactgaatgaatggaatattatttctctccctaagcaaaattccacaaaacaattatttcttatgtttatgtagccttaaattgttttgtactgtaaacctcagcataaaaactttcttcatttctaatttcattcaacaaatattgattgaatacctggtattagcacaagaaaaatgtgctaataagccttatgagaatttggagctgaagaaagacatataactcaggaaagttacagtccagtagtaggtataaattacagtgcctgataaataggcattttaatatttgtacactcaacgtatactaggtaggtgcaaaacatttacatataattttactgatacccatgcagcacaaaggtactaactttaaatattaaataacacctttatgtgtcagtaattcatttgcattaaatcttattgaaaaggctttcaatatattttccccacaaatgtcatcccaagaaaaaagtatttttaacatctcccaaatataatagttacaggaaatctacctctgtgagagtgacacctctcagaatgaactgtgtgacacaagaaaatgaatgtaggtctatccaaaaaaaaccccaagaaacaaaaacaatattattagccctttatgcttaagtgatggactcagggaacagttgatgttgtgatcattttattatctgattcttgttactttgaattaaaccaatattttgatgatataaatcatttccaccagcatatatttaatttccataataactttaaaattttctaatttcactcaactatgagggaatagaatgtggtggccacaggtttggcttttgttaaaatgtttgatatcttcgatgttgatctctgtctgcaatgtagatgtctaaacactaggatttaatatttaaggctaagctttaaaaataaagtacctttttaaaaagaatatggcttcaccaaatggaaaatacctaatttctaaatctttttctctacaaagtcctatctactaatgtctccattactatttagtcatcataaccattatcttcattttacatgtcgtgttctttctggtagctctaaaatgacactaaatcataagaagacaggttacatatcaggaaatacttgaaggttactgaaatagattcttgagttaatgaaaatattttctgtaaaaaggtttgaaaagccatttgagtctaaagcattatacctccattatcagtagttatgtgacaattgtgtgtgtgtttaatgtttaaagatgtggcactttttaataaggcaatgctatgctattttttcccatttaacattaagataatttattgctatacagatgatatggaaatatgatgaacaatattttttttgccaaaactatgccttgtaagtagccatggaatgtcaacctgtaacttaaattatccacagatagtcatgtgtttgatgatgggcactgtggagataactgacataggactgtgccccccttctctgccacttactagctggatgagattaagcaagtcatttaactgctctgattaaacctgcctttcccaagtgctttgtaatgaatagaaatggaaaccaaaaaaaacgtatacaggccttcagaaatagtaattgctactattttgttttcattaagccatagttctggctataattttatcaaactcaccagctatattctacagtgaaagcaggattctagaaagtctcactgttttatttatgtcaccatgtgctatgatatatttggttgaattcatttgaaattagggctggaagtattcaagtaatttcttctgctgaaaaaatacagtgttttgagtttagggcctgttttatcaaagttctaaagagcctatcactcttccattgtagacattttaaaataatgacactgattttaacatttttaagtgtctttttagaacagagagcctgactagaacacagcccctccaaaaacccatgctcaaattatttttactatggcagcaattccacaaaagggaacaatgggtttagaaattacaatgaagtcatcaacccaaaaaacatccctatccctaagaaggttatgatataaaatgcccacaagaaatctatgtctgctttaatctgtcttttattgctttggaaggatggctattacatttttagtttttgctgtgaatacctgagcagtttctctcatccatacttatccttcacacatcagaagtcaggatagaatatgaatcattttaaaaacttttacaactccagagccatgtgcataagaagcattcaaaacttgccaaaacatacattttttttcaaatttaaagatactctatttttgtattcaatagctcaacaactgtggtccccactgataaagtgaagtggacaaggagacaagtaatggcataagtttgtttttcccaaagtatgcctgttcaatagccattggatgtgggaaatttctacatctcttaaaattttacagaaaatacatagccagatagtctagcaaaagttcaccaagtcctaaattgcttatccttacttcactaagtcatgaaatcattttaatgaaaagaacatcacctaggttttgtggtttctttttttcttattcatggctgagtgaaaacaacaatctctgtttctccctagcatctgtggactatttaatgtaccattattccacactctatggtccttactaaatacaaaattgaacaaaaagcagtaaaacaactgactcttcacccatattataaaatataatccaagccagattagtcaacatccataagatgaatccaagctgaactgggcctagattattgagttcaggttggatcacatccctatttattaataaacttaggaaagaaggccttacagaccatcagttagctggagctaatagaacctacacttctaaagttcggcctagaatcaatgtggccttaaaagctgaaaagaagcaggaaagaacagttttcttcaataatttgtccaccctgtcactggagaaaatttaagaatttgggggtgttggtagtaagttaaacacagcagctgttcatggcagaaattattcaatacataccttctctgaatatcctataaccaaagcaaagaaaaacaccaaggggtttgttctcctccttggagttgacctcattccaaggcagagctcaggtcacaggcacaggggctgcgcccaagcttgtccgcagccttatgcagctgtggagtctggaagactgttgcaggactgctggcctagtcccagaatgtcagcctcattttcgatttactggctcttgttgctgtatgtcatgctgaccttattgttaaacacaggtttgtttgctttttttccactcatggagacatgggagaggcattatttttaagctggttgaaagctttaaccgataaagcatttttagagaaatgtgaatcaggcagctaagaaagcatactctgtccattacggtaaagaaaatgcacagattattaactctgcagtgtggcattagtgtcctggtcaatattcggatagatatgaataaaatatttaaatggtattgtaaatagttttcaggacatatgctatagcttatttttattatcttttgaaattgctcttaatacatcaaatcctgatgtattcaatttatcagatataaattattctaaatgaagcccagttaaatgtttttgtcttgtcagttatatgttaagtttctgatctctttgtctatgacgtttactaatctgcatttttactgttatgaattattttagacagcagtggtttcaagctttttgccactaaaaataccttttattttctcctcccccagaaaagtctataccttgaagtatctatccaccaaactgtacttctattaagaaatagttattgtgttttcttaatgttttgttattcaaagacatatcaatgaaagctgctgagcagcatgaataacaattatatccacacagatttgatatattttgtgcagccttaacttgatagtataaaatgtcattgctttttaaataatagttagtcaatggacttctatcatagctttcctaaactaggttaagatccagagctttggggtcataatatattacatacaattaagttatctttttctaagggctttaaaattcatgagaataaccaaaaaaggtatgtggagagttaatacaaacataccatattcttgttgaaacagagatgtggctctgcttgttctccataaggtagaaatactttccagaatttgcctaaactagtaagccctgaatttgctatgattagggataggaagagattttcacatggcagactttagaattcttcactttagccagtaaagtatctccttttgatcttagtattctgtgtattttaacttttctgagttgtgcatgtttataagaaaaatcagcacaaagggtttaagttaaagcctttttactgaaatttgaaagaaacagaagaaaatatcaaagttctttgtattttgagaggattaaatatgatttacaaaagttacatggagggctctctaaaacattaaattaattattttttgttgaaaagtcttactttaggcatcattttattcctcagcaactagctgtgaagcctttactgtgctgtatgccagtcactctgctagattgtggagattaccagtgttcccgtcttctccgagcttagagttggatggggaataaagacaggtaaacagatagctacaatattgtactgtgaatgcttatgctggaggaagtacagggaactattggagcacctaagaggagcacctaccttgaatttaggggttagcagaggcatcctgaaaaaagtcaaagctaagccacaatctataagcagtttaggaattagcagaacgtgcgtggtgaggagatgccaaaggcaagaagagaagagtattccaaacaggagggattccaaagagagaagagtatcccaaacaacatttgcacaaacctgatggggagagagaatgtggggtggggatggatgatgagactgaagaagaaagccaggtctagataatcagtggccttgtacaccatgttaaagagtgtagacttgattctgttgtaaacaggaaagcagcacaattcatatgaatattttagaagactcccactggaatatggagaataaagttggagatgactaatcctggaagcagggagaacatttttgaggaagttgcactattttggtgaaaatgatgatcataaacatgaagaattgtaggtgatcatgacctcctctctaattttccagaagggttttggaagatataacataggaacattgacaggactgacgaaaggagatgaaatacaccatataaattgtcaaacacaaggccagatgtctaattattttgcttatgtgttgaaattacaaatttttcatcaggaaaccaaaaactacaaaacttagttttcccaagtcccagaattctatctgtccaaacaatctgtaccactccacctatatccctacctttgcatgtctgtccaacctcaaagtccaggtctatacacacgggtaagactagagcagttcaagtttcagaaaatgagaaagaggaactgagttgtgctgaacccatacaaaataaacacattctttgtatagattcttggaacctcgagaggaattcacctaactcataggtatttgatggtatgaatccatggctgggctcggcttttaaaaagccttatctgggattccttctatggaaccaagttccatcaaagcccatttaaaagcctacattaaaaacaaaattcttgctgcattgtatacaaataatgatgtcatgatcaaataatcagatgccattatcaagtggaattacaaaatggtatacccactccaaaaaaaaaaaaaaagctaaattctcagtagaacattgtgacttcatgagccctccacagccttggagctgaggagggagcactggtgagcagtaggttgaagagaaaacttggcgcttaataatctatccatgttttttcatctaaaagagccttctttttggattaccttattcaatttccatcaaggaaattgttagttccactaaccagacagcagctgggaaggcagaagcttactgtatgtacatggtagctgtgggaaggaggtttctttctccaggtcctcactggccatacaccagtcccttgttagttatgcctggtcatagacccccgttgctatcatctcatatttaagtctttggcttgtgaatttatctattctttcagcttcagcactgcagagtgctgggactttgctaacttccatttcttgctggcttagcacattcctcataggcccagctcttttctcatctggccctgctgtggagtcaccttgccccttcaggagagccatggcttaccactgcctgctaagcctccactcagctgccaccacactaaatccaagcttctctaagatgttgcagactttacaggcaagcataaaaggcttgatcttcctggacttccctttacttgtctgaatctcacctccttcaactttcagtctcagaatgtaggcatttgtcctctttgccctacatcttccttcttctgaatcatgaaagcctctcacttcctcttgctatgtgctggaggcttctgtcaggttttagaatgagttctcatctagtcctagtagcttttgatgcttaagtccaccttttaaggatacctttgagatttagaccatgtttttcgcttgagaaagccctaatctccagacttgcctttctgtggatttcaaagaccaactgaggaagtcaaaagctgaatgttgactttctttgaacatttccgctataacaattccaattctcctcagagcaatatgcctgcctccaactgaccaggagaaaggtccagtgccaaagagaaaaacacaaagattaattatttcagttgagcacatactttcaaagtggtttgggtattcatatgaggttttctgtcaagagggtgagactcttcatctatccatgtgtgcctgacagttctcctggcactggctggtaacagatgcaaaactgtaaaaattaagtgatcatgtattttaacgatatcatcacatacttattttctatgtaatgttttaaatttcccctaacatactttgactgttttgcacatggtagatattcacatttttttgtgttgaagttgatgcaatcttcaaagttatctaccccgttgcttattagtaaaactagtgttaatacttggcaagagatgcagggaatctttctcatgactcacgccctatttagttattaatgctactaccctattttgagtaagtagtaggtccctaagtacattgtccagagttatacttttaaagatatttagccccatatacttcttgaatctaaagtcatacaccttgctcctcatttctgagtgggaaagacatttgagagtatgttgacaattgttctgaaggtttttgccaagaaggtgaaactgtcctttcatctgtgtatgcctggggctgggtccctggcagtgatggggtgacaatgcaaagctgtaaaaactaggtgctagtgggcacctaatatcatcatcatatacttattttcaagctaatatgcaaaatcccatctctgtttttaaactaagtgtagatttcagagaaaatattttgtggttcacataagaaaacagtctactcagcttgacaagtgttttatgttaaattggctggtggtttgaaatgaatcatcttcacataatgttttctttaaaaatattgtgaatttaactctaattcttgttattctgtgtgataataaagaataaactaatttcta

SEQ ID NO: 15483 - DNA, 1901 bp, Homo sapiens
  source 1..1901: mol_type = unassigned DNA
atttgagtgaaatctacaacccgaggcggctagtgctcccgcactactgggatctgagatcttcggagatgactgtcgcccgcagtacggagccagcagaagtccgacccttcctgggaatgggctgtaccgagaggtccgactagccccagggttttagtgagggggcagtggaactcagcgagggactgagagcttcacagcatgcacgagtttgatgccagagaaaaagtcgggagataaaggagccgcgtgtcactaaattgccgtcgcagccgcagccactcaagtgccggacttgccggattcagaagccagccagagcccacaatacagcttcgagtcattacctcagaagatttgtttaatctgtggggatgaagcatcaggctgtcattatggtgtccttacctgtgggagctgtaaggtcttctttaagagggcaatggaagggcagcacaactacttatgtgctggaagaaatgactgcatcgttgataaaatccgcagaaaaaactgcccagcatgtcgccttagaaagtgctgtcaggctggcatggtccttggaggtcgaaaatttaaaaagttcaataaagtcagagttgtgagagcactggatgctgttgctctcccacagccagtgggcgttccaaatgaaagccaagccctaagccagagattcactttttcaccaggtcaagacatacagttgattccaccactgatcaacctgttaatgagcattgaaccagatgtgatctatgcaggacatgacaacacaaaacctgacacctccagttctttgctgacaagtcttaatcaactaggcgagaggcaacttctttcagtagtcaagtggtctaaatcattgccaggttttcgaaacttacatattgatgaccagataactctcattcagtattcttggatgagcttaatggtgtttggtctaggatggagatcctacaaacacgtcagtgggcagatgctgtattttgcacctgatctaatactaaatgaacagcggatgaaagaatcatcattctattcattatgccttaccatgtggcagatcccacaggagtttgtcaagcttcaagttagccaagaagagttcctctgtatgaaagtattgttacttcttaatacaattcctttggaagggctacgaagtcaaacccagtttgaggagatgaggtcaagctacattagagagctcatcaaggcaattggtttgaggcaaaaaggagttgtgtcgagctcacagcgtttctatcaacttacaaaacttcttgataacttgcatgatcttgtcaaacaacttcatctgtactgcttgaatacatttatccagtcccgggcactgagtgttgaatttccagaaatgatgtctgaagttattgctgcacaattacccaagatattggcagggatggtgaaaccccttctctttcataaaaagtgaatgtcatctttttcttttaaagaattaaattttgtggtatgtctttttgttttggtcaggattatgaggtcttgagtttttataatgttcttctgaaagccttacatttataacatcatagtgtgtaaatttaaaagaaaaattgtgaggttctaattattttcttttataaagtataattagaatgtttaactgttttgtttacccatattttcttgaagaatttacaagattgaaaaagtactaaaattgttaaagtaaactatcttatccatattatttcataccatgtaggtgaggatttttaacttttgcatctaacaaatcatcgacttaagagaaaaaatcttacatgtaataacacaaagctattatatgttatttctaggtaactccctttgtgtcaattatatttccaaaaatgaacctttaaaat

SEQ ID NO: 15484 - DNA, 2224 bp, Homo sapiens
  source 1..2224: mol_type = unassigned DNA
aagtataatcctttttctttatgacaataccctgagttcagaaatctcagagacaaatgtttacagagaccaggtaaataagtagctagagtgacaagacttaagaaaagagaccattggcgtaccaccagtttgtggagggaactggaaaaactggaatacacatgccccatccaaaagcaaccattgcaactaaactttaacagattgttgccacctaagtaattcacggatggtctcataattctggtcagcattgtctgagccaaacaaaatgtatctatgggcatgatcagatactagagccagcagattgcaacctctgcttagataattgcaggtatcagccttcccttggctaaacagctacttcatactgataagtagcccttgcctggcacaaagcaggtggggctgaatccagcctgatatcacatcaccacaactttctctaattctcctcaaggcgtctgtgaactaccagcagcccaaataagcatccttttctccttcaatcatttctcataaagcagattctactcatctcaccatccatctttttcccctaacatatcagaattcatcaaagtagaaactccagaaatcatccagaaatacaaatgtgatctgaccagcacgggtataaactttctctttccttaatttagaaaaaggattattaattttgagtcttagatctcataaaagtagagctggattgattttaagggatcaatgaacctactgaaattgtataaaaagattttgtggggctggcaaacaaatgcttttcttttaacatattcttaaaagaacaaaacctcaaagaagatttaacaaccactatagactaagtttcaattaatgtagtctgtagcattagattttggaaggctgttctatcagaatatggaccaatactgagcgtagtcgctactaaaactctttgtctttttattcatatcttctcctaaaaagctccatgacccctgcagaatactggtataattacccacacctcacccacccagtgattgttgatgtaactaattatttaatccaagtctgaggcctaaattttttttaatcaagagttagttacatgttttaatttattttttgtaattttaatatctaacacttttattctatttcattcgattgatgctaaaatgcataatgctatgattctaagacttaggaaaaataatactatactgggatatggagtttatatatatttacatgaatttcttttttttcttctctgtaggtcgaaaatttaaaaagttcaataaagtcagagttgtgagagcactggatgctgttgctctcccacagccagtgggcgttccaaatgaaagccaagccctaagccagagattcactttttcaccaggtcaagacatacagttgattccaccactgatcaacctgttaatgagcattgaaccagatgtgatctatgcaggacatgacaacacaaaacctgacacctccagttctttgctgacaagtcttaatcaactaggcgagaggcaacttctttcagtagtcaagtggtctaaatcattgccaggttttcgaaacttacatattgatgaccagataactctcattcagtattcttggatgagcttaatggtgtttggtctaggatggagatcctacaaacacgtcagtgggcagatgctgtattttgcacctgatctaatactaaatgaacagcggatgaaagaatcatcattctattcattatgccttaccatgtggcagatcccacaggagtttgtcaagcttcaagttagccaagaagagttcctctgtatgaaagtattgttacttcttaatacaattcctttggaagggctacgaagtcaaacccagtttgaggagatgaggtcaagctacattagagagctcatcaaggcaattggtttgaggcaaaaaggagttgtgtcgagctcacagcgtttctatcaacttacaaaacttcttgataacttgcatgatcttgtcaaacaacttcatctgtactgcttgaatacatttatccagtcccgggcactgagtgttgaatttccagaaatgatgtctgaagttattgctgcacaattacccaagatattggcagggatggtgaaaccccttctctttcataaaaagtgaatgtcatctttttcttttaaagaattaaattttgtggtatgtctttttgttttgg

SEQ ID NO: 15485 - DNA, 2633 bp, Homo sapiens
  source 1..2633: mol_type = unassigned DNA
atgactgagctgaaggcaaagggtccccgggctccccacgtggcgggcggcccgccctcccccgaggtcggatccccactgctgtgtcgcccagccgcaggtccgttcccggggagccagacctcggacaccttgcctgaagtttcggccatacctatctccctggacgggctactcttccctcggccctgccagggacaggacccctccgacgaaaagacgcaggaccagcagtcgctgtcggacgtggagggcgcatattccagagctgaagctacaaggggtgctggaggcagcagttctagtcccccagaaaaggacagcggactgctggacagtgtcttggacactctgttggcgccctcaggtcccgggcagagccaacccagccctcccgcctgcgaggtcaccagctcttggtgcctgtttggccccgaacttcccgaagatccaccggctgcccccgccacccagcgggtgttgtccccgctcatgagccggtccgggtgcaaggttggagacagctccgggacggcagctgcccataaagtgctgccccggggcctgtcaccagcccggcagctgctgctcccggcctctgagagccctcactggtccggggccccagtgaagccgtctccgcaggccgctgcggtggaggttgaggaggaggatggctctgagtccgaggagtctgcgggtccgcttctgaagggcaaacctcgggctctgggtggcgcggcggctggaggaggagccgcggctgtcccgccgggggcggcagcaggaggcgtcgccctggtccccaaggaagattcccgcttctcagcgcccagggtcgccctggtggagcaggacgcgccgatggcgcccgggcgctccccgctggccaccacggtgatggatttcatccacgtgcctatcctgcctctcaatcacgccttattggcagcccgcactcggcagctgctggaagacgaaagttacgacggcggggccggggctgccagcgcctttgccccgccgcggagttcaccctgtgcctcgtccaccccggtcgctgtaggcgacttccccgactgcgcgtacccgcccgacgccgagcccaaggacgacgcgtaccctctctatagcgacttccagccgcccgctctaaagataaaggaggaggaggaaggcgcggaggcctccgcgcgctccccgcgttcctaccttgtggccggtgccaaccccgcagccttcccggatttcccgttggggccaccgcccccgctgccgccgcgagcgaccccatccagacccggggaagcggcggtgacggccgcacccgccagtgcctcagtctcgtctgcgtcctcctcggggtcgaccctggagtgcatcctgtacaaagcggagggcgcgccgccccagcagggcccgttcgcgccgccgccctgcaaggcgccgggcgcgagcggctgcctgctcccgcgggacggcctgccctccacctccgcctctgccgccgccgccggggcggcccccgcgctctaccctgcactcggcctcaacgggctcccgcagctcggctaccaggccgccgtgctcaaggagggcctgccgcaggtctacccgccctatctcaactacctgaggccggattcagaagccagccagagcccacaatacagcttcgagtcattacctcagaagatttgtttaatctgtggggatgaagcatcaggctgtcattatggtgtccttacctgtgggagctgtaaggtcttctttaagagggcaatggaaggtcgaaaatttaaaaagttcaataaagtcagagttgtgagagcactggatgctgttgctctcccacagccagtgggcgttccaaatgaaagccaagccctaagccagagattcactttttcaccaggtcaagacatacagttgattccaccactgatcaacctgttaatgagcattgaaccagatgtgatctatgcaggacatgacaacacaaaacctgacacctccagttctttgctgacaagtcttaatcaactaggcgagaggcaacttctttcagtagtcaagtggtctaaatcattgccaggttttcgaaacttacatattgatgaccagataactctcattcagtattcttggatgagcttaatggtgtttggtctaggatggagatcctacaaacacgtcagtgggcagatgctgtattttgcacctgatctaatactaaatgaatcccacaggagtttgtcaagcttcaagttagccaagaagagttcctctgtatgaaagtattgttacttcttaatacaattcctttggaagggctacgaagtcaaacccagtttgaggagatgaggtcaagctacattagagagctcatcaaggcaattggtttgaggcaaaaaggagttgtgtcgagctcacagcgtttctatcaacttacaaaacttcttgataacttgcatgatcttgtcaaacaacttcatctgtactgcttgaatacatttatccagtcccgggcactgagtgttgaatttccagaaatgatgtctgaagttattgctgcacaattacccaagatattggcagggatggtgaaaccccttctctttcataaaaagtga

SEQ ID NO: 15486 - DNA, 2750 bp, Homo sapiens
  source 1..2750: mol_type = unassigned DNA
atgactgagctgaaggcaaagggtccccgggctccccacgtggcgggcggcccgccctcccccgaggtcggatccccactgctgtgtcgcccagccgcaggtccgttcccggggagccagacctcggacaccttgcctgaagtttcggccatacctatctccctggacgggctactcttccctcggccctgccagggacaggacccctccgacgaaaagacgcaggaccagcagtcgctgtcggacgtggagggcgcatattccagagctgaagctacaaggggtgctggaggcagcagttctagtcccccagaaaaggacagcggactgctggacagtgtcttggacactctgttggcgccctcaggtcccgggcagagccaacccagccctcccgcctgcgaggtcaccagctcttggtgcctgtttggccccgaacttcccgaagatccaccggctgcccccgccacccagcgggtgttgtccccgctcatgagccggtccgggtgcaaggttggagacagctccgggacggcagctgcccataaagtgctgccccggggcctgtcaccagcccggcagctgctgctcccggcctctgagagccctcactggtccggggccccagtgaagccgtctccgcaggccgctgcggtggaggttgaggaggaggatggctctgagtccgaggagtctgcgggtccgcttctgaagggcaaacctcgggctctgggtggcgcggcggctggaggaggagccgcggctgtcccgccgggggcggcagcaggaggcgtcgccctggtccccaaggaagattcccgcttctcagcgcccagggtcgccctggtggagcaggacgcgccgatggcgcccgggcgctccccgctggccaccacggtgatggatttcatccacgtgcctatcctgcctctcaatcacgccttattggcagcccgcactcggcagctgctggaagacgaaagttacgacggcggggccggggctgccagcgcctttgccccgccgcggagttcaccctgtgcctcgtccaccccggtcgctgtaggcgacttccccgactgcgcgtacccgcccgacgccgagcccaaggacgacgcgtaccctctctatagcgacttccagccgcccgctctaaagataaaggaggaggaggaaggcgcggaggcctccgcgcgctccccgcgttcctaccttgtggccggtgccaaccccgcagccttcccggatttcccgttggggccaccgcccccgctgccgccgcgagcgaccccatccagacccggggaagcggcggtgacggccgcacccgccagtgcctcagtctcgtctgcgtcctcctcggggtcgaccctggagtgcatcctgtacaaagcggagggcgcgccgccccagcagggcccgttcgcgccgccgccctgcaaggcgccgggcgcgagcggctgcctgctcccgcgggacggcctgccctccacctccgcctctgccgccgccgccggggcggcccccgcgctctaccctgcactcggcctcaacgggctcccgcagctcggctaccaggccgccgtgctcaaggagggcctgccgcaggtctacccgccctatctcaactacctgaggccggattcagaagccagccagagcccacaatacagcttcgagtcattacctcagaagatttgtttaatctgtggggatgaagcatcaggctgtcattatggtgtccttacctgtgggagctgtaaggtcttctttaagagggcaatggaagggcagcacaactacttatgtgctggaagaaatgactgcatcgttgataaaatccgcagaaaaaactgcccagcatgtcgccttagaaagtgctgtcaggctggcatggtccttggaggtcgaaaatttaaaaagttcaataaagtcagagttgtgagagcactggatgctgttgctctcccacagccagtgggcgttccaaatgaaagccaagccctaagccagagattcactttttcaccaggtcaagacatacagttgattccaccactgatcaacctgttaatgagcattgaaccagatgtgatctatgcaggacatgacaacacaaaacctgacacctccagttctttgctgacaagtcttaatcaactaggcgagaggcaacttctttcagtagtcaagtggtctaaatcattgccaggttttcgaaacttacatattgatgaccagataactctcattcagtattcttggatgagcttaatggtgtttggtctaggatggagatcctacaaacacgtcagtgggcagatgctgtattttgcacctgatctaatactaaatgaatcccacaggagtttgtcaagcttcaagttagccaagaagagttcctctgtatgaaagtattgttacttcttaatacaattcctttggaagggctacgaagtcaaacccagtttgaggagatgaggtcaagctacattagagagctcatcaaggcaattggtttgaggcaaaaaggagttgtgtcgagctcacagcgtttctatcaacttacaaaacttcttgataacttgcatgatcttgtcaaacaacttcatctgtactgcttgaatacatttatccagtcccgggcactgagtgttgaatttccagaaatgatgtctgaagttattgctgcacaattacccaagatattggcagggatggtgaaaccccttctctttcataaaaagtga

SEQ ID NO: 15487 - DNA, 2365 bp, Homo sapiens
  source 1..2365: mol_type = unassigned DNA
atgactgagctgaaggcaaagggtccccgggctccccacgtggcgggcggcccgccctcccccgaggtcggatccccactgctgtgtcgcccagccgcaggtccgttcccggggagccagacctcggacaccttgcctgaagtttcggccatacctatctccctggacgggctactcttccctcggccctgccagggacaggacccctccgacgaaaagacgcaggaccagcagtcgctgtcggacgtggagggcgcatattccagagctgaagctacaaggggtgctggaggcagcagttctagtcccccagaaaaggacagcggactgctggacagtgtcttggacactctgttggcgccctcaggtcccgggcagagccaacccagccctcccgcctgcgaggtcaccagctcttggtgcctgtttggccccgaacttcccgaagatccaccggctgcccccgccacccagcgggtgttgtccccgctcatgagccggtccgggtgcaaggttggagacagctccgggacggcagctgcccataaagtgctgccccggggcctgtcaccagcccggcagctgctgctcccggcctctgagagccctcactggtccggggccccagtgaagccgtctccgcaggccgctgcggtggaggttgaggaggaggatggctctgagtccgaggagtctgcgggtccgcttctgaagggcaaacctcgggctctgggtggcgcggcggctggaggaggagccgcggctgtcccgccgggggcggcagcaggaggcgtcgccctggtccccaaggaagattcccgcttctcagcgcccagggtcgccctggtggagcaggacgcgccgatggcgcccgggcgctccccgctggccaccacggtgatggatttcatccacgtgcctatcctgcctctcaatcacgccttattggcagcccgcactcggcagctgctggaagacgaaagttacgacggcggggccggggctgccagcgcctttgccccgccgcggagttcaccctgtgcctcgtccaccccggtcgctgtaggcgacttccccgactgcgcgtacccgcccgacgccgagcccaaggacgacgcgtaccctctctatagcgacttccagccgcccgctctaaagataaaggaggaggaggaaggcgcggaggcctccgcgcgctccccgcgttcctaccttgtggccggtgccaaccccgcagccttcccggatttcccgttggggccaccgcccccgctgccgccgcgagcgaccccatccagacccggggaagcggcggtgacggccgcacccgccagtgcctcagtctcgtctgcgtcctcctcggggtcgaccctggagtgcatcctgtacaaagcggagggcgcgccgccccagcagggcccgttcgcgccgccgccctgcaaggcgccgggcgcgagcggctgcctgctcccgcgggacggcctgccctccacctccgcctctgccgccgccgccggggcggcccccgcgctctaccctgcactcggcctcaacgggctcccgcagctcggctaccaggccgccgtgctcaaggagggcctgccgcaggtctacccgccctatctcaactacctgaggccggattcagaagccagccagagcccacaatacagcttcgagtcattacctcagaagatttgtttaatctgtggggatgaagcatcaggctgtcattatggtgtccttacctgtgggagctgtaaggtcttctttaagagggcaatggaagggcagcacaactacttatgtgctggaagaaatgactgcatcgttgataaaatccgcagaaaaaactgcccagcatgtcgccttagaaagtgctgtcaggctggcatggtccttggaggttttcgaaacttacatattgatgaccagataactctcattcagtattcttggatgagcttaatggtgtttggtctaggatggagatcctacaaacacgtcagtgggcagatgctgtattttgcacctgatctaatactaaatgattcctttggaagggctacgaagtcaaacccagtttgaggagatgaggtcaagctacattagagagctcatcaaggcaattggtttgaggcaaaaaggagttgtgtcgagctcacagcgtttctatcaacttacaaaacttcttgataacttgcatgatcttgtcaaacaacttcatctgtactgcttgaatacatttatccagtcccgggcactgagtgttgaatttccagaaatgatgtctgaagttattgctgcacaattacccaagatattggcagggatggtgaaaccccttctctttcataaaaagtga

SEQ ID NO: 15488 - DNA, 2496 bp, Homo sapiens
  source 1..2496: mol_type = unassigned DNA
atgactgagctgaaggcaaagggtccccgggctccccacgtggcgggcggcccgccctcccccgaggtcggatccccactgctgtgtcgcccagccgcaggtccgttcccggggagccagacctcggacaccttgcctgaagtttcggccatacctatctccctggacgggctactcttccctcggccctgccagggacaggacccctccgacgaaaagacgcaggaccagcagtcgctgtcggacgtggagggcgcatattccagagctgaagctacaaggggtgctggaggcagcagttctagtcccccagaaaaggacagcggactgctggacagtgtcttggacactctgttggcgccctcaggtcccgggcagagccaacccagccctcccgcctgcgaggtcaccagctcttggtgcctgtttggccccgaacttcccgaagatccaccggctgcccccgccacccagcgggtgttgtccccgctcatgagccggtccgggtgcaaggttggagacagctccgggacggcagctgcccataaagtgctgccccggggcctgtcaccagcccggcagctgctgctcccggcctctgagagccctcactggtccggggccccagtgaagccgtctccgcaggccgctgcggtggaggttgaggaggaggatggctctgagtccgaggagtctgcgggtccgcttctgaagggcaaacctcgggctctgggtggcgcggcggctggaggaggagccgcggctgtcccgccgggggcggcagcaggaggcgtcgccctggtccccaaggaagattcccgcttctcagcgcccagggtcgccctggtggagcaggacgcgccgatggcgcccgggcgctccccgctggccaccacggtgatggatttcatccacgtgcctatcctgcctctcaatcacgccttattggcagcccgcactcggcagctgctggaagacgaaagttacgacggcggggccggggctgccagcgcctttgccccgccgcggagttcaccctgtgcctcgtccaccccggtcgctgtaggcgacttccccgactgcgcgtacccgcccgacgccgagcccaaggacgacgcgtaccctctctatagcgacttccagccgcccgctctaaagataaaggaggaggaggaaggcgcggaggcctccgcgcgctccccgcgttcctaccttgtggccggtgccaaccccgcagccttcccggatttcccgttggggccaccgcccccgctgccgccgcgagcgaccccatccagacccggggaagcggcggtgacggccgcacccgccagtgcctcagtctcgtctgcgtcctcctcggggtcgaccctggagtgcatcctgtacaaagcggagggcgcgccgccccagcagggcccgttcgcgccgccgccctgcaaggcgccgggcgcgagcggctgcctgctcccgcgggacggcctgccctccacctccgcctctgccgccgccgccggggcggcccccgcgctctaccctgcactcggcctcaacgggctcccgcagctcggctaccaggccgccgtgctcaaggagggcctgccgcaggtctacccgccctatctcaactacctgaggccggattcagaagccagccagagcccacaatacagcttcgagtcattacctcagaagatttgtttaatctgtggggatgaagcatcaggctgtcattatggtgtccttacctgtgggagctgtaaggtcttctttaagagggcaatggaagggcagcacaactacttatgtgctggaagaaatgactgcatcgttgataaaatccgcagaaaaaactgcccagcatgtcgccttagaaagtgctgtcaggctggcatggtccttggaggttttcgaaacttacatattgatgaccagataactctcattcagtattcttggatgagcttaatggtgtttggtctaggatggagatcctacaaacacgtcagtgggcagatgctgtattttgcacctgatctaatactaaatgaacagcggatgaaagaatcatcattctattcattatgccttaccatgtggcagatcccacaggagtttgtcaagcttcaagttagccaagaagagttcctctgtatgaaagtattgttacttcttaatacaattcctttggaagggctacgaagtcaaacccagtttgaggagatgaggtcaagctacattagagagctcatcaaggcaattggtttgaggcaaaaaggagttgtgtcgagctcacagcgtttctatcaacttacaaaacttcttgataacttgcatgatcttgtcaaacaacttcatctgtactgcttgaatacatttatccagtcccgggcactgagtgttgaatttccagaaatgatgtctgaagttattgctgcacaattacccaagatattggcagggatggtgaaaccccttctctttcataaaaagtga

SEQ ID NO: 15489 - DNA, 620 bp, Homo sapiens
  source 1..620: mol_type = unassigned DNA
gtcagtgggcagatgctgtattttgcacctgatctaatactaaatgaacagcggatgaaagaatcatcattctattcattatgccttaccatgtggcagatcccacaggagtttgtcaagcttcaagttagccaagaagagttcctctgtatgaaagtattgttacttcttaatacaattcctttggaagggctacgaagtcaaacccagtttgaggagatgaggtcaagctacattagagagctcatcaaggcaattggtttgaggcaaaaaggagttgtgtcgagctcacagcgtttctatcaacttacaaaacttcttgataacttgcatgatgtaagtatttggttgattccagaatatcaatgattattctctgaatttctataactttttaaatgttacatgtaaattttactttgtatgattttctcagattaatacttgtatgttaaaagtgtttggatcatgctgctcagactttttattgtgtttttttttcattttcaatatagaccactcaaatattcttttacaagtatttgtataatgtgagggtaatttaatagctgatagaaattatggtacatttcctgaatatgttctaaaatatttgtgcc

SEQ ID NO: 15490 - DNA, 551 bp, Homo sapiens
  source 1..551: mol_type = unassigned DNA
cccagtggggcagaaagtgcgcggcgagttgggggctttatgaaatgcttctttcttagaagaaggacgtttaccaggagtgcttgtcttggagaggagccggattcagaagccagccagagcccacaatacagcttcgagtcattacctcagaagatttgtttaatctgtggggatgaagcatcaggctgtcattatggtgtccttacctgtgggagctgtaaggtcttctttaagagggcaatggaagggcagcacaactacttatgtgctggaagaaatgactgcatcgttgataaaatccgcagaaaaaactgcccagcatgtcgccttagaaagtgctgtcaggctggcatggtccttggaggtcgaaaatttaaaaagttcaataaagtcagagttgtgagagcactggatgctgttgctctcccacagccagtgggcgttccaaatgaaagccaagccctaagccagagattcactttttcaccaggtcaagacatacagttgattccaccactgatcaacctgttaatgagcattgaaccaga

SEQ ID NO: 15491 - DNA, 3038 bp, Homo sapiens
  source 1..3038: mol_type = unassigned DNA
agtccacagctgtcactaatcggggtaagccttgttgtatttgtgcgtgtgggtggcattctcaatgagaactagcttcacttgtcatttgagtgaaatctacaacccgaggcggctagtgctcccgcactactgggatctgagatcttcggagatgactgtcgcccgcagtacggagccagcagaagtccgacccttcctgggaatgggctgtaccgagaggtccgactagccccagggttttagtgagggggcagtggaactcagcgagggactgagagcttcacagcatgcacgagtttgatgccagagaaaaagtcgggagataaaggagccgcgtgtcactaaattgccgtcgcagccgcagccactcaagtgccggacttgtgagtactctgcgtctccagtcctcggacagaagttggagaactctcttggagaactccccgagttaggagacgagatctcctaacaattactactttttcttgcgctccccacttgccgctcgctgggacaaacgacagccacagttcccctgacgacaggatggaggccaagggcaggagctgaccagcgccgccctcccccgcccccgacccaggaggtggagatccctccggtccagccacattcaacacccactttctcctccctctgcccctatattcccgaaaccccctcctccttcccttttccctcctcctggagacgggggaggagaaaaggggagtccagtcgtcatgactgagctgaaggcaaagggtccccgggctccccacgtggcgggcggcccgccctcccccgaggtcggatccccactgctgtgtcgcccagccgcaggtccgttcccggggagccagacctcggacaccttgcctgaagtttcggccatacctatctccctggacgggctactcttccctcggccctgccagggacaggacccctccgacgaaaagacgcaggaccagcagtcgctgtcggacgtggagggcgcatattccagagctgaagctacaaggggtgctggaggcagcagttctagtcccccagaaaaggacagcggactgctggacagtgtcttggacactctgttggcgccctcaggtcccgggcagagccaacccagccctcccgcctgcgaggtcaccagctcttggtgcctgtttggccccgaacttcccgaagatccaccggctgcccccgccacccagcgggtgttgtccccgctcatgagccggtccgggtgcaaggttggagacagctccgggacggcagctgcccataaagtgctgccccggggcctgtcaccagcccggcagctgctgctcccggcctctgagagccctcactggtccggggccccagtgaagccgtctccgcaggccgctgcggtggaggttgaggaggaggatggctctgagtccgaggagtctgcgggtccgcttctgaagggcaaacctcgggctctgggtggcgcggcggctggaggaggagccgcggctgtcccgccgggggcggcagcaggaggcgtcgccctggtccccaaggaagattcccgcttctcagcgcccagggtcgccctggtggagcaggacgcgccgatggcgcccgggcgctccccgctggccaccacggtgatggatttcatccacgtgcctatcctgcctctcaatcacgccttattggcagcccgcactcggcagctgctggaagacgaaagttacgacggcggggccggggctgccagcgcctttgccccgccgcggagttcaccctgtgcctcgtccaccccggtcgctgtaggcgacttccccgactgcgcgtacccgcccgacgccgagcccaaggacgacgcgtaccctctctatagcgacttccagccgcccgctctaaagataaaggaggaggaggaaggcgcggaggcctccgcgcgctccccgcgttcctaccttgtggccggtgccaaccccgcagccttcccggatttcccgttggggccaccgcccccgctgccgccgcgagcgaccccatccagacccggggaagcggcggtgacggccgcacccgccagtgcctcagtctcgtctgcgtcctcctcggggtcgaccctggagtgcatcctgtacaaagcggagggcgcgccgccccagcagggcccgttcgcgccgccgccctgcaaggcgccgggcgcgagcggctgcctgctcccgcgggacggcctgccctccacctccgcctctgccgccgccgccggggcggcccccgcgctctaccctgcactcggcctcaacgggctcccgcagctcggctaccaggccgccgtgctcaaggagggcctgccgcaggtctacccgccctatctcaactacctgaggccggattcagaagccagccagagcccacaatacagcttcgagtcattacctcagaagatttgtttaatctgtggggatgaagcatcaggctgtcattatggtgtccttacctgtgggagctgtaaggtcttctttaagagggcaatggaaggtcgaaaatttaaaaagttcaataaagtcagagttgtgagagcactggatgctgttgctctcccacagccagtgggcgttccaaatgaaagccaagccctaagccagagattcactttttcaccaggtcaagacatacagttgattccaccactgatcaacctgttaatgagcattgaaccagatgtgatctatgcaggacatgacaacacaaaacctgacacctccagttctttgctgacaagtcttaatcaactaggcgagaggcaacttctttcagtagtcaagtggtctaaatcattgccaggttttcgaaacttacatattgatgaccagataactctcattcagtattcttggatgagcttaatggtgtttggtctaggatggagatcctacaaacacgtcagtgggcagatgctgtattttgcacctgatctaatactaaatgaatcccacaggagtttgtcaagcttcaagttagccaagaagagttcctctgtatga

SEQ ID NO: 15492 - DNA, 2816 bp, Homo sapiens
  source 1..2816: mol_type = unassigned DNA
agtccacagctgtcactaatcggggtaagccttgttgtatttgtgcgtgtgggtggcattctcaatgagaactagcttcacttgtcatttgagtgaaatctacaacccgaggcggctagtgctcccgcactactgggatctgagatcttcggagatgactgtcgcccgcagtacggagccagcagaagtccgacccttcctgggaatgggctgtaccgagaggtccgactagccccagggttttagtgagggggcagtggaactcagcgagggactgagagcttcacagcatgcacgagtttgatgccagagaaaaagtcgggagataaaggagccgcgtgtcactaaattgccgtcgcagccgcagccactcaagtgccggacttgtgagtactctgcgtctccagtcctcggacagaagttggagaactctcttggagaactccccgagttaggagacgagatctcctaacaattactactttttcttgcgctccccacttgccgctcgctgggacaaacgacagccacagttcccctgacgacaggatggaggccaagggcaggagctgaccagcgccgccctcccccgcccccgacccaggaggtggagatccctccggtccagccacattcaacacccactttctcctccctctgcccctatattcccgaaaccccctcctccttcccttttccctcctcctggagacgggggaggagaaaaggggagtccagtcgtcatgactgagctgaaggcaaagggtccccgggctccccacgtggcgggcggcccgccctcccccgaggtcggatccccactgctgtgtcgcccagccgcaggtccgttcccggggagccagacctcggacaccttgcctgaagtttcggccatacctatctccctggacgggctactcttccctcggccctgccagggacaggacccctccgacgaaaagacgcaggaccagcagtcgctgtcggacgtggagggcgcatattccagagctgaagctacaaggggtgctggaggcagcagttctagtcccccagaaaaggacagcggactgctggacagtgtcttggacactctgttggcgccctcaggtcccgggcagagccaacccagccctcccgcctgcgaggtcaccagctcttggtgcctgtttggccccgaacttcccgaagatccaccggctgcccccgccacccagcgggtgttgtccccgctcatgagccggtccgggtgcaaggttggagacagctccgggacggcagctgcccataaagtgctgccccggggcctgtcaccagcccggcagctgctgctcccggcctctgagagccctcactggtccggggccccagtgaagccgtctccgcaggccgctgcggtggaggttgaggaggaggatggctctgagtccgaggagtctgcgggtccgcttctgaagggcaaacctcgggctctgggtggcgcggcggctggaggaggagccgcggctgtcccgccgggggcggcagcaggaggcgtcgccctggtccccaaggaagattcccgcttctcagcgcccagggtcgccctggtggagcaggacgcgccgatggcgcccgggcgctccccgctggccaccacggtgatggatttcatccacgtgcctatcctgcctctcaatcacgccttattggcagcccgcactcggcagctgctggaagacgaaagttacgacggcggggccggggctgccagcgcctttgccccgccgcggagttcaccctgtgcctcgtccaccccggtcgctgtaggcgacttccccgactgcgcgtacccgcccgacgccgagcccaaggacgacgcgtaccctctctatagcgacttccagccgcccgctctaaagataaaggaggaggaggaaggcgcggaggcctccgcgcgctccccgcgttcctaccttgtggccggtgccaaccccgcagccttcccggatttcccgttggggccaccgcccccgctgccgccgcgagcgaccccatccagacccggggaagcggcggtgacggccgcacccgccagtgcctcagtctcgtctgcgtcctcctcggggtcgaccctggagtgcatcctgtacaaagcggagggcgcgccgccccagcagggcccgttcgcgccgccgccctgcaaggcgccgggcgcgagcggctgcctgctcccgcgggacggcctgccctccacctccgcctctgccgccgccgccggggcggcccccgcgctctaccctgcactcggcctcaacgggctcccgcagctcggctaccaggccgccgtgctcaaggagggcctgccgcaggtctacccgccctatctcaactacctgaggccggattcagaagccagccagagcccacaatacagcttcgagtcattacctcagaagatttgtttaatctgtggggatgaagcatcaggctgtcattatggtgtccttacctgtgggagctgtaaggtcttctttaagagggcaatggaagggcagcacaactacttatgtgctggaagaaatgactgcatcgttgataaaatccgcagaaaaaactgcccagcatgtcgccttagaaagtgctgtcaggctggcatggtccttggaggttttcgaaacttacatattgatgaccagataactctcattcagtattcttggatgagcttaatggtgtttggtctaggatggagatcctacaaacacgtcagtgggcagatgctgtattttgcacctgatctaatactaaatgaggaaagtattgttacttcttaa

SEQ ID NO: 15493 - DNA, 1699 bp, Homo sapiens
  source 1..1699: mol_type = unassigned DNA
aagctctgcgtcagatgaagaagagacaggaggccctccaagcaaaggaaccactcatgtcaagacatggggcaaaaagagaggatgtatttggagaacagagagtaaccgaaggctatcattcaatcagtgatagtcttcatggaggctgagacttcaaccacaggacctgggtggtgatcaccacaaaatttcttcctgaacgttcttctccaacaacttctcacattcagttattcattcaacaaacattgagcaacaacctaatcttctgggctctggagaccgagttaaaaaggagacagcaggcccctgcccccgcttcccgacaggtcaccacatcttgagtgctaagactgtcatcacagggtgaggaggggaaatgagctcagaggggcagaaccttctgaaagggcagaatggttcaagcatcccgccaaggtcagaaggcgctggatccagggcaaaaatgaagacataagggaccttaggtgacaaggaagaagctcccaggcagcatgtgggatggacccaaggagaacgtcagagagaaagagttcagtctggtgtctcctgaagcaggtggcagcatgctgacgaaggagggtggggtacgcaaggaactggttgcctctaggactcgcgacaagaccttacggagaaagaagtcagccaaggaaaaacgactggagtgtggaagagtctggaagagctggaccaggtccacatggtccggtcagttctcgaaaaatcgagaccctgtgtggtgagggtgagccatcttagcaggaaggttaaaattaagctcggcaggctcgacgtaaatgtgcagacaaagcaaagcaggaagcctcccacactaaaaagggaagataagaatcacagaagctgggatggtttttattgaagggcatttcaaagcaaatacagacatctacagcatatttgtaaatcctccgtatgtgtatggaaacacacaccttcacacatcaaaactggatttgttcctgagtaacaaaacgtcctaagaacaaaatgaaagaaaaccaaatagcagaaaaatacttccaatgtatataccacaaaggattatttatcaactcaacacaccaagagttaagaaaataatgcaacaggaacaaagggcaaaggatatgtactgggaagaccacagagaaagaaaatgcaaatggctaataatataaaatatttcctaggttcaatagtaatcagggaaagacaaaattacacttttgacctcttagactggcagtgacaaagattatttgagtgaccaagctttagtcaggctcctggatcttctaggcccatctgggcacttcctcgtaaaatacagttttaacaaaagccctgctaaattggtttaccgagaactcccaccctcaatcgagttccttagcccttcacctttcctcaggtgagggctgatcatcctgtcctgtcttcagcaagactgctctaacgctgacgtttccttttagtaattttccatccactgacacccacttgtaatttatagccaaggagcaagatacactgctccttggctataagttattttccctgttacattcagagttgagcccaatcccactccccgactacaaaatcgatagcagtggtccctatacctattgcaatggtcctaaataaaacctgccttaccgtgcttgaacaa

SEQ ID NO: 15494 - DNA, 1589 bp, Homo sapiens
  source 1..1589: mol_type = unassigned DNA
atggcggcggcggccgggcccggggctgcgctgtccccgcggccgtgcgacagcgacccagccacccccggagcgcagtccccgaaggatgataatgaagataattcaaatgatgggacccagccatccaaaaggaggcgaatgggctcaggagatagttctaggagttgtgaaacttcaagtcaagatcttggttttagttactatccagcagaaaacttgatagagtacaaatggccacctgatgaaacaggagaatactatatgcttcaagaacaagtcagtgaatatttgggtgtgacctcctttaaaaggaaatatccagagcgacgagatttgtctcacaaggagaaactctacctgagagagctaaatgtcattactgaaactcagtgcactctaggcttaacagcattgcgcagtgatgaagtgattgatttaatgataaaagaatatccagccaaacatgctgagtattctgttattctacaagaaaaagaacgtcaacgaattacagaccattataaagagtattcccaaatgcaacaacagaatactcagaaagttgaagccagtaaagtgcctgagtatattaagaaagctgccaaaaaagcagcagaatttaatagcaacttaaaccgggaacgcatggaagaaagaagagcttattttgacttgcagacacatgttatccaggtacctcaagggaagtacaaagttttgccaacagagcgaacaaaggtcagttcttacccagtggctctcatccccggacagttccaggaatattataagaggtactcaccagatgagctgcggtatctgccattaaacacagccctgtatgagccccctctggatcctgagctccctgctctagacagtgatggtgattcagatgatggcgaagatggtcgaggtgatgagaaacggaaaaataaaggcacttcggacagctcctctggcaatgtatctgaaggggaaagccctcctgacagccaggaggactctttccagggaagacagaaatcaaaagacaaagctgccactccaagaaaagatggtcccaaacgttctgtactgtccaagtcagttcctgggtacaagccaaaggtcattccaaatgctatatgtggaatttgtctgaagggtaaggagtccaacaagaaaggaaaggctgaatcacttatacactgctcccaatgtgagaatagtggccatccttcttgcctggatatgacaatggagcttgtttctatgattaagacctacccatggcagtgtatggaatgtaaaacatgcattatatgtggacaaccccaccatgaagaagaaatgatgttctgtgatatgtgtgacagaggttatcatactttttgtgtgggccttggtgctattccatcaggtcgctggatttgtgactgttgtcagcgggcccccccaacacccaggaaagtgggcagaagggggaaaaacagcaaagagggataaaatagtttttgactctaatactgtatatgcatttaagtggaatatttggtgccatttacaacattattttcatgccaataaaagattttttttgcaaa

SEQ ID NO: 15495 - DNA, 1719 bp, Homo sapiens
  source 1..1719: mol_type = unassigned DNA
gggggcggggccggggcggcggggggcccgcgcggcggcggcggcggcggcggcggcagcggcggcggcggccgggacaaggcggaggcgacggcggcggcggcggcgcggggcgctcgggctgatggcggcggcggccgggcccggggctgcgctgtccccgcggccgtgcgacagcgacccagccacccccggagcgcagtccccgaaggatgataatgaagataattcaaatgatgggacccagccatccaaaaggaggcgaatgggctcaggagatagttctaggagttgtgaaacttcaagtcaagatcttggttttagttactatccagcagaaaacttgatagagtacaaatggccacctgatgaaacaggagaatactatatgcttcaagaacaagtcagtgaatatttgggtgtgacctcctttaaaaggaaatatccagatttagagcgacgagatttgtctcacaaggagaaactctacctgagagagctaaatgtcattactgaaactcagtgcactctaggcttaacagcattgcgcagtgatgaagtgattgatttaatgataaaagaatatccagccaaacatgctgagtattctgttattctacaagaaaaagaacgtcaacgaattacagaccattataaagagtattcccaaatgcaacaacagaatactcagaaagttgaagccagtaaagtgcctgagtatattaagaaagctgccaaaaaagcagcagaatttaatagcaacttaaaccgggaacgcatggaagaaagaagagcttattttgacttgcagacacatgttatccaggtacctcaagggaagtacaaagttttgccaacagagcgaacaaaggtcagttcttacccagtggctctcatccccggacagttccaggaatattataagaggtactcaccagatgagctgcggtatctgccattaaacacagccctgtatgagccccctctggatcctgagctccctgctctagacagtgatggtgattcagatgatggcgaagatggtcgaggtgatgagaaacggaaaaataaaggcacttcggacagctcctctggcaatgtatctgaaggggaaagccctcctgacagccaggaggactctttccagggaagacagaaatcaaaagacaaagctgccactccaagaaaagatggtcccaaacgttctgtactgtccaagtcagttcctgggtacaagccaaaggtcattccaaatgctatatgtggaatttgtctgaagggtaaggagtccaacaagaaaggaaaggctgaatcacttatacactgctcccaatgtgagaatagtggccatccttcttgcctggatatgacaatggagcttgtttctatgattaagacctacccatggcagtgtatggaatgtaaaacatgcattatatgtggacaaccccaccatgaagaagaaatgatgttctgtgatatgtgtgacagaggttatcatactttttgtgtgggccttggtgctattccatcaggtcgctggatttgtgactgttgtcagcgggcccccccaacacccaggaaagtgggcagaagggggaaaaacagcaaagagggataaaatagtttttgactctaatactgtatatgcatttaagtggaatatttggtgccatttacaacattattttcatgccaataaaagattttttttgcaaa

SEQ ID NO: 15496 - DNA, 4285 bp, Homo sapiens
  source 1..4285: mol_type = unassigned DNA
cggcggcagcggcggcggcggccgggacaaggcggaggcgacggcggcggcggcggcgcggggcgctcgggctgatggcggcggcggccgggcccggggctgcgctgtccccgcggccgtgcgacagcgacccagccacccccggagcgcagtccccgaaggatgataatgaagataattcaaatgatgggacccagccatccaaaaggaggcgaatgggctcaggagatagttctaggagttgtgaaacttcaagtcaagatcttggttttagttactatccagcagaaaacttgatagagtacaaatggccacctgatgaaacaggagaatactatatgcttcaagaacaagtcagtgaatatttgggtgtgacctcctttaaaaggaaatatccagatttagagcgacgagatttgtctcacaaggagaaactctacctgagagagctaaatgtcattactgaaactcagtgcactctaggcttaacagcattgcgcagtgatgaagtgattgatttaatgataaaagaatatccagccaaacatgctgagtattctgttattctacaagaaaaagaacgtcaacgaattacagaccattataaagagtattcccaaatgcaacaacagaatactcagaaagttgaagccagtaaagtgcctgagtatattaagaaagctgccaaaaaagcagcagaatttaatagcaacttaaaccgggaacgcatggaagaaagaagagcttattttgacttgcagacacatgtactcaccagatgagctgcggtatctgccattaaacacagccctgtatgagccccctctggatcctgagctccctgctctagacagtgatggtgattcagatgatggcgaagatggtcgaggtgatgagaaacggaaaaataaaggcacttcggacagctcctctggcaatgtatctgaaggggaaagccctcctgacagccaggaggactctttccagggaagacagaaatcaaaagacaaagctgccactccaagaaaagatggtcccaaacgttctgtactgtccaagtcagttcctgggtacaaggtagaagaaaaaagcccctgactcagcttctttactgaccagcctctccctgaaatattttaacttgactttcacgattgtggagcttctgcctgctgtacctcactagctgttcttctatggtgtgccctttgtccgctgctttcttttttgctttatttccttggtggcttttctgtcacttttggctatggtttaccttctgttttctgtatatgtacaatttataagtctttttttttctttgaaagaataaccaggcaagtatgggtttttaaaacattatttcataggcagaagtttatattttctttccttggagtaaagatcataattatttggcattttaaatgccccagcatttagtgtagctaaagctgctgagctataaagtatgagtggatatactgttagactaagttgcattttttttagtgcctttcattaagaaagatctgggtttaatctaaggattatttgatccatatgctaaatttagctaactctgggatagaaaataataaaacctgttacttacattgtagtgatttttagcataaccttggtaaagagcctatatgattctatggcaagaattaaaacatacttgttaacttgttgatctgattatcctcagagtaaaggagtaggttgtcagcaactattattatattttgaacttttcctccctctgtctgcccctcccttttcttctgaagaaaaggtgaggtgagagatgagtagccttatttgcatatagggatttaagaatatcataaaaggaagaattagctgtacagtttcatatttgggatggtggtagtaaaatagactaccttttgattcttttggtctgaaatgtattagaacatgcttttattgcacttatgaaggtgtattgaaggaaaattttagagtaagctgatgagaaagttttgccaagtgaaattgttaaacaccttgtatgtcagaactgtgattgtggtaaataattcacaagaacaggctgaagtaagtcacctttccctcaaactaactagaacacgttctaacatgttcatttacctttcttcaagtaaaaaaagcgacattaagttagtgtatttcatattttattaggaaatgcttttatgtaattaacttaaaaattcttttttttttttgtagcctatagcaagcaaattttaagcttaattcagcaagggttggcttccaagggtggctgcaataggctgcagctatgtgatttttgtacttgtttttacatatatagcttatgtaatttctttatataaattaatgcttaataactgaaagcaagtgagctccaaagatgaaatttcagaagcagtatacatgaatgagtgtgttctactggtctgctaagagctttaaatggaagtggccgctcaaagcacagtgtcctgttaactcttgagtgctaagtagatctttgcaacagtaagcttgattgatcatgggttaaaaagagagaatattgaaatagatgttttaatacaggctggaaatcagctattcaacactatcattgatttagtatacaagaaatcatatggattaactgaacttaatagtactcaagtaggatatgcaaaatttatattttacataatctgtgaacatttttagtacctaaaaatgtttcaggtatttcaaagatgggaacaaccagtatctagtcatcatacattaatgtgaacatgcttattaaaagttaacctctttataaaaagtattaataaaccaagatgtgcctaaatattagggtacttcaagctaaaggtcatagtttatatataaaaagtacgagattcaaggaagtaatgtatctgatgctttgcttaataagattcactagtgcttgcccttaattcatagaacagtattgtttaggttacattaacctgaaatttaaagcataattattaggattccggcctataaatacaataattaaaatctatactatattattgctaccatgaaagtcttatctttggctgtttttcaagtagaaaagtaagtgtactgtgagccttttatttgagatgctgagagctattaggatgagtatttcagttttcttgtcaatagtgatactctgatgatgttgcagttatttgaagtagaactgattgtctaaaccagacacacataggagtgtgctccattggtcttgtggagagtgctgcacattaacccctccctcaactgtgcaatccacttgagactggcttctctaagccacagttgttatctgctgtgtaaagtcctggatgccagcactgtggcttcttagagagggcagatgctttgtatatcgagctgcagcattcatcgtagaaaatgctacaaagctgtctctcttccccttctctcatgtttccctcttttcatcaagatgaaggctgttgggtaagaaaaactaagtgatttaacaaatcattatgatttaaacttagaaataaacctagaattttttggtgtcccttttatcataggtgtttaatgtatattttaatgattgtagaacttgaattgctctagaatgtgaatgactacccttgtgttttactccttttggcttttgttttgtaaagaatctcctgtgaggagttctgtttttagaatttaatattgtttggttacttccctgactttagtgaaagatattagagtatttactatgccagtatctaacttaaactattagtattaaataagtatatcttttacatttagtacaggtaccataaccaagagatttcttagttttgatggattaagagagagcattctgctgtatattatggcaggtacagatatgatcataactgaaccagaatttggattatagaagtgcacttcctagctgttttttatttaggtataggaacacacaatgagaaccttatgtttagaatgtagcagtaacaacagagggtaactacactgcaagacttaaatggtttgagcatgtgacactatccttttgttggggggagcagggtataaaaatatacatacaggagattagtttaatagtaaagttttatatgtatgtttaacttccatgatatttattattttgtagagacatttgtgattgtttagagttcttgtttttattctatttatgtataaggttgactttttttaaataaataagccaaaaattctttttgaa

SEQ ID NO: 15497 - DNA, 676 bp, Homo sapiens
  source 1..676: mol_type = unassigned DNA
tgattattctttgggtggatgaaatactggctatgcattttaagcccaagagaaagaagtcagagctgataccatcatcaccttgctttgccctcataggtcctttaaactaaaaatgccttcgttcttagcaattgtgattctacgttcttcccagtgtataaaagatgttattttcacatacctttttgacttggtagaccagataattatttctattccttgtacctgttttgtaattttctttgatacacaggaagtcaagtcataggaggcaaataatttaaatacttaaaatagttttcaaaatatcctcaataaaagtgattaaaaattaatgaaagctacatttaatgcataatatgtatttctgtacttagttttagttactatccagcagaaaacttgatagagtacaaatggccacctgatgaaacaggagaatactatatgcttcaagaacaagtcagtgaatatttgggtgtgacctcctttaaaaggaaatatccagatttagagcgacgagatttgtctcacaaggagaaactctacctgagagagctaaatgtcattactgaaactcagtgcactctaggtaagaatagctttttaatgtgaatttttcaagctgaacatttatgagataatactagataagtatcttatttcctaaaat

SEQ ID NO: 15498 - DNA, 4395 bp, Homo sapiens
  source 1..4395: mol_type = unassigned DNA
cggcggcagcggcggcggcggccgggacaaggcggaggcgacggcggcggcggcggcgcggggcgctcgggctgatggcggcggcggccgggcccggggctgcgctgtccccgcggccgtgcgacagcgacccagccacccccggagcgcagtccccgaaggatgataatgaagataattcaaatgatgggacccagccatccaaaaggaggcgaatgggctcaggagatagttctaggagttgtgaaacttcaagtcaagatcttggttttagttactatccagcagaaaacttgatagagtacaaatggccacctgatgaaacaggagaatactatatgcttcaagaacaagtcagtgaatatttgggtgtgacctcctttaaaaggaaatatccagatttagagcgacgagatttgtctcacaaggagaaactctacctgagagagctaaatgtcattactgaaactcagtgcactctaggcttaacagcattgcgcagtgatgaagtgattgatttaatgataaaagaatatccagccaaacatgctgagtattctgttattctacaagaaaaagaacgtcaacgaattacagaccattataaagagtattcccaaatgcaacaacagaatactcagaaagttgaagccagtaaagtgcctgagtatattaagaaagctgccaaaaaagcagcagaatttaatagcaacttaaaccgggaacgcatggaagaaagaagagcttattttgacttgcagacacatgttatccaggtacctcaagggaagtacaaagttttgccaacagagcgaacaaaggtcagttcttacccagtggctctcatccccggacagttccaggaatattataagaggtactcaccagatgagctgcggtatctgccattaaacacagccctgtatgagccccctctggatcctgagctccctgctctagacagtgatggtgattcagatgatggcgaagatggtcgaggtgatgagaaacggaaaaataaaggcacttcggacagctcctctggcaatgtatctgaaggggaaagccctcctgacagccaggaggactctttccagggaagacagaaatcaaaagacaaagctgccactccaagaaaagatggtcccaaacgttctgtactgtccaagtcagttcctgggtacaaggtagaagaaaaaagcccctgactcagcttctttactgaccagcctctccctgaaatattttaacttgactttcacgattgtggagcttctgcctgctgtacctcactagctgttcttctatggtgtgccctttgtccgctgctttcttttttgctttatttccttggtggcttttctgtcacttttggctatggtttaccttctgttttctgtatatgtacaatttataagtctttttttttctttgaaagaataaccaggcaagtatgggtttttaaaacattatttcataggcagaagtttatattttctttccttggagtaaagatcataattatttggcattttaaatgccccagcatttagtgtagctaaagctgctgagctataaagtatgagtggatatactgttagactaagttgcattttttttagtgcctttcattaagaaagatctgggtttaatctaaggattatttgatccatatgctaaatttagctaactctgggatagaaaataataaaacctgttacttacattgtagtgatttttagcataaccttggtaaagagcctatatgattctatggcaagaattaaaacatacttgttaacttgttgatctgattatcctcagagtaaaggagtaggttgtcagcaactattattatattttgaacttttcctccctctgtctgcccctcccttttcttctgaagaaaaggtgaggtgagagatgagtagccttatttgcatatagggatttaagaatatcataaaaggaagaattagctgtacagtttcatatttgggatggtggtagtaaaatagactaccttttgattcttttggtctgaaatgtattagaacatgcttttattgcacttatgaaggtgtattgaaggaaaattttagagtaagctgatgagaaagttttgccaagtgaaattgttaaacaccttgtatgtcagaactgtgattgtggtaaataattcacaagaacaggctgaagtaagtcacctttccctcaaactaactagaacacgttctaacatgttcatttacctttcttcaagtaaaaaaagcgacattaagttagtgtatttcatattttattaggaaatgcttttatgtaattaacttaaaaattcttttttttttttgtagcctatagcaagcaaattttaagcttaattcagcaagggttggcttccaagggtggctgcaataggctgcagctatgtgatttttgtacttgtttttacatatatagcttatgtaatttctttatataaattaatgcttaataactgaaagcaagtgagctccaaagatgaaatttcagaagcagtatacatgaatgagtgtgttctactggtctgctaagagctttaaatggaagtggccgctcaaagcacagtgtcctgttaactcttgagtgctaagtagatctttgcaacagtaagcttgattgatcatgggttaaaaagagagaatattgaaatagatgttttaatacaggctggaaatcagctattcaacactatcattgatttagtatacaagaaatcatatggattaactgaacttaatagtactcaagtaggatatgcaaaatttatattttacataatctgtgaacatttttagtacctaaaaatgtttcaggtatttcaaagatgggaacaaccagtatctagtcatcatacattaatgtgaacatgcttattaaaagttaacctctttataaaaagtattaataaaccaagatgtgcctaaatattagggtacttcaagctaaaggtcatagtttatatataaaaagtacgagattcaaggaagtaatgtatctgatgctttgcttaataagattcactagtgcttgcccttaattcatagaacagtattgtttaggttacattaacctgaaatttaaagcataattattaggattccggcctataaatacaataattaaaatctatactatattattgctaccatgaaagtcttatctttggctgtttttcaagtagaaaagtaagtgtactgtgagccttttatttgagatgctgagagctattaggatgagtatttcagttttcttgtcaatagtgatactctgatgatgttgcagttatttgaagtagaactgattgtctaaaccagacacacataggagtgtgctccattggtcttgtggagagtgctgcacattaacccctccctcaactgtgcaatccacttgagactggcttctctaagccacagttgttatctgctgtgtaaagtcctggatgccagcactgtggcttcttagagagggcagatgctttgtatatcgagctgcagcattcatcgtagaaaatgctacaaagctgtctctcttccccttctctcatgtttccctcttttcatcaagatgaaggctgttgggtaagaaaaactaagtgatttaacaaatcattatgatttaaacttagaaataaacctagaattttttggtgtcccttttatcataggtgtttaatgtatattttaatgattgtagaacttgaattgctctagaatgtgaatgactacccttgtgttttactccttttggcttttgttttgtaaagaatctcctgtgaggagttctgtttttagaatttaatattgtttggttacttccctgactttagtgaaagatattagagtatttactatgccagtatctaacttaaactattagtattaaataagtatatcttttacatttagtacaggtaccataaccaagagatttcttagttttgatggattaagagagagcattctgctgtatattatggcaggtacagatatgatcataactgaaccagaatttggattatagaagtgcacttcctagctgttttttatttaggtataggaacacacaatgagaaccttatgtttagaatgtagcagtaacaacagagggtaactacactgcaagacttaaatggtttgagcatgtgacactatccttttgttggggggagcagggtataaaaatatacatacaggagattagtttaatagtaaagttttatatgtatgtttaacttccatgatatttattattttgtagagacatttgtgattgtttagagttcttgtttttattctatttatgtataaggttgactttttttaaataaataagccaaaaattctttttgaa

SEQ ID NO: 15499 - DNA, 1651 bp, Homo sapiens
  source 1..1651: mol_type = unassigned DNA
cagacaagaagtgcggcggaagcttacacctgcacgtggtgggacagaggcaagaacggatggtctggctgaggctgagagaaccaagctggattaggatcggcttgagggcccggcgtcgtcagtggtgacctctctgacctgaggatgataatgaagataattcaaatgatgggacccagccatccaaaaggaggcgaatgggctcaggagatagttctaggagttgtgaaacttcaagtcaagatcttggttttagttactatccagcagaaaacttgatagagtacaaatggccacctgatgaaacaggagaatactatatgcttcaagaacaagtcagtgaatatttgggtgtgacctcctttaaaaggaaatatccagatttagagcgacgagatttgtctcacaaggagaaactctacctgagagagctaaatgtcattactgaaactcagtgcactctaggcttaacagcattgcgcagtgatgaagtgattgatttaatgataaaagaatatccagccaaacatgctgagtattctgttattctacaagaaaaagaacgtcaacgaattacagaccattataaagagtattcccaaatgcaacaacagaatactcagaaagttgaagccagtaaagtgcctgagtatattaagaaagctgccaaaaaagcagcagaatttaatagcaacttaaaccgggaacgcatggaagaaagaagagcttattttgacttgcagacacatgttatccaggtacctcaagggaagtacaaagttttgccaacagagcgaacaaaggtcagttcttacccagtggctctcatccccggacagttccaggaatattataagaggtactcaccagatgagctgcggtatctgccattaaacacagccctgtatgagccccctctggatcctgagctccctgctctagacagtgatggtgattcagatgatggcgaagatggtcgaggtgatgagaaacggaaaaataaaggcacttcggacagctcctctggcaatgtatctgaaggggaaagccctcctgacagccaggaggactctttccagggaagacagaaatcaaaagacaaagctgccactccaagaaaagatggtcccaaacgttctgtactgtccaagtcagttcctgggtacaagccaaaggtcattccaaatgctatatgtggaatttgtctgaagggtaaggagtccaacaagaaaggaaaggctgaatcacttatacactgctcccaatgtgagaatagtggccatccttcttgcctggatatgacaatggagcttgtttctatgattaagacctacccatggcagtgtatggaatgtaaaacatgcattatatgtggacaaccccaccatgaagaagaaatgatgttctgtgatatgtgtgacagaggttatcatactttttgtgtgggccttggtgctattccatcaggtcgctggatttgtgactgttgtcagcgggcccccccaacacccaggaaagtgggcagaagggggaaaaacagcaaagagggataaaatagtttttgactctaatactgtatatgcatttaagtggaatatttggtgccatttacaacattattttcatgccaataaaagattttttttgc

SEQ ID NO: 15500 - DNA, 3586 bp, Homo sapiens
  source 1..3586: mol_type = unassigned DNA
atttatgagctttgctcgacacggactcgccgtgtttacttggctctttgttcctcccccctcccccggcacacactcacactcacactcactcgcacacgcaccccggcctgcaaacttgcacggctcggggcgcgccgccgggtggcctcggcccccgccccgccccgcgagctgccccgatgaggcggcagccacagaacggcgacctcaagaagcagctccacgaaaggcagccgcggatcgccgcgctcagcgacaaacaaatcgcgggcagaacctctcatctgtgcacaagggacccagcacggggctttgggaacgatcactgcagtgcctgtcacgggtcctcaggtcagctccttgcagaggttggccgggcaaggagcggcagtgctacctcaggttaggccaaagactctgattccagacagcctccccgttgccccgggccgggaccggccacccaagcagcccccaacattccagaaggccaccgtggtcagcgtcaagaaccccagcccagccctccccaccgccaacaacactgtcagccatgtgccagcgcccggcagccagccccaggccctcgccgagcccgccgccctcgcctctccgctgagcagtgcgggggtggcctacgccatcatctccacctcccccagcaatgccgccgccatggcccccagcaccgccgtgtctgtggtcagtgacagcatcaaagtccagcccctcctcatcagtgctgacaacaaggtcatcatcattcagcctcaagtgcagacgcagcccgagagcacggcagagtcgcggccgcccacagaggagccatctcagggagctcaggccaccaaaaagaagaaggaagaccggcccccgacccaggagaaccccgagaaaatcgccttcatggtagcgctaggcctggttaccacggaacatttggaagaaatccagagcaagcgacaggagcggaagagaagaagcacagccaaccctgcctacagcggcctcctggagaccgagaggaaacggctggcctccaactatctcaacaaccccctgttcctcacagcgagagccaatgaggacccctgctggaagaacgagatcacccacgatgagcactgtgccgcctgcaagcgaggggccaacctgcagccctgcggcacctgcccgggggcctaccacctcagctgcctggagccgcccctcaagacggcgcccaagggcgtgtgggtgtgccccaggtgccagcagaaggccttaaagaaagacgagggtgtgccctggactgggatgctggccatcgtgcactcttatgtcacccacaagacagtcaaagaagaggagaagcagaagctgctgcaacgaggcagtgagctgcagaacgagcaccagcagctggaggagcgggaccggcggctggcgtcagcagtgcagaaatgcctggagttgaagacaagcctgctggcccgccagaggggcacccagtcatccctggaccgcctgcgggccctcctgagactgatacagggcgagcagctgctccaggtcaccatgacgaccactagccctgccccactgctggccgggccctggaccaagccctcagtggcagccacacaccccaccgtccagcacccccagggccacaactgaccccgagggaccagtcttcatacccacggaaagttattgggaccctgcttacacagcctgggggttctgtcggccttaattcataaacactatgaatttcagacaaaaattaaccagacagaggagaggagggaggaagagctgggcgagaggcctagagccaggaccaggtgggggtgcggccctgtgccctccaaattcacagggggtacctaggagccaggtggggtacgacaggctggggcacacagtctccccccggccacctcggggctgcctgggcctctggcttccaggccctgctctccacggcctccctctggcccgttggaggggcaggctgaggctgtggaggggacaagcacgccccccagaacgcagtctccactgagggcaccgcctattggtgtcctgtgggagggcgagctgagaacacatggactagctgagtggtagcggtagttgggacgagaagcggggtagtggatctaggtagttcctcaatgccccacgctcctaggaggtccccctggggtgggcgggcgggcctggggcactccgtcgcctttgcagaaccacctgggcccctttctgtcagtattattagggttacgaattgcagctgtttaacttgaaagacactgtcggaggtgagcatctgggcgccgggacgctgcagtgatccccgccagagcctgtgcccttcctgctccgtctttggggtcctcaaggctgcctccttccttttgccaatctcttggactcagtttgccgttgatgcgtttttctcatggagtttctgggcagagtggagctgcaaccctgttgtggggggcagcatttggcaggttttctccttggggttgaatcattcaacttaacgactgaagccctttcttgtctcctttggaagagccgataagtattccactcctcccttcttgccagtgcagacactatgccaaaaaataacttcacacttttgtatggcgtttttattgtgagatatttaatgtgaatggttggggggactctggctgacttcctttctgcttctagtagtctctgcttcaaggtacaaatgggaacacctcccctcgggaagcctggccaagctggaagatccggcaggttttttacgagccgggtggagggttggggaggaaagaaagggcggtggctcgggaggttccggccttcggggaccagacttgctgccaagggcttctgcatccagggtgggcagtggcagcttgtcacccttgcccgattcccacatcccagtcctgagggactcagcacaacaggataagcgtccaggagccacgggctcccaccccgagcatatcacatggtgccgaattgcactgaacacgcgtgtgtgcatcgcacgcggccacgaccacagacacgcatgcacacacgcagaggtgcagagcgaggaggccggcaaatcccgcagctgccacggtccctcctgtcattctcacgactccgggagaaactgtgctgtatgatacagatctattttaatacacttaccactgggtgaacaagatttttatattcttttattgatgaacaaagtgaaccgtgtgaggcacacgtcttctatattggctactctgtgccaagtatgcattaccgcgtggcttgcgatgtccatgtcttcagcttccttttctgttggtttggttttcttcgcggatggattgagttacatgttttaacagtgtaatgggaggatctgaaaggttggacccgggaggggtagctgccgatgtgtcttgagattgttaggttttttttggaccaaggaggaccgtccagtgggtagtgaggatagagaaaaagtgtttgtcttaaatacgccaatgtagttttccttctttacaatgtattaaactcgatcgatgatttcaaa

SEQ ID NO: 15501 - DNA, 3671 bp, Homo sapiens
  source 1..3671: mol_type = unassigned DNA
tccctttcggccgtgggggagggggctcgtgtcccccccaacccagcccggaggccgcgtccgcccgcgcccgctctggcccccgcggagccgcgcaacttcccgggagcccgggccaaagtgagcgcaaagtgctgcccaagttgccgggatggagctgcagagccggcccgaggcgctcgccgtggaactcgcgcgccaccagaacggcgacctcaagaagcagctccacgaaaggcagccgcggatcgccgcgctcagcgacaaacaagctttgggaacgatcactgcagtgcctgtcacgggtcctcaggtcagctccttgcagaggttggccgggcaaggagcggcagtgctacctcaggttaggccaaagactctgattccagacagcctccccgttgccccgggccgggaccggccacccaagcagcccccaacattccagaaggccaccgtggtcagcgtcaagaaccccagcccagccctccccaccgccaacaacactgtcagccatgtgccagcgcccggcagccagccccaggccctcgccgagcccgccgccctcgcctctccgctgagcagtgcgggggtggcctacgccatcatctccacctcccccagcaatgccgccgccatggcccccagcaccgccgtgtctgtggtcagtgacagcatcaaagtccagcccctcctcatcagtgctgacaacaagcctcctccacgcctcctctcttcccctcaccccgcaacccatcactgtcccctccacccctcctctcttcccctcacccctccctccccatcactgtccccttcacccctccatggcatcttccaggtcatcatcattcagcctcaagtgcagacgcagcccgagagcacggcagagtcgcggccgcccacagaggagccatctcagggagctcaggccaccaaaaagaagaaggaagaccggcccccgacccaggagaaccccgagaaaatcgccttcatggtagcgctaggcctggttaccacggaacatttggaagaaatccagagcaagcgacaggagcggaagagaagaagcacagccaaccctgcctacagcggcctcctggagaccgagaggaaacggctggcctccaactatctcaacaaccccctgttcctcacagcgagagccaatgaggacccctgctggaagaacgagatcacccacgatgagcactgtgccgcctgcaagcgaggggccaacctgcagccctgcggcacctgcccgggggcctaccacctcagctgcctggagccgcccctcaagacggcgcccaagggcgtgtgggtgtgccccaggtgccagcagaaggccttaaagaaagacgagggtgtgccctggactgggatgctggccatcgtgcactcttatgtcacccacaagacagtcaaagaagaggagaagcagaagctgctgcaacgaggcagtgagctgcagaacgagcaccagcagctggaggagcgggaccggcggctggcgtcagcagtgcagaaatgcctggagttgaagacaagcctgctggcccgccagaggggcacccagtcatccctggaccgcctgcgggccctcctgagactgatacagggcgagcagctgctccaggtcaccatgacgaccactagccctgccccactgctggccgggccctggaccaagccctcagtggcagccacacaccccaccgtccagcacccccagggccacaactgaccccgagggaccagtcttcatacccacggaaagttattgggaccctgcttacacagcctgggggttctgtcggccttaattcataaacactatgaatttcagacaaaaattaaccagacagaggagaggagggaggaagagctgggcgagaggcctagagccaggaccaggtgggggtgcggccctgtgccctccaaattcacagggggtacctaggagccaggtggggtacgacaggctggggcacacagtctccccccggccacctcggggctgcctgggcctctggcttccaggccctgctctccacggcctccctctggcccgttggaggggcaggctgaggctgtggaggggacaagcacgccccccagaacgcagtctccactgagggcaccgcctattggtgtcctgtgggagggcgagctgagaacacatggactagctgagtggtagcggtagttgggacgagaagcggggtagtggatctaggtagttcctcaatgccccacgctcctaggaggtccccctggggtgggcgggcgggcctggggcactccgtcgcctttgcagaaccacctgggcccctttctgtcagtattattagggttacgaattgcagctgtttaacttgaaagacactgtcggaggtgagcatctgggcgccgggacgctgcagtgatccccgccagagcctgtgcccttcctgctccgtctttggggtcctcaaggctgcctccttccttttgccaatctcttggactcagtttgccgttgatgcgtttttctcatggagtttctgggcagagtggagctgcaaccctgttgtggggggcagcatttggcaggttttctccttggggttgaatcattcaacttaacgactgaagccctttcttgtctcctttggaagagccgataagtattccactcctcccttcttgccagtgcagacactatgccaaaaaataacttcacacttttgtatggcgtttttattgtgagatatttaatgtgaatggttggggggactctggctgacttcctttctgcttctagtagtctctgcttcaaggtacaaatgggaacacctcccctcgggaagcctggccaagctggaagatccggcaggttttttacgagccgggtggagggttggggaggaaagaaagggcggtggctcgggaggttccggccttcggggaccagacttgctgccaagggcttctgcatccagggtgggcagtggcagcttgtcacccttgcccgattcccacatcccagtcctgagggactcagcacaacaggataagcgtccaggagccacgggctcccaccccgagcatatcacatggtgccgaattgcactgaacacgcgtgtgtgcatcgcacgcggccacgaccacagacacgcatgcacacacgcagaggtgcagagcgaggaggccggcaaatcccgcagctgccacggtccctcctgtcattctcacgactccgggagaaactgtgctgtatgatacagatctattttaatacacttaccactgggtgaacaagatttttatattcttttattgatgaacaaagtgaaccgtgtgaggcacacgtcttctatattggctactctgtgccaagtatgcattaccgcgtggcttgcgatgtccatgtcttcagcttccttttctgttggtttggttttcttcgcggatggattgagttacatgttttaacagtgtaatgggaggatctgaaaggttggacccgggaggggtagctgccgatgtgtcttgagattgttaggttttttttggaccaaggaggaccgtccagtgggtagtgaggatagagaaaaagtgtttgtcttaaatacgccaatgtagttttccttctttacaatgtattaaactcgatcgatgatttcaaa

SEQ ID NO: 15502 - DNA, 3491 bp, Homo sapiens
  source 1..3491: mol_type = unassigned DNA
aggccgcgtccgcccgcgcccgctctggcccccgcggagccgcgcaacttcccgggagcccgggccaaagtgagcgcaaagtgctgcccaagttgccgggatggagctgcagagccggcccgaggcgctcgccgtggaactcgcgcgccaccagaacggcgacctcaagaagcagctccacgaaaggcagccgcggatcgccgcgctcagcgacaaacaagctttgggaacgatcactgcagtgcctgtcacgggtcctcaggtcagctccttgcagaggttggccgggcaaggagcggcagtgctacctcaggttaggccaaagactctgattccagacagcctccccgttgccccgggccgggaccggccacccaagcagcccccaacattccagaaggccaccgtggtcagcgtcaagaaccccagcccagccctccccaccgccaacaacactgtcagccatgtgccagcgcccggcagccagccccaggccctcgccgagcccgccgccctcgcctctccgctgagcagtgcgggggtggcctacgccatcatctccacctcccccagcaatgccgccgccatggcccccagcaccgccgtgtctgtggtcagtgacagcatcaaagtccagcccctcctcatcagtgctgacaacaaggtcatcatcattcagcctcaagtgcagacgcagcccgagagcacggcagagtcgcggccgcccacagaggagccatctcagggagctcaggccaccaaaaagaagaaggaagaccggcccccgacccaggagaaccccgagaaaatcgccttcatggtagcgctaggcctggttaccacggaacatttggaagaaatccagagcaagcgacaggagcggaagagaagaagcacagccaaccctgcctacagcggcctcctggagaccgagaggaaacggctggcctccaactatctcaacaaccccctgttcctcacagcgagagccaatgaggacccctgctggaagaacgagatcacccacgatgagcactgtgccgcctgcaagcgaggggccaacctgcagccctgcggcacctgcccgggggcctaccacctcagctgcctggagccgcccctcaagacggcgcccaagggcgtgtgggtgtgccccaggtgccagcagaaggccttaaagaaagacgagggtgtgccctggactgggatgctggccatcgtgcactcttatgtcacccacaagacagtcaaagaagaggagaagcagaagctgctgcaacgaggcagtgagctgcagaacgagcaccagcagctggaggagcgggaccggcggctggcgtcagcagtgcagaaatgcctggagttgaagacaagcctgctggcccgccagaggggcacccagtcatccctggaccgcctgcgggccctcctgagactgatacagggcgagcagctgctccaggtcaccatgacgaccactagccctgccccactgctggccgggccctggaccaagccctcagtggcagccacacaccccaccgtccagcacccccagggccacaactgaccccgagggaccagtcttcatacccacggaaagttattgggaccctgcttacacagcctgggggttctgtcggccttaattcataaacactatgaatttcagacaaaaattaaccagacagaggagaggagggaggaagagctgggcgagaggcctagagccaggaccaggtgggggtgcggccctgtgccctccaaattcacagggggtacctaggagccaggtggggtacgacaggctggggcacacagtctccccccggccacctcggggctgcctgggcctctggcttccaggccctgctctccacggcctccctctggcccgttggaggggcaggctgaggctgtggaggggacaagcacgccccccagaacgcagtctccactgagggcaccgcctattggtgtcctgtgggagggcgagctgagaacacatggactagctgagtggtagcggtagttgggacgagaagcggggtagtggatctaggtagttcctcaatgccccacgctcctaggaggtccccctggggtgggcgggcgggcctggggcactccgtcgcctttgcagaaccacctgggcccctttctgtcagtattattagggttacgaattgcagctgtttaacttgaaagacactgtcggaggtgagcatctgggcgccgggacgctgcagtgatccccgccagagcctgtgcccttcctgctccgtctttggggtcctcaaggctgcctccttccttttgccaatctcttggactcagtttgccgttgatgcgtttttctcatggagtttctgggcagagtggagctgcaaccctgttgtggggggcagcatttggcaggttttctccttggggttgaatcattcaacttaacgactgaagccctttcttgtctcctttggaagagccgataagtattccactcctcccttcttgccagtgcagacactatgccaaaaaataacttcacacttttgtatggcgtttttattgtgagatatttaatgtgaatggttggggggactctggctgacttcctttctgcttctagtagtctctgcttcaaggtacaaatgggaacacctcccctcgggaagcctggccaagctggaagatccggcaggttttttacgagccgggtggagggttggggaggaaagaaagggcggtggctcgggaggttccggccttcggggaccagacttgctgccaagggcttctgcatccagggtgggcagtggcagcttgtcacccttgcccgattcccacatcccagtcctgagggactcagcacaacaggataagcgtccaggagccacgggctcccaccccgagcatatcacatggtgccgaattgcactgaacacgcgtgtgtgcatcgcacgcggccacgaccacagacacgcatgcacacacgcagaggtgcagagcgaggaggccggcaaatcccgcagctgccacggtccctcctgtcattctcacgactccgggagaaactgtgctgtatgatacagatctattttaatacacttaccactgggtgaacaagatttttatattcttttattgatgaacaaagtgaaccgtgtgaggcacacgtcttctatattggctactctgtgccaagtatgcattaccgcgtggcttgcgatgtccatgtcttcagcttccttttctgttggtttggttttcttcgcggatggattgagttacatgttttaacagtgtaatgggaggatctgaaaggttggacccgggaggggtagctgccgatgtgtcttgagattgttaggttttttttggaccaaggaggaccgtccagtgggtagtgaggatagagaaaaagtgtttgtcttaaatacgccaatgtagttttccttctttacaatgtattaaactcgatcgatgatttc

SEQ ID NO: 15503 - DNA, 557 bp, Homo sapiens
  source 1..557: mol_type = unassigned DNA
gaattagcatcgtgccgaggcacaactttgccgaggcccaacgagatccaggccctcgccgagcccgccgccctcgcctctccgctgagcagtgcgggggtggcctacgccatcatctccacctcccccagcaatgccgccgccatggcccccagcaccgccgtgtctgtggtcagtgacagcatcaaagtccagcccctcctcatcagtgctgacaacaaggtcatcatcattcagcctcaagtgcagacgcagcccgagagcacggcagagtcgcggccgcccacagaggagccatctcagggagctcaggccaccaaaaagaagaaggaagaccggcccccgacccaggagaaccccgagaaaatcgccttcatggtagcgctaggcctggttaccacggaacatttggaagaaatccagagcaagcgacaggagcggaagagaagaagcacagccaaccctgcctacagcggcctcctggagaccgagaggaaacggctggcctccaactatctcaacaaccccctgttcctcacagcgagagccaatgagga

SEQ ID NO: 15504 - DNA, 750 bp, Homo sapiens
  source 1..750: mol_type = unassigned DNA
agctttgctcgacacggactcgccgtgtttacttggctctttgttcctcccccctcccccggcacacactcacactcacactcactcgcacacgcaccccggcctgcaaacttgcacggctcggggcgcgccgccgggtggcctcggcccccgccccgccccgcgagctgccccgatgaggcggcagccacagaacggcgacctcaagaagcagctccacgaaaggcagccgcggatcgccgcgctcagcgacaaacaagctttgggaacgatcactgcagtgcctgtcacgggtcctcaggtcagctccttgcagaggttggccgggcaaggagcggcagtgctacctcaggttaggccaaagactctgattccagacagcctccccgttgccccgggccgggaccggccacccaagcagcccccaacattccagaaggccaccgtggtcagcgtcaagaaccccagcccagccctccccaccgccaacaacactgtcagccatgtgccagcgcccggcagccagccccaggccctcgccgagcccgccgccctcgcctctccgctgagcagtgcgggggtggcctacgccatcatctccacctcccccagcaatgccgccgccatggcccccagcaccgccgtgtctgtggtcagtgacagcatcaaagtccagcccctcctcatcagtgctgacaacaaggtcatcatcattcagcctcaagtgcagacgcagcccgagagcacggc

SEQ ID NO: 15505 - DNA, 553 bp, Homo sapiens
  source 1..553: mol_type = unassigned DNA
tccgcctgcccctggcgctgtcctgcacagtttgcgggatcgaggacgcgtgggacccgagcctggagtcttctcttaagcgataacggcgacctcaagaagcagctccacgaaaggcagccgcggatcgccgcgctcagcgacaaacaagctttgggaacgatcactgcagtgcctgtcacgggtcctcaggtcagctccttgcagaggttggccgggcaaggagcggcagtgctacctcaggttaggccaaagactctgattccagacagcctccccgttgccccgggccgggaccggccacccaagcagcccccaacattccagaaggccaccgtggtcagcgtcaagaaccccagcccagccctccccaccgccaacaacactgtcagccatgtgccagcgcccggcagccagccccaggccctcgccgagcccgccgccctcgcctctccgctgagcagtgcgggggtggcctacgccatcatctccacctcccccagcaatgccgccgccatggcccccagcaccgccgtgtctgtggtcagtgaca

SEQ ID NO: 15506 - DNA, 508 bp, Homo sapiens
  source 1..508: mol_type = unassigned DNA
tgcagagactctggccacaggaagtgtcagtatcctttggtgcagctgtgaatggtgcccaggagctgagcgtcttgtagtgcctgaagggcgcattggtggccaccccccgtgagcgagaggacatccagcccccacctcaggggactcagtggttggagaaagttcctgattcagctccacgtggctctccatggagaagcagaaagagaatcgtgttttcttgcagaggcattgaggctttgggaacgatcactgcagtgcctgtcacgggtcctcaggtcagctccttgcagaggttggccgggcaaggagcggcagtgctacctcaggttaggccaaagactctgattccagacagcctccccgttgccccgggccgggaccggccacccaagcagcccccaacattccagaaggccaccgtggtcagcgtcaagaaccccagcccagccctccccaccgccaacaacactgtcagccatgtgccagcgcccggcagccagcc

SEQ ID NO: 15507 - DNA, 338 bp, Homo sapiens
  source 1..338: mol_type = unassigned DNA
gcccgggccaaagtgagcgcaaagtgctgcccaagttgccgggatggagctgcagagccggcccgaggcgctcgccgtggaactcgcgcgccaccagaacggcgacctcaagaagcagctccacgaaaggcagccgcggatcgccgcgctcagcgacaaacaaatcgcgggcagaacctctcatctgtgcacaagggacccagcacggggctttgggaacgatcactgcagtgcctgtcacgggtcctcaggtcagctccttgcagaggttggccgggcaaggagcggcagtgctacctcaggttaggccaaagactctgattccagacagcctcccc

SEQ ID NO: 15508 - DNA, 749 bp, Homo sapiens
  source 1..749: mol_type = unassigned DNA
cccttctcagtatctccccaactctgtgtgcggtacaggtggtctcggatgcactccttctgctgcctaccccgaatggccctgaggagggctgtttaccaggcaccaatgctttatcatctgaaaaacacatggcagaaagaattcaagggaggacggagaaaacccaaagataccttgtcaggtgagaggagggcttcagagtcactcacgccaaacaggcttcatagccacgccaggggcccatgatggtgatctacagggtccagccgtgagtgaggagccctgtggttgaaaaacacagggtgtgggtggattagaactccttccaaaacacagattattgagcctttcctcccagggttttagatttaatcactcttgggtgggcctgagaatttgcattttgaggcgagtcctcatgctctgctggtactgctggaatggccaccacaccttgagcaccgctgggttggaggaggagtgctgacggagtgctaagctgatctcatcctggccagaccttaggagggagctcctgcaaactgatgccagcagggccaggcgagcatggatcacgtggacacggaggccctttgtcctgcttcgtccgtccaaccctatgccagtgagctccacgaagcagtgacgcctgcagagactctggccacaggaagtgtcagtatcctttggtgcagctgtgaatggtgcccaggagctgagcgtcttgtagtgcctgaaggtaacaa

SEQ ID NO: 15509 - DNA, 528 bp, Homo sapiens
  source 1..528: mol_type = unassigned DNA
ggagctgcagagccggcccgaggcgctcgccgtggaactcgcgcgccaccagaacggcgacctcaagaagcagctccacgaaaggcagccgcggatcgccgcgctcagcgacaaacaagatgattagtgagcaggggactgatttcctcgttcctcattcatgaacaacaactaacatttgtgtagcagcatcttgaggtattgggcattgccacttacattaacccgttggattcacgtttcatgggtttaaaaagcgaggtttgagggctggtgggccttttccagggcacccacaaataaaatccagcgttttctttggaggaggccaagctgagattggaggcagcttcctagagcccttctcatcactcgcacagcaccgccaccgccaacttgttccttgagtccggggtttgaggaacatccatgtgaagagttccctgaggtctcctgaccaggctgctttatctgtggcccttcagactatggtcctgtgatccgccagcctgccatgggctgcggaga

SEQ ID NO: 15510 - DNA, 575 bp, Homo sapiens
  source 1..575: mol_type = unassigned DNA
agccgcgcaacttcccgggagcccgggccaaagtgagcgcaaagtgctgcccaagttgccgggatggagctgcagagccggcccgaggcgctcgccgtggaactcgcgcgccaccagaacggcgacctcaagaagcagctccacgaaaggcagccgcggatcgccgcgctcagcgacaaacaagtaagcgatgggatcgcggccccccctgggatggggcgggagggtggctgggcactttggcggcgccctaaaaagtgccagcctgggcgacgcacgctcagactcccagaggggtctgtctccagttctcaaagttccccacccctcccctttcctggaaagaaagagccgggttctcggaggcggcagggagagccgggccctgcgggggccgaagagaggagctcacttaaaaggcagcgcgcggcccggcgtccattttgaggtggtggacatgtttttggaacgtggcgatttctcccggctcggagtcccccgctttgcgctgaggcggccatgggggcggaggggggcggccgtgggggcctggacaccaaactcgttggaagcga

SEQ ID NO: 15511 - DNA, 3540 bp, Homo sapiens
  source 1..3540: mol_type = unassigned DNA
atttatgagctttgctcgacacggactcgccgtgtttacttggctctttgttcctcccccctcccccggcacacactcacactcacactcactcgcacacgcaccccggcctgcaaacttgcacggctcggggcgcgccgccgggtggcctcggcccccgccccgccccgcgagctgccccgatgaggcggcagccacagaacggcgacctcaagaagcagctccacgaaaggcagccgcggatcgccgcgctcagcgacaaacaagctttgggaacgatcactgcagtgcctgtcacgggtcctcaggtcagctccttgcagaggttggccgggcaaggagcggcagtgctacctcaggttaggccaaagactctgattccagacagcctccccgttgccccgggccgggaccggccacccaagcagcccccaacattccagaaggccaccgtggtcagcgtcaagaaccccagcccagccctccccaccgccaacaacactgtcagccatgtgccagcgcccggcagccagccccaggccctcgccgagcccgccgccctcgcctctccgctgagcagtgcgggggtggcctacgccatcatctccacctcccccagcaatgccgccgccatggcccccagcaccgccgtgtctgtggtcagtgacagcatcaaagtccagcccctcctcatcagtgctgacaacaaggtcatcatcattcagcctcaagtgcagacgcagcccgagagcacggcagagtcgcggccgcccacagaggagccatctcagggagctcaggccaccaaaaagaagaaggaagaccggcccccgacccaggagaaccccgagaaaatcgccttcatggtagcgctaggcctggttaccacggaacatttggaagaaatccagagcaagcgacaggagcggaagagaagaagcacagccaaccctgcctacagcggcctcctggagaccgagaggaaacggctggcctccaactatctcaacaaccccctgttcctcacagcgagagccaatgaggacccctgctggaagaacgagatcacccacgatgagcactgtgccgcctgcaagcgaggggccaacctgcagccctgcggcacctgcccgggggcctaccacctcagctgcctggagccgcccctcaagacggcgcccaagggcgtgtgggtgtgccccaggtgccagcagaaggccttaaagaaagacgagggtgtgccctggactgggatgctggccatcgtgcactcttatgtcacccacaagacagtcaaagaagaggagaagcagaagctgctgcaacgaggcagtgagctgcagaacgagcaccagcagctggaggagcgggaccggcggctggcgtcagcagtgcagaaatgcctggagttgaagacaagcctgctggcccgccagaggggcacccagtcatccctggaccgcctgcgggccctcctgagactgatacagggcgagcagctgctccaggtcaccatgacgaccactagccctgccccactgctggccgggccctggaccaagccctcagtggcagccacacaccccaccgtccagcacccccagggccacaactgaccccgagggaccagtcttcatacccacggaaagttattgggaccctgcttacacagcctgggggttctgtcggccttaattcataaacactatgaatttcagacaaaaattaaccagacagaggagaggagggaggaagagctgggcgagaggcctagagccaggaccaggtgggggtgcggccctgtgccctccaaattcacagggggtacctaggagccaggtggggtacgacaggctggggcacacagtctccccccggccacctcggggctgcctgggcctctggcttccaggccctgctctccacggcctccctctggcccgttggaggggcaggctgaggctgtggaggggacaagcacgccccccagaacgcagtctccactgagggcaccgcctattggtgtcctgtgggagggcgagctgagaacacatggactagctgagtggtagcggtagttgggacgagaagcggggtagtggatctaggtagttcctcaatgccccacgctcctaggaggtccccctggggtgggcgggcgggcctggggcactccgtcgcctttgcagaaccacctgggcccctttctgtcagtattattagggttacgaattgcagctgtttaacttgaaagacactgtcggaggtgagcatctgggcgccgggacgctgcagtgatccccgccagagcctgtgcccttcctgctccgtctttggggtcctcaaggctgcctccttccttttgccaatctcttggactcagtttgccgttgatgcgtttttctcatggagtttctgggcagagtggagctgcaaccctgttgtggggggcagcatttggcaggttttctccttggggttgaatcattcaacttaacgactgaagccctttcttgtctcctttggaagagccgataagtattccactcctcccttcttgccagtgcagacactatgccaaaaaataacttcacacttttgtatggcgtttttattgtgagatatttaatgtgaatggttggggggactctggctgacttcctttctgcttctagtagtctctgcttcaaggtacaaatgggaacacctcccctcgggaagcctggccaagctggaagatccggcaggttttttacgagccgggtggagggttggggaggaaagaaagggcggtggctcgggaggttccggccttcggggaccagacttgctgccaagggcttctgcatccagggtgggcagtggcagcttgtcacccttgcccgattcccacatcccagtcctgagggactcagcacaacaggataagcgtccaggagccacgggctcccaccccgagcatatcacatggtgccgaattgcactgaacacgcgtgtgtgcatcgcacgcggccacgaccacagacacgcatgcacacacgcagaggtgcagagcgaggaggccggcaaatcccgcagctgccacggtccctcctgtcattctcacgactccgggagaaactgtgctgtatgatacagatctattttaatacacttaccactgggtgaacaagatttttatattcttttattgatgaacaaagtgaaccgtgtgaggcacacgtcttctatattggctactctgtgccaagtatgcattaccgcgtggcttgcgatgtccatgtcttcagcttccttttctgttggtttggttttcttcgcggatggattgagttacatgttttaacagtgtaatgggaggatctgaaaggttggacccgggaggggtagctgccgatgtgtcttgagattgttaggttttttttggaccaaggaggaccgtccagtgggtagtgaggatagagaaaaagtgtttgtcttaaatacgccaatgtagttttccttctttacaatgtattaaactcgatcgatgatttcaaa

SEQ ID NO: 15512 - DNA, 313 bp, Homo sapiens
  source 1..313: mol_type = unassigned DNA
cagaaaacagcgcatagggtaggctgggccagccgaggattatgtgaaggttcgttgggaccctccggaggccagtggggtactgcaaagagccatgggggtgttgatgtccaagcggcagacagtggagcaggtgcagaaggtgagtctggctgtgtctgctttcaaggatgggctgcgggacaggccttccatccgacgcacaggtgagctgccagggtcccgccgtggcactgtagagggctccgtccaggaggtacaggaggagaaggaagcagaagcaggaacctcggtggtccaggaagagagtagt

SEQ ID NO: 15513 - DNA, 1681 bp, Homo sapiens
  source 1..1681: mol_type = unassigned DNA
ctcgggctgccgtgggctgcgcggggcccgcggtgtgtagagtccgccgccccggagccgcgtcccgcacccggacggtcccgagccatgggggtgttgatgtccaagcggcagacagtggagcaggtgcagaagggtctgcaccagggttttccatgatggctgcctgcgccgcatgggctacatccaaggagacagtgcagcggaggtgacggagatggcccacacagaaacaggctggagctgccactactgtgacaacatcaacttgctgcttactgaggaggaaatgtatagcctcacggagacctttcagcggtgtaaagtcatccctgattgctccctgacactggaggactttctgcgttaccgccaccaagcagccaagcggggggaccgtgacagggccctgagtgaggagcaagaagagcaggcggcccgccagtttgctgccctggaccctgaacatcgaggccacatagagtggcctgacttcttgtcccatgagtccctcctgcttctgcagcagttgcgtccccagaactctctgttgaggcttctgacagtgaaggagcgggagcgagcccgagccgccttcctggctcggggcagtgggagcaccgtcagtgaggcagagtgccgccgggcccagcactcttggttttgcaaacggttcccagaggctccttcctgcagtgtcagcatcagccatgtgggtcccatcgcagatagcagcccagccagcagcagcagcaagagtcaggacaagaccctgctgcccacagagcaggagtccagatttgtggactggcctaccttcctgcaagagaatgtcctctacatcctggctgctcgccccaacagcgcagccattcacctgaagcccccaggatagcatggagcagagaagctcggtttgaggacagtgacatcctctccctcctttcctttctcccttcccccaccaacctctggcacagagactcatggggttgggacactgccagcgtcttaacttgtcactaagctttaaggcactgaaatcaccattcccctcacaatagaggcagtgaatgcattgccacaaggagaagccctgggagctgtggcagcatcctctcctggaccgcccctgccccacatcatagacgggacctgccaccacacttatatacatgtgcacatgctgcccagctgtccatgccttcagaagcctggttctttttggttgagaaaggaccaaagtccctttgtgaagcccctggtatagaggagggggtctctactcaccccttctataggcaggccagttctaatttccaatagataagtctctggccaagtgattcttaggaagggggcatgtcagactcgcatgcctgcctagagctcctggagatcctaatgggccccgctttctccaccaaaaatcccttctgcagtcagctgctgttactagtaggtgtgcattatgtacctcggctgtactgagttgggaaaagagttaaacatcaccactgaaattcagccctttatttatttaaattccaattcctggtgacagaaaaggcaactagcctggagaatcctgactggaagagggggaggcagcccttcccagggactcgggattctaggaacctctcagtcaggtcacctgagtccaaaagtctttagcagg

SEQ ID NO: 15514 - DNA, 5718 bp, Homo sapiens
  source 1..5718: mol_type = unassigned DNA
gctgccgtgggctgcgcggggcccgcggtgtgtagagtccgccgccccggagccgcgtcccgcacccggacggtcccgagccatgggggtgttgatgtccaagcggcagacagtggagcaggtgcagaaggtgagtctggctgtgtctgctttcaaggatgggctgcgggacaggccttccatccgacgcacaggtgagctgccagggtcccgccgtggcactgtagagggctccgtccaggaggtacaggaggagaaggaagcagaagcaggaacctcggtggtccaggaagagagtagtgccggccgcgcagcctgggagcggctccgagatgggcgcggcgtggagcctgaggagtttgacaggacaagtcgattcacaccccctgcgttcatccgccccacccggaagctggatgatgacaaacctccagaaatctgcctggagcccagagagcctgttgtcaacgatgagatgtgtgatgtttgtgaggtctggacagctgagagcctcttcccgtgcagggtctgcaccagggttttccatgatggctgcctgcgccgcatgggctacatccaaggagacagtgcagcggaggtgacggagatggcccacacagaaacaggctggagctgccactactgtgacaacatcaacttgctgcttactgaggaggaaatgtatagcctcacggagacctttcagcggtgtaaagtcatccctgattgctccctgacactggaggactttctgcgttaccgccaccaagcagccaagcggggggaccgtgacagggccctgagtgaggagcaagaagagcaggcggcccgccagtttgctgccctggaccctgaacatcgaggccacatagagtggcctgacttcttgtcccatgagtccctcctgcttctgcagcagttgcgtccccagaactctctgttgaggcttctgacagtgaaggagcgggagcgagcccgagccgccttcctggctcggggcagtgggagcaccgtcagtgaggcagagtgccgccgggcccagcactcttggttttgcaaacggttcccagaggctccttcctgcagtgtcagcatcagccatgtgggtcccatcgcagatagcagcccagccagcagcagcagcaagagtcaggacaagaccctgctgcccacagagcaggagtccagatttgtggactggcctaccttcctgcaagagaatgtcctctacatcctggctgctcgccccaacagcgcagccattcacctgaagcccccaggatagcatggagcagagaagctcggtttgaggacagtgacatcctctccctcctttcctttctcccttcccccaccaacctctggcacagagactcatggggttgggacactgccagcgtcttaacttgtcactaagctttaaggcactgaaatcaccattcccctcacaatagaggcagtgaatgcattgccacaaggagaagccctgggagctgtggcagcatcctctcctggaccgcccctgccccacatcatagacgggacctgccaccacacttatatacatgtgcacatgctgcccagctgtccatgccttcagaagcctggttctttttggttgagaaaggaccaaagtccctttgtgaagcccctggtatagaggagggggtctctactcaccccttctataggcaggccagttctaatttccaatagataagtctctggccaagtgattcttaggaagggggcatgtcagactcgcatgcctgcctagagctcctggagatcctaatgggccccgctttctccaccaaaaatcccttctgcagtcagctgctgttactagtaggtgtgcattatgtacctcggctgtactgagttgggaaaagagttaaacatcaccactgaaattcagccctttatttatttaaattccaattcctggtgacagaaaaggcaactagcctggagaatcctgactggaagagggggaggcagcccttcccagggactcgggattctaggaacctctcagtcaggtcacctgagtccaaaagtctttagcagggtagtcaaaaatcaaggtgagccttcttggccccatttttcagatggtagctcatggcctagggccaagggggcctgaatggagcaaacacactggcaggagccacagccctctgtgttagatgcttcacccaagtcaccgaccacagagactgacgagagcacactctggaggaagaggagagaacggggctctgcttcctcatcattccagctcaactcaactgtagacaccttccacagcccaagaaagatctgcagagccctgagcagggactctttcagccatcctgacaaacaggataagaggctggggcttaagaagaggctctgcagagaaggtcctgggaaagccttacagaagaagttttccgcttctccctatcactgagactcggcttgagtggctgcttctcctcactgctcatcacatgtccttccccagcaggctagggcttgggcctggcatggaaggccttttggggcaatcagaggctgccacaagagcaccaagcctggcctccaagccccagccctccttcctaagtactcatcaaattcaaattcttcagtccgtgtgttatggctcatcttggccggccgtggggtccatgttctaggcttctgtttccaacttaatgacttaggcatagcgagatctgactaccaagagttattcaaaagggagtggagtgcagtcatgcagaagcaaacacgtcttcattgctcgaggcccttgtgctaaatcgggtgcgtacagaagaacacacaccgctcggtgctgaatgtttcgaggaaagcaaggagctgcggccaggggcttcttgagagccctgtgtagtctcctcctgtaggaaccaccttagctggaagcagggtggtgagctgctggggttggattatttgggactgaaatgaagcagacaggagacaaatctgggctcaggtgtatggcccacagcttttagaaatgctcttcagccgtcccccaggattgatccataggaggggccattattcagtctagtcaaaacaagaaagcgcaggactcctgggcctaagaactgcatctgaagcagccaggcctggggttttgcactgagatgaaagcacattaagcacaggggctcttacctactctcctggcaaatcatctcctgtgccactggccttgggctgctcgatctcacagacggggcattttgagtagagacaagctctgggctttgagagctgaatagcatttttctcctgcctcatcagtcacagggactggaagtccatcttgttccctgatccttcacagatcaaggtgatgcctacctctttggagctgctgcctctagctctccacgggtgagtgaggagagttggtgggccaggtcaggcctgccgtattccagggcctggcaaagcagccccagagttcttccacaacaggaacaggcccatttggatcacgcttctccctattccagaacagcaaacttcctgggtgagggcctgctacagagatcccaggggacacttccctcagcaaagagtagagttcccatcccacaagagtcctaggaagcaggaaagcacgaaggagcagccagcctcttctccacaggcagtcatctagctttttaccaaaggggaagtgccgttgctccccaagtccagagttgcagacgccctgccccaacccccgtccagaatctccctttgcagtgttctaatccccagagcccctctgcggtatgtatagagttgttaaaaacgttcagaaacccagtgaagcccatttcgttttcaagccctcccatcactgtgactctgaaattctgccaagtacaaatattagcgtttggctctaataagggtatgagaaaatgtttcagtcttttctttgtggctacccaaaattgagatcagtgtttctaaccaaggaaggcctgggttatagacaggctcctctgaagcccacttgccctaagcatttttcacctagcattcctcttcctcatgttcagatgtgaatgaaggggcagctggaggatgtggtggagctgcagggaccgagggtcagctgagcagtggccctggccacaaaaccactccaagtctgctccttggcttcctctcctgagcccagccttccccaacagaacacttgagcaagggcccctagagtatcccagggatggagcagtcccctcactctaggtactgatctaaccttcaagtgctcctcttcatttgaggacacctacagtagaaaccatgaggacattgcctctttctgccctcagcccaagtacctggggctagcagggcagataccagcctttctggtcctgctgctccctatgggatgtcaccctgaccttgcttaagtggccaagtcttagggtccccttattcctgtcaccattatgaaaaacacagcattaaactgcctgggaagaggacacctccttgggggagtgagccccaaggttatacccaggactcatagcccaaagcacaacctcggccattgcaggtttcacagcttcagtcagagtggtgccaggaagcccaaaagccaagagggaaggtcagcagaagctgcctggcaaggccccaggccagccaggcccaccccagagccaagagaaacttcaagcaggactgagaactggtagctggctctagtgatcctgaaagcatgttcccttcagaccagcagagtgaagacagacagatgtgtggccctaaaaggcagaacagttttgatgccagaacttcaggactgtcaccacagtccctttttacccctcctctatttacagtgaaataaaattcctattttcttttttttttttttttaattttccttatttcaagctcttatctgaaaaaatgctactttctcctaccacttagtttgaatttgcccaggatatctgtctgggcccctggctgcaacccagacaatggcgagatctcctggagtgggggatattcacgcatcgtgcctgttcctgacagctcagccctggtgtagggtgggactgggcattttctctgctgttacttttctgctaccactatttttggcaaccttggaaagaaaataaacaggttacagaatttcggctagcactaagggaaagctttttcctctgggccacatgccccagtgacccagagcatggaaagggggtcagctctggtctgggccagtgactaagaagcccaatcacattccagtttctatagcactgggtaggcacaacccacagttaagaacatcaagttataagtagccaggccttttcatagccatggtgacacaaaggccctcaagattagcctcctgccatcatgggttggcctgtgatctgtcccccagccaaacccaagtttgtgagagggactctgagaacacttgagcaacacttgggaatccaatgcgctctggtccctcatgcccttcccatgtgcttttctgcagaaggtaacttgacagcaagctgaggggaacgtccccaagccctgtctccctgtctctacagctgcatgctcctctgcgtggcccagccttcacagcgctccagaagaagctgatgccctgaggctgggcacagtggaaatcataataaagcgattgcgatgctc

SEQ ID NO: 15515 - DNA, 668 bp, Homo sapiens
  source 1..668: mol_type = unassigned DNA
cgaggaaagcaaggagctgcggccaggggcttcttgagagccctgtgtagtctcctcctgtaggaaccaccttagctggaagcagggtggtgagctgctggggttggattatttgggactgaaatgaagcagacaggagacaaatctgggctcaggtgtatggcccacagcttttagaaatgctcttcagccgtcccccaggattgatccataggaggggccattattcagtctagtcaaaacaagaaagcgcaggactcctgggcctaagaactgcatctgaagcagccaggcctggggttttgcactgagatgaaagcacattaagcacaggggctcttacctactctcctggcaaatcatctcctgtgccactggccttgggctgctcgatctcacagacggggcattttgagtagagacaagctctgggctttgagagctgaatagcatttttctcctgcctcatcagtcacagggactggaagtccatcttgttccctgatccttcacagatcaaggtgatgcctacctctttggagctgctgcctctagctctccacggctgcatgctcctctgcgtggcccagccttcacagcgctccagaagaagctgatgccctgaggctgggcacagtggaaatcataataaagcgattgcgatgctc

SEQ ID NO: 15516 - DNA, 6020 bp, Homo sapiens
  source 1..6020: mol_type = unassigned DNA
tccgcggcgccaggcctgagcggtgggagggctctgcggggcctggtgttcaggcgtcccaccacgagggtggagcagcgttggatacttgttccttagggaccgaaggctccggtggcacccgggctatttctcagaggacaattagtaacgtgtcgccatgaggagccggagtaactccggggtccggctggacggctacgctcgactggtgcaacagaccatcctgtgccatcagaatccagtgactggcttgcttccagccagctatgatcagaaagatgcttgggtccgagataatgtgtacagcatcttggctgtgtggggtttgggcctggcctatcggaagaatgcagaccgggatgaggataaggcaaaggcctatgaattggagcagagtgtagtgaagctgatgagaggactactgcactgcatgatcagacaggtggataaagtagaatccttcaaatatagtcagagtactaaggatagcctccatgcaaagtacaacaccaaaacctgtgccactgtagtgggtgatgatcaatggggacacctgcagttggatgctacctctgtgtacctgctcttcttagcccaaatgactgcctcaggactccatatcatccacagcctagatgaagtcaatttcatacagaaccttgtgttttacattgaagctgcatataaaactgctgacttcgggatatgggaacgtggagacaagaccaaccaagggatctcagagttgaatgccagttcagttggaatggcaaaggcagccctggaagcattagatgaactggatctgtttggtgtgaaaggtgggcctcaatcagttatccatgtcctggctgatgaagtacagcactgccagtctatcctaaattcactactgccccgtgcttcaacatcaaaagaggttgatgctagtctactctcagtggtttccttccctgcctttgcagtagaggatagccagttggtggagctcacaaaacaggaaatcatcaccaagcttcagggtcgttatggttgctgtcgctttctacgagatggatataaaactcctaaagaggatcccaatcgtctgtactatgaaccagctgagctgaagctatttgaaaacattgagtgtgaatggccattgttctggacatactttattcttgatggggtcttcagtggcaatgcagaacaggttcaagaatataaagaggctcttgaagcagtcctcatcaagggcaaaaatggagtcccacttctgccagagctgtacagtgttcctcctgacagggtcgatgaagaatatcagaatcctcacactgtggaccgagtccccatggggaaattgcctcacatgtggggtcagtctctatacattttaggaagcttgatggcagagggatttttagcccctggagaaattgatcccctgaatcgcaggttttctactgtaccgaagcccgatgttgtggttcaagtctccattctagctgaaacagaagaaatcaagaccattttgaaggacaagggaatttacgtggagaccattgctgaggtataccccatcagagtacaaccagctcgtattctcagccacatttattccagcctaggatgcaacaatagaatgaaactcagtggacgaccctacagacacatgggagtgcttggaacttcaaaactctatgacattcggaaaactatctttactttcactccacagtttatagaccagcaacagttctacctggctctggacaacaagatgatagtggaaatgcttagaacagacctctcctacctctgtagccgctggcggatgacaggccagcccaccatcaccttccccatctcacacagcatgcttgatgaagatggaacaagcttgaattcaagtatcctggcagcactccgaaaaatgcaagatgggtattttggtggggcaagggttcaaacaggtaaattgtcagagtttttgacaacatcttgttgcacacacttgagcttcatggaccctggacctgagggtaagctgtacagtgaagattatgatgacaactatgattacctggaatctggcaactggatgaatgattatgattcaaccagtcatgctcgctgtggtgatgaagttgctcgttatttagatcaccttttggcgcacactgctccccatcctaaactagcccctacctcacagaagggagggctagatcggttccaagctgctgtgcaaacaacctgcgacttaatgtccttggtgaccaaggccaaggaactgcatgtacagaatgttcacatgtatcttcctacgaagttatttcaggcttcccggccttcattcaacttacttgattcacctcatccccgacaggagaaccaggttccctctgttcgtgtagaaatacatcttcctagagaccagtctggggaggtggactttaaagcactggttttacagttgaaggagacctcaagcttacaggaacaagctgatatcctctatatgctgtatactatgaaaggacctgactggaacactgaattgtataatgaacggagtgctacagtgagagagcttcttaccgagctgtatggcaaagtgggagaaattcgtcactggggcctgatccgatacatttctgggatcttaaggaagaaagtggaagcacttgatgaggcctgcacagaccttctctcccaccagaaacatttgacagtaggacttcctccagaacctcgagaaaagactatctctgcacctctgccctatgaggcgctcactcagctgatagatgaagccagtgaaggggatatgagcatttcaatccttacacaggaaataatggtatatctagccatgtatatgcgaacccagcctggcctctttgctgaaatgtttcgacttcgaattggtctgatcatacaagttatggcaacagaactggcccactcccttcgatgctcagctgaggaagccacagagggcctgatgaatctcagtccttcggccatgaagaatctcctgcatcacattctcagcggcaaggagtttggagtggaacgaagcgttcgtcccactgattcaaatgtcagtcctgctatttctatccacgagattggtgctgttggagcaaccaaaacagaacgaactgggatcatgcagttaaaaagtgagataaagcaggtggaatttcgtagactgtcaatctcagctgagagtcagtcacctggaacctctatgactccaagtagtgggtcctttcctagtgcatatgatcagcagtcatctaaagatagtcgtcaaggtcaatggcaacgccgaagaaggctggatggggcactgaatagagttccagttggattttatcagaaagtatggaaagttttgcagaagtgtcacggactttctgttgaagggtttgtccttccttcctctaccactagagagatgactccaggtgagattaaattctctgttcatgtggagtctgtcctgaatcgtgtacctcagccagagtaccgtcagctgctggttgaagccatccttgtcctcaccatgctggcagatattgaaattcatagcatcggaagcatcattgctgtggaaaaaatagtgcatattgccaatgacttgttccttcaagaacagaaaacccttggcgcagatgataccatgttggcaaaggatcccgcatctggcatctgtactcttctgtatgacagtgcacccagtggcaggtttggcaccatgacctacctctccaaggcagccgccacctacgtgcaggagttcctgccccacagcatctgtgccatgcaatgagggctttggttcctggcttctgggagccttttgacagctggtccctgcctcggttgattgtgcatggaactaaaatgttattgcctaatcactccaaccctgcccctttctgtcccatccttcccaagaagagagaactttttcgataaactaactactgtagaagaagtgaacacttacctggaggctcaccttgcagaaccagtgacaatcttatgagtataatgaacactcagccaggcctgtcatgattggctttatttctttcatcattcataaaagtttgcatgtgtttttattctctagatctgttaccaatatagttttctaactcctgtttggggagcaagtgttaataataacttattcctaaagcttggtttttcttttttgtgattttattgtgtatatgagtggtgggtactttgggacattatttcaaatgagtaaactctaaattgttaaatatttatgctgctataaattagaattacctattctacgtgccttttcttaggaaaagagagtactggatcatggttttcttccttacttacaggttgcttcacactgagtgataatttaaaattgtttctatgtagaatcattgtctctactgttgccctctctgtgtctgcacacataatgcctctctcactttggtgaaatatcaaaaaaatgcaagtacagcatgcatatttaagaatttctgaactaacacttgaaatcacattttataaagattgttggtactcagagttgtatttgcagcagaaaatgcagaataacccagaaatggagcccggagcccaattccagagaggaagggaaagaagagacgatgcctggacaatgtcttatacatagggaacagagagggaatcagaggtggcttagttccctgaagacagccttatgcgcttaatccctgcctttgaaaaatgggccaatacacaacacagacaataatttgaagcgtctgtattcagcaaagataaatacagcagtccagtctataggtgctctacttagcattcttttcatgtgctcctggtctctgtctcactcacctactttctactacatccaactcaactccctgacaccctatccccccatctattcttaaactctttcatatatattttcacttcctaattctagtgtacatatccctgtatatcatggtatctgtgggcatatgtctgtttcttataaagacacatatttgtgtgtgtatgtgtgtgtgtgtgtgtgtgtgtgtataagcatacatgggaatttttctgaatgtaagcagttttgatgtgtctgtatatcaatctgtatctacatttgatggactgagtaagaatgttgcatgtgagagaagggatgtgactgtggactcagattgacacacacagattggtggaagaatagcttcagtcctcttccttcatcccatatgtaggtagccttgcttgacaaatgtttcttctaactctccttcttctgaattgtgcagagactctgttaacttccctttttgcacttagataacttcctacttcaaccccctcctttatcttggatttctaaagtttttccccaatattgggaatggtgagggtggggatgagagactctctgaacaattcttgcagaaccagtgacaatcttatgaatataatgaataagtaagcatatagtagggtgatagaatacagatagtagaaacaaagagaggacagcaaaccttttcagcacttctctcagagcaaatggaaacacacagtaagtagctttctgactacattattttctggtcacttttaaagaaagtttacaacctgttctgaaactatttgtcttttcactggttgtaagtgtaccccaatctcagggagtatatctgtagtgccacaggcaaaagatccactccttcccacactcatttgcctgaacttactcgaagggctgcatttctctgagtttacgaaattgtgtcattatggtccccatacagtggtatttaacttttaaagcaacttttaagaaaactcgacttgttttttgttcattttaagtgtgtggtactaaaaagacatgttagactttttttaaaaaagcacttatgttttgaaaatagaataaataataagaatttccaattaaatcatgtctggtgccaatgtgcaaaacttca

SEQ ID NO: 15517 - DNA, 6173 bp, Homo sapiens
  source 1..6173: mol_type = unassigned DNA
tcgcgcccgccccgcctcccgctcgcgtctcccgcaaggtggaggcggcgcagcggtcgttgacctgttggcggcggccgggcgggaggctgtgggccgcggcggtctcccggggttgaggggaggatgcaggagtcacacgcggaggccggactggactaagggggcaggagcggcgcctggggcgctgcggcggggctctagaccgcgggaagccagtgctagcgctggcgcgtggtgggcccctgaggccgccggagtccggagaggtacgcggaatccgcggcgccaggcctgagcggtgggagggctctgcggggcctggtgttcaggcgtcccaccacgagggtggagcagcgttggatacttgttccttagggaccgaaggctccggtggcacccgggctatttctcagaggacaattagtaacgtgtcgccatgaggagccggagtaactccggggtccggctggacggctacgctcgactggtgcaacagaccatcctgtgccatcagaatccagtgactggcttgcttccagccagctatgatcagaaagatgcttgggtccgagataatgtgtacagcatcttggctgtgtggggtttgggcctggcctatcggaagaatgcagaccgggatgaggataaggcaaaggcctatgaattggagcagagtgtagtgaagctgatgagaggactactgcactgcatgatcagacaggtggataaagtagaatccttcaaatatagtcagagtactaaggatagcctccatgcaaagtacaacaccaaaacctgtgccactgtagtgggtgatgatcaatggggacacctgcagttggatgctacctctgtgtacctgctcttcttagcccaaatgactgcctcaggactccatatcatccacagcctagatgaagtcaatttcatacagaaccttgtgttttacattgaagctgcatataaaactgctgacttcgggatatgggaacgtggagacaagaccaaccaagggatctcagagttgaatgccagttcagttggaatggcaaaggcagccctggaagcattagatgaactggatctgtttggtgtgaaaggtgggcctcaatcagttatccatgtcctggctgatgaagtacagcactgccagtctatcctaaattcactactgccccgtgcttcaacatcaaaagaggttgatgctagtctactctcagtggtttccttccctgcctttgcagtagaggatagccagttggtggagctcacaaaacaggaaatcatcaccaagcttcagggtcgttatggttgctgtcgctttctacgagatggatataaaactcctaaagaggatcccaatcgtctgtactatgaaccagctgagctgaagctatttgaaaacattgagtgtgaatggccattgttctggacatactttattcttgatggggtcttcagtggcaatgcagaacaggttcaagaatataaagaggctcttgaagcagtcctcatcaagggcaaaaatggagtcccacttctgccagagctgtacagtgttcctcctgacagggtcgatgaagaatatcagaatcctcacactgtggaccgagtccccatggggaaattgcctcacatgtggggtcagtctctatacattttaggaagcttgatggcagagggatttttagcccctggagaaattgatcccctgaatcgcaggttttctactgtaccgaagcccgatgttgtggttcaagtctccattctagctgaaacagaagaaatcaagaccattttgaaggacaagggaatttacgtggagaccattgctgaggtataccccatcagagtacaaccagctcgtattctcagccacatttattccagcctaggatgcaacaatagaatgaaactcagtggacgaccctacagacacatgggagtgcttggaacttcaaaactctatgacattcggaaaactatctttactttcactccacagtttatagaccagcaacagttctacctggctctggacaacaagatgatagtggaaatgcttagaacagacctctcctacctctgtagccgctggcggatgacaggccagcccaccatcaccttccccatctcacacagcatgcttgatgaagatggaacaagcttgaattcaagtatcctggcagcactccgaaaaatgcaagatgggtattttggtggggcaagggttcaaacaggtaaattgtcagagtttttgacaacatcttgttgcacacacttgagcttcatggaccctggacctgagggtaagctgtacagtgaagattatgatgacaactatgattacctggaatctggcaactggatgaatgattatgattcaaccagtcatgatgttcacatgtatcttcctacgaagttatttcaggcttcccggccttcattcaacttacttgattcacctcatccccgacaggagaaccaggttccctctgttcgtgtagaaatacatcttcctagagaccagtctggggaggtggactttaaagcactggttttacagttgaaggagacctcaagcttacaggaacaagctgatatcctctatatgctgtatactatgaaaggacctgactggaacactgaattgtataatgaacggagtgctacagtgagagagcttcttaccgagctgtatggcaaagtgggagaaattcgtcactggggcctgatccgatacatttctgggatcttaaggaagaaagtggaagcacttgatgaggcctgcacagaccttctctcccaccagaaacatttgacagtaggacttcctccagaacctcgagaaaagactatctctgcacctctgccctatgaggcgctcactcagctgatagatgaagccagtgaaggggatatgagcatttcaatccttacacaggaaataatggtatatctagccatgtatatgcgaacccagcctggcctctttgctgaaatgtttcgacttcgaattggtctgatcatacaagttatggcaacagaactggcccactcccttcgatgctcagctgaggaagccacagagggcctgatgaatctcagtccttcggccatgaagaatctcctgcatcacattctcagcggcaaggagtttggagtggaacgaagcgttcgtcccactgattcaaatgtcagtcctgctatttctatccacgagattggtgctgttggagcaaccaaaacagaacgaactgggatcatgcagttaaaaagtgagataaagcaggtggaatttcgtagactgtcaatctcagctgagagtcagtccaatggtggtcatcccctgggtatagatttgatgtcaccgtcttttatgtcacctggaacctctatgactccaagtagtgggtcctttcctagtgcatatgatcagcagtcatctaaagatagtcgtcaaggtcaatggcaacgccgaagaaggctggatggggcactgaatagagttccagttggattttatcagaaagtatggaaagttttgcagaagtgtcacggactttctgttgaagggtttgtccttccttcctctaccactagagagatgactccaggtgagattaaattctctgttcatgtggagtctgtcctgaatcgtgtacctcagccagagtaccgtcagctgctggttgaagccatccttgtcctcaccatgctggcagatattgaaattcatagcatcggaagcatcattgctgtggaaaaaatagtgcatattgccaatgacttgttccttcaagaacagaaaacccttggcgcagatgataccatgttggcaaaggatcccgcatctggcatctgtactcttctgtatgacagtgcacccagtggcaggtttggcaccatgacctacctctccaaggcagccgccacctacgtgcaggagttcctgccccacagcatctgtgccatgcaatgagggctttggttcctggcttctgggagccttttgacagctggtccctgcctcggttgattgtgcatggaactaaaatgttattgcctaatcactccaaccctgcccctttctgtcccatccttcccaagaagagagaactttttcgataaactaactactgtagaagaagtgaacacttacctggaggctcaccttgcagaaccagtgacaatcttatgagtataatgaacactcagccaggcctgtcatgattggctttatttctttcatcattcataaaagtttgcatgtgtttttattctctagatctgttaccaatatagttttctaactcctgtttggggagcaagtgttaataataacttattcctaaagcttggtttttcttttttgtgattttattgtgtatatgagtggtgggtactttgggacattatttcaaatgagtaaactctaaattgttaaatatttatgctgctataaattagaattacctattctacgtgccttttcttaggaaaagagagtactggatcatggttttcttccttacttacaggttgcttcacactgagtgataatttaaaattgtttctatgtagaatcattgtctctactgttgccctctctgtgtctgcacacataatgcctctctcactttggtgaaatatcaaaaaaatgcaagtacagcatgcatatttaagaatttctgaactaacacttgaaatcacattttataaagattgttggtactcagagttgtatttgcagcagaaaatgcagaataacccagaaatggagcccggagcccaattccagagaggaagggaaagaagagacgatgcctggacaatgtcttatacatagggaacagagagggaatcagaggtggcttagttccctgaagacagccttatgcgcttaatccctgcctttgaaaaatgggccaatacacaacacagacaataatttgaagcgtctgtattcagcaaagataaatacagcagtccagtctataggtgctctacttagcattcttttcatgtgctcctggtctctgtctcactcacctactttctactacatccaactcaactccctgacaccctatccccccatctattcttaaactctttcatatatattttcacttcctaattctagtgtacatatccctgtatatcatggtatctgtgggcatatgtctgtttcttataaagacacatatttgtgtgtgtatgtgtgtgtgtgtgtgtgtgtgtgtataagcatacatgggaatttttctgaatgtaagcagttttgatgtgtctgtatatcaatctgtatctacatttgatggactgagtaagaatgttgcatgtgagagaagggatgtgactgtggactcagattgacacacacagattggtggaagaatagcttcagtcctcttccttcatcccatatgtaggtagccttgcttgacaaatgtttcttctaactctccttcttctgaattgtgcagagactctgttaacttccctttttgcacttagataacttcctacttcaaccccctcctttatcttggatttctaaagtttttccccaatattgggaatggtgagggtggggatgagagactctctgaacaattcttgcagaaccagtgacaatcttatgaatataatgaataagtaagcatatagtagggtgatagaatacagatagtagaaacaaagagaggacagcaaaccttttcagcacttctctcagagcaaatggaaacacacagtaagtagctttctgactacattattttctggtcacttttaaagaaagtttacaacctgttctgaaactatttgtcttttcactggttgtaagtgtaccccaatctcagggagtatatctgtagtgccacaggcaaaagatccactccttcccacactcatttgcctgaacttactcgaagggctgcatttctctgagtttacgaaattgtgtcattatggtccccatacagtggtatttaacttttaaagcaacttttaagaaaactcgacttgttttttgttcattttaagtgtgtggtactaaaaagacatgttagactttttttaaaaaagcacttatgttttgaaaatagaataaataataagaatttccaattaaatcatgtctggtgccaatgtgcaaaacttca

SEQ ID NO: 15518 - DNA, 4476 bp, Homo sapiens
  source 1..4476: mol_type = unassigned DNA
gacctgttggcggcggccgggcgggaggctgtgggccgcggcggtctcccggggttgaggggaggatgcaggagtcacacgcggaggccggactggactaagggggcaggagcggcgcctggggcgctgcggcggggctctagaccgcgggaagccagtgctagcgctggcgcgtggtgggcccctgaggccgccggagtccggagaggtacgcggaatccgcggcgccaggcctgagcggtgggagggctctgcggggcctggtgttcaggcgtcccaccacgagggtggagcagcgttggatacttgttccttagggaccgaaggctccggtggcacccgggctatttctcagaggacaattagtaacgtgtcgccatgaggagccggagtaactccggggtccggctggacggctacgctcgactggtgcaacagaccatcctgtgccatcagaatccagtgactggcttgcttccagccagctatgatcagaaagatgcttgggtccgagataatgtgtacagcatcttggctgtgtggggtttgggcctggcctatcggaagaatgcagaccgggatgaggataaggcaaaggcctatgaattggagcagagtgtagtgaagctgatgagaggactactgcactgcatgatcagacaggtggataaagtagaatccttcaaatatagtcagagtactaaggatagcctccatgcaaagtacaacaccaaaacctgtgccactgtagtgggtgatgatcaatggggacacctgcagttggatgctacctctgtgtacctgctcttcttagcccaaatgactgcctcaggactccatatcatccacagcctagatgaagtcaatttcatacagaaccttgtgttttacattgaagctgcatataaaactgctgacttcgggatatgggaacgtggagacaagaccaaccaagggatctcagagttgaatgccagttcagttggaatggcaaaggcagccctggaagcattagatgaactggatctgtttggtgtgaaaggtgggcctcaatcagttatccatgtcctggctgatgaagtacagcactgccagtctatcctaaattcactactgccccgtgcttcaacatcaaaagaggttgatgctagtctactctcagtggtttccttccctgcctttgcagtagaggatagccagttggtggagctcacaaaacaggaaatcatcaccaagcttcagggtcgttatggttgctgtcgctttctacgagatggatataaaactcctaaagaggatcccaatcgtctgtactatgaaccagctgagctgaagctatttgaaaacattgagtgtgaatggccattgttctggacatactttattcttgatggggtcttcagtggcaatgcagaacaggttcaagaatataaagaggctcttgaagcagtcctcatcaagggcaaaaatggagtcccacttctgccagagctgtacagtgttcctcctgacagggtcgatgaagaatatcagaatcctcacactgtggaccgagtccccatggggaaattgcctcacatgtggggtcagtctctatacattttaggaagcttgatggcagagggatttttagcccctggagaaattgatcccctgaatcgcaggttttctactgtaccgaagcccgatgttgtggttcaagtctccattctagctgaaacagaagaaatcaagaccattttgaaggacaagggaatttacgtggagaccattgctgaggtataccccatcagagtacaaccagctcgtattctcagccacatttattccagcctaggatgcaacaatagaatgaaactcagtggacgaccctacagacacatgggagtgcttggaacttcaaaactctatgacattcggaaaactatctttactttcactccacagtttatagaccagcaacagttctacctggctctggacaacaagatgatagtggaaatgcttagaacagacctctcctacctctgtagccgctggcggatgacaggccagcccaccatcaccttccccatctcacacagcatgcttgatgaagatggaacaagcttgaattcaagtatcctggcagcactccgaaaaatgcaagatgggtattttggtggggcaagggttcaaacaggtaaattgtcagagtttttgacaacatcttgttgcacacacttgagcttcatggaccctggacctgagggtaagctgtacagtgaagattatgatgacaactatgattacctggaatctggcaactggatgaatgattatgattcaaccagtcatgctcgctgtggtgatgaagttgctcgttatttagatcaccttttggcgcacactgctccccatcctaaactagcccctacctcacagaagggagggctagatcggttccaagctgctgtgcaaacaacctgcgacttaatgtccttggtgaccaaggccaaggaactgcatgtacagaatgttcacatgtatcttcctacgaagttatttcaggcttcccggccttcattcaacttacttgattcacctcatccccgacaggagaaccaggttccctctgttcgtgtagaaatacatcttcctagagaccagtctggggaggtggactttaaagcactggttttacagttgaaggagacctcaagcttacaggaacaagctgatatcctctatatgctgtatactatgaaaggacctgactggaacactgaattgtataatgaacggagtgctacagtgagagagcttcttaccgagctgtatggcaaagtgggagaaattcgtcactggggcctgatccgatacatttctgggatcttaaggaagaaagtggaagcacttgatgaggcctgcacagaccttctctcccaccagaaacatttgacagtaggacttcctccagaacctcgagaaaagactatctctgcacctctgccctatgaggcgctcactcagctgatagatgaagccagtgaaggggatatgagcatttcaatccttacacaggaaataatggtatatctagccatgtatatgcgaacccagcctggcctctttgctgaaatgtttcgacttcgaattggtctgatcatacaagttatggcaacagaactggcccactcccttcgatgctcagctgaggaagccacagagggcctgatgaatctcagtccttcggccatgaagaatctcctgcatcacattctcagcggcaaggagtttggagtggaacgaagcgttcgtcccactgattcaaatgtcagtcctgctatttctatccacgagattggtgctgttggagcaaccaaaacagaacgaactgggatcatgcagttaaaaagtgagataaagcaggtggaatttcgtagactgtcaatctcagctgagagtcagtccaatggtggtcatcccctgggtatagatttgatgtcaccgtcttttatgtcacctggaacctctatgactccaagtagtgggtcctttcctagtgcatatgatcagcagtcatctaaagatagtcgtcaaggtcaatggcaacgccgaagaaggctggatggggcactgaatagagttccagttggattttatcagaaagtatggaaagttttgcagaagtgtcacggactttctgttgaagggtttgtccttccttcctctaccactagagagatgactccaggtgagattaaattctctgttcatgtggagtctgtcctgaatcgtgtacctcagccagagtaccgtcagctgctggttgaagccatccttgtcctcaccatgctggcagatattgaaattcatagcatcggaagcatcattgctgtggaaaaaatagtgcatattgccaatgacttgttccttcaagaacagaaaacccttggcgcagatgataccatgttggcaaaggatcccgcatctggcatctgtactcttctgtatgacagtgcacccagtggcaggtttggcaccatgacctacctctccaaggcagccgccacctacgtgcaggagttcctgccccacagcatctgtgccatgcaatgagggctttggttcctggcttctgggagccttttgacagctggtccctgcctcggttgattgtgcatggaactaaaatgttattgcctaatcactccaaccctgcccctttctgtcccatccttcccaagaagagagaactttttcgataaactaactactgtagaagaagtgaacacttacctggaggctcaccttgcagaaccagtgacaatcttatgagtataatgaacactcagccaggcctgtcatgattggctttatttctttcatcattcataaaagtttgcatgtgtttttattctctagatctgttaccaatatagttttctaactcctgtttggggagcaagtgttaataataacttattcctaaag

SEQ ID NO: 15519 - DNA, 6121 bp, Homo sapiens
  source 1..6121: mol_type = unassigned DNA
cacgcggaggccggactggactaagggggcaggagcggcgcctggggcgctgcggcggggctctagaccgcgggaagccagtgctagcgctggcgcgtggtgggcccctgaggccgccggagtccggagaggtacgcggaatccgcggcgccaggcctgagcggtgggagggctctgcggggcctggtgttcaggcgtcccaccacgagggtggagcagcgttggatacttgttccttagggaccgaaggctccggtggcacccgggctatttctcagaggacaattagtaacgtgtcgccatgaggagccggagtaactccggggtccggctggacggctacgctcgactggtgcaacagaccatcctgtgccatcagaatccagtgactggcttgcttccagccagctatgatcagaaagatgcttgggtccgagataatgtgtacagcatcttggctgtgtggggtttgggcctggcctatcggaagaatgcagaccgggatgaggataaggcaaaggcctatgaattggagcagagtgtagtgaagctgatgagaggactactgcactgcatgatcagacaggtggataaagtagaatccttcaaatatagtcagagtactaaggatagcctccatgcaaagtacaacaccaaaacctgtgccactgtagtgggtgatgatcaatggggacacctgcagttggatgctacctctgtgtacctgctcttcttagcccaaatgactgcctcaggactccatatcatccacagcctagatgaagtcaatttcatacagaaccttgtgttttacattgaagctgcatataaaactgctgacttcgggatatgggaacgtggagacaagaccaaccaagggatctcagagttgaatgccagttcagttggaatggcaaaggcagccctggaagcattagatgaactggatctgtttggtgtgaaaggtgggcctcaatcagttatccatgtcctggctgatgaagtacagcactgccagtctatcctaaattcactactgccccgtgcttcaacatcaaaagaggttgatgctagtctactctcagtggtttccttccctgcctttgcagtagaggatagccagttggtggagctcacaaaacaggaaatcatcaccaagcttcagggtcgttatggttgctgtcgctttctacgagatggatataaaactcctaaagaggatcccaatcgtctgtactatgaaccagctgagctgaagctatttgaaaacattgagtgtgaatggccattgttctggacatactttattcttgatggggtcttcagtggcaatgcagaacaggttcaagaatataaagaggctcttgaagcagtcctcatcaagggcaaaaatggagtcccacttctgccagagctgtacagtgttcctcctgacagggtcgatgaagaatatcagaatcctcacactgtggaccgagtccccatggggaaattgcctcacatgtggggtcagtctctatacattttaggaagcttgatggcagagggatttttagcccctggagaaattgatcccctgaatcgcaggttttctactgtaccgaagcccgatgttgtggttcaagtctccattctagctgaaacagaagaaatcaagaccattttgaaggacaagggaatttacgtggagaccattgctgaggtataccccatcagagtacaaccagctcgtattctcagccacatttattccagcctaggatgcaacaatagaatgaaactcagtggacgaccctacagacacatgggagtgcttggaacttcaaaactctatgacattcggaaaactatctttactttcactccacagtttatagaccagcaacagttctacctggctctggacaacaagatgatagtggaaatgcttagaacagacctctcctacctctgtagccgctggcggatgacaggccagcccaccatcaccttccccatctcacacagcatgcttgatgaagatggaacaagcttgaattcaagtatcctggcagcactccgaaaaatgcaagatgggtattttggtggggcaagggttcaaacaggtaaattgtcagagtttttgacaacatcttgttgcacacacttgagcttcatggaccctggacctgagggtaagctgtacagtgaagattatgatgacaactatgattacctggaatctggcaactggatgaatgattatgattcaaccagtcatgctcgctgtggtgatgaagttgctcgttatttagatcaccttttggcgcacactgctccccatcctaaactagcccctacctcacagaagggagggctagatcggttccaagctgctgtgcaaacaacctgcgacttaatgtccttggtgaccaaggccaaggaactgcatgtacagaatgttcacatgtatcttcctacgaagttatttcaggcttcccggccttcattcaacttacttgattcacctcatccccgacaggagaaccaggttccctctgttcgtgtagaaatacatcttcctagagaccagtctggggaggtggactttaaagcactggttttacagttgaaggagacctcaagcttacaggaacaagctgatatcctctatatgctgtatactatgaaaggacctgactggaacactgaattgtataatgaacggagtgctacagtgagagagcttcttaccgagctgtatggcaaagtgggagaaattcgtcactggggcctgatccgatacatttctgggatcttaaggaagaaagtggaagcacttgatgaggcctgcacagaccttctctcccaccagaaacatttgacagtaggacttcctccagaacctcgagaaaagactatctctgcacctctgccctatgaggcgctcactcagctgatagatgaagccagtgaaggggatatgagcatttcaatccttacacaggaaataatggtatatctagccatgtatatgcgaacccagcctggcctctttgctgaaatgtttcgacttcgaattggtctgatcatacaagttatggcaacagaactggcccactcccttcgatgctcagctgaggaagccacagagggcctgatgaatctcagtccttcggccatgaagaatctcctgcatcacattctcagcggcaaggagtttggagtggaacgaagcgttcgtcccactgattcaaatgtcagtcctgctatttctatccacgagattggtgctgttggagcaaccaaaacagaacgaactgggatcatgcagttaaaaagtgagataaagcagtcacctggaacctctatgactccaagtagtgggtcctttcctagtgcatatgatcagcagtcatctaaagatagtcgtcaaggtcaatggcaacgccgaagaaggctggatggggcactgaatagagttccagttggattttatcagaaagtatggaaagttttgcagaagtgtcacggactttctgttgaagggtttgtccttccttcctctaccactagagagatgactccaggtgagattaaattctctgttcatgtggagtctgtcctgaatcgtgtacctcagccagagtaccgtcagctgctggttgaagccatccttgtcctcaccatgctggcagatattgaaattcatagcatcggaagcatcattgctgtggaaaaaatagtgcatattgccaatgacttgttccttcaagaacagaaaacccttggcgcagatgataccatgttggcaaaggatcccgcatctggcatctgtactcttctgtatgacagtgcacccagtggcaggtttggcaccatgacctacctctccaaggcagccgccacctacgtgcaggagttcctgccccacagcatctgtgccatgcaatgagggctttggttcctggcttctgggagccttttgacagctggtccctgcctcggttgattgtgcatggaactaaaatgttattgcctaatcactccaaccctgcccctttctgtcccatccttcccaagaagagagaactttttcgataaactaactactgtagaagaagtgaacacttacctggaggctcaccttgcagaaccagtgacaatcttatgagtataatgaacactcagccaggcctgtcatgattggctttatttctttcatcattcataaaagtttgcatgtgtttttattctctagatctgttaccaatatagttttctaactcctgtttggggagcaagtgttaataataacttattcctaaagcttggtttttcttttttgtgattttattgtgtatatgagtggtgggtactttgggacattatttcaaatgagtaaactctaaattgttaaatatttatgctgctataaattagaattacctattctacgtgccttttcttaggaaaagagagtactggatcatggttttcttccttacttacaggttgcttcacactgagtgataatttaaaattgtttctatgtagaatcattgtctctactgttgccctctctgtgtctgcacacataatgcctctctcactttggtgaaatatcaaaaaaatgcaagtacagcatgcatatttaagaatttctgaactaacacttgaaatcacattttataaagattgttggtactcagagttgtatttgcagcagaaaatgcagaataacccagaaatggagcccggagcccaattccagagaggaagggaaagaagagacgatgcctggacaatgtcttatacatagggaacagagagggaatcagaggtggcttagttccctgaagacagccttatgcgcttaatccctgcctttgaaaaatgggccaatacacaacacagacaataatttgaagcgtctgtattcagcaaagataaatacagcagtccagtctataggtgctctacttagcattcttttcatgtgctcctggtctctgtctcactcacctactttctactacatccaactcaactccctgacaccctatccccccatctattcttaaactctttcatatatattttcacttcctaattctagtgtacatatccctgtatatcatggtatctgtgggcatatgtctgtttcttataaagacacatatttgtgtgtgtatgtgtgtgtgtgtgtgtgtgtgtgtataagcatacatgggaatttttctgaatgtaagcagttttgatgtgtctgtatatcaatctgtatctacatttgatggactgagtaagaatgttgcatgtgagagaagggatgtgactgtggactcagattgacacacacagattggtggaagaatagcttcagtcctcttccttcatcccatatgtaggtagccttgcttgacaaatgtttcttctaactctccttcttctgaattgtgcagagactctgttaacttccctttttgcacttagataacttcctacttcaaccccctcctttatcttggatttctaaagtttttccccaatattgggaatggtgagggtggggatgagagactctctgaacaattcttgcagaaccagtgacaatcttatgaatataatgaataagtaagcatatagtagggtgatagaatacagatagtagaaacaaagagaggacagcaaaccttttcagcacttctctcagagcaaatggaaacacacagtaagtagctttctgactacattattttctggtcacttttaaagaaagtttacaacctgttctgaaactatttgtcttttcactggttgtaagtgtaccccaatctcagggagtatatctgtagtgccacaggcaaaagatccactccttcccacactcatttgcctgaacttactcgaagggctgcatttctctgagtttacgaaattgtgtcattatggtccccatacagtggtatttaacttttaaagcaacttttaagaaaactcgacttgttttttgttcattttaagtgtgtggtactaaaaagacatgttagactttttttaaaaaagcacttatgttttgaaaatagaataaataataagaatttccaattaaatcatgtctggtgccaatgtgcaaaacttc

SEQ ID NO: 15520 - DNA, 5944 bp, Homo sapiens
  source 1..5944: mol_type = unassigned DNA
cacgcggaggccggactggactaagggggcaggagcggcgcctggggcgctgcggcggggctctagaccgcgggaagccagtgctagcgctggcgcgtggtgggcccctgaggccgccggagtccggagaggtacgcggaatccgcggcgccaggcctgagcggtgggagggctctgcggggcctggtgttcaggcgtcccaccacgagggtggagcagcgttggatacttgttccttagggaccgaaggctccggtggcacccgggctatttctcagaggacaattagtaacgtgtcgccatgaggagccggagtaactccggggtccggctggacggctacgctcgactggtgcaacagaccatcctgtgccatcagaatccagtgactggcttgcttccagccagctatgatcagaaagatgcttgggtccgagataatgtgtacagcatcttggctgtgtggggtttgggcctggcctatcggaagaatgcagaccgggatgaggataaggcaaaggcctatgaattggagcagagtgtagtgaagctgatgagaggactactgcactgcatgatcagacaggtggataaagtagaatccttcaaatatagtcagagtactaaggatagcctccatgcaaagtacaacaccaaaacctgtgccactgtagtgggtgatgatcaatggggacacctgcagttggatgctacctctgtgtacctgctcttcttagcccaaatgactgcctcaggactccatatcatccacagcctagatgaagtcaatttcatacagaaccttgtgttttacattgaagctgcatataaaactgctgacttcgggatatgggaacgtggagacaagaccaaccaagggatctcagagttgaatgccagttcagttggaatggcaaaggcagccctggaagcattagatgaactggatctgtttggtgtgaaaggtgggcctcaatcagttatccatgtcctggctgatgaagtacagcactgccagtctatcctaaattcactactgccccgtgcttcaacatcaaaagaggttgatgctagtctactctcagtggtttccttccctgcctttgcagtagaggatagccagttggtggagctcacaaaacaggaaatcatcaccaagcttcagggtcgttatggttgctgtcgctttctacgagatggatataaaactcctaaagaggatcccaatcgtctgtactatgaaccagctgagctgaagctatttgaaaacattgagtgtgaatggccattgttctggacatactttattcttgatggggtcttcagtggcaatgcagaacaggttcaagaatataaagaggctcttgaagcagtcctcatcaagggcaaaaatggagtcccacttctgccagagctgtacagtgttcctcctgacagggtcgatgaagaatatcagaatcctcacactgtggaccgagtccccatggggaaattgcctcacatgtggggtcagtctctatacattttaggaagcttgatggcagagggatttttagcccctggagaaattgatcccctgaatcgcaggttttctactgtaccgaagcccgatgttgtggttcaagtctccattctagctgaaacagaagaaatcaagaccattttgaaggacaagggaatttacgtggagaccattgctgaggtataccccatcagagtacaaccagctcgtattctcagccacatttattccagcctaggatgcaacaatagaatgaaactcagtggacgaccctacagacacatgggagtgcttggaacttcaaaactctatgacattcggaaaactatctttactttcactccacagtttatagaccagcaacagttctacctggctctggacaacaagatgatagtggaaatgcttagaacagacctctcctacctctgtagccgctggcggatgacaggccagcccaccatcaccttccccatctcacacagcatgcttgatgaagatggaacaagcttgaattcaagtatcctggcagcactccgaaaaatgcaagatgggtattttggtggggcaagggttcaaacaggtaaattgtcagagtttttgacaacatcttgttgcacacacttgagcttcatggaccctggacctgagggtaagctgtacagtgaagattatgatgacaactatgattacctggaatctggcaactggatgaatgattatgattcaaccagtcatgatgttcacatgtatcttcctacgaagttatttcaggcttcccggccttcattcaacttacttgattcacctcatccccgacaggagaaccaggttccctctgttcgtgtagaaatacatcttcctagagaccagtctggggaggtggactttaaagcactggttttacagttgaaggagacctcaagcttacaggaacaagctgatatcctctatatgctgtatactatgaaaggacctgactggaacactgaattgtataatgaacggagtgctacagtgagagagcttcttaccgagctgtatggcaaagtgggagaaattcgtcactggggcctgatccgatacatttctgggatcttaaggaagaaagtggaagcacttgatgaggcctgcacagaccttctctcccaccagaaacatttgacagtaggacttcctccagaacctcgagaaaagactatctctgcacctctgccctatgaggcgctcactcagctgatagatgaagccagtgaaggggatatgagcatttcaatccttacacaggaaataatggtatatctagccatgtatatgcgaacccagcctggcctctttgctgaaatgtttcgacttcgaattggtctgatcatacaagttatggcaacagaactggcccactcccttcgatgctcagctgaggaagccacagagggcctgatgaatctcagtccttcggccatgaagaatctcctgcatcacattctcagcggcaaggagtttggagtggaacgaagcgttcgtcccactgattcaaatgtcagtcctgctatttctatccacgagattggtgctgttggagcaaccaaaacagaacgaactgggatcatgcagttaaaaagtgagataaagcagtcacctggaacctctatgactccaagtagtgggtcctttcctagtgcatatgatcagcagtcatctaaagatagtcgtcaaggtcaatggcaacgccgaagaaggctggatggggcactgaatagagttccagttggattttatcagaaagtatggaaagttttgcagaagtgtcacggactttctgttgaagggtttgtccttccttcctctaccactagagagatgactccaggtgagattaaattctctgttcatgtggagtctgtcctgaatcgtgtacctcagccagagtaccgtcagctgctggttgaagccatccttgtcctcaccatgctggcagatattgaaattcatagcatcggaagcatcattgctgtggaaaaaatagtgcatattgccaatgacttgttccttcaagaacagaaaacccttggcgcagatgataccatgttggcaaaggatcccgcatctggcatctgtactcttctgtatgacagtgcacccagtggcaggtttggcaccatgacctacctctccaaggcagccgccacctacgtgcaggagttcctgccccacagcatctgtgccatgcaatgagggctttggttcctggcttctgggagccttttgacagctggtccctgcctcggttgattgtgcatggaactaaaatgttattgcctaatcactccaaccctgcccctttctgtcccatccttcccaagaagagagaactttttcgataaactaactactgtagaagaagtgaacacttacctggaggctcaccttgcagaaccagtgacaatcttatgagtataatgaacactcagccaggcctgtcatgattggctttatttctttcatcattcataaaagtttgcatgtgtttttattctctagatctgttaccaatatagttttctaactcctgtttggggagcaagtgttaataataacttattcctaaagcttggtttttcttttttgtgattttattgtgtatatgagtggtgggtactttgggacattatttcaaatgagtaaactctaaattgttaaatatttatgctgctataaattagaattacctattctacgtgccttttcttaggaaaagagagtactggatcatggttttcttccttacttacaggttgcttcacactgagtgataatttaaaattgtttctatgtagaatcattgtctctactgttgccctctctgtgtctgcacacataatgcctctctcactttggtgaaatatcaaaaaaatgcaagtacagcatgcatatttaagaatttctgaactaacacttgaaatcacattttataaagattgttggtactcagagttgtatttgcagcagaaaatgcagaataacccagaaatggagcccggagcccaattccagagaggaagggaaagaagagacgatgcctggacaatgtcttatacatagggaacagagagggaatcagaggtggcttagttccctgaagacagccttatgcgcttaatccctgcctttgaaaaatgggccaatacacaacacagacaataatttgaagcgtctgtattcagcaaagataaatacagcagtccagtctataggtgctctacttagcattcttttcatgtgctcctggtctctgtctcactcacctactttctactacatccaactcaactccctgacaccctatccccccatctattcttaaactctttcatatatattttcacttcctaattctagtgtacatatccctgtatatcatggtatctgtgggcatatgtctgtttcttataaagacacatatttgtgtgtgtatgtgtgtgtgtgtgtgtgtgtgtgtataagcatacatgggaatttttctgaatgtaagcagttttgatgtgtctgtatatcaatctgtatctacatttgatggactgagtaagaatgttgcatgtgagagaagggatgtgactgtggactcagattgacacacacagattggtggaagaatagcttcagtcctcttccttcatcccatatgtaggtagccttgcttgacaaatgtttcttctaactctccttcttctgaattgtgcagagactctgttaacttccctttttgcacttagataacttcctacttcaaccccctcctttatcttggatttctaaagtttttccccaatattgggaatggtgagggtggggatgagagactctctgaacaattcttgcagaaccagtgacaatcttatgaatataatgaataagtaagcatatagtagggtgatagaatacagatagtagaaacaaagagaggacagcaaaccttttcagcacttctctcagagcaaatggaaacacacagtaagtagctttctgactacattattttctggtcacttttaaagaaagtttacaacctgttctgaaactatttgtcttttcactggttgtaagtgtaccccaatctcagggagtatatctgtagtgccacaggcaaaagatccactccttcccacactcatttgcctgaacttactcgaagggctgcatttctctgagtttacgaaattgtgtcattatggtccccatacagtggtatttaacttttaaagcaacttttaagaaaactcgacttgttttttgttcattttaagtgtgtggtactaaaaagacatgttagactttttttaaaaaagcacttatgttttgaaaatagaataaataataagaatttccaattaaatcatgtctggtgccaatgtgcaaaacttc

SEQ ID NO: 15521 - DNA, 5559 bp, Homo sapiens
  source 1..5559: mol_type = unassigned DNA
cggagggcgggtccaaggcgcccaggtggccgcggcagaagggcctgtttctctggccttggctgtggttggcagccggccggggagagaagggactcagggaggcaacctggttcccgcccgttgctgatttcgcagcggctctcccgggccgcccccttttccttcctcctcaggccgcgacttggagggttccgctccgcggcgggggcagagccaggggcggggctgagcgcggcctgggcgatctccccggcggctggggtgggctggcgtcttcttcgcgcccgggggacctcctcgcgaccgccgggacgtaaaaggggcttggcaggggcgtcctcgccccactcccggaacctggtttcccgctgctcccgcgagcgtcgggagcccagcaggcctggccgaggcgggaccttcgtcgctccagcccccgtccccgcccccgcgcctccccgccgcgcggagctctggttggcttgctttccaaccggactttggggctagcgtttagaaaagtctcgacctcctccggcccggtcccatcccaagaaccgactaaggctgtgagtgtccgggaaccagacccgcttggaggccacagccccgacgtcccgcgcccacgcggcagatcgggcgctgcggcctgggagcctcggggagatgcggagcaggagcaattccggggtccgcttggacgggtacgcgcggctggtgcagcaaaccatcctgtgttaccagaatcccgtcacggggctgctgtcagccagccatgagcagaaggatgcctgggtgcgggataacatctacagtatcctggccgtgtggggcctgggcatggcctaccgtaagaatgcagaccgcgatgaggacaaggccaaggcctacgagctggagcagaacgtggtgaagctgatgcgaggtcttctccagtgcatgatgagacaggtggccaaagtggagaagttcaaacacactcagagcaccaaggacagcctgcacgccaagtacaacaccgccacctgtggcacggtggtgggcgacgaccagtggggccacctccaggtggatgccacctctctcttcctcctgttcctggcccagatgaccgcctcaggcttacgtatcattttcactctcgatgaggtggccttcatacagaatcttgtcttttacatagaagctgcatataaagtcgctgattatggaatgtgggagcgtggagataagactaatcagggcatcccggaattgaatgcaagctccgtaggaatggccaaggcagctcttgaggcaattgatgaactggacctttttggagcccatggaggacgcaagtcagtgattcatgttctgccagatgaggtcgagcactgccagtctattctgttctccatgctgccaagagcgtcgacatctaaagaaattgatgctggacttctttccattatttccttcccggcctttgcagtggaagatgtaaaccttgtaaatgtgaccaaaaatgaaattatttctaagctccaggggcgttatggatgctgtcgcttccttcgagatggttataaaactccaagagaggaccctaatcgactgcattatgaccctgctgaactcaagctcttcgaaaacattgaatgtgagtggcctgtgttttggacatattttataatagatggagtcttcagtggtgatgctgttcaggtccaagaataccgagaggccctggagggaatactcatcagaggcaagaatgggatccgcctggtgcctgaactctacgctgtcccgcctaacaaggtagatgaagagtacaagaatcctcacacagtagaccgagttcctatggggaaggtgcctcatctgtggggccaatccttgtacatcctcagctcgctgttggcagagggattccttgccgctggtgaaatcgatcccttaaatagaagattttccacttcagtcaaacctgatgttgtagtacaagttactgttttggcagaaaacaatcacattaaggacttattgaggaaacacggggtgaacgtccagagtatcgcggacattcatccaattcaagtccagccgggccggattcttagtcacatatatgccaagcttggacggaataagaatatgaatttgagtgggcgaccgtatcgacatattggtgtccttggaacctctaaactatatgtgattaggaaccaaatctttacttttacaccccagttcaccgaccagcatcacttctacctggccctcgacaatgagatgatcgtggagatgctaaggatcgagctggcctacctgtgcacctgctggaggatgacgggcagacccacactcaccttccccatcagtcgcaccatgctcacaaatgatggctcagacattcattctgctgtgctctccacaattagaaaactagaggatggatattttggaggagccagagtaaaattagggaacctttcggaatttctcaccacatcgttctacacatatctgacttttctggatccagactgtgatgagaagttgtttgacaatgccagcgaagggactttcagtcctgatagtgattcagatttggtaggatatctggaagacacctgtaatcaagaaagccaagacgaacttgaccattatatcaaccaccttctgcaaagcacatcgttgaggtcctatctgcctcctctttgtaagaacacagaagaccgccatgtcttcagtgctatccactccacgcgggacatactttctgtgatggcaaaagcaaagggtttggaagttccatttgttcccatgactttgccgactaaagttctaagtgcccaccgtaaatcactgaatcttgttgattctcctcagccactcctagaaaaggttcctgaaagtgactttcagtggcccagagatgaccatggtgacgtggactgtgagaagctggttgagcagctaaaagattgttcgaacctacaggaccaagcagacattctgtacattctttatgtcataaagggtcccagctgggacacaaatctctctggacagcacggggtcaccgttcaaaaccttcttggtgagctctatgggaaagccggcttgaaccaggagtggggtctgattcgctacatctcaggccttctcaggaagaaagtggaggtcctggctgaggcctgcacagacctgctttcgcaccagaagcagctcaccgtgggcctgccgcccgagccccgggagaagatcatctctgcgccccttcccccagaggagctcacaaaactcatctacgaggccagtgggcaggacatcagcattgccgtcctcacgcaggagattgtggtttacctggccatgtatgtcagggcgcagcccagcctctttgtggagatgctgagactccggattggactgatcattcaggtgatggccacggagctggcacggagcctgaactgctcaggagaagaggcttctgaaagtttgatgaacctcagccctttcgatatgaaaaatctcctgcaccatattctaagtgggaaagagtttggcgttgaaagaagtgtgcgccctatccactcctccacatccagccctaccatctccatccacgaggtgggccataccggagtcaccaaaactgagaggagtggcattaacagactgaggagtgaaatgaaacagatgactaggcggtttagtgctgatgaacagttcttttctgtgggccaggccgcgtccagcagtgcgcattcctccaagtctgcgaggtccagcaccccatcctcgcccactggcacgtcatcctcagactcgggaggacatcacatcggctggggtgagcggcagggccagtggctgcgcaggagaaggctggatggggccatcaacagggtccccgtgggattctaccagagggtgtggaagatcctccagaagtgccacggtctctccatcgatggttatgtcctcccatcctcgacgacccgagagatgaccccgcatgagatcaagtttgctgtccatgtcgaatcggtgctgaaccgcgtgccgcagcccgagtaccggcagctgctggtggaagccatcatggtgctgacgctgctctcggacacggagatgaccagcatcgggggcatcatccacgtggaccagatcgtgcagatggccagtcagctgttcttgcaggaccaggtgtcaattggtgccatggacaccctggagaaagaccaagccacaggaatctgccacttcttttatgacagcgctccgagtggggcttatgggacgatgacctacctaacaagagcagtggcttcttatttgcaggaattgttgcccaattcgggctgccagatgcaatagggtctcacctggaaacatgatcacactctcaatctgtcacgtgccccctagccttactgggaaccttctgtcccccaagatcccctgtgctatcaggaaagcatgtcccatcagaaacactctcggggggcaatggtagcactcaccctgaaactgatgtatgttaaagccacagagatagagctgaggagtcctgtgttcccccgcaaggagcaccccgggatcattttctaggttcatttctctggaacatttgctgtagcatctggtctcacggactctgaggaggaattggaaattggtctcttttgagtgcagagggaactgagacgccagcttaaattggctcttgcagagagttacagaaatagtttcgatgagctagtgacacatcctaaagatgcaaagatcctcctggcggcagtagccttgacaagggccacctcttcacaggatgcagtctgtctgtgcaccaaactcttcaccaaatagaacacttgtgtctctctgtggaatgggggttttcttgtgccttgcttgctttcatagccttccattttattggcatggctgccttgatgtaacataattctctgtccccaagatttagaaaattcctcttcgttcaccttggctcatggtcttccagggtttttatcctggctgtctatgaactagggttttctcctgccttaggaaaaatactgcatcttctggaatctagaaaaaaaaaaaaaaaaagacaaggctcctcttatagccaggcaagcagttgtttagggctagacctgttgtccccgctcgcgtggggtgaacgccccgcagtggatactgtcctcctgtgctctgggcgaggcgtcatagggtgagcacaagtcagcagtgccatggaagtgaacaggcatgtccccgcagaaacaatgcttccctctgaaaaatagagccaggctaggaacctgtaccctcttggtagaagcactttggtcttcactctcttgggtgggtgcagttggaggcaccgattggaggagagcaaggttgagtcaggtgtcagggtctggcaaatcttttgccaatgccctagcaatggagtttctctccgggcattgtcttaccttgggggaaggaaacaaaaccaatgggaaaacagtttctgtaaataataaaccttgaaagacaaatgct

SEQ ID NO: 15522 - DNA, 3115 bp, Homo sapiens
  source 1..3115: mol_type = unassigned DNA
caggagtagtgtccctgctgttcagcgatgtgactgagccccaccctcccagggtacctgccgtgttcagtcccaaggtgtacagaggtggagagcttccagtttagccccaggtcctgtgtgccctgaaggcacaatctccctcacaccctggggccccactcccctcagccagccggctgttgcgcttcccatctgcctggggccgttcacgtctccccagctgttgtccctgggaactgtggtgcctgtacctgagcacaggagcacctccctgagcgcctgttgtcaaggaggggggcagcattctctgtacccccccagtgtctcccttctgcatcagcccgagagagtttatgcagctccctgggctgcaccaggccctccctgtcttttcccttgaatggaaggacagtgtgcctcgcttaaaagctgtgcaaaccaagacatttttttccccccagaactattttttagttcatttcacagtgggagagaagagaaaaaataatcccagtgacagcatacaacagcccccttcccaaagccatggcaccacttgctcaaggttctttctgtaacaggggcccctgtgcttcatgggccccaaggtattcctcacggccaccgcagagggatgtgaggaggtcggagcaggccctgcccgagcagctggactcctgggacccaggcaggatcctgcaggggctcatggtgcttgctccacttcccgcctctcttaagggggtgggagtgtccactgctgttctgccctcagcccactggggacgctccaggccggggtgctgggatttagaaggtggccagttagactagaacaagctgttcctagaaaatttccccactcttcctggggcatcacatgcttccgctcggactcactggcgcaataccaagatatttctattatgaaaaagcattttgtgttgagctggcactcgatatttatatacatgggtgtgcatgtgcatgtctgtgcatgtgctggaggcttttgtgattggtgcttattatagaaatctcaaaaatagatgcctgcaaaggcacagaagcatcccttccccagcaggagccatgaaaatccccctttattatggcaccaaaggggcctcgcagccgcccgggcccagttgccaagtacaatgcggagcctcccgggaggactcggcagccccctagggcattgttcgggggagatctgaaagatgcctgctgggttccctagaattgttccatcgaaaacacagcctgtgggcagtgagaacaagctctctaaaaataactctgacagtctggcgtgtcccagccctcatatgggtttccagggcagagggtgctgtgtgtgcatgcacgcctgtgtgtgcatgcatgtgcttatcccattctggaatctgactgaaatgcgctctattctgcctccagtgccacggtctctccatcgatggttatgtcctcccatcctcgacgacccgagaggtacgatgagaaaaacgcagaggcgggcccctctgtgggttcacaataagggcttcattgcatggactctgacctcttgtgctccttttgggctcattctaattgacaggccatttgtagctctgagctgtctagccccttcaccctcatatttggcaaaaatgtctttccagcatttattggcatcagcctttttcttcacctgagactcagcatttctgggctagcaagctctttgcatttgccagacaccccttagaaccctggtgaaagaaaggagccaatctccatgccaccctggcctgccccatgggcagccttctcggcccttttctccaactaaaaacagtaatcgtccctaggtgatttgtcattctttttaacatggatttttttttagttttaccccacccaaagcaccatgcttcatgctggaaggaataatgaagaggaaagagaaaccagaaatggtccctgctccctggaagctgtagtcgatggggggaagggtagataaatcaggcgaggacaggctggctcctggaggcatactccagcctcctgctctgagggccactgccagcaggatccagggagtggccagaaaaggggcagcagtggcgctgagccccgagcccaggcactgctacggtcacccttggttactcggtgattgattgatagggctgcatctgtcctctcactggtggttgcctgcctgtccctttggtagatgaccccgcatgagatcaagtttgctgtccatgtcgaatcggtgctgaaccgcgtgccgcagcccgagtaccggcagctgctggtggaagccatcatggtgctgacgctgctctcggacacggagatgaccagcatcgggggcatcatccacgtggaccagatcgtgcagatggccagtcagctgttcttgcaggaccaggtgtcaattggtgccatggacaccctggagaaagaccaagccacaggaatctgccacttcttttatgacagcgctccgagtggggcttatgggacgatgacctacctaacaagagcagtggcttcttatttgcaggaattgttgcccaattcgggctgccagatgcaatagggtctcacctggaaacatgatcacactctcaatctgtcacgtgccccctagccttactgggaaccttctgtcccccaagatcccctgtgctatcaggaaagcatgtcccatcagaaacactctcggggggcaatggtagcactcaccctgaaactgatgtatgttaaagccacagagatagagctgaggagtcctgtgttcccccgcaaggagcaccccgggatcattttctaggttcatttctctggaacatttgctgtagcatctggtctcacggactctgaggaggaattggaaattggtctcttttgagtgcagagggaactgagacgccagcttaaattggctcttgcagagagttacagaaatagtttcgatgagctagtgacacatcctaaagatgcaaagatcctcctggcggcagtagccttgacaagggccacctcttcacaggatgcagtctgtctgtgcaccaaactcttcaccaaatagaacacttgtgtctctctgtgg

SEQ ID NO: 15523 - DNA, 1945 bp, Homo sapiens
  source 1..1945: mol_type = unassigned DNA
ttaagataaagcccagtgccaagaatagggaaagccggaaatgggattgcaaagggtgggtggatggaccctgatctgcgaggtcctcgccactaaacgcgggcttcactgtttgtcttcccccgtgtcatgtattgccttctctgtggttcctgtcctgtggaaacgtgtctgtcacttctctgtggcactgcagcaatgaagtgggcactatggagtttgtctccctgagccatggatgcctgctccgagggcccgttgtcaccctcaaagctctcccactgcagtggcacaggcgccacgtgcgggtgacagctgcccctcatgggcacttagcgcacactaggtatgcctcaggggcttctgtgtctccacgtggtgaaggcttccgggcagctctttataggatgcctgactgtgtccccactgtgcagatgagactgaggcccagaatcagtgttcatggcagggccagacggcctcgggtgtgtccttggcaccgctggcattgagtggggattagcactccggcagtctgacccccaagcccgtgctcgccctgttcggcctcctccttatgggttctagctttgggggtgggactgcctctcggggggcagggcagagtgcaacatggaatgaagtgatcaacccaaagtatgcgagtcatctcacatgaggaaacagacaaggtggactggaggaaccgtgttcctctctggcgagtggtgttctggcatttgtgcctaggtcgcagggccgcccttcgagatggcgcactttccctggggcacctgctgcgtggcttctgaggccccaagctgtctgtcttgcagaggtccagcaccccatcctcgcccactggcacgtcatcctcagactcgggaggacatcacatcggctggggtgagcggcagggccagtggctgcgcaggagaaggctggatggggccatcaacagggtccccgtgggattctaccagagggtgtggaagatcctccagaagtgccacggtctctccatcgatggttatgtcctcccatcctcgacgacccgagagatgaccccgcatgagatcaagtttgctgtccatgtcgaatcggtgctgaaccgcgtgccgcagcccgagtaccggcagctgctggtggaagccatcatggtgctgacgctgctctcggacacggagatgaccagcatcgggggcatcatccacgtggaccagatcgtgcagatggccagtcagctgttcttgcaggaccaggtgtcaattggtgccatggacaccctggagaaagaccaagccacaggaatctgccacttcttttatgacagcgctccgagtggggcttatgggacgatgacctacctaacaagagcagtggcttcttatttgcaggaattgttgcccaattcgggctgccagatgcaatagggtctcacctggaaacatgatcacactctcaatctgtcacgtgccccctagccttactgggaaccttctgtcccccaagatcccctgtgctatcaggaaagcatgtcccatcagaaacactctcggggggcaatggtagcactcaccctgaaactgatgtatgttaaagccacagagatagagctgaggagtcctgtgttcccccgcaaggagcaccccgggatcattttctaggttcatttctctggaacatttgctgtagcatctggtctcacggactctgaggaggaattggaaattggtctcttttgagtgcagagggaactgagacgccagcttaaattggctcttgcagagagttacagaaatagtttcgatgagctagtgacacatcctaaagatgcaaagatcctcctggcggcagtagccttgacaagggccacctcttcacaggatgcagtctgtctgtgcaccaaactcttcaccaaatagaacacttgtgtctctctgtg

SEQ ID NO: 15524 - DNA, 514 bp, Homo sapiens
  source 1..514: mol_type = unassigned DNA
tgcttatcccattctggaatctgactgaaatgcgctctattctgcctccagtgccacggtctctccatcgatggttatgtcctcccatcctcgacgacccgagagatgaccccgcatgagatcaagtttgctgtccatgtcgaatcggtgctgaaccgcgtgccgcagcccgagtaccggcagctgctggtggaagccatcatggtgctgacgctgctctcggacacggagatgaccagcatcgggggcatcatccacgtggaccagatcgtgcagatggccagtcagctgttcttgcaggaccaggtgtcaattggtgccatggacaccctggagaaagaccaagccacaggaatctgccacttcttttatgacagcgctccgagtggggcttatgggacgatgacctacctaacaagagcagtggcttcttatttgcaggaattgttgcccaattcgggctgccagatgcaatagggtctcacctggaaacatgatcacactctcaatctgt

SEQ ID NO: 15525 - DNA, 751 bp, Homo sapiens
  source 1..751: mol_type = unassigned DNA
tgcgccctatccactcctccacatccagccctaccatctccatccacgaggtgggccataccggagtcaccaaaactgagaggagtggcattaacagactgaggagtgaaatgaaacagatgactaggcggtttagtgctgatgaacagttcttttctgtgggccaggccgcgtccagcagtgcgcattcctccaagtctgcgaggtccagcaccccatcctcgcccactggcacgtcatcctcagactcgggaggacatcacatcggctggggtgagcggcagggccagtggctgcgcaggagaaggctggatggggccatcaacagggtccccgtgggattctaccagagggtgtggaagatcctccagaagtgccacggtctctccatcgatggttatgtcctcccatcctcgacgacccgagagatgaccccgcatgagatcaagtttgctgtccatgtcgaatcggtgctgaaccgcgtgccgcagcccgagtaccggcagctgctggtggaagccatcatggtgctgacgctgctctcggacacggagatgaccagcatcgggggcatcatccacgtggaccagatcgtgcagatggccagtcagctgttcttgcaggaccaggtgggggtgccagggagctgggttggctggcatttatctctgttgaggctggagattctgtgtccaataggaaagaatatactcgaaccaagaaaatgtcatcacagatgatggggaaaaaa

SEQ ID NO: 15526 - DNA, 728 bp, Homo sapiens
  source 1..728: mol_type = unassigned DNA
agaggagctcacaaaactcatctacgaggccagtgggcaggacatcagcattgccgtcctcacgcaggagattgtggtttacctggccatgtatgtcagggcgcagcccagcctctttgtggagatgctgagactccggattggactgatcattcaggtgatggccacggagctggcacggagcctgaactgctcaggagaagaggcttctgaaagtttgatgaacctcagccctttcgatatgaaaaatctcctgcaccatattctaagtgggaaagagtttggcgttgaaagaagtgatacgaggtctcaccatgctgcccaggctggtcttgaactcctgggctcaagcagtcttcccacctcggcctcccaaagtgctgggattacagtgcgccctatccactcctccacatccagccctaccatctccatccacgaggtgggccataccggagtcaccaaaactgagaggagtggcattaacagactgaggagtgaaatgaaacagaggtccagcaccccatcctcgcccactggcacgtcatcctcagactcgggaggacatcacatcggctggggtgagcggcagggccagtggctgcgcaggagaaggctggatggggccatcaacagggtccccgtgggattctaccagagggtgtggaagatcctccagaagtgccacggtctctccatcgatggttatgtcctcccatcctcgacga

SEQ ID NO: 15527 - DNA, 317 bp, Homo sapiens
  source 1..317: mol_type = unassigned DNA
atgaaaaatctcctgcaccatattctaagtgggaaagagtttggcgttgaaagaagtgatacgaggtctcaccatgctgcccaggctggtcttgaactcctgggctcaagcagtcttcccacctcggcctcccaaagtgctgggattacaggtgtgagccaccgtgcctggcctcggtgcgccctatccactcctccacatccagccctaccatctccatccacgaggtgggccataccggagtcaccaaaactgagaggagtggcattaacagactgaggagtgaaatgaaacagatgactaggcggtttagtgct

SEQ ID NO: 15528 - DNA, 500 bp, Homo sapiens
  source 1..500: mol_type = unassigned DNA
attcttagtcacatatatgccaagcttggacggaataagaatatgaatttgagtgggcgaccgtatcgacatattggtgtccttggaacctctaaactatatgtgattaggaaccaaatctttacttttacaccccagttcaccgaccagcatcacttctacctggccctcgacaatgagatgatcgtggagatgctaaggatcgagctggcctacctgtgcacctgctggaggatgacgggcagacccacactcaccttccccatcagtcgcaccatgctcagtaactccagggatttcagcaggctccctcctgccccaggggtggtttgggctcttacaaatgtttaaaatggctcccatggccagaactaagcactgaaggggcttcttagcagtttggtttcttatctcgggaatcttctatgccagaaatattttaattagatggtgttgatgaaaatgtttcagtgcataacggaaaaaaagtctgcccagac

SEQ ID NO: 15529 - DNA, 1431 bp, Homo sapiens
  source 1..1431: mol_type = unassigned DNA
acgttagcctccggtcatcaaatagcaaaacccaaaacaacagcagatgatatcttccaagtgtctgctcgggacacggcttcagccctctgtggtcccctctccccggggggctttgggattcttgtcaagctccttcaagagcctgcaagcacttaaccagccacccagagttccctcactgaagatctgagcatgacccgggacgaggcactgccggactctcattctgcacaggacttctatgagaattatgagcccaaagagatcctgggcaggggcgttagcagtgtggtcaggcgatgcatccacaagcccacgagccaggagtacgccgtgaaggtcatcgacgtcaccggtggaggcagcttcagcccggaggaggtgcgggagctgcgagaagccacgctgaaggaggtggacatcctgcgcaaggtctcagggcaccccaacatcatacagctgaaggacacttatgagaccaacactttcttcttcttggtgtttgacctgatgaagagaggggagctctttgactacctcactgagaaggtcaccttgagtgagaaggaaaccagaaagatcatgcgagctctgctggaggtgatctgcaccttgcacaaactcaacatcgtgcaccgggacctgaagcccgagaacattctcttggatgacaacatgaacatcaagctcacagactttggcttttcctgccagctggagccgggagagaggctgcgagaggtctgcgggacccccagttacctggcccctgagattatcgagtgctccatgaatgaggaccacccgggctacgggaaagaggtggacatgtggagcactggcgtcatcatgtacacgctgctggccggctccccgcccttctggcaccggaagcagatgctgatgctgaggatgatcatgagcggcaactaccagtttggctcgcccgagtgggatgattactcggacaccgtgaaggacctggtctcccgattcctggtggtgcaaccccagaaccgctacacagcggaagaggccttggcacaccccttcttccagcagtacttggtggaggaagtgcggcacttcagcccccgggggaagttcaaggtgatcgctctgaccgtgctggcttcagtgcggatctactaccagtaccgccgggtgaagcctgtgacccgggagatcgtcatccgagacccctatgccctccggcctctgcgccggctcatcgacgcctacgctttccgaatctatggccactgggtgaagaaggggcagcagcagaaccgggcagcccttttcgagaacacacccaaggccgtgctcctctccctggccgaggaggactactgaggggctggccagtcagggagggctagggggcaggtggggaggggaagccatggaaatacaagtcaaaggggt

SEQ ID NO: 15530 - DNA, 483 bp, Homo sapiens
  source 1..483: mol_type = unassigned DNA
ctgctcgggacacggcttcagccctctgtggtcccctctccccggggggctttgggattcttgtcaagctccttcaagagcctgcaagcacttaaccagccacccagagttccctcactgaagatctgagcatgacccgggacgaggcactgccggactctcattctgcacaggacttctatgagaattatgagcccaaagagatcctgggcaggatgaagagaggggagctctttgactacctcactgagaaggtcaccttgagtgagaaggaaaccagaaagatcatgcgagctctgctggaggtgatctgcaccttgcacaaactcaacatcgtgcaccgggacctgaagcccgagaacattctcttggatgacaacatgaacatcaagctcacagactttggcttttcctgccagctggagccgggagagaggctgcgaggtctcccgattcctggtggtgcaaccccagaaccgctac

SEQ ID NO: 15531 - DNA, 582 bp, Homo sapiens
  source 1..582: mol_type = unassigned DNA
tatcttccaagtgtctgctcgggacacggcttcagccctctgtggtcccctctccccggggggctttgggattcttgtcaagctccttcaagagcctgcaagcacttaaccagccacccagagttccctcactgaagatctgagcatgacccgggacgaggcactgccggactctcattctgcacaggacttctatgagaattatgagcccaaagagatcctgggcaggatgaagagaggggagctctttgactacctcactgagaaggtcaccttgagtgagaaggaaaccagaaagatcatgcgagctctgctggaggtgatctgcaccttgcacaaactcaacatcgtgcaccgggacctgaagcccgagaacattctcttggatgacaacatgaacatcaagctcacagactttggcttttcctgccagctggagccgggagagaggctgcgagaggtctgcgggacccccagttacctggcccctgagattatcgagtgctccatgaatgaggaccacccgggctacgggaaagaggtggacatgtggagcactggcgtcatcatgtacacgctgct

SEQ ID NO: 15532 - DNA, 453 bp, Homo sapiens
  source 1..453: mol_type = unassigned DNA
gaggcagcttcagcccggaggaggtgcgggagctgcgagaagccacgctgaaggaggtggacatcctgcgcaaggtctcagggcaccccaacatcagatgaagagaggggagctctttgactacctcactgagaaggtcaccttgagtgagaaggaaaccagaaagatcatgcgagctctgctggaggtgatctgcaccttgcacaaactcaacatcgtgcaccgggacctgaagcccgagaacattctcttggatgacaacatgaacatcaagctcacagactttggcttttcctgccagctggagccgggagagaggctgcgaggtctggtaacatggccttggcccacgtccaggcctcgggtgctcaatcaaccatctgcagaatagagatggtctgggtttctcccctaacttaattgttccctggaataaaaattccaccatttcaa

SEQ ID NO: 15533 - DNA, 580 bp, Homo sapiens
  source 1..580: mol_type = unassigned DNA
agatgatatcttccaagtgtctgctcgggacacggcttcagccctctgtggtcccctctccccggggggctttgggattcttgtcaagctccttcaagagcctgcaagcacttaaccagccacccagagttccctcactgaagatctgagcatgacccgggacgaggcactgccggactctcattctgcacaggacttctatgagaattatgagcccaaagagatcctgggcaggggcgttagcagtgtggtcaggcgatgcatccacaagcccacgagccaggagtacgccgtgaaggtcatcgacgtcaccggtggaggcagcttcagcccggaggaggtgcgggagctgcgagaagccacgctgaaggaggtggacatcctgcgcaaggtctcagggcaccccaacatcagatgaagagaggggagctctttgactacctcactgagaaggtcaccttgagtgagaaggaaaccagaaagatcatgcgagctctgctggaggtgatctgcaccttgcacaaactcaacatcgtgcaccgggacctgaagcccgagaacattctcttggatgacaaca

SEQ ID NO: 15534 - DNA, 551 bp, Homo sapiens
  source 1..551: mol_type = unassigned DNA
gatgatatcttccaagtgtctgctcgggacacggcttcagccctctgtggtcccctctccccggggggctttgggattcttgtcaagctccttcaagagcctgcaagcacttaaccagccacccagagttccctcactgaagatctgagcatgacccgggacgaggcactgccggactctcattctgcacaggacttctatgagaattatgagcccaaagagatcctgggcaggggcgttagcagtgtggtcaggcgatgcatccacaagcccacgagccaggagtacgccgtgaaggtcatcgacgtcaccggtggaggcagcttcagcccggaggaggtgcgggagctgcgagaagccacgctgaaggaggtggacatcctgcgcaaggtctcagggcaccccaacatcatacagctgaaggacacttatgagaccaacactttcttcttcttggtgtttgacctatgggaagacactgatacaatggagatggaacagaaatggtgcttgggctgggactctcccaagtccaccaacttcagggccca

SEQ ID NO: 15535 - DNA, 588 bp, Homo sapiens
  source 1..588: mol_type = unassigned DNA
aaatagcaaaacccaaaacaacagcagatgatatcttccaagtgtctgctcgggacacggcttcagccctctgtggtcccctctccccggggggctttgggattcttgtcaagctccttcaagagcctgcaagcacttaaccagccacccagagttccctcactgaagatctgagcatgacccgggacgaggcactgccggactctcattctgcacaggacttctatgagaattatgagcccaaagagatcctgggcaggggcgttagcagtgtggtcaggcgatgcatccacaagcccacgagccaggagtacgccgtgaaggtcatcgacgtcaccggtggaggcagcttcagcccggaggaggtgcgggagctgcgagaagccacgctgaaggaggtggacatcctgcgcaaggtctcagggcaccccaacatcatacagctgaaggacacttatgagaccaacactttcttcttcttggtgtttgacctgtaagtacccagcactggagcaagccacacctgagagaacctccgactgctgtcccctccccaaccccagggctgcctggagaccacagccagct

SEQ ID NO: 15536 - DNA, 583 bp, Homo sapiens
  source 1..583: mol_type = unassigned DNA
acgttagcctccggtcatcaaatagcaaaacccaaaacaacagcagatgatatcttccaagtgtctgctcgggacacggcttcagccctctgtggtcccctctccccggggggctttgggattcttgtcaagctccttcaagagcctgcaagcacttaaccagccacccagagttccctcactgaagatctgagcatgacccgggacgaggcactgccggactctcattctgcacaggacttctatgagaattatgagcccaaagagatcctgggcaggtaaagcccaagctttccccacgaagtgctgtcctaggctccagcagaccctgtgggctacagccagctctgctccaccccgagtactaacgccactttcatccccaaagtgctgttcacttggagaaaccctttgtttggggtcctgccctcctgaagccaggacagataagagaaacctctcccagcaaaaagttcccaggggcaggcgcaatggctcacacctgtaatcccagcactttgggaggctgaggtgggaggattgcttgaggccaagagttcaagatcagcctgggcaacatagc

SEQ ID NO: 15537 - DNA, 2226 bp, Homo sapiens
  source 1..2226: mol_type = unassigned DNA
acgttagcctccggtcatcaaatagcaaaacccaaaacaacagcagatgatatcttccaagtgtctgctcgggacacggcttcagccctctgtggtcccctctccccggggggctttgggattcttgtcaagctccttcaagagcctgcaagcacttaaccagccacccagagttccctcactgaagatctgagcatgacccgggacgaggcactgccggactctcattctgcacaggacttctatgagaattatgagcccaaagagatcctgggcaggggcgttagcagtgtggtcaggcgatgcatccacaagcccacgagccaggagtacgccgtgaaggtcatcgacgtcaccggtggaggcagcttcagcccggaggaggtgcgggagctgcgagaagccacgctgaaggaggtggacatcctgcgcaaggtctcagggcaccccaacatcatacagctgaaggacacttatgagaccaacactttcttcttcttggtgtttgacctatgggaagacactgatacaatggagatggaacagaaatggtgcttgggctgggactctcccaagtccaccaacttcagggcccagggcagggcaaggatgaagagaggggagctctttgactacctcactgagaaggtcaccttgagtgagaaggaaaccagaaagatcatgcgagctctgctggaggtgatctgcaccttgcacaaactcaacatcgtgcaccgggacctgaagcccgagaacattctcttggatgacaacatgaacatcaagctcacagactttggcttttcctgccagctggagccgggagagaggctgcgagaggtctgcgggacccccagttacctggcccctgagattatcgagtgctccatgaatgaggaccacccgggctacgggaaagaggtggacatgtggagcactggcgtcatcatgtacacgctgctggccggctccccgcccttctggcaccggaagcagatgctgatgctgaggatgatcatgagcggcaactaccagtttggctcgcccgagtgggatgattactcggacaccgtgaaggacctggtctcccgattcctggtggtgcaaccccagaaccgctacacagcggaagaggccttggcacaccccttcttccagcagtacttggtggaggaagtgcggcacttcagcccccgggggaagttcaaggtgatcgctctgaccgtgctggcttcagtgcggatctactaccagtaccgccgggtgaagcctgtgacccgggagatcgtcatccgagacccctatgccctccggcctctgcgccggctcatcgacgcctacgctttccgaatctatggccactgggtgaagaaggggcagcagcagaaccgggcagcccttttcgagaacacacccaaggccgtgctcctctccctggccgaggaggactactgaggggctggccagtcagggagggctagggggcaggtggggaggggaagccatggaaatacaagtcaaaggggtgagatgcgtgcaggcctctgcagaaggagcacttggccctggccaggaacccctggaactgaggccacgatcccctctcaaaggctgtgcacaagggaagtgggtgttcccaccacacagcaatacctgcaggctggggcaggccctgggtgggcagagatcacacgtggcctgagaaccaggaaccccctgctcctctacttcctagatgagccaccatctccatttctctttaggggaggcccagagttactgacactcaggctttcttcccttagggtcacagggtgaggatcaaagacacaaatgtctgagatacacaattgcaggagattttattggccccatgacatccagtgacagtgtgggagcaggctactctccagggacatgtttttggaggcatatggagaagggggcccaggcgaggtggctcacacctgtaatcccagcactttgggaggtcgaggtgggaggatcgcttgaggccaggagttcgagaccaccctgggcaacagagcgagatcccatcactacaaaaattcaaaaaattagccaggcatggtggtgcacacttgtagtcccagctactcaggaggctgaggtgggagaattgcttgggcccaggaattcaaggctagagtgagccgtgatcaccagtgcactctagcctgggcaacagagaaagaccctgtctca

SEQ ID NO: 15538 - DNA, 2139 bp, Homo sapiens
  source 1..2139: mol_type = unassigned DNA
acgttagcctccggtcatcaaatagcaaaacccaaaacaacagcagatgatatcttccaagtgtctgctcgggacacggcttcagccctctgtggtcccctctccccggggggctttgggattcttgtcaagctccttcaagagcctgcaagcacttaaccagccacccagagttccctcactgaagatctgagcatgacccgggacgaggcactgccggactctcattctgcacaggacttctatgagaattatgagcccaaagagatcctgggcaggggcgttagcagtgtggtcaggcgatgcatccacaagcccacgagccaggagtacgccgtgaaggtcatcgacgtcaccggtggaggcagcttcagcccggaggaggtgcgggagctgcgagaagccacgctgaaggaggtggacatcctgcgcaaggtctcagggcaccccaacatcatacagctgaaggacacttatgagaccaacactttcttcttcttggtgtttgaccttttccacaggatgaagagaggggagctctttgactacctcactgagaaggtcaccttgagtgagaaggaaaccagaaagatcatgcgagctctgctggaggtgatctgcaccttgcacaaactcaacatcgtgcaccgggacctgaagcccgagaacattctcttggatgacaacatgaacatcaagctcacagactttggcttttcctgccagctggagccgggagagaggctgcgagaggtctgcgggacccccagttacctggcccctgagattatcgagtgctccatgaatgaggaccacccgggctacgggaaagaggtggacatgtggagcactggcgtcatcatgtacacgctgctggccggctccccgcccttctggcaccggaagcagatgctgatgctgaggatgatcatgagcggcaactaccagtttggctcgcccgagtgggatgattactcggacaccgtgaaggacctggtctcccgattcctggtggtgcaaccccagaaccgctacacagcggaagaggccttggcacaccccttcttccagcagtacttggtggaggaagtgcggcacttcagcccccgggggaagttcaaggtgatcgctctgaccgtgctggcttcagtgcggatctactaccagtaccgccgggtgaagcctgtgacccgggagatcgtcatccgagacccctatgccctccggcctctgcgccggctcatcgacgcctacgctttccgaatctatggccactgggtgaagaaggggcagcagcagaaccgggcagcccttttcgagaacacacccaaggccgtgctcctctccctggccgaggaggactactgaggggctggccagtcagggagggctagggggcaggtggggaggggaagccatggaaatacaagtcaaaggggtgagatgcgtgcaggcctctgcagaaggagcacttggccctggccaggaacccctggaactgaggccacgatcccctctcaaaggctgtgcacaagggaagtgggtgttcccaccacacagcaatacctgcaggctggggcaggccctgggtgggcagagatcacacgtggcctgagaaccaggaaccccctgctcctctacttcctagatgagccaccatctccatttctctttaggggaggcccagagttactgacactcaggctttcttcccttagggtcacagggtgaggatcaaagacacaaatgtctgagatacacaattgcaggagattttattggccccatgacatccagtgacagtgtgggagcaggctactctccagggacatgtttttggaggcatatggagaagggggcccaggcgaggtggctcacacctgtaatcccagcactttgggaggtcgaggtgggaggatcgcttgaggccaggagttcgagaccaccctgggcaacagagcgagatcccatcactacaaaaattcaaaaaattagccaggcatggtggtgcacacttgtagtcccagctactcaggaggctgaggtgggagaattgcttgggcccaggaattcaaggctagagtgagccgtgatcaccagtgcactctagcctgggcaacagagaaagaccctgtctca

SEQ ID NO: 15539 - DNA, 928 bp, Homo sapiens
  source 1..928: mol_type = unassigned DNA
ggagcgcgttttcgctgagacccactaccccgacatttacacgcgtgaggagctggcgctcaagatcgacctcactgaggctcgcggcgcactgtgggccggtgtggcgggcggtgggggcggcgggcctggcgcgggagcggccgaactacttaaggcttggcagccggcggagtccggccccgggcccttctccggggttctgtcctcctttcaccggaagcccggccccgccctgaagaccaatctcttctagctgccggcctctggaggctccgagcctgcccccagagacgtccctgcccctccaggacctgacagcccctcccatcctggccacccgcctggaagtccccatccgtctccactccctactgtctcacccctcggtgtgtcctccccaactttggagaccaagtcagggccactctcgtcctcacccaccctctaccagcagagcggagttctttataccgggacctcctccaggagaaccccggagctccttctagcttggccttctttggatgcggtatcacatgaggcctgtccctaacagtgccctcaaagtgaaggtcctcaaggaggatcggcacagcccccttccctggctctgcagcggctgggtcaccccttacgctggtgatcaggaaagcccgctgccccacccctcgggcccacccgtacagaggctggtggtcgccgggataattaatgaccaccgccaattcatccctcacgtgtctcctctcttccctagcccgtctggcacagagggtggacctgttagaggagtggaggggctgcctggggaatgggacagagggattctctttccctaatttttttggttgtcctttttctttgaaaaacttgtaatttattgaagttttactcaatccaaataaaacttaatttattgaagaca

SEQ ID NO: 15540 - DNA, 1699 bp, Homo sapiens
  source 1..1699: mol_type = unassigned DNA
acttgcgttgcacccgggctgagtgcggccgcgacggggcgggcggactctcgggcgctcagagctggcctcgggtcctcggagcctggcgctcgaacctcccttccgacctccacccggaccccgaccccgacccggcctggcccggcccccgcccccgccccccgggccgatggactactcctacctcaattcgtacgactcgtgcgtggcggccatggaggcgtccgcctacggcgactttggcgcctgcagccagcccggcggcttccaatacagccccctgcggcccgctttccccgcggcagggccgccctgccccgcgctcggctcctccaactgcgcacttggcgccctacgcgaccaccagcccgcgccctactcggcagtgccctacaagttcttcccagagccatccggcctgcacgagaagcgcaagcagcggcgcatccgcaccacgttcaccagcgcgcagctcaaggagctggagcgcgttttcgctgagacccactaccccgacatttacacgcgtgaggagctggcgctcaagatcgacctcactgaggctcgcgtgcaggtctggttccagaaccgccgggccaagttccgcaaacaggagcgcgcggccagcgccaagggcgcggcgggcgcggcgggcgccaaaaagggcgaggcgcgctgctcctccgaggacgacgattccaaggagtccacgtgcagccccacgcccgatagcaccgcctcgctgccgccgccgcctgcgcccggcctggccagcccgcgcctgagccccagcccgctgcccgtcgcactgggctccgggccgggacctgggccggggccacagccgctcaagggcgcactgtgggccggtgtggcgggcggtgggggcggcgggcctggcgcgggagcggccgaactacttaaggcttggcagccggcggagtccggccccgggcccttctccggggttctgtcctcctttcaccggaagcccggccccgccctgaagaccaatctcttctagctgccggcctctggaggctccgagcctgcccccagagacgtccctgcccctccaggacctgacagcccctcccatcctggccacccgcctggaagtccccatccgtctccactccctactgtctcacccctcggtgtgtcctccccaactttggagaccaagtcagggccactctcgtcctcacccaccctctaccagcagagcggagttctttataccgggacctcctccaggagaaccccggagctccttctagcttggccttctttggatgcggtatcacatgaggcctgtccctaacagtgccctcaaagtgaaggtcctcaaggaggatcggcacagcccccttccctggctctgcagcggctgggtcaccccttacgctggtgatcaggaaagcccgctgccccacccctcgggcccacccgtacagaggctggtggtcgccgggataattaatgaccaccgccaattcatccctcacgtgtctcctctcttccctagcccgtctggcacagagggtggacctgttagaggagtggaggggctgcctggggaatgggacagagggattctctttccctaatttttttggttgtcctttttctttgaaaaacttgtaatttattgaagttttactcaatccaaataaaacttaatttattgaagaca

SEQ ID NO: 15541 - DNA, 605 bp, Homo sapiens
  source 1..605: mol_type = unassigned DNA
tcggtggaagaggctgggggttgagtggacgagctgcccaacccagctcaggagcgacggaaaagttatctgttcccttctcttgtgccctacaagttcttcccagagccatccggcctgcacgagaagcgcaagcagcggcgcatccgcaccacgttcaccagcgcgcagctcaaggagctggagcgcgttttcgctgagacccactaccccgacatttacacgcgtgaggagctggcgctcaagatcgacctcactgaggctcgcgtgcaggtctggttccagaaccgccgggccaagttccgcaaacaggagcgcgcggccagcgccaagggcgcggcgggcgcggcgggcgccaaaaagggcgaggcgcgctgctcctccgaggacgacgattccaaggagtccacgtgcagccccacgcccgatagcaccgcctcgctgccgccgccgcctgcgcccggcctggccagcccgcgcctgagccccagcccgctgcccgtcgcactgggctccgggccgggacctgggccggggccacagccgctcaagggcgcactgtgggccggtgtggcgggcggtgggggcggcgggcctggcgcggg

SEQ ID NO: 15542 - DNA, 3099 bp, Homo sapiens
  source 1..3099: mol_type = unassigned DNA
ttctttctcccttctctgcctctctctcctccacgctgctttgatttcgctcttgcctctcttcttgcgctgctcagctgggaacatcgtctcaccaggggcagcagcgacgcgctgcacagccagacaggagctggctgcggggcatggaagcagcctccttggcagccgggagaggagcaagcgcacgccactgcccgtgacccaggcgtccggctgctgtcccctgccggggagctcatccacgcagaggtctctccctgtcctccctgcgagcttttcctctgcagagcccagtggagccagccatgtaccgcggcaacgcttgctgaccccagtgaggagagaggcctgaatccgagggccctggcacctgtgagctcttggctgtcacctgccccaagcctcgcacctccgctccacagcagtccccacaggagacaaccctgacgggagcatggagctgctgtccacgccccacagcattgagatcaacaacatcacctgcgactccttccgcatctcctgggccatggaggacagtgacctggagagggtcacccattacttcattgaccttaacaagaaggagaataagaattccaacaagttcaagcaccgggacgtccccaccaagctcgtggccaaggcagtgccgctgcccatgacggtgagaggccactggttcctgagcccccgcacggagtacagtgtggccgtgcagacggcagtgaagcagagcgatggggagtacctggtgtccggctggagcgagacggtggagttctgcactggggattatgccaaggagcacctggctcagcttcaggagaaagctgagcagatcgcaggccgcatgctccgcttctccgtcttctaccgcaaccatcacaaggagtacttccagcatgccaggacccactgcgggaacatgctgcagccttacctgaaggacaacagtggcagccacggctcccccaccagcggtatgctccacggggtcttcttcagctgcaacacggagttcaacacgggccagcccccgcaggactccccctacggccgctggcgcttccagatcccagctcagcgcctcttcaatcccagcaccaacctctactttgcggacttctactgcatgtacacggcctaccactacgccatcctggtgctggcgcccaaaggctccctgggggaccgcttctgccgcgaccgcctgcccctcctggacattgcttgcaacaagttcctgacctgcagcgtggaggatggggagctggtcttccgccacgcccaggacctcatcctggagatcatctacactgagcccgtcgacctgtccctgggcaccctgggggagatcagtgggcaccagctcatgagtctgtctactgccgatgccaagaaggaccccagctgcaagacctgcaacatcagcgtgggccgctagggactcctggggagctggggggcgagggagagatgagcggaaggtggaggtgggtagcccaggttcagggagctggctttctctctcctgcccccctgctccctccactctgcccagctgccctcccctcgccccttggcattggaggcaacagacggtggtcctcttggtaagtgtggcccacacccagcctggtggacatggaaaggcttctcagcctctgtagttggcagctgggctggacttctggagaacttcccctttcctctggtttccttgtcctactgttctttgcctcgtccaggtctctatctcccaaagacctgcccacctcctgggctctcccagggaagcccctctgggccaaagcccatgggtagcttggctgcctccagaagagatgcagagagctgtggggcgatctttcttagtcccactcaccccactcagggccaaccacagaatgccccctccctgctgagctgggtctctggggcttcccactccaggcctggatcccttccttctataaatagtctcctgcaccaccgtgactccctggctgctccttgccccaaagaaccctcttcctgcatgggagagctgtccctccttctccacctgcccaccgggacactccccctgctctctagaaaggaactctctttcttctcttggcactgggggcgtcaggctgtcggatgttccttccttccataccccagcataccttctccttgcttagagtgcaggggtctgagacagcagccactggggttgaggagggggaggagacccctgagacccagaggtgccccttcctcagctgggagtgggccgcctcatgctctgctggggcctggcatggaacgtgagacctgtaagctgtcccgcgggccccggcaccccgcccagctgtgcactttgctcactcgctctgccatggtgccatgactgtactgtgcccatgcgtgacctggactgtggaccctctgctgctccgcctctcccctccccactggctctgtctgctctcctgccaccctgctggccgggagcccctccccggggagttcttggtgaagtccttcccgggcctccttgtgtttttgcctcattcctactgtcacacaggtcacgagggtggactccctacaatcaacaaagcaaacagagagcctgtgggaggggctgacagcagcagccggctgtttgggggatgatggaggtgacatcaggcagaggagagtgcagcctcacagtgactttctcagaggtgacagagatgatggatgagcagctggattttcgtgatgaaggacggaagcagcagcgggccggcaaggccatacctcggtgagggacaggtggacaacggtcacctatctgtagccaggggcagttgtgtggccagctgtctctctgggatgagtcaggaggcctggaggcttggggagaggtgtggagaaggagagaacatggcccaggccctttccttccccctgtgctgacagcattgctgtgggggtggcccactgccctcccctggccctcatgtccccccggggctggggtccgcctgcctgtgctgtgcttgcgacgtgcatcaataaaccaccatggcctgagggccctgctcgtctcagtcc

SEQ ID NO: 15543 - DNA, 3200 bp, Homo sapiens
  source 1..3200: mol_type = unassigned DNA
agagatttccaagtagggggtgtgttggagggacttctgagggcagcttgtcctggaagaatgggggaaaggcggcgtgtgttgctgtccctgaggacatctgtgtagctccctgggagaccctctgccctttccccctcccaccagcccggcgagcagggaccaagcctgcttattatcacctgacgctgcgcagccgctgatcccattggtggaggcagattcggtctggctctctcgttctttctcccttctctgcctctctctcctccacgctgctttgatttcgctcttgcctctcttcttgcgctgctcagctgggaacatcgtctcaccaggggcagcagcgacgcgctgcacagccagacaggagctggctgcggggcatggaagcagcctccttggcagccgggagaggagcaagcgcacgccactgcccgtgacccaggcgtccggctgctgtcccctgccggggagctcatccacgcagaggtctctccctgtcctccctgcgagcttttcctctgcagagcccagtggagccagtccccacaggagacaaccctgacgggagcatggagctgctgtccacgccccacagcattgagatcaacaacatcacctgcgactccttccgcatctcctgggccatggaggacagtgacctggagagggtcacccattacttcattgaccttaacaagaaggagaataagaattccaacaagttcaagcaccgggacgtccccaccaagctcgtggccaaggcagtgccgctgcccatgacggtgagaggccactggttcctgagcccccgcacggagtacagtgtggccgtgcagacggcagtgaagcagagcgatggggagtacctggtgtccggctggagcgagacggtggagttctgcactggggattatgccaaggagcacctggctcagcttcaggagaaagctgagcagatcgcaggccgcatgctccgcttctccgtcttctaccgcaaccatcacaaggagtacttccagcatgccaggacccactgcgggaacatgctgcagccttacctgaaggacaacagtggcagccacggctcccccaccagcggtatgctccacggggtcttcttcagctgcaacacggagttcaacacgggccagcccccgcaggactccccctacggccgctggcgcttccagatcccagctcagcgcctcttcaatcccagcaccaacctctactttgcggacttctactgcatgtacacggcctaccactacgccatcctggtgctggcgcccaaaggctccctgggggaccgcttctgccgcgaccgcctgcccctcctggacattgcttgcaacaagttcctgacctgcagcgtggaggatggggagctggtcttccgccacgcccaggacctcatcctggagatcatctacactgagcccgtcgacctgtccctgggcaccctgggggagatcagtgggcaccagctcatgagtctgtctactgccgatgccaagaaggaccccagctgcaagacctgcaacatcagcgtgggccgctagggactcctggggagctggggggcgagggagagatgagcggaaggtggaggtgggtagcccaggttcagggagctggctttctctctcctgcccccctgctccctccactctgcccagctgccctcccctcgccccttggcattggaggcaacagacggtggtcctcttggtaagtgtggcccacacccagcctggtggacatggaaaggcttctcagcctctgtagttggcagctgggctggacttctggagaacttcccctttcctctggtttccttgtcctactgttctttgcctcgtccaggtctctatctcccaaagacctgcccacctcctgggctctcccagggaagcccctctgggccaaagcccatgggtagcttggctgcctccagaagagatgcagagagctgtggggcgatctttcttagtcccactcaccccactcagggccaaccacagaatgccccctccctgctgagctgggtctctggggcttcccactccaggcctggatcccttccttctataaatagtctcctgcaccaccgtgactccctggctgctccttgccccaaagaaccctcttcctgcatgggagagctgtccctccttctccacctgcccaccgggacactccccctgctctctagaaaggaactctctttcttctcttggcactgggggcgtcaggctgtcggatgttccttccttccataccccagcataccttctccttgcttagagtgcaggggtctgagacagcagccactggggttgaggagggggaggagacccctgagacccagaggtgccccttcctcagctgggagtgggccgcctcatgctctgctggggcctggcatggaacgtgagacctgtaagctgtcccgcgggccccggcaccccgcccagctgtgcactttgctcactcgctctgccatggtgccatgactgtactgtgcccatgcgtgacctggactgtggaccctctgctgctccgcctctcccctccccactggctctgtctgctctcctgccaccctgctggccgggagcccctccccggggagttcttggtgaagtccttcccgggcctccttgtgtttttgcctcattcctactgtcacacaggtcacgagggtggactccctacaatcaacaaagcaaacagagagcctgtgggaggggctgacagcagcagccggctgtttgggggatgatggaggtgacatcaggcagaggagagtgcagcctcacagtgactttctcagaggtgacagagatgatggatgagcagctggattttcgtgatgaaggacggaagcagcagcgggccggcaaggccatacctcggtgagggacaggtggacaacggtcacctatctgtagccaggggcagttgtgtggccagctgtctctctgggatgagtcaggaggcctggaggcttggggagaggtgtggagaaggagagaacatggcccaggccctttccttccccctgtgctgacagcattgctgtgggggtggcccactgccctcccctggccctcatgtccccccggggctggggtccgcctgcctgtgctgtgcttgcgacgtgcatcaataaaccaccatggcctgagggc

SEQ ID NO: 15544 - DNA, 769 bp, Homo sapiens
  source 1..769: mol_type = unassigned DNA
gccatttgcttgacttagaaaaggaatgggagagagtcctccgtgggacgtccccaccaagctcgtggccaaggcagtgccgctgcccatgacggtgagaggccactggttcctgagcccccgcacggagtacagtgtggccgtgcagacggcagtgaagcagagcgatggggagtacctggtgtccggctggagcgagacggtggagttctgcactggggattatgccaaggagcacctggctcagcttcaggagaaagctgagcagatcgcaggccgcatgctccgcttctccgtcttctaccgcaaccatcacaaggagtacttccagcatgccaggacccactgcgggaacatgctgcagccttacctgaaggacaacagtggcagccacggctcccccaccagcggtatgctccacggggtcttcttcagctgcaacacggagttcaacacgggccagcccccgcaggactccccctacggccgctggcgcttccagatcccagctcagcgcctcttcaatcccagcaccaacctctactttgcggacttctactgcatgtacacggcctaccactacgccatcctggtgctggcgcccaaaggctccctgggggaccgcttctgccgcgaccgcctgcccctcctggacattgcttgcaacaagttcctgacctgcagcgtggaggatggggagctggtcttccgccacgcccaggacctcatcctggagatcatctacactgagcccgtcgacctgtccctg

SEQ ID NO: 15545 - DNA, 847 bp, Homo sapiens
  source 1..847: mol_type = unassigned DNA
ccattacttcattgaccttaacaagaaggagaataagaattccaacaagttcaagcaccgggacgtccccaccaagctcgtggccaaggcagtgccgctgcccatgacggtgagaggccactggttcctgagcccccgcacggagtacagtgtggccgtgcagacggcagtgaagcagagcgatggggagtacctggtgtccggctggagcgagacggtggagttctgcactggggattatgccaaggagcacctggctcagcttcaggagaaagctgagcagatcgcaggccgcatgctccgcttctccgtcttctaccgcaaccatcacaaggagtacttccagcatgccaggtatgggcgcgggctcccggctggacccgccgggcctctcctccctcccagcccttcctgctcctgtcctggctgtctgaggtcacccccaccctcgtggctgccagtccctcctctagggttgacatgtcctgacgtcaccaggctggctctgaagagactgctactttggggattgggctcagggaagatcaagggctctggggacagggccttctgcaagagtgttgtactaatgagcctgggagaatgaggtctgggtttgctcccactctgggacagttcctttcacaggggtctaccaccacaggtctctccgattcaggccctggggccaaagggaaggtggcagggagtgcacaaaatgagtgttctgatcacaaagggttcgaggaagcacccagctcgtcggttttcaaactgggtgctccctccagggagacatgtcagtgaaccccttagaatgctgccatggggttggggggaccagagg

SEQ ID NO: 15546 - DNA, 713 bp, Homo sapiens
  source 1..713: mol_type = unassigned DNA
aaatctgtccccgcccggctttgcagcattcccactgcctctgccacctgtcaggtgccgtctgctctgcagacccctccgaggagagcaaagagccccccgggcaggcacccctttccaccctccatcatccttctccagcctcccctgtacagtctttcccatctggttcatgaggcatgtggattccaggggtccttgaggttccgcctcgaaagggatattgggaggaggacattccagaaagctcgccggggtcaagggatgtactgaccctttccctcctcctcagtccccacaggagacaaccctgacgggagcatggagctgctgtccacgccccacagcattgagatcaacaacatcacctgcgactccttccgcatctcctgggccatggaggacagtgacctggagagggtcacccattacttcattgaccttaacaagaaggagaataagaattccaacaagttcaagcaccgggacgtccccaccaagctcgtggccaaggcagtgccgctgcccatgacggtgagaggccactggttcctgagcccccgcacggagtacagtgtggccgtgcagacggcagtgaagcagagcgatggggagtacctggtgtccggctggagcgagacggtggagttctgcactggggattatgccaaggagcacctggctcagcttcaggagaaagctgagcagatcgc

SEQ ID NO: 15547 - DNA, 2190 bp, Homo sapiens
  source 1..2190: mol_type = unassigned DNA
cctgggtgcaaccagtcacagctctgcagaggttactgtgattttgcccctgaaggatctgtccacaacttaggaactcacacagcttttggcctgagcccccgttaccaagagaaaggaggtttttgccaaggactccaaggggagtgcacttgatgctggtcgggacccaaagcgcccagccctccctgagacattgtgtgagtcgggctgggcctcaaacacggcccccactgccccaccccagccagggtggtgcttgtgtgggaaggactttaaatccagctgccagacccctggacgggagaaggagagacggctggccaccatgcacggctcctgcagtttcctgatgcttctgctgccgctactgctactgctggtggccaccacaggccccgttggagccctcacagatgaggagaaacgtttgatggtggagctgcacaacctctaccgggcccaggtatccccgacggcctcagacatgctgcacatgagatgggacgaggagctggccgccttcgccaaggcctacgcacggcagtgcgtgtggggccacaacaaggagcgcgggcgccgcggcgagaatctgttcgccatcacagacgagggcatggacgtgccgctggccatggaggagtggcaccacgagcgtgagcactacaacctcagcgccgccacctgcagcccaggccagatgtgcggccactacacgcaggtggtatgggccaagacagagaggatcggctgtggttcccacttctgtgagaagctccagggtgttgaggagaccaacatcgaattactggtgtgcaactatgagcctccggggaacgtgaaggggaaacggccctaccaggaggggactccgtgctcccaatgtccctctggctaccactgcaagaactccctctgtgaacccatcggaagcccggaagatgctcaggatttgccttacctggtaactgaggccccatccttccgggcgactgaagcatcagactctaggaaaatgggtactccttcttccctagcaacggggattccggctttcttggtaacagaggtctcaggctccctggcaaccaaggctctgcctgctgtggaaacccaggccccaacttccttagcaacgaaagacccgccctccatggcaacagaggctccaccttgcgtaacaactgaggtcccttccattttggcagctcacagcctgccctccttggatgaggagccagttaccttccccaaatcgacccatgttcctatcccaaaatcagcagacaaagtgacagacaaaacaaaagtgccctctaggagcccagagaactctctggaccccaagatgtccctgacaggggcaagggaactcctaccccatgcccaggaggaggctgaggctgaggctgagttgcctccttccagtgaggtcttggcctcagtttttccagcccaggacaagccaggtgagctgcaggccacactggaccacacggggcacacctcctccaagtccctgcccaatttccccaatacctctgccaccgctaatgccacgggtgggcgtgccctggctctgcagtcgtccttgccaggtgcagagggccctgacaagcctagcgtcgtgtcagggctgaactcgggccctggtcatgtgtggggccctctcctgggactactgctcctgcctcctctggtgttggctggaatcttctgaaggggataccactcaaagggtgaagaggtcagctgtcctcctgtcatcttccccaccctgtccccagcccctaaacaagatacttcttggttaaggccctccggaagggaaaggctacggggcatgtgcctcatcacaccatccatcctggaggcacaaggcctggctggctgcgagctcaggaggccgcctgaggactgcacaccgggcccacacctctcctgcccctccctcctgagtcctgggggtgggaggatttgagggagctcactgcctacctggcctggggctgtctgcccacacagcatgtgcgctctccctgagtgcctgtgtagctggggatggggattcctaggggcagatgaaggacaagccccactggagtggggttctttgagtgggggaggcagggacgagggaaggaaagtaactcctgactctccaataaaaacctgtccaacctgtggcaa

SEQ ID NO: 15548 - DNA, 466 bp, Homo sapiens
  source 1..466: mol_type = unassigned DNA
cccatccttccgggcgactgaagcatcagactctaggaaaatgggtgcagagggccctgacaagcctagcgtcgtgtcagggctgaactcgggccctggtcatgtgtggggccctctcctgggactactgctcctgcctcctctggtgttggctggaatcttctgaaggggataccactcaaagggtgaagaggtcagctgtcctcctgtcatcttccccaccctgtccccagcccctaaacaagatacttcttggttaaggccctccggaagggaaaggctacggggcatgtgcctcatcacaccatccatcctggaggcacaaggcctggctggctgcgagctcaggaggccgcctgaggactgcacaccgggcccacacctctcctgcccctccctcctgagtcctgggggtgggaggatttgagggagctcactgcctacctggcctggggctgtctgccca

SEQ ID NO: 15549 - DNA, 2083 bp, Homo sapiens
  source 1..2083: mol_type = unassigned DNA
gctattgaaggggcatgactggaggcagaggccacagagatgaccacaccagggcaacctgtagtgccagtgcctggttccacccggggggcatctgagaactgtgtccttccattcctgagtccagcacttcccaggccagccagggtggtgcttgtgtgggaaggactttaaatccagctgccagacccctggacgggagaaggagagacggctggccaccatgcacggctcctgcagtttcctgatgcttctgctgccgctactgctactgctggtggccaccacaggccccgttggagccctcacagatgaggagaaacgtttgatggtggagctgcacaacctctaccgggcccaggtatccccgacggcctcagacatgctgcacatgagatgggacgaggagctggccgccttcgccaaggcctacgcacggcagtgcgtgtggggccacaacaaggagcgcgggcgccgcggcgagaatctgttcgccatcacagacgagggcatggacgtgccgctggccatggaggagtggcaccacgagcgtgagcactacaacctcagcgccgccacctgcagcccaggccagatgtgcggccactacacgcaggtggtatgggccaagacagagaggatcggctgtggttcccacttctgtgagaagctccagggtgttgaggagaccaacatcgaattactggtgtgcaactatgagcctccggggaacgtgaaggggaaacggccctaccaggaggggactccgtgctcccaatgtccctctggctaccactgcaagaactccctctgtgaacccatcggaagcccggaagatgctcaggatttgccttacctggtaactgaggccccatccttccgggcgactgaagcatcagactctaggaaaatgggtactccttcttccctagcaacggggattccggctttcttggtaacagaggtctcaggctccctggcaaccaaggctctgcctgctgtggaaacccaggccccaacttccttagcaacgaaagacccgccctccatggcaacagaggctccaccttgcgtaacaactgaggtcccttccattttggcagctcacagcctgccctccttggatgaggagccagttaccttccccaaatcgacccatgttcctatcccaaaatcagcagacaaagtgacagacaaaacaaaagtgccctctaggagcccagagaactctctggaccccaagatgtccctgacaggggcaagggaactcctaccccatgcccaggaggaggctgaggctgaggctgagttgcctccttccagtgaggtcttggcctcagtttttccagcccaggacaagccaggtgagctgcaggccacactggaccacacggggcacacctcctccaagtccctgcccaatttccccaatacctctgccaccgctaatgccacgggtgggcgtgccctggctctgcagtcgtccttgccaggtgcagagggccctgacaagcctagcgtcgtgtcagggctgaactcgggccctggtcatgtgtggggccctctcctgggactactgctcctgcctcctctggtgttggctggaatcttctgaaggggataccactcaaagggtgaagaggtcagctgtcctcctgtcatcttccccaccctgtccccagcccctaaacaagatacttcttggttaaggccctccggaagggaaaggctacggggcatgtgcctcatcacaccatccatcctggaggcacaaggcctggctggctgcgagctcaggaggccgcctgaggactgcacaccgggcccacacctctcctgcccctccctcctgagtcctgggggtgggaggatttgagggagctcactgcctacctggcctggggctgtctgcccacacagcatgtgcgctctccctgagtgcctgtgtagctggggatggggattcctaggggcagatgaaggacaagccccactggagtggggttctttgagtgggggaggcagggacgagggaaggaaagtaactcctgactctccaataaaaacctgtccaacctgtggc

SEQ ID NO: 15550 - DNA, 479 bp, Homo sapiens
  source 1..479: mol_type = unassigned DNA
tggagatgggctttgcaacacaacagacctgtgtgtgcgattttgatcttaggcaactgaaaagcaagtaacgctccctttctattacctgaagcttctgcttatggagttttgaagttctccaggatggtttttctatttctctgagcactgaagtggctaatgccatggcagatgtcatacctaatgctgcagaggcagagcataagcactttcagaccatgctgaagtctaaattgaatgtcttaacactgaaaaaggaacctctcccagcggtcatcttccatgagccggaggccattgagctgtgcacgaccacaccgctgatgaagacaaggactcacagtggctgcaaggtacatggtttcactgtgttgcccaggatggtctcaaactcatggcctcaagcaatactcagacttcagcctctgaaagtgctgggattataggcgtgaaccactgtgactggcctgtatttt

SEQ ID NO: 15551 - DNA, 2745 bp, Homo sapiens
  source 1..2745: mol_type = unassigned DNA
aggacagccggcgcgcggccgtgcccacaagttgccggcagctgagcgccgcgcctcctcctgctcgcagccccctacgcccacccggcggcggtggccagcgccaggacgcacatcccgcggacaccgaccccagatgtaaagcgggaccccagcccctcgccccccggcgcgatcgacagtctcgccagcgtctcctctgccaaaacccagggctggaagatgtggcagccggccacggagcgcctgcaggagagatttgcagacacagaagcggcacagagaaggccattgtgaagatcaaggcagaaaccggagttatggcatcataagccaaggaatgccaaggattgctggcaaccacctgatgttagaagagtcgaggacatgttcttctccagagcttttggatggtgtgtggccctgccaacctttacattttggacttccagcctccgaaatgcactttcagaccatgctgaagtctaaattgaatgtcttaacactgaaaaaggaacctctcccagcggtcatcttccatgagccggaggccattgagctgtgcacgaccacaccgctgatgaagacaaggactcacagtggctgcaaggttacctacctgggcaaagtctccaccactggcatgcagtttttgtcaggctgcacagaaaagccagtcattgagctctggaagaagcacacgctagcccgagaggatgtctttccggccaatgccctcctggaaatccggccattccaagtttggctccatcatctcgaccacaaaggggaggccacagtgcacatggataccttccaggtggcccgcatcgcctactgcaccgccgaccacaacgtgagccccaacatcttcgcctgggtctacagggagatcaatgatgacctgtcctaccagatggactgccacgccgtggagtgcgagagcaagctcgaggccaagaaactggcccacgccatgatggaggccttcaggaagactttccacagtatgaagagcgacgggcggatccacagcaacagctcctccgaagaggtttcccaggaattggaatccgatgatggctgaatgaacttgagacgcttcagcaaaggcagcattggtcacggagttcaagggaatagatgagtaagcaacgtttcaaatttgggatgaaaagactgccaaactattggctgaccaaggtttttaaattcagaagagcaattctaaatctaaagaaatgtatcattaaagtaattacgttacattgaaacctgctgctgctgtgactgtgaggagggtgggagtgtggatggggaggaaggttctaggctctcttatttttctcatttcccaatgcctctctgtgggagagctccatgccagttttcaccacgctcaggcaaatactctgcagctgttattggatgggccattccgatctgccttatgaaattccacaagaatgttaggggcacctatgggatctctagtggggtgggcagggtgctgatggggacgctggccgcagggaggaaggaacatctcgggagggccctctgttcctctcccacggcagatgccctcctctgtatgcaaatcagcacagcctttattgagctttacaactaacaacctgatagttggcagttaattcacagttacagataatgcttttatttacataaatataccaagtagtaccctcttattgtattcacttcatctattttcttagaatacttgcaattactaatgaccccttccctttccctcctgctgccctgtccaccctctttccccttctaacatccttagagggatgaaatctcagcatatgttgcaggacaccaaaaggaagaaaacaatcaagcaaataaaataaacagtcaaacaaaccaggagtttaaaacaacaaccccaacaacagaagccttggcaaagaggaataagtgatcagcaagtgaacacactctatgtcaactctccttttatccagctgagatttatggtaacttatttaattaatggtcctgtctgatgcatccttgatggcaagcttcaaatctgatttggtatcaccgaggaaaccttgcccccatcactcagcattgcacttagatacagaatgagttagataaacttggcttgtctagagacccatgtcatcttaacctaaagggaaatcttattgcgttatcataaaattgatgatatcttagggtcagaattgccctttttttttattttgaatgggaagttctcactaaaacaatcctgagatttcttaatttcatggttctttaaatattataaacacagagtcaacatagaatgaaattgtatttgttaaaatacacacattggaggacaagagcagatgactacttttcgaagtaatgctgctccttcctaaaagtctgttttcaatcctggtaatattaggggcactgcggcacctaagaagccttaaatgagagctaatccaatctagagagcgatggtgtcagcatttcggtctgcatatctgtgtgtccgtatctgcgtttgtgtgcgtgtacgtgtgcccctgtgtgtgggcccagttttcaggcatgtagaataagcatggagtcatattgaggaggactcacttcttgaagatatgcttgttgctttacaacatatgtaagctattctttagcataaatgcattcattctttaataaaaatatgtttgcattaataaagctgaggagtttcat

SEQ ID NO: 15552 - DNA, 2387 bp, Homo sapiens
  source 1..2387: mol_type = unassigned DNA
tctcgcagctgcgccaggacagccggcgcgcggccgtgcccacaagttgccggcagctgagcgccgcgcctcctcctgctcgcagccccctacgcccacccggcggcggtggccagcgccaggacgcacatcccgcggacaccgaccccagatgtaaagcgggaccccagcccctcgccccccggcgcgatcgacagtctcgccagcgtctcctctgccaaaacccagggctggaagatgtggcagccggccacggagcgcctgcaggttacctacctgggcaaagtctccaccactggcatgcagtttttgtcaggctgcacagaaaagccagtcattgagctctggaagaagcacacgctagcccgagaggatgtctttccggccaatgccctcctggaaatccggccattccaagtttggctccatcatctcgaccacaaaggggaggccacagtgcacatggataccttccaggtggcccgcatcgcctactgcaccgccgaccacaacgtgagccccaacatcttcgcctgggtctacagggagatcaatgatgacctgtcctaccagatggactgccacgccgtggagtgcgagagcaagctcgaggccaagaaactggcccacgccatgatggaggccttcaggaagactttccacagtatgaagagcgacgggcggatccacagcaacagctcctccgaagaggtttcccaggaattggaatccgatgatggctgaatgaacttgagacgcttcagcaaaggcagcattggtcacggagttcaagggaatagatgagtaagcaacgtttcaaatttgggatgaaaagactgccaaactattggctgaccaaggtttttaaattcagaagagcaattctaaatctaaagaaatgtatcattaaagtaattacgttacattgaaacctgctgctgctgtgactgtgaggagggtgggagtgtggatggggaggaaggttctaggctctcttatttttctcatttcccaatgcctctctgtgggagagctccatgccagttttcaccacgctcaggcaaatactctgcagctgttattggatgggccattccgatctgccttatgaaattccacaagaatgttaggggcacctatgggatctctagtggggtgggcagggtgctgatggggacgctggccgcagggaggaaggaacatctcgggagggccctctgttcctctcccacggcagatgccctcctctgtatgcaaatcagcacagcctttattgagctttacaactaacaacctgatagttggcagttaattcacagttacagataatgcttttatttacataaatataccaagtagtaccctcttattgtattcacttcatctattttcttagaatacttgcaattactaatgaccccttccctttccctcctgctgccctgtccaccctctttccccttctaacatccttagagggatgaaatctcagcatatgttgcaggacaccaaaaggaagaaaacaatcaagcaaataaaataaacagtcaaacaaaccaggagtttaaaacaacaaccccaacaacagaagccttggcaaagaggaataagtgatcagcaagtgaacacactctatgtcaactctccttttatccagctgagatttatggtaacttatttaattaatggtcctgtctgatgcatccttgatggcaagcttcaaatctgatttggtatcaccgaggaaaccttgcccccatcactcagcattgcacttagatacagaatgagttagataaacttggcttgtctagagacccatgtcatcttaacctaaagggaaatcttattgcgttatcataaaattgatgatatcttagggtcagaattgccctttttttttattttgaatgggaagttctcactaaaacaatcctgagatttcttaatttcatggttctttaaatattataaacacagagtcaacatagaatgaaattgtatttgttaaaatacacacattggaggacaagagcagatgactacttttcgaagtaatgctgctccttcctaaaagtctgttttcaatcctggtaatattaggggcactgcggcacctaagaagccttaaatgagagctaatccaatctagagagcgatggtgtcagcatttcggtctgcatatctgtgtgtccgtatctgcgtttgtgtgcgtgtacgtgtgcccctgtgtgtgggcccagttttcaggcatgtagaataagcatggagtcatattgaggaggactcacttcttgaagatatgcttgttgctttacaacatatgtaagctattctttagcataaatgcattcattctttaataaaaatatgtttgcattaataaa

SEQ ID NO: 15553 - DNA, 2533 bp, Homo sapiens
  source 1..2533: mol_type = unassigned DNA
agtcctctcgcagctgcgccaggacagccggcgcgcggccgtgcccacaagttgccggcagctgagcgccgcgcctcctcctgctcgcagccccctacgcccacccggcggcggtggccagcgccaggacgcacatcccgcggacaccgaccccagatgtaaagcgggaccccagcccctcgccccccggcgcgatcgacagtctcgccagcgtctcctctgccaaaacccagggctggaagatgtggcagccggccacggagcgcctgcagcactttcagaccatgctgaagtctaaattgaatgtcttaacactgaaaaaggaacctctcccagcggtcatcttccatgagccggaggccattgagctgtgcacgaccacaccgctgatgaagacaaggactcacagtggctgcaaggttacctacctgggcaaagtctccaccactggcatgcagtttttgtcaggctgcacagaaaagccagtcattgagctctggaagaagcacacgctagcccgagaggatgtctttccggccaatgccctcctggaaatccggccattccaagtttggctccatcatctcgaccacaaaggggaggccacagtgcacatggataccttccaggtggcccgcatcgcctactgcaccgccgaccacaacgtgagccccaacatcttcgcctgggtctacagggagatcaatgatgacctgtcctaccagatggactgccacgccgtggagtgcgagagcaagctcgaggccaagaaactggcccacgccatgatggaggccttcaggaagactttccacagtatgaagagcgacgggcggatccacagcaacagctcctccgaagaggtttcccaggaattggaatccgatgatggctgaatgaacttgagacgcttcagcaaaggcagcattggtcacggagttcaagggaatagatgagtaagcaacgtttcaaatttgggatgaaaagactgccaaactattggctgaccaaggtttttaaattcagaagagcaattctaaatctaaagaaatgtatcattaaagtaattacgttacattgaaacctgctgctgctgtgactgtgaggagggtgggagtgtggatggggaggaaggttctaggctctcttatttttctcatttcccaatgcctctctgtgggagagctccatgccagttttcaccacgctcaggcaaatactctgcagctgttattggatgggccattccgatctgccttatgaaattccacaagaatgttaggggcacctatgggatctctagtggggtgggcagggtgctgatggggacgctggccgcagggaggaaggaacatctcgggagggccctctgttcctctcccacggcagatgccctcctctgtatgcaaatcagcacagcctttattgagctttacaactaacaacctgatagttggcagttaattcacagttacagataatgcttttatttacataaatataccaagtagtaccctcttattgtattcacttcatctattttcttagaatacttgcaattactaatgaccccttccctttccctcctgctgccctgtccaccctctttccccttctaacatccttagagggatgaaatctcagcatatgttgcaggacaccaaaaggaagaaaacaatcaagcaaataaaataaacagtcaaacaaaccaggagtttaaaacaacaaccccaacaacagaagccttggcaaagaggaataagtgatcagcaagtgaacacactctatgtcaactctccttttatccagctgagatttatggtaacttatttaattaatggtcctgtctgatgcatccttgatggcaagcttcaaatctgatttggtatcaccgaggaaaccttgcccccatcactcagcattgcacttagatacagaatgagttagataaacttggcttgtctagagacccatgtcatcttaacctaaagggaaatcttattgcgttatcataaaattgatgatatcttagggtcagaattgccctttttttttattttgaatgggaagttctcactaaaacaatcctgagatttcttaatttcatggttctttaaatattataaacacagagtcaacatagaatgaaattgtatttgttaaaatacacacattggaggacaagagcagatgactacttttcgaagtaatgctgctccttcctaaaagtctgttttcaatcctggtaatattaggggcactgcggcacctaagaagccttaaatgagagctaatccaatctagagagcgatggtgtcagcatttcggtctgcatatctgtgtgtccgtatctgcgtttgtgtgcgtgtacgtgtgcccctgtgtgtgggcccagttttcaggcatgtagaataagcatggagtcatattgaggaggactcacttcttgaagatatgcttgttgctttacaacatatgtaagctattctttagcataaatgcattcattctttaataaaaatatgtttgcatt

SEQ ID NO: 15554 - DNA, 839 bp, Homo sapiens
  source 1..839: mol_type = unassigned DNA
atgaaaagccttgtacaagaggcttcgtgccatgttcagcctgccccttagccttccactgtgtgaggacacagcattccttccttccaagtgctgcagctctcacaagacaatcaaacaagcccgcaccttgatcatgatcttcctagcctccggaacgcactttcagaccatgctgaagtctaaattgaatgtcttaacactgaaaaaggaacctctcccagcggtcatcttccatgagccggaggccattgagctgtgcacgaccacaccgctgatgaagacaaggactcacagtggctgcaaggttacctacctgggcaaagtctccaccactggcatgcagtttttgtcaggctgcacagaaaagccagtcattgagctctggaagaagcacacgctagcccgagaggatgtctttccggccaatgccctcctggaaatccggccattccaagtttggctccatcatctcgaccacaaaggggaggccacagtgcacatggataccttccaggtggcccgcatcgcctactgcaccgccgaccacaacgtgagccccaacatcttcgcctgggtctacagggagatcaatgatgacctgtcctaccagatggactgccacgccgtggagtgcgagagcaagctcgaggccaagaaactggcccacgccatgatggaggccttcaggaagactttccacagtatgaagagcgacgggcggatccacagcaacagctcctccgaagaggtttcccaggaattggaatccgatgatggctgaatgaacttgagacgcttcagcaaaggcagcattggtcacggagttcaagggaata

SEQ ID NO: 15555 - DNA, 553 bp, Homo sapiens
  source 1..553: mol_type = unassigned DNA
acaagttgccggcagctgagcgccgcgcctcctcctgctcgcagccccctacgcccacccggcggcggtggccagcgccaggacgcacatcccgcggacaccgaccccagatgtaaagcgggaccccagcccctcgccccccggcgcgatcgacagtctcgccagcgtctcctctgccaaaacccagggctggaagatgtggcagccggccacggagcgcctgcaggatggctgctgcaactccagtcacaatacacttgtccctcagtatccctggggaatcgattcaggacctcttgtgaataccaaaatctacagatagtcaagaccgtgcactttcagaccatgctgaagtctaaattgaatgtcttaacactgaaaaaggaacctctcccagcggtcatcttccatgagccggaggccattgagctgtgcacgaccacaccgctgatgaagacaaggactcacagtggctgcaaggttacctacctgggcaaagtctccaccactggcatgcagtttttgtcaggctgcacagaaaagccagtcattg

SEQ ID NO: 15556 - DNA, 389 bp, Homo sapiens
  source 1..389: mol_type = unassigned DNA
tggtggtcttcaatgacaaagtcagtcccccaagtctggggttcctggctggctatggcttttaggctgcatgtgagaccatgtccagatgttcatccagacccacagcatggcagaggccttgttgttcactggcagtctccatcagaccttccgtcccaggatgttctttggaggatcttcaaaggcaaccttcctgtggctgcttctccgtgtttgcagtttgaaaatggactagaaccactagcacaagacagcggttatcttgcatgtccatagcaaagatattagtatcttaaatgtttaaattattatcctttacaatgttgccttttctaagtttgtattatttatacttctaacaccattacagtttaaacctgcagtaa

SEQ ID NO: 15557 - DNA, 9356 bp, Homo sapiens
  source 1..9356: mol_type = unassigned DNA
atggcctcagaagtggtgtgcgggctcatcttcaggctgctgctgcccatctgcctggcagtagcatgtgcattccgatacaatgggctctcctttgtctaccttatctacctcttgctcattcctctgttctcagaaccaacaaaaacgacgatgcaaggacatacgggacggttattaaagtctctgtgcttcatcagtctttccttcctgttgctgcacatcattttccacatcacgttggtgagccttgaagctcaacatcgtattgcacctggctacaactgctcaacatgggaaaagacattccggcagatcggctttgaaagcttaaagggagctgatgctggcaatgggatcagagtgtttgtacctgacatcgggatgttcattgctagtctgaccatctggctcctctgtagaaacattgttcagaaacctgtgacagacgaagcagcacagagtaacccggagtttgaaaatgaagaattggctgaaggagaaaaaattgattcagaagaggcactgatctatgaagaggatttcaatggaggagatggtgttgaaggcgagttggaagaaagcacgaagttaaaaatgttccgcaggcttgcctctgtggcctctaagctcaaggagttcattggcaacatgatcaccactgctgggaaagtcgttgttaccatcttactgggctcctcgggcatgatgttgccgtctttgacatcatctgtgtatttttttgtatttttgggtctgtgcacctggtggtcctggtgccggacgttcgacccattgctgttcagctgtctctgtgttctgctggctattttcactgctggacatttgattggactttatttataccagttccaattctttcaagaggcagttccacccaatgactactatgcaaggttgtttggtatcaagtcagtaattcaaacggactgttcaagtacttggaagatcatagtgaacccggacctgtcgtggtaccaccacgccaaccctatcctcctgctggtgatgtactacactctggccactctgatccgcatctggctgcaagagccccttgtgcaggatgaggggaccaaagaagaggacaaagccctggcttgtagccccatccaaataacagcggggaggaggcggagcctgtggtacgcaacccattaccccactgatgagagaaaacttttatccatgacccaggatgactacaaaccatctgatggcctgctggtgactgtgaacggcaaccccgtggattaccacaccatccacccaagcctgcccatggagaacggccctggcaaagccgacctctactccacccctcagtaccggtgggagccctctgatgaatcctcagaaaagcgagaggaggaagaggaagagaaagaagaatttgaagaagaaaggagccgtgaggaaaaaagaagtatcaaagttcatgccatggtctccgtattccaatttattatgaaacaaagttacatctgtgccctcatagctatgatggcctggagcatcacctatcacagctggctgaccttcgtgctgctgatctggtcgtgcactctttggatgattcgcaacagaagaaaatatgccatgatcagctctcccttcatggtggtttatggaaacctattgttgatattacagtatatatggagttttgaacttcctgaaattaaaaaagttccaggatttttagaaaagaaagagccaggagaacttgcttccaaaatccttttcaccattactttttggctactgctgaggcagcacctcacagagcaaaaagctctgcaagaaaaggaagctcttttatcggaagtcaaaattggcagtcaggaaaatgaagaaaaagatgaggaacttcaagatatacaagtggaaggagagcccaaagaggaggaagaagaggaagcgaaggaagagaagcaagagagaaagaaggtagagcaagaggaagctgaagaagaagatgagcaggacatcatgaaagtcctgggcaatctggtggtggccatgttcatcaagtactggatctacgtctgcggaggcatgttcttcttcgtcagcttcgagggtaaaatcgtaatgtacaaaatcatctacatggtgctgttcctgttctgtgtggccctataccaggtgcactatgaatggtggaggaaaattctaaaatatttttggatgtcagtggttatttacactatgctggtgcttatctttatatacacatatcagtttgagaacttcccaggcctgtggcaaaatatgactggactgaaaaaagaaaagcttgaggatcttggcttaaagcagtttactgtggctgaactattcactcgcatattcatcccaacctcctttctgctggtgtgcattttacacctgcactacttccatgaccggttccttgaactcacagacctcaagtccattcccagcaaagaagacaacaccatctacagactggcccacccggaaggaagcctcccggacctcaccatgatgcatctgactgccagcctggagaagccggaggtgaggaagttggctgagcctggggaggagaagcttgagggctactctgaaaaagcccagaagggtgatcttgggaaagacagcgaggagtcagaggaggacggagaggaagaggaggaatccgaggaggaggaagaaacatcagacttaaggaacaaatggcacctggtgattgaccgcctcactgtgctcttcttaaaattcctggagtattttcacaagctgcaggtgttcatgtggtggattttggagttgcacatcatcaaaatcgtttcctcttacattatctgggtttctgtgaaagaggtgtctctgttcaactatgtatttttgatttcttgggcttttgctctgccgtacgccaagctgcgccgtctggcttcaagtgtctgcacagtctggacgtgtgtgatcatcgtctgcaaaatgttgtaccagctccaaaccattaagcctgagaacttctctgttaactgttccttgccaaatgaaaatcaaacaaacatcccctttaatgagttgaacaagtctctgctctacagcgctcctatcgatcctacagagtgggtcggcctgcggaagtcttcgcctctgctagtctacctgaggaataacctcctgatgctggctatcctggcctttgaagtcaccatttaccgccatcaggaatactatcgaggtcgaaataacctgacggcccctgtgtctagaactatctttcatgacattacaagactacatctagatgatggacttattaattgtgccaaatatttcattaattacttcttttacaagtttggtctggagacctgtttcctaatgtcagttaacgtcattggccagcgaatggatttctatgccatgatccacgcctgctggctgatcgctgtcttatatagacgcagaaggaaagccatcgcagagatctggcccaagtactgctgcttcctggcatgcatcatcaccttccagtatttcatctgcattggcatcccacctgctccttgccgagattacccgtggagattcaagggtgccagcttcaatgacaacatcataaagtggctgtacttcccagatttcattgtgcggcccaaccctgtgtttctcgtctatgacttcatgctgcttctgtgtgcctccttacaacggcagatttttgaggatgagaacaaggctgcagtgcgaatcatggcaggtgacaatgtcgagatctgcatgaaccttgatgcggcctccttcagccaacataaccctgtgccagattttattcactgcagatcttacttagacatgtccaaagtgatcatcttcagctacctcttctggtttgtgctcaccatcatcttcatcactgggaccaccaggatcagcatcttttgcatggggtacctggtggcctgtttctacttcctgctctttgggggcgatttgctgttgaaacccatcaagagcatcctgcgctactgggactggctgatcgcatacaacgtttttgtgattacgatgaaaaatatcctgtcaataggagcatgtggatacattggaacattggtgcacaatagttgttggttgatccaggctttcagcctggcctgcacagtcaaaggctatcaaatgcctgctgctaattcaccctgtacacttcccagtggggaagcaggaatcatttgggacagcatatgttttgccttcctcctgctgcaaagaagagttttcatgagttattattttctacatgttgtggctgatataaaagcttcccagattctggcatcaagaggagctgaacttttccaggccacaattgtaaaagctgtaaaggcaagaattgaggaagagaagaagtccatggaccagctgaagcgacagatggatcgcatcaaggccaggcaacagaaatataaaaagggtaaggagaggatgctgagcttgacccaggagccaggggaaggccaggacatgcaaaaactctctgaagaggatgatgaaagagaagcagacaaacagaaagccaagggcaaaaaaaagcagtggtggcggccttgggttgatcatgcttccatggtcaggagtggagattattatttgtttgaaacggatagtgaagaggaggaagaggaagaattaaagaaggaagatgaagaacctccacgaaggtcagcattccagtttgtttatcaagcctggattactgatcctaaaacagcactccgacaaagacacaaagagaaaaaaaggtctgcaagagaagaacggaaacgaaggcggaaaggatccaaggagggtcctgtggaatgggaagaccgggaggatgaaccaatcaaaaagaaatccgatggaccagataatatcatcaagaggatatttaatattttgaaatttacctgggtcctatttctggcaacagtggacagtttcactacttggcttaactccatttcaagggagcatattgatatatctacagttctgagaattgaacgatgcatgctgaccagagaaattaagaagggcaatgttccaactcgggagagcatccacatgtactatcagaaccacatcatgaacctttccagagagtcgggactggacaccattgacgagcatcccggagctgcttcaggtgcacagacagcccacaggatggatagtttagattcacatgacagtatctccagcgagcccacgcagtgtaccatgctgtactcacgccaggggaccactgagaccatcgaggaggtggaggctgagcaggaggaggaggcagggagcacggcgcctgagcccagggaggccaaggagtacgaggccactgggtacgatgtgggagccatgggtgccgaggaggccagcctcaccccagaggaagagctgacacagttctccaccttggacggggatgtggaggccccaccctcctacagcaaggctgtgagcttcgagcatctgtccttcggctcgcaggacgactctgcaggcaagaaccgtatggcagtcagcccggacgacagccgcaccgacaagctggggtccagcatcttacctcccctgacccatgagctgacggccagcgagctgctgctgaaaaagatgtttcacgacgatgagcttgaagagtcagagaaattctacgtggggcagccccgatttctgctgctcttctatgccatgtacaataccctggtggcccgctcggagatggtgtgctacttcgtgatcatcctcaaccacatggtctctgcctccatgatcacgctcctgcttcccatcctcatcttcctctgggccatgttgtccgtccccaggcccagccgccggttctggatgatggccatcgtctatactgaggtggcaattgtagtcaagtatttcttccaatttgggttctttccctggaataagaatgtggaggtgaacaaagataaaccgtatcaccccccaaacatcataggagtggaaaagaaggaaggttatgttctctatgacctcatccagctcctggctctgttctttcatcgatcaattttgaagtgccatggcttatgggatgaagatgacatgactgaaagtggcatggccagggaggaatcagatgatgagctctccctcggtcatggcaggagggactcctccgattctctcaagtccatcaacctggccgcgtctgtggagtcagtgcatgtgaccttcccggagcagcagacagctgtccggaggaagcgctccggcagcagctccgagccatcccagagatccagcttttcttcaaacagatcccaaagaggcagcacaagcacccgaaacagcagtcaaaaaggaagcagtgttttgagtattaagcaaaaaggcaaaagggaactttatatggaaaagcttcaagaacatttaatcaaagcaaaagcctttaccataaagaagacgctggagatctatgtgcccatcaaacagttcttttacaacctcatccacccggagtatagcgccgtgactgacgtgtatgtactcatgttcctggctgacactgtggacttcatcatcattgtcttcggcttttgggcctttgggaaacactcagcagctgcagacatcacctcttcactgtcagaggaccaggtcccggggccgtttttggtgatggtcctcattcagtttggaaccatggtggtggaccgagccctctacctcaggaagactgtactgggaaaggtcatcttccaggtcattcttgtgttcggaattcacttctggatgttcttcatcttacctggtgtgactgagaggaaattcagccagaacctggttgcccagctttggtactttgtgaaatgtgtttacttcgggttgtctgcttaccagatccgttgtggctacccaacgcgagtcctggggaacttcctcaccaagagctacaattacgtcaacctcttcttattccaagggtttcgcctcgtgccctttttgactgagctgagggcagtgatggactgggtgtggacggacacaactttgagcctgtccagctggatctgtgtggaggacatctatgctcacatattcatcctgaagtgttggcgggagtcggagaagcctattttcacaatgagtgcccaacaaagccagttgaaagttatggaccagcagagctttaacaaatttatacaagctttttctagggacaccggtgctatgcaatttctggaaaattatgaaaaagaagacataacagtagcagaactggaaggaaactcaaattctttgtggaccatcagcccacccagtaagcagaaaatgatacacgaactcctggaccccaatagtagcttctctgttgttttttcatggagtattcagagaaacttaagtctgggtgcaaaatcggaaatagcaacagataagctttcttttcctcttaaaaatattactcgaaagaatatcgctaaaatgatagcaggcaacagcacagaaagttcaaaaacaccagtgaccatagaaaagatttatccatattatgtgaaagcacctagtgattctaactcaaaacctataaagcaacttttatctgaaaataatttcatggatattaccatcattttgtccagagacaatacaactaaatataacagtgagtggtgggttctcaacctgactggaaacagaatatacaatccgaactctcaggccctggaactggtggtcttcaatgacaaagtcagtcccccaagtctggggttcctggctggctatggtattatgggattatatgcttcagttgtccttgtgattgggaaatttgtccgtgaattcttcagtgggatttctcactccatcatgtttgaagagcttccaaatgtggatcgaattttgaagttgtgcacagatatttttttagttcgagagacaggagaactggagctagaagaagatctctatgccaaattaatattcctatatcgctcaccagagacaatgatcaaatggactagagaaaaaacaaattgaaaccttagaacacagactgcaaataatgttaacatttgaattttttttaaaagcacaatattctcataagagctaagcatttctagttcgacggaaatggtttgtttctcttctgataggtagacaaaaggagctgatatccttctgcagtaaaagctaccttgcaagttaaggcactgttgaaaatgttatttgtaactccatttctctgaaatcagggctacttgctttatgttttagtcaacagtgtctcgcattctgattgatcatgtgaaggaatcatttatgggccccgtccctaagagaaacagaagaggagtcagaaagaaagatgcctgtgttttcctctgtggggcccgtgcacttcctggagagatgctacaatgcaatatacagcgctccatccccactggggaagctgctgtgatgagactagatgagccttcaacacactcagaaaatgcaacagcaatagggggcagacagctcctacctgtgtttctaggagcaaaagagagggaactaattgcccgtgaagacgccagtggaaggatcagcctcattctaagcaaaaacatagtattagtgatactcttactgccttatcttaaccaaggactaataggatacctttccattaaacaccagtgacttctcaggaaaaaaaaaaaaaaggagcaaaacaaatgatgtgtacacctgctttgttatggtccaccagtgaccagcttcaatgaggggaaccattctggagggctgcggtctcctgtgcaaacagacatgaggcagaagagtaaaaagaccaacccagtgggacctagaatactttgtaactctttaataactgaggtcaggaccgctcttctgccttccccttcccttaacgtgctttttcccatttccatgatttaaggcaatggtttttccagtatgtgacattttccttcctgtttttcaggtatatcaaagagtttacatattccaattcacatttttacatctgagacgggttttttaagttcataattatgaaagaaatatgtatattgagcttggggaaataaaaatggccttttcttaaattattattattggtaatacaacctcttcattaaataacaatgtagcatgaaaaatttatgattgaaatgtagttttcattccatattaagatacagtttctgagaagaatcattgaatggactagaatatgtcaaaaattgatcctgtgtagtttgggttcagggctgacttaaaataaagcacatcctgcaaagtcattttaa

SEQ ID NO: 15558 - DNA, 2671 bp, Homo sapiens
  source 1..2671: mol_type = unassigned DNA
atgttaacaattaatcagttcaagttggtcatcttcctagataacctggaccgtaatcttcctagataacctggacatcaggattggtgatggggctgaggggccagtgagtgtgccatggcttatgggatgaagatgacatgactgaaagtggcatggccagggaggaatcagatgatgagctctccctcggtcatggcaggagggactcctccgattctctcaagtccatcaacctggccgcgtctgtggagtcagtgcatgtgaccttcccggagcagcagacagctgtccggaggaagcgctccggcagcagctccgagccatcccagagatccagcttttcttcaaacagatcccaaagaggcagcacaagcacccgaaacagcagtcaaaaaggaagcagtgttttgagtattaagcaaaaaggcaaaagggaactttatatggaaaagcttcaagaacatttaatcaaagcaaaagcctttaccataaagaagacgctggagatctatgtgcccatcaaacagttcttttacaacctcatccacccggagtatagcgccgtgactgacgtgtatgtactcatgttcctggctgacactgtggacttcatcatcattgtcttcggcttttgggcctttgggaaacactcagcagctgcagacatcacctcttcactgtcagaggaccaggtcccggggccgtttttggtgatggtcctcattcagtttggaaccatggtggtggaccgagccctctacctcaggaagactgtactgggaaaggtcatcttccaggtcattcttgtgttcggaattcacttctggatgttcttcatcttacctggtgtgactgagaggaaattcagccagaacctggttgcccagctttggtactttgtgaaatgtgtttacttcgggttgtctgcttaccagatccgttgtggctacccaacgcgagtcctggggaacttcctcaccaagagctacaattacgtcaacctcttcttattccaagggtttcgcctcgtgccctttttgactgagctgagggcagtgatggactgggtgtggacggacacaactttgagcctgtccagctggatctgtgtggaggacatctatgctcacatattcatcctgaagtgttggcgggagtcggagaagagataccctcagccacggggccagaagaagaagaaagtggtgaagtatggcatgggaggaatgatcatcgtcctgctcatctgcattgtctggtttcctcttctcttcatgtctttgatcaaatctgtggctggggtcatcaaccagcccctggacgtctccgtcacaattaccctgggagggtatcagcctattttcacaatgagtgcccaacaaagccagttgaaagttatggaccagcagagctttaacaaatttatacaagctttttctagggacaccggtgctatgcaatttctggaaaattatgaaaaagaagacataacagtagcagaactggaaggaaactcaaattctttgtggaccatcagcccacccagtaagcagaaaatgatacacgaactcctggaccccaatagtagcttctctgttgttttttcatggagtattcagagaaacttaagtctgggtgcaaaatcggaaatagcaacagataagctttcttttcctcttaaaaatattactcgaaagaatatcgctaaaatgatagcaggcaacagcacagaaagttcaaaaacaccagtgaccatagaaaagatttatccatattatgtgaaagcacctagtgattctaactcaaaacctataaagcaacttttatctgaaaataatttcatggatattaccatcattttgtccagagacaatacaactaaatataacagtgagtggtgggttctcaacctgactggaaacagaatatacaatccgaactctcaggccctggaactggtggtcttcaatgacaaagtcagtcccccaagtctggggttcctggctggctatggtattatgggattatatgcttcagttgtccttgtgattgggaaatttgtccgtgaattcttcagtgggatttctcactccatcatgtttgaagagcttccaaatgtggatcgaattttgaagttgtgcacagatatttttttagttcgagagacaggagaactggagctagaagaagatctctatgccaaattaatattcctatatcgctcaccagagacaatgatcaaatggactagagaaaaaacaaattgaaaccttagaacacagactgcaaataatgttaacatttgaattttttttaaaagcacaatattctcataagagctaagcatttctagttcgacggaaatggtttgtttctcttctgataggtagacaaaaggagctgatatccttctgcagtaaaagctaccttgcaagttaaggcactgttgaaaatgttatttgtaactccatttctctgaaatcagggctacttgctttatgttttagtcaacagtgtctcgcattctgattgatcatgtgaaggaatcatttatgggccccgtccctaagagaaacagaagaggagtcagaaagaaagatgcctgtgttttcctctgtggggcccgtgcacttcctggagagatgctacaatgcaatatacagcgctc

SEQ ID NO: 15559 - DNA, 8334 bp, Homo sapiens
  source 1..8334: mol_type = unassigned DNA
atggcctcagaagtggtgtgcgggctcatcttcaggctgctgctgcccatctgcctggcagtagcatgtgcattccgatacaatgggctctcctttgtctaccttatctacctcttgctcattcctctgttctcagaaccaacaaaaacgacgatgcaaggacatacgggacggttattaaagtctctgtgcttcatcagtctttccttcctgttgctgcacatcattttccacatcacgttggtgagccttgaagctcaacatcgtattgcacctggctacaactgctcaacatgggaaaagacattccggcagatcggctttgaaagcttaaagggagctgatgctggcaatgggatcagagtgtttgtacctgacatcgggatgttcattgctagtctgaccatctggctcctctgtagaaacattgttcagaaacctgtgacagacgaagcagcacagagtaacccggagtttgaaaatgaagaattggctgaaggagaaaaaattgattcagaagaggcactgatctatgaagaggatttcaatggaggagatggtgttgaaggcgagttggaagaaagcacgaagttaaaaatgttccgcaggcttgcctctgtggcctctaagctcaaggagttcattggcaacatgatcaccactgctgggaaagtcgttgttaccatcttactgggctcctcgggcatgatgttgccgtctttgacatcatctgtgtatttttttgtatttttgggtctgtgcacctggtggtcctggtgccggacgttcgacccattgctgttcagctgtctctgtgttctgctggctattttcactgctggacatttgattggactttatttataccagttccaattctttcaagaggcagttccacccaatgactactatgcaaggttgtttggtatcaagtcagtaattcaaacggactgttcaagtacttggaagatcatagtgaacccggacctgtcgtggtaccaccacgccaaccctatcctcctgctggtgatgtactacactctggccactctgatccgcatctggctgcaagagccccttgtgcaggatgaggggaccaaagaagaggacaaagccctggcttgtagccccatccaaataacagcggggaggaggcggagcctgtggtacgcaacccattaccccactgatgagagaaaacttttatccatgacccaggatgactacaaaccatctgatggcctgctggtgactgtgaacggcaaccccgtggattaccacaccatccacccaagcctgcccatggagaacggccctggcaaagccgacctctactccacccctcagtaccggtgggagccctctgatgaatcctcagaaaagcgagaggaggaagaggaagagaaagaagaatttgaagaagaaaggagccgtgaggaaaaaagaagtatcaaagttcatgccatggtctccgtattccaatttattatgaaacaaagttacatctgtgccctcatagctatgatggcctggagcatcacctatcacagctggctgaccttcgtgctgctgatctggtcgtgcactctttggatgattcgcaacagaagaaaatatgccatgatcagctctcccttcatggtggtttatggaaacctattgttgatattacagtatatatggagttttgaacttcctgaaattaaaaaagttccaggatttttagaaaagaaagagccaggagaacttgcttccaaaatccttttcaccattactttttggctactgctgaggcagcacctcacagagcaaaaagctctgcaagaaaaggaagctcttttatcggaagtcaaaattggcagtcaggaaaatgaagaaaaagatgaggaacttcaagatatacaagtggaaggagagcccaaagaggaggaagaagaggaagcgaaggaagagaagcaagagagaaagaaggtagagcaagaggaagctgaagaagaagatgagcaggacatcatgaaagtcctgggcaatctggtggtggccatgttcatcaagtactggatctacgtctgcggaggcatgttcttcttcgtcagcttcgagggtaaaatcgtaatgtacaaaatcatctacatggtgctgttcctgttctgtgtggccctataccaggtgcactatgaatggtggaggaaaattctaaaatatttttggatgtcagtggttatttacactatgctggtgcttatctttatatacacatatcagtttgagaacttcccaggcctgtggcaaaatatgactggactgaaaaaagaaaagcttgaggatcttggcttaaagcagtttactgtggctgaactattcactcgcatattcatcccaacctcctttctgctggtgtgcattttacacctgcactacttccatgaccggttccttgaactcacagacctcaagtccattcccagcaaagaagacaacaccatctacagccatgccaaagtcaatggtcgcgtatatctaataataaatagcatcaagaaaaaattaccaatccaccaaaatgaactggcccacccggaaggaagcctcccggacctcaccatgatgcatctgactgccagcctggagaagccggaggtgaggaagttggctgagcctggggaggagaagcttgagggctactctgaaaaagcccagaagggtgatcttgggaaagacagcgaggagtcagaggaggacggagaggaagaggaggaatccgaggaggaggaagaaacatcagacttaaggaacaaatggcacctggtgattgaccgcctcactgtgctcttcttaaaattcctggagtattttcacaagctgcaggtgttcatgtggtggattttggagttgcacatcatcaaaatcgtttcctcttacattatctgggtttctgtgaaagaggtgtctctgttcaactatgtatttttgatttcttgggcttttgctctgccgtacgccaagctgcgccgtctggcttcaagtgtctgcacagtctggacgtgtgtgatcatcgtctgcaaaatgttgtaccagctccaaaccattaagcctgagaacttctctgttaactgttccttgccaaatgaaaatcaaacaaacatcccctttaatgagttgaacaagtctctgctctacagcgctcctatcgatcctacagagtgggtcggcctgcggaagtcttcgcctctgctagtctacctgaggaataacctcctgatgctggctatcctggcctttgaagtcaccatttaccgccatcaggaatactatcgaggtcgaaataacctgacggcccctgtgtctagaactatctttcatgacattacaagactacatctagatgatggacttattaattgtgccaaatatttcattaattacttcttttacaagtttggtctggagacctgtttcctaatgtcagttaacgtcattggccagcgaatggatttctatgccatgatccacgcctgctggctgatcgctgtcttatatagacgcagaaggaaagccatcgcagagatctggcccaagtactgctgcttcctggcatgcatcatcaccttccagtatttcatctgcattggcatcccacctgctccttgccgagattacccgtggagattcaagggtgccagcttcaatgacaacatcataaagtggctgtacttcccagatttcattgtgcggcccaaccctgtgtttctcgtctatgacttcatgctgcttctgtgtgcctccttacaacggcagatttttgaggatgagaacaaggctgcagtgcgaatcatggcaggtgacaatgtcgagatctgcatgaaccttgatgcggcctccttcagccaacataaccctgtgccagattttattcactgcagatcttacttagacatgtccaaagtgatcatcttcagctacctcttctggtttgtgctcaccatcatcttcatcactgggaccaccaggatcagcatcttttgcatggggtacctggtggcctgtttctacttcctgctctttgggggcgatttgctgttgaaacccatcaagagcatcctgcgctactgggactggctgatcgcatacaacgtttttgtgattacgatgaaaaatatcctgtcaataggagcatgtggatacattggaacattggtgcacaatagttgttggttgatccaggctttcagcctggcctgcacagtcaaaggctatcaaatgcctgctgctaattcaccctgtacacttcccagtggggaagcaggaatcatttgggacagcatatgttttgccttcctcctgctgcaaagaagagttttcatgagttattattttctacatgttgtggctgatataaaagcttcccagattctggcatcaagaggagctgaacttttccaggccacaattgtaaaagctgtaaaggcaagaattgaggaagagaagaagtccatggaccagctgaagcgacagatggatcgcatcaaggccaggcaacagaaatataaaaagggtaaggagaggatgctgagcttgacccaggagccaggggaaggccaggacatgcaaaaactctctgaagaggatgatgaaagagaagcagacaaacagaaagccaagggcaaaaaaaagcagtggtggcggccttgggttgatcatgcttccatggtcaggagtggagattattatttgtttgaaacggatagtgaagaggaggaagaggaagaattaaagaaggaagatgaagaacctccacgaaggtcagcattccagtttgtttatcaagcctggattactgatcctaaaacagcactccgacaaagacacaaagagaaaaaaaggtctgcaagagaagaacggaaacgaaggcggaaaggatccaaggagggtcctgtggaatgggaagaccgggaggatgaaccaatcaaaaagaaatccgatggaccagataatatcatcaagaggatatttaatattttgaaatttacctgggtcctatttctggcaacagtggacagtttcactacttggcttaactccatttcaagggagcatattgatatatctacagttctgagaattgaacgatgcatgctgaccagagaaattaagaagggcaatgttccaactcgggagagcatccacatgtactatcagaaccacatcatgaacctttccagagagtcgggactggacaccattgacgagcatcccggagctgcttcaggtgcacagacagcccacaggatggatagtttagattcacatgacagtatctccagcgagcccacgcagtgtaccatgctgtactcacgccaggggaccactgagaccatcgaggaggtggaggctgagcaggaggaggaggcagggagcacggcgcctgagcccagggaggccaaggagtacgaggccactgggtacgatgtgggagccatgggtgccgaggaggccagcctcaccccagaggaagagctgacacagttctccaccttggacggggatgtggaggccccaccctcctacagcaaggctgtgagcttcgagcatctgtccttcggctcgcaggacgactctgcaggcaagaaccgtatggcagtcagcccggacgacagccgcaccgacaagctggggtccagcatcttacctcccctgacccatgagctgacggccagcgagctgctgctgaaaaagatgtttcacgacgatgagcttgaagagtcagagaaattctacgtggggcagccccgatttctgctgctcttctatgccatgtacaataccctggtggcccgctcggagatggtgtgctacttcgtgatcatcctcaaccacatggtctctgcctccatgatcacgctcctgcttcccatcctcatcttcctctgggccatgttgtccgtccccaggcccagccgccggttctggatgatggccatcgtctatactgaggtggcaattgtagtcaagtatttcttccaatttgggttctttccctggaataagaatgtggaggtgaacaaagataaaccgtatcaccccccaaacatcataggagtggaaaagaaggaaggttatgttctctatgacctcatccagctcctggctctgttctttcatcgatcaattttgaagtgccatggcttatgggatgaagatgacatgactgaaagtggcatggccagggaggaatcagatgatgagctctccctcggtcatggcaggagggactcctccgattctctcaagtccatcaacctggccgcgtctgtggagtcagtgcatgtgaccttcccggagcagcagacagctgtccggaggaagcgctccggcagcagctccgagccatcccagagatccagcttttcttcaaacagatcccaaagaggcagcacaagcacccgaaacagcagtcaaaaaggaagcagtgttttgagtattaagcaaaaaggcaaaagggaactttatatggaaaagcttcaagaacatttaatcaaagcaaaagcctttaccataaagaagacgctggagatctatgtgcccatcaaacagttcttttacaacctcatccacccggagtatagcgccgtgactgacgtgtatgtactcatgttcctggctgacactgtggacttcatcatcattgtcttcggcttttgggcctttgggaaacactcagcagctgcagacatcacctcttcactgtcagaggaccaggtcccggggccgtttttggtgatggtcctcattcagtttggaaccatggtggtggaccgagccctctacctcaggaagactgtactgggaaaggtcatcttccaggtcattcttgtgttcggaattcacttctggatgttcttcatcttacctggtgtgactgagaggaaattcagccagaacctggttgcccagctttggtactttgtgaaatgtgtttacttcgggttgtctgcttaccagatccgttgtggctacccaacgcgagtcctggggaacttcctcaccaagagctacaattacgtcaacctcttcttattccaagggtttcgcctcgtgccctttttgactgagctgagggcagtgatggactgggtgtggacggacacaactttgagcctgtccagctggatctgtgtggaggacatctatgctcacatattcatcctgaagtgttggcgggagtcggagaagagataccctcagccacggggccagaagaagaagaaagtggtgaagtatggcatgggaggaatgatcatcgtcctgctcatctgcattgtctggtttcctcttctcttcatgtctttgatcaaatctgtggctggggtcatcaaccagcccctggacgtctccgtcacaattaccctgggagggtatcagcctattttcacaatgagtgcccaacaaagccagttgaaagttatggaccagcagagctttaacaaatttatacaagctttttctagggacaccggtgctatgcaatttctggaaaattatgaaaaagaagacataacagtagcagaactggaaggaaactcaaattctttgtggaccatcagcccacccagtaagcagaaaatgatacacgaactcctggaccccaatagtagcttctctgttgttttttcatggagtattcagagaaacttaagtctgggtgcaaaatcggaaatagcaacagataagctttcttttcctcttaaaaatattactcgaaagaatatcgctaaaatgatagcaggcaacagcacagaaagttcaaaaacaccagtgaccatagaaaagatttatccatattatgtgaaagcacctagtgattctaactcaaaacctataaagcaacttttatctgaaaataatttcatggatattaccatcattttgtccagagacaatacaactaaatataacagtgagtggtgggttctcaacctgactggaaacagaatatacaatccgaactctcaggccctggaactggtggtcttcaatgacaaagtcagtcccccaagtctggggttcctggctggctatggtattatgggattatatgcttcagttgtccttgtgattgggaaatttgtccgtgaattcttcagtgggatttctcactccatcatgtttgaagagcttccaaatgtggatcgaattttgaagttgtgcacagatatttttttagttcgagagacaggagaactggagctagaagaagatctctatgccaaattaatattcctatatcgctcaccagagacaatgatcaaatggactagagaaaaaacaaattga

SEQ ID NO: 15560 - DNA, 8259 bp, Homo sapiens
  source 1..8259: mol_type = unassigned DNA
atggcctcagaagtggtgtgcgggctcatcttcaggctgctgctgcccatctgcctggcagtagcatgtgcattccgatacaatgggctctcctttgtctaccttatctacctcttgctcattcctctgttctcagaaccaacaaaaacgacgatgcaaggacatacgggacggttattaaagtctctgtgcttcatcagtctttccttcctgttgctgcacatcattttccacatcacgttggtgagccttgaagctcaacatcgtattgcacctggctacaactgctcaacatgggaaaagacattccggcagatcggctttgaaagcttaaagggagctgatgctggcaatgggatcagagtgtttgtacctgacatcgggatgttcattgctagtctgaccatctggctcctctgtagaaacattgttcagaaacctgtgacagacgaagcagcacagagtaacccggagtttgaaaatgaagaattggctgaaggagaaaaaattgattcagaagaggcactgatctatgaagaggatttcaatggaggagatggtgttgaaggcgagttggaagaaagcacgaagttaaaaatgttccgcaggcttgcctctgtggcctctaagctcaaggagttcattggcaacatgatcaccactgctgggaaagtcgttgttaccatcttactgggctcctcgggcatgatgttgccgtctttgacatcatctgtgtatttttttgtatttttgggtctgtgcacctggtggtcctggtgccggacgttcgacccattgctgttcagctgtctctgtgttctgctggctattttcactgctggacatttgattggactttatttataccagttccaattctttcaagaggcagttccacccaatgactactatgcaaggttgtttggtatcaagtcagtaattcaaacggactgttcaagtacttggaagatcatagtgaacccggacctgtcgtggtaccaccacgccaaccctatcctcctgctggtgatgtactacactctggccactctgatccgcatctggctgcaagagccccttgtgcaggatgaggggaccaaagaagaggacaaagccctggcttgtagccccatccaaataacagcggggaggaggcggagcctgtggtacgcaacccattaccccactgatgagagaaaacttttatccatgacccaggatgactacaaaccatctgatggcctgctggtgactgtgaacggcaaccccgtggattaccacaccatccacccaagcctgcccatggagaacggccctggcaaagccgacctctactccacccctcagtaccggtgggagccctctgatgaatcctcagaaaagcgagaggaggaagaggaagagaaagaagaatttgaagaagaaaggagccgtgaggaaaaaagaagtatcaaagttcatgccatggtctccgtattccaatttattatgaaacaaagttacatctgtgccctcatagctatgatggcctggagcatcacctatcacagctggctgaccttcgtgctgctgatctggtcgtgcactctttggatgattcgcaacagaagaaaatatgccatgatcagctctcccttcatggtggtttatggaaacctattgttgatattacagtatatatggagttttgaacttcctgaaattaaaaaagttccaggatttttagaaaagaaagagccaggagaacttgcttccaaaatccttttcaccattactttttggctactgctgaggcagcacctcacagagcaaaaagctctgcaagaaaaggaagctcttttatcggaagtcaaaattggcagtcaggaaaatgaagaaaaagatgaggaacttcaagatatacaagtggaaggagagcccaaagaggaggaagaagaggaagcgaaggaagagaagcaagagagaaagaaggtagagcaagaggaagctgaagaagaagatgagcaggacatcatgaaagtcctgggcaatctggtggtggccatgttcatcaagtactggatctacgtctgcggaggcatgttcttcttcgtcagcttcgagggtaaaatcgtaatgtacaaaatcatctacatggtgctgttcctgttctgtgtggccctataccaggtgcactatgaatggtggaggaaaattctaaaatatttttggatgtcagtggttatttacactatgctggtgcttatctttatatacacatatcagtttgagaacttcccaggcctgtggcaaaatatgactggactgaaaaaagaaaagcttgaggatcttggcttaaagcagtttactgtggctgaactattcactcgcatattcatcccaacctcctttctgctggtgtgcattttacacctgcactacttccatgaccggttccttgaactcacagacctcaagtccattcccagcaaagaagacaacaccatctacagactggcccacccggaaggaagcctcccggacctcaccatgatgcatctgactgccagcctggagaagccggaggtgaggaagttggctgagcctggggaggagaagcttgagggctactctgaaaaagcccagaagggtgatcttgggaaagacagcgaggagtcagaggaggacggagaggaagaggaggaatccgaggaggaggaagaaacatcagacttaaggaacaaatggcacctggtgattgaccgcctcactgtgctcttcttaaaattcctggagtattttcacaagctgcaggtgttcatgtggtggattttggagttgcacatcatcaaaatcgtttcctcttacattatctgggtttctgtgaaagaggtgtctctgttcaactatgtatttttgatttcttgggcttttgctctgccgtacgccaagctgcgccgtctggcttcaagtgtctgcacagtctggacgtgtgtgatcatcgtctgcaaaatgttgtaccagctccaaaccattaagcctgagaacttctctgttaactgttccttgccaaatgaaaatcaaacaaacatcccctttaatgagttgaacaagtctctgctctacagcgctcctatcgatcctacagagtgggtcggcctgcggaagtcttcgcctctgctagtctacctgaggaataacctcctgatgctggctatcctggcctttgaagtcaccatttaccgccatcaggaatactatcgaggtcgaaataacctgacggcccctgtgtctagaactatctttcatgacattacaagactacatctagatgatggacttattaattgtgccaaatatttcattaattacttcttttacaagtttggtctggagacctgtttcctaatgtcagttaacgtcattggccagcgaatggatttctatgccatgatccacgcctgctggctgatcgctgtcttatatagacgcagaaggaaagccatcgcagagatctggcccaagtactgctgcttcctggcatgcatcatcaccttccagtatttcatctgcattggcatcccacctgctccttgccgagattacccgtggagattcaagggtgccagcttcaatgacaacatcataaagtggctgtacttcccagatttcattgtgcggcccaaccctgtgtttctcgtctatgacttcatgctgcttctgtgtgcctccttacaacggcagatttttgaggatgagaacaaggctgcagtgcgaatcatggcaggtgacaatgtcgagatctgcatgaaccttgatgcggcctccttcagccaacataaccctgtgccagattttattcactgcagatcttacttagacatgtccaaagtgatcatcttcagctacctcttctggtttgtgctcaccatcatcttcatcactgggaccaccaggatcagcatcttttgcatggggtacctggtggcctgtttctacttcctgctctttgggggcgatttgctgttgaaacccatcaagagcatcctgcgctactgggactggctgatcgcatacaacgtttttgtgattacgatgaaaaatatcctgtcaataggagcatgtggatacattggaacattggtgcacaatagttgttggttgatccaggctttcagcctggcctgcacagtcaaaggctatcaaatgcctgctgctaattcaccctgtacacttcccagtggggaagcaggaatcatttgggacagcatatgttttgccttcctcctgctgcaaagaagagttttcatgagttattattttctacatgttgtggctgatataaaagcttcccagattctggcatcaagaggagctgaacttttccaggccacaattgtaaaagctgtaaaggcaagaattgaggaagagaagaagtccatggaccagctgaagcgacagatggatcgcatcaaggccaggcaacagaaatataaaaagggtaaggagaggatgctgagcttgacccaggagccaggggaaggccaggacatgcaaaaactctctgaagaggatgatgaaagagaagcagacaaacagaaagccaagggcaaaaaaaagcagtggtggcggccttgggttgatcatgcttccatggtcaggagtggagattattatttgtttgaaacggatagtgaagaggaggaagaggaagaattaaagaaggaagatgaagaacctccacgaaggtcagcattccagtttgtttatcaagcctggattactgatcctaaaacagcactccgacaaagacacaaagagaaaaaaaggtctgcaagagaagaacggaaacgaaggcggaaaggatccaaggagggtcctgtggaatgggaagaccgggaggatgaaccaatcaaaaagaaatccgatggaccagataatatcatcaagaggatatttaatattttgaaatttacctgggtcctatttctggcaacagtggacagtttcactacttggcttaactccatttcaagggagcatattgatatatctacagttctgagaattgaacgatgcatgctgaccagagaaattaagaagggcaatgttccaactcgggagagcatccacatgtactatcagaaccacatcatgaacctttccagagagtcgggactggacaccattgacgagcatcccggagctgcttcaggtgcacagacagcccacaggatggatagtttagattcacatgacagtatctccagcgagcccacgcagtgtaccatgctgtactcacgccaggggaccactgagaccatcgaggaggtggaggctgagcaggaggaggaggcagggagcacggcgcctgagcccagggaggccaaggagtacgaggccactgggtacgatgtgggagccatgggtgccgaggaggccagcctcaccccagaggaagagctgacacagttctccaccttggacggggatgtggaggccccaccctcctacagcaaggctgtgagcttcgagcatctgtccttcggctcgcaggacgactctgcaggcaagaaccgtatggcagtcagcccggacgacagccgcaccgacaagctggggtccagcatcttacctcccctgacccatgagctgacggccagcgagctgctgctgaaaaagatgtttcacgacgatgagcttgaagagtcagagaaattctacgtggggcagccccgatttctgctgctcttctatgccatgtacaataccctggtggcccgctcggagatggtgtgctacttcgtgatcatcctcaaccacatggtctctgcctccatgatcacgctcctgcttcccatcctcatcttcctctgggccatgttgtccgtccccaggcccagccgccggttctggatgatggccatcgtctatactgaggtggcaattgtagtcaagtatttcttccaatttgggttctttccctggaataagaatgtggaggtgaacaaagataaaccgtatcaccccccaaacatcataggagtggaaaagaaggaaggttatgttctctatgacctcatccagctcctggctctgttctttcatcgatcaattttgaagtgccatggcttatgggatgaagatgacatgactgaaagtggcatggccagggaggaatcagatgatgagctctccctcggtcatggcaggagggactcctccgattctctcaagtccatcaacctggccgcgtctgtggagtcagtgcatgtgaccttcccggagcagcagacagctgtccggaggaagcgctccggcagcagctccgagccatcccagagatccagcttttcttcaaacagatcccaaagaggcagcacaagcacccgaaacagcagtcaaaaaggaagcagtgttttgagtattaagcaaaaaggcaaaagggaactttatatggaaaagcttcaagaacatttaatcaaagcaaaagcctttaccataaagaagacgctggagatctatgtgcccatcaaacagttcttttacaacctcatccacccggagtatagcgccgtgactgacgtgtatgtactcatgttcctggctgacactgtggacttcatcatcattgtcttcggcttttgggcctttgggaaacactcagcagctgcagacatcacctcttcactgtcagaggaccaggtcccggggccgtttttggtgatggtcctcattcagtttggaaccatggtggtggaccgagccctctacctcaggaagactgtactgggaaaggtcatcttccaggtcattcttgtgttcggaattcacttctggatgttcttcatcttacctggtgtgactgagaggaaattcagccagaacctggttgcccagctttggtactttgtgaaatgtgtttacttcgggttgtctgcttaccagatccgttgtggctacccaacgcgagtcctggggaacttcctcaccaagagctacaattacgtcaacctcttcttattccaagggtttcgcctcgtgccctttttgactgagctgagggcagtgatggactgggtgtggacggacacaactttgagcctgtccagctggatctgtgtggaggacatctatgctcacatattcatcctgaagtgttggcgggagtcggagaagagataccctcagccacggggccagaagaagaagaaagtggtgaagtatggcatgggaggaatgatcatcgtcctgctcatctgcattgtctggtttcctcttctcttcatgtctttgatcaaatctgtggctggggtcatcaaccagcccctggacgtctccgtcacaattaccctgggagggtatcagcctattttcacaatgagtgcccaacaaagccagttgaaagttatggaccagcagagctttaacaaatttatacaagctttttctagggacaccggtgctatgcaatttctggaaaattatgaaaaagaagacataacagtagcagaactggaaggaaactcaaattctttgtggaccatcagcccacccagtaagcagaaaatgatacacgaactcctggaccccaatagtagcttctctgttgttttttcatggagtattcagagaaacttaagtctgggtgcaaaatcggaaatagcaacagataagctttcttttcctcttaaaaatattactcgaaagaatatcgctaaaatgatagcaggcaacagcacagaaagttcaaaaacaccagtgaccatagaaaagatttatccatattatgtgaaagcacctagtgattctaactcaaaacctataaagcaacttttatctgaaaataatttcatggatattaccatcattttgtccagagacaatacaactaaatataacagtgagtggtgggttctcaacctgactggaaacagaatatacaatccgaactctcaggccctggaactggtggtcttcaatgacaaagtcagtcccccaagtctggggttcctggctggctatggtattatgggattatatgcttcagttgtccttgtgattgggaaatttgtccgtgaattcttcagtgggatttctcactccatcatgtttgaagagcttccaaatgtggatcgaattttgaagttgtgcacagatatttttttagttcgagagacaggagaactggagctagaagaagatctctatgccaaattaatattcctatatcgctcaccagagacaatgatcaaatggactagagaaaaaacaaattga

SEQ ID NO: 15561 - DNA, 8465 bp, Homo sapiens
  source 1..8465: mol_type = unassigned DNA
atggcctcagaagtggtgtgcgggctcatcttcaggctgctgctgcccatctgcctggcagtagcatgtgcattccgatacaatgggctctcctttgtctaccttatctacctcttgctcattcctctgttctcagaaccaacaaaaacgacgatgcaaggacatacgggacggttattaaagtctctgtgcttcatcagtctttccttcctgttgctgcacatcattttccacatcacgttggtgagccttgaagctcaacatcgtattgcacctggctacaactgctcaacatgggaaaagacattccggcagatcggctttgaaagcttaaagggagctgatgctggcaatgggatcagagtgtttgtacctgacatcgggatgttcattgctagtctgaccatctggctcctctgtagaaacattgttcagaaacctgtgacagacgaagcagcacagagtaacccggagtttgaaaatgaagaattggctgaaggagaaaaaattgattcagaagaggcactgatctatgaagaggatttcaatggaggagatggtgttgaaggcgagttggaagaaagcacgaagttaaaaatgttccgcaggcttgcctctgtggcctctaagctcaaggagttcattggcaacatgatcaccactgctgggaaagtcgttgttaccatcttactgggctcctcgggcatgatgttgccgtctttgacatcatctgtgtatttttttgtatttttgggtctgtgcacctggtggtcctggtgccggacgttcgacccattgctgttcagctgtctctgtgttctgctggctattttcactgctggacatttgattggactttatttataccagttccaattctttcaagaggcagttccacccaatgactactatgcaaggttgtttggtatcaagtcagtaattcaaacggactgttcaagtacttggaagatcatagtgaacccggacctgtcgtggtaccaccacgccaaccctatcctcctgctggtgatgtactacactctggccactctgatccgcatctggctgcaagagccccttgtgcaggatgaggggaccaaagaagaggacaaagccctggcttgtagccccatccaaataacagcggggaggaggcggagcctgtggtacgcaacccattaccccactgatgagagaaaacttttatccatgacccaggatgactacaaaccatctgatggcctgctggtgactgtgaacggcaaccccgtggattaccacaccatccacccaagcctgcccatggagaacggccctggcaaagccgacctctactccacccctcagtaccggtgggagccctctgatgaatcctcagaaaagcgagaggaggaagaggaagagaaagaagaatttgaagaagaaaggagccgtgaggaaaaaagaagtatcaaagttcatgccatggtctccgtattccaatttattatgaaacaaagttacatctgtgccctcatagctatgatggcctggagcatcacctatcacagctggctgaccttcgtgctgctgatctggtcgtgcactctttggatgattcgcaacagaagaaaatatgccatgatcagctctcccttcatggtggtttatggaaacctattgttgatattacagtatatatggagttttgaacttcctgaaattaaaaaagttccaggatttttagaaaagaaagagccaggagaacttgcttccaaaatccttttcaccattactttttggctactgctgaggcagcacctcacagagcaaaaagctctgcaagaaaaggaagctcttttatcggaagtcaaaattggcagtcaggaaaatgaagaaaaagatgaggaacttcaagatatacaagtggaaggagagcccaaagaggaggaagaagaggaagcgaaggaagagaagcaagagagaaagaaggtagagcaagaggaagctgaagaagaagatgagcaggacatcatgaaagtcctgggcaatctggtggtggccatgttcatcaagtactggatctacgtctgcggaggcatgttcttcttcgtcagcttcgagggtaaaatcgtaatgtacaaaatcatctacatggtgctgttcctgttctgtgtggccctataccaggtgcactatgaatggtggaggaaaattctaaaatatttttggatgtcagtggttatttacactatgctggtgcttatctttatatacacatatcagtttgagaacttcccaggcctgtggcaaaatatgactggactgaaaaaagaaaagcttgaggatcttggcttaaagcagtttactgtggctgaactattcactcgcatattcatcccaacctcctttctgctggtgtgcattttacacctgcactacttccatgaccggttccttgaactcacagacctcaagtccattcccagcaaagaagacaacaccatctacagccatgccaaagtcaatggtcgcgtatatctaataataaatagactggcccacccggaaggaagcctcccggacctcaccatgatgcatctgactgccagcctggagaagccggaggtgaggaagttggctgagcctggggaggagaagcttgagggctactctgaaaaagcccagaagggtgatcttgggaaagacagcgaggagtcagaggaggacggagaggaagaggaggaatccgaggaggaggaagaaacatcagacttaaggaacaaatggcacctggtgattgaccgcctcactgtgctcttcttaaaattcctggagtattttcacaagctgcaggtgttcatgtggtggattttggagttgcacatcatcaaaatcgtttcctcttacattatctgggtttctgtgaaagaggtgtctctgttcaactatgtatttttgatttcttgggcttttgctctgccgtacgccaagctgcgccgtctggcttcaagtgtctgcacagtctggacgtgtgtgatcatcgtctgcaaaatgttgtaccagctccaaaccattaagcctgagaacttctctgttaactgttccttgccaaatgaaaatcaaacaaacatcccctttaatgagttgaacaagtctctgctctacagcgctcctatcgatcctacagagtgggtcggcctgcggaagtcttcgcctctgctagtctacctgaggaataacctcctgatgctggctatcctggcctttgaagtcaccatttaccgccatcaggaatactatcgaggtcgaaataacctgacggcccctgtgtctagaactatctttcatgacattacaagactacatctagatgatggacttattaattgtgccaaatatttcattaattacttcttttacaagtttggtctggagacctgtttcctaatgtcagttaacgtcattggccagcgaatggatttctatgccatgatccacgcctgctggctgatcgctgtcttatatagacgcagaaggaaagccatcgcagagatctggcccaagtactgctgcttcctggcatgcatcatcaccttccagtatttcatctgcattggcatcccacctgctccttgccgagattacccgtggagattcaagggtgccagcttcaatgacaacatcataaagtggctgtacttcccagatttcattgtgcggcccaaccctgtgtttctcgtctatgacttcatgctgcttctgtgtgcctccttacaacggcagatttttgaggatgagaacaaggctgcagtgcgaatcatggcaggtgacaatgtcgagatctgcatgaaccttgatgcggcctccttcagccaacataaccctgtgccagattttattcactgcagatcttacttagacatgtccaaagtgatcatcttcagctacctcttctggtttgtgctcaccatcatcttcatcactgggaccaccaggatcagcatcttttgcatggggtacctggtggcctgtttctacttcctgctctttgggggcgatttgctgttgaaacccatcaagagcatcctgcgctactgggactggctgatcgcatacaacgtttttgtgattacgatgaaaaatatcctgtcaataggagcatgtggatacattggaacattggtgcacaatagttgttggttgatccaggctttcagcctggcctgcacagtcaaaggctatcaaatgcctgctgctaattcaccctgtacacttcccagtggggaagcaggaatcatttgggacagcatatgttttgccttcctcctgctgcaaagaagagttttcatgagttattattttctacatgttgtggctgatataaaagcttcccagattctggcatcaaggtggctgaacttttccaggccacaattgtaaaagctgtaaaggcaagaattgaggaagagaagaagtccatggaccagctgaagcgacagatggatcgcatcaaggccaggcaacagaaatataaaaagggtaaggagaggatgctgagcttgacccaggagccaggggaaggccaggacatgcaaaaactctctgaagaggatgatgaaagagaagcagacaaacagaaagccaagggcaaaaaaaagcagtggtggcggccttgggttgatcatgcttccatggtcaggagtggagattattatttgtttgaaacggatagtgaagaggaggaagaggaagaattaaagaaggaagatgaagaacctccacgaaggtcagcattccagtttgtttatcaagcctggattactgatcctaaaacagcactccgacaaagacacaaagagaaaaaaaggtctgcaagagaagaacggaaacgaaggcggaaaggatccaaggagggtcctgtggaatgggaagaccgggaggatgaaccaatcaaaaagaaatccgatggaccagataatatcatcaagaggatatttaatattttgaaatttacctgggtcctatttctggcaacagtggacagtttcactacttggcttaactccatttcaagggagcatattgatatatctacagttctgagaattgaacgatgcatgctgaccagagaaattaagaagggcaatgttccaactcgggagagcatccacatgtactatcagaaccacatcatgaacctttccagagagtcgggactggacaccattgacgagcatcccggagctgcttcaggtgcacagacagcccacaggatggatagtttagattcacatgacagtatctccagctgctacactgaagcaaccatgctgttctcaaggcagtccacccttgatgatttagatggacaagaaattcctaaaacaagcgagcgtgctcggcctaggctccgtaaaatgctcagcatggatatgtcctcctcatcagctgacagtggcagtttagcatcaagcgagcccacgcagtgtaccatgctgtactcacgccaggggaccactgagaccatcgaggaggtggaggctgagcaggaggaggaggcagggagcacggcgcctgagcccagggaggccaaggagtacgaggccactgggtacgatgtgggagccatgggtgccgaggaggccagcctcaccccagaggaagagctgacacagttctccaccttggacggggatgtggaggccccaccctcctacagcaaggctgtgagcttcgagcatctgtccttcggctcgcaggacgactctgcaggcaagaaccgtatggcagtcagcccggacgacagccgcaccgacaagctggggtccagcatcttacctcccctgacccatgagctgacggccagcgagctgctgctgaaaaagatgtttcacgacgatgagcttgaagagtcagagaaattctacgtggggcagccccgatttctgctgctcttctatgccatgtacaataccctggtggcccgctcggagatggtgtgctacttcgtgatcatcctcaaccacatggtctctgcctccatgatcacgctcctgcttcccatcctcatcttcctctgggccatgttgtccgtccccaggcccagccgccggttctggatgatggccatcgtctatactgaggtggcaattgtagtcaagtatttcttccaatttgggttctttccctggaataagaatgtggaggtgaacaaagataaaccgtatcaccccccaaacatcataggagtggaaaagaaggaaggttatgttctctatgacctcatccagctcctggctctgttctttcatcgatcaattttgaagtgccatggcttatgggatgaagatgacatgactgaaagtggcatggccagggaggaatcagatgatgagctctccctcggtcatggcaggagggactcctccgattctctcaagtccatcaacctggccgcgtctgtggagtcagtgcatgtgaccttcccggagcagcagacagctgtccggaggaagcgctccggcagcagctccgagccatcccagagatccagcttttcttcaaacagatcccaaagaggcagcacaagcacccgaaacagcagtcaaaaaggaagcagtgttttgagtattaagcaaaaaggcaaaagggaactttatatggaaaagcttcaagaacatttaatcaaagcaaaagcctttaccataaagaagacgctggagatctatgtgcccatcaaacagttcttttacaacctcatccacccggagtatagcgccgtgactgacgtgtatgtactcatgttcctggctgacactgtggacttcatcatcattgtcttcggcttttgggcctttgggaaacactcagcagctgcagacatcacctcttcactgtcagaggaccaggtcccggggccgtttttggtgatggtcctcattcagtttggaaccatggtggtggaccgagccctctacctcaggaagactgtactgggaaaggtcatcttccaggtcattcttgtgttcggaattcacttctggatgttcttcatcttacctggtgtgactgagaggaaattcagccagaacctggttgcccagctttggtactttgtgaaatgtgtttacttcgggttgtctgcttaccagatccgttgtggctacccaacgcgagtcctggggaacttcctcaccaagagctacaattacgtcaacctcttcttattccaagggtttcgcctcgtgccctttttgactgagctgagggcagtgatggactgggtgtggacggacacaactttgagcctgtccagctggatctgtgtggaggacatctatgctcacatattcatcctgaagtgttggcgggagtcggagaagagataccctcagccacggggccagaagaagaagaaagtggtgaagtatggcatgggaggaatgatcatcgtcctgctcatctgcattgtctggtttcctcttctcttcatgtctttgatcaaatctgtggctggggtcatcaaccagcccctggacgtctccgtcacaattaccctgggagggtatcagcctattttcacaatgagtgcccaacaaagccagttgaaagttatggaccagcagagctttaacaaatttatacaagctttttctagggacaccggtgctatgcaatttctggaaaattatgaaaaagaagacataacagtagcagaactggaaggaaactcaaattctttgtggaccatcagcccacccagtaagcagaaaatgatacacgaactcctggaccccaatagtagcttctctgttgttttttcatggagtattcagagaaacttaagtctgggtgcaaaatcggaaatagcaacagataagctttcttttcctcttaaaaatattactcgaaagaatatcgctaaaatgatagcaggcaacagcacagaaagttcaaaaacaccagtgaccatagaaaagatttatccatattatgtgaaagcacctagtgattctaactcaaaacctataaagcaacttttatctgaaaataatttcatggatattaccatcattttgtccagagacaatacaactaaatataacagtgagtggtgggttctcaacctgactggaaacagaatatacaatccgaactctcaggccctggaactggtggtcttcaatgacaaagtcagtcccccaagtctggggttcctggctggctatggtattatgggattatatgcttcagttgtccttgtgattgggaaatttgtccgtgaattcttcagtgggatttctcactccatcatgtttgaagagcttccaaatgtggatcgaattttgaagttgtgcacagatatttttttagttcgagagacaggagaactggagctagaagaagatctctatgccaaattaatattcctatatcgctcaccagagacaatgatcaaatggactagagaaaaaacaaattga

SEQ ID NO: 15562 - DNA, 563 bp, Homo sapiens
  source 1..563: mol_type = unassigned DNA
gcaatttctggaaaattatgaaaaagaagacataacagtagcagaactggaaggaaactcaaattctttgtggaccatcagcccacccaaaacttaagtctgggtgcaaaatcggaaatagcaacagataagctttcttttcctcttaaaaatattactcgaaagaatatcgctaaaatgatagcaggcaacagcacagaaagttcaaaaacaccagtgaccatagaaaagatttatccatattatgtgaaagcacctagtgattctaactcaaaacctataaagcaacttttatctgaaaataatttcatggatattaccatcattttgtccagagacaatacaactaaatataacagtgagtggtgggttctcaacctgactggaaacagaatatacaatccgaactctcaggccctggaactggtggtcttcaatgacaaagtcagtcccccaagtctggggttcctggctggctatggtattatgggattatatgcttcagttgtccttgtgattgggaaatttgtccgtgaattcttcagtgggatttctcactccat

SEQ ID NO: 15563 - DNA, 600 bp, Homo sapiens
  source 1..600: mol_type = unassigned DNA
aaagccagttgaaagttatggaccagcagagctttaacaaatttatacaagctttttctagggacaccggtgctatgcaatttctggaaaattatgaaaaagaagacataacagtagcagaactggaaggaaactcaaattctttgtggaccatcagcccacccagtaagcagaaaatgatacacgaactcctggaccccaatagtagcttctctgttgttttttcatggagtattcagagaaacttaagtctgggtgcaaaatcggaaatagcaacagataagctttcttttcctcttaaaaatattactcgaaagaatatcgctaaaatgatagcaggcaacagcacagaaagttcaaaaacaccagtgtaagtgtattttttcctactaatagagctttgttaggtatatgcagctggtacaaaatgtccatctacagattcatgtgtatgaggaatgcaacttcattctttggtaacacaaagttaatttctatttggaggccccattttgcaagattaaagaaacttaatctcagctatggagttttctgtccactgtccccagggttatgtctatgttccaaatgagggtttgg

SEQ ID NO: 15564 - DNA, 3682 bp, Homo sapiens
  source 1..3682: mol_type = unassigned DNA
tataaaagcttcccagattctggcatcaagaggagctgaacttttccaggccacaattgtaaaagctgtaaaggcaagaattgaggaagagaagaagtccatggaccagctgaagcgacagatggatcgcatcaaggccaggcaacagaaatataaaaagggtaaggagaggatgctgagcttgacccaggagccaggggaaggccaggacatgcaaaaactctctgaagaggatgatgaaagagaagcagacaaacagaaagccaagggcaaaaaaaagcagtggtggcggccttgggttgatcatgcttccagtaggttttctcgatccccttacaacctcatcgactctaacccttatatccttgaccagaattcaggcgttcccgtgacccatgtgttccatgcatggtttgatccttgtgacttgatagggggtcggagtgtaggaaaattttaatgtcagtgggtctttgagcccggggtccaattcttccagagacatcagcacagacgttctgacattcttgtgctggctgtagaaagccaaacacgtggcttatagactctagggcataatttatgggctcagaaagggaagaagaattgaatattatattgcccaattctgaggtcgagagccctattcacatacatattttatggctaaatacccttactaaaaatgagcttgggctccaccttggactctgatttaaggatgatcattctattcaaagggtcagtgaccctttctctgtaaggcactaggcatggatgccagtgagcctcccctcccctcattcccacagctttgattttatttgcatttaaggatttttggcaatttattaaatagaaagatgagggataacttaaaatgcactcactttcttactacgcctcctccccaatttcaaaaaggcactctaaattccaatgcccacatgtggcacagccttcaagccacctgatgctcagagacgaccaatgaacagcaaaaaccagaaaactatttttaaaagcagatcctgatagccacatagaatgcagtgtgtttccctcctgatcataaagatgaatgaggaattctggaactcagtggctatatttgctctgcttagcaaagaaaatatcactataggtcgatgggattatagtggaatgccccattccaatccagtcctctttaaatttcatagaatattgaataattattattttgcaagttacgtataatgtcgtcttcagtctttacatgatgtctccatacttgcagctaatctaactggacaaggaatatcactgagacaaataacatcacacaattgtaggagtgaatctactaggaggatatttagaatcactaggaaatcaaataaagtagaacttcttcccatacctaattattggtttcacatagatctgacgttggcctctctctcccaagacataattttctaaatcggcaagctagtttttaataaagcaatatttgaaatttgcttggtatatctggatgtaatcaaatttaatcccaaatattgaatttcaacattacaacaaaaaaagaaaaacacaagattagaaagagttttatttaattttctccccaagtccaaagacaaaagattccagtcggagtccagtgtgactcttctatttactgttcagggtatgacagtcacgctaacaatctggtaaatgcagtgcacaaatgcctatttctatcaagtcacaagtaaactgtgcttttctttatgtttttaaagggcctctgctaatttagagagacctatccatttcaaaattgtgtcatattgaatgttttttcacctcacctggggtaaattcccaccgcggtcattgtggttgcctttcctttcctcatgtaaaaatcgcatttgcaaaggaattggatatggtctgtgataactatcttacaagttgtaataatataaagaacttcctgtgaatgttgttgactttagattttctggttcatttcaccctcattatatcaagttattgaagattgatgttaaactacatgtgccttgttacaaaaccttatgatgcaataatgcagaaatgtgtgtaattcatagtttggaatcatattcagactgtggtgttaaattttttgctgcaaaatgtatttctttttacaagtgaatgaagaatgaaagggaaagaatgtgtgctgtattgttgtgtctatgatgagttccagaatttatctttagatctggaagtactttgttggaagcccttaatttgatcttttgagtaactgggctttcaaacagctatttcttagagaagccaagtgtaagaattagtgtagttggatacacatgtgtaaatctattgacaatacaaaaatgttgctatgttcttgatgttattagtaagcagtgaagattttagcatggtctgtatagggacagatttcctacttccatacctatgtacacacacaagattgcattattgctgttcaatgataccttccattccaataccttatgtttcaatattggttcagtactgcctaaattaataccaagcttcatcttattgataaatatctgaaacagaaggccaagttctgaggataaaagtagtggaatttaaaaagttaatttccaacttagtaatttagcagtaacatcaacatccatgatatgtatgtggacacaggctggagtcaggttcgccatctgagctaacaaacacgtgtgtaagagcttttctactcactaatttaacagatggcatgaatgaaaatgtgctctgtcattttcctagtttcatttcaataacattttataaggaaataagagacttttttacattttcttttttcttatgtgataattccactagctcacataaatattggtggtttctaatggtaaaatcaatgttaccactgcttgagatgaaaaccttttgaacttgtccatatgaataaaagttatcgaaggtatgattgaatacaatttaagctaatgttgattttggaacctataatgagggtaaaattctcgatcttataatagtctgtgttttcccaaacgaccacgtgatgtagagtccacatcactttcctgcaaatctctcggcttatgtgaaggcattactttaatggtcttcttcactatcaaatgtaatgctgtaactttggtttgttcttgcttattctcacttgtgttgtattgcatttatttcccaaggcctggacccagtactctgggcctggttctttcttcaaaatgaaaataacgaatgacagtgcttctgttcaaggatataaggcccaattcacccactgtgtatcttcatgaatggaggcttcagatttttctgaaatcgtgggcaaaattacttaacttttggccatgtgaagtgatattcaagcaattaattttaaacaagccaaggttttccattaccttacaatgtataggcccaaaagacaacttaagatcaaaatatgtcatccaaaagatgcctgagcatttgaaaacctgaatataatttgaaaatatgttttcctgcgatgatgggacattgcttgtagcatcagaaatgtatatgttgggcctcttttctctggtagactttaaataatgatcaaactgataaagatttaatttattaaatttccttaaatctc

SEQ ID NO: 15565 - DNA, 702 bp, Homo sapiens
  source 1..702: mol_type = unassigned DNA
agccggaggtgaggaagttggctgagcctggggaggagaagcttgagggctactctgaaaaagcccagaagggtgatcttgggaaagacagcgaggagtcagaggaggacggagaggaagaggaggaatccgaggaggaggaagaaacatcagacttaaggaacaaatggcacctggtgattgaccgcctcactgtgctcttcttaaaattcctggagtattttcacaagctgcaggtgttcatgtggtggattttggagttgcacatcatcaaaatcgtttcctcttacattatctgggtttctgtgaaagaggcaagtgaacatttgtcctatcatcaggctgaacagaaccacagtaggtcatcattttccttttccagctgtccatgatttttttaatgtgatccgcattacatcggagtatcaagactccaagactaagtacttacacttacagaaatccgagggtcagcagcactgagaaaaaggaaagaggctcgtggctgagtttctcgttggcttggtcatattacaaaggctacttattttcatcgaatccttagggaagagtgtgagagcaggctgcccttctgcccctgcctatgggaatctatctccctaaattctccaaggaaaacagtagcattccagtttacattaccaaggagaaagctcaggttccaaaatctaataaaatctt

SEQ ID NO: 15566 - DNA, 1021 bp, Homo sapiens
  source 1..1021: mol_type = unassigned DNA
caaccacggaccagcacctcaaggaagaccacctgttgcagctgatttcctgcccaggtggaagttgttagaaaggttgggttcatcttcctcaggacttgcgtggtgcttctggcacccaacacaaacatgggagcatcctcggaaaagggacttaaaagcagtgaatctcagctgaagtcaagcagatccttttcaccattactttttggctactgctgaggcagcacctcacagagcaaaaagctctgcaagaaaaggaagctcttttatcggaagtcaaaattggcagtcaggaaaatgaagaaaaagatgaggaacttcaagatatacaagtggaaggagagcccaaagaggaggaagaagaggaagcgaaggaagagaagcaagagagaaagaaggtagagcaagaggaagctgaagaagaagatgagcaggacatcatgaaagtcctgggcaatctggtggtggccatgttcatcaagtactggatctacgtctgcggaggcatgttcttcttcgtcagcttcgagggtaaaatcgtaatgtacaaaatcatctacatggtgctgttcctgttctgtgtggccctataccaggtgcactatgaatggtggaggaaaattctaaaatatttttggatgtcagtggttatttacactatgctggtgcttatctttatatacacatatcagtttgagaacttcccaggcctgtggcaaaatatgactggactgaaaaaagaaaagcttgaggatcttggcttaaagcagtttactgtggctgaactattcactcgcatattcatcccaacctcctttctgctggtgtgcattttacacctgcactacttccatgaccggttccttgaactcacagacctcaagtccattcccagcaaagaagacaacaccatctacagactggcccacccggaaggaagcctcccggacctcaccatgatgcatctgactgccagcctggagaagccggaggtgaggaagttggctgagcctgggga

SEQ ID NO: 15567 - DNA, 532 bp, Homo sapiens
  source 1..532: mol_type = unassigned DNA
cactgctggacatttgattggactttatttataccagttccaattctttcaagaggcagttccacccaatgactactatgcaaggttgtttggtatcaagtcagtaattcaaacggactgttcaagtacttggaagatcatagtgaacccggacctgtcgtggtaccaccacgccaaccctatcctcctgctggtgatgtactacactctggccactctgatccgcatctggctgcaagagccccttgtgcaggatgaggggaccaaagaagaggacaaagccctggcttgtagccccatccaaataacagcggggaggaggcggagcctgtggtacgcaacccattaccccactgatgagagaaaaggcctgctggtgactgtgaacggcaaccccgtggattaccacaccatccacccaagcctgcccatggagaacggccctggcaaagccgacctctactccacccctcagtaccggtgggagccctctgatgaatcctcagaaaagcgagaggaggaagaggaagag

SEQ ID NO: 15568 - DNA, 523 bp, Homo sapiens
  source 1..523: mol_type = unassigned DNA
ctggtgggaggtaattgaatcattggggcagttacctccatgctgttctcgtgataacgagtgagttctcatgagatctgatggttttctaaggggattttcccccacttcacactgcacgtctcttgctgcctccatgtgaagaaggatgtgtttgcttcttcttctgccatgattttaagtttcctgaggcctccccagccatgctgaactcttaaagggagctgatgctggcaatgggatcagagtgtttgtacctgacatcgggatgttcattgctagtctgaccatctggctcctctgtagaaacattgttcagaaacctgtgacagacgaagcagcacagagtaacccggagtttgaaaatgaagaattggctgaaggagaaaaaattgattcagaagaggcactgatctatgaagaggatttcaatggaggagatggtgttgaaggcgagttggaagaaagcacgaagttaaaaatgttccgcaggcttgcctctgtggcctctaagctcaaggag

SEQ ID NO: 15569 - DNA, 9718 bp, Homo sapiens
  source 1..9718: mol_type = unassigned DNA
gccccgggagcgtgccctcggggcggagagcgtcgcggcccgcgccgaggcgatgctcgggtggctgcgagctgccggcggcgagaggccatagacgggcatgggccttgcgtcccaccacccctagggaccctcgagcctcgcccctctgctccgactcgccggaccgacgcgatggcctcagaagtggtgtgcgggctcatcttcaggctgctgctgcccatctgcctggcagtagcatgtgcattccgatacaatgggctctcctttgtctaccttatctacctcttgctcattcctctgttctcagaaccaacaaaaacgacgatgcaaggacatacgggacggttattaaagtctctgtgcttcatcagtctttccttcctgttgctgcacatcattttccacatcacgttggtgagccttgaagctcaacatcgtattgcacctggctacaactgctcaacatgggaaaagacattccggcagatcggctttgaaagcttaaagggagctgatgctggcaatgggatcagagtgtttgtacctgacatcgggatgttcattgctagtctgaccatctggctcctctgtagaaacattgttcagaaacctgtgacagacgaagcagcacagagtaacccggagtttgaaaatgaagaattggctgaaggagaaaaaattgattcagaagaggcactgatctatgaagaggatttcaatggaggagatggtgttgaaggcgagttggaagaaagcacgaagttaaaaatgttccgcaggcttgcctctgtggcctctaagctcaaggagttcattggcaacatgatcaccactgctgggaaagtcgttgttaccatcttactgggctcctcgggcatgatgttgccgtctttgacatcatctgtgtatttttttgtatttttgggtctgtgcacctggtggtcctggtgccggacgttcgacccattgctgttcagctgtctctgtgttctgctggctattttcactgctggacatttgattggactttatttataccagttccaattctttcaagaggcagttccacccaatgactactatgcaaggttgtttggtatcaagtcagtaattcaaacggactgttcaagtacttggaagatcatagtgaacccggacctgtcgtggtaccaccacgccaaccctatcctcctgctggtgatgtactacactctggccactctgatccgcatctggctgcaagagccccttgtgcaggatgaggggaccaaagaagaggacaaagccctggcttgtagccccatccaaataacagcggggaggaggcggagcctgtggtacgcaacccattaccccactgatgagagaaaacttttatccatgacccaggatgactacaaaccatctgatggcctgctggtgactgtgaacggcaaccccgtggattaccacaccatccacccaagcctgcccatggagaacggccctggcaaagccgacctctactccacccctcagtaccggtgggagccctctgatgaatcctcagaaaagcgagaggaggaagaggaagagaaagaagaatttgaagaagaaaggagccgtgaggaaaaaagaagtatcaaagttcatgccatggtctccgtattccaatttattatgaaacaaagttacatctgtgccctcatagctatgatggcctggagcatcacctatcacagctggctgaccttcgtgctgctgatctggtcgtgcactctttggatgattcgcaacagaagaaaatatgccatgatcagctctcccttcatggtggtttatggaaacctattgttgatattacagtatatatggagttttgaacttcctgaaattaaaaaagttccaggatttttagaaaagaaagagccaggagaacttgcttccaaaatccttttcaccattactttttggctactgctgaggcagcacctcacagagcaaaaagctctgcaagaaaaggaagctcttttatcggaagtcaaaattggcagtcaggaaaatgaagaaaaagatgaggaacttcaagatatacaagtggaaggagagcccaaagaggaggaagaagaggaagcgaaggaagagaagcaagagagaaagaaggtagagcaagaggaagctgaagaagaagatgagcaggacatcatgaaagtcctgggcaatctggtggtggccatgttcatcaagtactggatctacgtctgcggaggcatgttcttcttcgtcagcttcgagggtaaaatcgtaatgtacaaaatcatctacatggtgctgttcctgttctgtgtggccctataccaggtgcactatgaatggtggaggaaaattctaaaatatttttggatgtcagtggttatttacactatgctggtgcttatctttatatacacatatcagtttgagaacttcccaggcctgtggcaaaatatgactggactgaaaaaagaaaagcttgaggatcttggcttaaagcagtttactgtggctgaactattcactcgcatattcatcccaacctcctttctgctggtgtgcattttacacctgcactacttccatgaccggttccttgaactcacagacctcaagtccattcccagcaaagaagacaacaccatctacagactggcccacccggaaggaagcctcccggacctcaccatgatgcatctgactgccagcctggagaagccggaggtgaggaagttggctgagcctggggaggagaagcttgagggctactctgaaaaagcccagaagggtgatcttgggaaagacagcgaggagtcagaggaggacggagaggaagaggaggaatccgaggaggaggaagaaacatcagacttaaggaacaaatggcacctggtgattgaccgcctcactgtgctcttcttaaaattcctggagtattttcacaagctgcaggtgttcatgtggtggattttggagttgcacatcatcaaaatcgtttcctcttacattatctgggtttctgtgaaagaggcaagggtgtctctgttcaactatgtatttttgatttcttgggcttttgctctgccgtacgccaagctgcgccgtctggcttcaagtgtctgcacagtctggacgtgtgtgatcatcgtctgcaaaatgttgtaccagctccaaaccattaagcctgagaacttctctgttaactgttccttgccaaatgaaaatcaaacaaacatcccctttaatgagttgaacaagtctctgctctacagcgctcctatcgatcctacagagtgggtcggcctgcggaagtcttcgcctctgctagtctacctgaggaataacctcctgatgctggctatcctggcctttgaagtcaccatttaccgccatcaggaatactatcgaggtcgaaataacctgacggcccctgtgtctagaactatctttcatgacattacaagactacatctagatgatggacttattaattgtgccaaatatttcattaattacttcttttacaagtttggtctggagacctgtttcctaatgtcagttaacgtcattggccagcgaatggatttctatgccatgatccacgcctgctggctgatcgctgtcttatatagacgcagaaggaaagccatcgcagagatctggcccaagtactgctgcttcctggcatgcatcatcaccttccagtatttcatctgcattggcatcccacctgctccttgccgagattacccgtggagattcaagggtgccagcttcaatgacaacatcataaagtggctgtacttcccagatttcattgtgcggcccaaccctgtgtttctcgtctatgacttcatgctgcttctgtgtgcctccttacaacggcagatttttgaggatgagaacaaggctgcagtgcgaatcatggcaggtgacaatgtcgagatctgcatgaaccttgatgcggcctccttcagccaacataaccctgtgccagattttattcactgcagatcttacttagacatgtccaaagtgatcatcttcagctacctcttctggtttgtgctcaccatcatcttcatcactgggaccaccaggatcagcatcttttgcatggggtacctggtggcctgtttctacttcctgctctttgggggcgatttgctgttgaaacccatcaagagcatcctgcgctactgggactggctgatcgcatacaacgtttttgtgattacgatgaaaaatatcctgtcaataggagcatgtggatacattggaacattggtgcacaatagttgttggttgatccaggctttcagcctggcctgcacagtcaaaggctatcaaatgcctgctgctaattcaccctgtacacttcccagtggggaagcaggaatcatttgggacagcatatgttttgccttcctcctgctgcaaagaagagttttcatgagttattattttctacatgttgtggctgatataaaagcttcccagattctggcatcaagaggagctgaacttttccaggccacaattgtaaaagctgtaaaggcaagaattgaggaagagaagaagtccatggaccagctgaagcgacagatggatcgcatcaaggccaggcaacagaaatataaaaagggtaaggagaggatgctgagcttgacccaggagccaggggaaggccaggacatgcaaaaactctctgaagaggatgatgaaagagaagcagacaaacagaaagccaagggcaaaaaaaagcagtggtggcggccttgggttgatcatgcttccatggtcaggagtggagattattatttgtttgaaacggatagtgaagaggaggaagaggaagaattaaagaaggaagatgaagaacctccacgaaggtcagcattccagtttgtttatcaagcctggattactgatcctaaaacagcactccgacaaagacacaaagagaaaaaaaggtctgcaagagaagaacggaaacgaaggcggaaaggatccaaggagggtcctgtggaatgggaagaccgggaggatgaaccaatcaaaaagaaatccgatggaccagataatatcatcaagaggatatttaatattttgaaatttacctgggtcctatttctggcaacagtggacagtttcactacttggcttaactccatttcaagggagcatattgatatatctacagttctgagaattgaacgatgcatgctgaccagagaaattaagaagggcaatgttccaactcgggagagcatccacatgtactatcagaaccacatcatgaacctttccagagagtcgggactggacaccattgacgagcatcccggagctgcttcaggtgcacagacagcccacaggatggatagtttagattcacatgacagtatctccagcgagcccacgcagtgtaccatgctgtactcacgccaggggaccactgagaccatcgaggaggtggaggctgagcaggaggaggaggcagggagcacggcgcctgagcccagggaggccaaggagtacgaggccactgggtacgatgtgggagccatgggtgccgaggaggccagcctcaccccagaggaagagctgacacagttctccaccttggacggggatgtggaggccccaccctcctacagcaaggctgtgagcttcgagcatctgtccttcggctcgcaggacgactctgcaggcaagaaccgtatggcagtcagcccggacgacagccgcaccgacaagctggggtccagcatcttacctcccctgacccatgagctgacggccagcgagctgctgctgaaaaagatgtttcacgacgatgagcttgaagagtcagagaaattctacgtggggcagccccgatttctgctgctcttctatgccatgtacaataccctggtggcccgctcggagatggtgtgctacttcgtgatcatcctcaaccacatggtctctgcctccatgatcacgctcctgcttcccatcctcatcttcctctgggccatgttgtccgtccccaggcccagccgccggttctggatgatggccatcgtctatactgaggtggcaattgtagtcaagtatttcttccaatttgggttctttccctggaataagaatgtggaggtgaacaaagataaaccgtatcaccccccaaacatcataggagtggaaaagaaggaaggttatgttctctatgacctcatccagctcctggctctgttctttcatcgatcaattttgaagtgccatggcttatgggatgaagatgacatgactgaaagtggcatggccagggaggaatcagatgatgagctctccctcggtcatggcaggagggactcctccgattctctcaagtccatcaacctggccgcgtctgtggagtcagtgcatgtgaccttcccggagcagcagacagctgtccggaggaagcgctccggcagcagctccgagccatcccagagatccagcttttcttcaaacagatcccaaagaggcagcacaagcacccgaaacagcagtcaaaaaggaagcagtgttttgagtattaagcaaaaaggcaaaagggaactttatatggaaaagcttcaagaacatttaatcaaagcaaaagcctttaccataaagaagacgctggagatctatgtgcccatcaaacagttcttttacaacctcatccacccggagtatagcgccgtgactgacgtgtatgtactcatgttcctggctgacactgtggacttcatcatcattgtcttcggcttttgggcctttgggaaacactcagcagctgcagacatcacctcttcactgtcagaggaccaggtcccggggccgtttttggtgatggtcctcattcagtttggaaccatggtggtggaccgagccctctacctcaggaagactgtactgggaaaggtcatcttccaggtcattcttgtgttcggaattcacttctggatgttcttcatcttacctggtgtgactgagaggaaattcagccagaacctggttgcccagctttggtactttgtgaaatgtgtttacttcgggttgtctgcttaccagatccgttgtggctacccaacgcgagtcctggggaacttcctcaccaagagctacaattacgtcaacctcttcttattccaagggtttcgcctcgtgccctttttgactgagctgagggcagtgatggactgggtgtggacggacacaactttgagcctgtccagctggatctgtgtggaggacatctatgctcacatattcatcctgaagtgttggcgggagtcggagaagagataccctcagccacggggccagaagaagaagaaagtggtgaagtatggcatgggaggaatgatcatcgtcctgctcatctgcattgtctggtttcctcttctcttcatgtctttgatcaaatctgtggctggggtcatcaaccagcccctggacgtctccgtcacaattaccctgggagggtatcagcctattttcacaatgagtgcccaacaaagccagttgaaagttatggaccagcagagctttaacaaatttatacaagctttttctagggacaccggtgctatgcaatttctggaaaattatgaaaaagaagacataacagtagcagaactggaaggaaactcaaattctttgtggaccatcagcccacccagtaagcagaaaatgatacacgaactcctggaccccaatagtagcttctctgttgttttttcatggagtattcagagaaacttaagtctgggtgcaaaatcggaaatagcaacagataagctttcttttcctcttaaaaatattactcgaaagaatatcgctaaaatgatagcaggcaacagcacagaaagttcaaaaacaccagtgaccatagaaaagatttatccatattatgtgaaagcacctagtgattctaactcaaaacctataaagcaacttttatctgaaaataatttcatggatattaccatcattttgtccagagacaatacaactaaatataacagtgagtggtgggttctcaacctgactggaaacagaatatacaatccgaactctcaggccctggaactggtggtcttcaatgacaaagtcagtcccccaagtctggggttcctggctggctatggtattatgggattatatgcttcagttgtccttgtgattgggaaatttgtccgtgaattcttcagtgggatttctcactccatcatgtttgaagagcttccaaatgtggatcgaattttgaagttgtgcacagatatttttttagttcgagagacaggagaactggagctagaagaagatctctatgccaaattaatattcctatatcgctcaccagagacaatgatcaaatggactagagaaaaaacaaattgaaaccttagaacacagactgcaaataatgttaacatttgaattttttttaaaagcacaatattctcataagagctaagcatttctagttcgacggaaatggtttgtttctcttctgataggtagacaaaaggagctgatatccttctgcagtaaaagctaccttgcaagttaaggcactgttgaaaatgttatttgtaactccatttctctgaaatcagggctacttgctttatgttttagtcaacagtgtctcgcattctgattgatcatgtgaaggaatcatttatgggccccgtccctaagagaaacagaagaggagtcagaaagaaagatgcctgtgttttcctctgtggggcccgtgcacttcctggagagatgctacaatgcaatatacagcgctccatccccactggggaagctgctgtgatgagactagatgagccttcaacacactcagaaaatgcaacagcaatagggggcagacagctcctacctgtgtttctaggagcaaaagagagggaactaattgcccgtgaagacgccagtggaaggatcagcctcattctaagcaaaaacatagtattagtgatactcttactgccttatcttaaccaaggactaataggatacctttccattaaacaccagtgacttctcaggaaaaaaaaaaaaaaggagcaaaacaaatgatgtgtacacctgctttgttatggtccaccagtgaccagcttcaatgaggggaaccattctggagggctgcggtctcctgtgcaaacagacatgaggcagaagagtaaaaagaccaacccagtgggacctagaatactttgtaactctttaataactgaggtcaggaccgctcttctgccttccccttcccttaacgtgctttttcccatttccatgatttaaggcaatggtttttccagtatgtgacattttccttcctgtttttcaggtatatcaaagagtttacatattccaattcacatttttacatctgagacgggttttttaagttcataattatgaaagaaatatgtatattgagcttggggaaataaaaatggccttttcttaaattattattattggtaatacaacctcttcattaaataacaatgtagcatgaaaaatttatgattgaaatgtagttttcattccatattaagatacagtttctgagaagaatcattgaatggactagaatatgtcaaaaattgatcctgtgtagtttgggttcagggctgacttaaaataaagcacatcctgcaaagtc

SEQ ID NO: 15570 - DNA, 3652 bp, Homo sapiens
  source 1..3652: mol_type = unassigned DNA
attggtgctgcggaacagcagggagggactccggctgcagccgcgggaggtccggacactggcggccatggaactcaccggtaatagaggacacatctcttaactgggttgctctaagaactgatgtctaaaccgtctcagcatggcctgtagaggaggagctgggaatggccaccgtgcctcagctacactctctcgggttagccctggaagtctttacacatgtagaacccgtacccataatatatgcatggtatctgactttttctacccaaatatgggaggcgtggaaagccacatttaccagctctctcagtgcctgattgaaagagggcataaggttataattgtcacccatgcttatggaaatcgaaaaggcatccgttacctcaccagtggcctcaaagtctattacttgcctctgaaagtcatgtacaaccagtctacagccacgaccctctttcacagtctgccattgctcaggtacatatttgttcgggagagagtcacgataatccattcacatagttctttttctgctatggcccatgatgctctcttccacgccaagacaatggggcttcagacagtcttcacggaccattccctttttggatttgctgatgtcagctcggtgcttacaaacaagcttctaaccgtgtctctttgtgatacaaaccacatcatttgtgtgtcttatactagtaaggaaaatactgtactaagagcagcactgaatcctgaaatagtgtccgtcattcctaatgctgtagatcctactgacttcactccagacccatttagaaggcatgatagtataactattgttgttgtcagcagacttgtttacagaaaagggatcgatttgcttagtggtataatacctgaactctgtcagaaatatccagatttaaatttcataattggaggagagggaccaaagagaatcattttggaagaagttcgggaaagataccagctgcatgacagggtgcgtcttttgggagctttagaacacaaggatgttagaaatgtcttagttcaaggacatatttttctgaatacctcccttactgaagcattctgcatggcgatcgtggaagcagccagttgtggtttacaggttgtaagtaccagagttggtggaattcctgaggtgcttccagaaaaccttattattttatgtgagccttcagtaaaatctttgtgtgaaggattggaaaaggctattttccaactgaagtcagggacattgccagctccagaaaacatccataacatagtaaagactttctacacctggaggaatgttgcagaaagaactgaaaaggtatatgaccgggtatcagtggaagctgtgttgccaatggacaaacgactggacagacttatttctcactgcggcccagtaacaggctacatctttgctttgttggcagttttcaacttcctcttcctcattttcttgagatggatgactccagattctatcattgatgttgcaatagatgccactgggccacggggtgcctggactaataactattctcacagtaaaagagggggtgagaataatgagatatctgaaaccaggtagaaggaagcctagattgtaagattttaaacatttgtaatagttctataaagactatggaaaataaccttgcttttggggggtttttgtttttttagagttaatttagtaagttatgctacctctatatcattcaatattttctgttgaggaaagataaaaatgtatgcaattcctgagtgtagaaacttcttgcacttatttaaaatttaggagagaacatttaagccactcaggtatgcaatttttcagactactgaaatccctgtagcagagatgttttaacattatattttgagagctttgggtgctgaagggccaaacgttttctgggcattttttggccagtttttaatgtaacaccattagacactcaccagatgtttacaagttttctttaggggaactacaacaattatatgaactgttttatatcatgttcatatacatttattaggaatctaaatcatgtctttgaacatttattaggttcactcagtaggtgttacatgtaattaacaggttccttgagtaagatagtccatcagttaccagcacattttgaacccctgctctgtgtagaatgttgaactagatgcttcccgccattaaggaccaggggtgcattcactctttgtttaccattcaaatggcttacttcatcataattgtggttgatatgagatcaatatccaacatgccaaaaatgctcatgccagttaatgccaggaaaaaaatcaccgacacactactagtactttgttcctgttgtatgcattctcctaggtagagcctccatcttcagttgtgtttgtgaaggtattttttgctttttaaatactggggaccgatatcactgttgatagtgcagagaaaccctccacatttttcagtgcataattgagttttctataaatgccttcgtgttttctgagcagaatgtacgaggtgtgccatcccaaaaccagctgctaccctgtccttttaatgtaagtcactccccttcactgtggcctcgctgatgtctgataagtattgtcagtgtgcaaaaggctttacttcagaatggtttatttatagcaaactaagttgaaaattttagaaacagtctttgtgggtggatgttattaactgtcattgttgttgcccagagccatgggttttttaaccccaaattatccacatggtgtgtattatgaattctttgaactcttaaggtttttgtgagaaaaggactgtgaattcaaaacaataaggcacttgtgggtgcactacatagattctgacagtgttgtgattctgtataggatttttaaaaatgacaacattcacaaaatttattactttttaaaaaataacatgcctattaactggttgcactgatataaaagaaatatatttgtgttttgtttgtactaaaatgcaaaagcaagagtgcaatttttaaaatctagaagttaggggttttgttggagaaaaatggactgatctttaaactattcagtcttactgggatttttatgcatagaaactcacatataaacatgaaataaacagtgccagtattcataggaaagtgagaaactgtaatatttggccattattctattcaacaggttttagaggcatgccaccattttttccttatatttttgcttaatttttttaaattgtcatttaattcttaaactgtcatttatttgagatggaaataagatctaaagttagttgcctttgcctgtaaaacatgtgatttgcaaattattatttttcttttttttaacaaatggaagtaaatttgtttcacgtaaatcttaattttcaacctttctggataccttaattgtaactgtcagtttgcactggtcggtatatggaaacacattgctctaccctgctacttagttgattttaaagtgaatttacagtgatgagaaatttgtgaaaaatatattgtatttcttttgatgtttcaaaaggttgcctatgaaaaactgatttgttaaaacatgctacatgtccaaaaataaagaccagaatgacattttgataattttc

SEQ ID NO: 15571 - DNA, 2850 bp, Homo sapiens
  source 1..2850: mol_type = unassigned DNA
cctgatgctgttaaatttcagatctttttaaaaattaaaacagccctgcacatgtgggatcgatttgcttagtggtataatacctgaactctgtcagaaatatccagatttaaatttcataattggaggagagggaccaaagagaatcattttggaagaagttcgggaaagataccagctgcatgacagggtgcgtcttttgggagctttagaacacaaggatgttagaaatgtcttagttcaaggacatatttttctgaatacctcccttactgaagcattctgcatggcgatcgtggaagcagccagttgtggtttacaggttgtaagtaccagagttggtggaattcctgaggtgcttccagaaaaccttattattttatgtgagccttcagtaaaatctttgtgtgaaggattggaaaaggctattttccaactgaagtcagggacattgccagctccagaaaacatccataacatagtaaagactttctacacctggaggaatgttgcagaaagaactgaaaaggtatatgaccgggtatcagtggaagctgtgttgccaatggacaaacgactggacagacttatttctcactgcggcccagtaacaggctacatctttgctttgttggcagttttcaacttcctcttcctcattttcttgagatggatgactccagattctatcattgatgttgcaatagatgccactgggccacggggtgcctggactaataactattctcacagtaaaagagggggtgagaataatgagatatctgaaaccaggtagaaggaagcctagattgtaagattttaaacatttgtaatagttctataaagactatggaaaataaccttgcttttggggggtttttgtttttttagagttaatttagtaagttatgctacctctatatcattcaatattttctgttgaggaaagataaaaatgtatgcaattcctgagtgtagaaacttcttgcacttatttaaaatttaggagagaacatttaagccactcaggtatgcaatttttcagactactgaaatccctgtagcagagatgttttaacattatattttgagagctttgggtgctgaagggccaaacgttttctgggcattttttggccagtttttaatgtaacaccattagacactcaccagatgtttacaagttttctttaggggaactacaacaattatatgaactgttttatatcatgttcatatacatttattaggaatctaaatcatgtctttgaacatttattaggttcactcagtaggtgttacatgtaattaacaggttccttgagtaagatagtccatcagttaccagcacattttgaacccctgctctgtgtagaatgttgaactagatgcttcccgccattaaggaccaggggtgcattcactctttgtttaccattcaaatggcttacttcatcataattgtggttgatatgagatcaatatccaacatgccaaaaatgctcatgccagttaatgccaggaaaaaaatcaccgacacactactagtactttgttcctgttgtatgcattctcctaggtagagcctccatcttcagttgtgtttgtgaaggtattttttgctttttaaatactggggaccgatatcactgttgatagtgcagagaaaccctccacatttttcagtgcataattgagttttctataaatgccttcgtgttttctgagcagaatgtacgaggtgtgccatcccaaaaccagctgctaccctgtccttttaatgtaagtcactccccttcactgtggcctcgctgatgtctgataagtattgtcagtgtgcaaaaggctttacttcagaatggtttatttatagcaaactaagttgaaaattttagaaacagtctttgtgggtggatgttattaactgtcattgttgttgcccagagccatgggttttttaaccccaaattatccacatggtgtgtattatgaattctttgaactcttaaggtttttgtgagaaaaggactgtgaattcaaaacaataaggcacttgtgggtgcactacatagattctgacagtgttgtgattctgtataggatttttaaaaatgacaacattcacaaaatttattactttttaaaaaataacatgcctattaactggttgcactgatataaaagaaatatatttgtgttttgtttgtactaaaatgcaaaagcaagagtgcaatttttaaaatctagaagttaggggttttgttggagaaaaatggactgatctttaaactattcagtcttactgggatttttatgcatagaaactcacatataaacatgaaataaacagtgccagtattcataggaaagtgagaaactgtaatatttggccattattctattcaacaggttttagaggcatgccaccattttttccttatatttttgcttaatttttttaaattgtcatttaattcttaaactgtcatttatttgagatggaaataagatctaaagttagttgcctttgcctgtaaaacatgtgatttgcaaattattatttttcttttttttaacaaatggaagtaaatttgtttcacgtaaatcttaattttcaacctttctggataccttaattgtaactgtcagtttgcactggtcggtatatggaaacacattgctctaccctgctacttagttgattttaaagtgaatttacagtgatgagaaatttgtgaaaaatatattgtatttcttttgatgtttcaaaaggttgcctatgaaaaactgatttgttaaaacatgctacatgtccaaaaataaagaccagaatgacattttgataatttt

SEQ ID NO: 15572 - DNA, 3626 bp, Homo sapiens
  source 1..3626: mol_type = unassigned DNA
ggatcgtggcgggtggtggagggggtgaaaccgacccggttcgaagcccggaagttgggtaatagaggacacatctcttaactgggttgctctaagaactgatgtctaaaccgtctcagcatggcctgtagaggaggagctgggaatggccaccgtgcctcagctacactctctcgggttagccctggaagtctttacacatgtagaacccgtacccataatatatgcatggtatctgactttttctacccaaatatgggaggcgtggaaagccacatttaccagctctctcagtgcctgattgaaagagggcataaggttataattgtcacccatgcttatggaaatcgaaaaggcatccgttacctcaccagtggcctcaaagtctattacttgcctctgaaagtcatgtacaaccagtctacagccacgaccctctttcacagtctgccattgctcaggtacatatttgttcgggagagagtcacgataatccattcacatagttctttttctgctatggcccatgatgctctcttccacgccaagacaatggggcttcagacagtcttcacggaccattccctttttggatttgctgatgtcagctcggtgcttacaaacaagcttctaaccgtgtctctttgtgatacaaaccacatcatttgtgtgtcttatactagtaaggaaaatactgtactaagagcagcactgaatcctgaaatagtgtccgtcattcctaatgctgtagatcctactgacttcactccagacccatttagaaggcatgatagtataactattgttgttgtcagcagacttgtttacagaaaagggatcgatttgcttagtggtataatacctgaactctgtcagaaatatccagatttaaatttcataattggaggagagggaccaaagagaatcattttggaagaagttcgggaaagataccagctgcatgacagggtgcgtcttttgggagctttagaacacaaggatgttagaaatgtcttagttcaaggacatatttttctgaatacctcccttactgaagcattctgcatggcgatcgtggaagcagccagttgtggtttacaggttgtaagtaccagagttggtggaattcctgaggtgcttccagaaaaccttattattttatgtgagccttcagtaaaatctttgtgtgaaggattggaaaaggctattttccaactgaagtcagggacattgccagctccagaaaacatccataacatagtaaagactttctacacctggaggaatgttgcagaaagaactgaaaaggtatatgaccgggtatcagtggaagctgtgttgccaatggacaaacgactggacagacttatttctcactgcggcccagtaacaggctacatctttgctttgttggcagttttcaacttcctcttcctcattttcttgagatggatgactccagattctatcattgatgttgcaatagatgccactgggccacggggtgcctggactaataactattctcacagtaaaagagggggtgagaataatgagatatctgaaaccaggtagaaggaagcctagattgtaagattttaaacatttgtaatagttctataaagactatggaaaataaccttgcttttggggggtttttgtttttttagagttaatttagtaagttatgctacctctatatcattcaatattttctgttgaggaaagataaaaatgtatgcaattcctgagtgtagaaacttcttgcacttatttaaaatttaggagagaacatttaagccactcaggtatgcaatttttcagactactgaaatccctgtagcagagatgttttaacattatattttgagagctttgggtgctgaagggccaaacgttttctgggcattttttggccagtttttaatgtaacaccattagacactcaccagatgtttacaagttttctttaggggaactacaacaattatatgaactgttttatatcatgttcatatacatttattaggaatctaaatcatgtctttgaacatttattaggttcactcagtaggtgttacatgtaattaacaggttccttgagtaagatagtccatcagttaccagcacattttgaacccctgctctgtgtagaatgttgaactagatgcttcccgccattaaggaccaggggtgcattcactctttgtttaccattcaaatggcttacttcatcataattgtggttgatatgagatcaatatccaacatgccaaaaatgctcatgccagttaatgccaggaaaaaaatcaccgacacactactagtactttgttcctgttgtatgcattctcctaggtagagcctccatcttcagttgtgtttgtgaaggtattttttgctttttaaatactggggaccgatatcactgttgatagtgcagagaaaccctccacatttttcagtgcataattgagttttctataaatgccttcgtgttttctgagcagaatgtacgaggtgtgccatcccaaaaccagctgctaccctgtccttttaatgtaagtcactccccttcactgtggcctcgctgatgtctgataagtattgtcagtgtgcaaaaggctttacttcagaatggtttatttatagcaaactaagttgaaaattttagaaacagtctttgtgggtggatgttattaactgtcattgttgttgcccagagccatgggttttttaaccccaaattatccacatggtgtgtattatgaattctttgaactcttaaggtttttgtgagaaaaggactgtgaattcaaaacaataaggcacttgtgggtgcactacatagattctgacagtgttgtgattctgtataggatttttaaaaatgacaacattcacaaaatttattactttttaaaaaataacatgcctattaactggttgcactgatataaaagaaatatatttgtgttttgtttgtactaaaatgcaaaagcaagagtgcaatttttaaaatctagaagttaggggttttgttggagaaaaatggactgatctttaaactattcagtcttactgggatttttatgcatagaaactcacatataaacatgaaataaacagtgccagtattcataggaaagtgagaaactgtaatatttggccattattctattcaacaggttttagaggcatgccaccattttttccttatatttttgcttaatttttttaaattgtcatttaattcttaaactgtcatttatttgagatggaaataagatctaaagttagttgcctttgcctgtaaaacatgtgatttgcaaattattatttttcttttttttaacaaatggaagtaaatttgtttcacgtaaatcttaattttcaacctttctggataccttaattgtaactgtcagtttgcactggtcggtatatggaaacacattgctctaccctgctacttagttgattttaaagtgaatttacagtgatgagaaatttgtgaaaaatatattgtatttcttttgatgtttcaaaaggttgcctatgaaaaactgatttgttaaaacatgctacatgtccaaaaataaagaccagaatgacattttgataat

SEQ ID NO: 15573 - DNA, 3738 bp, Homo sapiens
  source 1..3738: mol_type = unassigned DNA
actggcggccatggaactcaccggtaatagaggacacatctcttaactgggttgctctaagaactgatgtctaaaccgtctcagcatggcctgtagaggaggagctgggaatggccaccgtgcctcagctacactctctcgggttagccctggaagtctttacacatgtagaacccgtacccataatatatgcatggtatctgactttttctacccaaatatgggaggcgtggaaagccacatttaccagctctctcagtgcctgattgaaagagggcataaggttataattgtcacccatgcttatggaaatcgaaaaggcatccgttacctcaccagtggcctcaaagtctattacttgcctctgaaagtcatgtacaaccagtctacagccacgaccctctttcacagtctgccattgctcaggtacatatttgttcgggagagagtcacgataatccattcacatagttctttttctgctatggcccatgatgctctcttccacgccaagacaatggggcttcagacagtcttcacggaccattccctttttggatttgctgatgtcagctcggtgcttacaaacaagcttctaaccgtgtctctttgtgatacaaaccacatcatttgtgtgtcttatactagtaaggaaaatactgtactaagagcagcactgaatcctgaaatagtgtccgtcattcctaatgctgtagatcctactgacttcactccagacccatttagaaggcatgatagtataactattgttgttgtcagcagacttgtttacagaaaagggatcgatttgcttagtggtataatacctgaactctgtcagaaatatccagatttaaatttcataattggaggagagggaccaaagagaatcattttggaagaagttcgggaaagataccagctgcatgacagggtgcgtcttttgggagctttagaacacaaggatgttagaaatgtcttagttcaaggacatatttttctgaatacctcccttactgaagcattctgcatggcgatcgtggaagcagccagttgtggtttacaggtaaaaagctttgagggcattcatggttgggatttctgtgtattttgaaaaataatgagacacattccataataatgttttaactggttttgttgatcttcctgaggtatgattatggtggagtatgtgttctttctttctttttaaggttgtaagtaccagagttggtggaattcctgaggtgcttccagaaaaccttattattttatgtgagccttcagtaaaatctttgtgtgaaggattggaaaaggctattttccaactgaagtcagggacattgccagctccagaaaacatccataacatagtaaagactttctacacctggaggaatgttgcagaaagaactgaaaaggtatatgaccgggtatcagtggaagctgtgttgccaatggacaaacgactggacagacttatttctcactgcggcccagtaacaggctacatctttgctttgttggcagttttcaacttcctcttcctcattttcttgagatggatgactccagattctatcattgatgttgcaatagatgccactgggccacggggtgcctggactaataactattctcacagtaaaagagggggtgagaataatgagatatctgaaaccaggtagaaggaagcctagattgtaagattttaaacatttgtaatagttctataaagactatggaaaataaccttgcttttggggggtttttgtttttttagagttaatttagtaagttatgctacctctatatcattcaatattttctgttgaggaaagataaaaatgtatgcaattcctgagtgtagaaacttcttgcacttatttaaaatttaggagagaacatttaagccactcaggtatgcaatttttcagactactgaaatccctgtagcagagatgttttaacattatattttgagagctttgggtgctgaagggccaaacgttttctgggcattttttggccagtttttaatgtaacaccattagacactcaccagatgtttacaagttttctttaggggaactacaacaattatatgaactgttttatatcatgttcatatacatttattaggaatctaaatcatgtctttgaacatttattaggttcactcagtaggtgttacatgtaattaacaggttccttgagtaagatagtccatcagttaccagcacattttgaacccctgctctgtgtagaatgttgaactagatgcttcccgccattaaggaccaggggtgcattcactctttgtttaccattcaaatggcttacttcatcataattgtggttgatatgagatcaatatccaacatgccaaaaatgctcatgccagttaatgccaggaaaaaaatcaccgacacactactagtactttgttcctgttgtatgcattctcctaggtagagcctccatcttcagttgtgtttgtgaaggtattttttgctttttaaatactggggaccgatatcactgttgatagtgcagagaaaccctccacatttttcagtgcataattgagttttctataaatgccttcgtgttttctgagcagaatgtacgaggtgtgccatcccaaaaccagctgctaccctgtccttttaatgtaagtcactccccttcactgtggcctcgctgatgtctgataagtattgtcagtgtgcaaaaggctttacttcagaatggtttatttatagcaaactaagttgaaaattttagaaacagtctttgtgggtggatgttattaactgtcattgttgttgcccagagccatgggttttttaaccccaaattatccacatggtgtgtattatgaattctttgaactcttaaggtttttgtgagaaaaggactgtgaattcaaaacaataaggcacttgtgggtgcactacatagattctgacagtgttgtgattctgtataggatttttaaaaatgacaacattcacaaaatttattactttttaaaaaataacatgcctattaactggttgcactgatataaaagaaatatatttgtgttttgtttgtactaaaatgcaaaagcaagagtgcaatttttaaaatctagaagttaggggttttgttggagaaaaatggactgatctttaaactattcagtcttactgggatttttatgcatagaaactcacatataaacatgaaataaacagtgccagtattcataggaaagtgagaaactgtaatatttggccattattctattcaacaggttttagaggcatgccaccattttttccttatatttttgcttaatttttttaaattgtcatttaattcttaaactgtcatttatttgagatggaaataagatctaaagttagttgcctttgcctgtaaaacatgtgatttgcaaattattatttttcttttttttaacaaatggaagtaaatttgtttcacgtaaatcttaattttcaacctttctggataccttaattgtaactgtcagtttgcactggtcggtatatggaaacacattgctctaccctgctacttagttgattttaaagtgaatttacagtgatgagaaatttgtgaaaaatatattgtatttcttttgatgtttcaaaaggttgcctatgaaaaactgatttgttaaaacatgctacatgtccaaaaataaagaccagaatgacattttgataa

SEQ ID NO: 15574 - DNA, 3246 bp, Homo sapiens
  source 1..3246: mol_type = unassigned DNA
gactccggctgcagccgcgggaggtccggacactggcggccatggaactcaccggtaatagaggacacatctcttaactgggttgctctaagaactgatgtctaaaccgtctcagcatggcctgtagaggaggagctgggaatggccaccgtgcctcagctacactctctcgggttagccctggaagtctttacacatgtagaacccgtacccataatatatgcatggtatctgactttttctacccaaatatgggaggcgtggaaagccacatttaccagctctctcagtgcctgattgaaagagggcataaggttataattgtcacccatgcttatggaaatcgaaaaggcatccgttacctcaccagtggcctcaaagtctattacttgcctctgaaagtcatgtacaaccagtctacagccacgaccctctttcacagtctgccattgctcagggatcgatttgcttagtggtataatacctgaactctgtcagaaatatccagatttaaatttcataattggaggagagggaccaaagagaatcattttggaagaagttcgggaaagataccagctgcatgacagggtgcgtcttttgggagctttagaacacaaggatgttagaaatgtcttagttcaaggacatatttttctgaatacctcccttactgaagcattctgcatggcgatcgtggaagcagccagttgtggtttacaggttgtaagtaccagagttggtggaattcctgaggtgcttccagaaaaccttattattttatgtgagccttcagtaaaatctttgtgtgaaggattggaaaaggctattttccaactgaagtcagggacattgccagctccagaaaacatccataacatagtaaagactttctacacctggaggaatgttgcagaaagaactgaaaaggtatatgaccgggtatcagtggaagctgtgttgccaatggacaaacgactggacagacttatttctcactgcggcccagtaacaggctacatctttgctttgttggcagttttcaacttcctcttcctcattttcttgagatggatgactccagattctatcattgatgttgcaatagatgccactgggccacggggtgcctggactaataactattctcacagtaaaagagggggtgagaataatgagatatctgaaaccaggtagaaggaagcctagattgtaagattttaaacatttgtaatagttctataaagactatggaaaataaccttgcttttggggggtttttgtttttttagagttaatttagtaagttatgctacctctatatcattcaatattttctgttgaggaaagataaaaatgtatgcaattcctgagtgtagaaacttcttgcacttatttaaaatttaggagagaacatttaagccactcaggtatgcaatttttcagactactgaaatccctgtagcagagatgttttaacattatattttgagagctttgggtgctgaagggccaaacgttttctgggcattttttggccagtttttaatgtaacaccattagacactcaccagatgtttacaagttttctttaggggaactacaacaattatatgaactgttttatatcatgttcatatacatttattaggaatctaaatcatgtctttgaacatttattaggttcactcagtaggtgttacatgtaattaacaggttccttgagtaagatagtccatcagttaccagcacattttgaacccctgctctgtgtagaatgttgaactagatgcttcccgccattaaggaccaggggtgcattcactctttgtttaccattcaaatggcttacttcatcataattgtggttgatatgagatcaatatccaacatgccaaaaatgctcatgccagttaatgccaggaaaaaaatcaccgacacactactagtactttgttcctgttgtatgcattctcctaggtagagcctccatcttcagttgtgtttgtgaaggtattttttgctttttaaatactggggaccgatatcactgttgatagtgcagagaaaccctccacatttttcagtgcataattgagttttctataaatgccttcgtgttttctgagcagaatgtacgaggtgtgccatcccaaaaccagctgctaccctgtccttttaatgtaagtcactccccttcactgtggcctcgctgatgtctgataagtattgtcagtgtgcaaaaggctttacttcagaatggtttatttatagcaaactaagttgaaaattttagaaacagtctttgtgggtggatgttattaactgtcattgttgttgcccagagccatgggttttttaaccccaaattatccacatggtgtgtattatgaattctttgaactcttaaggtttttgtgagaaaaggactgtgaattcaaaacaataaggcacttgtgggtgcactacatagattctgacagtgttgtgattctgtataggatttttaaaaatgacaacattcacaaaatttattactttttaaaaaataacatgcctattaactggttgcactgatataaaagaaatatatttgtgttttgtttgtactaaaatgcaaaagcaagagtgcaatttttaaaatctagaagttaggggttttgttggagaaaaatggactgatctttaaactattcagtcttactgggatttttatgcatagaaactcacatataaacatgaaataaacagtgccagtattcataggaaagtgagaaactgtaatatttggccattattctattcaacaggttttagaggcatgccaccattttttccttatatttttgcttaatttttttaaattgtcatttaattcttaaactgtcatttatttgagatggaaataagatctaaagttagttgcctttgcctgtaaaacatgtgatttgcaaattattatttttcttttttttaacaaatggaagtaaatttgtttcacgtaaatcttaattttcaacctttctggataccttaattgtaactgtcagtttgcactggtcggtatatggaaacacattgctctaccctgctacttagttgattttaaagtgaatttacagtgatgagaaatttgtgaaaaatatattgtatttcttttgatgtttcaaaaggttgcctatgaaaaactgatttgttaaaacatgctacatgtccaaaaataaagaccagaatgacattttgata

SEQ ID NO: 15575 - DNA, 3877 bp, Homo sapiens
  source 1..3877: mol_type = unassigned DNA
actggcggccatggaactcaccggtaatagaggacacatctcttaactgggttgctctaagaactgatgtctaaaccgtctcagcatggcctgtagaggaggagctgggaatggccaccgtgcctcagctacactctctcgggttagccctggaagtctttacacatgtagaacccgtacccataatatatgcatggtatctgactttttctacccaaatatgggaggcgtggaaagccacatttaccagctctctcagtgcctgattgaaagagggcataaggttataattgtcacccatgcttatggaaatcgaaaaggcatccgttacctcaccagtggcctcaaagtctattacttgcctctgaaagtcatgtacaaccagtctacagccacgaccctctttcacagtctgccattgctcaggtacatatttgttcgggagagagtcacgataatccattcacatagttctttttctgctatggcccatgatgctctcttccacgccaagacaatggggcttcagacagtcttcacggaccattccctttttggatttgctgatgtcagctcggtgcttacaaacaagcttctaaccgtgtctctttgtgatacaaaccacatcatttgtgtgtcttatactagtaaggaaaatactgtactaagagcagcactgaatcctgaaatagtgtccgtcattcctaatgctgtagatcctactgacttcactccagacccatttagaaggcatgatagtataactattgttgttgtcagcagacttgtttacagaaaagacggagtctcgctctgtctcccaggctggagtgcagtggcgcaatctcggctcactgcaaactccgcctcccgggttcacgccattctcctgcctcagcctccggagtagctgggactacaggcgcccgccactacgcccggctaattttttgtatttttagtagagacggggtttcaccatgttagccaggatggtctcaatttcctgaccttgtgatccgcctgccttggcctcccgaaatgctgggattactgggattacaggcgtgagccaccgcgccctgcctactcttacttttgaatatggatcgatttgcttagtggtataatacctgaactctgtcagaaatatccagatttaaatttcataattggaggagagggaccaaagagaatcattttggaagaagttcgggaaagataccagctgcatgacagggtgcgtcttttgggagctttagaacacaaggatgttagaaatgtcttagttcaaggacatatttttctgaatacctcccttactgaagcattctgcatggcgatcgtggaagcagccagttgtggtttacaggttgtaagtaccagagttggtggaattcctgaggtgcttccagaaaaccttattattttatgtgagccttcagtaaaatctttgtgtgaaggattggaaaaggctattttccaactgaagtcagggacattgccagctccagaaaacatccataacatagtaaagactttctacacctggaggaatgttgcagaaagaactgaaaaggtatatgaccgggtatcagtggaagctgtgttgccaatggacaaacgactggacagacttatttctcactgcggcccagtaacaggctacatctttgctttgttggcagttttcaacttcctcttcctcattttcttgagatggatgactccagattctatcattgatgttgcaatagatgccactgggccacggggtgcctggactaataactattctcacagtaaaagagggggtgagaataatgagatatctgaaaccaggtagaaggaagcctagattgtaagattttaaacatttgtaatagttctataaagactatggaaaataaccttgcttttggggggtttttgtttttttagagttaatttagtaagttatgctacctctatatcattcaatattttctgttgaggaaagataaaaatgtatgcaattcctgagtgtagaaacttcttgcacttatttaaaatttaggagagaacatttaagccactcaggtatgcaatttttcagactactgaaatccctgtagcagagatgttttaacattatattttgagagctttgggtgctgaagggccaaacgttttctgggcattttttggccagtttttaatgtaacaccattagacactcaccagatgtttacaagttttctttaggggaactacaacaattatatgaactgttttatatcatgttcatatacatttattaggaatctaaatcatgtctttgaacatttattaggttcactcagtaggtgttacatgtaattaacaggttccttgagtaagatagtccatcagttaccagcacattttgaacccctgctctgtgtagaatgttgaactagatgcttcccgccattaaggaccaggggtgcattcactctttgtttaccattcaaatggcttacttcatcataattgtggttgatatgagatcaatatccaacatgccaaaaatgctcatgccagttaatgccaggaaaaaaatcaccgacacactactagtactttgttcctgttgtatgcattctcctaggtagagcctccatcttcagttgtgtttgtgaaggtattttttgctttttaaatactggggaccgatatcactgttgatagtgcagagaaaccctccacatttttcagtgcataattgagttttctataaatgccttcgtgttttctgagcagaatgtacgaggtgtgccatcccaaaaccagctgctaccctgtccttttaatgtaagtcactccccttcactgtggcctcgctgatgtctgataagtattgtcagtgtgcaaaaggctttacttcagaatggtttatttatagcaaactaagttgaaaattttagaaacagtctttgtgggtggatgttattaactgtcattgttgttgcccagagccatgggttttttaaccccaaattatccacatggtgtgtattatgaattctttgaactcttaaggtttttgtgagaaaaggactgtgaattcaaaacaataaggcacttgtgggtgcactacatagattctgacagtgttgtgattctgtataggatttttaaaaatgacaacattcacaaaatttattactttttaaaaaataacatgcctattaactggttgcactgatataaaagaaatatatttgtgttttgtttgtactaaaatgcaaaagcaagagtgcaatttttaaaatctagaagttaggggttttgttggagaaaaatggactgatctttaaactattcagtcttactgggatttttatgcatagaaactcacatataaacatgaaataaacagtgccagtattcataggaaagtgagaaactgtaatatttggccattattctattcaacaggttttagaggcatgccaccattttttccttatatttttgcttaatttttttaaattgtcatttaattcttaaactgtcatttatttgagatggaaataagatctaaagttagttgcctttgcctgtaaaacatgtgatttgcaaattattatttttcttttttttaacaaatggaagtaaatttgtttcacgtaaatcttaattttcaacctttctggataccttaattgtaactgtcagtttgcactggtcggtatatggaaacacattgctctaccctgctacttagttgattttaaagtgaatttacagtgatgagaaatttgtgaaaaatatattgtatttcttttgatgtttcaaaaggttgcctatgaaaaactgatttgttaaaacatgctacatgtccaaaaataaagac

SEQ ID NO: 15576 - DNA, 2963 bp, Homo sapiens
  source 1..2963: mol_type = unassigned DNA
gcagccgcgggaggtccggacactggcggccatggaactcaccggtaatagaggacacatctcttaactgggttgctctaagaactgatgtctaaaccgtctcagcatggcctgtagaggaggagctgggaatggccaccgtgcctcagctacactctctcgggttagccctggaagtctttacacatgtagaacccgtacccataatatatgcatgggatcgatttgcttagtggtataatacctgaactctgtcagaaatatccagatttaaatttcataattggaggagagggaccaaagagaatcattttggaagaagttcgggaaagataccagctgcatgacagggtgcgtcttttgggagctttagaacacaaggatgttagaaatgtcttagttcaaggacatatttttctgaatacctcccttactgaagcattctgcatggcgatcgtggaagcagccagttgtggtttacaggttgtaagtaccagagttggtggaattcctgaggtgcttccagaaaaccttattattttatgtgagccttcagtaaaatctttgtgtgaaggattggaaaaggctattttccaactgaagtcagggacattgccagctccagaaaacatccataacatagtaaagactttctacacctggaggaatgttgcagaaagaactgaaaaggtatatgaccgggtatcagtggaagctgtgttgccaatggacaaacgactggacagacttatttctcactgcggcccagtaacaggctacatctttgctttgttggcagttttcaacttcctcttcctcattttcttgagatggatgactccagattctatcattgatgttgcaatagatgccactgggccacggggtgcctggactaataactattctcacagtaaaagagggggtgagaataatgagatatctgaaaccaggtagaaggaagcctagattgtaagattttaaacatttgtaatagttctataaagactatggaaaataaccttgcttttggggggtttttgtttttttagagttaatttagtaagttatgctacctctatatcattcaatattttctgttgaggaaagataaaaatgtatgcaattcctgagtgtagaaacttcttgcacttatttaaaatttaggagagaacatttaagccactcaggtatgcaatttttcagactactgaaatccctgtagcagagatgttttaacattatattttgagagctttgggtgctgaagggccaaacgttttctgggcattttttggccagtttttaatgtaacaccattagacactcaccagatgtttacaagttttctttaggggaactacaacaattatatgaactgttttatatcatgttcatatacatttattaggaatctaaatcatgtctttgaacatttattaggttcactcagtaggtgttacatgtaattaacaggttccttgagtaagatagtccatcagttaccagcacattttgaacccctgctctgtgtagaatgttgaactagatgcttcccgccattaaggaccaggggtgcattcactctttgtttaccattcaaatggcttacttcatcataattgtggttgatatgagatcaatatccaacatgccaaaaatgctcatgccagttaatgccaggaaaaaaatcaccgacacactactagtactttgttcctgttgtatgcattctcctaggtagagcctccatcttcagttgtgtttgtgaaggtattttttgctttttaaatactggggaccgatatcactgttgatagtgcagagaaaccctccacatttttcagtgcataattgagttttctataaatgccttcgtgttttctgagcagaatgtacgaggtgtgccatcccaaaaccagctgctaccctgtccttttaatgtaagtcactccccttcactgtggcctcgctgatgtctgataagtattgtcagtgtgcaaaaggctttacttcagaatggtttatttatagcaaactaagttgaaaattttagaaacagtctttgtgggtggatgttattaactgtcattgttgttgcccagagccatgggttttttaaccccaaattatccacatggtgtgtattatgaattctttgaactcttaaggtttttgtgagaaaaggactgtgaattcaaaacaataaggcacttgtgggtgcactacatagattctgacagtgttgtgattctgtataggatttttaaaaatgacaacattcacaaaatttattactttttaaaaaataacatgcctattaactggttgcactgatataaaagaaatatatttgtgttttgtttgtactaaaatgcaaaagcaagagtgcaatttttaaaatctagaagttaggggttttgttggagaaaaatggactgatctttaaactattcagtcttactgggatttttatgcatagaaactcacatataaacatgaaataaacagtgccagtattcataggaaagtgagaaactgtaatatttggccattattctattcaacaggttttagaggcatgccaccattttttccttatatttttgcttaatttttttaaattgtcatttaattcttaaactgtcatttatttgagatggaaataagatctaaagttagttgcctttgcctgtaaaacatgtgatttgcaaattattatttttcttttttttaacaaatggaagtaaatttgtttcacgtaaatcttaattttcaacctttctggataccttaattgtaactgtcagtttgcactggtcggtatatggaaacacattgctctaccctgctacttagttgattttaaagtgaatttacagtgatgagaaatttgtgaaaaatatattgtatttcttttgatgtttcaaaaggttgcctatgaaaaactgatttgttaaaac

SEQ ID NO: 15577 - DNA, 2113 bp, Homo sapiens
  source 1..2113: mol_type = unassigned DNA
actggcggccatggaactcaccggtaatagaggacacatctcttaactgggttgctctaagaactgatgtctaaaccgtctcagcatggcctgtagaggaggagctgggaatggccaccgtgcctcagctacactctctcggatcctactgacttcactccagacccatttagaaggcatgatagtataactattgttgttgtcagcagacttgtttacagaaaagggatcgatttgcttagtggtataatacctgaactctgtcagaaatatccagatttaaatttcataattggaggagagggaccaaagagaatcattttggaagaagttcgggaaagataccagctgcatgacagggtgcgtcttttgggagctttagaacacaaggatgttagaaatgtcttagttcaaggacatatttttctgaatacctcccttactgaagcattctgcatggcgatcgtggaagcagccagttgtggtttacaggttgtaagtaccagagttggtggaattcctgaggtgcttccagaaaaccttattattttatgtgagccttcagtaaaatctttgtgtgaaggattggaaaaggctattttccaactgaagtcagggacattgccagctccagaaaacatccataacatagtaaagactttctacacctggaggaatgttgcagaaagaactgaaaaggtatatgaccgggtatcagtggaagctgtgttgccaatggacaaacgactggacagacttatttctcactgcggcccagtaacaggctacatctttgctttgttggcagttttcaacttcctcttcctcattttcttgagatggatgactccagattctatcattgatgttgcaatagatgccactgggccacggggtgcctggactaataactattctcacagtaaaagagggggtgagaataatgagatatctgaaaccaggtagaaggaagcctagattgtaagattttaaacatttgtaatagttctataaagactatggaaaataaccttgcttttggggggtttttgtttttttagagttaatttagtaagttatgctacctctatatcattcaatattttctgttgaggaaagataaaaatgtatgcaattcctgagtgtagaaacttcttgcacttatttaaaatttaggagagaacatttaagccactcaggtatgcaatttttcagactactgaaatccctgtagcagagatgttttaacattatattttgagagctttgggtgctgaagggccaaacgttttctgggcattttttggccagtttttaatgtaacaccattagacactcaccagatgtttacaagttttctttaggggaactacaacaattatatgaactgttttatatcatgttcatatacatttattaggaatctaaatcatgtctttgaacatttattaggttcactcagtaggtgttacatgtaattaacaggttccttgagtaagatagtccatcagttaccagcacattttgaacccctgctctgtgtagaatgttgaactagatgcttcccgccattaaggaccaggggtgcattcactctttgtttaccattcaaatggcttacttcatcataattgtggttgatatgagatcaatatccaacatgccaaaaatgctcatgccagttaatgccaggaaaaaaatcaccgacacactactagtactttgttcctgttgtatgcattctcctaggtagagcctccatcttcagttgtgtttgtgaaggtattttttgctttttaaatactggggaccgatatcactgttgatagtgcagagaaaccctccacatttttcagtgcataattgagttttctataaatgccttcgtgttttctgagcagaatgtacgaggtgtgccatcccaaaaccagctgctaccctgtccttttaatgtaagtcactccccttcactgtggcctcgctgatgtctgataagtattgtcagtgtgcaaaaggctttacttcagaatggtttatttatagcaaactaagttgaaaattttagaaacagtctttgtgggtggatgttattaactgtcattgttgttgccca

SEQ ID NO: 15578 - DNA, 965 bp, Homo sapiens
  source 1..965: mol_type = unassigned DNA
gcagccgcgggaggtccggacactggcggccatggaactcaccgggatcgatttgcttagtggtataatacctgaactctgtcagaaatatccagatttaaatttcataattggaggagagggaccaaagagaatcattttggaagaagttcgggaaagataccagctgcatgacagggtgcgtcttttgggagctttagaacacaaggatgttagaaatgtcttagttcaaggacatatttttctgaatacctcccttactgaagcattctgcatggcgatcgtggaagcagccagttgtggtttacaggttgtaagtaccagagttggtggaattcctgaggtgcttccagaaaaccttattattttatgtgagccttcagtaaaatctttgtgtgaaggattggaaaaggctattttccaactgaagtcagggacattgccagctccagaaaacatccataacatagtaaagactttctacacctggaggaatgttgcagaaagaactgaaaaggtatatgaccgggtatcagtggaagctgtgttgccaatggacaaacgactggacagacttatttctcactgcggcccagtaacaggctacatctttgctttgttggcagttttcaacttcctcttcctcattttcttgagatggatgactccagattctatcattgatgttgcaatagatgccactgggccacggggtgcctggactaataactattctcacagtaaaagagggggtgagaataatgagatatctgaaaccaggtagaaggaagcctagattgtaagattttaaacatttgtaatagttctataaagactatggaaaataaccttgcttttggggggtttttgtttttttagagttaatttagtaagttatgctacctctatatcattcaatattttctgttgaggaaagataaaaatgtatgcaattcctgagtgta

SEQ ID NO: 15579 - DNA, 1092 bp, Homo sapiens
  source 1..1092: mol_type = unassigned DNA
ccggtaatagaggacacatctcttaactgggttgctctaagaactgatgtctaaaccgtctcagcatggcctgtagaggaggagctgggaatggccaccgtgcctcagctacactctctcgggttagccctggaagtctttacacatgtagaacccgtacccataatatatgcatggtatctgactttttctacccaaatatgggaggcgtggaaagccacatttaccagctctctcagtgcctgattgaaagagggcataaggttataattgtcacccatgcttatggaaatcgaaaaggcatccgttacctcaccagtggcctcaaagtctattacttgcctctgaaagtcatgtacaaccagtctacagccacgaccctctttcacagtctgccattgctcagggtgcgtcttttgggagctttagaacacaaggatgttagaaatgtcttagttcaaggacatatttttctgaatacctcccttactgaagcattctgcatggcgatcgtggaagcagccagttgtggtttacaggttgtaagtaccagagttggtggaattcctgaggtgcttccagaaaaccttattattttatgtgagccttcagtaaaatctttgtgtgaaggattggaaaaggctattttccaactgaagtcagggacattgccagctccagaaaacatccataacatagtaaagactttctacacctggaggaatgttgcagaaagaactgaaaaggtatatgaccgggtatcagtggaagctgtgttgccaatggacaaacgactggacagacttatttctcactgcggcccagtaacaggctacatctttgctttgttggcagttttcaacttcctcttcctcattttcttgagatggatgactccagattctatcattgatgttgcaatagatgccactgggccacggggtgcctggactaataactattctcacagtaaaagagggggtgagaataatgagatatctgaaaccaggtagaaggaagcctagattgtaagattttaaacatttgtaatagttctataaagactatggaaaataaccttgcttttggggg

SEQ ID NO: 15580 - DNA, 854 bp, Homo sapiens
  source 1..854: mol_type = unassigned DNA
gactccggctgcagccgcgggaggtccggacactggcggccatggaactcaccggtaatagaggacacatctcttaactgggttgctctaagaactgatgtctaaaccgtctcagcatggcctgtagaggaggagctgggaatggccaccgtgcctcagctacactctctcggggatcgatttgcttagtggtataatacctgaactctgtcagaaatatccagatttaaatttcataattggaggagagggaccaaagagaatcattttggaagaagttcgggaaagataccagctgcatgacagggtgcgtcttttgggagctttagaacacaaggatgttagaaatgtcttagttcaaggacatatttttctgaatacctcccttactgaagcattctgcatggcgatcgtggaagcagccagttgtggtttacaggttgtaagtaccagagttggtggaattcctgaggtgcttccagaaaaccttattattttatgtgagccttcagtaaaatctttgtgtgaaggattggaaaaggctattttccaactgaagtcagggacattgccagctccagaaaacatccataacatagtaaagactttctacacctggaggaatgttgcagaaagaactgaaaaggtatatgaccgggtatcagtggaagctgtgttgccaatggacaaacgactggacagacttatttctcactgcggcccagtaacaggctacatctttgctttgttggcagttttcaacttcctcttcctcattttcttgagatggatgactccagattctatcattgatgttgcaatagatgccactgggccacggggtgcctggacta

SEQ ID NO: 15581 - DNA, 153 bp, Homo sapiens
  source 1..153: mol_type = unassigned DNA
caaggacatatttttctgaatacctcccttactgaagcattctgcatggcgatcgtggaagcagccagttgtggtttacaggtatatgaccgggtatcagtggaagctgtgttgccaatggacaaacgactggacagacttatttctcactgc

SEQ ID NO: 15582 - DNA, 520 bp, Homo sapiens
  source 1..520: mol_type = unassigned DNA
agaacattagcagcaataagaatttaagtgtaatataaatagcagacttggtttataaattaaatttcttttgtagcatgagttttcactcctttcttcccctctcatttaaaaaatcagggtgcgtcttttgggagctttagaacacaaggatgttagaaatgtcttagttcaaggacatatttttctgaatacctcccttactgaagcattctgcatggcgatcgtggaagcagccagttgtggtttacaggttgtaagtaccagagttggtggaattcctgaggtgcttccagaaaaccttattattttatgtgagccttcagtaaaatctttgtgtgaaggattggaaaaggctattttccaactgaagtcagggacattgccagctccagaaaacatccataacatagtaaagactttctacacctggaggaatgttgcagaaagaactgaaaaggtatatgaccgggtatcagtggaagctgtgttgccaatggacaaacgactggacagactt

SEQ ID NO: 15583 - DNA, 743 bp, Homo sapiens
  source 1..743: mol_type = unassigned DNA
cttagccaccttaaatataccttttttagaagtacgcaatgtataaacacaagtgaataacttaaagaatagtctgttgagatgaaacagaatagtccatattttgggtgtgtggaaggtaatgcatgtcaaggtctacgtcttcaagaattgtaactcttgggggaccactgccagtttgcaaacaattccactcctggaaaaggtttaagagagtttctctcctttatggagtgcatagctaatacttttcaaaataagtggattctcagtcgttctggtgaatttttttaagtttaaatattaatatctccaacattcaactttatattttcagggatcgatttgcttagtggtataatacctgaactctgtcagaaatatccagatttaaatttcataattggaggagagggaccaaagagaatcattttggaagaagttcgggaaagataccagctgcatgacagggtgcgtcttttgggagctttagaacacaaggatgttagaaatgtcttagttcaaggacatatttttctgaatacctcccttactgaagcattctgcatggcgatcgtggaagcagccagttgtggtttacaggttgtaagtaccagagttggtggaattcctgaggtgcttccagaaaaccttattattttatgtgagccttcagtaaaatctttgtgtgaaggattggaaaaggctattttccaactgaagtcagggacattgccagctcc

SEQ ID NO: 15584 - DNA, 680 bp, Homo sapiens
  source 1..680: mol_type = unassigned DNA
gtcacccatgcttatggaaatcgaaaaggcatccgttacctcaccagtggcctcaaagtctattacttgcctctgaaagtcatgtacaaccagtctacagccacgaccctctttcacagtctgccattgctcaggagtttattggaccagatatcaaagtcccactggaatgtcttaagtgagagagaggataaatcaaagttttccttatccaggctttttggatgtctttttcctgagcctcctcttccaagcctgttttgctctcagtcaggatttaccagcactctgcatgtgtaggcacgctcacctgcttccttctgtagtgggatcgatttgcttagtggtataatacctgaactctgtcagaaatatccagatttaaatttcataattggaggagagggaccaaagagaatcattttggaagaagttcgggaaagataccagctgcatgacagggtgcgtcttttgggagctttagaacacaaggatgttagaaatgtcttagttcaaggacatatttttctgaatacctcccttactgaagcattctgcatggcgatcgtggaagcagccagttgtggtttacaggttgtaagtaccagagttggtggaattcctgaggtgcttccagaaaaccttattattttatgtgagccttcagtaaaatctttgtg

SEQ ID NO: 15585 - DNA, 582 bp, Homo sapiens
  source 1..582: mol_type = unassigned DNA
actggcggccatggaactcaccggtaatagaggacacatctcttaactgggttgctctaagaactgatgtctaaaccgtctcagcatggcctgtagaggaggagctgggaatggccaccgtgcctcagctacactctctcggggatcgatttgcttagtggtataatacctgaactctgtcagaaatatccagatttaaatttcataattggaggagagggaccaaagagaatcattttggaagaagttcgggaaagataccagctgcatgacaggtattgatgaatttcatgttgtcttgagggagaagatgtcaattatctctatttggttttaactgcatgcgtaccttaggtgtgttgcttctcctgcatgtaattgatatacatataattgatataaatctaatgcaaggactgttttcaaaatttttatataaataggaaacctagttaattcactattttttccattagcccaatattatttgactttggggggccattgttggaggcaccatgaaaggcacaaaaaacagctgctttaactggaagcgtttgcagatttccaggccatactgtg

SEQ ID NO: 15586 - DNA, 100 bp, Homo sapiens
  source 1..100: mol_type = unassigned DNA
catgaaattgagtctcagagaggggatcgatttgcttagtggtataatacctgaactctgtcagaaatatccagatttaaatttcataattggaggagag

SEQ ID NO: 15587 - DNA, 1320 bp, Homo sapiens
  source 1..1320: mol_type = unassigned DNA
gcattctgtattctgaattcctcctgggacattagtgatgtgtttttttgtaacttaggaattgtacctaatttattttttaaccaaatagcatatcttcttgagatggctagctgagaaagagtatgacacaagtgtgatcaaggatcagcaaaattaactacccatgcaaagattaaacctgttacctttacttccctaatgtggtattttaactagctgagctaaccaccaatggagtgatggtatggcctttcctgtactcaattcagtaattgaacagttatttatcgaaccctctccagatgccaggcaccctgcagaaagtaacattctgaaaaggaacagccatgcctgtagcccaaaagtgagtagttgtattaatggtccattccttattaacaaattaatttcctcaggagtttattggaccagatatcaaagtcccactggaatgtcttaagtgagagagaggataaatcaaagttttccttatccaggctttttggatgtctttttcctgagcctcctcttccaagcctgttttgctctcagtcaggatttaccagcactctgcatgtgtaggcacgctcacctgcttccttctgtagtggtaatgacaacctacatttgtattctgcagttgataaagcctgttcgtggtacaatacctcatttgaccctcccaacaactgtagggtagatgttatctacatgaaattgagtctcagagagggtaagtaactcacccaggttacacagtaagtaacagagatgacacacgagttcagcttttctggagctaagttctcctcttcctccacccatgcccagccactcatatcctaggtgtagatcagaaggttcttaaaaatattgttagactgagctttaaaagcagtttggatcagagattttcattgtctgttttgtgttcacatggcagtcgaaagtctctaggttccattgcattatacccttcttagaggctccagaataaatttttttatagtggtggggaaaagcccttattcttagaataagaatatagatcattggtaatagtaatcagttccatttcttatgagatacttgtcaggattaaatgacataatgaatttaaagtatattgcctgtcatagcaagcactctgttactgttagctattatcatttatgactattgctctatgttgttttttgtttgtttgaagaatgggctcttaaccttgtacgagaaagaaaagggtgaggaagaaaatggattgaaggaattgtaggagactaaatgttaaaagtcattaaactaccttctggttta

SEQ ID NO: 15588 - DNA, 572 bp, Homo sapiens
  source 1..572: mol_type = unassigned DNA
gggtgaaaccgacccggttcgaagcccggaagttgggtcggagggtctccagagtaatagaggacacatctcttaactgggttgctctaagaactgatgtctaaaccgtctcagcatggcctgtagaggaggagctgggaatggccaccgtgcctcagctacactctctcgggttagccctggaagtctttacacatgtagaacccgtacccataatatatgcatggtatctgactttttctacccaaatatgggaggcgtggaaagccacatttaccagctctctcagtgcctgattgaaagagggcataaggttataattgtcacccatgcttatggaaatcgaaaaggcatccgttacctcaccagtggcctcaaagtctattacttgcctctgaaagtcatgtacaaccagtctacagccacgaccctctttcacagtctgccattgctcaggtacatatttgttcgggagagagtcacgataatccattcacatagttctttttctgctatggcccatgatgctctcttccacgccaagacaatggggcttcagacagtcttcacgg

SEQ ID NO: 15589 - DNA, 760 bp, Homo sapiens
  source 1..760: mol_type = unassigned DNA
gcggccgcctggcgctgcagcgccgctactactccccgtcctgccgggaattctgcctcagctgccctcggctctcgctgcgttcgctcaccgctgtcacctgcacggtgtggctggcggcctacggactcttcaccctctgcgagaacagcatgatcctctctgctgccatcttcatcaccctcttaggtctgcttggttatctccattttgtgaagattgatcaggagactctgttaatcattgattcccttggcattcagatgacttcatcttatgcttcaggcaaagaaagcactaccttcatagaaatgggcaaggtcaaggatattgtcatcaatgaggccatttacatgcagaaggtgatttactacctctgcatcttattgaaagatccagtggaaccacatgggatatcccaagtagtacccgtcttccaggctgcatggtgcattcattctaagctggcaacccgaccctcctgcttcctgaacagaaccttacctgggccatcagggcagccatctcaagagccaattccttgttgataggaaacctccctgccactatctctctactggtttgagaggcaaggagcagccgttctcggtccgtctcccctttgacttgactgcgaaagtacagcctacaaagaagagaataagaaaccaggactcagcagggattccaaacagggatggggctttctctgggtctgttacctttatttccaaaaagataaagtactcttttcccacta

SEQ ID NO: 15590 - DNA, 1420 bp, Homo sapiens
  source 1..1420: mol_type = unassigned DNA
aagcgggtctggagcgggcgagacggccagggccggcgagcgcagtgcagcgccgcgcggtgcgggcggccgagtgggggcgtcatggaggatgagcggagcttttcggatatctgcggcggccgcctggcgctgcagcgccgctactactccccgtcctgccgggaattctgcctcagctgccctcggctctcgctgcgttcgctcaccgctgtcacctgcacggtgtggctggcggcctacggactcttcaccctctgcgagaacagcatgatcctctctgctgccatcttcatcaccctcttaggtctgcttggttatctccattttgtgaagattgatcaggagactctgttaatcattgattcccttggcattcagatgacttcatcttatgcttcaggcaaagaaagcactaccttcatagaaatgggcaaggtcaaggatattgtcatcaatgaggccatttacatgcagaaggtgatttactacctctgcatcttattgaaagatccagtggaaccacatgggatatcccaagtagtacccgtcttccagagtgccaagccccggctggactgcttgattgaagtatacaggagctgccaggagatcctggcacaccagaaagccacatcaacaagcccatgagccccagcgttcagaaggccagcattgtcttccatgggagatgactcttaagccataggggctggttttccgtactccaaaccatcaggtggacacagtcctaggaaccattatggatgtagtgcatcttagagccatagagcaggtgactggaaatctaactcagtatatttccgtgtattatagtgttttccttgtaaggttttgcctactttaccaaaggaggggagaccttaagaattttgacacagtatgtcaaaagtaatgtcagcaaagaacactttcggaaattgctaagcatgttcaggtttactttgttgatgtttgtgaagcaaaacaatgggaaactgacatcagatgtcttgagaaagctatattttccaatagtaccccttgtgtaaagttacgaaaaaaacaagcccttcagtactggttagcaggaagaaatgtcctacaaaagacgagtctgtcaacctagtgcctgtgttctgtacagggcttatttatttactgttaataaacagatcttccaaaacacacagttacctggttcacagatagctgctttttattgacaaacaagatcatagtatttcagtcatggtgtcaagcacattaatacttttctgttactcagcatttttttttatatcagttcaaaagctacttttgccaagaaggatgagacaaaaggccagacagaaattggactttggttttcagacatgggactctcatgttaacaaagaataaataagcaaatattgaa

SEQ ID NO: 15591 - DNA, 841 bp, Homo sapiens
  source 1..841: mol_type = unassigned DNA
ccctcttaggtctgcttggttatctccattttgtgaagattgatcaggagactctgttaatcattgattcccttggcattcagatgacttcatcttatgcttcaggcaaagaaagcactaccttcatagaaatgggcaaggtcaaggatattgtcatcaatgaggccatttacatgcagaaggtgatttactacctctgcatcttattgaaagatccagtggaaccacatgggatatcccaagtagtacccgtcttccagagacagagtctcactttgtcacctaggctggagtgcagtgacaatcaccactcattgcagcctccacctcccaggctcaagaaatcctcctgcctcagcctcctgagaacttgggactacagagtgccaagccccggctggactgcttgattgaagtatacaggagctgccaggagatcctggcacaccagaaagccacatcaacaagcccatgagccccagcgttcagaaggccagcattgtcttccatgggagatgactcttaagccataggggctggttttccgtactccaaaccatcaggtggacacagtcctaggaaccattatggatgtagtgcatcttagagccatagagcaggtgactggaaatctaactcagtatatttccgtgtattatagtgttttccttgtaaggttttgcctactttaccaaaggaggggagaccttaagaattttgacacagtatgtcaaaagtaatgtcagcaaagaacactttcggaaattgctaagcatgttcaggtttactttgttgatgtttgtgaagcaaaacaatgggaaactgacatcagatgtcttga

SEQ ID NO: 15592 - DNA, 560 bp, Homo sapiens
  source 1..560: mol_type = unassigned DNA
aaaaagaatgcaaaatgagtttcacttagactttgctatttgatttattttcttacagcagaaggtgatttactacctctgcatcttattgaaagatccagtggaaccacatgggatatcccaagtagtacccgtcttccagagtgccaagccccggctggactgcttgattgaagtatacaggagctgccaggagatcctggcacaccagaaagccacatcaacaagcccatgagccccagcgttcagaaggccagcattgtcttccatgggagatgactcttaagccataggggctggttttccgtactccaaaccatcaggtggacacagtcctaggaaccattatggatgtagtgcatcttagagccatagagcaggtgactggaaatctaactcagtatatttccgtgtattatagtgttttccttgtaaggttttgcctactttaccaaaggaggggagaccttaagaattttgacacagtatgtcaaaagtaatgtcagcaaagaacactttcggaaattgctaagcatgttcaggtttactttgttgatgtt

SEQ ID NO: 15593 - DNA, 903 bp, Homo sapiens
  source 1..903: mol_type = unassigned DNA
gagacggccagggccggcgagcgcagtgcagcgccgcgcggtgcgggcggccgagtgggggcgtcatggaggatgagcggagcttttcggatatctgcggcggccgcctggcgctgcagcgccgctactactccccgtcctgccgggaattctgcctcagctgccctcggctctcgctgcgttcgctcaccgctgtcacctgcacggtgtggctggcggcctacggactcttcaccctctgcgagaacagcatgatcctctctgctgccatcttcatcaccctcttaggtctgcttggttatctccattttgtgaagattgatcaggagactctgttaatcattgattcccttggcattcagatgacttcatcttatgcttcaggcaaagaaagcactaccttcatagaaatgggcaaggtcaaggatattgtcatcaatgaggccatttacatgaaggtgatttactacctctgcatcttattgaaagatccagtggaaccacatgggatatcccaagtagtacccgtcttccagagtgccaagccccggctggactgcttgattgaagtatacaggagctgccaggagatcctggcacaccagaaagccacatcaacaagcccatgagccccagcgttcagaaggccagcattgtcttccatgggagatgactcttaagccataggggctggttttccgtactccaaaccatcaggtggacacagtcctaggaaccattatggatgtagtgcatcttagagccatagagcaggtgactggaaatctaactcagtatatttccgtgtattatagtgttttccttgtaaggttttgcctactttaccaaaggaggggagaccttaagaattttgacacagtatgtcaaaagtaatgtcagcaa

SEQ ID NO: 15594 - DNA, 499 bp, Homo sapiens
  source 1..499: mol_type = unassigned DNA
gtcctgccgggaattctgcctcagctgccctcggctctcgctgcgttcgctcaccgctgtcacctgcacggtgtggctggcggcctacggactcttcaccctctgcgagaacagcatgatcctctctgctgccatcttcatcaccctcttaggtctgcttggttatctccattttgtgaagattgatcaggagactctgttaatcattgattcccttggcattcagatgacttcatcttatgcttcaggcaaagaaagcactaccttcatagaaatgggcaaggtcaaggatattgtcatcaatgaggccatttacatgagtgccaagccccggctggactgcttgattgaagtatacaggagctgccaggagatcctggcacaccagaaagccacatcaacaagcccatgagccccagcgttcagaaggccagcattgtcttccatgggagatgactcttaagccataggggctggttttccgtactccaaaccatca

SEQ ID NO: 15595 - DNA, 583 bp, Homo sapiens
  source 1..583: mol_type = unassigned DNA
acggccagggccggcgagcgcagtgcagcgccgcgcggtgcgggcggccgagtgggggcgtcatggaggatgagcggagcttttcggatatctgcggcggccgcctggcgctgcagcgccgctactactccccgtcctgccgggaattctgcctcagctgccctcggctctcgctgcgttcgctcaccgctgtcacctgcacggtgtggctggcggcctacggactcttcaccctctgcgagcatgatcctctctgctgccatcttcatcaccctcttaggtctgcttggttatctccattttgtgaagattgatcaggagactctgttaatcattgattcccttggcattcagatgacttcatcttatgcttcaggcaaagaaagcactaccttcatagaaatgggcaaggtcaaggatattgtcatcaatgaggccatttacatgagtgccaagccccggctggactgcttgattgaagtatacaggagctgccaggagatcctggcacaccagaaagccacatcaacaagcccatgagccccagcgttcagaaggccagcattgtcttccatgggagatg

SEQ ID NO: 15596 - DNA, 593 bp, Homo sapiens
  source 1..593: mol_type = unassigned DNA
gcagtgcagcgccgcgcggtgcgggcggccgagtgggggcgtcatggaggatgagcggagcttttcggatatctgcggcggccgcctggcgctgcagcgccgctactactccccgtcctgccgggaattctgcctcagctgccctcggctctcgctgcgttcgctcaccgctgtcacctgcacggtgtggctggcggcctacggactcttcaccctctgcgagaacagcatgatcctctctgctgccatcttcatcaccctcttaggtctgcttggttatctccattttgtgaagattgatcaggagactctgttaatcattgattcccttggcattcagatgacttcatcttatgcttcaggcaaagaaagcactaccttcatagaaatgggcaaggtcaaggatattgtcatcaatgaggccatttacatggtaagtatttaaaagcagaaggtgatttactacctctgcatcttattgaaagatccagtggaaccacatgggatatcccaagtagtacccgtcttccagagtgccaagccccggctggactgcttgattgaagtatacaggagctgccaggagatcctgg

SEQ ID NO: 15597 - DNA, 594 bp, Homo sapiens
  source 1..594: mol_type = unassigned DNA
ggtctggagcgggcgagacggccagggccggcgagcgcagtgcagcgccgcgcggtgcgggcggccgagtgggggcgtcatggaggatgagcggagcttttcggatatctgcggcggccgcctggcgctgcagcgccgctactactccccgtcctgccgggaattctgcctcagctgccctcggctctcgctgcgttcgctcaccgctgtcacctgcacggtgtggctggcggcctacggactcttcaccctctgcgagcatgatcctctctgctgccatcttcatcaccctcttaggtctgcttggttatctccattttgtgaagattgatcaggagactctgttaatcattgattcccttggcattcagatgacttcatcttatgcttcaggcaaagaaagcactaccttcatagaaatgggcaaggtcaaggatattgtcatcaatgaggccatttacatgcagaaggtgatttactacctctgcatcttattgaaagatccagtggaaccacatgggatatcccaagtagtacccgtcttccagagtgccaagccccggctggactgcttgattgaagtatacaggagct

SEQ ID NO: 15598 - DNA, 1049 bp, Homo sapiens
  source 1..1049: mol_type = unassigned DNA
agacggccagggccggcgagcgcagtgcagcgccgcgcggtgcgggcggccgagtgggggcgtcatggaggatgagcggagcttttcggatatctgcggcggccgcctggcgctgcagcgccgctactactccccgtcctgccgggaattctgcctcagctgccctcggctctcgctgcgttcgctcaccgctgtcacctgcacggtgtggctggcggcctacggactcttcaccctctgcgagatgacttcatcttatgcttcaggcaaagaaagcactaccttcatagaaatgggcaaggtcaaggatattgtcatcaatgaggccatttacatgcagaaggtgatttactacctctgcatcttattgaaagatccagtggaaccacatgggatatcccaagtagtacccgtcttccagagacagagtctcactttgtcacctaggctggagtgcagtgacaatcaccactcattgcagcctccacctcccaggctcaagaaatcctcctgcctcagcctcctgagaacttgggactacaggtgtgcaccatctcgcctggctaattttttttttttatttttagtagagatgaggtcttgccatgttgcctaggctgatcttgaactcctgagttcaagcaattctcctgcctcagcctcccaaagtgttgggattacaagcatgagccagcatacctggcctcatgcacattttaaagaacacaatcaaatatatagcaacttctgcctataaatcaccattcatctactttgactctgtcagtctactactgtacactttttttagatagaggtaattgatcttacattgtacactattgtgtgtcttgctttgtaaataatttaatatgtatgtatcctacaaaggccattatatttattattttaaataattgtataatatattgaaatatcagtttatttagccactcttgccagcttttaaaatcatgcctgggtttttttgttttgctcttacaaaaaaaaaaaaacacttatcagctggtgcagtggctcatgcctgt

SEQ ID NO: 15599 - DNA, 476 bp, Homo sapiens
  source 1..476: mol_type = unassigned DNA
gagacggccagggccggcgagcgcagtgcagcgccgcgcggtgcgggcggccgagtgggggcgtcatggaggatgagcggagcttttcggatatctgcggcggccgcctggcgctgcagcgccgctactactccccgtcctgccgggaattctgcctcagctgccctcggctctcgctgcgttcgctcaccgctgtcacctgcacggtgtggctggcggcctacggactcttcaccctctgcgagaacagcatgatcctctctgctgccatcttcatcaccctcttaggcaaagaaagcactaccttcatagaaatgggcaaggtcaaggatattgtcatcaatgaggccatttacatgcagaaggtgatttactacctctgcatcttattgaaagatccagtggaaccacatgggatatcccaagtagtacccgtcttccagagacagagtctcactttgtcacctaggctggag

SEQ ID NO: 15600 - DNA, 962 bp, Homo sapiens
  source 1..962: mol_type = unassigned DNA
agcgggtctggagcgggcgagacggccagggccggcgagcgcagtgcagcgccgcgcggtgcgggcggccgagtgggggcgtcatggaggatgagcggagcttttcggatatctgcggcggccgcctggcgctgcagcgccgctactactccccgtcctgccgggaattctgcctcagctgccctcggctctcgctgcgttcgctcaccgctgtcacctgcacggtgtggctggcggcctacggactcttcaccctctgcgagaacagcatgatcctctctgctgccatcttcatcaccctcttaggtctgcttggttatctccattttgtgaagattgatcaggagactctgttaatcattgattcccttggcattcagatgacttcatcttatgcttcaggcaaagaaagcactaccttcatagaaatgggcaaggtcaaggatattgtcatcaatgaggccatttacatggtaagtatttaaaaggtaagtattacaggcctctctggaggaggtagccagcccatgggatgttcccagatttaaactaaaaccgtaaaagtgagacttatatttaaaaggtaaatctctttatttttaaagagatgcagcaggttttcatggatagggaattagcatttcaactttatcttcaagaccaacttcaaaattatcactggcattttttccttctctttctatcttttttctttttttttttttgagacagggtctcactctgttgcccaggctggagtgcagtggctcgatcacagctcactgcagcctcaacttcccaggctcaagccattctcccacctcagcctcctgagtagctgggactacaggcatgcaccaccatgcttggctcgttttttctatgttttgcagagatgcagtctcactatgttgcctaggctggtcttgaattcctgggctcaagccatcctcctgctgtgg

SEQ ID NO: 15601 - DNA, 2397 bp, Homo sapiens
  source 1..2397: mol_type = unassigned DNA
ccccacggtggccggagcagccggaagctagcatggcggccgccggggctgcggctacacacctagctccgcctcatggtgcctgtcactgtcgtgtttacgcgggagtcagtgcccctggacgaccaggagaagctgcccttcaccgttgtgcatgaaagagagattcctctgaaatacaaaatgaaaatcaaatgccgtttccagaaggcctatcggagggctttggaccatgaggaggaggccctgtcatcgggcagtgtgcaagaggcagaagccatgttagatgagcctcaggaacaagcggagggctccctgactgtgtacgtgatatctgaacactcctcacttcttccccaggacatgatgagctacattgggcccaagaggacagcagtggtgcgggggataatgcaccgggaggcctttaacatcattggccgccgcatagtccaggtggcccaggccatgtctttgactgaggatgtgcttgctgctgctctggctgaccaccttccagaggacaagtggagcgctgagaagaggcggcctctcaagtccagcttgggctatgagatcaccttcagtttactcaacccagaccccaagtcccatgatgtctactgggacattgagggggctgtccggcgctatgtgcaacctttcctgaatgccctcggtgccgctggcaacttctctgtggactctcagattctttactatgcaatgttgggggtgaatccccgctttgactcagcttcctccagctactatttggacatgcacagcctcccccatgtcatcaacccagtggagtcccggctgggatccagtgctgcctccttgtaccctgtgctcaactttctactctacgtgcctgagcttgcacactcaccgctgtacattcaggacaaggatggcgctccagtggccaccaatgccttccatagtccccgctggggtggcattatggtatataatgttgactccaaaacctataatgcctcagtgctgccagtgagagtcgaggtggacatggtgcgagtgatggaggtgttcctggcacagttgcggttgctctttgggattgctcagccccagctgcctccaaaatgcctgctttcagggcctacgagtgaagggctaatgacctgggagctagaccggctgctctgggctcggtcagtggagaacctggccacagccaccaccacccttacctccctggcgcagcttctgggcaagatcagcaacattgtcattaaggacgacgtggcatctgaggtgtacaaggctgtagctgccgtccagaagtcggcagaagagttggcgtctgggcacctggcatctgcctttgtcgccagccaggaagctgtgacatcctctgagcttgccttctttgacccgtcactcctccacctcctttatttccctgatgaccagaagtttgccatctacatcccactcttcctgcctatggctgtgcccatcctcctgtccctggtcaagatcttcctggagacccgcaagtcctggagaaagcctgagaagacagactgagcagggcagcacctccataggaagccttcctttctggccaaggtgggcggtgttagattgtgaggcacgtacatggggcctgccggaatgacttaaatatttgtctccagtctccactgttggctctccagcaaccaaagtacaacactccaagatgggttcatcttttcttcctttcccattcacctggctcaatcctcctccaccaccaggggcctcaaaaggcacatcatccgggtctccttatcttgtttgataaggctgctgcctgtctccctctgtggcaaggactgtttgttcttttgccccatttctcaacatagcacacttgtgcactgagaggagggagcattatgggaaagtccctgccttccacacctctctctagtccctgtgggacagccctagcccctgctgtcatgaaggggccaggcattggtcacctgtgggaccttctccctcactcccctccctcctagttggctttgtctgtcaggtgcagtctggcgggagtccaggaggcagcagctcaggacatggtgctgtgtgtgtgtgtgtgtgtgtgtgtgtgtgtgtgtgtcagaggttccagaaagttccagatttggaatcaaacagtcctgaattcaaatccttgtttttgcacttattgtctggagagctttggataaggtattgaatctctctgagcctcagtttttcatttgttcaaatggcactgatgatgtctcccttacaagatggttgtgaggagtaaatgtgatcagcatgtaaagtgtctggcgtgtagtaggctcttaataaacactggctgaatatgaattggaatgatacaaa

SEQ ID NO: 15602 - DNA, 3088 bp, Homo sapiens
  source 1..3088: mol_type = unassigned DNA
atggtaatagtcacactacgcagaccccagagcccatgcttctgggacaggcaggtgtccctgaaactgtgttccttctgttttccttctggtgtcctccatggcccagcctgtgggaggggcaggcaccaggaaggtgagggtgctatgtgctcatgcccctcttctgccggccccacttttgtttccgccagtgttttctatactgtgaccctttgcccttacctaggatcattctgtgtccatcttagatcttcgccttatttgtgggagtcttgcaaggttgggagccttgtctcccttgttagactggaagtttctcatgggggagaattctaaaatgggataagaaaaaaatatgttctacaggactttcaagggggtaattgggataatgtatttaatgctctccgtagtaggtactcaaaaaatattagctataccatgaggtttatagcttctaaagagcacagaatatgttttccttttctctccagagtgcctagggcagagctgtgcaagggcctggtatgatgttgtggcaatctcattccccctttcaggtatataatgttgactccaaaacctataatgcctcagtgctgccagtgagagtcgaggtggacatggtgcgagtgatggaggtgttcctggcacagttgcggtgaggtcctggatgatccacttggggacatagtctccttggctgtagaggggagttgcaaagtggaatcaagtcttacctggcagggatatcttggctgtgcctagagccccagggaaaccaagaaaagtttctaaggatcccatcatccttctaagaaggactagtaggtgacaaaatcatttatttttttttttgagacggagtcttgctctgttgcccaggccggagtgcagtggtgccattttggctcactgcaacctccacctcccgggttcaagcaattctctgcctcagcctcccgagtagctgggactacaggtgcccgccaccacaactggctaattttttgtaattttagtagaaacggggtttcaccatcttggccaggctggtcttgaactcctgacctcgtgatccacccgcttaggcctcccaaagtgctgggattacaggcgtgagccactgtgcccagccagcaaaaccagttttaagaaaaatagactcatgaatgtcaggtccatggagtgtgattagggctgcttaagaaaatagctgttaattcttatgctgcctgatggattgagagtggctgcctgaggctctgtgttgaggattctaaggctgtatctgggctcattaggaaagagtattcttctgattgactagcagtgtctctcacggatgcaggcttagagaagcacagcacatgtgccttggcaaaggcagtcctggatcatcccttaatgctaagtcccattggccccatttgttcaaagagagggtagaaaaggtgaaaggattaaactgagttggtgttatcagaagtattttagccatggaacctttttttaaaaaacaagatcttggaaatctaatgtagaaacaggtaaaagcagaaacacctgttgaagcagcgtttggggccaacttgtttggtgttgccccttatgcccccaagaccctgaggtacttccctttaacccctatggttctgggtaagattgaaaatcactggctcaggacagatatttgagaaatcttagccatgatctcccgccttgtggtctcagccaccttgatcttactccgatgttcctacaggttgctctttgggattgctcagccccagctgcctccaaaatgcctgctttcagggcctacgagtgaagggctaatgacctgggagctagaccggctgctctgggctcggtcagtggagaacctggccacagccaccaccacccttacctccctggcgcagcttctgggcaagatcagcaacattgtcattaaggacgacgtggcatctgaggtgtacaaggctgtagctgccgtccagaagtcggcagaagagttggcgtctgggcacctggcatctgcctttgtcgccagccaggaagctgtgacatcctctgagcttgccttctttgacccgtcactcctccacctcctttatttccctgatgaccagaagtttgccatctacatcccactcttcctgcctatggctgtgcccatcctcctgtccctggtcaagatcttcctggagacccgcaagtcctggagaaagcctgagaagacagactgagcagggcagcacctccataggaagccttcctttctggccaaggtgggcggtgttagattgtgaggcacgtacatggggcctgccggaatgacttaaatatttgtctccagtctccactgttggctctccagcaaccaaagtacaacactccaagatgggttcatcttttcttcctttcccattcacctggctcaatcctcctccaccaccaggggcctcaaaaggcacatcatccgggtctccttatcttgtttgataaggctgctgcctgtctccctctgtggcaaggactgtttgttcttttgccccatttctcaacatagcacacttgtgcactgagaggagggagcattatgggaaagtccctgccttccacacctctctctagtccctgtgggacagccctagcccctgctgtcatgaaggggccaggcattggtcacctgtgggaccttctccctcactcccctccctcctagttggctttgtctgtcaggtgcagtctggcgggagtccaggaggcagcagctcaggacatggtgctgtgtgtgtgtgtgtgtgtgtgtgtgtgtgtgtgtgtcagaggttccagaaagttccagatttggaatcaaacagtcctgaattcaaatccttgtttttgcacttattgtctggagagctttggataaggtattgaatctctctgagcctcagtttttcatttgttcaaatggcactgatgatgtctcccttacaagatggttgtgaggagtaaatgtgatcagcatgtaaagtgtctggcgtgtagtaggctcttaataaacactggctgaatatgaattggaatgata

SEQ ID NO: 15603 - DNA, 2658 bp, Homo sapiens
  source 1..2658: mol_type = unassigned DNA
gatgcagacaagtgagagagcttaggcattcaggaagctcagagtagtttagtgtggctgaaatgtgagtgagtgaccaaagatgaagccggttaggcaggcaggagccaggtcataaaggaccatgttaaggagtttgaactttaacctgatatgggtggctagtgattgagggatattaagcagggaactgacataaggtcagatttctggtttgcataaaactatctgtagtaatatgggtacattgtgggagtggccaagaaagctgtcgtagacagtcaaggggcctttgaggagggagaattcgggggtgttttggagctaaggactatgtttccatcggtatggcacatctcgggagaacattctgaagccctttactagagacaccctggacaggaggatatcctaatgattgttagttggggaatcagtcccagagtgagtgaccagcaagttagaggccgacctgggactaaggtccaggtccagcatgttttgatattctgctttccctttataccacaggatccagtgctgcctccttgtaccctgtgctcaactttctactctacgtgcctgagcttgcacactcaccgctgtacattcaggacaaggatggcgctccagtggccaccaatgccttccatagtccccgctggggtggcattatggtaatagtcacactacgcagaccccagagcccatgcttctgggacaggcaggtgtccctgaaactgtgttccttctgttttccttctggtgtcctccatggcccagcctgtgggaggggcaggcaccaggaaggtgagggtgctatgtgctcatgcccctcttctgccggccccacttttgtttccgccagtgttttctatactgtgaccctttgcccttacctaggatcattctgtgtccatcttagatcttcgccttatttgtgggagtcttgcaaggttgggagccttgtctcccttgttagactggaagtttctcatgggggagaattctaaaatgggataagaaaaaaatatgttctacaggactttcaagggggtaattgggataatgtatttaatgctctccgtagtaggtactcaaaaaatattagctataccatgaggtttatagcttctaaagagcacagaatatgttttccttttctctccagagtgcctagggcagagctgtgcaagggcctggtatgatgttgtggcaatctcattccccctttcaggtatataatgttgactccaaaacctataatgcctcagtgctgccagtgagagtcgaggtggacatggtgcgagtgatggaggtgttcctggcacagttgcggttgctctttgggattgctcagccccagctgcctccaaaatgcctgctttcagggcctacgagtgaagggctaatgacctgggagctagaccggctgctctgggctcggtcagtggagaacctggccacagccaccaccacccttacctccctggcgcagcttctgggcaagatcagcaacattgtcattaaggacgacgtggcatctgaggtgtacaaggctgtagctgccgtccagaagtcggcagaagagttggcgtctgggcacctggcatctgcctttgtcgccagccaggaagctgtgacatcctctgagcttgccttctttgacccgtcactcctccacctcctttatttccctgatgaccagaagtttgccatctacatcccactcttcctgcctatggctgtgcccatcctcctgtccctggtcaagatcttcctggagacccgcaagtcctggagaaagcctgagaagacagactgagcagggcagcacctccataggaagccttcctttctggccaaggtgggcggtgttagattgtgaggcacgtacatggggcctgccggaatgacttaaatatttgtctccagtctccactgttggctctccagcaaccaaagtacaacactccaagatgggttcatcttttcttcctttcccattcacctggctcaatcctcctccaccaccaggggcctcaaaaggcacatcatccgggtctccttatcttgtttgataaggctgctgcctgtctccctctgtggcaaggactgtttgttcttttgccccatttctcaacatagcacacttgtgcactgagaggagggagcattatgggaaagtccctgccttccacacctctctctagtccctgtgggacagccctagcccctgctgtcatgaaggggccaggcattggtcacctgtgggaccttctccctcactcccctccctcctagttggctttgtctgtcaggtgcagtctggcgggagtccaggaggcagcagctcaggacatggtgctgtgtgtgtgtgtgtgtgtgtgtgtgtgtgtgtgtgtcagaggttccagaaagttccagatttggaatcaaacagtcctgaattcaaatccttgtttttgcacttattgtctggagagctttggataaggtattgaatctctctgagcctcagtttttcatttgttcaaatggcactgatgatgtctcccttacaagatggttgtgaggagtaaatgtgatcagcatgtaaagtgtctggcgtgtagtaggctcttaataaacactggctgaatatgaattggaatgata

SEQ ID NO: 15604 - DNA, 2815 bp, Homo sapiens
  source 1..2815: mol_type = unassigned DNA
agctctgcccccacggtggccggagcagccggaagctagcatggcggccgccggggctgcggctacacacctaggtgcggtgggcttcgggtggggggcctgcagctagctgatggcaagggaggaatagcaggggtggggattgtggtgtgcgagaggtcccgcggacggggggctcgggggtctcttcagacgagattcccttcaggcttgggccgggtcccttcgcacggagatcccaatgaacgcgggcccctggaggccggtggttggggcttctccgcgtcggggatggggccggtaccctagcccgtttccagcgcctcagtcggttccccatgccctcagaggtggcccggggcaagcgcgccgccctcttcttcgctgcggtggccatcgtgctggggctaccgctctggtggaagaccacggagacctaccgggcctcgttgccttactcccagatcagtggcctgaatgcccttcagctccgcctcatggtgcctgtcactgtcgtgtttacgcgggagtcagtgcccctggacgaccaggagaagctgcccttcaccgttgtgcatgaaagagagattcctctgaaatacaaaatgaaaatcaaatgccgtttccagaaggcctatcggagggctttggaccatgaggaggaggccctgtcatcgggcagtgtgcaagaggcagaagccatgttagatgagcctcaggaacaagcggagggctccctgactgtgtacgtgatatctgaacactcctcacttcttccccaggacatgatgagctacattgggcccaagaggacagcagtggtgcgggggataatgcaccgggaggcctttaacatcattggccgccgcatagtccaggtggcccaggccatgtctttgactgaggatgtgcttgctgctgctctggctgaccaccttccagaggacaagtggagcgctgagaagaggcggcctctcaagtccagcttgggctatgagatcaccttcagtttactcaacccagaccccaagtcccatgatgtctactgggacattgagggggctgtccggcgctatgtgcaacctttcctgaatgccctcggtgccgctggcaacttctctgtggactctcagattctttactatgcaatgttgggggtgaatccccgctttgactcagcttcctccagctactatttggacatgcacagcctcccccatgtcatcaacccagtggagtcccggctgggatccagtgctgcctccttgtaccctgtgctcaactttctactctacgtgcctgagcttgcacactcaccgctgtacattcaggacaaggatggcgctccagtggccaccaatgccttccatagtccccgctggggtggcattatggtatataatgttgactccaaaacctataatgcctcagtgctgccagtgagagtcgaggtggacatggtgcgagtgatggaggtgttcctggcacagttgcggttgctctttgggattgctcagccccagctgcctccaaaatgcctgctttcagggcctacgagtgaagggctaatgacctgggagctagaccggctgctctgggctcggtcagtggagaacctggccacagccaccaccacccttacctccctggcgcagcttctgggcaagatcagcaacattgtcattaaggacgacgtggcatctgaggtgtacaaggctgtagctgccgtccagaagtcggcagaagagttggcgtctgggcacctggcatctgcctttgtcgccagccaggaagctgtgacatcctctgagcttgccttctttgacccgtcactcctccacctcctttatttccctgatgaccagaagtttgccatctacatcccactcttcctgcctatggctgtgcccatcctcctgtccctggtcaagatcttcctggagacccgcaagtcctggagaaagcctgagaagacagactgagcagggcagcacctccataggaagccttcctttctggccaaggtgggcggtgttagattgtgaggcacgtacatggggcctgccggaatgacttaaatatttgtctccagtctccactgttggctctccagcaaccaaagtacaacactccaagatgggttcatcttttcttcctttcccattcacctggctcaatcctcctccaccaccaggggcctcaaaaggcacatcatccgggtctccttatcttgtttgataaggctgctgcctgtctccctctgtggcaaggactgtttgttcttttgccccatttctcaacatagcacacttgtgcactgagaggagggagcattatgggaaagtccctgccttccacacctctctctagtccctgtgggacagccctagcccctgctgtcatgaaggggccaggcattggtcacctgtgggaccttctccctcactcccctccctcctagttggctttgtctgtcaggtgcagtctggcgggagtccaggaggcagcagctcaggacatggtgctgtgtgtgtgtgtgtgtgtgtgtgtgtgtgtgtgtgtcagaggttccagaaagttccagatttggaatcaaacagtcctgaattcaaatccttgtttttgcacttattgtctggagagctttggataaggtattgaatctctctgagcctcagtttttcatttgttcaaatggcactgatgatgtctcccttacaagatggttgtgaggagtaaatgtgatcagcatgtaaagtgtctggcgtgtagtaggctcttaataaacactggctgaatatgaattggaatgata

SEQ ID NO: 15605 - DNA, 2877 bp, Homo sapiens
  source 1..2877: mol_type = unassigned DNA
tccattttcagatgagcctcggagctgcctgtagttgcccagctagtatttaaggactgcagaggttgcgctcttgattgcggggctagaagtgtgttctacagggaagcggggaacttcgttccagcagcgccgaaacccgcacggcccctaggctgtccctccgcgcccgggtgacttcctttcagatccccagcgaagctcccagcggagccctcccacccctcgcccgcttgctcccgtctgcgggtctggagtagcgctcgcgattggccccgatcaccgccgcggtcctgccccctcgttgcagagattccgattgggtgaggctcacgaagctctgcccccacggtggccggagcagccggaagctagcatggcggccgccggggctgcggctacacacctagaggtggcccggggcaagcgcgccgccctcttcttcgctgcggtggccatcgtgctggggctaccgctctggtggaagaccacggagacctaccgggcctcgttgccttactcccagatcagtggcctgaatgcccttcagctccgcctcatggtgcctgtcactgtcgtgtttacgcgggagtcagtgcccctggacgaccaggagaagctgcccttcaccgttgtgcatgaaagagagattcctctgaaatacaaaatgaaaatcaaatgccgtttccagaaggcctatcggagggctttggaccatgaggaggaggccctgtcatcgggcagtgtgcaagaggcagaagccatgttagatgagcctcaggaacaagcggagggctccctgactgtgtacgtgatatctgaacactcctcacttcttccccaggacatgatgagctacattgggcccaagaggacagcagtggtgcgggggataatgcaccgggaggcctttaacatcattggccgccgcatagtccaggtggcccaggccatgtctttgactgaggatgtgcttgctgctgctctggctgaccaccttccagaggacaagtggagcgctgagaagaggcggcctctcaagtccagcttgggctatgagatcaccttcagtttactcaacccagaccccaagtcccatgatgtctactgggacattgagggggctgtccggcgctatgtgcaacctttcctgaatgccctcggtgccgctggcaacttctctgtggactctcagattctttactatgcaatgttgggggtgaatccccgctttgactcagcttcctccagctactatttggacatgcacagcctcccccatgtcatcaacccagtggagtcccggctgggatccagtgctgcctccttgtaccctgtgctcaactttctactctacgtgcctgagcttgcacactcaccgctgtacattcaggacaaggatggcgctccagtggccaccaatgccttccatagtccccgctggggtggcattatggtatataatgttgactccaaaacctataatgcctcagtgctgccagtgagagtcgaggtggacatggtgcgagtgatggaggtgttcctggcacagttgcggttgctctttgggattgctcagccccagctgcctccaaaatgcctgctttcagggcctacgagtgaagggctaatgacctgggagctagaccggctgctctgggctcggtcagtggagaacctggccacagccaccaccacccttacctccctggcgcagcttctgggcaagatcagcaacattgtcattaaggacgacgtggcatctgaggtgtacaaggctgtagctgccgtccagaagtcggcagaagagttggcgtctgggcacctggcatctgcctttgtcgccagccaggaagctgtgacatcctctgagcttgccttctttgacccgtcactcctccacctcctttatttccctgatgaccagaagtttgccatctacatcccactcttcctgcctatggctgtgcccatcctcctgtccctggtcaagatcttcctggagacccgcaagtcctggagaaagcctgagaagacagactgagcagggcagcacctccataggaagccttcctttctggccaaggtgggcggtgttagattgtgaggcacgtacatggggcctgccggaatgacttaaatatttgtctccagtctccactgttggctctccagcaaccaaagtacaacactccaagatgggttcatcttttcttcctttcccattcacctggctcaatcctcctccaccaccaggggcctcaaaaggcacatcatccgggtctccttatcttgtttgataaggctgctgcctgtctccctctgtggcaaggactgtttgttcttttgccccatttctcaacatagcacacttgtgcactgagaggagggagcattatgggaaagtccctgccttccacacctctctctagtccctgtgggacagccctagcccctgctgtcatgaaggggccaggcattggtcacctgtgggaccttctccctcactcccctccctcctagttggctttgtctgtcaggtgcagtctggcgggagtccaggaggcagcagctcaggacatggtgctgtgtgtgtgtgtgtgtgtgtgtgtgtgtgtgtgtgtcagaggttccagaaagttccagatttggaatcaaacagtcctgaattcaaatccttgtttttgcacttattgtctggagagctttggataaggtattgaatctctctgagcctcagtttttcatttgttcaaatggcactgatgatgtctcccttacaagatggttgtgaggagtaaatgtgatcagcatgtaaagtgtctggcgtgtagtaggctcttaataaacactggctgaatatgaattggaatgata

SEQ ID NO: 15606 - DNA, 919 bp, Homo sapiens
  source 1..919: mol_type = unassigned DNA
cagtgttcctcatcccagttttgtcctccttttggttccatgatggaaagcagccccattccagaggagaaacaagttcagctcagctgggagtacaggctgcccctcttctttgatccacaagagcctctgacttccctgactcctgtttctgtaggctatgagatcaccttcagtttactcaacccagaccccaagtcccatgatgtctactgggacattgagggggctgtccggcgctatgtgcaacctttcctgaatgccctcggtgccgctggcaacttctctgtggactctcagattctttactatgcaatgttgggggtgaatccccgctttgactcagcttcctccagctactatttggacatgcacagcctcccccatgtcatcaacccagtggagtcccggctgggatccagtgctgcctccttgtaccctgtgctcaactttctactctacgtgcctgagcttgcacactcaccgctgtacattcaggacaaggatggcgctccagtggccaccaatgccttccatagtccccgctggggtggcattatggtaatagtcacactacgcagaccccagagcccatgcttctgggacaggcaggtgtccctgaaactgtgttccttctgttttccttctggtgtcctccatggcccagcctgtgggaggggcaggcaccaggaaggtgagggtgctatgtgctcatgcccctcttctgccggccccacttttgtttccgccagtgttttctatactgtgaccctttgcccttacctaggatcattctgtgtccatcttagatcttcgccttatttgtgggagtcttgcaaggttgggagccttgtctcccttgttagactggaagtttctcatgggggagaattctaaaatgggataagaaaaaaatatg

SEQ ID NO: 15607 - DNA, 699 bp, Homo sapiens
  source 1..699: mol_type = unassigned DNA
gattggcttacccaagcctgaccactgtgtcagctgaatgtgagtgaaggggtgggttaggcattctttggggctggggggagatggaatggtgttttgctcttggtgtaccacctgttcttgcccccagaggcagaagccatgttagatgagcctcaggaacaagcggagggctccctgactgtgtacgtgatatctgaacactcctcacttcttccccaggacatgatgagctacattgggcccaagaggacagcagtggtgcgggggataatgcaccgggaggcctttaacatcattggccgccgcatagtccaggtggcccaggccatgtctttgactgaggatgtgcttgctgctgctctggctgaccaccttccagaggacaagtggagcgctgagaagaggcggcctctcaagtccagcttgggctatgagatcaccttcagtttactcaacccagaccccaagtcccatgatgtctactgggacattgagggggctgtccggcgctatgtgcaacctttcctgaatgccctcggtgccgctggcaacttctctgtggactctcagattctttactatgcaatgttgggggtgaatccccgctttgactcagcttcctccagctactatttggacatgcacagcctcccccatgtcatcaacccagtggagtcccggctgggatccagtgct

SEQ ID NO: 15608 - DNA, 608 bp, Homo sapiens
  source 1..608: mol_type = unassigned DNA
tatatactcatagctcagaaatgctgagttaatagctcatgaatctcaagagaggtgcaaacctgttggtcattggcaaaggggcagattcggaacagtaggagccagggtgctttttggctttcttttctgagccatgggcattctgtctcttgctcacccccacaggacatgatgagctacattgggcccaagaggacagcagtggtgcgggggataatgcaccgggaggcctttaacatcattggccgccgcatagtccaggtggcccaggccatgtctttgactgaggatgtgcttgctgctgctctggctgaccaccttccagaggacaagtggagcgctgagaagaggcggcctctcaagtccagcttgggctatgagatcaccttcagtttactcaacccagaccccaagtcccatgatgtctactgggacattgagggggctgtccggcgctatgtgcaacctttcctgaatgccctcggtgccgctggcaacttctctgtggactctcagattctttactatgcaatgttgggggtgaatccccgctttgactcagcttcctccagctactatttggacatgcacagcctcccccatgt

SEQ ID NO: 15609 - DNA, 578 bp, Homo sapiens
  source 1..578: mol_type = unassigned DNA
agaggttgattggcttacccaagcctgaccactgtgtcagctgaataggcagaagccatgttagatgagcctcaggaacaagcggagggctccctgactgtgtacgtgatatctgaacactcctcacttcttccccaggacatgatgagctacattgggcccaagaggacagcagtggtgcgggggataatgcaccgggaggcctttaacatcattggccgccgcatagtccaggtggcccaggccatgtctttgactgaggatgtgcttgctgctgctctggctgaccaccttccagaggacaagtggagcgctgagaagaggcggcctctcaagtccagcttgggctatgagatcaccttcagtttactcaacccagaccccaagtcccatgatgtctactgggacattgagggggctgtccggcgctatgtgcaacctttcctgaatgccctcggtgccgctggcaacttctctgtggactctcagattctttactatgcaatgttgggggtgaatccccgctttgactcagcttcctccagctactatttggacatgcacagcctcccccatgt

SEQ ID NO: 15610 - DNA, 372 bp, Homo sapiens
  source 1..372: mol_type = unassigned DNA
agagaggttgattggcttacccaagcctgaccactgtgtcagctgaataggcagaagccatgttagatgagcctcaggaacaagcggagggctccctgactgtgtacgtgatatctgaacactcctcacttcttccccaggctatgagatcaccttcagtttactcaacccagaccccaagtcccatgatgtctactgggacattgagggggctgtccggcgctatgtgcaacctttcctgaatgccctcggtgccgctggcaacttctctgtggactctcagattctttactatgcaatgttgggggtgaatccccgctttgactcagcttcctccagctactatttggacatgcacagcctcccccatgt

SEQ ID NO: 15611 - DNA, 584 bp, Homo sapiens
  source 1..584: mol_type = unassigned DNA
acgaagctctgcccccacggtggccggagcagccggaagctagcatggcggccgccggggctgcggctacacacctagctccgcctcatggtgcctgtcactgtcgtgtttacgcgggagtcagtgcccctggacgaccaggagaagctgcccttcaccgttgtgcatgaaagagagattcctctgaaatacaaaatgaaaatcaaatgccgtttccagaaggcctatcggagggctttggaccatgaggaggaggccctgtcatcgggcagtgtgcaagaggcagaagccatgttagatgagcctcaggaacaagcggagggctccctgactgtgtacgtgatatctgaacactcctcacttcttccccaggctatgagatcaccttcagtttactcaacccagaccccaagtcccatgatgtctactgggacattgagggggctgtccggcgctatgtgcaacctttcctgaatgccctcggtgccgctggcaacttctctgtggactctcagattctttactatgcaatgttgggggtgaatccccgctttgactcagcttcctccagctactatttggac

SEQ ID NO: 15612 - DNA, 594 bp, Homo sapiens
  source 1..594: mol_type = unassigned DNA
gaagctctgcccccacggtggccggagcagccggaagctagcatggcggccgccggggctgcggctacacacctagaggtggcccggggcaagcgcgccgccctcttcttcgctgcggtggccatcgtgctggggctaccgctctggtggaagaccacggagacctaccgggcctcgttgccttactcccagatcagtggcctgaatgcccttcaggtgagactgctgtgcgggagggtcgggggacagcccccccggcaaggtggagactcagtgacggccctgatgctccttcctgtagctccgcctcatggtgcctgtcactgtcgtgtttacgcgggagtcagtgcccctggacgaccaggagaagctgcccttcaccgttgtgcatgaaagagagattcctctgaaatacaaaatgaaaatcaaatgccgtttccagaaggcctatcggagggctttggaccatgaggaggaggccctgtcatcgggcagtgtgcaagaggcagaagccatgttagatgagcctcaggaacaagcggagggctccctgactgtgtacgtgatatctgaacactcctcacttcttcccca

SEQ ID NO: 15613 - DNA, 481 bp, Homo sapiens
  source 1..481: mol_type = unassigned DNA
agccggaagctagcatggcggccgccggggctgcggctacacacctagaggtggcccggggcaagcgcgccgccctcttcttcgctgcggtggccatcgtgctggggctaccgctctggtggaagaccacggagacctaccgggcctcgttgccttactcccagatcagtggcctgaatgcccttcagctccgcctcatggtgcctgtcactgtcgtgtttacgcgggagtcagtgcccctggacgaccaggagaagctgcccttcaccgttgtgcatgaaagagagattcctctgaaatacaaaatgaaaatcaaatgccgtttccagaaggcctatcggagggctttggaccatgaggaggaggccctgtcatcgggcagtgtgcaaggtatgggaagggatgagcacaccattttaatgtgaagccctctttttccttctgatctctaagtgcatagttcccatgctttggcttactt

SEQ ID NO: 15614 - DNA, 546 bp, Homo sapiens
  source 1..546: mol_type = unassigned DNA
aagctagcatggcggccgccggggctgcggctacacacctaggtgcggtgggcttcgggtggggggcctgcagctagctgatggcaagggaggaatagcaggggtggggattgtggtgtgcgagaggtcccgcggacggggggctcgggggtctcttcagacgagattcccttcaggcttgggccgggtcccttcgcacggagatcccaatgaacgcgggcccctggaggccggtggttggggcttctccgcgtcggggatggggccggtaccctagcccgtttccagcgcctcagtcggttccccatgccctcagaggtggcccggggcaagcgcgccgccctcttcttcgctgcggtggccatcgtgctggggctaccgctctggtggaagaccacggagacctaccgggcctcgttgccttactcccagatcagtggcctgaatgcccttcagacaaaatgaaaatcaaatgccgtttccagaaggcctatcggagggctttggaccatgaggaggaggccctgtcatcgggcagtgtgcaag

SEQ ID NO: 15615 - DNA, 577 bp, Homo sapiens
  source 1..577: mol_type = unassigned DNA
tgcggggctagaagtgtgttctacagggaagcggggaacttcgttccagcagcgccgaaacccgcacggcccctaggctgtccctccgcgcccgggtgacttcctttcagatccccagcgaagctcccagcggagccctcccacccctcgcccgcttgctcccgtctgcgggtctggagtagcgctcgcgattggccccgatcaccgccgcggtcctgccccctcgttgcagagattccgattggaggtggcccggggcaagcgcgccgccctcttcttcgctgcggtggccatcgtgctggggctaccgctctggtggaagaccacggagacctaccgggcctcgttgccttactcccagatcagtggcctgaatgcccttcagctccgcctcatggtgcctgtcactgtcgtgtttacgcgggagtcagtgcccctggacgaccaggagaagctgcccttcaccgttgtgcatgaaagagagattcctctgaaatacaaaatgaaaatcaaatgccgtttccagaaggcctatcggagggctttggaccatgaggaggaggccctgtcatcgggc

SEQ ID NO: 15616 - DNA, 2701 bp, Homo sapiens
  source 1..2701: mol_type = unassigned DNA
agtctccgcgctgctgaggcgcgcccggccgctcccacggcctcccctccgccctgcggtcccgccgcctccggggcctcctgggaccctggccctcgccgggcaggacgccgccagcgctgaaggcgcagcccggaggccgcgcggatgcagatctgtggatccagcgtagcatctgtagcagctgggacatcattccaggttttgggcccggtgtgttggcaacaactggatctgaagatggcagtcagggtgctttggggtggtctcagcctgctccgagtgctgtggtgtctccttccgcagacgggctatgtgcacccagatgagttcttccagtcccctgaggtgatggcagaggacatcctgggcgttcaggccgcgcggccctgggagttttaccccagcagctcctgccgctcggtgctcttccccctgctgatctctggttccaccttctggctgctcaggctctgggaggagctggggccgtggcctggcctggtgagcggctatgcgctgctggtggggcctcgactcctcctcactgccctttcctttgctctggacggggccgtgtaccacctggccccgccgatgggggcggatcgctggaacgccctggccctgctgtctggttcctacgtcaccctggtcttctacacaaggaccttctccaacaccattgagggactcctcttcacgtggctgctggtgctggtatcctcccatgtaacgtggggccctacacgcaaggagccggcgccgggtccacggtggcgcagctggcttcttggaggcattgtggctgctggcttcttcaaccggcccacctttctggcctttgctgtggtccccctctacctctggggcactcgtggagccacaaaccctggtttgaagtctctgacccgggaggccctggtgctgctccctggggcagccctcacagcagcggtgtttgtggccacggacagctggtatttctccagccccgctacatccaggaaccttgtcctgacacctgtcaacttcttgcactacaacctgaatccccaaaacctggcgagacatggcacgcacgcgcggctcactcacctggcagtcaacggcttcctgctcttcggggtgctgcatgcccaggccctgcaggctgcgtggcaacggctgcaagtcggcctccaggcctctgcacaaatgggcctcctgagggcactgggtgcccggagcctgctgtccagccccaggtcctatctccttctcctctacttcatgcctctggccctgctatctgcctttagccaccaggaggctcggttcctgattcccctcctggtccccctggtcctgctttgtagtccacagacgcagcctgtgccttggaagggcactgtggtcctcttcaacgccctcggtgccctcctcttcggctgcctgcatcaggggggcctggtgcctggcctggagtacctggagcaggtggtccatgcccctgtgctcccaagcacacccacccactacacactcctcttcactcacacctacatgcccccccggcacctcctacacctcccaggcctgggggcaccagtggaggtggtggacatgggggggactgaggactgggccctgtgccaaaccctgaaaagcttcaccagacaaccagcctgccaagtggctggtgggccatggctctgccgcctctttgtggtaacccctggcaccaccaggcgtgccgtggagaagtgcagcttccccttcaagaatgaaacacttttatttccccatctgaccctggaggatccaccagccctgtcctccttgctgagtggggcttggagggaccacctcagtcttcacattgtggagctgggggaagaaacctgacaatatgacagagcacccactgcccaagactcagccatagaagatgccgccccaccttctacttgggtagctgggctgggacgctgggacaggaccccgtcctccttcatgactcccactgctgcctctcctgggcatggctgttagctgttctgccttctgggtgagctggcactcttctccctgagaccaaagatttgacctgtcggtcttgatgtcaaggtccccaaagaccaggttaagtgacgacacctgtctgttcctgccctgttgcttccagccactgtgatgtttgaaatatgtgatagtacctggttgtgaaaaaagacaatgaactgctagtgacattcctcaatgacctctcccaaacctcccatgatgccttacccttgctgtcatgacaaccctctggcttcctaagacccatctgcctatcgaaatatgtgcaagtcagtgagacgaagtatagagaacaggtggcccagatccaggggacccaacttctggccccttggtctgtcacctcctcgctgtgtgatcttgagaaagctccttccactcacccaccccacttcccagtctgttgggatcagaggaactttgaggtgtctgccggctaacattgtgtcattcctggagtccacagtacacgtcccctgcctcaacaggcacagctctcacaaagctcttcaagcatggaagtgggagttgtgttgtacttcatggcactctgatgcctgctgtctcagtgtttggttattatgcaaacaagtaatgtttgaaatatataatagcactggagattttctcccta

SEQ ID NO: 15617 - DNA, 1947 bp, Homo sapiens
  source 1..1947: mol_type = unassigned DNA
cagggtgctttggggtggtctcagcctgctccgagtgctgtggtgtctccttccgcagacgggctatgtgcacccagatgagttcttccagtcccctgaggtgatggcaggctctgggaggagctggggccgtggcctggcctggtgagcggctatgcgctgctggtggggcctcgactcctcctcactgccctttcctttgctctggacggggccgtgtaccacctggccccgccgatgggggcggatcgctggaacgccctggccctgctgtctggttcctacgtcaccctggtcttctacacaaggaccttctccaacaccattgagggactcctcttcacgtggctgctggtgctggtatcctcccatgtaacgtggggccctacacgcaaggagccggcgccgggtccacggtggcgcagctggcttcttggaggcattgtggctgctggcttcttcaaccggcccacctttctggcctttgctgtggtccccctctacctctggggcactcgtggagccacaaaccctggtttgaagtctctgacccgggaggccctggtgctgctccctggggcagccctcacagcagcggtgtttgtggccacggacagctggtatttctccagccccgctacatccaggaaccttgtcctgacacctgtcaacttcttgcactacaacctgaatccccaaaacctggcgagacatggcacgcacgcgcggctcactcacctggcagtcaacggcttcctgctcttcggggtgctgcatgcccaggccctgcaggctgcgtggcaacggctgcaagtcggcctccaggcctctgcacaaatgggcctcctgagggcactgggtgcccggagcctgctgtccagccccaggtcctatctccttctcctctacttcatgcctctggccctgctatctgcctttagccaccaggaggctcggttcctgattcccctcctggtccccctggtcctgctttgtagtccacagacgcagcctgtgccttggaagggcactgtggtcctcttcaacgccctcggtgccctcctcttcggctgcctgcatcaggggggcctggtgcctggcctggagtacctggagcaggtggtccatgcccctgtgctcccaagcacacccacccactacacactcctcttcactcacacctacatgcccccccggcacctcctacacctcccaggcctgggggcaccagtggaggtggtggacatgggggggactgaggactgggccctgtgccaaaccctgaaaagcttcaccagacaaccagcctgccaagtggctggtgggccatggctctgccgcctctttgtggtaacccctggcaccaccaggcgtgccgtggagaagtgcagcttccccttcaagaatgaaacacttttatttccccatctgaccctggaggatccaccagccctgtcctccttgctgagtggggcttggagggaccacctcagtcttcacattgtggagctgggggaagaaacctgacaatatgacagagcacccactgcccaagactcagccatagaagatgccgccccaccttctacttgggtagctgggctgggacgctgggacaggaccccgtcctccttcatgactcccactgctgcctctcctgggcatggctgttagctgttctgccttctgggtgagctggcactcttctccctgagaccaaagatttgacctgtcggtcttgatgtcaaggtccccaaagaccaggttaagtgacgacacctgtctgttcctgccctgttgcttccagccactgtgatgtttgaaatatgtgatagtacctggttgtgaaaaaagacaatgaactgctagtgacattcctcaatgacctctcccaaacctcccatgatgccttacccttgctgtcatgacaaccctctggcttcctaa

SEQ ID NO: 15618 - DNA, 675 bp, Homo sapiens
  source 1..675: mol_type = unassigned DNA
tccctcccggcccgccctgcgccggcggcggcggccccagtctccgcgctgctgaggcgcgcccggccgctcccacggcctcccctccgccctgcggtcccgccgcctccggggcctcctgggaccctggccctcgccgggcaggacgccgccagcgctgaaggcgcagcccggaggccgcgcggatgcagatctgtggatccagcgtagcatctgtagcagctgggacatcattccaggttttgggcccggtgtgttggcaacaactggatctgaagatggcagtcagggtgctttggggtggtctcagcctgctccgagtgctgtggtgtctccttccgcagacgggctatgtgcacccagatgagttcttccagtcccctgaggtgatggcaggaccttctccaacaccattgagggactcctcttcacgtggctgctggtgctggtatcctcccatgtaacgtggggccctacacgcaaggagccggcgccgggtccacggtggcgcagctggcttcttggaggcattgtggctgctggcttcttcaaccggcccacctttctggcctttgctgtggtccccctctacctctggggcactcgtggagccacaaaccctggtttgaagtctctgacccgggaggccctggtgctgctccctggggcagccct

SEQ ID NO: 15619 - DNA, 868 bp, Homo sapiens
  source 1..868: mol_type = unassigned DNA
aggggccgccggggagggagcccgagcgcggcggggcgagaccggtccccgcccggcgttgcccggcccgagggacggcggcgcccccaggaccctccccagcgcggccccagctcgctccgggaccgcggggccaggccgggcgggagcgcggggacgtacacggcggccccgcccgcgcgctcctcctccctcccggcccgccctgcgccggcggcggcggccccagtctccgcgctgctgaggcgcgcccggccgctcccacggcctcccctccgccctgcggtcccgccgcctccggggcctcctgggaccctggccctcgccgggcaggacgccgccagcgctgaaggcgcagcccggaggccgcgcggatgcagatctgtggatccagcgtagcatctgtagcagctgggacatcattccaggttttgggcccggtgtgttggcaacaactggatctgaagatggcagtcagggtgctttggggtggtctcagcctgctccgagtgctgtggtgtctccttccgcagacgggctatgtgcacccagatgagttcttccagtcccctgaggtgatggcaggtaaaactccgcatgtgtggctgagacaagctgcagcagagtctgcttgagaagctgacgggagactttgtggggagggagtagcatgtctgggtagatgagtagtaaatccacaagcagagcagcagcctctctctctggggtaagaacttggaagtggggacttcatatctccttcccgagtggtgacactgaccttctgggtaatgctaataaaccaccagtctctttgatgtatccctgcttggaccaacaatacaggtcattcagaatgagagctgtg

SEQ ID NO: 15620 - DNA, 1652 bp, Homo sapiens
  source 1..1652: mol_type = unassigned DNA
cgccacgctctgcacagtctattttcggagcctagccagagacgggaaaactgaccaagataatggaatctgaaaatatggattctgaaaatatgaagacagaaaatatggaatctcaaaatgtagactttgagagtgtttcttcagttacagctctggaagccctctctaagctacttaatcctgaagaagaggatgattctgactatggacagacaaatggtttatctactattggagccatgggtcctgggaatattggaccaccccaaatagaagagctcaaagtcatccctgaaaccagcgaggaaaataatgaggacatctggaattcagaagagattccagaaggagcagaatatgatgatatgtgggatgttagagaaatcccagagtatgagattatattcagacagcaggtgggaactgaagatatatttttagggttgtcaaaaaaggactcctcaacaggttgttgcagtgaactagtggctaaaattaaattgccaaatacaaacccttctgatattcaaattgatatccaggaaacaatccttgaccttcgtactcctcagaagaagctgttgataactcttcctgagctggtggaatgtaccagtgccaaagcattctatatcccagagactgaaactcttgaaatcactatgactatgaaaagagagttagatattgctaatttcttctgaaactgcatgaaaaagataaaaagtagtaaaatggcattggtaacaattaaaaaactttgaaaaaaatgattgttttctatattctctttattattctgacatatttttgaaagggacaaaattcagttctagtgatattgtgaccatttacagtaatttctattactctgttaggaaatatgtttccttggccaggtgcaatggctcatgcctgtaatcccaacactttgggaggccgaagcaggcggatcacttgaggtcaggagtttgagaccagcctggtcaacatggcgaaaccctgtctctactaaaaatacgaaaattagcctggcgtggtggcaggtgcctgtaatcccagctactctgtctcaaaaaacaaacaaaaaaaggaaatatgttttcttatgtaaataaactattctatttttatagtgatagctgagtagaatctttacaggttaaaaaattagaatatttcatggtcaattacataattgaaatatgatcatgaaatggttggtccacttacttcagtagtctgaaaaacttatgctaattatttacatttacactgtgatacaatcagttgcatagcaattggtcattattattaccagagaattttatttggttgctttttcattgatttgagcaaatgatttacagtgttctctgtttaggctctcactgttgttctggaatatacaggtaataaatagtttgatgtaccatactatcaacatatttacttgagtaaggaacacttttgtgcgtacagtattatttggcttcttcagttgtgcttttaatgcttggatatagttaggttaaaaacattttttatatgcactaataattattagcattgcctttttgggtactgtatttatatgtagtcaattgaaatccttgactttaaaataaatttaaagtgtggcacattta

SEQ ID NO: 15621 - DNA, 993 bp, Homo sapiens
  source 1..993: mol_type = unassigned DNA
gcacgatttatcctggcctagcatgccttggttaggaaatgttttgggggatatcacacttcagactgaaaaaaaaatggccccagtacttactacgtgaataatgtcctttgtgcgacaacttgaacgctgtggtctgagggttccagtgttgcttggttagataagctgaggagtgagaagtaatcagaccttcacttggtgggcccgagtgtactgtgcagagactacttgtacctacaagacctgctactcgccaagggctgattgggagagtaaataatggaatctgaaaatatggattctgaaaatatgaagacagaaaatatggaatctcaaaatgtagactttgagagtgtttcttcagttacagctctggaagccctctctaagctacttaatcctgaagaagaggatgattctgactatggacagacaaatggtttatctactattggagccatgggtcctgggaatattggaccaccccaaatagaagagctcaaagtcatccctgaaaccagcgaggaaaataatgaggacatctggaattcagaagagattccagaaggagcagaatatgatgatatgtgggatgttagagaaatcccagagtatgagattatattcagacagcaggtgggaactgaagatatatttttagggttgtcaaaaaaggactcctcaacaggttgttgcagtgaactagtggctaaaattaaattgccaaatacaaacccttctgatattcaaattgatatccaggaaacaatccttgaccttcgtactcctcagaagaagctgttgataactcttcctgagctggtggaatgtaccagtgccaaagcattctatatcccagagactgaaactcttgaaatcactatgactatgaaaagagagttagatattgctaatttcttctgaaactgcatgaaaaagataaaaagtagtaaaatggcattggtaacaattaaaaaactttgaaaaaaa

SEQ ID NO: 15622 - DNA, 1926 bp, Homo sapiens
  source 1..1926: mol_type = unassigned DNA
cgccacgctctgcacagtctattttcggagcctagccagagacgggaaaactgaccaaggcacgatttatcctggcctagcatgccttggttaggaaatgttttgggggatatcacacttcagactgaaaaaaaaatggccccagtacttactacgtgaataatgtcctttgtgcgacaacttgaacgctgtggtctgagggttccagtgttgcttggttagataagctgaggagtgagaagtaatcagaccttcacttggtgggcccgagtgtactgtgcagagactacttgtacctacaagacctgctactcgccaagggctgattgggagaataatggaatctgaaaatatggattctgaaaatatgaagacagaaaatatggaatctcaaaatgtagactttgagagtgtttcttcagttacagctctggaagccctctctaagctacttaatcctgaagaagaggatgattctgactatggacagacaaatggtttatctactattggagccatgggtcctgggaatattggaccaccccaaatagaagagctcaaagtcatccctgaaaccagcgaggaaaataatgaggacatctggaattcagaagagattccagaaggagcagaatatgatgatatgtgggatgttagagaaatcccagagtatgagattatattcagacagcaggtgggaactgaagatatatttttagggttgtcaaaaaaggactcctcaacaggttgttgcagtgaactagtggctaaaattaaattgccaaatacaaacccttctgatattcaaattgatatccaggaaacaatccttgaccttcgtactcctcagaagaagctgttgataactcttcctgagctggtggaatgtaccagtgccaaagcattctatatcccagagactgaaactcttgaaatcactatgactatgaaaagagagttagatattgctaatttcttctgaaactgcatgaaaaagataaaaagtagtaaaatggcattggtaacaattaaaaaactttgaaaaaaatgattgttttctatattctctttattattctgacatatttttgaaagggacaaaattcagttctagtgatattgtgaccatttacagtaatttctattactctgttaggaaatatgtttccttggccaggtgcaatggctcatgcctgtaatcccaacactttgggaggccgaagcaggcggatcacttgaggtcaggagtttgagaccagcctggtcaacatggcgaaaccctgtctctactaaaaatacgaaaattagcctggcgtggtggcaggtgcctgtaatcccagctactctgtctcaaaaaacaaacaaaaaaaggaaatatgttttcttatgtaaataaactattctatttttatagtgatagctgagtagaatctttacaggttaaaaaattagaatatttcatggtcaattacataattgaaatatgatcatgaaatggttggtccacttacttcagtagtctgaaaaacttatgctaattatttacatttacactgtgatacaatcagttgcatagcaattggtcattattattaccagagaattttatttggttgctttttcattgatttgagcaaatgatttacagtgttctctgtttaggctctcactgttgttctggaatatacaggtaataaatagtttgatgtaccatactatcaacatatttacttgagtaaggaacacttttgtgcgtacagtattatttggcttcttcagttgtgcttttaatgcttggatatagttaggttaaaaacattttttatatgcactaataattattagcattgcctttttgggtactgtatttatatgtagtcaattgaaatccttgactttaaaataaatttaaagtgtggcacattt

SEQ ID NO: 15623 - DNA, 7686 bp, Homo sapiens
  source 1..7686: mol_type = unassigned DNA
aaatttacttccccaaaacactgggacattgggatggaattcactcaccccaaatcatcaccctggttaaggagactaaagaatcagaagacatttgtgctttggggagcagaggccctcagggtatagagaaggaagaagagagaggttcactgtagtcctgaagcagaaataagacctgtggctgaaggaagccttagcaattcactccttcctcttcctgagaactctctgtaggaagtctcacctagcagaggcttcacagtatttcagagaagccaaagattgtttgcctctttggaaactgttatccttccatcatgactgtgtcactcctgccactgttccaccatagagatggcgtcctttgcagcaaaccgtaagttataaggatgagggaagaagagtagagggccaaaaggattccattttgaggaaaaactacagtttgccttgccaggtagaagaatcaggcgcccagacaccatgtcacaaccctccagaactgacgttggcaggaagtagagactttgttgcctgtgtcccccatcctcaccatgtcttcgactcagggcaatggggaacactggaagtccctggagtcagtgggcatcagccgcaaagagctagcgatggccgaagccctgcagatggagtatgatgccctgtcccggctccggcatgacaaggaggagaacagagccaagcagaacgcagacccctctctcatcagctgggatgagcctggggtagacttttacagcaagccagcaggaaggcggaccgacctcaagctgttacgcggtctctctggctctgatcctacccttaactacaactcactctccccacaggaagggccgcccaaccactctacctcccaagggccacagcctggctcagatccctggcccaaaggctccctgtctggagactatctctacatttttgatggttcagatgggggagtctcttcgtccccaggaccaggggacatagagggctcttgcaagaaactatccccacctcctctgcctccccgagcttctatctgggatacccctcccctgcctcccagaaaggggtccccctcatcctccaagatctcccagcccagtgacatcaacactttctctttggtcgaacaattgccgggcaaactgctagagcatcggatcctagaagaggaagaggtgctgggaggtgggggtcaggggcgcctactggggtctgtggactatgatggtatcaatgatgcaattactaggctcaacttgaaatcgacctatgatgcggagatgttgcgggatgccaccaggggctggaaggagggccgagggccgctggacttcagcaaagacacctctggaaaacccgtggccaggagcaagactatgccccctcaggtgcccccccgcacctatgcctcccgctatggcaaccgaaagaatgcgacgcctggcaagaaccgccggatttctgcagccccggtgggctcccggccccacactgttgccaatggccatgagttgtttgaggtctcagaagagagagatgaggaggttgctgcattttgccacatgctggatatccttcgatctggctctgacatccaagactacttcctcactggctatgtctggagtgctgtcacccctagcccagagcacctcggggatgaggtcaacctgaaggtgactgtgttgtgtgacaggcttcaagaggcactcactttcacctgcaactgttcctccactgtagacttgcttatctaccagaccctgtgctacacccatgatgacctgaggaatgtggacgtgggtgactttgtgctaaagccctgcgggctggaggagttcctgcagaacaagcatgccttgggcagtcatgagtacatccaatactgccgcaagtttgacattgacattcggctacagctgatggagcagaaggttgtgcgcagtgacctggcccggacggtgaatgatgaccagagcccctccaccttgaactacctcgtccatctccaagagaggcctgtcaagcagaccatcagcaggcaggccctgagtcttctgttcgacacttaccacaatgaggtggatgccttcctgctggctgatggagacttcccactgaaggctgacagggtggtccagtccgtcaaggccatctgcaacgccctggccgccgtggaaacccctgagatcaccagtgctctcaaccagctgcccccctgcccctcccgcatgcagcctaaaattcagaaggatcccagtgtcttggctgtgagggaaaaccgagagaaggtcgtggaagccctgaccgctgccatcttggacctggtggagctgtactgcaacacattcaacgcagacttccagacggcagtgcccgggagccgcaagcatgacctggtccaggaggcctgccatttcgccaggtccctggccttcactgtctatgccacccaccgcatccccatcatctgggctaccagctatgaagatttctacctctcctgctccctcagccatggcggcaaggagctgtgcagccccctgcagacccgaagagctcacttctccaagtacctcttccacctcatcgtctgggaccagcagatctgcttcccagtgcaggtgaaccggctgcctcgggagacactgctgtgtgccactctctatgctctgcccatccccccaccggggagctcctcagaggccaataagcagcggcgggtgcctgaagccctgggctgggtcactaccccactcttcaacttcaggcaggtcctgacctgtggccggaagcttctgggtttgtggccagcaacacaggaaaatcccagcgcccgttggagtgcacctaatttccaccagccagacagtgtcatcctgcagattgacttccccacctcggcctttgacatcaagttcaccagcccccctggagacaagttcagcccccgctatgagtttggcagcctccgggaagaagaccagcgcaagcttaaagacatcatgcagaaagagtccttgtactggctcactgatgctgacaagaagcgcctgtgggagaagcgatattactgccactcggaggtgagctcgctccccctggtgctcgccagcgcccccagctgggagtgggcttgcctgcctgacatctatgttctcctgaagcagtggacccacatgaaccaccaggatgccctggggctcctgcatgccaccttcccggaccaggaggtgcgtcgtatggctgtgcagtggattggctcactctcagatgctgagctgctagactacctgccccagctggtacaggccctgaagtatgaatgctacctggacagcccgttggtgcgcttcctcctgaaacgagctgtgtctgacttgagagtgactcactacttcttctggttactgaaggacggcctcaaggactctcagttcagcatccgctaccagtatctgctggcagccttactgtgctgctgtggcaaggggctgagagaagagtttaaccgccagtgctggcttgtcaatgccctggccaaactggcccagcaggtccgggaggcagccccatctgcaaggcagggaatcctccgcacgggcctggaggaggtgaagcagttctttgccctcaatggctcgtgccgcttgccactcagccccagtctgctggttaagggaattgtgcccagggactgttcctacttcaactccaatgctgtccccctcaaactctccttccaaaatgtggatcccctgggtgagaacatccgtgtcatcttcaagtgtggggacgaccttcgccaggacatgctaacgctgcagatgattcgcatcatgagcaagatctgggtccaggaggggctggacatgcgcatggtcatcttccgctgcttctccaccggccggggcagagggatggtggagatgatccctaatgctgagaccctgcgtaagatccaggtggagcatggggtgaccggctcgttcaaggaccggcccctggcagactggctgcagaaacacaaccctggggaggacgagtatgagaaggctgtggagaactttatctactcctgcgctggctgctgcgtggccacgtacgtcttgggcatctgtgaccgacataatgacaacatcatgctgaagaccactggtcacatgttccacattgattttggccgcttcctgggccatgcccagatgtttggcaacatcaagcgggaccgtgccccctttgtcttcacctcggacatggcgtatgtcatcaacgggggtgacaagccttccagccgcttccatgattttgttgacctttgctgccaagcctacaacctcattcgcaagcacacccacctcttcctcaaccttctgggcctgatgttgtcctgtgggatccctgaactctcagacctggaggacctcaagtatgtgtacgatgccctgaggcctcaggatacagaggccaatgccactacctacttcactaggttgattgagtccagcctgggcagtgtagccacaaagctcaattttttcatccataatctggctcagatgaagttcacgggctcagatgaccggctgaccctctcctttgcctcccgaacacacactctcaagagctctggccgaatcagtgatgttttcctctgccgccatgagaagatcttccaccccaacaaaggctatatatatgtggtaaaggtgatgcgagagaacactcacgaggccacctacatccagcggacctttgaggagttccaggaattacacaataagttgcggctgctcttcccttcttcccacttgcccagcttccctagtcgcttcgtgatcggccgctcccggggagaggcggtggccgagcggcggagggaggagctaaacggttacatctggcacttgatccacgcaccccctgaggtggccgagtgtgatttggtgtacaccttcttccacccactgccccgggatgagaaggctatgggcaccagcccagctcctaagtcctcagatggcacatgggcccggcccgtcggaaaggtgggaggggaggtgaagctgtccatctcctacaaaaacaataaactcttcatcatggtgatgcatattcggggcttgcaactgctccaggatggaaatgaccctgacccctatgtgaaaatttacctccttcctgaccctcagaaaaccactaagaggaaaaccaaagtggcccggaaaacctgcaatcctacctacaatgagatgttggtatatgatgggatccccaagggtgacctgcagcagcgggagctccagctgagcgtgctgagtgagcagggattctgggagaacgtcctcctcggtgaggtgaacatccgcctgcgagagctggacctggctcaggagaagaccggctggttcgccctgggatctcgaagtcatggcaccttgtgagcccagcagagccaccacccagcatcccaggctggtggcaggagctgggggagaggactctcccctgtgagactcctccttgtgaagggccagggccctgggcaggcctccagctcggtccaggtgattctggcctctgtggtaggaggcagggagagtaagacatgctctgctgtctcttcctctggagactgaacttgggttggttgtgatgagcagccccttggaggctgtgaggttgcagcaaagttttaagtttaccttgtgtcaagggagcaatgcttggtttggggagtgtgtggggtgggctgtatgaagtagcattttgggggtgggtgggtggatatcttaatttttatttttaaaaaatgaaatagtgatgttgtcctaactgggacaggaagccttgcgagaagggacgtacctatgccccagaaggcaagagaggaagactatttggactttttgtatgattaaggttcttattggacttttccctaggttttttttttttgttattgttgttgttgtttcgttttctagctataggaactatctggggaggggcccagtgggtcctcggccagagccctctctaaggacaggttggggagggttggggagggctgcctgtgctggactgaggcttgtgccactgggcctttctgattttgcctccaaaggagagcgctgtgatacctacatgtgtaaggaagggccttccgtattggggttctgccaaggacccgtattcagggacccatgctcttttggggggacttttcctcttgtcttccctactttattaggacttgccctgaataccattttctaccccttgcccctccattctcctggcccttctgggggtcagctggtctctatgaatatgctgggggtgcttccccataggtctctcccttcatttgtctctggtgggacaaaatactgactcagtccttagatgtagtttcacccaagagcatcttggccctgggaagaggtccctaggctgcagatgctactgactgcttgctaggtagcctctggaaagcattccccatccatcactccccacttctttctgctgtgctgcttccctcccaaactccatttctgtcaccctttttataagacttttcctcattctgtggggccataaacctatttagtctggagccaaagggatgccctatctgaaggaaaggggcatggggtgggggattccatcaaaactgttgttttttgccccatgatttttctttggtcagtaggaggctggattggagtggtgattattcccctggagctaagctcaggagcccgaagggagagactgagactgactcccttatctcttcatattctttattccctaccagatggatttttttttttttttttggagacggagtctcgccctgtcgccaggctggagtgtagtggcatgatctcgactcactgcaaaatctgcctcccgggttcaagcgattctcctacctcagcctcccgagtagctgggattacaggcatgtgccaccacgccaagctaatttttgtatttttagtagagacggggtttcaccatgttggccaggatggtctcgatctcttgacctcgtgatctgcctgccttggcctcccaaagtgctgggattacaggcgtgagccaccatgccccgccccagatggattttacatttgctcttttgtgtttcgctccaaagggttgtcttcctcgccaaaaggagggagggactttgaatttgatatgaatctttaaaaccagaattggctggatatttcccatgattgggaaaagagtgaaatgaggacattctgtaaactgtccctccctaattccaaggatcagaaactccccgttttgctgactcattccataactggagaaagaagctccattgaccgaagccacagggcagcatggaagtttaaattttctctaaaattaaaatgccaaggataaagctggctgcttccaggagggggaagaggagtggggagtgggcggtgaaacttttccagatgaacggaccataaatgtgttactggctttgtgcctgtagctcattttattatgacctatatgctcctgatttaaagagatctgtgtactgtttacttcccacttcccagaatcccttgtatctcctttctcgggaattgtattttctaataaatgacatttgagaaaaaaatgaaa

SEQ ID NO: 15624 - DNA, 526 bp, Homo sapiens
  source 1..526: mol_type = unassigned DNA
aagagctctggccgaatcagtgatgttttcctctgccgccatgagaagatcttccaccccaacaaaggctatatatatgtggtaaaggtgatgcgagagaacactcacgaggccacctacatccagcggacctttgaggagttccaggaattacacaataagttgcggctgctcttcccttcttcccacttgcccaggtagctgccccctttactatctgcacagagggatgtcggggagggggaaaggatacgggatgggaggtggtcagggctgcaggggcagaaaatacccttttggactaaacatctgcctgctttgcttggcctggtatggagtttgatgacaagtgctccccctgctggccaagctctccttgcacgcaagagctctcactccaggcccactggccagaaaggaaggcatggttgaatctgatgtttcaaaatttctaattttttaaagagttacaccatttttcaaatggataagcaaaatgtcatatgtacatacagtgggatattat

SEQ ID NO: 15625 - DNA, 402 bp, Homo sapiens
  source 1..402: mol_type = unassigned DNA
ccctgagagggaggctgtatcctcagcctcagcctcagcctgacttcctgggccacctgttgcttgaagccacaggagtggcccctcctaatttgacttcctgtcctccataggatctgcttcccagtgcaggtgaaccggctgcctcgggagacactgctgtgtgccactctctatgctctgcccatccccccaccggggagctcctcagaggccaataagcagcggcgggtgcctgaagccctgggctgggtcactaccccactcttcaacttcaggcaggtcctgacctgtggccggaagcttctgggtttgtggccagcaacacaggaaaatcccagcgcccgttggagtgcacctaatttccaccagccagacagtgtcatcctgcaggtgaggctt

SEQ ID NO: 15626 - DNA, 651 bp, Homo sapiens
  source 1..651: mol_type = unassigned DNA
tacgtaaaaataaggattatgtttaacattgtataactgtcattttatgaaaagctcatgacatgcttctgcttttttctcattttaccgcagatgggtgaactttgtcacagctattagagactgactagcatttggggaccactgtcttaggccatcccattctagccaatgccatggcaacaaggtagggcttgtggaggcctcatgactttcccttctgaccccttcccttcccagagaaggtcgtggaagccctgaccgctgccatcttggacctggtggagctgtactgcaacacattcaacgcagacttccagacggcagtgcccgggagccgcaagcatgacctggtccaggaggcctgccatttcgccaggtccctggccttcactgtctatgccacccaccgcatccccatcatctgggctaccagctatgaagatttctacctctcctgctccctcagccatggcggcaaggagctgtgcagccccctgcagacccgaagagctcacttctccaagtacctcttccacctcatcgtctgggaccagcagtaagcccttcccccaggcttcagtgcccaggccactgtagacctgctcagcctctgaaatatccctggggccagataactagtccaggact

SEQ ID NO: 15627 - DNA, 830 bp, Homo sapiens
  source 1..830: mol_type = unassigned DNA
acatccctagagctcagggatttttaaaggccctgctctgagaggtggggctgttcccgctatttatagggactgggagattcctgttcccagctctgagttcctcacacccagctgggcctgctcactgagtcagggcaccctggtaggtggtcacctctgtcactccttctctctcctgcctcccctactccctcacccttccccatcccctgcatgtcatcagagttctgagacagagctcagcccagaatctccttgaagaagcggacacaaagcaaaaagctcttgccagttctgagtggggaaatgcggccttggtcctccccggctcagcttgttgcaggggctcagcctgctgggaggggggaccccttgggccctcggcctataccaccgccccgctttcgtcgggcttccagccagagggaacctccttatcccaggccagcggagccagctctggaactggctggctccaaatgccagcctgatacccctgctgccagcctctgcccggcagactcccccagccagcatcgggtgatgccaccagggcctgccagctgggcaaacgtgggctcccggccccacactgttgccaatggccatgagttgtttgaggtctcagaagagagagatgaggaggttgctgcattttgccacatgctggatatccttcgatctggctctgacatccaagactacttcctcactggctatgtctggagtgctgtcacccctagcccagagcacctcggggatgaggtcaacctgaaggtgactgtgttgtgtgacaggcttcaagaggcactcactttcacctgcaa

SEQ ID NO: 15628 - DNA, 846 bp, Homo sapiens
  source 1..846: mol_type = unassigned DNA
agtgcgccgggtgtccgggagatggcttcccctctctcgcccgctgctgccgctattgtctcacccggggtggcctgactctgcgagctcgcgcacgctctcggcggagagcacccctccccacccccacaagctggtccttgcgccctttgctgcctctccctctgccccttggagcctagggtctgtgcggagcctggagaggggagcggcccgggagcaggcggcgtgcggccggccagctcctctcgcgctggtgcaagaggcgcctggagccgcagagcgagcccgggaggcgcggagcgagcagcccacgtcgccaggcacaagacacgtcggatgttgcagcagagccagcagctagcgcaggcgcccagacaccatgtcacaaccctccagaactgacgttggcaggaagtagagactttgttgcctgtgtcccccatcctcaccatgtcttcgactcagggcaatggggaacactggaagtccctggagtcagtgggcatcagccgcaaagagctagcgatggccgaagccctgcagatggagtatgatgccctgtcccggctccggcatgacaaggaggagaacagagccaagcagaacgcagacccctctctcatcagctgggatgagcctggggtagacttttacagcaagccagcaggaaggcggaccgacctcaagctgttacgcggtctctctggctctgatcctacccttaactacaactcactctccccacaggaagggccgcccaaccactctacctcccaagggccacagcctggctcagatccctggcccaaaggctccctgtctggagactatctctacattttt

SEQ ID NO: 15629 - DNA, 727 bp, Homo sapiens
  source 1..727: mol_type = unassigned DNA
ggcttcccctctctcgcccgctgctgccgctattgtctcacccggggtggcctgactctgcgagctcgcgcacgctctcggcggagagcacccctccccacccccacaagctggtccttgcgccctttgctgcctctccctctgccccttggagcctagggtctgtgcggagcctggagaggggagcggcccgggagcaggcggcgtgcggccggccagctcctctcgcgctggtgcaagaggcgcctggagccgcagagcgagcccgggaggcgcggagcgagcagcccacgtcgccaggcacaagacacgtcggatgttgcagcagagccagcagctagcgcagatggcgtcctttgcagcaaaccgtaagttataaggatgagggaagaagagtagagggccaaaaggattccattttgaggaaaaactacagtttgccttgccaggtagaagaatcaggcgcccagacaccatgtcacaaccctccagaactgacgttggcaggaagtagagactttgttgcctgtgtcccccatcctcaccatgtcttcgactcagggcaatggggaacactggaagtccctggagtcagtgggcatcagccgcaaagagctagcgatggccgaagccctgcagatggagtatgatgccctgtcccggctccggcatgacaaggaggagaacagagccaagcagaacgcagacccctctctcatcagctggg

SEQ ID NO: 15630 - DNA, 7522 bp, Homo sapiens
  source 1..7522: mol_type = unassigned DNA
aagaatcagaagacatttgtgctttggggagcagaggccctcagggtatagagaaggaagaagagagaggttcactgtagtcctgaagcagaaataagacctgtggctgaaggaagccttagcaattcactccttcctcttcctgagaactctctgtaggaagtctcacctagcagaggcttcacagtatttcagagaagccaaagattgtttgcctctttggaaactgttatccttccatcatgactgtgtcactcctgccactgttccaccatagagatggcgtcctttgcagcaaaccgtaagttataaggatgagggaagaagagtagagggccaaaaggattccattttgaggaaaaactacagtttgccttgccaggtagaagaatcaggcgcccagacaccatgtcacaaccctccagaactgacgttggcaggaagtagagactttgttgcctgtgtcccccatcctcaccatgtcttcgactcagggcaatggggaacactggaagtccctggagtcagtgggcatcagccgcaaagagctagcgatggccgaagccctgcagatggagtatgatgccctgtcccggctccggcatgacaaggaggagaacagagccaagcagaacgcagacccctctctcatcagctgggatgagcctggggtagacttttacagcaagccagcaggaaggcggaccgacctcaagctgttacgcggtctctctggctctgatcctacccttaactacaactcactctccccacaggaagggccgcccaaccactctacctcccaagggccacagcctggctcagatccctggcccaaaggctccctgtctggagactatctctacatttttgatggttcagatgggggagtctcttcgtccccaggaccaggggacatagagggctcttgcaagaaactatccccacctcctctgcctccccgagcttctatctgggatacccctcccctgcctcccagaaaggggtccccctcatcctccaagatctcccagcccagtgacatcaacactttctctttggtcgaacaattgccgggcaaactgctagagcatcggatcctagaagaggaagaggtgctgggaggtgggggtcaggggcgcctactggggtctgtggactatgatggtatcaatgatgcaattactaggctcaacttgaaatcgacctatgatgcggagatgttgcgggatgccaccaggggctggaaggagggccgagggccgctggacttcagcaaagacacctctggaaaacccgtggccaggagcaagactatgccccctcaggtgcccccccgcacctatgcctcccgctatggcaaccgaaagaatgcgacgcctggcaagaaccgccggatttctgcagccccggtgggctcccggccccacactgttgccaatggccatgagttgtttgaggtctcagaagagagagatgaggaggttgctgcattttgccacatgctggatatccttcgatctggctctgacatccaagactacttcctcactggctatgtctggagtgctgtcacccctagcccagagcacctcggggatgaggtcaacctgaaggtgactgtgttgtgtgacaggcttcaagaggcactcactttcacctgcaactgttcctccactgtagacttgcttatctaccagaccctgtgctacacccatgatgacctgaggaatgtggacgtgggtgactttgtgctaaagccctgcgggctggaggagttcctgcagaacaagcatgccttgggcagtcatgagtacatccaatactgccgcaagtttgacattgacattcggctacagctgatggagcagaaggttgtgcgcagtgacctggcccggacggtgaatgatgaccagagcccctccaccttgaactacctcgtccatctccaagagaggcctgtcaagcagaccatcagcaggcaggccctgagtcttctgttcgacacttaccacaatgaggtggatgccttcctgctggctgatggagacttcccactgaaggctgacagggtggtccagtccgtcaaggccatctgcaacgccctggccgccgtggaaacccctgagatcaccagtgctctcaaccagctgcccccctgcccctcccgcatgcagcctaaaattcagaaggatcccagtgtcttggctgtgagggaaaaccgagagaaggtcgtggaagccctgaccgctgccatcttggacctggtggagctgtactgcaacacattcaacgcagacttccagacggcagtgcccgggagccgcaagcatgacctggtccaggaggcctgccatttcgccaggtccctggccttcactgtctatgccacccaccgcatccccatcatctgggctaccagctatgaagatttctacctctcctgctccctcagccatggcggcaaggagctgtgcagccccctgcagacccgaagagctcacttctccaagtacctcttccacctcatcgtctgggaccagcagatctgcttcccagtgcaggtgaaccggctgcctcgggagacactgctgtgtgccactctctatgctctgcccatccccccaccggggagctcctcagaggccaataagcagcggcgggtgcctgaagccctgggctgggtcactaccccactcttcaacttcaggcaggtcctgacctgtggccggaagcttctgggtttgtggccagcaacacaggaaaatcccagcgcccgttggagtgcacctaatttccaccagccagacagtgtcatcctgcagattgacttccccacctcggcctttgacatcaagttcaccagcccccctggagacaagttcagcccccgctatgagtttggcagcctccgggaagaagaccagcgcaagcttaaagacatcatgcagaaagagtccttgtactggctcactgatgctgacaagaagcgcctgtgggagaagcgatattactgccactcggagtggacccacatgaaccaccaggatgccctggggctcctgcatgccaccttcccggaccaggaggtgcgtcgtatggctgtgcagtggattggctcactctcagatgctgagctgctagactacctgccccagctggtacaggccctgaagtatgaatgctacctggacagcccgttggtgcgcttcctcctgaaacgagctgtgtctgacttgagagtgactcactacttcttctggttactgaaggacggcctcaaggactctcagttcagcatccgctaccagtatctgctggcagccttactgtgctgctgtggcaaggggctgagagaagagtttaaccgccagtgctggcttgtcaatgccctggccaaactggcccagcaggtccgggaggcagccccatctgcaaggcagggaatcctccgcacgggcctggaggaggtgaagcagttctttgccctcaatggctcgtgccgcttgccactcagccccagtctgctggttaagggaattgtgcccagggactgttcctacttcaactccaatgctgtccccctcaaactctccttccaaaatgtggatcccctgggtgagaacatccgtgtcatcttcaagtgtggggacgaccttcgccaggacatgctaacgctgcagatgattcgcatcatgagcaagatctgggtccaggaggggctggacatgcgcatggtcatcttccgctgcttctccaccggccggggcagagggatggtggagatgatccctaatgctgagaccctgcgtaagatccaggtggagcatggggtgaccggctcgttcaaggaccggcccctggcagactggctgcagaaacacaaccctggggaggacgagtatgagaaggctgtggagaactttatctactcctgcgctggctgctgcgtggccacgtacgtcttgggcatctgtgaccgacataatgacaacatcatgctgaagaccactggtcacatgttccacattgattttggccgcttcctgggccatgcccagatgtttggcaacatcaagcgggaccgtgccccctttgtcttcacctcggacatggcgtatgtcatcaacgggggtgacaagccttccagccgcttccatgattttgttgacctttgctgccaagcctacaacctcattcgcaagcacacccacctcttcctcaaccttctgggcctgatgttgtcctgtgggatccctgaactctcagacctggaggacctcaagtatgtgtacgatgccctgaggcctcaggatacagaggccaatgccactacctacttcactaggttgattgagtccagcctgggcagtgtagccacaaagctcaattttttcatccataatctggctcagatgaagttcacgggctcagatgaccggctgaccctctcctttgcctcccgaacacacactctcaagagctctggccgaatcagtgatgttttcctctgccgccatgagaagatcttccaccccaacaaaggctatatatatgtggtaaaggtgatgcgagagaacactcacgaggccacctacatccagcggacctttgaggagttccaggaattacacaataagttgcggctgctcttcccttcttcccacttgcccagcttccctagtcgcttcgtgatcggccgctcccggggagaggcggtggccgagcggcggagggaggagctaaacggttacatctggcacttgatccacgcaccccctgaggtggccgagtgtgatttggtgtacaccttcttccacccactgccccgggatgagaaggctatgggcaccagcccagctcctaagtcctcagatggcacatgggcccggcccgtcggaaaggtgggaggggaggtgaagctgtccatctcctacaaaaacaataaactcttcatcatggtgatgcatattcggggcttgcaactgctccaggatggaaatgaccctgacccctatgtgaaaatttacctccttcctgaccctcagaaaaccactaagaggaaaaccaaagtggcccggaaaacctgcaatcctacctacaatgagatgttggtatatgatgggatccccaagggtgacctgcagcagcgggagctccagctgagcgtgctgagtgagcagggattctgggagaacgtcctcctcggtgaggtgaacatccgcctgcgagagctggacctggctcaggagaagaccggctggttcgccctgggatctcgaagtcatggcaccttgtgagcccagcagagccaccacccagcatcccaggctggtggcaggagctgggggagaggactctcccctgtgagactcctccttgtgaagggccagggccctgggcaggcctccagctcggtccaggtgattctggcctctgtggtaggaggcagggagagtaagacatgctctgctgtctcttcctctggagactgaacttgggttggttgtgatgagcagccccttggaggctgtgaggttgcagcaaagttttaagtttaccttgtgtcaagggagcaatgcttggtttggggagtgtgtggggtgggctgtatgaagtagcattttgggggtgggtgggtggatatcttaatttttatttttaaaaaatgaaatagtgatgttgtcctaactgggacaggaagccttgcgagaagggacgtacctatgccccagaaggcaagagaggaagactatttggactttttgtatgattaaggttcttattggacttttccctaggttttttttttttgttattgttgttgttgtttcgttttctagctataggaactatctggggaggggcccagtgggtcctcggccagagccctctctaaggacaggttggggagggttggggagggctgcctgtgctggactgaggcttgtgccactgggcctttctgattttgcctccaaaggagagcgctgtgatacctacatgtgtaaggaagggccttccgtattggggttctgccaaggacccgtattcagggacccatgctcttttggggggacttttcctcttgtcttccctactttattaggacttgccctgaataccattttctaccccttgcccctccattctcctggcccttctgggggtcagctggtctctatgaatatgctgggggtgcttccccataggtctctcccttcatttgtctctggtgggacaaaatactgactcagtccttagatgtagtttcacccaagagcatcttggccctgggaagaggtccctaggctgcagatgctactgactgcttgctaggtagcctctggaaagcattccccatccatcactccccacttctttctgctgtgctgcttccctcccaaactccatttctgtcaccctttttataagacttttcctcattctgtggggccataaacctatttagtctggagccaaagggatgccctatctgaaggaaaggggcatggggtgggggattccatcaaaactgttgttttttgccccatgatttttctttggtcagtaggaggctggattggagtggtgattattcccctggagctaagctcaggagcccgaagggagagactgagactgactcccttatctcttcatattctttattccctaccagatggatttttttttttttttttggagacggagtctcgccctgtcgccaggctggagtgtagtggcatgatctcgactcactgcaaaatctgcctcccgggttcaagcgattctcctacctcagcctcccgagtagctgggattacaggcatgtgccaccacgccaagctaatttttgtatttttagtagagacggggtttcaccatgttggccaggatggtctcgatctcttgacctcgtgatctgcctgccttggcctcccaaagtgctgggattacaggcgtgagccaccatgccccgccccagatggattttacatttgctcttttgtgtttcgctccaaagggttgtcttcctcgccaaaaggagggagggactttgaatttgatatgaatctttaaaaccagaattggctggatatttcccatgattgggaaaagagtgaaatgaggacattctgtaaactgtccctccctaattccaaggatcagaaactccccgttttgctgactcattccataactggagaaagaagctccattgaccgaagccacagggcagcatggaagtttaaattttctctaaaattaaaatgccaaggataaagctggctgcttccaggagggggaagaggagtggggagtgggcggtgaaacttttccagatgaacggaccataaatgtgttactggctttgtgcctgtagctcattttattatgacctatatgctcctgatttaaagagatctgtgtactgtttacttcccacttcccagaatcccttgtatctcctttctcgggaattgtattttctaataaatgacatttgagaaaaaaatga

SEQ ID NO: 15631 - DNA, 7011 bp, Homo sapiens
  source 1..7011: mol_type = unassigned DNA
gcgccgggcgctggagctgcgggcgcacggagaggagtcgccagcagctggagcggagttggaggaagcagcggcagcggcgagggcggcaggctagctgtcggagacggcaagcacggatcgggcacggccggcgggtcgcagccgggctggaggccggtcggaaccgagcgggcaggaggccaccgctgcagcgcgggccccgcagaggaaggaagccggcgggcggggtgaagctcgtgtgtggagtgccacggtacaatcagacgacagatggacagtgtgacaaaagtgtcagaaaggattgggcctcgctgtgagagtcagcctggattcaaagtgttgacaagttgctgaaaaggaagccagtgagaggactgtggcacgcagaggaagtggagccctgtcttcggtcacaccattgatggaggacagatggacagccgtatggccagtcacctctcctcttaaacctttggagagtggtcctttgtcctctgctggacacataataggaattctaacacattctctgaattcacttttcataaaaacgtaaaatcagactgctctgtacaaccaggctcaactgttgcatggtagcagatttgcaaacatgagtgctgaggggtaccagtacagagcgctgtatgattataaaaaggaaagagaagaagatattgacttgcacttgggtgacatattgactgtgaataaagggtccttagtagctcttggattcagtgatggacaggaagccaggcctgaagaaattggctggttaaatggctataatgaaaccacaggggaaaggggggactttccgggaacttacgtagaatatattggaaggaaaaaaatctcgcctcccacaccaaagccccggccacctcggcctcttcctgttgcaccaggttcttcgaaaactgaagcagatgttgaacaacaagctttgactctcccggatcttgcagagcagtttgcccctcctgacattgccccgcctcttcttatcaagctcgtggaagccattgaaaagaaaggtctggaatgttcaactctatacagaacacagagctccagcaacctggcagaattacgacagcttcttgattgtgatacaccctccgtggacttggaaatgatcgatgtgcacgttttggctgacgctttcaaacgctatctcctggacttaccaaatcctgtcattccagcagccgtttacagtgaaatgatttctttagctccagaagtacaaagctccgaagaatatattcagctattgaagaagcttattaggtcgcctagcatacctcatcagtattggcttacgcttcagtatttgttaaaacatttcttcaagctctctcaaacctccagcaaaaatctgttgaatgcaagagtactctctgaaattttcagccctatgcttttcagattctcagcagccagctctgataatactgaaaacctcataaaagttatagaaattttaatctcaactgaatggaatgaacgacagcctgcaccagcactgcctcctaaaccaccaaaacctactactgtagccaacaacggtatgaataacaatatgtccttacaagatgctgaatggtactggggagatatctcgagggaagaagtgaatgaaaaacttcgagatacagcagacgggacctttttggtacgagatgcgtctactaaaatgcatggtgattatactcttacactaaggaaagggggaaataacaaattaatcaaaatatttcatcgagatgggaaatatggcttctctgacccattaaccttcagttctgtggttgaattaataaaccactaccggaatgaatctctagctcagtataatcccaaattggatgtgaaattactttatccagtatccaaataccaacaggatcaagttgtcaaagaagataatattgaagctgtagggaaaaaattacatgaatataacactcagtttcaagaaaaaagtcgagaatatgatagattatatgaagaatatacccgcacatcccaggaaatccaaatgaaaaggacagctattgaagcatttaatgaaaccataaaaatatttgaagaacagtgccagacccaagagcggtacagcaaagaatacatagaaaagtttaaacgtgaaggcaatgagaaagaaatacaaaggattatgcataattatgataagttgaagtctcgaatcagtgaaattattgacagtagaagaagattggaagaagacttgaagaagcaggcagctgagtatcgagaaattgacaaacgtatgaacagcattaaaccagaccttatccagctgagaaagacgagagaccaatacttgatgtggttgactcaaaaaggtgttcggcaaaagaagttgaacgagtggttgggcaatgaaaacactgaagaccaatattcactggtggaagatgatgaagatttgccccatcatgatgagaagacatggaatgttggaagcagcaaccgaaacaaagctgaaaacctgttgcgagggaagcgagatggcacttttcttgtccgggagagcagtaaacagggctgctatgcctgctctgtagtggtggacggcgaagtaaagcattgtgtcataaacaaaacagcaactggctatggctttgccgagccctataacttgtacagctctctgaaagaactggtgctacattaccaacacacctcccttgtgcagcacaacgactccctcaatgtcacactagcctacccagtatatgcacagcagaggcgatgaagcgcttactctttgatccttctcctgaagttcagccaccctgaggcctctggaaagcaaagggctcctctccagtctgatctgtgaattgagctgcagaaacgaagccatctttctttggatgggactagagctttctttcacaaaaaagaagtaggggaagacatgcagcctaaggctgtatgatgaccacacgttcctaagctggagtgcttatcccttctttttctttttttctttggtttaatttaaagccacaaccacatacaacacaaagagaaaaagaaatgcaaaaatctctgcgtgcagggacaaagaggcctttaaccatggtgcttgttaatgctttctgaagctttaccagctgaaagttgggactctggagagcggaggagagagaggcagaagaaccctggcctgagaaggtttggtccagcctggtttagcctggatgttgctgtgcacggtggacccagacacatcgcactgtggattatttcattttgtaacaaatgaacgatatgtagcagaaaggcacgtccactcacaagggacgctttgggagaatgtcagttcatgtatgttcagaagaaattctgtcatagaaagtgccagaaagtgtttaacttgtcaaaaaacaaaaacccagcaacagaaaaatggagtttggaaaacaggacttaaaatgacattcagtatataaaatatgtacataatattggatgactaactatcaaatagatggatttgtatcaataccaaatagcttctgttttgttttgctgaaggctaaattcacagcgctatgcaattcttaattttcattaagttgttatttcagttttaaatgtaccttcagaataagcttccccaccccagtttttgttgcttgaaaatattgttgtcccggatttttgttaatattcatttttgttatccttttttaaaagtaaatgtacaggatgccagtaaaaaaaaaaaatggcttcagaattaaaactatgaaatattttacagtttttcttgtacagagtacttggctgttagcccaaggttaaaaagttcataacagattttttttggactgttttgttgggcagtgcctgataagcttcaaagctgctttattcaataaaaaaaagaaatgaaaaagatatatgaatatgacaaagtattgctgagtccaacaatgttgttttaagactcttaaaatacggtacctggcaatgtttatttcataaagaattgtgaacttcttgaatctagggagggggaatgtagtgaagggatgtatcaagtggggtggtgggagggggaggcaaggttatatgcactttctcatgatttacagagaagtgaataactgcaaagtgaagttgcttcttctacttcagtcttctctcactttgatttgctagttgttatcaattaatgacaattacaaacctactgtatctctaatacagtgtgactggtcaggtatttcagttcttaggaaggaagtgccaagtttgtttttgggttcctggaacagcgctcacctttgtttagaacactggtttaaagggataatcatctctgtcacattagactatccatcatgaccagcaaatactcattttaggaaaaaaaaaagcatgatctgaaaaatacttttggtggtatgttggttaccctcctagctttccatttggtttagaacataaagcaaatagacacagtcatactgtcactgctctggactgtgtggagctcgctaaagtcatggtcattgcaggaatccaagtggcagtccttctcattcattctaatcattgtatgtgcttcactacgggggggagaaggaaacgttagcatcatgtttcccatttagggcaggagtgagaggtctctcttcctgatttagatatgcaaaagctggtatgttcagtaggaactgtacatgtgttgggaggcataaagactaattagcaaccataatatggtcactaccctaatagactaaatgaaatcttgcaatttcaaattactctttctccatattagatttacccacagctatatttctgtttaagtactagggtgagggttttctgttactttgttttttaatgttgttccttttgaaagaatcagtcttgcagctgagtgaaaaatctgtggaatgtattatttgtcctctttacatgaaactactcatacttaagcaaaagtcagtcttatagcaagactgttagccctcaaacttgactctactgatctgaccatttccctctcatcgccagacaactgacgatttccctggttttagtctgcgtctctgctttaaagttattgtgatatccttctagatcatacacaagtctaacagttaattagttaacagtttttaaactaggtttgtgggtatttttttggtagcacatgtatgctattacatacaaatttttatttctaaaatataagatctgagattgaatattttcattaaaagctacagttttgtgaatctttgtgcttcaacattctttgcaagatgatacggtatttaggcatttgccttatttttgcatctcacaaacataagtgcaatagatcttttcattgaacagcaaagtaggattcatcattccatatgacttgagttacaccagacctgttctgcccaatgcctttttgattacagtgtagcttgcccaccgcatttgtcgttttagatactttgctagccggccactttggatttcatcagacagtcctaacaatattgtctgaacggctgaatatgaatagatacagcagaggcactcctgatatatgatttttatccatgcgtcagtttttcccacccagtgtagcatcctaaagataaagccagaagctaagctgcagtgaggctgtgattgggcgtagaagtgggagcattgggacctcacattacacacacgagagatcataaccatgtgaaaaggcaaaaagcatgtgtttgcaacatctgataacttcatggcctttgataaatgtatatatgtatatgtgcatggactgtgtttccagtacacctttcagccaaaacagatccacagtagttgttgagttcaagtacataaagtacataacaagcgaacgtctagtacaattcttacttatgtgtatgggatttttccctttgaggttgctttgttttgtcttacaaaggtgaaaattgtttgtaagtgaagtgagaagttcatatttctttggcttttttgtgtttttaaaagttactccttttagggagctggtctgatgacttgcttagcttggaaatccttgttttcagtgtgtcgagtcaaaatgtgtttatgtgagctgtcactgtggggaaccaattgctttgtcatatagctggttatgaactagtaacatgtttgggaagtcctactgatgttcctttggaagaaaaaatctgctggttttaacaactgtgcttttgctatgtatggtatccaagttagttgaaacgcagacactgagatctgtttgagtttagggtcatttttagaaaggggcagtttaaagcacaatgtctcacatgggacaaagttccaaaatgccaaattcttattttttaaaaagctagttctataaaatactggtattatgggtggggaggaaatagaattgagtcaattggaaagactatccaacttaacatgaaacttgtcaccatgagatagcattagctgcccaggatgctgctatatatatatatatatatatatatgtgtgtgtgtgtgtgtgtgtgtgtgtatatatatatatatatatatatatatatatatatatatatgtgtgtgtatatatatatatatgtgtatatatatatgtatatacatatatgtatatatatgcacatatatatatgtatttaaaaaaatcaaaacaaaaaaaaactcatttatacctgtgtattttttaaagctacaatctgttcaatgtttttaaaaatctgtttatatgacattgttaaaataaagttggtcttttgacgagagggaggatgtcacggtcagttgtaactttgccttcacaaggcaactggggtggggggtgggggtagtgtgcctccttgacatttcgttcaagttatagattcaatggagctatgtcttgttttaagttgctttaatgcattgtattagatcttcaaacagaataaaggttgttttgaaactgaa

SEQ ID NO: 15632 - DNA, 3891 bp, Homo sapiens
  source 1..3891: mol_type = unassigned DNA
agttggaggaagcagcggcagcggcgagggcggcaggctagctgtcggagacggcaagcacggatcgggcacggccggcgggtcgcagccgggctggaggccggtcggaaccgagcgggcaggaggccaccgctgcagcgcgggccccgcagaggaaggaagccggcgggcggggtaggtgaagctcgtgtgtggagtgccacggtacaatcagacgacagatggacagtgtgacaaaagtgtcagaaaggattgggcctcgctgtgagagtcagcctggattcaaagtgttgacaagttgctgaaaaggaagccagtgagaggactgtggcacgcagaggaagtggagccctgtcttcggtcacaccattgatggaggacagatggacagccgtatggccagtcacctctcctcttaaacctttggagagtggtcctttgtcctctgctggacacataataggaattctaacacattctctgaattcacttttcataaaaacgtaaaatcagactgctctgtacaaccaggctcaactgttgcatggtagcagatttgcaaacatgagtgctgaggggtaccagtacagagcgctgtatgattataaaaaggaaagagaagaagatattgacttgcacttgggtgacatattgactgtgaataaagggtccttagtagctcttggattcagtgatggacaggaagccaggcctgaagaaattggctggttaaatggctataatgaaaccacaggggaaaggggggactttccgggaacttacgtagaatatattggaaggaaaaaaatctcgcctcccacaccaaagccccggccacctcggcctcttcctgttgcaccaggttcttcgaaaactgaagcagatgttgaacaacaagctttgactctcccggatcttgcagagcagtttgcccctcctgacattgccccgcctcttcttatcaagctcgtggaagccattgaaaagaaaggtctggaatgttcaactctatacagaacacagagctccagcaacctggcagaattacgacagcttcttgattgtgatacaccctccgtggacttggaaatgatcgatgtgcacgttttggctgacgctttcaaacgctatctcctggacttaccaaatcctgtcattccagcagccgtttacagtgaaatgatttctttagctccagaagtacaaagctccgaagaatatattcagctattgaagaagcttattaggtcgcctagcatacctcatcagtattggcttacgcttcagtatttgttaaaacatttcttcaagctctctcaaacctccagcaaaaatctgttgaatgcaagagtactctctgaaattttcagccctatgcttttcagattctcagcagccagctctgataatactgaaaacctcataaaagttatagaaattttaatctcaactgaatggaatgaacgacagcctgcaccagcactgcctcctaaaccaccaaaacctactactgtagccaacaacggtatgaataacaatatgtccttacaagatgctgaatggtactggggagatatctcgagggaagaagtgaatgaaaaacttcgagatacagcagacgggacctttttggtacgagatgcgtctactaaaatgcatggtgattatactcttacactaaggaaagggggaaataacaaattaatcaaaatatttcatcgagatgggaaatatggcttctctgacccattaaccttcagttctgtggttgaattaataaaccactaccggaatgaatctctagctcagtataatcccaaattggatgtgaaattactttatccagtatccaaataccaacaggatcaagttgtcaaagaagataatattgaagctgtagggaaaaaattacatgaatataacactcagtttcaagaaaaaagtcgagaatatgatagattatatgaagaatatacccgcacatcccaggaaatccaaatgaaaaggacagctattgaagcatttaatgaaaccataaaaatatttgaagaacagtgccagacccaagagcggtacagcaaagaatacatagaaaagtttaaacgtgaaggcaatgagaaagaaatacaaaggattatgcataattatgataagttgaagtctcgaatcagtgaaattattgacagtagaagaagattggaagaagacttgaagaagcaggcagctgagtatcgagaaattgacaaacgtatgaacagcattaaaccagaccttatccagctgagaaagacgagagaccaatacttgatgtggttgactcaaaaaggtgttcggcaaaagaagttgaacgagtggttgggcaatgaaaacactgaagaccaatattcactggtggaagatgatgaagatttgccccatcatgatgagaagacatggaatgttggaagcagcaaccgaaacaaagctgaaaacctgttgcgagggaagcgagatggcacttttcttgtccgggagagcagtaaacagggctgctatgcctgctctgtagtggtggacggcgaagtaaagcattgtgtcataaacaaaacagcaactggctatggctttgccgagccctataacttgtacagctctctgaaagaactggtgctacattaccaacacacctcccttgtgcagcacaacgactccctcaatgtcacactagcctacccagtatatgcacagcagaggcgatgaagcgcttactctttgatccttctcctgaagttcagccaccctgaggcctctggaaagcaaagggctcctctccagtctgatctgtgaattgagctgcagaaacgaagccatctttctttggatgggactagagctttctttcacaaaaaagaagtaggggaagacatgcagcctaaggctgtatgatgaccacacgttcctaagctggagtgcttatcccttctttttctttttttctttggtttaatttaaagccacaaccacatacaacacaaagagaaaaagaaatgcaaaaatctctgcgtgcagggacaaagaggcctttaaccatggtgcttgttaatgctttctgaagctttaccagctgaaagttgggactctggagagcggaggagagagaggcagaagaaccctggcctgagaaggtttggtccagcctggtttagcctggatgttgctgtgcacggtggacccagacacatcgcactgtggattatttcattttgtaacaaatgaacgatatgtagcagaaaggcacgtccactcacaagggacgctttgggagaatgtcagttcatgtatgttcagaagaaattctgtcatagaaagtgccagaaagtgtttaacttgtcaaaaaacaaaaacccagcaacagaaaaatggagtttggaaaacaggacttaaaatgacattcagtatataaaatatgtacataatattggatgactaactatcaaatagatggatttgtatcaataccaaatagcttctgttttgttttgctgaaggctaaattcacagcgctatgcaattcttaattttcattaagttgttatttcagttttaaatgtaccttcagaataagcttccccaccccagtttttgttgcttgaaaatattgttgtcccggatttttgttaatattcatttttgttatccttttttaaaagtaaatgtacaggatgccagtaaaaaaaaaaaatggcttcagaattaaaactatgaaatattttacagtttttcttgtacagagtacttggctgttagcccaaggttaaaaagttcataacagattttttttggactgttttgttgggcagtgcctgataagcttcaaagctgctttattcaataaaaaaaagaaatgaaaaa

SEQ ID NO: 15633 - DNA, 586 bp, Homo sapiens
  source 1..586: mol_type = unassigned DNA
aaaaagcaactcactagctatacaactttttgacagattacactgttcttgaaaaaccgtttagaagaaagcagataagagttttcttaggtgcaaaagttgattaaactttaggaagcaagtgtttttgaccagtataaagaaaataagagtaatgtgtgggggtgtgtgtgtgtgtgtgtgtgtgtgcgcgcgcgtgcctgcggctaaagtttgggaagaaatgttggttcagagttaaggtttaagttggaaaggccagtggaggaggctccctgccttgcagaactgctgggtattgtcactgcttgcctcttcagcttttatatgcaggtgaagctcgtgtgtggagtgccacggtacaatcagacgacagatggacagtgtgacaaaagtgtcagaaaggattgggcctcgctgtgagagtcagcctggattcaaagtgttgacaagttgctgaaaaggaagccagtgagaggactgtggcacgcagaggaagtggagccctgtcttcggtcacaccattgatggaggacagatggacagccgtatggccagtcacctctcctcttaaacctttggagag

SEQ ID NO: 15634 - DNA, 865 bp, Homo sapiens
  source 1..865: mol_type = unassigned DNA
ctgtggcacgcagaggaagtggagccctgtcttcggtcacaccattgatggaggacagatggacagccgtatggccagtcacctctcctcttaaacctttggagagtggtcctttgtcctctgctggacacataataggaattctaacacattctctgaattcacttttcataaaaacgtaaaatcagactgctctgtacaaccaggctcaactgttgcatggtagcagatttgcaaacatgagtgctgaggggtaccagtacagagcgctgtatgattataaaaaggaaagagaagaagatattgacttgcacttgggtgacatattgactgtgaataaagggtccttagtagctcttggattcagtgatggacaggaagccaggcctgaagaaattggctggttaaatggctataatgaaaccacaggggaaaggggggactttccgggaacttacgtagaatatattggaaggaaaaaaatctcgcctcccacaccaaagccccggccacctcggcctcttcctgttgcaccaggttcttcgaaaactgaagcagatgttgaacaacaagctttgactctcccggatcttgcagagcagtttgcccctcctgacattgccccgcctcttcttatcaagctcgtggaagccattgaaaagaaaggtaaccagactgctagagggcatcagttcctttgttctacccttatttcatggctcttattatttgtctcttgtgcattcattaagtaaatttcctactaccagctatgtccagatactctgctggacactcaaactgtttggggctaagtactgggaaaaatgtctcagtctataatttctaactctagattatcatg

SEQ ID NO: 15635 - DNA, 395 bp, Homo sapiens
  source 1..395: mol_type = unassigned DNA
acagcaaaagaacctcatcagaaccgcaggctggaaagagctttgactctcccggatcttgcagagcagtttgcccctcctgacattgccccgcctcttcttatcaagctcgtggaagccattgaaaagaaaggtctggaatgttcaactctatacagaacacagagctccagcaacctggcagaattacgacagcttcttgattgtgatacaccctccgtggacttggaaatgatcgatgtgcacgttttggctgacgctttcaaacgctatctcctggacttaccaaatcctgtcattccagcagccgtttacagtgaaatgatttctttagctccagaagtacaaagctccgaagaatatattcagctattgaagaagcttattaggtcgcc

SEQ ID NO: 15636 - DNA, 552 bp, Homo sapiens
  source 1..552: mol_type = unassigned DNA
acacttgaagctgctcaatactggaagtacaaagctccgaagaatatattcagctattgaagaagcttattaggtcgcctagcatacctcatcagtattggcttacgcttcagtatttgttaaaacatttcttcaagctctctcaaacctccagcaaaaatctgttgaatgcaagagtactctctgaaattttcagccctatgcttttcagattctcagcagccagctctgataatactgaaaacctcataaaagttatagaaattttaatctcaactgaatggaatgaacgacagcctgcaccagcactgcctcctaaaccaccaaaacctactactgtagccaacaacggtatgaataacaatatgtccttacaagatgctgaatggtactggggagatatctcgagggaagaagtgaatgaaaaacttcgagatacagcagacgggacctttttggtacgagatgcgtctactaaaatgcatggtgattatactcttacactaaggaaagggggaaataacaaattaatcaaaatatttcatcgagatg

SEQ ID NO: 15637 - DNA, 705 bp, Homo sapiens
  source 1..705: mol_type = unassigned DNA
acacactgagctttttgcatttccatttgacctgagatttctactttctcataatgcgttttctaatgagaaggacaaatgtactgtgtgcttctcccaacaactttttaaatgactcctatagcttgaagaaagagcagaacttttctaggtgtttattcactgatacctggaagtagtcgcttactcatttctctttttttttttttttaaacttgtagaagtacaaagctccgaagaatatattcagctattgaagaagcttattaggtcgcctagcatacctcatcagtattggcttacgcttcagtatttgttaaaacatttcttcaagctctctcaaacctccagcaaaaatctgttgaatgcaagagtactctctgaaattttcagccctatgcttttcagattctcagcagccagctctgataatactgaaaacctcataaaagttatagaaattttaatctcaactgaatggaatgaacgacagcctgcaccagcactgcctcctaaaccaccaaaacctactactgtagccaacaacggtatgaataacaatatgtccttacaagatgctgaatggtactggggagatatctcgagggaagaagtgaatgaaaaacttcgagatacagcagacgggacctttttggtacgagatgcgtctactaaaatgcatggtgattatactcttacactaag

SEQ ID NO: 15638 - DNA, 2625 bp, Homo sapiens
  source 1..2625: mol_type = unassigned DNA
atctttatctaagggagacgtgcgagcgcctgggctcctttcctccccgatacagtagcgaaatccagttggcttctcaatgaggagccggcagtgagcggcggtggcccggacgcactgccgggcggggcgtggggcggagggacgagccgagccgagccaagcggagctgggccactgtgcacgcccggagggtcctggcggcgcccccgctcctgcgcgcactctcggcgccggacacgagcactgcctgccgggaacaggctggggggaggtgcgggggcttggcccacttggtggaagaacagctttggggattttttttttttcattgtcggatacaggcatttcaaagggaaaccgttgaaatgcataacctgcaaacactgcctcctaaaccaccaaaacctactactgtagccaacaacggtatgaataacaatatgtccttacaagatgctgaatggtactggggagatatctcgagggaagaagtgaatgaaaaacttcgagatacagcagacgggacctttttggtacgagatgcgtctactaaaatgcatggtgattatactcttacactaaggaaagggggaaataacaaattaatcaaaatatttcatcgagatgggaaatatggcttctctgacccattaaccttcagttctgtggttgaattaataaaccactaccggaatgaatctctagctcagtataatcccaaattggatgtgaaattactttatccagtatccaaataccaacaggatcaagttgtcaaagaagataatattgaagctgtagggaaaaaattacatgaatataacactcagtttcaagaaaaaagtcgagaatatgatagattatatgaagaatatacccgcacatcccaggaaatccaaatgaaaaggacagctattgaagcatttaatgaaaccataaaaatatttgaagaacagtgccagacccaagagcggtacagcaaagaatacatagaaaagtttaaacgtgaaggcaatgagaaagaaatacaaaggattatgcataattatgataagttgaagtctcgaatcagtgaaattattgacagtagaagaagattggaagaagacttgaagaagcaggcagctgagtatcgagaaattgacaaacgtatgaacagcattaaaccagaccttatccagctgagaaagacgagagaccaatacttgatgtggttgactcaaaaaggtgttcggcaaaagaagttgaacgagtggttgggcaatgaaaacactgaagaccaatattcactggtggaagatgatgaagatttgccccatcatgatgagaagacatggaatgttggaagcagcaaccgaaacaaagctgaaaacctgttgcgagggaagcgagatggcacttttcttgtccgggagagcagtaaacagggctgctatgcctgctctgtagtggtggacggcgaagtaaagcattgtgtcataaacaaaacagcaactggctatggctttgccgagccctataacttgtacagctctctgaaagaactggtgctacattaccaacacacctcccttgtgcagcacaacgactccctcaatgtcacactagcctacccagtatatgcacagcagaggcgatgaagcgcttactctttgatccttctcctgaagttcagccaccctgaggcctctggaaagcaaagggctcctctccagtctgatctgtgaattgagctgcagaaacgaagccatctttctttggatgggactagagctttctttcacaaaaaagaagtaggggaagacatgcagcctaaggctgtatgatgaccacacgttcctaagctggagtgcttatcccttctttttctttttttctttggtttaatttaaagccacaaccacatacaacacaaagagaaaaagaaatgcaaaaatctctgcgtgcagggacaaagaggcctttaaccatggtgcttgttaatgctttctgaagctttaccagctgaaagttgggactctggagagcggaggagagagaggcagaagaaccctggcctgagaaggtttggtccagcctggtttagcctggatgttgctgtgcacggtggacccagacacatcgcactgtggattatttcattttgtaacaaatgaacgatatgtagcagaaaggcacgtccactcacaagggacgctttgggagaatgtcagttcatgtatgttcagaagaaattctgtcatagaaagtgccagaaagtgtttaacttgtcaaaaaacaaaaacccagcaacagaaaaatggagtttggaaaacaggacttaaaatgacattcagtatataaaatatgtacataatattggatgactaactatcaaatagatggatttgtatcaataccaaatagcttctgttttgttttgctgaaggctaaattcacagcgctatgcaattcttaattttcattaagttgttatttcagttttaaatgtaccttcagaataagcttccccaccccagtttttgttgcttgaaaatattgttgtcccggatttttgttaatattcatttttgttatccttttttaaaagtaaatgtacaggatgccagtaaaaaaaaaaaa

SEQ ID NO: 15639 - DNA, 540 bp, Homo sapiens
  source 1..540: mol_type = unassigned DNA
ttcattgtcggatacaggcatttcaaagggaaaccgttgaaatgcataacctgcaaaggaagaagtgaatgaaaaacttcgagatacagcagacgggacctttttggtacgagatgcgtctactaaaatgcatggtgattatactcttacactaaggaaagggggaaataacaaattaatcaaaatatttcatcgagatgggaaatatggcttctctgacccattaaccttcagttctgtggttgaattaataaaccactaccggaatgaatctctagctcagtataatcccaaattggatgtgaaattactttatccagtatccaaataccaacaggatcaagttgtcaaagaagataatattgaagctgtagggaaaaaattacatgaatataacactcagtttcaagaaaaaagtcgagaatatgatagattatatgaagaatatacccgcacatcccaggaaatccaaatgaaaaggacagctattgaagcatttaatgaaaccataaaaatatttgaagaacagtgccagaccca

SEQ ID NO: 15640 - DNA, 2439 bp, Homo sapiens
  source 1..2439: mol_type = unassigned DNA
tataggttttaaaatgaattccaagacaccattacaaagaaagccggactcttttcttataactgagctcagccaaggaaactcttgcacaaatgtacaatactgtttggaatatggaagacctggatttagaatatgccaagacagatataaattgtggcacagacttgatgttttatatagaaatggacccaccagcactgcctcctaaaccaccaaaacctactactgtagccaacaacggtatgaataacaatatgtccttacaagatgctgaatggtactggggagatatctcgagggaagaagtgaatgaaaaacttcgagatacagcagacgggacctttttggtacgagatgcgtctactaaaatgcatggtgattatactcttacactaaggaaagggggaaataacaaattaatcaaaatatttcatcgagatgggaaatatggcttctctgacccattaaccttcagttctgtggttgaattaataaaccactaccggaatgaatctctagctcagtataatcccaaattggatgtgaaattactttatccagtatccaaataccaacaggatcaagttgtcaaagaagataatattgaagctgtagggaaaaaattacatgaatataacactcagtttcaagaaaaaagtcgagaatatgatagattatatgaagaatatacccgcacatcccaggaaatccaaatgaaaaggacagctattgaagcatttaatgaaaccataaaaatatttgaagaacagtgccagacccaagagcggtacagcaaagaatacatagaaaagtttaaacgtgaaggcaatgagaaagaaatacaaaggattatgcataattatgataagttgaagtctcgaatcagtgaaattattgacagtagaagaagattggaagaagacttgaagaagcaggcagctgagtatcgagaaattgacaaacgtatgaacagcattaaaccagaccttatccagctgagaaagacgagagaccaatacttgatgtggttgactcaaaaaggtgttcggcaaaagaagttgaacgagtggttgggcaatgaaaacactgaagaccaatattcactggtggaagatgatgaagatttgccccatcatgatgagaagacatggaatgttggaagcagcaaccgaaacaaagctgaaaacctgttgcgagggaagcgagatggcacttttcttgtccgggagagcagtaaacagggctgctatgcctgctctgtagtggtggacggcgaagtaaagcattgtgtcataaacaaaacagcaactggctatggctttgccgagccctataacttgtacagctctctgaaagaactggtgctacattaccaacacacctcccttgtgcagcacaacgactccctcaatgtcacactagcctacccagtatatgcacagcagaggcgatgaagcgcttactctttgatccttctcctgaagttcagccaccctgaggcctctggaaagcaaagggctcctctccagtctgatctgtgaattgagctgcagaaacgaagccatctttctttggatgggactagagctttctttcacaaaaaagaagtaggggaagacatgcagcctaaggctgtatgatgaccacacgttcctaagctggagtgcttatcccttctttttctttttttctttggtttaatttaaagccacaaccacatacaacacaaagagaaaaagaaatgcaaaaatctctgcgtgcagggacaaagaggcctttaaccatggtgcttgttaatgctttctgaagctttaccagctgaaagttgggactctggagagcggaggagagagaggcagaagaaccctggcctgagaaggtttggtccagcctggtttagcctggatgttgctgtgcacggtggacccagacacatcgcactgtggattatttcattttgtaacaaatgaacgatatgtagcagaaaggcacgtccactcacaagggacgctttgggagaatgtcagttcatgtatgttcagaagaaattctgtcatagaaagtgccagaaagtgtttaacttgtcaaaaaacaaaaacccagcaacagaaaaatggagtttggaaaacaggacttaaaatgacattcagtatataaaatatgtacataatattggatgactaactatcaaatagatggatttgtatcaataccaaatagcttctgttttgttttgctgaaggctaaattcacagcgctatgcaattcttaattttcattaagttgttatttcagttttaaatgtaccttcagaataagcttccccaccccagtttttgttgcttgaaaatattgttgtcccggatttttgttaatattcatttttgttatccttttttaaaagtaaatgtacaggatgccagtaaaaaaaaaaaa

SEQ ID NO: 15641 - DNA, 558 bp, Homo sapiens
  source 1..558: mol_type = unassigned DNA
aaagaaagccggactcttttcttataactgagctcagccaaggaaactcttgcacaaatgtacaatactgtttggaatatggaagacctggatttagaatatgccaagacagatataaattgtggcacagacttgatgttttatatagaaatggacccaccagcactgcctcctaaaccaccaaaacctactactgtagccaacaacggtatgaataacaatatgtccttacaagatgctgaatggtactggggagatatctcgagggaagaagtgaatgaaaaacttcgagatacagcagacgggacctttttggtacgagatgcgtctactaaaatgcatggtgattatactcttacactaaggtaagccagggaatatagctgaaattagggttttgggctgatattaaaacatatttccttattccaaaatgttaatacctttatttttatattgtttttacaggaaagggggaaataacaaattaatcaaaatatttcatcgagatgggaaatatggcttctctgacccattaaccttcagttctgtggttga

SEQ ID NO: 15642 - DNA, 945 bp, Homo sapiens
  source 1..945: mol_type = unassigned DNA
ggactcttttcttataactgagctcagccaaggaaactcttgcacaaatgtacaatactgtttggaatatggaagacctggatttagaatatgccaagacagatataaattgtggcacagacttgatgttttatatagaaatggacccaccagggaagaagtgaatgaaaaacttcgagatacagcagacgggacctttttggtacgagatgcgtctactaaaatgcatggtgattatactcttacactaaggaaagggggaaataacaaattaatcaaaatatttcatcgagatgggaaatatggcttctctgacccattaaccttcagttctgtggttgaattaataaaccactaccggaatgaatctctagctcagtataatcccaaattggatgtgaaattactttatccagtatccaaataccaacaggatcaagttgtcaaagaagataatattgaagctgtagggaaaaaattacatgaatataacactcagtttcaagaaaaaagtcgagaatatgatagattatatgaagaatatacccgcacatcccaggaaatccaaatgaaaaggacagctattgaagcatttaatgaaaccataaaaatatttgaagaacagtgccagacccaagagcggtacagcaaagaatacatagaaaagtttaaacgtgaaggcaatgagaaagaaatacaaaggattatgcataattatgataagttgaagtctcgaatcagtgaaattattgacagtagaagaagattggaagaagacttgaagaagcaggcagctgagtatcgagaaattgacaaacgtatgaacagcattaaaccagaccttatccagctgagaaagacgagagaccaatacttgatgtggttgactcaaaaaggtgttcggcaaaagaagttgaacgagtggttgggcaatgaaaacactga

SEQ ID NO: 15643 - DNA, 3722 bp, Homo sapiens
  source 1..3722: mol_type = unassigned DNA
agacttgatgttttatatagaaatggacccaccaggtaatactgcagtattattgtagagagttagttaatttcgtggctttttaatttttcgaaagctactgtaaaagatcctttttggatttctgtttttattaatttgtttcattgataaaaattagtttgctcatggcttaaaaattaaacagattgtttgactgtctgtggaagcaagcagctcaggctgtgtgtggtaaatgcttattcttacttgaatggatatgaattgaactccagtttttcactggtgtcttttgttaatcgagatccttccctgggtgagttatgttgtgggatattgtccctgtaattaaaatgatgcatcttttgtgctgcttttctctgttgccagtggatgagaacagtgtagcactttgcagtgataacacttggtactttagaaagcatgtaaaatgtagcagtgattacaactcagttctctaaatgttgagactttgcttgctctctcatattaagatattataatgaaaaaagaagttgactttccattattgttagtctttgtaaaatattcttggtagatacctgaaatcattttttgtataagttaaaatagtaacagtgctttaaaacttatgacagaatttacctaaaaatcctagatttattttgtttcctaagtaagttgttttattccaatgttagctctccccctgcccccatttaaggtattcaggaatactgcagtcttttatttgtcaccaattggtatatatgaatactgatttgacattgaggaagggggatatcatttttaatcagacctagtatatagagcacaatttatccaacagaatattaacatattaaagagatttagggcacagatgagagtttcttaaagtggcttttggcagaacagtgcctgaaatactaagattagagaaacccaattgctcctcttaaaacatactgctgtagatgagcctttttattactgcaacagagtttgtggaggacagagaccaaatttgtctttcgtaattaaataagaggaaattaaagccaactcatgttattcctgctactcatatgttcatagtttcttactttagatggatttgaccaggcatgaaactttaatataactagaatctagaagtacagaatgtcatgactctggatttactttgaaatttattcacatggccagcccaatttatttgttagtttctaaggctctctctcttttctccttttcagtttcatttctttttgagccatgctctgaaagattttttttaagaaaattatcttccatattgcatggaattgtgaactaatgctatatatttcagttactctaactttttatttttttaaagtaaaagtattcatctaaagaaatttagttctaatgtagttgggattgcgaacaactttttctttttcatctgcagcactgcctcctaaaccaccaaaacctactactgtagccaacaacggtatgaataacaatatgtccttacaagatgctgaatggtactggggagatatctcgagggaagaagtgaatgaaaaacttcgagatacagcagacgggacctttttggtacgagatgcgtctactaaaatgcatggtgattatactcttacactaaggaaagggggaaataacaaattaatcaaaatatttcatcgagatgggaaatatggcttctctgacccattaaccttcagttctgtggttgaattaataaaccactaccggaatgaatctctagctcagtataatcccaaattggatgtgaaattactttatccagtatccaaataccaacaggatcaagttgtcaaagaagataatattgaagctgtagggaaaaaattacatgaatataacactcagtttcaagaaaaaagtcgagaatatgatagattatatgaagaatatacccgcacatcccaggaaatccaaatgaaaaggacagctattgaagcatttaatgaaaccataaaaatatttgaagaacagtgccagacccaagagcggtacagcaaagaatacatagaaaagtttaaacgtgaaggcaatgagaaagaaatacaaaggattatgcataattatgataagttgaagtctcgaatcagtgaaattattgacagtagaagaagattggaagaagacttgaagaagcaggcagctgagtatcgagaaattgacaaacgtatgaacagcattaaaccagaccttatccagctgagaaagacgagagaccaatacttgatgtggttgactcaaaaaggtgttcggcaaaagaagttgaacgagtggttgggcaatgaaaacactgaagaccaatattcactggtggaagatgatgaagatttgccccatcatgatgagaagacatggaatgttggaagcagcaaccgaaacaaagctgaaaacctgttgcgagggaagcgagatggcacttttcttgtccgggagagcagtaaacagggctgctatgcctgctctgtagtggtggacggcgaagtaaagcattgtgtcataaacaaaacagcaactggctatggctttgccgagccctataacttgtacagctctctgaaagaactggtgctacattaccaacacacctcccttgtgcagcacaacgactccctcaatgtcacactagcctacccagtatatgcacagcagaggcgatgaagcgcttactctttgatccttctcctgaagttcagccaccctgaggcctctggaaagcaaagggctcctctccagtctgatctgtgaattgagctgcagaaacgaagccatctttctttggatgggactagagctttctttcacaaaaaagaagtaggggaagacatgcagcctaaggctgtatgatgaccacacgttcctaagctggagtgcttatcccttctttttctttttttctttggtttaatttaaagccacaaccacatacaacacaaagagaaaaagaaatgcaaaaatctctgcgtgcagggacaaagaggcctttaaccatggtgcttgttaatgctttctgaagctttaccagctgaaagttgggactctggagagcggaggagagagaggcagaagaaccctggcctgagaaggtttggtccagcctggtttagcctggatgttgctgtgcacggtggacccagacacatcgcactgtggattatttcattttgtaacaaatgaacgatatgtagcagaaaggcacgtccactcacaagggacgctttgggagaatgtcagttcatgtatgttcagaagaaattctgtcatagaaagtgccagaaagtgtttaacttgtcaaaaaacaaaaacccagcaacagaaaaatggagtttggaaaacaggacttaaaatgacattcagtatataaaatatgtacataatattggatgactaactatcaaatagatggatttgtatcaataccaaatagcttctgttttgttttgctgaaggctaaattcacagcgctatgcaattcttaattttcattaagttgttatttcagttttaaatgtaccttcagaataagcttccccaccccagtttttgttgcttgaaaatattgttgtcccggatttttgttaatattcatttttgttatccttttttaaaagtaaatgtacaggatgccagtaaaaaaaaaaaatggcttcagaattaaaactatg

SEQ ID NO: 15644 - DNA, 567 bp, Homo sapiens
  source 1..567: mol_type = unassigned DNA
aaagacgaccagaaaaagtcactgagcactggagaactggaagaagtgaatgaaaaacttcgagatacagcagacgggacctttttggtacgagatgcgtctactaaaatgcatggtgattatactcttacactaaggaaagggggaaataacaaattaatcaaaatatttcatcgagatgggaaatatggcttctctgacccattaaccttcagttctgtggttgaattaataaaccactaccggaatgaatctctagctcagtataatcccaaattggatgtgaaattactttatccagtatccaaataccaacaggatcaagttgtcaaagaagataatattgaagctgtagggaaaaaattacatgaatataacactcagtttcaagaaaaaagtcgagaatatgatagattatatgaagaatatacccgcacatcccaggaaatccaaatgaaaaggacagctattgaagcatttaatgaaaccataaaaatatttgaagaacagtgccagacccaagagcggtacagcaaagaatacatagaaaagtttaaacgtgaaggc

SEQ ID NO: 15645 - DNA, 2473 bp, Homo sapiens
  source 1..2473: mol_type = unassigned DNA
attattgacagagatgtcagtgaagtgccagagtgaagtggcactgcctaagaacagagtgtgaaggcactctatctattaagcacaactctaagaattcttgccttaaacacaataagaaaacaatgccattttatgttagctttgggaagggggagtaagggaagaagtgaatgaaaaacttcgagatacagcagacgggacctttttggtacgagatgcgtctactaaaatgcatggtgattatactcttacactaaggaaagggggaaataacaaattaatcaaaatatttcatcgagatgggaaatatggcttctctgacccattaaccttcagttctgtggttgaattaataaaccactaccggaatgaatctctagctcagtataatcccaaattggatgtgaaattactttatccagtatccaaataccaacaggatcaagttgtcaaagaagataatattgaagctgtagggaaaaaattacatgaatataacactcagtttcaagaaaaaagtcgagaatatgatagattatatgaagaatatacccgcacatcccaggaaatccaaatgaaaaggacagctattgaagcatttaatgaaaccataaaaatatttgaagaacagtgccagacccaagagcggtacagcaaagaatacatagaaaagtttaaacgtgaaggcaatgagaaagaaatacaaaggattatgcataattatgataagttgaagtctcgaatcagtgaaattattgacagtagaagaagattggaagaagacttgaagaagcaggcagctgagtatcgagaaattgacaaacgtatgaacagcattaaaccagaccttatccagctgagaaagacgagagaccaatacttgatgtggttgactcaaaaaggtgttcggcaaaagaagttgaacgagtggttgggcaatgaaaacactgaagaccaatattcactggtggaagatgatgaagatttgccccatcatgatgagaagacatggaatgttggaagcagcaaccgaaacaaagctgaaaacctgttgcgagggaagcgagatggcacttttcttgtccgggagagcagtaaacagggctgctatgcctgctctgtagtggtggacggcgaagtaaagcattgtgtcataaacaaaacagcaactggctatggctttgccgagccctataacttgtacagctctctgaaagaactggtgctacattaccaacacacctcccttgtgcagcacaacgactccctcaatgtcacactagcctacccagtatatgcacagcagaggcgatgaagcgcttactctttgatccttctcctgaagttcagccaccctgaggcctctggaaagcaaagggctcctctccagtctgatctgtgaattgagctgcagaaacgaagccatctttctttggatgggactagagctttctttcacaaaaaagaagtaggggaagacatgcagcctaaggctgtatgatgaccacacgttcctaagctggagtgcttatcccttctttttctttttttctttggtttaatttaaagccacaaccacatacaacacaaagagaaaaagaaatgcaaaaatctctgcgtgcagggacaaagaggcctttaaccatggtgcttgttaatgctttctgaagctttaccagctgaaagttgggactctggagagcggaggagagagaggcagaagaaccctggcctgagaaggtttggtccagcctggtttagcctggatgttgctgtgcacggtggacccagacacatcgcactgtggattatttcattttgtaacaaatgaacgatatgtagcagaaaggcacgtccactcacaagggacgctttgggagaatgtcagttcatgtatgttcagaagaaattctgtcatagaaagtgccagaaagtgtttaacttgtcaaaaaacaaaaacccagcaacagaaaaatggagtttggaaaacaggacttaaaatgacattcagtatataaaatatgtacataatattggatgactaactatcaaatagatggatttgtatcaataccaaatagcttctgttttgttttgctgaaggctaaattcacagcgctatgcaattcttaattttcattaagttgttatttcagttttaaatgtaccttcagaataagcttccccaccccagtttttgttgcttgaaaatattgttgtcccggatttttgttaatattcatttttgttatccttttttaaaagtaaatgtacaggatgccagtaaaaaaaaaaaatggcttcagaattaaaactatgaaatattttacagtttttcttgtacagagtacttggctgttagcccaaggttaaaaagttcataacagattttttttggactgttttgttgggcagtgcctgataagcttcaaagctgctttattcaataaaaaaaagaaatgaaaaagat

SEQ ID NO: 15646 - DNA, 1468 bp, Homo sapiens
  source 1..1468: mol_type = unassigned DNA
taagaaaacaatgccattttatgttagctttgggaagggggagtaaggttggagaaactcttttgagatcatgagtttctgtgctcatttgtcagagagattgtaatgtttggttgaaaaaataaaaacttagtaccacagatacaccaatagtgaaagtgatatgcacctgtttgtgatgagactgcaattgctaacatttctatttaaacaaattattagctcttattagtgagctctgaaaatgcaattcattaatttaaatctatgtgggcaggaggaatatgggcactcactgtactttccacttgattttgctgtgaacctaaaactgctctaaaaaatagcctattttaaaaaatataaatctgtggtcactaaaccttaagatgagcattgttttgtgttttcatttcagggaagaagtgaatgaaaaacttcgagatacagcagacgggacctttttggtacgagatgcgtctactaaaatgcatggtgattatactcttacactaaggaaagggggaaataacaaattaatcaaaatatttcatcgagatgggaaatatggcttctctgacccattaaccttcagttctgtggttgaattaataaaccactaccggaatgaatctctagctcagtataatcccaaattggatgtgaaattactttatccagtatccaaataccaacaggatcaagttgtcaaagaagataatattgaagctgtagggaaaaaattacatgaatataacactcagtttcaagaaaaaagtcgagaatatgatagattatatgaagaatatacccgcacatcccaggaaatccaaatgaaaaggacagctattgaagcatttaatgaaaccataaaaatatttgaagaacagtgccagacccaagagcggtacagcaaagaatacatagaaaagtttaaacgtgaaggcaatgagaaagaaatacaaaggattatgcataattatgataagttgaagtctcgaatcagtgaaattattgacagtagaagaagattggaagaagacttgaagaagcaggcagctgagtatcgagaaattgacaaacgtatgaacagcattaaaccagaccttatccagctgagaaagacgagagaccaatacttgatgtggttgactcaaaaaggtgttcggcaaaagaagttgaacgagtggttgggcaatgaaaacactgaagagtaagtagttactaaagatggtgatagcagaagatttttctcattttaggaaaatgcatgacttgctttgtttttagaacaagtgaggaattttactgagtttggaacatcttgtaggagaaaatgtataaactcagtgccattatccagaattttaaaaaaagaaagcttagctaaggaggactaggatttatttttactcataatgctgtgaaacaactctctgtgtccataatgatgtccctgaacatctga

SEQ ID NO: 15647 - DNA, 664 bp, Homo sapiens
  source 1..664: mol_type = unassigned DNA
gctgggtccctgaatcaccgactggaggagagttacctacaagagccttcatccaggagcatccacactgcaatgatataggaatgaggcggcccctccacagggcccctctcctgcctggacggctctgctggtctccccgtcccctggagaagaacaaggccatgggtcggcccctgctgctgcccctactgcccttgctgctgccgccagcatttctgcagcctagtggctccacaggatctggtccaagctacctttatggggtcactcaaccaaaacacctctcagcctccatgggtggctctgtggaaatccccttctccttctattacccctgggagttagccacagctcccgacgtgagaatatcctggagacggggccacttccacaggcagtccttctacagcacaaggccgccttccattcacaaggattatgtgaaccggctctttctgaactggacagagggtcagaagagcggcttcctcaggatctccaacctgcagaagcaggaccagtctgtgtatttctgccgagttgagctggacacacggagctcagggaggcagcagtggcagtccatcgaggggaccaaactctccatcacccagggtcagcagcggactaaagccacaaccccagccagggaacccttcca

SEQ ID NO: 15648 - DNA, 1316 bp, Homo sapiens
  source 1..1316: mol_type = unassigned DNA
aataggggaaaataagccagatggataaaggaagtgctggtcaccctggaggtgcactggtttggggaaggctcctggcccccacagccctcttcggagcctgagcccggctctcctcactcacctcaacccccaggcggcccctccacagggcccctctcctgcctggacggctctgctggtctccccgtcccctggagaagaacaaggccatgggtcggcccctgctgctgcccctactgcccttgctgctgccgccagcatttctgcagcctagtggctccacaggatctggtccaagctacctttatggggtcactcaaccaaaacacctctcagcctccatgggtggctctgtggaaatccccttctccttctattacccctgggagttagccacagctcccgacgtgagaatatcctggagacggggccacttccacaggcagtccttctacagcacaaggccgccttccattcacaaggattatgtgaaccggctctttctgaactggacagagggtcagaagagcggcttcctcaggatctccaacctgcagaagcaggaccagtctgtgtatttctgccgagttgagctggacacacggagctcagggaggcagcagtggcagtccatcgaggggaccaaactctccatcacccaggctgtcacgaccaccacccagaggcccagcagcatgactaccacctggaggctcagtagcacaaccaccacaaccggcctcagggtcacacagggcaaacgacgctcagactcttggcacataagtctggagactgctgtgggggtggcagtggctgtcactgtgctcggaatcatgattttgggactgatctgcctcctcaggtggaggagaaggaaaggtcagcagcggactaaagccacaaccccagccagggaacccttccaaaacacagaggagccatatgagaatatcaggaatgaaggacaaaatacagatcccaagctaaatcccaaggatgacggcatcgtctatgcttcccttgccctctccagctccacctcacccagagcacctcccagccaccgtcccctcaagagcccccagaacgagaccctgtactctgtcttaaaggcctaaccaatggacagccctctcaagactgaatggtgaggccaggtacagtggcgcacacctgtaatcccagctactctgaagcctgaggcagaatcaagtgagcccaggagttcagggccagctttgataatggagcgagatgccatctctagttaaaaatatatattaacaataaagtaacaaatttaaaaagat

SEQ ID NO: 15649 - DNA, 1043 bp, Homo sapiens
  source 1..1043: mol_type = unassigned DNA
aagccagatggataaaggaagtgctggtcaccctggaggtgcactggtttggggaaggctcctggcccccacagccctcttcggagcctgagcccggctctcctcactcacctcaacccccaggcggcccctccacagggcccctctcctgcctggacggctctgctggtctccccgtcccctggagaagaacaaggccatgggtcggcccctgctgctgcccctactgcccttgctgctgccgccagcatttctgcagcctagtggctccacaggatctggtccaagctacctttatggggtcactcaaccaaaacacctctcagcctccatgggtggctctgtggaaatccccttctccttctattacccctgggagttagccacagctcccgacgtgagaatatcctggagacggggccacttccacaggcagtccttctacagcacaaggccgccttccattcacaaggattatgtgaaccggctctttctgaactggacagagggtcagaagagcggcttcctcaggatctccaacctgcagaagcaggaccagtctgtgtatttctgccgagttgagctggacacacggagctcagggaggcagcagtggcagtccatcgaggggaccaaactctccatcacccagggtcagcagcggactaaagccacaaccccagccagggaacccttccaaaacacagaggagccatatgagaatatcaggaatgaaggacaaaatacagatcccaagctaaatcccaagctccacctcacccagagcacctcccagccaccgtcccctcaagagcccccagaacgagaccctgtactctgtcttaaaggcctaaccaatggacagccctctcaagactgaatggtgaggccaggtacagtggcgcacacctgtaatcccagctactctgaagcctgaggcagaatcaagtgagcccaggagttcagggccagctttgataatggagcgagatgccatctctagttaaaaatatatattaacaataaagtaacaaatttaaaaa

SEQ ID NO: 15650 - DNA, 892 bp, Homo sapiens
  source 1..892: mol_type = unassigned DNA
acagccctcttcggagcctgagcccggctctcctcactcacctcaacccccaggcggcccctccacagggcccctctcctgcctggacggctctgctggtctccccgtcccctggagaagaacaaggccatgggtcggcccctgctgctgcccctactgcccttgctgctgccgccagcatttctgcagcctagtggctccacaggatctggtccaagctacctttatggggtcactcaaccaaaacacctctcagcctccatgggtggctctgtggaaatccccttctccttctattacccctgggagttagccacagctcccgacgtgagaatatcctggagacggggccacttccacaggcagtccttctacagcacaaggccgccttccattcacaaggattatgtgaaccggctctttctgaactggacagagggtcagaagagcggcttcctcaggatctccaacctgcagaagcaggaccagtctgtgtatttctgccgagttgagctggacacacggagctcagggaggcagcagtggcagtccatcgaggggaccaaactctccatcacccagggtgagtccagctgccctggcacccgctttgcccaccgcagtgaggcttttatgatcactggtgacatcgtccccagcacctcagaccccacttcttctgacgacccctaagttctctctttggcccctaacacttcctcaggcctttgccacctctccccttttctcttccccttgtctccacaactgatctgctttccccaaccatccccctcactgtcccctccagatccagccccgcccccactcctcaggcctcagcagctgctggaccctctaattatccttcattctttctccaaaatgaggc

SEQ ID NO: 15651 - DNA, 909 bp, Homo sapiens
  source 1..909: mol_type = unassigned DNA
acagccctcttcggagcctgagcccggctctcctcactcacctcaacccccaggcggcccctccacagggcccctctcctgcctggacggctctgctggtctccccgtcccctggagaagaacaaggccatgggtcggcccctgctgctgcccctactgcccttgctgctgccgccagcatttctgcagcctagtggctccacaggatctggtccaagctacctttatggggtcactcaaccaaaacacctctcagcctccatgggtggctctgtggaaatccccttctccttctattacccctgggagttagccacagctcccgacgtgagaatatcctggagacggggccacttccacaggcagtccttctacagcacaaggccgccttccattcacaaggattatgtgaaccggctctttctgaactggacagagggtcagaagagcggcttcctcaggatctccaacctgcagaagcaggaccagtctgtgtatttctgccgagttgagctggacacacggagctcagggaggcagcagtggcagtccatcgaggggaccaaactctccatcacccaggggaacccttccaaaacacagaggagccatatgagaatatcaggaatgaaggacaaaatacagatcccaagctaaatcccaaggatgacggcatcgtctatgcttcccttgccctctccagctccacctcacccagagcacctcccagccaccgtcccctcaagagcccccagaacgagaccctgtactctgtcttaaaggcctaaccaatggacagccctctcaagactgaatggtgaggccaggtacagtggcgcacacctgtaatcccagctactctgaagcctgaggcagaatcaagtgagcccaggagttcagggccagctt

SEQ ID NO: 15652 - DNA, 1011 bp, Homo sapiens
  source 1..1011: mol_type = unassigned DNA
acagccctcttcggagcctgagcccggctctcctcactcacctcaacccccaggcggcccctccacagggcccctctcctgcctggacggctctgctggtctccccgtcccctggagaagaacaaggccatgggtcggcccctgctgctgcccctactgcccttgctgctgccgccagcatttctgcagcctagtggctccacaggatctggtccaagctacctttatggggtcactcaaccaaaacacctctcagcctccatgggtggctctgtggaaatccccttctccttctattacccctgggagttagccacagctcccgacgtgagaatatcctggagacggggccacttccacaggcagtccttctacagcacaaggccgccttccattcacaaggattatgtgaaccggctctttctgaactggacagagggtcagaagagcggcttcctcaggatctccaacctgcagaagcaggaccagtctgtgtatttctgccgagttgagctggacacacggagctcagggaggcagcagtggcagtccatcgaggggaccaaactctccatcacccagggtcagcagcggactaaagccacaaccccagccagggaacccttccaaaacacagaggagccatatgagaatatcaggaatgaaggacaaaatacagatcccaagctaaatcccaaggatgacggcatcgtctatgcttcccttgccctctccagctccacctcacccagagcacctcccagccaccgtcccctcaagagcccccagaacgagaccctgtactctgtcttaaaggcctaaccaatggacagccctctcaagactgaatggtgaggccaggtacagtggcgcacacctgtaatcccagctactctgaagcctgaggcagaatcaagtgagcccaggagttcagggccagctttgataatggagcgagatgccatctctagttaaaaatatatattaacaataaagtaacaaatttaaaaa

SEQ ID NO: 15653 - DNA, 683 bp, Homo sapiens
  source 1..683: mol_type = unassigned DNA
gtggctccacaggatctggtccaagctacctttatggggtcactcaaccaaaacacctctcagcctccatgggtggctctgtggaaatccccttctccttctattacccctgggagttagccacagctcccgacgtgagaatatcctggagacggggccacttccacaggcagtccttctacagcacaaggccgccttccattcacaaggattatgtgaaccggctctttctgaactggacagagggtcagaagagcggcttcctcaggatctccaacctgcagaagcaggaccagtctgtgtatttctgccgagttgagctggacacacggagctcagggaggcagcagtggcagtccatcgaggggaccaaactctccatcacccaggggacctgcagggacggacactctcgctgcctgcgccctggtaaaccactgcaccatcttaaccactgtgttggttttggagcagatggaaagtggctccataatctaaatgaagcaagacagccttgaactttgatttcctacatatttccttaaatggccttttttgagagatttgggtttttctcaggccttctcttcctctttccttaattcctgcttgcttttctcacctctctgcataggtcagatttgttgtttttttcactaataaattgtattttcaattaattc

SEQ ID NO: 15654 - DNA, 2369 bp, Homo sapiens
  source 1..2369: mol_type = unassigned DNA
agcggaccgacgcgacacgccgtgcgcctccgcggctgcgctacgaaaacgagtcccggagcggccccgcgcccgccgcacccggccctcgcccgcccgaagacaggcgccaagctgccccgccgtctccccagctagcgcccggccgccgccgcctcgcgggccccgggcggaagggggcggggtcccgattcgccccgcccccgcggagggatacgcggcgccgcggcccaaaacccccgggcgaggcggccggggcgggtgaggcgctccgcctgctgcgcgtctacgcggtccccgcgggccttccgggcccactgcgccgcgcggaccgcctcgggctcggacggccggtgtccccggcgcgccgctcgcccggatcggccgcggcttcggcgcctggggctcggggctccggggaggccgtcgcccgcgatgctgctctccaagttcggctccctggcgcacctctgcgggcccggcggcgtggaccacctcccggtgaagatcctgcagccagccaaggcggacaaggagagcttcgagaaggcgtaccaggtgggcgccgtgctgggtagcggcggcttcggcacggtctacgcgggtagccgcatcgccgacgggctcccggtggctgtgaagcacgtggtgaaggagcgggtgaccgagtggggcagcctgggcggcgcgaccgtgcccctggaggtggtgctgctgcgcaaggtgggcgcggcgggcggcgcgcgcggcgtcatccgcctgctggactggttcgagcggcccgacggcttcctgctggtgctggagcggcccgagccggcgcaggacctcttcgactttatcacggagcgcggcgccctggacgagccgctggcgcgccgcttcttcgcgcaggtgctggccgccgtgcgccactgccacagctgcggggtcgtgcaccgcgacattaaggacgaaaatctgcttgtggacctgcgctccggagagctcaagctcatcgacttcggttcgggtgcgctgctcaaggacacggtctacaccgacttcgacggcacccgagtgtacagccccccggagtggatccgctaccaccgctaccacgggcgctcggccaccgtgtggtcgctgggcgtgcttctctacgatatggtgtgtggggacatccccttcgagcaggacgaggagatcctccgaggccgcctgctcttccggaggagggtctctccagagtgccagcagctgatccggtggtgcctgtccctgcggccctcagagcggccgtcgctggatcagattgcggcccatccctggatgctgggggctgacgggggcgtcccggagagctgtgacctgcggctgtgcaccctcgaccctgatgacgtggccagcaccacgtccagcagcgagagcttgtgaggagctgcacctgactgggagctaggggaccacctgccttggccagacctgggacgcccccagaccctgactttctcctgcgtgggccgtctcctcctgcggaagcagtgacctctgacccctggtgaccttcgctttgagtgccttttgaacgctggtcccgcgggacttggttttctcaagctctgtctgtccaaagacgctccggtcgaggtcccgcctgccctgggtggatacttgaaccccagacgcccctctgtgctgctgtgtccggaggcggccttcccatctgcctgcccacccggagctctttccgccggcgcagggtcccaagcccacctcccgccctcagtcctgcggtgtgcgtctgggcacgtcctgcacacacaatgcaagtcctggcctccgcgcccgcccgcccacgcgagccgtacccgccgccaactctgttatttatggtgtgaccccctggaggtgccctcggcccaccggggctatttattgtttaatttatttgttgaggttatttcctctgagcagtctgcctctcccaagccccaggggacagtggggaggcaggggagggggtggctgtggtccagggaccccaggccctgattcctgtgcctggcgtctgtcccggccccgcctgtcagaagatgaacatgtatagtggctaacttaaggggagtgggtgaccctgacacttccaggcactgtgcccagggtttgggttttaaattattgactttgtacagtctgcttgtgggctctgaaagctggggtggggccagagcctgagcgtttaatttattcagtacctgtgtttgtgtgaatgcggtgtgtgcaggcatcgcagatgggggttctttcagttcaaaagtgagatgtctggagatcatatttttttatacaggtatttcaattaaaatgtttttgtacatagtggataa

SEQ ID NO: 15655 - DNA, 723 bp, Homo sapiens
  source 1..723: mol_type = unassigned DNA
gggcgggtgaggcgctccgcctgctgcgcgtctacgcggtccccgcgggccttccgggcccactgcgccgcgcggaccgcctcgggctcggacggccggtgtccccggcgcgccgctcgcccggatcggccgcggcttcggcgcctggggctcggggctccggggaggccgtcgcccgcgatgctgctctccaagttcggctccctggcgcacctctgcgggcccggcggcgtggaccacctcccggtgaagatcctgcagccaggtacgcgcggggccggcggggccggggccggggccagggcggggaccgggggcgccccgggccgcaccaaccccgcccgcgcctccctgcagccaaggcggacaaggagagcttcgagaaggcgtaccaggtgggcgccgtgctgggtagcggcggcttcggcacggtctacgcgggtagccgcatcgccgacgggctcccggtggctgtgaagcacgtggtgaaggagcgggtgaccgagtggggcagcctgggcggcgcgaccgtgcccctggaggtggtgctgctgcgcaaggtgggcgcggcgggcggcgcgcgcggcgtcatccgcctgctggactggttcgagcggcccgacggcttcctgctggtgctggagcggcccgagccggcgcaggacctcttcgactttatcacggagcgcggcgccctggacgagccgctggcgcgccgcttct

SEQ ID NO: 15656 - DNA, 1094 bp, Homo sapiens
  source 1..1094: mol_type = unassigned DNA
cgccgagggactgcagagccacccacccccgtggctcctactgcgcacgcgtgaaaaaagccaggttgaggggaacgggggagcttcgggcgtagagtgtggggagtgggggatctggtgcaaattagggtgcgtgaaagaagtcacaaaaagcgcagaggccaggcttcccgccctaatccggcctttgtctccgcccctctgcctttgtttcggcccaagcgtcttattggtcagacatcttcagccccattggtccaagagccaaaggacggggtctgccccaagctgtgcctgcttccggagccgcaataagaacggtcaattgagatgcggctttcaggcatttgtttaggacatgcccatggcggggcttctaaaggggcttgtacggcaactggagcggttcagcgttcaacaacaagcttccaagatgccgcccaaaggaaaaagtggttctggaaaagcggggaaagcttgtcaactatcattagtgttagcgtattttgtgtggcccaagataattcttccattgtggcccagggaagctgaaaggttggatacccttgttgtaaagtgtctggccgagttcccttttgaagtgtggcgttatgatggaaatatccactccggttgtgtgttggacctttctgtaaacatggaggtgcagtttaaatgagtacctgtcatctcttctctaaagggggagcagcctctgggagtgacagtgctgacaagaaggctcaaggtcccaaaggtggtggcaatgcagtaaaggtcagacacattctatgtgaaaaacatggcaaaatcatggaagccatggaaaagttaaagtctgggatgagattcaatgaagtggccgcacagtatagtgaagataaagccaggcaaggggtatgttgctcttattatttataattttctctcaaggtaagaaagcaaagtaaaaatgacaaataataaaataagataaaaattctccatcctccacagaagaaacacagaagtagggatcattcctttgttcaaccattggttgtagcgatattttggtttaaagatctcaaaagcagaaatgtccaacttgtaaa

SEQ ID NO: 15657 - DNA, 1780 bp, Homo sapiens
  source 1..1780: mol_type = unassigned DNA
aattgagatgcggctttcaggcatttgtttaggacatgcccatggcggggcttctaaaggggcttgtacggcaactggagcggttcagcgttcaacaacaagcttccaagatgccgcccaaaggaaaaagtggttctggaaaagcggggaaagggggagcagcctctgggagtgacagtgctgacaagaaggctcaaggtcccaaaggtggtggcaatgcagtaaaggtcagacacattctatgtgaaaaacatggcaaaatcatggaagccatggaaaagttaaagtctgggatgagattcaatgaagtggccgcacagtatagtgaagataaagccaggcaaggggtatgttgctcttattatttataattttctctcaaggtaagaaagcaaagtaaaaatgacaaataataaaataagataaaaattctccatcctccacagaagaaacacagaagtagggatcattcctttgttcaaccattggttgtagcgatattttggtttaaagatctcaaaagcagaaatgtccaacttgtaaatagtagaataagggtcatctatgtcaaaacctatgcatgaccaaacttgcacggctaacttcaaagtccagcagtgttgagagtacttatgtgttcagtctagttagacttcttctacctatttgtccttattgagcctattcctgtattgctcttaggaatatacctcgtaaccttagcaaaatgttgggaaattctctcaagctacagtagaactgttccctcttctgggccacttgatatcacttatcttttgggtttttcagggtgacttgggttggatgaccagagggtccatggtgggaccatttcaagaagcagcatttgccttgcctgtaagtgggatggataagcctgtgtttacagacccaccggttaagacaaaatttggatatcatattattatggtcgaaggaagaaaataaaatcatatgaaagactgaataagttttatacattttgtttctttaaaaggtattacatattcttttgagctggagctgcaaggaaatacaaaaatttttaaaaagaaaagatattggatgctccttgtattctgtgaaagctctaagtatgggtttgtaggtgtaagagagggtggggctaagtgaatgtcaactgtagtaggtattcagtcagtctttctcaaagagaagtcaagcagactccctttaacctgtattctctttcctcccagaactatatctgactctcagtctgtcccataaattaattcagaaaccatcttcaggggaagcagatatcaactcacactattcacacaactgaaaatattgggcatcaaatagattagtgtgtgagaatcataaaataagttcctagacaacatttgttttacatgttagtcaactctgatcttccaggacaggtggtattagctccactgtcttaacatagtacgtggcacgttatgcctttcagtgttaactcctttctttttaaataaatgtttattggaggaaaaaagcactcagttgttccatgagttgttttgtactagactaaccgagtgctggttaaagggagggatgtcagcataaaaatgtcattccctcatcttcagtgtatgggttacattaagactgtcctttccagggccaatgttctgtgcatctaaatttttaaaatttaaaatgccatatttatgacatataaaaaagtataaagattactaatataaatactatactgcttcaaaaataaaactttgccaac

SEQ ID NO: 15658 - DNA, 1321 bp, Homo sapiens
  source 1..1321: mol_type = unassigned DNA
tgagatgcggctttcaggcatttgtttaggacatgcccatggcggggcttctaaaggggcttgtacggcaactggagcggttcagcgttcaacaacaagcttccaagatgccgcccaaaggaaaaagtggttctggaaaagcggggaaagggggagcagcctctgggagtgacagtgctgacaagaaggctcaaggtcccaaaggtggtggcaatgcagtaaaggtcagacacattctatgtgaaaaacatggcaaaatcatggaagccatggaaaagttaaagtctgggatgagattcaatgaagtggccgcacagtatagtgaagataaagccaggcaagggggtgacttgggttggatgaccagagggtccatggtgggaccatttcaagaagcagcatttgccttgcctgtaagtgggatggataagcctgtgtttacagacccaccggttaagacaaaatttggatatcatattattatggtcgaaggaagaaaataaaatcatatgaaagactgaataagttttatacattttgtttctttaaaaggtattacatattcttttgagctggagctgcaaggaaatacaaaaatttttaaaaagaaaagatattggatgctccttgtattctgtgaaagctctaagtatgggtttgtaggtgtaagagagggtggggctaagtgaatgtcaactgtagtaggtattcagtcagtctttctcaaagagaagtcaagcagactccctttaacctgtattctctttcctcccagaactatatctgactctcagtctgtcccataaattaattcagaaaccatcttcaggggaagcagatatcaactcacactattcacacaactgaaaatattgggcatcaaatagattagtgtgtgagaatcataaaataagttcctagacaacatttgttttacatgttagtcaactctgatcttccaggacaggtggtattagctccactgtcttaacatagtacgtggcacgttatgcctttcagtgttaactcctttctttttaaataaatgtttattggaggaaaaaagcactcagttgttccatgagttgttttgtactagactaaccgagtgctggttaaagggagggatgtcagcataaaaatgtcattccctcatcttcagtgtatgggttacattaagactgtcctttccagggccaatgttctgtgcatctaaatttttaaaatttaaaatgccatatttatgacatataaaaaagtataaagattactaatataaatactatactgcttcaaaaataaaactttgccaacacagcta

SEQ ID NO: 15659 - DNA, 678 bp, Homo sapiens
  source 1..678: mol_type = unassigned DNA
gttcaacaacaagcttccaagatgccgcccaaaggaaaaagtggttctggaaaagcggggaaagggggagcagcctctgggagtgacagtgctgacaagaaggctcaaggtcccaaaggtggtggcaatgcagtaaaggtcagacacattctatgtgaaaaacatggcaaaatcatggaagccatggaaaagttaaagtctgggatgagattcaatgaagtggccgcacagtatagtgaagataaagccaggcaagggattcccagcctgcagcaacatgctggtcaccatagagacctgagaagcaccctcatctcattggtatcatatttacaaaccaccccttaaagtggattattttgcagatggctgatctcatctattcaatgttgattctattagttccaatttcagaaggtgacattttctgactttgtccccttaagcacaaacaaaaactatggatttttgtttttgttttcagaaaagagaaagtacaaggtgtgcttggggaacagcaaggaaaccagacagatgtgggggcgggtttgtaggggaactgctggatgtacctcattaatttgttcatttgttcagcacccacagggtgccagtgaacgggctaggtgctggggatagagtggtgaacaagatgagccttatgcacctcacagtctc

SEQ ID NO: 15660 - DNA, 577 bp, Homo sapiens
  source 1..577: mol_type = unassigned DNA
gttcaacaacaagcttccaagatgccgcccaaaggaaaaagtggttctggaaaagcggggaaagggggagcagcctctgggagtgacagtgctgacaagaaggctcaaggtcccaaaggtggtggcaatgcagtaaaggtcagacacattctatgtgaaaaacatggcaaaatcatggaagccatggaaaagttaaagtctgggatgagattcaatgaagtggccgcacagtatagtgaagataaagccaggcaaggggccttcagactccgatgaattacaccactggcttgcctggttctccagcttgcagacagaagactgtgggacttctcagcctctataatcttctccttcccagctagccactcacaaccccgccatgggcctcagaattgctaaagggacatcagaccatactacacatcattagatctcaatgaagaacacctctagttggcccgtctctttgtgaggtgccacccttgacatcaagtgcaggcctcgacgttgttggcatttcagagccttggcagaagttggataaattggcgggaagtgatgctgccagctggag

SEQ ID NO: 15661 - DNA, 776 bp, Homo sapiens
  source 1..776: mol_type = unassigned DNA
caaaggaaaaagtggttctggaaaagcggggaaaggtagagcggccagagcgatcaaggagaatgggggcgggtgaggagcgaagggagggaacagacagtccatctccggagtccgggacggacgcagcagggggagcagcctctgggagtgacagtgctgacaagaaggctcaaggtcccaaaggtggtggcaatgcagtaaaggtcagacacattctatgtgaaaaacatggcaaaatcatggaagccatggaaaagttaaagtctgggatgagattcaatgaagtggccgcacagtatagtgaagataaagccaggcaaggggtatgttgctcttattatttataattttctctcaaggtaagaaagcaaagtaaaaatgacaaataataaaataagataaaaattctccatcctccacagaagaaacacagaagtagggatcattcctttgttcaaccattggttgtagcgatattttggtttaaagatctcaaaagcagaaatgtccaacttgtaaatagtagaataagggtcatctatgtcaaaacctatgcatgaccaaacttgcacggctaacttcaaagtccagcagtgttgagagtacttatgtgttcagtctagttagacttcttctacctatttgtccttattgagcctattcctgtattgctcttaggaatatacctcgtaaccttagcaaaatgttgggaaattctctcaagctacagtagaactgttccctcttctgggccacttgatatcacttatctt

SEQ ID NO: 15662 - DNA, 1605 bp, Homo sapiens
  source 1..1605: mol_type = unassigned DNA
aattgagatgcggctttcaggcatttgtttaggacatgcccatggcggggcttctaaaggggcttgtacggcaactggagcggttcagcgttcaacaacaagcttccaagatgccgcccaaaggaaaaagtggttctggaaaagcggggaaagggggagcagcctctgggagtgacagtgctgacaagaaggctcaaggtcccaaaggtggtggcaatgcagtaaaggtcagacacattctatgtgaaaaacatggcaaaatcatggaagccatggaaaagttaaagtctgggatgagattcaatgaagtggccgcacagtatagtgaagataaagccaggcaagggattcccagcctgcagcaacatgctggtcaccatagagacctgagaagcaccctcatctcattggtatcatatttacaaaccaccccttaaagtggattattttgcagatggctgatctcatctattcaatgttgattctattagttccaatttcagaaggtgacattttctgactttgtccccttaagcacaaacaaaaactatggatttttgtttttgttttcagaaaagagaaagtacaaggtgtgcttggggaacagcaaggaaaccagacagatgtgggggcgggtttgtaggggaactgctggatgtacctcattaatttgttcatttgttcagcacccacagggtgccagtgaacgggctaggtgctggggatagagtggtgaacaagatgagccttatgcacctcacagtctcctgggggagacagccaaatagacaattttaatacaatgtggcaaattctatgatgggaagaagagagaaatggtgtgtgtgagtccctcaccttcccagaggtttcccaggggaagcaacgtttcagctgagacctgaaggatggatgacagtccaccagaaaaaagttagtggagcggggacaagcagggttgcagagtggaagaaaaatgttcctgtgagaagaaactgtccaaagagtctgaagagaaaagggaacagggtgaatttgaggccctacaagaaaaacaggagaccattcaacaggagacgcccagggagcaggtggctttgtgggcctgatgtccaagaaagaagtcgtggtggtaaacagagacttgggattgcaagctactgttgtctttctattgaaaaaatagctgagcaccacactagggaggccttgcaaggacagcccaaagaatttgaacttgattctacaggcagtgattttgaacaagaggttttgaagagaacgtgacacacgtcaagctgagctctagggagtgggcagcagcctgcagaagagggactaggctaggagcacagaaagtagcccacggcagaggtagcagaaggaatggaggagtgcccatgtgaggggtactgaggtggcacacttgccagaatcagggcagcctgcttggtctcataccagctggaaccagttcctaccagctcccaagggctaattgttaaactttcaggaattttctcagcattcattaaaaatgaaaaaaagtatcaatattaaaaatatttttgctggacatggtgtctcaggcctgtaatcccagct

SEQ ID NO: 15663 - DNA, 3802 bp, Homo sapiens
  source 1..3802: mol_type = unassigned DNA
gcggcgggcgcaggatacgggccggggcgcgagccgagcgcagtctgccgggccgagcgggcggagcgagccgagtggggctgagcgcgccggcggcggcgggcggagcggagcgcggcgcgccggggccgccgccggggggatgcggctgcctccccgggccggggtgtagagagggcgggtccccggcctcgggagcacggcggtggaggggacataggaggcggccatggcgacccccggcaacctagggtcctctgtcctggcgagcaagaccaagaccaagaagaagcacttcgtagcgcagaaagtgaagctgtttcgggccagcgacccgctgctcagcgtcctcatgtggggggtaaaccactcgatcaatgaactgagccatgttcaaatccctgttatgttgatgccagatgacttcaaagcctattcaaaaataaaggtggacaatcacctttttaacaaagaaaacatgccgagccatttcaagtttaaggaatactgcccgatggtcttccgtaacctgcgggagaggtttggaattgatgatcaagatttccagaattccctgaccaggagcgcacccctccccaacgactcccaggcccgcagtggagctcgttttcacacttcctacgacaaaagatacatcatcaagactattaccagtgaagacgtggccgaaatgcacaacatcctgaagaaataccaccagtacatagtggaatgtcatgggatcacccttcttccccagttcttgggcatgtaccggcttaatgttgatggagttgaaatatatgtgatagttacaagaaatgtattcagccaccgtttgtctgtgtataggaaatacgacttaaagggctctacagtggctagagaagctagtgacaaagaaaaggccaaagaactgccaactctgaaagataatgatttcattaatgagggccaaaagatttatattgatgacaacaacaagaaggtcttcctggaaaaactaaaaaaggatgttgagtttctggcccagctgaagctcatggactacagtctgctggtgggaattcatgatgtggagagagccgaacaggaggaagtggagtgtgaggagaacgatggggaggaggagggcgagagcgatggcacccacccggtgggaacccccccagatagccccgggaatacactgaacagctcaccacccctggctcccggggagttcgatccgaacatcgacgtctatggaattaagtgccatgaaaactcgcctaggaaggaggtgtacttcatggcaattattgacatccttactcattatgatgcaaaaaagaaagctgcccatgctgcaaaaactgttaaacatggcgctggcgcggagatctccaccgtgaacccagaacagtattcaaagcgctttttggactttattggccacatcttgacgtaacctcctgcgcagcctcggacagacatgaacattggatggacagaggtggcttcggtgtaggaaaaatgaaaaccaaactcagtgaagtactcatcttgcaggaagcaaacctccttgtttacatcttcaggccaagatgactgatttgggggctactcgctttacagctacctgattttcccagcatcgttctagctatttctgactttgtgtatatgtgtgtgtgtgtgtgttgggggggggtgagtgtgtgcgcgcgtgtgcattttaaaagtcataaattaattaaaacagatccacttcggtcagtatgtgtcccaacaaagaccctttgattccagctatggccgaatgaatgagtgagtgagtgagtgagtgaatgaacacacgtgtgggggaggggagaaggaagtgcatgatgtcaggcaccgtgttggcatcacacaacaaactgtggatcagttttttttttttttttttttttttggagttgaaagatgtgagacagtattcagaataatgaagataataatgatgattattataataatgatgatgattccaaggaaaaaacctacagcgaatgttccatttctaccccgcacgcagacactctccctaacactgataacctgagcccccagcactggacggaagaatgctggcgtctccgtgtgtactggttcagggttctggccccagccttgtcaggaccccctggtgtccagagcccccacccctcccgcaacaagcagctgatgccccagtgattctctatacatttttcacctcggccaatatgtccaggaaaactgcttacttctcttttcttgcctggagccttcattgttcacccttacgttgcaatataggaattaatgctacaaaataaaagtaaagcttacctgaaaagtgcatagtttggggcaatggtatctacatctcccactgtgggaaaaccagcaaagcatcaaaactctcaattctcctgttaccaaatgcagatctgaattataagatgtttatgtttgaccattgtttcaacaatgggattttgttacgaattatccctttaactgaaaccctcagttttactgtttacattattaggaaaacagggatatcttttgaatctaaaaatttgatgtacagcatgtgatttttgaagtttacatgtaaagtcacagtataggtgaaataacgtttgtcatattttgagacgtatcctgcagccatgtttttacgtgagtgttttagtcaaagtacatggtagacagtctttcacaataaaaggaaaaggatttttttttcctccaaatgtacatttatcaacctaatgattgatttttttaaaaagagatttcgccccagtctggtttatgaaagttcattgccctaaactgtgctgattgtttttaatcaagttataaatttccaacctagatcatgtatctaccaactctcctgcattttccaaaaggcattgagcttaaatattagtcttgcttagagtaggttatccacttacatgctgcgctaaagccatgcctttgaaactccttgtttaaaacatgatatgatttttgtgggcagtttcagaaaagaaaacaaacaaacaaaaatcgaccctttaattattacttgcaactcaacagatctccctgccgtactgccttttccaggaactttacttcagggctgtccagattgcagctgtgccccgtgtatgtggatctagttcacagagtctttggaagccagcagtcgtgccctccgtatactgtccactcattttatgtagatttggtatcctcagcagccagtgttaacaccactgtcacgtagtgtacagattcatcttttatgtatttaaagtaatccatactatgatttggtttttccctgcaccattaattctggcatcagatcagtttttgtgttgtgaagttctactgtggtttgacccaagaccacaaccatgagaccctgaagtaaagataaggtacacatacattatttgagtaactgtttccttgggggccaatctgtgtatgcttttagaagtttacagaatgcttttatttttgtctataacaaacagtctgtcatttatttctgttgataaaccatttggacagagtgaggacgtttgccctgttatctcctagtgctaacaatacactccagtcatgagccgggctttacaaataaagcacttttgatgactcacaagatgaatccttttttcctctgtcccaattgtgtgtctctgttccaaacacattttaaatactcggtcctgacagtgtctttagctaatccttgaagaaatgaaagtggaattgaatcttt

SEQ ID NO: 15664 - DNA, 1319 bp, Homo sapiens
  source 1..1319: mol_type = unassigned DNA
ttcctacgacaaaagatacatcatcaagactattaccagtgaagacgtggccgaaatgcacaacatcctgaagaaataccaccagtacatagtggaatgtcatgggatcacccttcttccccagttcttgggcatgtaccggcttaatgttgatggagttgaaatatatgtgatagttacaagaaatgtattcagccaccgtttgtctgtgtataggaaatacgacttaaagatggccaatctaaaagccactttcacttttcccaagccaactggctctacagtggctagagaagctagtgacaaagaaaaggccaaagaactgccaactctgaaagataatgatttcattaatgagggccaaaagatttatattgatgacaacaacaagaaggtcttcctggaaaaactaaaaaaggatgttgagtttctggcccagctgaagctcatggactacagtctgctggtgggaattcatgatgtggagagagccgaacaggaggaagtggagtgtgaggagaacgatggggaggaggagggcgagagcgatggcacccacccggtgggaacccccccagatagccccgggaatacactgaacagctcaccacccctggctcccggggagttcgatccgaacatcgacgtctatggaattaagtgccatgaaaactcgcctaggaaggaggtgtacttcatggcaattattgacatccttactcattatgatgcaaaaaagaaagctgcccatgctgcaaaaactgttaaacatggcgctggcgcggagatctccaccgtgaacccagaacagtattcaaagcgctttttggactttattggccacatcttgacgtaacctcctgcgcagcctcggacagacatgaacattggatggacagaggtggcttcggtgtaggaaaaatgaaaaccaaactcagtgaagtactcatcttgcaggaagcaaacctccttgtttacatcttcaggccaagatgactgatttgggggctactcgctttacagctacctgattttcccagcatcgttctagctatttctgactttgtgtatatgtgtgtgtgtgtgtgttgggggggggtgagtgtgtgcgcgcgtgtgcattttaaaagtcataaattaattaaaacagatccacttcggtcagtatgtgtcccaacaaagaccctttgattccagctatggccgaatgaatgagtgagtgagtgagtgagtgaatgaacacacgtgtgggggaggggagaaggaagtgcatgatgtcaggcaccgtgttggcatcacacaacaaactgtggatcagt

SEQ ID NO: 15665 - DNA, 559 bp, Homo sapiens
  source 1..559: mol_type = unassigned DNA
gcgcatcactaggatgttacacaaattcttttttgtttgaaaaatgttccagagataaaagtgcaaaagaagataatgaagtgttctaatatgaaatattcaaaactgaagcatgattgtctgcttaagacacttcccaagtatacaggattaatatttcttttctcacagctggcgcggagatctccaccgtgaacccagaacagtattcaaagcgctttttggactttattggccacatcttgacgtaacctcctgcgcagcctcggacagacatgaacattggatggacagaggtggcttcggtgtaggaaaaatgaaaaccaaactcagtgaagtactcatcttgcaggaagcaaacctccttgtttacatcttcaggccaagatgactgatttgggggctactcgctttacagctacctgattttcccagcatcgttctagctatttctgactttgtgtatatgtgtgtgtgtgtgtgttgggggggggtgagtgtgtgcgcgcgtgtgcattttaaaagtcataaattaattaaaacagatccacttcggtca

SEQ ID NO: 15666 - DNA, 1436 bp, Homo sapiens
  source 1..1436: mol_type = unassigned DNA
gcagctgctgcggggcggggagccggagtcagccctggacctccggctgctcgcccgcctcgaagcccccagccccgcggcgcgtgcccccagccctctgggccgcccaggcaccaccacttgcgtcccctttagatctatggcccggtgcgggtcgggggtcccgtgtgcatatcaatgaactgagccatgttcaaatccctgttatgttgatgccagatgacttcaaagcctattcaaaaataaaggtggacaatcacctttttaacaaagaaaacatgccgagccatttcaagtttaaggaatactgcccgatggtcttccgtaacctgcgggagaggtttggaattgatgatcaagatttccagaattccctgaccaggagcgcacccctccccaacgactcccaggcccgcagtggagctcgttttcacacttcctacgacaaaagatacatcatcaagactattaccagtgaagacgtggccgaaatgcacaacatcctgaagaaataccaccagtacatagtggaatgtcatgggatcacccttcttccccagttcttgggcatgtaccggcttaatgttgatggagttgaaatatatgtgatagttacaagaaatgtattcagccaccgtttgtctgtgtataggaaatacgacttaaagggctctacagtggctagagaagctagtgacaaagaaaaggccaaagaactgccaactctgaaagataatgatttcattaatgagggccaaaagatttatattgatgacaacaacaagaaggtcttcctggaaaaactaaaaaaggatgttgagtttctggcccagctgaagctcatggactacagtctgctggtgggaattcatgatgtggagagagccgaacaggaggaagtggagtgtgaggagaacgatggggaggaggagggcgagagcgatggcacccacccggtgggaacccccccagatagccccgggaatacactgaacagctcaccacccctggctcccggggagttcgatccgaacatcgacgtctatggaattaagtgccatgaaaactcgcctaggaaggaggtgtacttcatggcaattattgacatccttactcattatgatgcaaaaaagaaagctgcccatgctgcaaaaactgttaaacatggcgctggcgcggagatctccaccgtgaacccagaacagtattcaaagcgctttttggactttattggccacatcttgacgtaacctcctgcgcagcctcggacagacatgaacattggatggacagaggtggcttcggtgtaggaaaaatgaaaaccaaactcagtgaagtactcatcttgcaggaagcaaacctccttgtttacatcttcaggccaagatgactgatttgggggctactcgctttacagctacctgattttcccagca

SEQ ID NO: 15667 - DNA, 443 bp, Homo sapiens
  source 1..443: mol_type = unassigned DNA
gtgaagacgtggccgaaatgcacaacatcctgaagaaataccaccagtacatagtggaatgtcatgggatcacccttcttccccagttcttgggcatgtaccggcttaatgttgatggagttgaaatatatgtgatagttacaagaaatgtattcagccaccgtttgtctgtgtataggaaatacgacttaaagggctctacagtggctagagaagctagtgacaaagaaaaggccaaagaactgccaactctgaaagataatgatttcattaatgagggccaaaagatttatattgatgacaacaacaagaaggtcttcctggaaaaactaaaaaaggatgttgagtttctggcccagctgaagctcatggactacagtctgctggtgggaattcatgatgtggagagagccgaacaggaggaagtggagtgtgaggagaac

SEQ ID NO: 15668 - DNA, 768 bp, Homo sapiens
  source 1..768: mol_type = unassigned DNA
atcaatgaactgagccatgttcaaatccctgttatgttgatgccagatgacttcaaagcctattcaaaaataaaggtggacaatcacctttttaacaaagaaaacatgccgagccatttcaagtttaaggaatactgcccgatggtcttccgtaacctgcgggagaggtttggaattgatgatcaagatttccagaattccctgaccaggagcgcacccctccccaacgactcccaggcccgcagtggagctcgttttcacacttcctacgacaaaagatacatcatcaagactattaccagtgaagacgtggccgaaatgcacaacatcctgaagaaataccaccagtacatagtggaatgtcatgggatcacccttcttccccagttcttgggcatgtaccggcttaatgttgatggagttgaaatatatgtgatagttacaagaaatgtattcagccaccgtttgtctgtgtataggaaatacgacttaaagggctctacagtggctagagaagctagtgacaaagaaaagtctcccacccctgctattgtggttcttcctgttccccattctgctgccaccagcgagaaacactgtattgacccgatgagagttctacttcatttctcttcatcaaattgttgaatagtgaaacagttatttgttgcaagcatggttggaaggaacattccacatgcaacttgctcttgaaaaacacagccacctgtgcagtaaacctataatcgaaaatggcactgacagctg

SEQ ID NO: 15669 - DNA, 304 bp, Homo sapiens
  source 1..304: mol_type = unassigned DNA
atcaatgaactgagccatgttcaaatccctgttatgttgatgccagatgacttcaaagcctattcaaaaataaaggtggacaatcacctttttaacaaagaaaacatgccgagccatttcaagtttaaggaatactgcccgatggtcttccgtaacctgcgggagaggtttggaattgatgatcaagatttccaggtgagttgcgtttgtaacatttgcttccagtaggaaatgggttttgccatgacttttgctgtgtcaattgggatctgtatttttgtcaataaaagtattatataatagt

SEQ ID NO: 15670 - DNA, 558 bp, Homo sapiens
  source 1..558: mol_type = unassigned DNA
ttgattaactatgagaaacatatttttaagaaggcttatttttgggaagttagagttgtgttgtttgaggtgtgctcctgaaagctgtttactcaaacctttatgggtcaagttttgtgctgggagcagggtttcccttgtagtgaggagcttacacctggaaacatagcaaatgacgcaatgggagagccacctcactgtggaatcagcctcttctctctggtccttcatcctagaatttgcatccggtgtttctaacttctgctcagaaaccgtgaaaataatatattcatttaccgattgattcatccaaacaataattgggtacacactacataccaggttcaagcgattctcctgcctcagcctcccgagtagctgggattacaggcgcctgccaccatgccctgcccccattagcatcttgggggaatcaaaccaagaatctaccaacccttaagagccaactttagggacaagcaatgtcttcatcgagaggcacatcacatccccaaaggccaaattttggtgaacagtgactgtgtccattctttatat

SEQ ID NO: 15671 - DNA, 5080 bp, Homo sapiens
  source 1..5080: mol_type = unassigned DNA
ctcccttggccggcggcgcttgttgttcggcggcggcggtcgcagctcgggtccccctcgggcgcccccgccgccgtccgcgcgcggccatggagctggaggtaccggacgaggcggagagcgctgaggcgggggccgtgccctcggaggcggcgtgggcggcagagagcggggcggcggcaggtttggctcagaagaaggcggccccaacagaggttctgtccatgacggcacagccgggccctggccatgggaagaagttgggccatcgaggtgtggacgcatccggcgaaaccacctacaagaagaccacctcctccaccctgaagggtgccatccagctgggcatcggctacaccgtgggccacctgagctccaagcccgaacgcgacgtgctcatgcaggacttctacgtggtggagagcatcttcttccccagcgaaggcagcaacctcacccccgcccaccacttccaggacttccgcttcaagacctatgcacctgtcgccttccgctacttccgggagctctttgggatccggccagatgattacttgtactccctgtgcaatgagccgctgatcgagctgtccaacccgggcgccagtggctccctcttctacgtcaccagcgacgacgagttcatcatcaagaccgtcatgcacaaggaggccgagttcctgcagaagctgctccctggctactacatgaacctcaaccagaacccgcggacgctgctgcccaagttctatgggctgtactgcgtgcagtcggggggcaagaacatccgcgtcgtggtcatgaacaacatcctgccccgcgtggtcaagatgcacctcaagttcgacctcaagggctccacctacaagcggcgcgccagcaagaaggagaaggagaagagcttccccacctacaaggacctggacttcatgcaggacatgcccgaggggctcctgctggacgccgacaccttcagcgccctggtcaagacgctgcagcgggactgcctggtcctggaaagtttcaagatcatggactacagcctgctgctgggcgtgcacaacatcgaccagcacgagcgcgagcggcaggcgcagggcgcccagagcacctcagatgagaagcggcctgtgggccagaaggcgctctactccacggccatggagtccatccagggtggcgccgcgcgcggggaggccatcgaatcggatgacacgatgggcgggatccccgctgtgaacggccgcggggagcggctgctgctgcacattggcatcatcgacatcctgcagtcctacaggttcatcaagaaactggagcacacctggaaggccctcgtccacgatggggacacggtgtccgtccaccgccccagcttctatgccgagcgctttttcaagttcatgagcaacacggtctttcggaagaactcctccctgaagtcctcgccctccaagaaggggcgcggcggagccttgctagctgtgaaaccgctggggcccaccgctgccttctcggccagccagatccctagcgagcgggaggaggcccagtacgacctgcggggggcccgcagctaccccacgctggaggacgaaggccggcccgacctcctgccctgcacgccaccttctttcgaagaagccactacagcctccattgccacgactctgtcatccacatccctctccattcctgagcggtccccctcggagacgtcggagcagccgcggtacaggcggcgcacacagtcgtctggacaggatggcaggccgcaggaggagccacccgcggaagaggatctgcagcagattacagtgcaggtggagcctgcgtgcagcgtggagattgtggtccccaaagaggaggacgcaggggtggaggcttccccggccggtgcctctgctgctgttgaagtagaaactgccagccaggcctcagacgaggagggcgcacctgccagccaggcctcggacgaggaggacgcgcccgccaccgacatctactttcccaccgatgagaggagctgggtgtactccccgctccactatagcgcccaggcccccccggcctccgacggcgagagcgacacataatttctatgcagcccccgacccagagccgagctccacttctgctccggctgcccccgaaggcgctgcccaccccgctgaggcccagagctcgggagatgcccgcctcgccgccccaccggacctcgtcctccccctgcacggatgccgacggccgggcccctccccgacaagcctcccagggccccggcaccccggtcggcagcctgcccctgtgagacccaccctcccgagcggccaatcgcatttgagtccttatttggcacagagacggaagcacgtgtgtgccgttttaggaaaagaacaaaaaagacacaaacaaaccaaccagagggagaagagcccctgcccactgcactctttggttctctgctgtgcctgcctgtgtcctgaggaagaagccaggctgttcgcggtggcctctggggacctgagccccgggggccccatcggcctgcagaggggacggctggggtcccgagcaactctgcctccatccacgtgggaagcggaccctcctgccctcagcttgggtttgggggcctcagtgcaggacatctggcctgaacatcgactgtggggacagccctcgccctgccaagcactgcggccactcagcagctatgttcccgccgcagtggggccctgacgcccacctcccaggtgcccctcgagcaaaaacctctggcgcctccaatccagacccaccacagctggagggccaggcctcctcttccccaggctgccacccacgctggcggagctcagggctggggacttgtccttctcttccaacgtaggccactcagcaactggcatggagggcccaggcaacggagacgttttctccatggcaggacagagcgggaggccgggccttgggccacaggagaccagctcagggcggaaggtcaggctccccgccccctccacgtggagacatggcctagggggccaggcccggctccacaggagtctccttcaggactggtgtggatgtccgccgcctctttcttgtttaagtgatgtgatgtctccgaggaggggagagaagactttgtttccgactcatcaccctccaagagggcagcgctcccagtggtgggactcagcccagactgccctggggcagcttcctgggcccgctgcgctcagagggtgctggttggaggccagagctcggcagagtcacccaccctgcccttccccaggacccctgagaggggcttattggtgatggctgtgggaatcccccacttccaagatgtgcccaggatgtgaggagctggagtggaagctgcacctttgggaagaattcctctccagacctggcagagcctggtgtggggtctgagacggccggagaacctcccaggcagggctctgtgttttgtctgttacaacctccgtatgacgccacgccacccgctgttcacgtcccgtcggcctcctgcacagcccacacgctgcgcccggaaggcccctgctgtggagaagccggacccatccccgaggtccccagcgaggacacacactccacgagagcagcccctccactctgcccaggagaggggccgaccctcctcgggaaccggccagccgcgtggctcccagcatccatcaggacaagcccacgtggggtcctccctgcgtgctcagagggtctgtccagccctgggaagcgaccttggcctcagttcacagcctggtgctcatctgctggcaccgggcatccacccatcagcccccgccctgtccctccgaaggacacccagcaggcaccccccggggaggcaggggcagaggtcagaaggggtgtctgggacctggatggccagcagggacaggggcattgtcatctcaaaggcccaacccccagaggccacaccagtcctcccagggagtcctcgagtcgccctgcccagagccctggcaccagagacgccaagagcctgtggggtgactcggagcagcaggtgtggccccgggcgggcggcaccgcgtccagggcagcctccctccgctgagtgacacgggacaccagtgcccggccgacgcgcctttgcaggagaaatgtgcaaacctctgtggataccatttcatttccattcttgtgttgtctccaaggcccttttggagatatacttggtgttggttgtgttttttggttccttttcagagaactgtaaaccgaggctgacgtgctccactgactgtgccgaggggcgggggcaggaggacggcaagacctatttataatatttagcgaactcggtctccctcagatcccccgcgagggaggctgctggacccaccccgctgtcccccatgatagaagtctgtaaataccttggtgaccaatgcccacttcccctcctgggtcacctctgatggctgctgtccactgagaacgtgggcagtgtccaaattcctgtactgtaaagactaaaaggcgtttgctctgagactgacaaggcggaaacttccatgtgtctcctgccaggctctgtccccctacgccatcccgacacgtccccgttcccccgaaacctggctcagtgcaatactcccattgccatggggtccttcaccatggtactgtctccacagccctcagtccccaccccaggagaggcgcctgccacctcctcctcatctccggtggttcaatcgctccgcctgtccccaacccagtcccatttttatggccaaactgattctgaaacaaaatgaaactgcaaacctcgtgtgtcttaactccccccagggatgccactccattcctccgccccgtggtctggtgcgtgacaatccaaagcgccgagacgagggtgctgtgtccctcaaacccagagtggtgggcgcctctgaaaccatacagccactcctggccccaaacactggtttgcatcccaggttcctcgcccacctacccccgccacaccccgtctttttagagatctctctaataaatcgggtaataagca

SEQ ID NO: 15672 - DNA, 2289 bp, Homo sapiens
  source 1..2289: mol_type = unassigned DNA
ggcgcttgttgttcggcggcggcggtcgcagctcgggtccccctcgggcgcccccgccgccgtccgcgcgcggccatggagctggaggtaccggacgaggcggagagcgctgaggcgggggccgtgccctcggaggcggcgtgggcggcagagagcggggcggcggcaggtttggctcagaagaaggcggccccaacagaggttctgtccatgacggcacagccgggccctggccatgggaagaagttgggccatcgaggtgtggacgcatccggcgaaaccacctacaagaagaccacctcctccaccctgaagggtgccatccagctgggcatcggctacaccgtgggccacctgagctccaagcccgaacgcgacgtgctcatgcaggacttctacgtggtggagagcatcttcttccccagcgaaggcagcaacctcacccccgcccaccacttccaggacttccgcttcaagacctatgcacctgtcgccttccgctacttccgggagctctttgggatccggccagatgattacttgtactccctgtgcaatgagccgctgatcgagctgtccaacccgggcgccagtggctccctcttctacgtcaccagcgacgacgagttcatcatcaagaccgtcatgcacaaggaggccgagttcctgcagaagctgctccctggctactacatgaacctcaaccagaacccgcggacgctgctgcccaagttctatgggctgtactgcgtgcagtcggggggcaagaacatccgcgtcgtggtcatgaacaacatcctgccccgcgtggtcaagatgcacctcaagttcgacctcaagggctccacctacaagcggcgcgccagcaagaaggagaaggagaagagcttccccacctacaaggacctggacttcatgcaggacatgcccgaggggctcctgctggacgccgacaccttcagcgccctggtcaagacgctgcagcgggactgcctggtcctggaaagtttcaagatcatggactacagcctgctgctgggcgtgcacaacatcgaccagcacgagcgcgagcggcaggcgcagggcgcccagagcacctcagatgagaagcggcctgtgggccagaaggcgctctactccacggccatggagtccatccagggtggcgccgcgcgcggggaggccatcgaatcggatgacacgatgggcgggatccccgctgtgaacggccgcggggagcggctgctgctgcacattggcatcatcgacatcctgcagtcctacaggttcatcaagaaactggagcacacctggaaggccctcgtccacgatggggacacggtgtccgtccaccgccccagcttctatgccgagcgctttttcaagttcatgagcaacacggtctttcggaagaactcctccctgaagtcctcgccctccaagaaggggcgcggcggagccttgctagctgtgaaaccgctggggcccaccgctgccttctcggccagccagatccctagcgagcgggaggaggcccagtacgacctgcggggggcccgcagctaccccacgctggaggacgaaggccggcccgacctcctgccctgcacgccaccttctttcgaagaagccactacagcctccattgccacgactctgtcatccacatccctctccattcctgagcggtccccctcggagacgtcggagcagccgcggtacaggcggcgcacacagtcgtctggacaggatggcaggccgcaggaggagccacccgcggaagaggatctgcagcagattacagtgcaggtggagcctgcgtgcagcgtggagattgtggtccccaaagaggaggacgcaggggtggaggcttccccggccggtgcctctgctgctgttgaagtagaaactgccagccaggcctcagacgaggagggcgcacctgccagccaggcctcggacgaggaggacgcgcccgccaccgacatctacttttaatttctatgcagcccccgacccagagccgagctccacttctgctccggctgcccccgaaggcgctgcccaccccgctgaggcccagagctcgggagatgcccgcctcgccgccccaccggacctcgtcctccccctgcacggatgccgacggccgggcccctccccgacaagcctcccagggccccggcaccccggtcggcagcctgcccctgtgagacccaccctcccgagcggccaatcgcatttgagtccttatttggcacagagacggaagcacgtgtgtgccgtttt

SEQ ID NO: 15673 - DNA, 2933 bp, Homo sapiens
  source 1..2933: mol_type = unassigned DNA
atggagctggaggtaccggacgaggcggagagcgctgaggcgggggccgtgccctcggaggcggcgtgggcggcagagagcggggcggcggcaggtttggctcagaagaaggcggccccaacagaggttctgtccatgacggcacagccgggccctggccatgggaagaagttgggccatcgaggtgtggacgcatccggcgaaaccacctacaagaagaccacctcctccaccctgaagggtgccatccagctgggcatcggctacaccgtgggccacctgagctccaagcccgaacgcgacgtgctcatgcaggacttctacgtggtggagagcatcttcttccccagcgaaggcagcaacctcacccccgcccaccacttccaggacttccgcttcaagacctatgcacctgtcgccttccgctacttccgggagctctttgggatccggccagatgattacttgtactccctgtgcaatgagccgctgatcgagctgtccaacccgggcgccagtggctccctcttctacgtcaccagcgacgacgagttcatcatcaagaccgtcatgcacaaggaggccgagttcctgcagaagctgctccctggctactacatgaacctcaaccagaacccgcggacgctgctgcccaagttctatgggctgtactgcgtgcagtcggggggcaagaacatccgcgtcgtggtcatgaacaacatcctgccccgcgtggtcaagatgcacctcaagttcgacctcaagggctccacctacaagcggcgcgccagcaagaaggagaaggagaagagcttccccacctacaaggacctggacttcatgcaggacatgcccgaggggctcctgctggacgccgacaccttcagcgccctggtcaagacgctgcagcgggactgcctggtcctggaaagtttcaagatcatggactacagcctgctgctgggcgtgcacaacatcgaccagcacgagcgcgagcggcaggcgcagggcgcccagagcacctcagatgagaagcggcctgtgggccagaaggcgctctactccacggccatggagtccatccagggtggcgccgcgcgcggggaggccatcgaatcggatgacacgatgggcgggatccccgctgtgaacggccgcggggagcggctgctgctgcacattggcatcatcgacatcctgcagtcctacaggttcatcaagaaactggagcacacctggaaggccctcgtccacgatggggacacggtgtccgtccaccgccccagcttctatgccgagcgctttttcaagttcatgagcaacacggtctttcggaagaactcctccctgaagtcctcgccctccaagaaggggcgcggcggagccttgctagctgtgaaaccgctggggcccaccgctgccttctcggccagccagatccctagcgagcgggaggaggcccagtacgacctgcggggggcccgcagctaccccacgctggaggacgaaggccggcccgacctcctgccctgcacgccaccttctttcgaagaagccactacagcctccattgccacgactctgtcatccacatccctctccattcctgagcggtccccctcggagacgtcggagcagccgcggtacaggcggcgcacacagtcgtctggacaggatggcaggccgcaggaggagccacccgcggaagaggatctgcagcagattacagtgcaggtggagcctgcgtgcagcgtggagattgtggtccccaaagaggaggacgcaggggtggaggcttccccggccggtgcctctgctgctgttgaagtagaaactgccagccaggcctcagacgaggagggcgcacctgccagccaggcctcggacgaggaggacgcgcccgccaccgacatctactttttcacggatgggaggtactggatttactctccccgccatcgccgactgcgggccgtgacgctgagcgcctcggggactgtaagtgaccgcagccggccaccctggggagaaggggcagtgcccctcgggcagcagggagccgcaggtccccggccggaagctcagtgtctgacgtcagttgttttccagaagggctttgggtaaatcacggctgcaattgaggtcagccacgctggccccggaccaggcgctgggctgcatgcgtcactgggaatgtcattcggtcccacgtcgaaccgggcgctccatagggcagcaccatcaccaggtgcacagctgaggcccagggtctgcttcggaccccggccagaccccagcgagcccctctctgcccctggacccagccctctcgtgtcagggtgtcttgggtggacgcttctcactcgtgcagacctggctgcccgtggccccgctggctgcacaggggaggttgcacaggtcagcagagtggctgcagggccgggctctgaaccgcagggccatggagacggggaggagatggtctctccacacccacctcacagatggaggcgctgaggcctcggctcccctgggagcctgggagaccacacggtttagtcaaaatccagatccccaagctctcaaggaggtccccctgggacgccacatgggccccacgtagctgtgagatcctcagggcctgctgttgtcattatgaccaataagcaaggggcccagagagcctaagagacctgcccagcaccgcacagccagaacggggcgcagacccaaagcaggagtgtcccctcgagacaaagcctccgccgaggccgccgtgactccccgcccatcagcaaacctctccgagcacctctgtgtgccaggcactgtggagtgaccccaagaggtggagaccacttccccggctgctctaggcagctccgtcccacggagccagcgggaagccagccaccgcgaagccgtgccccgga

SEQ ID NO: 15674 - DNA, 3326 bp, Homo sapiens
  source 1..3326: mol_type = unassigned DNA
atggagctggaggtaccggacgaggcggagagcgctgaggcgggggccgtgccctcggaggcggcgtgggcggcagagagcggggcggcggcaggtttggctcagaagaaggcggccccaacagaggttctgtccatgacggcacagccgggccctggccatgggaagaagttgggccatcgaggtgtggacgcatccggcgaaaccacctacaagaagaccacctcctccaccctgaagggtgccatccagctgggcatcggctacaccgtgggccacctgagctccaagcccgaacgcgacgtgctcatgcaggacttctacgtggtggagagcatcttcttccccagcgaaggcagcaacctcacccccgcccaccacttccaggacttccgcttcaagacctatgcacctgtcgccttccgctacttccgggagctctttgggatccggccagatgattacttgtactccctgtgcaatgagccgctgatcgagctgtccaacccgggcgccagtggctccctcttctacgtcaccagcgacgacgagttcatcatcaagaccgtcatgcacaaggaggccgagttcctgcagaagctgctccctggctactacatgaacctcaaccagaacccgcggacgctgctgcccaagttctatgggctgtactgcgtgcagtcggggggcaagaacatccgcgtcgtggtcatgaacaacatcctgccccgcgtggtcaagatgcacctcaagttcgacctcaagggctccacctacaagcggcgcgccagcaagaaggagaaggagaagagcttccccacctacaaggacctggacttcatgcaggacatgcccgaggggctcctgctggacgccgacaccttcagcgccctggtcaagacgctgcagcgggactgcctggtcctggaaagtttcaagatcatggactacagcctgctgctgggcgtgcacaacatcgaccagcacgagcgcgagcggcaggcgcagggcgcccagagcacctcagatgagaagcggcctgtgggccagaaggcgctctactccacggccatggagtccatccagggtggcgccgcgcgcggggaggccatcgaatcggatgacacgatgggcgggatccccgctgtgaacggccgcggggagcggctgctgctgcacattggcatcatcgacatcctgcagtcctacaggttcatcaagaaactggagcacacctggaaggccctcgtccacgatggggacacggtgtccgtccaccgccccagcttctatgccgagcgctttttcaagttcatgagcaacacggtctttcggaagaactcctccctgaagtcctcgccctccaagaaggggcgcggcggagccttgctagctgtgaaaccgctggggcccaccgctgccttctcggccagccagatccctagcgagcgggaggaggcccagtacgacctgcggggggcccgcagctaccccacgctggaggacgaaggccggcccgacctcctgccctgcacgccaccttctttcgaagaagccactacagcctccattgccacgactctgtcatccacatccctctccattcctgagcggtccccctcggagacgtcggagcagccgcggtacaggcggcgcacacagtcgtctggacaggatggcaggccgcaggaggagccacccgcggaagaggatctgcagcagattacagtgcaggtggagcctgcgtgcagcgtggagattgtggtccccaaagaggaggacgcaggggtggaggcttccccggccggtgcctctgctgctgttgaagtagaaactgccagccaggcctcagacgaggagggcgcacctgccagccaggcctcggacgaggaggacgcgcccgccaccgacatctacttttggcgcctctggggtccccatgcacccacctggccctggagaagggagggacgggccgcgtgcctgtgcccctacccaccgcacgtcgtcaccccttttcctgggactggtttgtgcgcgtcctggtctccggatggtacggggggcctgggggccatgtcgtgctgtgtgtctgtgtcctgatgccctgccaggtgggcagcagagaagggagaagggtcctcggtcctgcccctgccccggcaccccccaccttctgcttggcagtcagctgtccccacctgctccccgccacctccctccgcctctcccacccgaccacgggggtggccgcctcatccgctgtcctctgttttccttcctcctccggcccacccggcccgccccgtccagttcacggatgggaggtactggatttactctccccgccatcgccgactgcgggccgtgacgctgagcgcctcggggactgtaagtgaccgcagccggccaccctggggagaaggggcagtgcccctcgggcagcagggagccgcaggtccccggccggaagctcagtgtctgacgtcagttgttttccagaagggctttgggtaaatcacggctgcaattgaggtcagccacgctggccccggaccaggcgctgggctgcatgcgtcactgggaatgtcattcggtcccacgtcgaaccgggcgctccatagggcagcaccatcaccaggtgcacagctgaggcccagggtctgcttcggaccccggccagaccccagcgagcccctctctgcccctggacccagccctctcgtgtcagggtgtcttgggtggacgcttctcactcgtgcagacctggctgcccgtggccccgctggctgcacaggggaggttgcacaggtcagcagagtggctgcagggccgggctctgaaccgcagggccatggagacggggaggagatggtctctccacacccacctcacagatggaggcgctgaggcctcggctcccctgggagcctgggagaccacacggtttagtcaaaatccagatccccaagctctcaaggaggtccccctgggacgccacatgggccccacgtagctgtgagatcctcagggcctgctgttgtcattatgaccaataagcaaggggcccagagagcctaagagacctgcccagcaccgcacagccagaacggggcgcagacccaaagcaggagtgtcccctcgagacaaagcctccgccgaggccgccgtgactccccgcccatcagcaaacctctccgagcacctctgtgtgccaggcactgtggagtgaccccaagaggtggagaccacttccccggctgctctaggcagctccgtcccacggagccagcgggaagccagccaccgcgaagccgtgccccgga

SEQ ID NO: 15675 - DNA, 456 bp, Homo sapiens
  source 1..456: mol_type = unassigned DNA
aggggacgtgtgggcacggtgccgggtgacagttaactcccgcgctgggcaggggacgtgtgggcacggtgccgggatgggcgggatccccgctgtgaacggccgcggggagcggctgctgctgcacattggcatcatcgacatcctgcagtcctacaggttcatcaagaaactggagcacacctggaaggccctcgtccacgatggggacacggtgtccgtccaccgccccagcttctatgccgagcgctttttcaagttcatgagcaacacggtctttcggaagaactcctccctgaagtcctcgccctccaagaaggggcgcggcggagccttgctagctgtgaaaccgctggggcccaccgctgccttctcggccagccagatccctagcgagcgggaggaggcccagtacgacctgcggggggcccgcagctaccccacgctggaggacga

SEQ ID NO: 15676 - DNA, 1311 bp, Homo sapiens
  source 1..1311: mol_type = unassigned DNA
gtcgcagctcgggtccccctcgggcgcccccgccgccgtccgcgcgcggccatggagctggaggtaccggacgaggcggagagcgctgaggcgggggccgtgccctcggaggcggcgtgggcggcagagagcggggcggcggcaggtttggctcagaagaaggcggccccaacagaggttctgtccatgacggcacagccgggccctggccatgggaagaagttgggccatcgaggtgtggacgcatccggcgaaaccacctacaagaagaccacctcctccaccctgaagggtgccatccagctgggcatcggctacaccgtgggccacctgagctccaagcccgaacgcgacgtgctcatgcaggacttctacgtggtggagagcatcttcttccccagcgaaggcagcaacctcacccccgcccaccacttccaggacttccgcttcaagacctatgcacctgtcgccttccgctacttccgggagctctttgggatccggccagatgattacttgtactccctgtgcaatgagccgctgatcgagctgtccaacccgggcgccagtggctccctcttctacgtcaccagcgacgacgagttcatcatcaagaccgtcatgcacaaggaggccgagttcctgcagaagctgctccctggctactacatgaacctcaaccagaacccgcggacgctgctgcccaagttctatgggctgtactgcgtgcagtcggggggcaagaacatccgcgtcgtggtcatgaacaacatcctgccccgcgtggtcaagatgcacctcaagttcgacctcaagggctccacctacaagcggcgcgccagcaagaaggagaaggagaagagcttccccacctacaaggacctggacttcatgcaggacatgcccgaggggctcctgctggacgccgacaccttcagcgccctggtcaagacgctgcagcgggactgcctggtcctggaaagtttcaagatcatggactacagcctgctgctgggcgtgcacaacatcgaccagcacgagcgcgagcggcaggcgcagggcgcccagagcacctcagatgagaagcggcctgtgggccagaaggcgctctactccacggccatggagtccatccagggtggcgccgcgcgcggggaggccatcgaatcggatgacacggtcttcgctggcctggcgggggagcaggtgagcgtaccagcctgtggcgtgagcagagcgtgcagggcgccagcccagcgggtctgggtcccagtggcttcaggatgactgctgcacgtgtggcctcactaa

SEQ ID NO: 15677 - DNA, 153 bp, Homo sapiens
  source 1..153: mol_type = unassigned DNA
agaagaaggcggccccaacagaggttctgtccatgacggcacagccgggccctggccatgggaagaagttgggccatcgagaccacctcctccaccctgaagggtgccatccagctgggcatcggctacaccgtgggccacctgagctccaag

SEQ ID NO: 15678 - DNA, 435 bp, Homo sapiens
  source 1..435: mol_type = unassigned DNA
gcttgttgttcggcggcggcggtcgcagctcgggtccccctcgggcgcccccgccgccgtccgcgcgcggccatggagctggaggtaccggacgaggcggagagcgctgaggcgggggccgtgccctcggaggcggcgtgggcggcagagagcggggcggcggcagttctgacccggcagcagagcaaagctatgggctgctccaccaagtcgcattcagttgccttcagtgcccgcggtggacgtgttttcagacggcagggcggtcaccggggtgcagcctctggatgggacacacgtgggtctcccgtgcacccaccgagagcagcacagtgcccatgggggccgaggggcgctggcagggctgatagggtggggcatcgccgacccaggcccagccacagcgcagcctcttccagtctctgtctgactcac

SEQ ID NO: 15679 - DNA, 1772 bp, Homo sapiens
  source 1..1772: mol_type = unassigned DNA
ttgccacttccttgtatggacagtgggggactccaaagacccgctcgggagaggcccaaagcccggtacccggacgtgctgggggaagcacaaaggggccaacaagaagggggtggggaggcctgccggtgcaacgagatggagtgggctggcgcctcgggagagcgaatcgagggcggcggggcccagctgtgctgctgtgttaacctggaggcattatggaacagagctggaatcttgctccattgcccaggctggagtacaatggtgtgattatagctcactgcagcctcaaactcctgggctcaagtgaccctcctgcctcagcctcccaattctttctaccacactcccgaggaagctcccatggacaaagccggataatccgaaaggcgtacctggaagacttttacacccggatgatgcatgagtgctatcagatatgggcccagctggagcacgaggctggaacccaattgcacaggcagactggattactgctgctgggaatgaaagagaatcaagaattaaagacaatccaggccaatctgtcgaggcagagggtagaacaccagtgtctttcatctgaggaactgaagcaacgtttcccaaatattcggttgcccaggggagaagtggggctcttggacaattccggaggagttatctatgcatataaggccctcagagccctgcaggatgcaattcgacagctaggaggcatagtgcgtgacggagagaaggtggtggagataaacccagggctactggtcacggtgaaaaccacctccaggagctaccaagctaagagcttggtcatcacagcaggtccttggaccaaccagctcctccgtcccctgggcattgagatgcctctccagaccctgcggatcaacgtgtgttactggcgagagatggttcctgggagctatggtgtgtcccaggcctttccgtgcttcctgtggctgggcttgtgtccccaccacatctacggactgcccacaggagagtacccagggctgatgaaggtcagctatcaccacggcaaccacgcagaccctgaggagcgggactgccccacagcacgcacagacatcggagacgtccagatcctgagcagctttgtcagagatcacttacctgatctgaagcccgagcctgctgtcattgagagctgcatgtacacgaatacccctgatgagcagttcattctcgatcgccacccaaagtatgacaacattgtcattggtgctggattctctgggcacgggttcaagctggcccctgtggtggggaagatcctgtatgaattaagcatgaaattaacaccatcttatgacttggcaccttttcgaatcagccgtttcccaagcctgggcaaagcccacctttgacctctggccagaagcctcccttctgtgcacaggagccagtttcacagatggagaagatgtctcagatgaagggagtgtccctgagatatcatccttttcttctgcctcgcctgaatcccccataaacaccagatgattgagtctaccttctttccttggcccgctccctttttcttctgcctcacttgaatcccccgtaaacaccagacgattgagtctaccttcttttcttggccacctccccattcacaactactttctcgctcccagaaggttgatcagatattctacaatcacagagtagcaaggacgtttgagatgggtatatcagtaagaagagggcacaagaactggctctggagaccaaagcagttgtta

SEQ ID NO: 15680 - DNA, 580 bp, Homo sapiens
  source 1..580: mol_type = unassigned DNA
agggggtggggaggcctgccggtgcaacgagatggagtgggctggcgcctcgggagagcgaatcgagggcggcggagctggaatcttgctccattgcccaggctggagtacaatggtgtgattatagctcactgcagcctcaaactcctgggctcaagtgaccctcctgcctcagcctcccaattctttctaccacactcccgaggaagctcccatggacaaagccggataatccgaaaggcgtacctggaagacttttacacccggatgatgcatgagtgctatcagatatgggcccagctggagcacgaggctggaacccaattgcacaggcagactggattactgctgctgggaatgaaagagaatcaagaattaaagacaatccaggccaatctgtcgaggcagagggtagaacaccagtgtctttcatctgaggaactgaagcaacgtttcccaaatattcggttgcccaggggagaagtggggctcttggacaattccggaggagttatctatgcatataaggccctcagagccctgcaggatgcaattcgacagctaggaggcatagtgcgtg

SEQ ID NO: 15681 - DNA, 1829 bp, Homo sapiens
  source 1..1829: mol_type = unassigned DNA
gcaacgagatggagtgggctggcgcctcgggagagcgaatcgagggcggcggggcccagctgtgctgctgtgttaacctggaggcattatggaacaggaggccctgagtacctgcggtggggtgaggccagagtgagctccagctcagatgatcagggagaaggctgcaccagtctcattggattcttcacaccagctggtgctgaaggttcaggggttgaagttgaaagaagcccgtggggtcctccataaaggactcaaggtgctggccttccaacagcctgagctggaatcttgctccattgcccaggctggagtacaatggtgtgattatagctcactgcagcctcaaactcctgggctcaagtgaccctcctgcctcagcctcccaattctttctaccacactcccgaggaagctcccatggacaaagccggataatccgaaaggcgtacctggaagacttttacacccggatgatgcatgagtgctatcagatatgggcccagctggagcacgaggctggaacccaattgcacaggcagactggattactgctgctgggaatgaaagagaatcaagaattaaagacaatccaggccaatctgtcgaggcagagggtagaacaccagtgtctttcatctgaggaactgaagcaacgtttcccaaatattcggttgcccaggggagaagtggggctcttggacaattccggaggagttatctatgcatataaggccctcagagccctgcaggatgcaattcgacagctaggaggcatagtgcgtgacggagagaaggtggtggagataaacccagggctactggtcacggtgaaaaccacctccaggagctaccaagctaagagcttggtcatcacagcaggtccttggaccaaccagctcctccgtcccctgggcattgagatgcctctccagaccctgcggatcaacgtgtgttactggcgagagatggttcctgggagctatggtgtgtcccaggcctttccgtgcttcctgtggctgggcttgtgtccccaccacatctacggactgcccacaggagagtacccagggctgatgaaggtcagctatcaccacggcaaccacgcagaccctgaggagcgggactgccccacagcacgcacagacatcggagacgtccagatcctgagcagctttgtcagagatcacttacctgatctgaagcccgagcctgctgtcattgagagctgcatgtacacgaatacccctgatgagcagttcattctcgatcgccacccaaagtatgacaacattgtcattggtgctggattctctgggcacgggttcaagctggcccctgtggtggggaagatcctgtatgaattaagcatgaaattaacaccatcttatgacttggcaccttttcgaatcagccgtttcccaagcctgggcaaagcccacctttgacctctggccagaagcctcccttctgtgcacaggagccagtttcacagatggagaagatgtctcagatgaagggagtgtccctgagatatcatccttttcttctgcctcgcctgaatcccccataaacaccagatgattgagtctaccttctttccttggcccgctccctttttcttctgcctcacttgaatcccccgtaaacaccagacgattgagtctaccttcttttcttggccacctccccattcacaactactttctcgctcccagaaggttgatcagatattctacaatcacagagtagcaaggacgtttgagatgggtatatcagtaagaagagggcacaagaactggctctggagaccaaagcagttgtta

SEQ ID NO: 15682 - DNA, 790 bp, Homo sapiens
  source 1..790: mol_type = unassigned DNA
caggccctcacaagaaagctgctcctttcgccattttggtaatgggatatgggctatcatgcccttggagtcctcaggcatgaacagaaaggagcaaggtgtggtgttggatggagctggtcgcctgtcggtgacagcagtattcctagggatgttgtacttgaccgtttggttctaccatcgggtgtggctggaccaggccaccatattggtaaagagaaaagccatttgagacagaaaatgacgcttttggaggcgtgtgggatgactgtggttcctaattctctcccgctcctgacagataattttatcagttaattgtatcctcagcatccctgccttgcgtggtggtggcactggagagttccgcctgcccgttaccaccctctcttcaccactgtccctgagatctgctcttcaagaggaagcctaaagtggagagtttgtaatcctgacaacgcccagctacctgcgtaccccggactccaactcccagtttgcaacgccaaagggtctaaagggcgaacgggggcgcattgcatcctgggagcaagaatcgcgataggtctgatggattgtgggaactgtagttccatggcccagctgtgctgctgtgttaacctggaggcattatggaacagttctttctaccacactcccgaggaagctcccatggacaaagccggataatccgaaaggcgtacctggaagacttttacacccggatgatgcatgagtgctatcagatatgggcccagctggagcacgaggctggaacccaattgcacag

SEQ ID NO: 15683 - DNA, 633 bp, Homo sapiens
  source 1..633: mol_type = unassigned DNA
gggaactgtagttccatgtgcgtgcgatgcactctatgggcccagctgtgctgctgtgttaacctggaggcattatggaacaggaggccctgagtacctgcggtggggtgaggccagagtgagctccagctcagatgatcagggagaaggctgcaccagtctcattggattcttcacaccagctggtgctgaaggttcaggggttgaagttgaaagaagcccgtggggtcctccataaaggactcaaggtgctggccttccaacagcctgttctttctaccacactcccgaggaagctcccatggacaaagccggataatccgaaaggcgtacctggaagacttttacacccggatgatgcatgagtgctatcagatatgggcccagctggagcacgaggctggaacccaattgcacaggcagactggattactgctgctgggaatgaaagagaatcaagaattaaagacaatccaggccaatctgtcgaggcagagggtagaacaccagtgtctttcatctgaggaactgaagcaacgtttcccaaatattcggttgcccaggggagaagtggggctcttggacaattccggaggagttatctatgcatataaggccctcagagccctgcag

SEQ ID NO: 15684 - DNA, 2414 bp, Homo sapiens
  source 1..2414: mol_type = unassigned DNA
gagacaggaaggtggcaaaggaaggagcccatttgcatgacaataattgagccaagaatagaaagccacagggatgcaagggtgaggctggcggctgagctgggctaaacctcacaaatcagactacccagctctgctccgcaggggaagggagactgagccctgggccaggcttggcagagagggaagcgggaggacacgaccccagggcattgtgggaacactggccaggctggactttgccttcctcctcgtcctttagccgggagcctgtctttgcttgcctttgcctttgaggctctgtggctgtggggctgagtggcatcatggcggctcagaaagatctctgggacgccattgtgattggggcggggatccagggctgcttcactgcataccacctggccaaacacaggaagaggatcctcctgctggagcagttctttctaccacactcccgaggaagctcccatggacaaagccggataatccgaaaggcgtacctggaagacttttacacccggatgatgcatgagtgctatcagatatgggcccagctggagcacgaggctggaacccaattgcacaggcagactggattactgctgctgggaatgaaagagaatcaagaattaaagacaatccaggccaatctgtcgaggcagagggtagaacaccagtgtctttcatctgaggaactgaagcaacgtttcccaaatattcggttgcccaggggagaagtggggctcttggacaattccggaggagttatctatgcatataaggccctcagagccctgcaggatgcaattcgacagctaggaggcatagtgcgtgacggagagaaggtggtggagataaacccagggctactggtcacggtgaaaaccacctccaggagctaccaagctaagagcttggtcatcacagcaggtccttggaccaaccagctcctccgtcccctgggcattgagatgcctctccagaccctgcggatcaacgtgtgttactggcgagagatggttcctgggagctatggtgtgtcccaggcctttccgtgcttcctgtggctgggcttgtgtccccaccacatctacggactgcccacaggagagtacccagggctgatgaaggtcagctatcaccacggcaaccacgcagaccctgaggagcgggactgccccacagcacgcacagacatcggagacgtccagatcctgagcagctttgtcagagatcacttacctgatctgaagcccgagcctgctgtcattgagagctgcatgtacacgaatacccctgatgagcagttcattctcgatcgccacccaaagtatgacaacattgtcattggtgctggattctctgggcacgggttcaagctggcccctgtggtggggaagatcctgtatgaattaagcatgaaattaacaccatcttatgacttggcaccttttcgaatcagccgtttcccaagcctgggcaaagcccacctttgacctctggccagaagcctcccttctgtgcacaggagccagtttcacagatggagaagatgtctcagatgaagggagtgtccctgagatatcatccttttcttctgcctcgcctgaatcccccataaacaccagatgattgagtctaccttctttccttggcccgctccctttttcttctgcctcacttgaatcccccgtaaacaccagacgattgagtctaccttcttttcttggccacctccccattcacaactactttctcgctcccagaaggttgatcagatattctacaatcacagagtagcaaggacgtttgagatgggtatatcagtaagaagagggcacaagaactggctctggagaccaaagcagttgttaaaaattctctttgctgggggccgggtgtggtggctcacacctgtaatctcggcactttggggggctgagacaggcggatcacctgaggccaggaattcaagaccagcctggccaacatggtgaaaccctatctccactaaaaatacaaaattagctgggtgtggtggcgcatgcctgtaatcccagctacttgggagactgaggcaagagaatcacttgaacccgggaggtggaggtggcagtgagccgagattgcgccattgcactccagcctgggcaaaaagagtgagactctgtctcaaaaaaaaaacaaaacaaaaaaaacctctttgctggtatatttgaagagcttgggatggatttgactaaatctgccccgaggagggtgaacaaggtgatctcagagatcactactgctcttggagttccttctcctaaagctaaggccagcctccatcacaaatgcccataaaatctggctcgtctttgatgaacaataaatatttgttgaacaaataaataactgccctgcattaa

SEQ ID NO: 15685 - DNA, 720 bp, Homo sapiens
  source 1..720: mol_type = unassigned DNA
gtcagcatcagtttccttgttcataaaatgaaggggctggagtagttgaactggaaggttttttctaattttgcttctttgtgaatctaagtgaggtgagattgcagcaggatggttgaagactagctaacaaaagaacttctggatgtgaacaacgttagcaaaaaggaagcctaattctttctaccacactcccgaggaagctcccatggacaaagccggataatccgaaaggcgtacctggaagacttttacacccggatgatgcatgagtgctatcagatatgggcccagctggagcacgaggctggaacccaattgcacaggcagactggattactgctgctgggaatgaaagagaatcaagaattaaagacaatccaggccaatctgtcgaggcagagggtagaacaccagtgtctttcatctgaggaactgaagcaacgtttcccaaatattcggttgcccaggggagaagtggggctcttggacaattccggaggagttatctatgcatataaggccctcagagccctgcaggatgcaattcgacagctaggaggcatagtgcgtgacggagagaaggtggtggagataaacccagggctactggtcacggtgaaaaccacctccaggagctaccaagctaagagcttggtcatcacagcaggtccttggaccaaccagctcctccgtcccctgggcattgagatgcctctc

SEQ ID NO: 15686 - DNA, 760 bp, Homo sapiens
  source 1..760: mol_type = unassigned DNA
gggctggagtagttgaactggaaggttttttctaattttgcttctttgtgaatctaagtgagttctttctaccacactcccgaggaagctcccatggacaaagccggataatccgaaaggcgtacctggaagacttttacacccggatgatgcatgagtgctatcagatatgggcccagctggagcacgaggctggaacccaattgcacaggcagactggattactgctgctgggaatgaaagagaatcaagaattaaagacaatccaggccaatctgtcgaggcagagggtagaacaccagtgtctttcatctgaggaactgaagcaacgtttcccaaatattcggttgcccaggggagaagtggggctcttggacaattccggaggagttatctatgcatataaggccctcagagccctgcaggatgcaattcgacagctaggaggcatagtgcgtgacggagagaaggtggtggagataaacccagggctactggtcacggtgaaaaccacctccaggagctaccaagctaagagcttggtcatcacagcaggtccttggaccaaccagctcctccgtcccctgggcattgagatgcctctccagaccctgcggatcaacgtgtgttactggcgagagatggttcctgggagctatggtgtgtcccaggcctttccgtgcttcctgtggctgggcttgtgtccccaccacatctacggactgcccacaggagagtacccagggctgatgaaggtcag

SEQ ID NO: 15687 - DNA, 1038 bp, Homo sapiens
  source 1..1038: mol_type = unassigned DNA
cagatgggtgcaacaaccacagataccaaggggagtggcagcaggaaagagggagagggatccttgggtaggagactctcagaagcgcacaatcctcctctttgccaggaggacaggaatttggacgggctttggaactggacctggctctaaatctcagctctgacacgctcagctgtgtggtttggaacgagctgttgaacctctggcagactggattactgctgctgggaatgaaagagaatcaagaattaaagacaatccaggccaatctgtcgaggcagagggtagaacaccagtgtctttcatctgaggaactgaagcaacgtttcccaaatattcggttgcccaggggagaagtggggctcttggacaattccggaggagttatctatgcatataaggccctcagagccctgcaggatgcaattcgacagctaggaggcatagtgcgtgacggagagaaggtggtggagataaacccagggctactggtcacggtgaaaaccacctccaggagctaccaagctaagagcttggtcatcacagcaggtccttggaccaaccagctcctccgtcccctgggcattgagatgcctctccagaccctgcggatcaacgtgtgttactggcgagagatggttcctgggagctatggtgtgtcccaggcctttccgtgcttcctgtggctgggcttgtgtccccaccacatctacggactgcccacaggagagtacccagggctgatgaaggtcagctatcaccacggcaaccacgcagaccctgaggagcgggactgccccacagcacgcacagacatcggagacgtccagatcctgagcagctttgtcagagatcacttacctgatctgaagcccgagcctgctgtcattgagagctgcatgtacacgaatacccctgatgagcagttcattctcgatcgccacccaaagtatgacaacattgtcattggtgctggattctctgggcacgggttcaagctggcccctgtggtggggaagatcctgtatgaattaa

SEQ ID NO: 15688 - DNA, 518 bp, Homo sapiens
  source 1..518: mol_type = unassigned DNA
ggaaccatcagttgttcaacaggcacgttacagaggaggaatctgggcccagagaggcagactggattactgctgctgggaatgaaagagaatcaagaattaaagacaatccaggccaatctgtcgaggcagagggtagaacaccagtgtctttcatctgaggaactgaagcaacgtttcccaaatattcggttgcccaggggagaagtggggctcttggacaattccggaggagttatctatgcatataaggccctcagagccctgcaggatgcaattcgacagctaggaggcatagtgcgtgacggagagaaggtggtggagataaacccagggctactggtcacggtgaaaaccacctccaggagctaccaagctaagagcttggtcatcacagcaggtccttggaccaaccagctcctccgtcccctgggcattgagatgcctctccaggtaagaggagctggaagcccgagagttggtgctcaagagaagccttggaaccagatggagtcaaa

SEQ ID NO: 15689 - DNA, 6945 bp, Homo sapiens
  source 1..6945: mol_type = unassigned DNA
gcccgggaagcgcgaggagcgcgcgtagcgccgccggagcccgccgcccgggacatggccaaggcgggccgtgcaggtggtcctcccccgggcggcggtgccccctggcaccttcgaaatgtcctcagtgactctgtggagagctcagatgatgaattctttgatgccagaggagaagggaccgcgccgtgcacatccagcatcctccaggagaagcagcgagaactgtaccgggtttccttgagaagacagaggttcccagcccagggaagcatcgagatccacgaagacagcgaggaaggctgcccgcagcgctcctgcaagacacatgtcctcctgctggtcctgcatgggggaaacatcctggacacgggtgccggggacccgtcctgcaaggcagccgacatccacaccttcagctccgtgctggagaaggtcacacgagcccatttccctgctgccctgggccacatcctcatcaagttcgtcccctgtcctgccatctgctctgaggctttctcgcttgtctctcacctgaacccctacagccacgatgagggctgcctcagcagcagccaggaccacgtccctctggccgcccttcccctgttggccatctcctccccgcagtaccaggatgctgtcgccaccgtcatcgagcgagccaaccaggtctacagagagttcctgaagtcctctgatgggattggcttcagtgggcaggtgtgtctcatcggggactgtgtggggggcctcctggccttcgatgccatctgctacagtgcggggccctcaggggacagccctgccagcagcagccggaaggggagcatcagcagcacccaggacaccccagtcgcggtggaggaagattgcagcctggccagcagcaagcgtctcagcaaaagcaacattgacatctccagtgggttggaggatgaggagcccaagaggccgttgccgcggaaacagagcgactcctccacctatgactgcgaggccatcacccagcaccatgccttcctctcaagcatccactccagcgtgctaaaggatgagtctgagaccccggcggctggggggccgcagctccctgaggtcagcctgggccgctttgacttcgatgtgtccgacttcttcctcttcggctcgccactgggcctggtcctggccatgcggaggacggtgctgcctgggctggacggcttccaggtgcgtcctgcctgcagccaggtctacagcttcttccattgcgcagacccctctgcctcacggctcgagccactgctggagcccaagttccacctggtgccgcctgtcagcgtgcctcgctaccagaggttcccactgggcgatgggcagtccctcctcctcgctgatgccctacacacccacagccccctcttcctggagggcagctcccgggacagcccgccacttctggatgcccctgcctcgccccctcaggcctcgaggttccagcgcccaggacggaggatgagcgaggggagctcccacagcgagagctcggagtcctcggacagcatggcacccgtgggtgcctcccgcatcacagccaagtggtggggaagcaagaggatcgactatgccctgtactgccctgatgtcctcacggccttccccaccgtggccctgccccacctcttccacgccagttactgggagtccacagacgtggtggccttcatcctgagacaggtaatgcgctatgagagcgtgaacatcaaggaaagcgcccgcctggaccctgcagcactgagtcctgccaacccccgggagaagtggcttcgtaagcggactcaggtcaagctgaggaatgtcacggctaatcaccgggccaatgatgtgattgctgctgaagatggcccccaggtcctggtggggcggttcatgtacgggcccctcgacatggtggctctgactggagagaaggtggacatcctagtaatggcagagccatcctcaggccgctgggtacacctggacacagagatcaccaacagcagtggtcgcatcacatacaatgtgccgcggccccggcgcctgggggttggtgtctatcctgtgaagatggtcgtcaggggcgaccagacctgtgccatgagctacctcacggtgttgcccaggggcatggagtgtgtagtgttcagcattgatgggtccttcgcggccagcgtgtctatcatgggaagcgaccccaaggtccggccgggtgcagtggatgttgtccggcactggcaggacttgggctacatgatcctttacatcacgggacggccggacatgcagaagcagcgggtggtgtcgtggctgtcccagcacaacttcccacagggcatgatcttcttctccgatgggctggtgcatgacccgctgcggcagaaggccatcttcctgcgcaacctcatgcaggagtgcttcatcaaaatcagtgcggcctatggctccacgaaggacatctctgtctacagcgtgctgggcctgcctgcctcccagatcttcattgtgggccggcccaccaagaagtaccaaacccagtgccagttcctgagcgagggctacgccgcacacctggccgcgctggaggccagccaccgctcacgcccaaagaagaacaactcgcgcatgatcctgcgcaagggcagcttcgggctgcacgcgcagccagagttcctgcggaagcgcaaccacctgcgcagaaccatgtcagtgcagcagcccgacccgcccgccgccaaccccaagcccgagcgggcccagagccagcccgagtcggacaaagaccacgagcggccgctgccggcgctcagctgggcgcgtgggccccccaagttcgagtcggtgccctgaggggtgggctgtgctcagagcagggagcggggggcccaatcaggctgcctgcggggacgggagggggctgccctctccccgacacaggcgttttcctgctttttccctcccgtgtctgtccagcagtgtccgaccagagcggggagggatcctgcccgagcccggggggctccctgagctgcgacggggtgaggtccggggatctcggtgcagccactgctgcctcccacgggcctgcgaccgcaagcccaagtcagggttcatgtttgtgtcatcctgggggcaggcttgcccggggctgaagcgtttgggcaaagtcgaccaccctcctgcgtccccaggcttcacagcgagctaggcaggccctcaagggggcagccccagcctcggcaccaagcgccgctggcaggcacagcctctgggctgtcttgtggaggtgtgagtggcatttgtgcccgcccttcctgtggtttgggtcaccattttggggttggcgctcttatggcaagatggccactttctgggagtgagagcacatccccgggctcatgttacgccgtctctgtccacagccctcgggggtggggtctggtgctgacggtctgtcctgcagctgtccattgtccccaacccccgttgtcctcagtgtcctcaccatttccctgtggccctggaggccagggcttcctcttcccggagccctgcctcatgccctcccttgggaggctgcagccttgggctctggctcagctgggctggctgtgagcccctgagctggttgcttgccctctctgggctccgtcttccttctgttattggaggggtccccctagctgagattggtgtgagtctttgactcccaagatgtcctgcagtttggcccattgaggctcttcaggcctaagggtccctccgagtgtcctgtgacccacacctttcacacagcctgggagagggggtctgggtgggctggaaaggaggggctcttaaaggagcctctctgggtgggctgggaagggatccctactccacggagaggtgcagctggtttgccttgcactgcgtgtcccagggacaacccactcaaactgggtgtcctagggacaacccacctccctctcctgccaaaaggttactgattgggctccccataaccccagctctgccaggacccttttatcctttttggctcccagaggcatagagctgagattccagggttctaggggttcctggaagtttggctccaactgttgtattctcttccctttcccctgctgctcagtttgtgcccataacctcctcctgggtagtcccctgaggttggcaggacttggcccttctggggcccctaaagcctgctcaggccctcctgctgctgaaccttggcctgggcactgctttcctgcatcctggaaaaccccgactccctggcccaggcccacacctgctgtgtggggctgcccacgtggccactgagcccccataggctgccatcaaggccggtcccagcaatttcagccaggctgccccagggcccagacgtctgtatacacagcaggcacctgtgtcagctcagtgtcgcttctgctcaatgtctacctctcgcggctcccatgcagccagtgacgctgctggtgggggcggctggcaccgccgttgtgaattgcctggcaaattgggtgccctcctggggctggaggggtctgggctcctaacccccatccctgctctccccactagaaatgtgtcttcagtctgccagctcttctgctctacttccagtgctgcatcctgcactcaagcccagggctgctggcgagtctatggggaggagtgcggatcaggctcagcctcagcctcagcctcagcctcctctatggtcctgtctcctggcggttcacaggtgcccatcccccctttaacatttcacagttcttggctttccaaaggcaccagctcatatggcatagccaccccaaccctaatccttcccccaaatatcctgatttaaacttgggcagacttagtctgattcttgaaaactctaccatctccttcttgcagaaggcactggttacactaaaatgataaaataattagtatggggtactttgctcccagttacattccctcttccctgagaaccccaggctaggcgagagagggagagggagagagaaagagagagagggagagagagagagagagagggagagagaaagagagagagaaagaaaggaagacagaggaaagaaaggaagacagagagaggaaggcagagagagagagggagaaagaaagacaggaaggcagagagagagagagagagagaaaggaagacagagagagagagagaggaagagagagagagagaggaagagagagagagagctcatgagccaggatccctggggaatttgaagtcagtgtgaccagggttctgtggctctggggtcagagctgggacacaggacccagcaggagggccaccaccccttccttttggaaacagctctggttccaagcagcaatcaggtaggaggatcggggctttggctgatgatgcacacacaagatgctgatggtgtacggtgagatattgtgaacgcaacaactggagctgtagttggcgtgtgtgagtgtgtacctgcggttctgtttagtggcgagacaaggtatgtttcagtactgctttcacggcaactgtgtaatgcatatgctctttctacactagcggtttgctcagttttgtctgtccggttaagttggagaaagaaccaagttgtgttgttctctggagggggtgctgctgcctctccttgagtagttctgtgacccccaatccagctgttttgtagagaatccttctagcttctggtatgcctgctctccagcagctggaaacagatcttcctgcctgaccaaagctccttgtttcttgcgtggcatgtttgttcttcccgatccggtggctgtcgtagccgagggcctgcctgccaccttcctttatcatttgccctgttggggttcagggtgcatccttagcccaggacctgctcttccagcatcatgggttttttcctaaagatctcaacggctcccttgggctccataaaatatttcttttttaaaaaagcagactcctttcatgcattgggatgaacggccctcttgtctgggtgctgggctacagcaaacaaatgtgtttgaatcccagtattccagagattcctggcggtgggctgtctagaagaggcgaggctggatctcacggtttttaaactgtatttttacccctttgggacccatacctgtgccctggagtctttcatgaggcacgtgggtcctctgcatcctcactctcccccctagcccaggtgcagccccgggaggggtgccctgaccccgccttaaacaaccaactttcccaccgaatcccatcggcgggcggggggggggggtttgggtgccaagtgccctggaaacctattgtcttttggctcagccaaaagaaacattccctccttcctttccttccgggcttgggggaaaccttcgtaaaaatcatagttagggttaagtccaagcagtgaggcctgacctgggctctgctctccttgttgagacactaacaggcagttgggaggaaaatctgcatttgactccaccctctttggggcaaaggagaaacaggtgacccgagggggggcaggccagaggagggcgactcgtgcacagggacccccacccttggaccccgctgtccttttctagttgtttacttggtggtggcagccagtctgaccttgtctgtggtctgactgttcctaagtgtgtaactttcagtattatctgtgacagatggttctgtggtgaaaaaggtttattatattccttatggctgccttgtacaaaatccgttagaaacgctaatgtaagatatcagatttctaacaagacaaaaacagcattatggagttaaaagatttttacaactgggtcttgattttgatgtgagctggtttttagctctcaaatgttgtcacttaaataaaaaccttctttgccttt

SEQ ID NO: 15690 - DNA, 7086 bp, Homo sapiens
  source 1..7086: mol_type = unassigned DNA
gagtccgttcggggccggaggcggtcggggccgggcccgggaagcgcgaggagcgcgcgtagcgccgccggagcccgccgcccgggacatggccaaggcgggccgtgcaggtggtcctcccccgggcggcggtgccccctggcaccttcgaaatgtcctcagtgactctgtggagagctcagatgatgaattctttgatgccagagaggagatggctgaagggaagaatgccatcctcattgggatgagccagtggaactccaatgacctcgtggagcagatcgagaccatggggaaactggacgagcatcaaggagaagggaccgcgccgtgcacatccagcatcctccaggagaagcagcgagaactgtaccgggtttccttgagaagacagaggttcccagcccagggaagcatcgagatccacgaagacagcgaggaaggctgcccgcagcgctcctgcaagacacatgtcctcctgctggtcctgcatgggggaaacatcctggacacgggtgccggggacccgtcctgcaaggcagccgacatccacaccttcagctccgtgctggagaaggtcacacgagcccatttccctgctgccctgggccacatcctcatcaagttcgtcccctgtcctgccatctgctctgaggctttctcgcttgtctctcacctgaacccctacagccacgatgagggctgcctcagcagcagccaggaccacgtccctctggccgcccttcccctgttggccatctcctccccgcagtaccaggatgctgtcgccaccgtcatcgagcgagccaaccaggtctacagagagttcctgaagtcctctgatgggattggcttcagtgggcaggtgtgtctcatcggggactgtgtggggggcctcctggccttcgatgccatctgctacagtgcggggccctcaggggacagccctgccagcagcagccggaaggggagcatcagcagcacccaggacaccccagtcgcggtggaggaagattgcagcctggccagcagcaagcgtctcagcaaaagcaacattgacatctccagtgggttggaggatgaggagcccaagaggccgttgccgcggaaacagagcgactcctccacctatgactgcgaggccatcacccagcaccatgccttcctctcaagcatccactccagcgtgctaaaggatgagtctgagaccccggcggctggggggccgcagctccctgaggtcagcctgggccgctttgacttcgatgtgtccgacttcttcctcttcggctcgccactgggcctggtcctggccatgcggaggacggtgctgcctgggctggacggcttccaggtgcgtcctgcctgcagccaggtctacagcttcttccattgcgcagacccctctgcctcacggctcgagccactgctggagcccaagttccacctggtgccgcctgtcagcgtgcctcgctaccagaggttcccactgggcgatgggcagtccctcctcctcgctgatgccctacacacccacagccccctcttcctggagggcagctcccgggacagcccgccacttctggatgcccctgcctcgccccctcaggcctcgaggttccagcgcccaggacggaggatgagcgaggggagctcccacagcgagagctcggagtcctcggacagcatggcacccgtgggtgcctcccgcatcacagccaagtggtggggaagcaagaggatcgactatgccctgtactgccctgatgtcctcacggccttccccaccgtggccctgccccacctcttccacgccagttactgggagtccacagacgtggtggccttcatcctgagacaggtaatgcgctatgagagcgtgaacatcaaggaaagcgcccgcctggaccctgcagcactgagtcctgccaacccccgggagaagtggcttcgtaagcggactcaggtcaagctgaggaatgtcacggctaatcaccgggccaatgatgtgattgctgctgaagatggcccccaggtcctggtggggcggttcatgtacgggcccctcgacatggtggctctgactggagagaaggtggacatcctagtaatggcagagccatcctcaggccgctgggtacacctggacacagagatcaccaacagcagtggtcgcatcacatacaatgtgccgcggccccggcgcctgggggttggtgtctatcctgtgaagatggtcgtcaggggcgaccagacctgtgccatgagctacctcacggtgttgcccaggggcatggagtgtgtagtgttcagcattgatgggtccttcgcggccagcgtgtctatcatgggaagcgaccccaaggtccggccgggtgcagtggatgttgtccggcactggcaggacttgggctacatgatcctttacatcacgggacggccggacatgcagaagcagcgggtggtgtcgtggctgtcccagcacaacttcccacagggcatgatcttcttctccgatgggctggtgcatgacccgctgcggcagaaggccatcttcctgcgcaacctcatgcaggagtgcttcatcaaaatcagtgcggcctatggctccacgaaggacatctctgtctacagcgtgctgggcctgcctgcctcccagatcttcattgtgggccggcccaccaagaagtaccaaacccagtgccagttcctgagcgagggctacgccgcacacctggccgcgctggaggccagccaccgctcacgcccaaagaagaacaactcgcgcatgatcctgcgcaagggcagcttcgggctgcacgcgcagccagagttcctgcggaagcgcaaccacctgcgcagaaccatgtcagtgcagcagcccgacccgcccgccgccaaccccaagcccgagcgggcccagagccagcccgagtcggacaaagaccacgagcggccgctgccggcgctcagctgggcgcgtgggccccccaagttcgagtcggtgccctgaggggtgggctgtgctcagagcagggagcggggggcccaatcaggctgcctgcggggacgggagggggctgccctctccccgacacaggcgttttcctgctttttccctcccgtgtctgtccagcagtgtccgaccagagcggggagggatcctgcccgagcccggggggctccctgagctgcgacggggtgaggtccggggatctcggtgcagccactgctgcctcccacgggcctgcgaccgcaagcccaagtcagggttcatgtttgtgtcatcctgggggcaggcttgcccggggctgaagcgtttgggcaaagtcgaccaccctcctgcgtccccaggcttcacagcgagctaggcaggccctcaagggggcagccccagcctcggcaccaagcgccgctggcaggcacagcctctgggctgtcttgtggaggtgtgagtggcatttgtgcccgcccttcctgtggtttgggtcaccattttggggttggcgctcttatggcaagatggccactttctgggagtgagagcacatccccgggctcatgttacgccgtctctgtccacagccctcgggggtggggtctggtgctgacggtctgtcctgcagctgtccattgtccccaacccccgttgtcctcagtgtcctcaccatttccctgtggccctggaggccagggcttcctcttcccggagccctgcctcatgccctcccttgggaggctgcagccttgggctctggctcagctgggctggctgtgagcccctgagctggttgcttgccctctctgggctccgtcttccttctgttattggaggggtccccctagctgagattggtgtgagtctttgactcccaagatgtcctgcagtttggcccattgaggctcttcaggcctaagggtccctccgagtgtcctgtgacccacacctttcacacagcctgggagagggggtctgggtgggctggaaaggaggggctcttaaaggagcctctctgggtgggctgggaagggatccctactccacggagaggtgcagctggtttgccttgcactgcgtgtcccagggacaacccactcaaactgggtgtcctagggacaacccacctccctctcctgccaaaaggttactgattgggctccccataaccccagctctgccaggacccttttatcctttttggctcccagaggcatagagctgagattccagggttctaggggttcctggaagtttggctccaactgttgtattctcttccctttcccctgctgctcagtttgtgcccataacctcctcctgggtagtcccctgaggttggcaggacttggcccttctggggcccctaaagcctgctcaggccctcctgctgctgaaccttggcctgggcactgctttcctgcatcctggaaaaccccgactccctggcccaggcccacacctgctgtgtggggctgcccacgtggccactgagcccccataggctgccatcaaggccggtcccagcaatttcagccaggctgccccagggcccagacgtctgtatacacagcaggcacctgtgtcagctcagtgtcgcttctgctcaatgtctacctctcgcggctcccatgcagccagtgacgctgctggtgggggcggctggcaccgccgttgtgaattgcctggcaaattgggtgccctcctggggctggaggggtctgggctcctaacccccatccctgctctccccactagaaatgtgtcttcagtctgccagctcttctgctctacttccagtgctgcatcctgcactcaagcccagggctgctggcgagtctatggggaggagtgcggatcaggctcagcctcagcctcagcctcagcctcctctatggtcctgtctcctggcggttcacaggtgcccatcccccctttaacatttcacagttcttggctttccaaaggcaccagctcatatggcatagccaccccaaccctaatccttcccccaaatatcctgatttaaacttgggcagacttagtctgattcttgaaaactctaccatctccttcttgcagaaggcactggttacactaaaatgataaaataattagtatggggtactttgctcccagttacattccctcttccctgagaaccccaggctaggcgagagagggagagggagagagaaagagagagagggagagagagagagagagagggagagagaaagagagagagaaagaaaggaagacagaggaaagaaaggaagacagagagaggaaggcagagagagagagggagaaagaaagacaggaaggcagagagagagagagagagagaaaggaagacagagagagagagagaggaagagagagagagagaggaagagagagagagagctcatgagccaggatccctggggaatttgaagtcagtgtgaccagggttctgtggctctggggtcagagctgggacacaggacccagcaggagggccaccaccccttccttttggaaacagctctggttccaagcagcaatcaggtaggaggatcggggctttggctgatgatgcacacacaagatgctgatggtgtacggtgagatattgtgaacgcaacaactggagctgtagttggcgtgtgtgagtgtgtacctgcggttctgtttagtggcgagacaaggtatgtttcagtactgctttcacggcaactgtgtaatgcatatgctctttctacactagcggtttgctcagttttgtctgtccggttaagttggagaaagaaccaagttgtgttgttctctggagggggtgctgctgcctctccttgagtagttctgtgacccccaatccagctgttttgtagagaatccttctagcttctggtatgcctgctctccagcagctggaaacagatcttcctgcctgaccaaagctccttgtttcttgcgtggcatgtttgttcttcccgatccggtggctgtcgtagccgagggcctgcctgccaccttcctttatcatttgccctgttggggttcagggtgcatccttagcccaggacctgctcttccagcatcatgggttttttcctaaagatctcaacggctcccttgggctccataaaatatttcttttttaaaaaagcagactcctttcatgcattgggatgaacggccctcttgtctgggtgctgggctacagcaaacaaatgtgtttgaatcccagtattccagagattcctggcggtgggctgtctagaagaggcgaggctggatctcacggtttttaaactgtatttttacccctttgggacccatacctgtgccctggagtctttcatgaggcacgtgggtcctctgcatcctcactctcccccctagcccaggtgcagccccgggaggggtgccctgaccccgccttaaacaaccaactttcccaccgaatcccatcggcgggcggggggggggggtttgggtgccaagtgccctggaaacctattgtcttttggctcagccaaaagaaacattccctccttcctttccttccgggcttgggggaaaccttcgtaaaaatcatagttagggttaagtccaagcagtgaggcctgacctgggctctgctctccttgttgagacactaacaggcagttgggaggaaaatctgcatttgactccaccctctttggggcaaaggagaaacaggtgacccgagggggggcaggccagaggagggcgactcgtgcacagggacccccacccttggaccccgctgtccttttctagttgtttacttggtggtggcagccagtctgaccttgtctgtggtctgactgttcctaagtgtgtaactttcagtattatctgtgacagatggttctgtggtgaaaaaggtttattatattccttatggctgccttgtacaaaatccgttagaaacgctaatgtaagatatcagatttctaacaagacaaaaacagcattatggagttaaaagatttttacaactgggtcttgattttgatgtgagctggtttttagctctcaaatgttgtcacttaaataaaaaccttctttgcctt

SEQ ID NO: 15691 - DNA, 1621 bp, Homo sapiens
  source 1..1621: mol_type = unassigned DNA
gcctgaaggaacctgggttggcttcctaggcttccaggtgcgtcctgcctgcagccaggtctacagcttcttccattgcgcagacccctctgcctcacggctcgagccactgctggagcccaagttccacctggtgccgcctgtcagcgtgcctcgctaccagaggttcccactgggcgatgggcagtccctcctcctcgccccctcttcctggagggcagctcccgggacagcccgccacttctggatgcccctgcctcgccccctcaggcctcgaggttccagcgcccaggacggaggatgagcgaggggagctcccacagcgagagctcggagtcctcggacagcatggcacccgtgggtgcctcccgcatcacagccaagtggtggggaagcaagaggatcgactatgccctgtactgccctgatgtcctcacggccttccccaccgtggccctgccccacctcttccacgccagttactgggagtccacagacgtggtggccttcatcctgagacaggtaatgcgctatgagagcgtgaacatcaaggaaagcgcccgcctggaccctgcagcactgagtcctgccaacccccgggagaagtggcttcgtaagcggactcaggtcaagctgaggaatgtcacggctaatcaccgggccaatgatgtgattgctgctgaagatggcccccaggtcctggtggggcggttcatgtacgggcccctcgacatggtggctctgactggagagaaggtggacatcctagtaatggcagagccatcctcaggccgctgggtacacctggacacagagatcaccaacagcagtggtcgcatcacatacaatgtgccgcggccccggcgcctgggggttggtgtctatcctgtgaagatggtcgtcaggggcgaccagacctgtgccatgagctacctcacggtgttgcccaggggcatggagtgtgtagtgttcagcattgatgggtccttcgcggccagcgtgtctatcatgggaagcgaccccaaggtccggccgggtgcagtggatgttgtccggcactggcaggacttgggctacatgatcctttacatcacgggacggccggacatgcagaagcagcgggtggtgtcgtggctgtcccagcacaacttcccacagggcatgatcttcttctccgatgggctggtgcatgacccgctgcggcagaaggccatcttcctgcgcaacctcatgcaggagtgcttcatcaaaatcagtgcggcctatggctccacgaaggacatctctgtctacagcgtgctgggcctgcctgcctcccagatcttcattgtgggccggcccaccaagaagtaccaaacccagtgccagttcctgagcgagggctacgccgcacacctggccgcgctggaggccagccaccgctcacgcccaaagaagaacaactcgcgcatgatcctgcgcaagggcagcttcgggctgcacgcgcagccagagttcctgcggaagcgcaaccacctgcgcagaaccatgtcagtgcagcagcccgacccgcccgccgccaaccccaagcccgagcgggcccagagccagcccgagtcggacaaagaccacgagcggccgc

SEQ ID NO: 15692 - DNA, 5369 bp, Homo sapiens
  source 1..5369: mol_type = unassigned DNA
tattcatccatccatccgtccatccatccatccatctgtccatccattatctatctatctatctatctatctatctatctatctatctatcatctgatctatctacctcataatatcacagtgctctgatggagcataatatcacagagcacagggcactgtgggctctctgagaaaggccagagaggacttcctggaggagtgacttttgggtttgcataccacggctaagtgtgtgggctctcaggccgcctggatttgagtcctggctgtgtggtctggggaaggtgtttaacttctccttgtctcaatttcctaatctgtacaatgaaggtagccatagtaaataacctctcagggtggctgtgaagagtctgtgtgctaatgtgtgtgaagcactcaacacagtgtccagaatgtagaaagcacatagggatgccagccttgggaatgccagccttggggatgctgaccttggggatgccagccttggggatgccagctgtggggatctagccatggggatactagcctcagggatactagctatggggatgccaaccttggagatactagccatagggatgccagccttggggatactagtcttggagatactagccatggggatgccagccttggggatactaactgtggggatgccagcttcggggatgctggccatgactcacatcatcttcctcctggctggaagaggggctctctctgcaggtggagagtgggctggggagagagacttccaactcgcagcagggaacccagctggtggggagaaaggagggaaggatgtgtccacagaagggctggttgagcgctgggcagcttgctcactgctgacgctggcacatccttgcccactgtgggccctggcacctgtgggggacaaactgaggggacctccagggtatggggcctctgggagctccacccactgctccaggcactgagggctgcagtgctcccctcctgcctatcctgttgaactagctaaaggtaggtgcctggggccgggtggatacctgggttctcagcagtcatatgtgcaaaaatgacccaaacgcctacagggcccaaatcctataggcattcggcagatcactggggctggcagctggaagctttggaactttcagtcaggggcaggagggaggcctctgcacctctgttctgcctgtccccctcacaggacctcgccagagacttggggctgctgcagagcccagccctcaggcagagccctcataccccggggctccggagctgggaagggtgggaagaggtccccagcagggtgccaggtgtgtggggcgcaccgcactccgaattccccaggagaatgggagccgatgttctcagccaattgtggctctgaggagggctcagtgcggggagggccaaagtcccctgccctggagcttccagccagtcaggagagagcacgggcaagccccttcccttccctgggccttccttttccccctctagattgggggaaagtcagagactctgatttatctgcgttccttggacaccaacaggaattgcaggcagatctcaatcagagttggaaggaaggaagattaggtctgtaattccgcaacctggctaattgcccaaatccctggtgtgattcttgttaaactgcgagatgtccaggcctccctccagcagtggctgattcaggagggaggtgccccggaatctgcatctttgacacctgctcactgctgaactggtggcgcagcatgttcccttgtcactctgatagtccaggacttcactgtgctagttcatcatccgtctcaggaacccctctacctgtccccaggacatctgacctccagagctgggtcacccctatctccaggaagacggatggcctggccattcattcatggggccagcgggagggagcttagttctcccccaggcagctccttgccagggccattcatcaccccataatcacggctgggagggagctctttctcagctaattaaaatctctccggctgcaatcgaggcctgcttcctctaatttgtgttctttggagatgaggaatggctgacagggccagccttgtacaccacgaggactctgccacctgctgagagtgctccagccctgtcacctgccccagattctgtcgagtcccagtgggatgtgcactgggctccatcagcctgagcttgagctaagggggaagggcaggctctgggcaggggtggagagttcccagcctccctgtatggtccttcctgaccagccaggtccaacagtgcatctgggtcggaagccccagggaacagaagcagagatgggggcagagggaggggtaggtgacttggaggcactggtctcaggtgagtctgagctgcccagagaggaggggatttcctagtgggaaggtagggagttgagggtgccaatgcaaagtctggacagtctgctggctggacactgtggggcaggctttcagccccctcgggggtcacagaactttctgcaaagctgatgaaagctctgatcttctcccagtgatgcaatgaacacaacatcatgtctgcagctatgtgcccagctccaagctgtggccaacatgtgaaccccaagcctggcatgtcctctctcctcctttcccagcttctccaaagcctttcttgaggcctagttcaagccccacctcctccaggaagtctgccatgatgatatgttcctacatgttccacactagctgggtcctcagctgacttcttcctctatgattggggtgccctttggggccatgcagaagagggcaatagagactgcagtcacagggaccccagggcccacacccatggccagcacgggaaggacacacagggagtcagtgtaggcttgaatcctcttcccctctcctccccacactgcctgtgctctgtgtcaccaggctcctgcctgggtcttcctgaagggtccctggagcccaattcctggccagtatgtgctctcttctgcctgatcctcagccccaaacctgccaacctgcccgatcctggctgggctcaccttgggccccctgtctgcagcctgaacccctacagccacgatgagggctgcctcagcagcagccaggaccacgtccctctggccgcccttcccctgttggccatctcctccccgcagtaccaggatgctgtcgccaccgtcatcgagcgagccaaccaggtctacagagagttcctgaagtcctctgatgggattggcttcagtgggcaggtgtgtctcatcggggactgtgtggggggcctcctggccttcgatgccatctgctacagtgcggggccctcaggggacagccctgccagcagcagccggaaggggagcatcagcagcacccaggacaccccagtcgcggtggaggaagattgcagcctggccagcagcaagcgtctcagcaaaagcaacattgacatctccagtgggttggaggatgaggagcccaagaggccgttgccgcggaaacagagcgactcctccacctatgactgcgaggccatcacccagcaccatgccttcctctcaagcatccactccagcgtgctaaaggatgagtctgagaccccggcggctggggggccgcagctccctgaggtcagcctgggccgctttgacttcgatgtgtccgacttcttcctcttcggctcgccactgggcctggtcctggccatgcggaggacggtgctgcctgggctggacggcttccaggtgcgtcctgcctgcagccaggtctacagcttcttccattgcgcagacccctctgcctcacggctcgagccactgctggagcccaagttccacctggtgccgcctgtcagcgtgcctcgctaccagaggttcccactgggcgatgggcagtccctcctcctcgctgatgccctacacacccacagccccctcttcctggagggcagctcccgggacagcccgccacttctggatgcccctgcctcgccccctcaggcctcgaggttccagcgcccaggacggaggatgagcgaggggagctcccacagcgagagctcggagtcctcggacagcatggcacccgtgggtgcctcccgcatcacagccaagtggtggggaagcaagaggatcgactatgccctgtactgccctgatgtcctcacggccttccccaccgtggccctgccccacctcttccacgccagttactgggagtccacagacgtggtggccttcatcctgagacaggtaatgcgctatgagagcgtgaacatcaaggaaagcgcccgcctggaccctgcagcactgagtcctgccaacccccgggagaagtggcttcgtaagcggactcaggtcaagctgaggaatgtcacggctaatcaccgggccaatgatgtgattgctgctgaagatggcccccaggtcctggtggggcggttcatgtacgggcccctcgacatggtggctctgactggagagaaggtggacatcctagtaatggcagagccatcctcaggccgctgggtacacctggacacagagatcaccaacagcagtggtcgcatcacatacaatgtgccgcggccccggcgcctgggggttggtgtctatcctgtgaagatggtcgtcaggggcgaccagacctgtgccatgagctacctcacggtgttgcccaggggcatggagtgtgtagtgttcagcattgatgggtccttcgcggccagcgtgtctatcatgggaagcgaccccaaggtccggccgggtgcagtggatgttgtccggcactggcaggacttgggctacatgatcctttacatcacgggacggccggacatgcagaagcagcgggtggtgtcgtggctgtcccagcacaacttcccacagggcatgatcttcttctccgatgggctggtgcatgacccgctgcggcagaaggccatcttcctgcgcaacctcatgcaggagtgcttcatcaaaatcagtgcggcctatggctccacgaaggacatctctgtctacagcgtgctgggcctgcctgcctcccagatcttcattgtgggccggcccaccaagaagtaccaaacccagtgccagttcctgagcgagggctacgccgcacacctggccgcgctggaggccagccaccgctcacgcccaaagaagaacaactcgcgcatgatcctgcgcaagggcagcttcgggctgcacgcgcagccagagttcctgcggaagcgcaaccacctgcgcagaaccatgtcagtgcagcagcccgacccgcccgccgccaaccccaagcccgagcgggcccagagccagcccgagtcggacaaagaccacg

SEQ ID NO: 15693 - DNA, 734 bp, Homo sapiens
  source 1..734: mol_type = unassigned DNA
gggcgaccagacctgtgccatgagctacctcacggtgttgcccaggggcatggagtgtgtagtgttcagcattgatgggtccttcgcggccagcgtgtctatcatgggaagcgaccccaaggtccggccgggtgcagtggatgttgtccggcactggcaggacttgggctacatgatcctttacatcacgggacggccggacatgcagaagcagcgggtggtgtcgtggctgtcccagcacaacttcccacagggcatgatcttcttctccgatgggctggtgcatgacccgctgcggcagaaggccatcttcctgcgcaacctcatgcaggagatgtgctttccatgaccgaagctatggttcccactagcagcaccaggaaactcggaaactcgggagaagtgcaaattatctgccctgcctcctcctgccaccctcttagacctactcaatcagaaactctggggaggggctcaggaaccttttcacaagccctccaggggattctgatgcacagaaagattaatcaagaatccctgacctagagcagaagaggcgttgacatataatgaccaaacccagcccacagcctgttttgatatgactggtcagctaagaatggtttttacactttcaaatggatggagagaataatcaaaagaatgatatttcatgacatgcaaattacatgaatttcaatgtctctaaataaaaaaagtttgattggaacaca

SEQ ID NO: 15694 - DNA, 3897 bp, Homo sapiens
  source 1..3897: mol_type = unassigned DNA
gttactgggcgtatggcgtacagacacgaggccggcgcccgggaggcggtgttcatccgcccgggaaaagagcgcctgttgctcgctgcccgcgtgtccctggctctctcgggaacccagcgccgaaggcgaggtgggcgcgggccgaaggaggtcctgggaggtcggcggcgcggagggatctccgcgggagccgttggggctgttggcctcgggctgaggtgcaaggaccaggactagggcgagggcagcggtccaagaaatagaaaacaatgactgggagagcccgagccagagccagaggaagggcccgcggtcaggagacagcgcagctggtgggctccactgccagtcagcaacctggttatattcagcctaggcctcagccgccaccagcagagggggaattatttggccgtggacggcagagaggaacagcaggaggaacagccaagtcacaaggactccagatatctgctggatttcaggagttatcgttagcagagagaggaggtcgtcgtagagattttcatgatcttggtgtgaatacaaggcagaacctagaccatgttaaagaatcaaaaacaggttcttcaggcattatagtaaggttaagcactaaccatttccggctgacatcccgtccccagtgggccttatatcagtatcacattgactataacccactgatggaagccagaagactccgttcagctcttctttttcaacacgaagatctaattggaaagtgtcatgcttttgatggaacgatattatttttacctaaaagactacagcaaaaggttactgaagtttttagtaagacccggaatggagaggatgtgaggataacgatcactttaacaaatgaacttccacctacatcaccaacttgtttgcagttctataatattattttcaggaggcttttgaaaatcatgaatttgcaacaaattggacgaaattattataacccaaatgacccaattgatattccaagtcacaggttggtgatttggcctggcttcactacttccatccttcagtatgaaaacagcatcatgctctgcactgacgttagccataaagtccttcgaagtgagactgttttggatttcatgttcaacttttatcatcagacagaagaacataaatttcaagaacaagtttccaaagaactaataggtttagttgttcttaccaagtataacaataagacatacagagtggatgatattgactgggaccagaatcccaagagcacctttaagaaagccgacggctctgaagtcagcttcttagaatactacaggaagcaatacaaccaagagatcaccgacttgaagcagcctgtcttggtcagccagcccaagagaaggcggggccctggggggacactgccagggcctgccatgctcattcctgagctctgctatcttacaggtctaactgataaaatgcgtaatgattttaacgtgatgaaagacttagccgttcatacaagactaactccagagcaaaggcagcgtgaagtgggacgactcattgattacattcataaaaacgataatgttcaaagggagcttcgagactggggtttgagctttgattccaacttactgtccttctcaggaagaattttgcaaacagaaaagattcaccaaggtggaaaaacatttgattacaatccacaatttgcagattggtccaaagaaacaagaggtgcaccattaattagtgttaagccactagataactggctgttgatctatacgcgaagaaattatgaagcagccaattcattgatacaaaatctatttaaagttacaccagccatgggcatgcaaatgagaaaagcaataatgattgaagtggatgacagaactgaagcctacttaagagtcttacagcaaaaggtcacagcagacacccagatagttgtctgtctgttgtcaagtaatcggaaggacaaatacgatgctattaaaaaatacctgtgtacagattgccctaccccaagtcagtgtgtggtggcccgaaccttaggcaaacagcaaactgtcatggccattgctacaaagattgccctacagatgaactgcaagatgggaggagagctctggagggtggacatccccctgaagctcgtgatgatcgttggcatcgattgttaccatgacatgacagctgggcggaggtcaatcgcaggatttgttgccagcatcaatgaagggatgacccgctggttctcacgctgcatatttcaggatagaggacaggagctggtagatgggctcaaagtctgcctgcaagcggctctgagggcttggaatagctgcaatgagtacatgcccagccggatcatcgtgtaccgcgatggcgtaggagacggccagctgaaaacactggtgaactacgaagtgccacagtttttggattgtctaaaatccattggtagaggttacaaccctagactaacggtaattgtggtgaagaaaagagtgaacaccagattttttgctcagtctggaggaagacttcagaatccacttcctggaacagttattgatgtagaggttaccagaccagaatggtatgacttttttatcgtgagccaggctgtgagaagtggtagtgtttctcccacacattacaatgtcatctatgacaacagcggcctgaagccagaccacatacagcgcttgacctacaagctgtgccacatctattacaactggccaggtgtcattcgtgttcctgctccttgccagtacgcccacaagctggcttttcttgttggccagagtattcacagagagccaaatctgtcactgtcaaaccgcctttactacctctaacctgcagaagacgatgcagccgcttttctttttgaaatgactttgggatttttttaagcttttatttactttttttttaactgttatctttctggatgaaacttgggaaggggattaggagatctagcattttatttctagcattgctattcaccggcttccttattttatacgtaaaaattaagattttatattttatcttcttgtttctcatagatattttgtgagcatttttttgtttattttgaagaaatgtggataagatacttggtagtataaaacagactctctgagagtatttgaaatgtgtttggagatttacttaaacgtactttcaggagtgagcaagtcctacttataaacctatattaactttatttttgagatacctgttttgaatttaaaggagataagaggcgtaaagtaggatgctcactacaaccataggtggggtttcagctcatatcttaaagataaaaggtactattatataacctatacacaagatacaggagaaaatatgcttgatttttatttggcaggggggctaggttgtatgggagtaaaaaaaacattgaaaatttttaaattgtccaaagaaacattttaagactctttaacaaaaaaggccatgagtaaatctctatattaacattactatttattttgttttggaactgggacatgattctatttgttataaaataaaattgatgtgattgtcaccttatttgaataactgtaattcttgttttactgaaagtatgtgcgttttcttttcatttaatttttaaaagtgcatacaattccattcataaaagctaaattagcctgaccaacatggtgaaaccccatctctactaaaaatacaaaattagccagatgtggtgccaggaggctgaggcaggagaatcacttgaacctgagaggcggaggttgcagtgagcagagatcacgccactgcactccagcctgggcaacagagtgagactccgtctcaaaaaaaaaaaaaaaaaaaaaaaaaaaaaaaaaaaaaaaa

SEQ ID NO: 15695 - DNA, 571 bp, Homo sapiens
  source 1..571: mol_type = unassigned DNA
gtgcaaggaccaggactagggcgagggcagcggtccaaggtgcggggccaggctgaggtgctagaaatagaaaacaatgactgggagagcccgagccagagccagaggaagggcccgcggtcaggagacagcgcagctggtgggctccactgccagtcagcaacctggttatattcagcctaggcctcagccgccaccagcagagggggaattatttggccgtggacggcagagaggaacagcaggaggaacagccaagtcacaaggactccagatatctgctggatttcaggagttatcgttagcagagagaggaggtcgtcgtagagattttcatgatcttggtgtgaatacaaggcagaacctagaccatgttaaagaatcaaaaacaggttcttcaggcattatagtaaggttaagcactaaccatttccggctgacatcccgtccccagtgggccttatatcagtatcacattgactataacccactgatggaagccagaagactccgttcagctcttctttttcaacacgaagatctaattggaaagtgtcatgcttttgatgga

SEQ ID NO: 15696 - DNA, 467 bp, Homo sapiens
  source 1..467: mol_type = unassigned DNA
agcggtccaaggtgcggggccaggctgaggtgctaggtgtgcgggggccgggatgcgggggcggcggctgggggtccgggatgtggagaaatagaaaacaatgactgggagagcccgagccagagccagaggaagggcccgcggtcaggagacagcgcagctggtgggctccactgccagtcagcaacctggttatattcagcctaggcctcagccgccaccagcagagggggaattatttggccgtggacggcagagaggaacagcaggaggaacagccaagtcacaaggactccagatatctgctggatttcaggagttatcgttagcagagagaggaggtcgtcgtagagattttcatgatcttggtgtgaatacaaggcagaacctagaccatgttaaagaatcaaaaacaggttcttcaggcattatagtaaggttaagcactaaccatttccggctgacat

SEQ ID NO: 15697 - DNA, 545 bp, Homo sapiens
  source 1..545: mol_type = unassigned DNA
gtgcacggcgtggtcctgagctcagcgccggagggacgttaggtggaagcgtctttggcagagctggtagcgaatcggagagaaatagaaaacaatgactgggagagcccgagccagagccagaggaagggcccgcggtcaggagacagcgcagctggtgggctccactgccagtcagcaacctggttatattcagcctaggcctcagccgccaccagcagagggggaattatttggccgtggacggcagagaggaacagcaggaggaacagccaagtcacaaggactccagatatctgctggatttcaggagttatcgttagcagagagaggaggtcgtcgtagagattttcatgatcttggtgtgaatacaaggcagaacctagaccatgttaaagaatcaaaaacaggttcttcaggcattatagtaaggttaagcactaaccatttccggctgacatcccgtccccagtgggccttatatcagtatcacattgactataacccactgatggaagccagaagactccgttcagctcttcttt

SEQ ID NO: 15698 - DNA, 566 bp, Homo sapiens
  source 1..566: mol_type = unassigned DNA
gttaggtggaagcgtctttggcagagctggtagcgaatcggagaggtgatttccagcgagtgtggttattggaagcacacacttgctttctgactttaagaattcaatatccagactgaggtggttttgaaactggaaggagataaagctgaaaaccagagttgtgctgggaaacctggacgtagagcgctgagccccccagaaatagaaaacaatgactgggagagcccgagccagagccagaggaagggcccgcggtcaggagacagcgcagctggtgggctccactgccagtcagcaacctggttatattcagcctaggcctcagccgccaccagcagagggggaattatttggccgtggacggcagagaggaacagcaggaggaacagccaagtcacaaggactccagatatctgctggatttcaggagttatcgttagcagagagaggaggtcgtcgtagagattttcatgatcttggtgtgaatacaaggcagaacctagaccatgttaaagaatcaaaaacaggttcttcaggcattatagtaaggttaagcactaacc

SEQ ID NO: 15699 - DNA, 879 bp, Homo sapiens
  source 1..879: mol_type = unassigned DNA
atctccaaatgggaaagaaagaaccagccaccagcatcctaattctttcagcactttctcctcctaagtctgtttataataaataatccaaatgaaaaactaagtcttatattaaaataggttttcccctttggccctactgcagtgcccagtgcaaggtaagcaactgagtttgttgaatgtaggaatgttacattaaaaaaaactgtcattaaagattagaaggatacataataattgcctggggagcttacttttgaaactcaaagaagtttaaagtaacattgtagaaattatcaaatgcgattgcctccattgagtattgtcttcaagattgtttcctctccagaaatagaaaacaatgactgggagagcccgagccagagccagaggaagggcccgcggtcaggagacagcgcagctggtgggctccactgccagtcagcaacctggttatattcagcctaggcctcagccgccaccagcagagggggaattatttggccgtggacggcagagaggaacagcaggaggaacagccaagtcacaaggactccagatatctgctggatttcaggagttatcgttagcagagagaggaggtcgtcgtagagattttcatgatcttggtgtgaatacaaggcagaacctagaccatgttaaagaatcaaaaacaggttcttcaggcattatagtaaggttaagcactaaccatttccggctgacatcccgtccccagtgggccttatatcagtatcacattgactataacccactgatggaagccagaagactccgttcagctcttctttttcaacacgaagatctaattggaaagtgtcatgcttttgatggaacgatattatttttacctaaaag

SEQ ID NO: 15700 - DNA, 1051 bp, Homo sapiens
  source 1..1051: mol_type = unassigned DNA
caggttacagatttaaaccctctaaaccagcaacttctgtagttgtaattgcatcatgacagactgtggaaaatacatgaagacctttaggtagttatcagacttacaatacagaaaaataatttcccagtcagcaaacatatgctcctgcactcttgcaccacagtccagttggcttgatctcttgattcaaggtgcacatctcttgaaagggtgcatctgcaattgcccaggacagtgacaaggcctttatgaatgaagttataactaggaaaccattctctcgttaggctggcagatacctaaaacatgttgataggattgttttatgccttgtcttctacacctcagtatcctttggattacacataatagcactatgggagttaatattgtcatcctttatttcgtgctttatgttgctcaagtacacaatttttttttaaggactccagatatctgctggatttcaggagttatcgttagcagagagaggaggtcgtcgtagagattttcatgatcttggtgtgaatacaaggcagaacctagaccatgttaaagaatcaaaaacaggttcttcaggcattatagtaaggttaagcactaaccatttccggctgacatcccgtccccagtgggccttatatcagtatcacattgactataacccactgatggaagccagaagactccgttcagctcttctttttcaacacgaagatctaattggaaagtgtcatgcttttgatggaacgatattatttttacctaaaagactacagcaaaaggttactgaagtttttagtaagacccggaatggagaggatgtgaggataacgatcactttaacaaatgaacttccacctacatcaccaacttgtttgcagttctataatattattttcaggaggcttttgaaaatcatgaatttgcaacaaattggacgaaattattataacccaaatgacccaattgatattccaagtcacaggttggtgatttggcctggcttcactacttccatccttcagtatgaaaacagcatcatgct

SEQ ID NO: 15701 - DNA, 545 bp, Homo sapiens
  source 1..545: mol_type = unassigned DNA
caggccaagaagcctgatgaaccttgacacaggagagccgcctgaagaatccaggtggggatgggtggctaaaaagggcagcctctagtatgggtgcatctggcgtgtggtaggccaaggagtgtggggccgtcctggggtctgcggaaaacgtcatttgagactccggtgaaacacgagtatgaaaatgaagttactcctcctgaaaaagccctagactaacggtaattgtggtgaagaaaagagtgaacaccagattttttgctcagtctggaggaagacttcagaatccacttcctggaacagttattgatgtagaggttaccagaccagaatggtatgacttttttatcgtgagccaggctgtgagaagtggtagtgtttctcccacacattacaatgtcatctatgacaacagcggcctgaagccagaccacatacagcgcttgacctacaagctgtgccacatctattacaactggccagtaagtgcttctacttgttgatgtttagcaaataaaggacattcacttttcaaaatgaaa

SEQ ID NO: 15702 - DNA, 3875 bp, Homo sapiens
  source 1..3875: mol_type = unassigned DNA
gttactgggcgtatggcgtacagacacgaggccggcgcccgggaggcggtgttcatccgcccgggaaaagagcgcctgttgctcgctgcccgcgtgtccctggctctctcgggaacccagcgccgaaggcgaggtgggcgcgggccgaaggaggtcctgggaggtcggcggcgcggagggatctccgcgggagccgttggggctgttggcctcgggctgaggtgcaaggaccaggactagggcgagggcagcggtccaagaaatagaaaacaatgactgggagagcccgagccagagccagaggaagggcccgcggtcaggagacagcgcagctggtgggctccactgccagtcagcaacctggttatattcagcctaggcctcagccgccaccagcagagggggaattatttggccgtggacggcagagaggaacagcaggaggaacagccaagtcacaaggactccagatatctgctggatttcaggagttatcgttagcagagagaggaggtcgtcgtagagattttcatgatcttggtgtgaatacaaggcagaacctagaccatgttaaagaatcaaaaacaggttcttcaggcattatagtaaggttaagcactaaccatttccggctgacatcccgtccccagtgggccttatatcagtatcacattgactataacccactgatggaagccagaagactccgttcagctcttctttttcaacacgaagatctaattggaaagtgtcatgcttttgatggaacgatattatttttacctaaaagactacagcaaaaggttactgaagtttttagtaagacccggaatggagaggatgtgaggataacgatcactttaacaaatgaacttccacctacatcaccaacttgtttgcagttctataatattattttcaggaggcttttgaaaatcatgaatttgcaacaaattggacgaaattattataacccaaatgacccaattgatattccaagtcacaggttggtgatttggcctggcttcactacttccatccttcagtatgaaaacagcatcatgctctgcactgacgttagccataaagtccttcgaagtgagactgttttggatttcatgttcaacttttatcatcagacagaagaacataaatttcaagaacaagtttccaaagaactaataggtttagttgttcttaccaagtataacaataagacatacagagtggatgatattgactgggaccagaatcccaagagcacctttaagaaagccgacggctctgaagtcagcttcttagaatactacaggaagcaatacaaccaagagatcaccgacttgaagcagcctgtcttggtcagccagcccaagagaaggcggggccctggggggacactgccagggcctgccatgctcattcctgagctctgctatcttacaggtctaactgataaaatgcgtaatgattttaacgtgatgaaagacttagccgttcatacaagactaactccagagcaaaggcagcgtgaagtgggacgactcattgattacattcataaaaacgataatgttcaaagggagcttcgagactggggtttgagctttgattccaacttactgtccttctcaggaagaattttgcaaacagaaaagattcaccaaggtggaaaaacatttgattacaatccacaatttgcagattggtccaaagaaacaagaggtgcaccattaattagtgttaagccactagataactggctgttgatctatacgcgaagaaattatgaagcagccaattcattgatacaaaatctatttaaagttacaccagccatgggcatgcaaatgagaaaagcaataatgattgaagtggatgacagaactgaagcctacttaagagtcttacagcaaaaggtcacagcagacacccagatagttgtctgtctgttgtcaagtaatcggaaggacaaatacgatgctattaaaaaatacctgtgtacagattgccctaccccaagtcagtgtgtggtggcccgaaccttaggcaaacagcaaactgtcatggccattgctacaaagattgccctacagatgaactgcaagatgggaggagagctctggagggtggacatccccctgaagctcgtgatgatcgttggcatcgattgttaccatgacatgacagctgggcggaggtcaatcgcaggatttgttgccagcatcaatgaagggatgacccgctggttctcacgctgcatatttcaggatagaggacaggagctggtagatgggctcaaagtctgcctgcaagcggctctgagggcttggaatagctgcaatgagtacatgcccagccggatcatcgtgtaccgcgatggcgtaggagacggccagctgaaaacactggtgaactacgaagtgccacagtttttggattgtctaaaatccattggtagaggttacaaccctagactaacggtaattgtggtgaagaaaagagtgaacaccagattttttgctcagtctggaggaagacttcagaatccacttcctggaacagttattgatgtagaggttaccagaccagaatggtatgacttttttatcgtgagccaggctgtgagaagtggtagtgtttctcccacacattacaatgtcatctatgacaacagcggcctgaagccagaccacatacagcgcttgacctacaagctgtgccacatctattacaactggccaggtgtcattcgtgttcctgctccttgccagtacgcccacaagctggcttttcttgttggccagagtattcacagagagccaaatctgtcactgtcaaaccgcctttactacctctaacctgcagaagacgatgcagccgcttttctttttgaaatgactttgggatttttttaagcttttatttactttttttttaactgttatctttctggatgaaacttgggaaggggattaggagatctagcattttatttctagcattgctattcaccggcttccttattttatacgtaaaaattaagattttatattttatcttcttgtttctcatagatattttgtgagcatttttttgtttattttgaagaaatgtggataagatacttggtagtataaaacagactctctgagagtatttgaaatgtgtttggagatttacttaaacgtactttcaggagtgagcaagtcctacttataaacctatattaactttatttttgagatacctgttttgaatttaaaggagataagaggcgtaaagtaggatgctcactacaaccataggtggggtttcagctcatatcttaaagataaaaggtactattatataacctatacacaagatacaggagaaaatatgcttgatttttatttggcaggggggctaggttgtatgggagtaaaaaaaacattgaaaatttttaaattgtccaaagaaacattttaagactctttaacaaaaaaggccatgagtaaatctctatattaacattactatttattttgttttggaactgggacatgattctatttgttataaaataaaattgatgtgattgtcaccttatttgaataactgtaattcttgttttactgaaagtatgtgcgtttccttttcatttaatttttaaaagtgcatacaattccattcataaaagctaaattagcctgaccaacatggtgaaaccccatctctactaaaaatacaaaattagccagatgtggtgccaggaggctgaggcaggagaatcacttgaacctgagaggcggaggttgcagtgagcagagatcacgccactgcactccagcctgggcaacagagtgagactccgtctcaaaaaaaaaaaaaaaaaa

SEQ ID NO: 15703 - DNA, 2579 bp, Homo sapiens
  source 1..2579: mol_type = unassigned DNA
aggtgcaaggaccaggactagggcgagggcagcggtccaagaaatagaaaacaatgactgggagagcccgagccagagccagaggaagggcccgcggtcaggagacagcgcagctggtgggctccactgccagtcagcaacctggttatattcagcctaggcctcagccgccaccagcagagggggaattatttggccgtggacggcagagaggaacagcaggaggaacagccaagtcacaaggactccagatatctgctggatttcaggagttatcgttagcagagagaggaggtcgtcgtagagattttcatgatcttggtgtgaatacaaggcagaacctagaccatgttaaagaatcaaaaacaggttcttcaggcattatagtaaggttaagcactaaccatttccggctgacatcccgtccccagtgggccttatatcagtatcacattgactataacccactgatggaagccagaagactccgttcagctcttctttttcaacacgaagatctaattggaaagtgtcatgcttttgatggaacgatattatttttacctaaaagactacagcaaaaggttactgaagtttttagtaagacccggaatggagaggatgtgaggataacgatcactttaacaaatgaacttccacctacatcaccaacttgtttgcagttctataatattattttcaggaggcttttgaaaatcatgaatttgcaacaaattggacgaaattattataacccaaatgacccaattgatattccaagtcacaggttggtgatttggcctggcttcactacttccatccttcagtatgaaaacagcatcatgctctgcactgacgttagccataaagtccttcgaagtgagactgttttggatttcatgttcaacttttatcatcagacagaagaacataaatttcaagaacaagtttccaaagaactaataggtttagttgttcttaccaagtataacaataagacatacagagtggatgatattgactgggaccagaatcccaagagcacctttaagaaagccgacggctctgaagtcagcttcttagaatactacaggaagcaatacaaccaagagatcaccgacttgaagcagcctgtcttggtcagccagcccaagagaaggcggggccctggggggacactgccagggcctgccatgctcattcctgagctctgctatcttacaggtctaactgataaaatgcgtaatgattttaacgtgatgaaagacttagccgttcatacaagactaactccagagcaaaggcagcgtgaagtgggacgactcattgattacattcataaaaacgataatgttcaaagggagcttcgagactggggtttgagctttgattccaacttactgtccttctcaggaagaattttgcaaacagaaaagattcaccaaggtggaaaaacatttgattacaatccacaatttgcagattggtccaaagaaacaagaggtgcaccattaattagtgttaagccactagataactggctgttgatctatacgcgaagaaattatgaagcagccaattcattgatacaaaatctatttaaagttacaccagccatgggcatgcaaatgagaaaagcaataatgattgaagtggatgacagaactgaagcctacttaagagtcttacagcaaaaggtcacagcagacacccagatagttgtctgtctgttgtcaagtaatcggaaggacaaatacgatgctattaaaaaatacctgtgtacagattgccctaccccaagtcagtgtgtggtggcccgaaccttaggcaaacagcaaactgtcatggccattgctacaaagattgccctacagatgaactgcaagatgggaggagagctctggagggtggacatccccctgaagctcgtgatgatcgttggcatcgattgttaccatgacatgacagctgggcggaggtcaatcgcaggatttgttgccagcatcaatgaagggatgacccgctggttctcacgctgcatatttcaggatagaggacaggagctggtagatgggctcaaagtctgcctgcaagcggctctgagggcttggaatagctgcaatgagtacatgcccagccggatcatcgtgtaccgcgatggcgtaggagacggccagctgaaaacactggtgaactacgaagtgccacagtttttggattgtctaaaatccattggtagaggttacaaccctagactaacggtaattgtggtgaagaaaagagtgaacaccagattttttgctcagtctggaggaagacttcagaatccacttcctggaacagttattgatgtagaggttaccagaccagaatggtatgacttttttatcgtgagccaggctgtgagaagtggtagtgtttctcccacacattacaatgtcatctatgacaacagcggcctgaagccagaccacatacagcgcttgacctacaagctgtgccacatctattacaactggccagtaagtgcttctacttgttgatgtttagcaaataaaggacattcacttttcaaaatg

SEQ ID NO: 15704 - DNA, 571 bp, Homo sapiens; identical to SEQ ID NO: 15695
  source 1..571: mol_type = unassigned DNA

SEQ ID NO: 15705 - DNA, 467 bp, Homo sapiens; identical to SEQ ID NO: 15696
  source 1..467: mol_type = unassigned DNA

SEQ ID NO: 15706 - DNA, 545 bp, Homo sapiens; identical to SEQ ID NO: 15697
  source 1..545: mol_type = unassigned DNA

SEQ ID NO: 15707 - DNA, 566 bp, Homo sapiens; identical to SEQ ID NO: 15698
  source 1..566: mol_type = unassigned DNA

SEQ ID NO: 15708 - DNA, 879 bp, Homo sapiens; identical to SEQ ID NO: 15699
  source 1..879: mol_type = unassigned DNA

SEQ ID NO: 15709 - DNA, 1051 bp, Homo sapiens; identical to SEQ ID NO: 15700
  source 1..1051: mol_type = unassigned DNA

SEQ ID NO: 15710 - DNA, 545 bp, Homo sapiens; identical to SEQ ID NO: 15701
  source 1..545: mol_type = unassigned DNA

SEQ ID NO: 15711 - DNA, 3043 bp, Homo sapiens
  source 1..3043: mol_type = unassigned DNA
cagcatcgccttttcctcccgtttctccttccactcccagctccacatcctcctcctattctcccctctcccctcttcaaacccccaccttccagttccctcacctcccctttcggctggtcccctggggcttgcagcaagagggagagagagctcctgacaggattgatggtccttccccaccctgtcctctcatccgctccctccccagcaggcacagacatccccctacaaaaggcaggagcccaggctgtgtggaaacagctgctctcagacgcctttccatttgctctctgctggctaggctgggctgtgcctctgctccctcttcctctagctgagagtgggcacctggggtaccgggcccccccacctcattccccatgaatgctgtgggaagtcctgaggggcaggagctgcaaaagctggggagtggagcctgggacaaccccgcctacagtggtcccccttccccacacgggacgctgagagtctgcaccatctccagcacggggcctctccagccccaacccaagaagcctgaagatgaaccccaggagacggcatacaggacccaggtgtccagctgctgcctccatatctgtcaaggcatcagaggactttggggaacaaccctgactgagaacacagctgagaaccgggaactttatatcaagaccaccctgagggagctgttggtatatattgtgttcctggtggacatctgtctactgacctatggaatgacaagctccagtgcttattactacaccaaagtgatgtctgagctcttcttacatactccatcagacactggagtctcctttcaggccatcagcagcatggcggacttctgggattttgcccagggcccactactggacagtttgtattggaccaaatggtacaacaaccagagcctgggccatggctcccactccttcatctactatgagaacatgctgctgggggttccgaggctgcggcagctaaaggtccgcaatgactcctgtgtggtgcatgaagacttccgggaggacattctgagctgctatgatgtctactctccagacaaagaagaacaactcccctttgggcccttcaatggcacagcgtggacataccactcgcaggatgagttggggggcttctcccactggggcaggctcacaagctacagcggaggtggctactacctggaccttccaggatcccgacagggtagtgcagaggctctccgggcccttcaggaggggctgtggctggacaggggcactcgagtggtgttcatcgacttctcagtctacaatgccaatatcaatcttttctgtgtcctgaggctggtggtggagtttccagctacaggaggtgccatcccatcctggcaaatccgcacagtcaagctgatccgctatgtcagcaactgggacttctttatcgttggctgtgaggtcatcttctgcgtcttcatcttctactatgtggtggaagagatcctggagctccacattcaccggcttcgctacctcagcagcatctggaacatactggacctggtggtcatcttgctctccattgtggctgtgggcttccacatattccgaaccctcgaggtgaatcggctcatggggaagctcctgcagcagccaaacacgtatgcagactttgagttcctcgccttctggcagacacagtacaacaacatgaatgctgtcaacctcttcttcgcctggatcaagatattcaagtacatcagcttcaacaaaaccatgacccagctctcctccacgctggcccgctgtgccaaggacatcctgggcttcgccgtcatgttcttcattgttttcttcgcctatgcccaactcggctacctgcttttcgggacccaagtggaaaactttagcactttcatcaagtgcattttcactcagttccggataatcctcggggactttgactacaatgctatcgacaatgccaaccgcatcctgggccctgcctactttgtcacctatgtcttcttcgtcttcttcgtgctcctgaacatgttcctggccatcatcaatgacacatattcagaggtcaaggaggagctggctggacagaaggatgagctgcaactttctgacctcctgaaacagggctacaacaagaccctactaagactgcgtctgaggaaggagagggtttcggatgtgcagaaggtcctgcagggtggggagcaggagatccagtttgaggatttcaccaacaccttaagggaactgggacacgcagagcatgaaatcactgagctcacggccaccttcaccaagtttgacagagatgggaatcgtattctggatgagaaggaacaggaaaaaatgcgacaggacctggaggaagagagggtggccctcaacactgagattgagaaactaggccgatctattgtgagcagcccacaaggcaaatcgggtccagaggctgccagagcaggaggctgggtttcaggagaagaattctacatgctcacaaggagagttctgcagctggagactgtcctggaaggagtagtgtcccagattgatgctgtaggctcaaagctgaaaatgctggagaggaaggggtggctggctccctccccaggcgtgaaggaacaagctatttggaagcacccgcagccagccccagctgtgaccccagacccctggggagtccagggtgggcaggagagtgaggttccctataaaagagaagaggaagccttagaggagaggagactctcccgtggtgagattccaacgttgcagaggagttaagtgtgaggcactcccggagcaaagtctatgaaggatcttctgcaagaggctgcctcctggtccactgaacctggaaactgagtgggctttaaccaggagataaaaatggagcctgaagggaatcaggcaaggaaatgaactcaggattcagagatctttgaattaatatgtggtgggttctgacattattcttccataagaccatgtgggtttccatggtggctatcaataaaactccttag

SEQ ID NO: 15712 - DNA, 423 bp, Homo sapiens
  source 1..423: mol_type = unassigned DNA
gcctctccagccccaacccaagaagcctgaagatgaaccccaggagacggcatacaggacccaggtgtccagctgctgcctccatatctgtcaaggcatcagagaggttccctataaaagagaagaggaagccttagaggagaggagactctcccgtggtgagattccaacgttgcagaggagttaagtgtgaggcactcccggagcaaagtctatgaaggatcttctgcaagaggctgcctcctggtccactgaacctggaaactgagtgggctttaaccaggagataaaaatggagcctgaagggaatcaggcaaggaaatgaactcaggattcagagatctttgaattaatatgtggtgggttctgacattattcttccataagaccatgtgggtttccatggtggctatcaataaaact

SEQ ID NO: 15713 - DNA, 2277 bp, Homo sapiens
  source 1..2277: mol_type = unassigned DNA
atgaaccccaggagacggcatacaggacccaggtgtccagctgctgcctccatatctgtcaaggcatcagaggcatctctcccatgccccttaggactttggggaacaaccctgactgagaacacagctgagaaccgggaactttatatcaagaccaccctgagggagctgttggtatatattgtgttcctggtggacatctgtctactgacctatggaatgacaagctccagtgcttattactacaccaaagtgatgtctgagctcttcttacatactccatcagacactggagtctcctttcaggccatcagcagcatggcggacttctgggattttgcccagggcccactactggacagtttgtattggaccaaatggtacaacaaccagagcctgggccatggctcccactccttcatctactatgagaacatgctgctgggggttccgaggctgcggcagctaaaggtccgcaatgactcctgtgtggtgcatgaagacttccgggaggacattctgagctgctatgatgtctactctccagacaaagaagaacaactcccctttgggcccttcaatggcacagcgtggacataccactcgcaggatgagttggggggcttctcccactggggcaggctcacaagctacagcggaggtggctactacctggaccttccaggatcccgacagggtagtgcagaggctctccgggcccttcaggaggggctgtggctggacaggggcactcgagtggtgttcatcgacttctcagtctacaatgccaatatcaatcttttctgtgtcctgaggctggtggtggagtttccagctacaggaggtgccatcccatcctggcaaatccgcacagtcaagctgatccgctatgtcagcaactgggacttctttatcgttggctgtgaggtcatcttctgcgtcttcatcttctactatgtggtggaagagatcctggagctccacattcaccggcttcgctacctcagcagcatctggaacatactggacctggtggtcatcttgctctccattgtggctgtgggcttccacatattccgaaccctcgaggtgaatcggctcatggggaagctcctgcagcagccaaacacgtatgcagactttgagttcctcgccttctggcagacacagtacaacaacatgaatgctgtcaacctcttcttcgcctggatcaagatattcaagtacatcagcttcaacaaaaccatgacccagctctcctccacgctggcccgctgtgccaaggacatcctgggcttcgccgtcatgttcttcattgttttcttcgcctatgcccaactcggctacctgcttttcgggacccaagtggaaaactttagcactttcatcaagtgcattttcactcagttccggataatcctcggggactttgactacaatgctatcgacaatgccaaccgcatcctgggccctgcctactttgtcacctatgtcttcttcgtcttcttcgtgctcctgaacatgttcctggccatcatcaatgacacatattcagaggtcaaggaggagctggctggacagaaggatgagctgcaactttctgacctcctgaaacagggctacaacaagaccctactaagactgcgtctgaggaaggagagggtttcggatgtgcagaaggtcctgcagggtggggagcaggagatccagtttgaggatttcaccaacaccttaagggaactgggacacgcagagcatgaaatcactgagctcacggccaccttcaccaagtttgacagagatgggaatcgtattctggatgagaaggaacaggaaaaaatgcgacaggacctggaggaagagagggtggccctcaacactgagattgagaaactaggccgatctattgtgagcagcccacaaggcaaatcgggtccagaggctgccagagcaggaggctgggtttcaggagaagaattctacatgctcacaaggagagttctgcagctggagactgtcctggaaggagtagtgtcccagattgatgctgtaggctcaaagctgaaaatgctggagaggaaggggtggctggctccctccccaggcgtgaaggaacaagctatttggaagcacccgcagccagccccagctgtgaccccagacccctggggagtccagggtgggcaggagagtgaggttccctataaaagagaagaggaagccttagaggagaggagactctcccgtggtgagattccaacgttgcagaggagttaa

SEQ ID NO: 15714 - DNA, 554 bp, Homo sapiens
  source 1..554: mol_type = unassigned DNA
atccccctacaaaaggcaggagcccaggctgtgtggaaacagctgctctcagacgcctttccatttgctctctgctggctaggctgggctgtgcctctgctccctcttcctctagctgagagtgggcacctggggtaccgggcccccccacctcattccccatgaatgctgtgggaagtcctgaggggcaggagctgcaaaagctggggagtggagcctgggacaaccccgcctacagtggtcccccttccccacacgggacgctgagagtctgcaccatctccagcacggggcctctccagccccaacccaagaagcctgaagatgaaccccaggagacggcatacaggacccaggactttggggaacaaccctgactgagaacacagctgagaaccgggaactttatatcaagaccaccctgagggagctgttggtatatattgtgttcctggtggacatctgtctactgacctatggaatgacaagctccagtgcttattactacaccaaagtgatgtctgagctcttcttacatactccatcagacactg

SEQ ID NO: 15715 - DNA, 2502 bp, Homo sapiens
  source 1..2502: mol_type = unassigned DNA
gaggcaagtgtcaggccgatgtgtcgcccgcgaggggccggggtcggggccgccggggccatgcgcgcgggctgggcagggggccggcggggcgcagagcggagccgcctcggagcctgagccgcccggggccggggccggggagccgcgcggggccggccggccggggggaggggagcgatgcggcgccggcgggcggcagtggccgcgggtttctgcgcctccttcctgctgggctccgtcctcaacgtgctcttcgctccgggctcggagcctccgaggccaggccagtcccctgagccttcgccggccccgggtccgggccgtcgcgggggccgcggggagctggcccggcagatccgggcgcgctacgaggaggtgcagcgctattcccgcgggggccccgggcccggggcgggccggccggagcggcggcgcctgatggacctggctccgggcgggcccggcctgccgcgcccccggcccccttgggcccggcccctgtccgacggcgccccaggctggcccccggctcccggcccaggctcccccggcccgggcccgcgcctgggctgcgccgcgcttcgcaacgtgtccggcgcgcagtacatgggctcaggctacaccaaggccgtgtaccgggtccgcctgcccggcggtgccgcggtggcgctcaaggcggtggactttagcggccacgatctgggcagctgcgtgcgcgagttcggggtacggaggggctgctatcggctggcggcccacaagctgcttaaggagatggtgctgctggagcggctgcggcaccccaacgtgctgcagctctatggctactgctaccaggacagcgaggacatcccagacaccctgaccaccatcacggagctgggcgcccctgtagaaatgatccagctgctgcaaacttcctgggaggatcgattccgaatctgcctgagcctgggccgcctcctccaccacctggcccactccccactgggctccgtcactctgctggacttccgccctcggcagtttgtgctggtggatggggagctcaaagtgacggacctggatgacgcacgtgtggaggagacgccgtgtgcaggcagcaccgactgcatactcgagtttccggccaggaacttcaccctgccctgctcagcccagggctggtgcgagggcatgaacgagaagcggaacctctataatgcctacaggtttttcttcacatacctcctgcctcacagtgccccgccttcactgcgtcctctgctggacagcatcgtcaacgccacaggagagctcgcctggggggtggacgagaccctggcccagctggagaaggtgctgcacctgtaccggagcgggcagtatctgcagaactccacggcaagcagcagtaccgagtaccagtgtatcccagacagcaccatcccccaggaagactaccgctgctggccatcctaccaccacgggagctgcctcctttcagtgttcaacctggctgaggctgtggatgtctgtgagagccatgcccagtgtcgggcctttgtggtcaccaaccagaccacctggacaggtcggcagctggtctttttcaagactggatggagccaagtggtccctgatcccaacaagaccacatatgtgaaggcctctggctgacctatctgagggctcggctgaccagctgactatcctcagcagctgggcttgcctgtggagggagtgacttgcactggcagcactgcatgtcacctgggaacccctgcagacaaagctaacatcccagacagacagatgtgaccaggacaaacgtgcaataatgccaaatgttaaaatgtgagtttaccagcctagctatgggactgctggctcctagtccaggaatcatgggggtatgactgcctctccaaccctgtgggctgtaagcaagctcaggctagtctccccactgggggctgtgcccctccctgggacggttccgtgggcagccccatcactgtgttcaatagtgtgagaatgtagctaaagcccctgctgctgctgctgcacatgccacagcaggcggtgggggctgcgtggggacaatccatcgtggagtgttctctcagcttaggtctggacaggagacttggcgggagatgctccaggatgtgggtgattctgtacctggggaggctatctctgacctcccgacaggggacactcccaggccagcccaggggtcaggggcagaggtgcacacctcagcatgagccaagactggggtcagggagcaggtgtggtttgagccaggacctggggcgggggtggggccggggcctttctgcctcatttgctttcaatgaaagcctcaaagcagccaaaaccaggctttcccccttcctcgagtttgaatatccagaatcttttgtacttcttgttggttaaattgtttatttttgtaaaaaataaaataaaattagttaataaaatgatgtttcacagcaaactcttccctaa

SEQ ID NO: 15716 - DNA, 1550 bp, Homo sapiens
  source 1..1550: mol_type = unassigned DNA
cgcccgcgaggggccggggtcggggccgccggggccatgcgcgcgggctgggcagggggccggcggggcgcagagcggagccgcctcggagcctgagccgcccggggccggggccggggagccgcgcggggccggccggccggggggaggggagcgatgcggcgccggcgggcggcagtggccgcgggtttctgcgcctccttcctgctgggctccgtcctcaacgtgctcttcgctccgggctcggagcctccgaggccaggccagtcccctgagccttcgccggccccgggtccgggccgtcgcgggggccgcggggagctggcccggcagatccgggcgcgctacgaggaggctggcccccggctcccggcccaggctcccccggcccgggcccgcgcctgggctgcgccgcgcttcgcaacgtgtccggcgcgcagtacatgggctcaggctacaccaaggccgtgtaccgggtccgcctgcccggcggtgccgcggtggcgctcaaggcggtggactttagcggccacgatctgggcagctgcgtgcgcgagttcggggtacggaggggctgctatcggctggcggcccacaagctgcttaaggagatggtgctgctggagcggctgcggcaccccaacgtgctgcagctctatggctactgctaccaggacagcgaggacatcccagacaccctgaccaccatcacggagctgggcgcccctgtagaaatgatccagctgctgcaaacttcctgggaggatcgattccgaatctgcctgagcctgggccgcctcctccaccacctggcccactccccactgggctccgtcactctgctggacttccgccctcggcagtttgtgctggtggatggggagctcaaagtgacggacctggatgacgcacgtgtggaggagacgccgtgtgcaggcagcaccgactgcatactcgagtttccggccaggaacttcaccctgccctgctcagcccagggctggtgcgagggcatgaacgagaagcggaacctctataatgcctacaggtttttcttcacatacctcctgcctcacagtgccccgccttcactgcgtcctctgctggacagcatcgtcaacgccacaggagagctcgcctggggggtggacgagaccctggcccagctggagaaggtgctgcacctgtaccggagcgggcagtatctgcagaactccacggcaagcagcagtaccgagtaccagtgtatcccagacagcaccatcccccaggaagactaccgctgctggccatcctaccaccacgggagctgcctcctttcagtgttcaacctggctgaggctgtggatgtctgtgagagccatgcccagtgtcgggcctttgtggtcaccaaccagaccacctggacaggtcggcagctggtctttttcaagactggatggagccaagtggtccctgatcccaacaagaccacatatgtgaaggcctctggctgacctatctgagggctcggctgaccagctgactatcctcagcagctgggcttgcct

SEQ ID NO: 15717 - DNA, 563 bp, Homo sapiens
  source 1..563: mol_type = unassigned DNA
gcccgcgcctgggctgcgccgcgcttcgcaacgtgtccggcgcgcagtacatgggctcaggctacaccaaggccgtgtaccgggtccgcctgcccggcggtgccgcggtggcgctcaaggcggtggactttagcggccacgatctgggcagctgcgtgcgcgagttcggggtacggaggggctgctatcggctggcggcccacaagctgcttaaggagatggtgctgctggagcggctgcggcaccccaacgtgctgcagctctatggctactgctaccaggacagcgaggacatcccagacaccctgaccaccatcacggagctgggcgcccctgtagaaatgatccagctgctgcaaacttcctgggaggatcgattccgagtgagctcagaggagggctcgggccctgggctccttgctaggatggttctgccttagaaggccagccctccaaagcagctcccactcctcctccacccagggagagggaggggaggaaggcgcacaggctgactcagccaccggccaaagggttcaaaaaagaagcaagacttaaaggat

SEQ ID NO: 15718 - DNA, 693 bp, Homo sapiens
  source 1..693: mol_type = unassigned DNA
cggcccacaagctgcttaaggagatggtgctgctggagcggctgcggcaccccaacgtgctgcagctctatggctactgctaccaggacagcgaggacatcccagacaccctgaccaccatcacggagctgggcgcccctgtagaaatgatccagctgctgcaaacttcctgggaggatcgattccgaatctgcctgagcctgggccgcctcctccaccacctggcccactccccactgggctccgtcactctgctggacttccgccctcggcagtttgtgctggtggatggggagctcaaagtgacggacctggatgacgcacgtgtggaggagacgccgtgtgcaggcagcaccgactgcatactcgagtttccggccaggaacttcaccctgccctgctcagcccagggctggtgcgagggcatgaacgagaagcggaacctctataatgcctacaggtgacctccacccctgactcgggaactccatcgaaggagaatgggccaggagggcatggcaggaagagagccaacgtggaggccagctgggcagggagactcagccttgaccagagcaagggaaggcttctaccctgtccagaagggaacattcaggcctctgatggagaggctaaaaatagacagctccaaggagaatccgggttagggggtggcagctggaggcttcttaa

SEQ ID NO: 15719 - DNA, 725 bp, Homo sapiens
  source 1..725: mol_type = unassigned DNA
ggggctgctccgacaccgggagtcagtcaggggataatgtggggctgggaggtgggcaagtcctgggaagggttgggaagcaggcccctggtttcggttagtatgaagttaggtgtggtgttagcatgtgcccagaaccctcccccgaggctgagtagacttcactgcgttctgcctggttgctaggcctgagggatccggctccctggccaggttagcgttctgccccaggttggaatagaggaaggatgtgtctccaaaggctggattcctgagccactggtttccctctgccacaggtttttcttcacatacctcctgcctcacagtgccccgccttcactgcgtcctctgctggacagcatcgtcaacgccacaggagagctcgcctggggggtggacgagaccctggcccagctggagaaggtgctgcacctgtaccggagcgggcagtatctgcagaactccacggcaagcagcagtaccggtgagtggccccaagctgatccacagggaagcaagaaacaggtgggagggtgaatgaccccgcccaattaggctaagtggctcaccctttctctggggacccttgtctccaaaggccactgtaggggctcacatagaatcatggaggggctgacatggactaatttgaggttccatctctagctgagctagagcaactataattctgccttcaacctggggttgggcactgatacccc

SEQ ID NO: 15720 - DNA, 773 bp, Homo sapiens
  source 1..773: mol_type = unassigned DNA
tgcgttctgcctggttgctaggcctgagggatccggctccctggccaggttagcgttctgccccaggttggaatagaggaaggatgtgtctccaaaggctggattcctgagccactggtttccctctgccacaggtttttcttcacatacctcctgcctcacagtgccccgccttcactgcgtcctctgctggacagcatcgtcaacgccacaggtgagctctccagggcccatctgcttccaggcacctaccccacccccacccgccagcaaaagtggggagaaaaataacccagggcagcaggggttctagaaaccatcacttcctaaggtggcattctgccgcaacctccccgctcccccgccctctgttcactggggcacaggctctggaggcagaggtgggagcagctggctgctgacttcagggaggagtgggagccccaggcatcctgtcttagccacactgcactctgcaggagagctcgcctggggggtggacgagaccctggcccagctggagaaggtgctgcacctgtaccggagcgggcagtatctgcagaactccacggcaagcagcagtaccgagtaccagtgtatcccagacagcaccatcccccaggaagactaccgctgctggccatcctaccaccacgggagctgcctcctttcagtgttcaacctggctgaggctgtggatgtctgtgagagccatgcccagtgtcgggcctttgtggtcaccaaccagaccacctggacaggtgagccagtgg

SEQ ID NO: 15721 - DNA, 1447 bp, Homo sapiens
  source 1..1447: mol_type = unassigned DNA
tctgccacaggtttttcttcacatacctcctgcctcacagtgccccgccttcactgcgtcctctgctggacagcatcgtcaacgccacaggagagctcgcctggggggtggacgagaccctggcccagctggagaaggtgctgcacctgtaccggagcgggcagtatctgcagaactccacggcaagcagcagtaccgagtaccagtgtatcccagacagcaccatcccccaggaagactaccgctgctggccatcctaccaccacgggagctgcctcctttcagtgttcaacctggctgaggctgtggatgtctgtgagagccatgcccagtgtcgggcctttgtggtcaccaaccagaccacctggacaggtgagccagtgggagaagcccttccaagggagatggcaggacctctctggaggttgatagatagtgatcccccatcggaagtcagagggggtgctgaggtgatgagagagaggtatacgtgtcttcaaggcagtcaaattagggagaatggtcttgcctccagaaagagaaacatccagccctgttacctctcacctctgccccccaggtcggcagctggtctttttcaagactggatggagccaagtggtccctgatcccaacaagaccacatatgtgaaggcctctggctgacctatctgagggctcggctgaccagctgactatcctcagcagctgggcttgcctgtggagggagtgacttgcactggcagcactgcatgtcacctgggaacccctgcagacaaagctaacatcccagacagacagatgtgaccaggacaaacgtgcaataatgccaaatgttaaaatgtgagtttaccagcctagctatgggactgctggctcctagtccaggaatcatgggggtatgactgcctctccaaccctgtgggctgtaagcaagctcaggctagtctccccactgggggctgtgcccctccctgggacggttccgtgggcagccccatcactgtgttcaatagtgtgagaatgtagctaaagcccctgctgctgctgctgcacatgccacagcaggcggtgggggctgcgtggggacaatccatcgtggagtgttctctcagcttaggtctggacaggagacttggcgggagatgctccaggatgtgggtgattctgtacctggggaggctatctctgacctcccgacaggggacactcccaggccagcccaggggtcaggggcagaggtgcacacctcagcatgagccaagactggggtcagggagcaggtgtggtttgagccaggacctggggcgggggtggggccggggcctttctgcctcatttgctttcaatgaaagcctcaaagcagccaaaaccaggctttcccccttcctcgagtttgaatatccagaatcttttgtacttcttgttggttaaattgtttattttt

SEQ ID NO: 15722 - DNA, 765 bp, Homo sapiens
  source 1..765: mol_type = unassigned DNA
tttttcttcacatacctcctgcctcacagtgccccgccttcactgcgtcctctgctggacagcatcgtcaacgccacaggctctggaggcagaggtgggagcagctggctgctgacttcagggaggagtgggagccccaggcatcctgtcttagccacactgcactctgcaggagagctcgcctggggggtggacgagaccctggcccagctggagaaggtgctgcacctgtaccggagcgggcagtatctgcagaactccacggcaagcagcagtaccgagtaccagtgtatcccagacagcaccatcccccaggaagactaccgctgctggccatcctaccaccacgggagctgcctcctttcagtgttcaacctggctgaggctgtggatgtctgtgagagccatgcccagtgtcgggcctttgtggtcaccaaccagaccacctggacaggtcggcagctggtctttttcaagactggatggagccaagtggtccctgatcccaacaagaccacatatgtgaaggcctctggctgacctatctgagggctcggctgaccagctgactatcctcagcagctgggcttgcctgtggagggagtgacttgcactggcagcactgcatgtcacctgggaacccctgcagacaaagctaacatcccagacagacagatgtgaccaggacaaacgtgcaataatgccaaatgttaaaatgtgagtttaccagcctagctatgggactgctggctcctagtccaggaa

SEQ ID NO: 15723 - DNA, 787 bp, Homo sapiens
  source 1..787: mol_type = unassigned DNA
ctcctgcctcacagtgccccgccttcactgcgtcctctgctggacagcatcgtcaacgccacaggaagactaccgctgctggccatcctaccaccacgggagctgcctcctttcagtgttcaacctggctgaggctgtggatgtctgtgagagccatgcccagtgtcgggcctttgtggtcaccaaccagaccacctggacaggtcggcagctggtctttttcaagactggatggagccaagtggtccctgatcccaacaagaccacatatgtgaaggcctctggctgacctatctgagggctcggctgaccagctgactatcctcagcagctgggcttgcctgtggagggagtgacttgcactggcagcactgcatgtcacctgggaacccctgcagacaaagctaacatcccagacagacagatgtgaccaggacaaacgtgcaataatgccaaatgttaaaatgtgagtttaccagcctagctatgggactgctggctcctagtccaggaatcatgggggtatgactgcctctccaaccctgtgggctgtaagcaagctcaggctagtctccccactgggggctgtgcccctccctgggacggttccgtgggcagccccatcactgtgttcaatagtgtgagaatgtagctaaagcccctgctgctgctgctgcacatgccacagcaggcggtgggggctgcgtggggacaatccatcgtggagtgttctctcagcttaggtctggacaggagacttggcgggagatgctccaggatgtgggtg

SEQ ID NO: 15724 - DNA, 4163 bp, Homo sapiens
  source 1..4163: mol_type = unassigned DNA
atccataatccagcgatgctgcagctgtaaaagcattaatagaaaatcaatccacaacctcgcggggcagcgatcgtcgagcgccgtttccaggctgccttccctggggtcgggagcggccccgctccccccgtggctggcgcggaatgtggtgatccgtcccggggcggggatgacttcatgcagccggagctccgcggcgggagcggaggctgctgctggcaggtggggcgcgggccggcgcgagctgaccgagcactcggcgggcgcggcgggactgcggcccgtggcggcgtgcgcggggacctgcgctgactaggtccggggaagtttcctgactttctgagaagccctggtttccccaaagaagtgatttctgatagaaatctgaaggtcatctccaagaaaaaagagatctagtatagtcaatgaattaaagacaagaaggtttccaatcagtccctgctatgtggatatttggtagcaatgactgatgtggaaactacatatgcagattttattgcttcaggaagaacaggtagaagaaatgcaatacatgatatcctggtttcctctgcaagtggcaacagcaatgaattagccttgaaattagcaggtcttgatatcaacaagacagaaggtgaagaagatgcacaacgaagttctacagaacaaagtggggaagcccagggagaagcagcaaaatctgaaagctaacaccccactttgaccctcgaccacacctgaaaatgtctcaaatctccaggagtatctggaatgcatttgtttccatgagtgaaaagaggaaaaagaaaatggctgtgctgcattgcaggaacctgctcattatcatgttaaaaatgagggcagaggctgtggctgcaggcagacttttccctacctctgtcattagcaatggttgaaatcatgtggcttgtgtttgggcgtcatttttgtatggatcctttcacttgatcatatgacgaaatgcttatagagagtagctccgacctagatgatgattcttcctgtagcatctggcccctcacaatgtcagaggatttaattgtgtctaattgcgaagggttgattgaaccccagagtttaaatatctctggctcaagtgttcacccagtaaaagaaagatccagaaagcactgtttttagcattacgtatctgtgtgttactgctgtgttatttacactgttttgtattgtacaatatatatgctcagcactgcccccttctctgattgcttatgaaaaacaaaatgatgtacattactgtgaatttttataccactcatttttaaaagggctgtcttttcattttagttttccatactgtggtggtgtacacaggatagaacacccttttttaaaacacagtctttccccttgctcattgtatgttgatgagttgattaagtctaacagattcatcaagactccattgctttattatagagacatttgaaaatatccattaatgtgaatatcacctgaattcagtctgtttggtgtctgcacagactggaattcaatctgtcaaatttgttttattctcaagtggagaacttctcccacataatatatatatatatatatattttaatttatgagaattttggacaattggaaaggtagaaaagaaaagccaagatcatactaaggactggaaatattttgttctatggaatcaaatttctcacaatgctgtatgatactatttaaatttggaggacaacttatcttcactaagctgaatcaggtggagaaagtaatctccttgcaatcatgtggacaccaatcacaaaagtaaagccctggtgttgtgttttcatgtcttttttcagccctctcagatccaaatgttattatgcactttttaatgtttgtaaacttttactaataattagtgtgaattgcattctgatacaataatgattatcattagaagctaacaaaattctcattaatactgtgtttgatggcctctgctgtgttttaacatcgtgcttcttatatggaaagtttttgtgagctgtgtaatccctctggtcagtattatgaaatcatttgtcagtggtaataaataaggaaccagtaatatgccaatggttcatgaattactggacaaatagcagacaatgggagtccctttacaataacgagcccacttagctgtccttgagggcttagataccttgccacgtgaagtaggtagagcagcatttcaataggtaatttgtgtggttgtgccagaaactcagcccttctatgtaattacatacaggataaaaggtaagtctgctcacttctccttctacagggcatttcaactgactggaataagggcatggttgcatttagtactcaatcagatattactagaaaaaaaattaataatgtgagcctttccgagagcagaacgaggaaagattaaattttagaatgcttccttctgtctaatccatcaggggccaaaatgcccagtaaaattcaaacacatcacctattaatagacttacaagtgagaaaagaggttcctagggttattttaggcaatccctggtaaactgtttaaaccatcaaacccctacagtcagttttcagtatcctcatttaatattttaataggtttcttgtgaatttaaacttctcttctttcttaaggttgtgaaattccaaactgattttatgtgattttgaaaagtttagaaccagtgctgagtctatgtggagggtttatattcctatgtgatatactgttattaatgcatgtggtgccatgcttgtctttaaatatataaatagtgctaaattgcaaagtcatatggagctttggatttagtttgacttcttactactgctttgtctgctatattcaaacccaaaggcattcccaagctagggagataaaaattaattttctaaaatgtccacatcctatacattttgcttattcatggcatctttcaaattttattttagtttcctttatttgccaagaatacatatggatttgaatttttaaggagagaaggaaagggtaggaaaccagggccttgggtttagtaacaggcattggatgtctattaaccaactattcttacgctaatggctttgcagctcctattctcccatttgatcctcaaacaattctattagagtggtatttttatccaatttcacagattaaaatataagcactcaataaaatataacctttagaagcttaaaaagctagtaagtgatgaactgaggatttgaacccatgtttgtcaccaaggagctttccagggcacatgtcataaaattagagccaactgcagagctgtaagggaacttttagagatgaacttcttcagcctccatattttacagaaggaaactgaatcccagaaggagaaattgccgttctcaaggctccctggatgggtaataacacagatatgagtaggtcacataaagtatatcttttttaaaaaaaagaaattcaattatgtcttatttggggggtatatttcccagaagatatttttctggcatgtggtctgtaaacacagcatgattcatattttttatgtttcatgctactcattttgtttaattaccaacaaacatggggactttggctttttgacttatttgcaacaagcatgaaattgttaaatttaccttttatcaattgtaatcatcctatgccaacatattatcataaattcatagaaatatttttaaaaataaataacagacattgaaatccaattcttagataatactcccagaacagccaatggtaaatgccctatacttgagtcttacttagatgctgtggtaatgcaccattttagaagatgaatgatactgctatttctcttcagggaaacaataatggataaagaaatgtaactgccgggcagcaaagcttctaagtgaaacctgtagtagcagtagtagtagggagaaaatgtgtagtcatcaagtgaaaataggaaaggatctatgatttatgatgtcttaatagaccctaaattgttctttaattacaagagtggcagtctctgaagtcatttgtgagcttgtatgacttttgtatttagcaatgttgcatgctcacataattgaaaattaaaagtaacacatttttctgaaatgta

SEQ ID NO: 15725 - DNA, 1736 bp, Homo sapiens
  source 1..1736: mol_type = unassigned DNA
tgctggcaggtggggcgcgggccggcgcgagctgaccgagcactcggcgggcgcggcgggactgcggcccgtggcggcgtgcgcggggacctgcgctgactaggtccggggaagtccctgctatgtggatatttggtagcaatgactgatgtggaaactacatatgcagattttattgcttcaggaagaacaggtagaagaaatgcaatacatgatatcctggtttcctctgcaagtggcaacagcaatgaattagccttgaaattagcaggtcttgatatcaacaagacagaaggtgaagaagatgcacaacgaagttctacagaacaaagtggggaagcccagggagaagcagcaaaatctgaaagctaacaccccactttgaccctcgaccacacctgaaaatgtctcaaatctccaggagtatctggaatgcatttgtttccatgagtgaaaagaggaaaaagaaaatggctgtgctgcattgcaggaacctgctcattatcatgttaaaaatgagggcagaggctgtggctgcaggcagacttttccctacctctgtcattagcaatggttgaaatcatgtggcttgtgtttgggcgtcatttttgtatggatcctttcacttgatcatatgacgaaatgcttatagagagtagctccgacctagatgatgattcttcctgtagcatctggcccctcacaatgtcagaggatttaattgtgtctaattgcgaagggttgattgaaccccagagtttaaatatctctggctcaagtgttcacccagtaaaagaaagatccagaaagcactgtttttagcattacgtatctgtgtgttactgctgtgttatttacactgttttgtattgtacaatatatatgctcagcactgcccccttctctgattgcttatgaaaaacaaaatgatgtacattactgtgaatttttataccactcatttttaaaagggctgtcttttcattttagttttccatactgtggtggtgtacacaggatagaacacccttttttaaaacacagtctttccccttgctcattgtatgttgatgagttgattaagtctaacagattcatcaagactccattgctttattatagagacatttgaaaatatccattaatgtgaatatcacctgaattcagtctgtttggtgtctgcacagactggaattcaatctgtcaaatttgttttattctcaagtggagaacttctcccacataatatatatatatatatatattttaatttatgagaattttggacaattggaaaggtagaaaagaaaagccaagatcatactaaggactggaaatattttgttctatggaatcaaatttctcacaatgctgtatgatactatttaaatttggaggacaacttatcttcactaagctgaatcaggtggagaaagtaatctccttgcaatcatgtggacaccaatcacaaaagtaaagccctggtgttgtgttttcatgtcttttttcagccctctcagatccaaatgttattatgcactttttaatgtttgtaaacttttactaataattagtgtgaattgcattctgatacaataatgattatcattagaagctaacaaaattctcattaatactgtgtttgatggcctctgctgtgttttaacatcgtgcttcttatatggaaagtttttgtgagctgtgtaatccctctggtcagtattatgaaatcattt

SEQ ID NO: 15726 - DNA, 588 bp, Homo sapiens
  source 1..588: mol_type = unassigned DNA
aacttctagaatccatcgatgtggaacacttcagtttgtttaacgtaggagactccctgctatgtggatatttggtagcaatgactgatgtggaaactacatatgcagattttattgcttcaggaagaacaggtagaagaaatgcaatacatgatatcctggtttcctctgcaagtggcaacagcaatgaattagccttgaaattagcaggtcttgatatcaacaagacagaaggtgaagaagatgcacaacgaagttctacagaacaaagtggggaagcccagggagaagcagcaaaatctgaaagctaacaccccactttgaccctcgaccacacctgaaaatgtctcaaatctccaggagtatctggaatgcatttgtttccatgagtgaaaagaggaaaaagaaaatggctgtgctgcattgcaggaacctgctcattatcatgttaaaaatgagggcagaggctgtggctgcaggcagacttttccctacctctgtcattagcaatggttgaaatcatgtggcttgtgtttgggcgtcatttttgtatggatcctttcacttgatcatatgacgaaatgctta

SEQ ID NO: 15727 - DNA, 2308 bp, Homo sapiens
  source 1..2308: mol_type = unassigned DNA
agtcctccgcccgggcgtccggaacagtcgacggcagactccggcccgctgagccacccgaggggtcccgtggcctccgcggacccggaatctgggccctcgcggacccgcgccccgcccagtcgccccagggcttccccacacccacggagtgaagtcagccgcggccctgcctgggaggaacttaccgtctaccgggaaaggtggccagcagatgtgtcgggcctggtgagagggtgaggcgagacggcccgatcgcccagggccccggaagctgcggaggtcacccccgcctggccttagctcagggacaccctggattcacgtgggagcccctgctcctgcctcccccgtcccaccactgaggctgttgggccaggccagtcatgctagaacggcctcctgcactggccatgcccatgcccacggagggcaccccgccacctctgagtggcacccccatcccagtcccagcctacttccgccacgcagaacctggattctccctcaagaggcccagggggctcagccggagcctcccacctccgccccctgccaagggcagcattcccatcagccgcctcttccctcctcggaccccaggctggcaccagctgcagccccggcgggtgtcattccggggcgaggcctcagagactctgcagagccctgggtatgacccaagccggccagagtccttcttccagcagagcttccagaggctcagccgcctgggccatggctcctacggagaggtcttcaaggtgcgctccaaggaggacggccggctctatgcggtaaagcgttccatgtcaccattccggggccccaaggaccgggcccgcaagttggccgaggtgggcagccacgagaaggtggggcagcacccatgctgcgtgcggctggagcaggcctgggaggagggcggcatcctgtacctgcagacggagctgtgcgggcccagcctgcagcaacactgtgaggcctggggtgccagcctgcctgaggcccaggtctggggctacctgcgggacacgctgcttgccctggcccatctgcacagccagggcctggtgcaccttgatgtcaagcctgccaacatcttcctggggccccggggccgctgcaagctgggtgacttcggactgctggtggagctgggtacagcaggagctggtgaggtccaggagggagacccccgctacatggcccccgagctgctgcagggctcctatgggacagcagcggatgtgttcagtctgggcctcaccatcctggaagtggcatgcaacatggagctgccccacggtggggagggctggcagcagctgcgccagggctacctgccccctgagttcactgccggtctgtcttccgagctgcgttctgtccttgtcatgatgctggagccagaccccaagctgcgggccacggccgaggccctgctggcactgcctgtgttgaggcagccgcgggcctggggtgtgctgtggtgcatggcagcggaggccctgagccgagggtgggccctgtggcaggccctgcttgccctgctctgctggctctggcatgggctggctcaccctgccagctggctacagcccctgggcccgccagccaccccgcctggctcaccaccctgcagtttgctcctggacagcagcctctccagcaactgggatgacgacagcctagggccttcactctcccctgaggctgtcctggcccggactgtggggagcacctccaccccccggagcaggtgcacacccagggtcttaacgcccctgaggctgagccctgctgcagaacccagcgctcctggccttgggccagcagctgaagccccatgctgtgtggagcaaagaggtttcctgagcaggcacatcccccggtccttctctgcattccaggcagctccaccaaagtctgcgtgcaacgcccttcatttgcatggacacacgcaaccctcggcgtttgtatggtcattaacatgctcctcccaccacggaagaactttcgaggcccgtaccaaagtagatcctttattcaaaatctgtgggggttttttgactgtttttgctgacctgtgacctctcactgaggacggcagtccaggaccacccccagaggggttcaaagacctccgaaaccagagaccacccccacatacaggtccatggagagggcctggaccatctggacccccacggtcaggccaagtcccagataatagcaccagatgtttcctgtccgacttttggtctccccaaggcgaccagaggccgagctgcccctacacaggcgc

SEQ ID NO: 15728 - DNA, 360 bp, Homo sapiens
  source 1..360: mol_type = unassigned DNA
tctgggtcctgcgggctgcgctagagtgaccctggcacctcgcgtccctcagaactgtgcatccgggctttccgcgtgacacccaggtctccgtacctttgggcacccaccctcgggggcatagtcctgccacctagccctaccctgcagacggggctctgtccaaggtgctgccggacgggtccggcctacatccggtccttctctgcattccaggcagctccaccaaagtctgcgtgcaacgcccttcatttgcatggacacacgcaaccctcggcgtttgtatggtcattaacatgctcctcccaccacggaagaactttcgaggcccgtaccaaagtagatcctttattcaaaatc

SEQ ID NO: 15729 - DNA, 479 bp, Homo sapiens
  source 1..479: mol_type = unassigned DNA
acatttactaaaagtttatttcaaatctgcctccaagtccatgtgttctgaaaaggacagagggggtcagtccacagggaagaacgggtgaacagggctcctgctgagacatctcatgagctggaagcatccaaggagccagccccttgcagacgagttgggaggaacacctggtgttgctaactctaggaggctgctgtgggcaggctggcatggcagctcagtcccggggacaggcgtggtgggcagcccagagcaggtcgggcacgacgccggcgtgcagctgcaggatggagcccacgctcagcaggtgcatgatctggtgggagttgccccagtagtcaaagcggccaggtccccagcgctcgggcagacgggctacatttaccagtcccccaagcagcgccagtgcgtccatgcgcaggtagcagggcagggagcctggagcccctgaacccagacccactccccgggcccca

SEQ ID NO: 15730 - DNA, 2061 bp, Homo sapiens
  source 1..2061: mol_type = unassigned DNA
agtcgacggcagactccggcccgctgagccacccgaggggtcccgtggcctccgcggacccggaatctgggccctcgcggacccgcgccccgcccagtcgccccagggcttccccacacccacggagtgaagtcagccgcggccctgcctgggaggaacttaccgtctaccgggaaaggtggccagcagatgtgtcgggcctggtgagagggtgaggcgagacggcccgatcgcccagggccccggaagctgcggaggtcacccccgcctggccttagctcagggacaccctggattcacgtgggagcccctgctcctgcctcccccgtcccaccactgaggctgttgggccaggccagtcatgctagaacggcctcctgcactggccatgcccatgcccacggagggcaccccgccacctctgagtggcacccccatcccagtcccagcctacttccgccacgcagaacctggattctccctcaagaggcccagggggctcagccggagcctcccacctccgccccctgccaagggcagcattcccatcagccgcctcttccctcctcggaccccaggctggcaccagctgcagccccggcgggtgtcattccggggcgaggcctcagagactctgcagagccctgggtatgacccaagccggccagagtccttcttccagcagagcttccagaggctcagccgcctgggccatggctcctacggagaggtcttcaaggtgcgctccaaggaggacggccggctctatgcggtaaagcgttccatgtcaccattccggggccccaaggaccgggcccgcaagttggccgaggtgggcagccacgagaaggtggggcagcacccatgctgcgtgcggctggagcaggcctgggaggagggcggcatcctgtacctgcagacggagctgtgcgggcccagcctgcagcaacactgtgaggcctggggtgccagcctgcctgaggcccaggtctggggctacctgcgggacacgctgcttgccctggcccatctgcacagccagggcctggtgcaccttgatgtcaagcctgccaacatcttcctggggccccggggccgctgcaagctgggtgacttcggactgctggtggagctgggtacagcaggagctggtgaggtccaggagggagacccccgctacatggcccccgagctgctgcagggctcctatgggacagcagcggatgtgttcagtctgggcctcaccatcctggaagtggcatgcaacatggagctgccccacggtggggagggctggcagcagctgcgccagggctacctgccccctgagttcactgccggtctgtcttccgagctgcgttctgtccttgtcatgatgctggagccagaccccaagctgcgggccacggccgaggccctgctggcactgcctgtgttgaggcagccgcgggcctggggtgtgctgtggtgcatggcagcggaggccctgagccgagggtgggccctgtggcaggccctgcttgccctgctctgctggctctggcatgggctggctcaccctgccagctggctacagcccctgggcccgccagccaccccgcctggctcaccaccctgcagtttgctcctggacagcagcctctccagcaactgggatgacgacagcctaggccctggacaccctccttgtctcgcctgccctcctgcaggccttcactctcccctgaggctgtcctggcccggactgtggggagcacctccaccccccggagcaggtgcacacccagggatgccctggacctaagtgacatcaactcagagcctcctcggggctccttcccctcctttgagcctcggaacctcctcagcctgtttgaggacaccctagacccaacctgagccccagactctgcctctgcacttttaaccttttatcctgtgtctctcccgtcgcccttgaaagctggggcccctcgggaactcccatggtcttctctgcctggccgtgtctaataaaaagtatttgaaccttgggagcacccaagcttgctcatgtggcaa

SEQ ID NO: 15731 - DNA, 2171 bp, Homo sapiens
  source 1..2171: mol_type = unassigned DNA
gagcctcggagcccgggcacccctgacgggctgcactggggagggggaggagcctcgaggccggtttggaatttttggcgcgagcagctccgcgcgcgttcacgggccgttccccctcacgggagtcctccgcccgggcgtccggaacagtcgacggcagactccggcccgctgagccacccgaggggtcccgtggcctccgcggacccggaatctgggccctcgcggacccgcgccccgcccagtcgccccagggcttccccacacccacggagtgaagtcagccgcggccctgcctgggaggaacttaccgtctaccgggaaaggtggccagcagatgtgtcgggcctggtgagagggtgaggcgagacggcccgatcgcccagggccccggaagctgcggaggtcacccccgcctggccttagctcagggacaccctggattcacgtgggagcccctgctcctgcctcccccgtcccaccactgaggctgttgggccaggccagtcatgctagaacggcctcctgcactggccatgcccatgcccacggagggcaccccgccacctctgagtggcacccccatcccagtcccagcctacttccgccacgcagaacctggattctccctcaagaggcccagggggctcagccggagcctcccacctccgccccctgccaagggcagcattcccatcagccgcctcttccctcctcggaccccaggctggcaccagctgcagccccggcgggtgtcattccggggcgaggcctcagagactctgcagagccctgggtatgacccaagccggccagagtccttcttccagcagagcttccagaggctcagccgcctgggccatggctcctacggagaggtcttcaaggtgcgctccaaggaggacggccggctctatgcggtaaagcgttccatgtcaccattccggggccccaaggaccgggcccgcaagttggccgaggtgggcagccacgagaaggtggggcagcacccatgctgcgtgcggctggagcaggcctgggaggagggcggcatcctgtacctgcagacggagctgtgcgggcccagcctgcagcaacactgtgaggcctggggtgccagcctgcctgaggcccaggtctggggctacctgcgggacacgctgcttgccctggcccatctgcacagccagggcctggtgcaccttgatgtcaagcctgccaacatcttcctggggccccggggccgctgcaagctgggtgacttcggactgctggtggagctgggtacagcaggagctggtgaggtccaggagggagacccccgctacatggcccccgagctgctgcagggctcctatgggacagcagcggatgtgttcagtctgggcctcaccatcctggaagtggcatgcaacatggagctgccccacggtggggagggctggcagcagctgcgccagggctacctgccccctgagttcactgccggtctgtcttccgagctgcgttctgtccttgtcatgatgctggagccagaccccaagctgcgggccacggccgaggccctgctggcactgcctgtgttgaggcagccgcgggcctggggtgtgctgtggtgcatggcagcggaggccctgagccgagggtgggccctgtggcaggccctgcttgccctgctctgctggctctggcatgggctggctcaccctgccagctggctacagcccctgggcccgccagccaccccgcctggctcaccaccctgcagtttgctcctggacagcagcctctccagcaactgggatgacgacagcctagggccttcactctcccctgaggctgtcctggcccggactgtggggagcacctccaccccccggagcaggtgcacacccagggatgccctggacctaagtgacatcaactcagagcctcctcggggctccttcccctcctttgagcctcggaacctcctcagcctgtttgaggacaccctagacccaacctgagccccagactctgcctctgcacttttaaccttttatcctgtgtctctcccgtcgcccttgaaagctggggcccctcgggaactcccatggtcttctctgcctggccgtgtctaataaaaagtatttgaaccttgggagcacccaagcttgctcatgtggcaa

SEQ ID NO: 15732 - DNA, 605 bp, Homo sapiens
  source 1..605: mol_type = unassigned DNA
agccgagggtgggccctgtggcaggccctgcttgccctgctctgctggctctggcatgggctggctcaccctgccagctggctacagcccctgggcccgccagccaccccgcctggctcaccaccctgcagtttgctcctggacagcagcctctccagcaactgggatgacgacagcctagggccttcactctcccctgaggctgtcctggcccggactgtggggagcacctccaccccccggagcaggtgcacacccaggtaagcaggtccaggggctggggtgggcagggctagcttttggatcctgagtgtcactactctctcctcccagggatgccctggacctaagtgacatcaactcagagcctcctcggggctccttcccctcctttgagcctcggaacctcctcagcctgtttgaggacaccctagacccaacctgagccccagactctgcctctgcacttttaaccttttatcctgtgtctctcccgtcgcccttgaaagctggggcccctcgggaactcccatggtcttctctgcctggccgtgtctaataaaaagtatttgaaccttgggagcacccaagcttgctcatgtggc

SEQ ID NO: 15733 - DNA, 910 bp, Homo sapiens
  source 1..910: mol_type = unassigned DNA
cccttccccctgcttccgcccctccctgactgatgaagacagcagccctctcccacccacctccaagaggcagccctggactgggtctgtgtcccagggccaaccctgcccctttctgtccccatcccgtccctgccagtctgggcctcaccatcctggaagtggcatgcaacatggagctgccccacggtggggagggctggcagcagctgcgccagggctacctgccccctgagttcactgccggtctgtcttccgagctgcgttctgtccttgtcatgatgctggagccagaccccaagctgcgggccacggccgaggccctgctggcactgcctgtgttgaggcagccgcgggcctggggtgtgctgtggtgcatggcagcggaggccctgagccgagggtgggccctgtggcaggccctgcttgccctgctctgctggctctggcatgggctggctcaccctgccagctggctacagcccctgggcccgccagccaccccgcctggctcaccaccctgcagtttgctcctggacagcagcctctccagcaactgggatgacgacagcctagggccttcactctcccctgaggctgtcctggcccggactgtggggagcacctccaccccccggagcaggtgcacacccagggatgccctggacctaagtgacatcaactcagagcctcctcggggctccttcccctcctttgagcctcggaacctcctcagcctgtttgaggacaccctagacccaacctgagccccagactctgcctctgcacttttaaccttttatcctgtgtctctcccgtcgcccttgaaagctggggcccctcgggaactcccatggtcttctctgcctggccgtgtctaataaaaagtatttgaaccttgggagcaccc

SEQ ID NO: 15734 - DNA, 717 bp, Homo sapiens
  source 1..717: mol_type = unassigned DNA
ggaaaccacacgctcagggcagacagctcttggggactctgccgttagccccttccttacaaacacatcacctcatccctcggggcacttgatagcagacaagaagttccagaaaggcttacatttactaaaagtttatttcaaatctgcctccaagtccatgtgttctgaaaaggacagagggggccttggagtgcagccagatggaaggactttgaaggctgtccaagtgctgctttcagagtgcaccaagtttttattgtccctgactgtggctccctgcctgtttgtcaggcgggagcctggagcctgcacagggacagagctggtttcatccggcactccctagccctggacaccctccttgtctcgcctgccctcctgcaggccttcactctcccctgaggctgtcctggcccggactgtggggagcacctccaccccccggagcaggtgcacacccagggatgccctggacctaagtgacatcaactcagagcctcctcggggctccttcccctcctttgagcctcggaacctcctcagcctgtttgaggacaccctagacccaacctgagccccagactctgcctctgcacttttaaccttttatcctgtgtctctcccgtcgcccttgaaagctggggcccctcgggaactcccatggtcttctctgcctggccgtgtctaataaaaagtatttgaaccttgggagca

SEQ ID NO: 15735 - DNA, 1892 bp, Homo sapiens
  source 1..1892: mol_type = unassigned DNA
ctcacgggagtcctccgcccgggcgtccggaacagtcgacggcagactccggcccgctgagccacccgaggggtcccgtggcctccgcggacccggaatctgggccctcgcggacccgcgccccgcccagtcgccccagcccgtccactgctctgttcgccagggcttccccacacccacggagtgaagtcagccgcggccctgcctgggaggaacttaccgtctaccgggaaaggtggccagcagatgtgtcgggcctggtgagaggggcctcctgcactggccatgcccatgcccacggagggcaccccgccacctctgagtggcacccccatcccagtcccagcctacttccgccacgcagaacctggattctccctcaagaggcccagggggctcagccggagcctcccacctccgccccctgccaagggcagcattcccatcagccgcctcttccctcctcggaccccaggctggcaccagctgcagccccggcgggtgtcattccggggcgaggcctcagagactctgcagagccctgggtatgacccaagccggccagagtccttcttccagcagagcttccagaggctcagccgcctgggccatggctcctacggagaggtcttcaaggtgcgctccaaggaggacggccggctctatgcggtaaagcgttccatgtcaccattccggggccccaaggaccgggcccgcaagttggccgaggtgggcagccacgagaaggtggggcagcacccatgctgcgtgcggctggagcaggcctgggaggagggcggcatcctgtacctgcagacggagctgtgcgggcccagcctgcagcaacactgtgaggcctggggtgccagcctgcctgaggcccaggtctggggctacctgcgggacacgctgcttgccctggcccatctgcacagccagggcctggtgcaccttgatgtcaagcctgccaacatcttcctggggccccggggccgctgcaagctgggtgacttcggactgctggtggagctgggtacagcaggagctggtgaggtccaggagggagacccccgctacatggcccccgagctgctgcagggctcctatgggacagcagcggatgtgttcagtctgggcctcaccatcctggaagtggcatgcaacatggagctgccccacggtggggagggctggcagcagctgcgccagggctacctgccccctgagttcactgccggtctgtcttccgagctgcgttctgtccttgtcatgatgctggagccagaccccaagctgcgggccacggccgaggccctgctggcactgcctgtgttgaggcagccgcgggcctggggtgtgctgtggtgcatggcagcggaggccctgagccgagggtgggccctgtggcaggccctgcttgccctgctctgctggctctggcatgggctggctcaccctgccagctggctacagcccctgggcccgccagccaccccgcctggctcaccaccctgcagtttgctcctggacagcagcctctccagcaactgggatgacgacagcctagggccttcactctcccctgaggctgtcctggcccggactgtggggagcacctccaccccccggagcaggtgcacacccagggatgccctggacctaagtgacatcaactcagagcctcctcggggctccttcccctcctttgagcctcggaacctcctcagcctgtttgaggacaccctagacccaacctgagccccagactctgcctctgcacttttaaccttttatcctgtgtctctcccgtcgcccttgaaagctggggcccctcgggaactcccatggtcttctctgcctggccgtgtctaataaaaagtatttgaaccttg

SEQ ID NO: 15736 - DNA, 1806 bp, Homo sapiens
  source 1..1806: mol_type = unassigned DNA
cacgggccgttccccctcacgggagtcctccgcccgggcgtccggaacagtcgacggcagactccggcccgctgagccacccgaggggtcccgtggcctccgcggacccggaatctgggccctcgcggacccgcgccccgcccagtcgccccagggcttccccacacccacggagtgaagtcagccgcggccctgcctgggaggaacttaccgtctaccgggaaaggtggccagcagatgtgtcgggcctggtgagagggtgaggcgagacggcccgatcgcccagggccccggaagctgcggaggtcacccccgcctggccttagctcagggacaccctggattcacgtgggagcccctgctcctgcctcccccgtcccaccactgaggctgttgggccaggccagtcatgctagaacgctggcaccagctgcagccccggcgggtgtcattccggggcgaggcctcagagactctgcagagccctgggtatgacccaagccggccagagtccttcttccagcagagcttccagaggctcagccgcctgggccatggctcctacggagaggtcttcaaggtgcgctccaaggaggacggccggctctatgcggtaaagcgttccatgtcaccattccggggccccaaggaccgggcccgcaagttggccgaggtgggcagccacgagaaggtggggcagcacccatgctgcgtgcggctggagcaggcctgggaggagggcggcatcctgtacctgcagacggagctgtgcgggcccagcctgcagcaacactgtgaggcctggggtgccagcctgcctgaggcccaggtctggggctacctgcgggacacgctgcttgccctggcccatctgcacagccagggcctggtgcaccttgatgtcaagcctgccaacatcttcctggggccccggggccgctgcaagctgggtgacttcggactgctggtggagctgggtacagcaggagctggtgaggtccaggagggagacccccgctacatggcccccgagctgctgcagggctcctatgggacagcagcggatgtgttcagtctgggcctcaccatcctggaagtggcatgcaacatggagctgccccacggtggggagggctggcagcagctgcgccagggctacctgccccctgagttcactgccggtctgtcttccgagctgcgttctgtccttgtcatgatgctggagccagaccccaagctgcgggccacggccgaggccctgctggcactgcctgtgttgaggcagccgcgggcctggggtgtgctgtggtgcatggcagcggaggccctgagccgagggtgggccctgtggcaggccctgcttgccctgctctgctggctctggcatgggctggctcaccctgccagctggctacagcccctgggcccgccagccaccccgcctggctcaccaccctgcagtttgctcctggacagcagcctctccagcaactgggatgacgacagcctagggccttcactctcccctgaggctgtcctggcccggactgtggggagcacctccaccccccggagcaggtgcacacccagggatgccctggacctaagtgacatcaactcagagcctcctcggggctccttcccctcctttgagcctcggaacctcctcagcctgtttgaggacaccctagacccaacctgagccccagactctgcctctgcacttttaaccttttatcctgtgtctctcccgtcgcccttgaaagctggggcccctcgggaactcccatggtcttctctgcctgg

SEQ ID NO: 15737 - DNA, 1891 bp, Homo sapiens
  source 1..1891: mol_type = unassigned DNA
ccggtttggaatttttggcgcgagcagctccgcgcgcgttcacgggccgttccccctcacgggagtcctccgcccgggcgtccggaacagtcgacggcagactccggcccgctgagccacccgaggggtcccgtggcctccgcggacccggaatctgggccctcgcggacccgcgccccgcccagtcgccccagggcttccccacacccacggagtgaagtcagccgcggccctgcctgggaggaacttaccgtctaccgggaaaggtggccagcagatgtgtcgggcctggtgagaggggcctcctgcactggccatgcccatgcccacggagggcaccccgccacctctgagtggcacccccatcccagtcccagcctacttccgccacgcagaacctggattctccctcaagaggcccagggggctcagccggagcctcccacctccgccccctgccaagggcagcattcccatcagccgcctcttccctcctcggaccccaggctggcaccagctgcagccccggcgggtgtcattccggggcgaggcctcagagactctgcagagccctgggtatgacccaagccggccagagtccttcttccagcagagcttccagaggctcagccgcctgggccatggctcctacggagaggtcttcaaggtgcgctccaaggaggacggccggctctatgcggtaaagcgttccatgtcaccattccggggccccaaggaccgggcccgcaagttggccgaggtgggcagccacgagaaggtggggcagcacccatgctgcgtgcggctggagcaggcctgggaggagggcggcatcctgtacctgcagacggagctgtgcgggcccagcctgcagcaacactgtgaggcctggggtgccagcctgcctgaggcccaggtctggggctacctgcgggacacgctgcttgccctggcccatctgcacagccagggcctggtgcaccttgatgtcaagcctgccaacatcttcctggggccccggggccgctgcaagctgggtgacttcggactgctggtggagctgggtacagcaggagctggtgaggtccaggagggagacccccgctacatggcccccgagctgctgcagggctcctatgggacagcagcggatgtgttcagtctgggcctcaccatcctggaagtggcatgcaacatggagctgccccacggtggggagggctggcagcagctgcgccagggctacctgccccctgagttcactgccggtctgtcttccgagctgcgttctgtccttgtcatgatgctggagccagaccccaagctgcgggccacggccgaggccctgctggcactgcctgtgttgaggcagccgcgggcctggggtgtgctgtggtgcatggcagcggaggccctgagccgagggtgggccctgtggcaggccctgcttgccctgctctgctggctctggcatgggctggctcaccctgccagctggctacagcccctgggcccgccagccaccccgcctggctcaccaccctgcagtttgctcctggacagcagcctctccagcaactgggatgacgacagcctagggccttcactctcccctgaggctgtcctggcccggactgtggggagcacctccaccccccggagcaggtgcacacccagggatgccctggacctaagtgacatcaactcagagcctcctcggggctccttcccctcctttgagcctcggaacctcctcagcctgtttgaggacaccctagacccaacctgagccccagactctgcctctgcacttttaaccttttatcctgtgtctctcccgtcgcccttgaaagctggggcccctcgggaactcccatggtcttctctgcct

SEQ ID NO: 15738 - DNA, 1991 bp, Homo sapiens
  source 1..1991: mol_type = unassigned DNA
actgccattctggaagtggacaccactaactgggttttggcacgacagttatgaaaaagaaagacacttgagggattccgggttttcactttggaattggagataagggatcgtgggcccgtgtagtctcggaagaggttgtgtagtttaggatcaaagagctggccgtgatgagggcagggatgcaggcgcagcccgtctgactccaaactgccttgctcttaacccgactgcaagaccctcaagaacacgggccccatggttttcctcttatgtttctatcatctctaaaatacaacagcctggtgggcagggcctcctgcactggccatgcccatgcccacggagggcaccccgccacctctgagtggcacccccatcccagtcccagcctacttccgccacgcagaacctggattctccctcaagaggcccagggggctcagccggagcctcccacctccgccccctgccaagggcagcattcccatcagccgcctcttccctcctcggaccccaggctggcaccagctgcagccccggcgggtgtcattccggggcgaggcctcagagactctgcagagccctgggtatgacccaagccggccagagtccttcttccagcagagcttccagaggctcagccgcctgggccatggctcctacggagaggtcttcaaggtgcgctccaaggaggacggccggctctatgcggtaaagcgttccatgtcaccattccggggccccaaggaccgggcccgcaagttggccgaggtgggcagccacgagaaggtggggcagcacccatgctgcgtgcggctggagcaggcctgggaggagggcggcatcctgtacctgcagacggagctgtgcgggcccagcctgcagcaacactgtgaggcctggggtgccagcctgcctgaggcccaggtctggggctacctgcgggacacgctgcttgccctggcccatctgcacagccagggcctggtgcaccttgatgtcaagcctgccaacatcttcctggggccccggggccgctgcaagctgggtgacttcggactgctggtggagctgggtacagcaggagctggtgaggtccaggagggagacccccgctacatggcccccgagctgctgcagggctcctatgggacagcagcggatgtgttcagtctgggcctcaccatcctggaagtggcatgcaacatggagctgccccacggtggggagggctggcagcagctgcgccagggctacctgccccctgagttcactgccggtctgtcttccgagctgcgttctgtccttgtcatgatgctggagccagaccccaagctgcgggccacggccgaggccctgctggcactgcctgtgttgaggcagccgcgggcctggggtgtgctgtggtgcatggcagcggaggccctgagccgagggtgggccctgtggcaggccctgcttgccctgctctgctggctctggcatgggctggctcaccctgccagctggctacagcccctgggcccgccagccaccccgcctggctcaccaccctgcagtttgctcctggacagcagcctctccagcaactgggatgacgacagcctaggtccatgtgttctgaaaaggacagagggggccttggagtgcagccagatggaaggactttgaaggctgtccaagtgctgctttcagagtgcaccaagtttttattgtccctgactgtggctccctgcctgtttgtcaggcgggagcctggagcctgcacagggacagagctggtttcatccggcactccctagccctggacaccctccttgtctcgcctgccctcctgcaggccttcactctcccctgaggctgtcctggcccggactgtggggagcacctccaccccccggagcaggtgcacacccagggatgccctggacctaagtgacatcaactcagagcctcctcggggctccttcccctcctttgagcctcgg

SEQ ID NO: 15739 - DNA, 1091 bp, Homo sapiens
  source 1..1091: mol_type = unassigned DNA
acgggccgttccccctcacgggagtcctccgcccgggcgtccggaacagtcgacggcagactccggcccgctgagccacccgaggggtcccgtggcctccgcggacccggaatctgggccctcgcggacccgcgccccgcccagtcgccccagggcttccccacacccacggagtgaagtcagccgcggccctgcctgggaggaacttaccgtctaccgggaaaggtggccagcagatgtgtcgggcctgggcctcctgcactggccatgcccatgcccacggagggcaccccgccacctctgagtggcacccccatcccagtcccagcctacttccgccacgcagaacctggattctccctcaagaggcccagggggctcagccggagcctcccacctccgccccctgccaagggcagcattcccatcagccgcctcttccctcctcggaccccaggctggcaccagctgcagccccggcgggtgtcattccggggcgaggcctcagagactctgcagagccctgggtatgacccaagccggccagagtccttcttccagcagagcttccagaggctcagccgcctgggccatggctcctacggagaggtcttcaaggtgcgctccaaggaggacggccggctctatgcggtaaagcgttccatgtcaccattccggggccccaaggaccgggcccgcaagttggccgaggtgggcagccacgagaaggtggggcagcacccatgctgcgtgcggctggagcaggcctgggaggagggcggcatcctgtacctgcagacggagctgtgcgggcccagcctgcagcaacactgtgaggcctggggtgccagcctgcctgaggcccaggtctggggctacctgcgggacacgctgcttgccctggcccatctgcacagccagggcctggtgcaccttgatgtcaagcctgccaacatcttcctggggccccggggccgctgcaagctgggtgacttcggactgctggtggagctgggtacagcaggagctggtgaggtccaggagggagacccccgctacatggcccccgagctgctgcagggctcctatgg

SEQ ID NO: 15740 - DNA, 1006 bp, Homo sapiens
  source 1..1006: mol_type = unassigned DNA
gggccctcgcggacccgcgccccgcccagtcgccccaggtgagcccagaccccgccgtgaggggcctcggcgtggccacctcgccgctcccctccgcctcgccagggcttccccacacccacggagtgaagtcagccgcggccctgcctgggaggaacttaccgtctaccgggaaaggtggccagcagatgtgtcgggcctggtgagagggtgaggcgagacggcccgatcgcccagggccccggaagctgcggaggtcacccccgcctggccttagctcagggacaccctggattcacgtgggagcccctgctcctgcctcccccgtcccaccactgaggctgttgggccaggccagtcatgctagaacggcctcctgcactggccatgcccatgcccacggagggcaccccgccacctctgagtggcacccccatcccagtcccagcctacttccgccacgcagaacctggattctccctcaagaggcccagggggctcagccggagcctcccacctccgccccctgccaagggcagcattcccatcagccgcctcttccctcctcggaccccaggctggcaccagctgcagccccggcgggtgtcattccggggcgaggcctcagagactctgcagagccctgggtatgacccaagccggccagagtccttcttccagcagagcttccagaggctcagccgcctgggccatggctcctacggagaggtcttcaagctgctttttccacctcgtgacacatccaagaggtcccctggggtcagtgcaggtcggccctggctcctccgtcgctgggtctccacagacccagcccgagggatggaggtgcgctccaaggaggacggccggctctatgcggtaaagcgttccatgtcaccattccggggccccaaggaccgggcccgcaagttggccgaggtgggcagccacgagaaggtggggcagcacccatgctgcgtgcggctggagcaggcctgggaggagg

SEQ ID NO: 15741 - DNA, 979 bp, Homo sapiens
  source 1..979: mol_type = unassigned DNA
gtttggaatttttggcgcgagcagctccgcgcgcgttcacgggccgttccccctcacgggagtcctccgcccgggcgtccggaacagtcgacggcagactccggcccgctgagccacccgaggggtcccgtggcctccgcggacccggaatctgggccctcgcggacccgcgccccgcccagtcgccccagcccgtccactgctctgttcgccagggcttccccacacccacggagtgaagtcagccgcggccctgcctgggaggaacttaccgtctaccgggaaaggtggccagcagatgtgtcgggcctggtgagagggtgaggcgagacggcccgatcgcccagggccccggaagctgcggaggtcacccccgcctggccttagctcagggacaccctggattcacgtgggagcccctgctcctgcctcccccgtcccaccactgaggctgttgggccaggccagtcatgctagaacggcctcctgcactggccatgcccatgcccacggagggcaccccgccacctctgagtggcacccccatcccagtcccagcctacttccgccacgcagaacctggattctccctcaagaggcccagggggctcagccggagcctcccacctccgccccctgccaagggcagcattcccatcagccgcctcttccctcctcggaccccaggctggcaccagctgcagccccggcgggtgtcattccggggcgaggcctcagagactctgcagagccctgggtatgacccaagccggccagagtccttcttccagcagagcttccagaggctcagccgcctgggccatggctcctacggagaggtcttcaaggtgcgctccaaggaggacggccggctctatgcggtaaagcgttccatgtcaccattccggggccccaaggaccgggcccgcaagttggccgaggtgggcagccacgagaaggtggggcagcacccatgctg

SEQ ID NO: 15742 - DNA, 880 bp, Homo sapiens
  source 1..880: mol_type = unassigned DNA
cgtccggaacagtcgacggcagactccggcccgctgagccacccgaggggtcccgtggcctccgcggacccggaatctgggccctcgcggacccgcgccccgcccagtcgccccaggtgagcccagaccccgccgtgaggggcctcggcgtggccacctcgccgctcccctccgcctcgccagggcttccccacacccacggagtgaagtcagccgcggccctgcctgggaggaacttaccgtctaccgggaaaggtggccagcagatgtgtcgggcctggtgagagggtgaggcgagacggcccgatcgcccagggccccggaagctgcggaggtcacccccgcctggccttagctcagggacaccctggattcacgtgggagcccctgctcctgcctcccccgtcccaccactgaggctgttgggccaggccagtcatgctagaacggcctcctgcactggccatgcccatgcccacggagggcaccccgccacctctgagtggcacccccatcccagtcccagcctacttccgccacgcagaacctggattctccctcaagaggcccagggggctcagccggagcctcccacctccgccccctgccaagggcagcattcccatcagccgcctcttccctcctcggaccccaggctggcaccagctgcagccccggcgggtgtcattccggggcgaggcctcagagactctgcagagccctgggtatgacccaagccggccagagtccttcttccagcagagcttccagaggctcagccgcctgggccatggctcctacggagaggtcttcaaggtgcgctccaaggaggacggccggctctatgcggtaaagcgttccatgtcaccattccggggcc

SEQ ID NO: 15743 - DNA, 495 bp, Homo sapiens
  source 1..495: mol_type = unassigned DNA
agcccagaccccgccgtgaggggcctcggcgtggccacctcgccgctcccctccgcctcgccagcccgtccactgctctgttcgccagggcttccccacacccacggagtgaagtcagccgcggccctgcctgggaggaacttaccgtctaccgggaaaggtggccagcagatgtgtcgggcctggtgagagggtgaggcgagacggcccgatcgcccagggccccggaagctgcggaggtcacccccgcctggccttagctcagggacaccctggattcacgtgggagcccctgctcctgcctcccccgtcccaccactgaggctgttgggccaggccagtcatgctagaacggcctcctgcactggccatgcccatgcccacggagggcaccccgccacctctgagtggcacccccatcccagtcccagcctacttccgccacgcagaacctggattctccctcaagaggcccagggggctcagccggagcct

SEQ ID NO: 15744 - DNA, 612 bp, Homo sapiens
  source 1..612: mol_type = unassigned DNA
agcagctccgcgcgcgttcacgggccgttccccctcacgggagtcctccgcccgggcgtccggaacagtcgacggcagactccggcccgctgagccacccgaggggtcccgtggcctccgcggacccggaatctgggccctcgcggacccgcgccccgcccagtcgccccagggcttccccacacccacggagtgaagtcagccgcggccctgcctgggaggaacttaccgtctaccgggaaaggtggccagcagatgtgtcgggcctggtgagagggtgaggcgagacggcccgatcgcccagggccccggaagctgcggaggtcacccccgcctggccttagctcagggacaccctggattcacgtgggagcccctgctcctgcctcccccgtcccaccactgaggctgttgggccaggccagtcatgctagaacgtaagtcgtagggcagggacggtgggagaactgggttaagatgcacaggcccaggtccccgagtgtgccagggttgggcctggaggctgtgcttgtgaccagtgacctccaggatcccaacaccctggctcctgacttggagaaaccctgggctgggactctgaggtagttagag

SEQ ID NO: 15745 - DNA, 551 bp, Homo sapiens
  source 1..551: mol_type = unassigned DNA
aacagtcgacggcagactccggcccgctgagccacccgaggggtcccgtggcctccgcggacccggaatctgggccctcgcggacccgcgccccgcccagtcgccccagcccgtccactgctctgttcgccagggcttccccacacccacggagtgaagtcagccgcggccctgcctgggaggaacttaccgtctaccgggaaaggtggccagcagatgtgtcgggcctggtgagagggtgaggcgagacggcccgatcgcccagggccccggaagctgcggaggtcacccccgcctggccttagctcagggacaccctggattcacgtgggagcccctgctcctgcctcccccgtcccaccactgaggctgttgggccaggccagtcatgctagaacgtaagtcgtagggcagggacggtgggagaactgggttaagatgcacaggcccaggtccccgagtgtgccagggttgggcctggaggctgtgcttgtgaccagtgacctccaggatcccaacaccctggctcctgacttggagaaaccctgggc

SEQ ID NO: 15746 - DNA, 846 bp, Homo sapiens
  source 1..846: mol_type = unassigned DNA
ggcgggggcgtcaggacggcggcgctgggaggctcctcccgggccctcctcatcgcagtcaacaccatctcccggctgggtgctggcgggagggggttcccagggcgctgggattacagaggccggacaccatgctccctacccctggggctcagagggattaagcaggctcagaccctactctgctcccctctcctgacccggcccccacccgccgggaaaacggaagctggcagcgcggcccgggacaatggcagctttgtcaccgcggctactggcggtgccagggccggggcagccctggacttgggcgctggggccctcctcggcctcagtgcccccggcccaacgcaggtccttctctgcattccaggcagctccaccaaagtctgcgtgcaacgcccttcatttgcatggacacacgcaaccctcggcgtttgtatggtcattaacatgctcctcccaccacggaagaactttcgaggcccgtaccaaagtagatcctttattcaaaatctgtgggggttttttgactgtttttgctgacctgtgacctctcactgaggacggcagtccaggaccacccccagaggggttcaaagacctccgaaaccagagaccacccccacatacaggtccatggagagggcctggaccatctggacccccacggtcaggccaagtcccagataatagcaccagatgtttcctgtccgacttttggtctccccaaggcgaccagaggccgagctgcccctacacaggcgcaaggccgaggcagggcgcagcacagcatctcaggtgtccatctcgccggcggcgggcccagcggaccctcggggccca

SEQ ID NO: 15747 - DNA, 1709 bp, Homo sapiens
  source 1..1709: mol_type = unassigned DNA
gggtccctgtgccgctgacgtcccgagcagtgctgggaagtataggctgtgttgtcacgccggtgtcagtctgatgaagattggcatcaggtgaagtctggagcaggacttctgaggctttctatcctccatgctgctcactagaaaaggggctgtgaactgtgctttggctctagcagacaggaagaaattctggcccagctggaagtagaaagaggggagtgagtctcctgaggaccatctcagaggccccgggatcacccgaacaatgacggcaaccgcccagccaccctccaaggcccaggctgtccacatctctgccccctcagctgctgccagcacacctgtgcccagtgcccccatcgacccccaggcccagctggaggctgacaagcgagctgtatacaggcaccctcttttcccgctcctgacgctgctgtttgagaaatgtgaacaggccacccagggctctgagtgcatcacctccgccagctttgatgtggacatcgagaactttgtccaccagcaggaacaggagcacaaacccttcttcagcgatgacccagaactggacaatctgatggtgaaggcaatccaggtcctgagaatccacctgctggagctggagaaagtcaatgaactctgcaaggacttttgtaaccgttacatcacctgcctcaaaaccaagatgcacagcgacaacctgctcaggaatgatctaggggggccctactcccccaaccagccctccatcaaccttcactcacaggacctcctgcagaattcccccaattccatgtccggagtctccaataacccccaggggattgtggtcccagcctcagcgctccagcagggcaacatcgccatgacaaccgtcaactcacaagttgtgtcaggtggagccttataccaaccggttaccatggtaacctcccagggtcaggtggtcacccaagcaatcccccagggagccatccagatccagaacacacaggttaaccttgacctcacctccctcctggacaatgaggataagaagtccaagaacaaacgaggagtcttgcccaagcatgccaccaatataatgcgttcttggctcttccagcatctcatgcacccctaccccacggaggatgagaagaggcagatcgcagcccagaccaacctcaccctcctgcaagtaaacaactggttcatcaatgcccggaggcgcatcctgcagcccatgcttgatgccagcaacccagatcctgcccccaaagccaagaagatcaagtctcagcaccggcccacccaaagattctggcccaactccatcgctgcgggggtgctgcagcagcagggcggtgccccagggacaaaccccgatggttccatcaacttggacaacctgcagtccctgtcctcagacagtgccaccatggccatgcagcaggctatgatggctgcacacgatgactcattggatgggacagaagaagaggatgaggatgagatggaagaggaggaggaggaggagctggaggaggaggtcgacgagctgcagacgacaaatgtcagcgacctgggcttggaacacagtgactccctggagtagtcgggcagcccagatggcactgatcactgagcaggagaggagtgtcgccgggaggccttcagggtgggggggaaggggacatgggcaggaagcaccgagggagttgggc

SEQ ID NO: 15748 - DNA, 1673 bp, Homo sapiens
  source 1..1673: mol_type = unassigned DNA
gtgccgctgacgtcccgagcagtgctgggaagtataggctgtgttgtcacgccggtgtcagtctgatgaagattggcatcaggtgctttggctctagcagacaggaagaaattctggcccagctggaagtagaaagaggggagtgagtctcctgaggaccatctcagaggccccgggatcacccgaacaatgacggcaaccgcccagccaccctccaaggcccaggctgtccacatctctgccccctcagctgctgccagcacacctgtgcccagtgcccccatcgacccccaggcccagctggaggctgacaagcgagctgtatacaggcaccctcttttcccgctcctgacgctgctgtttgagaaatgtgaacaggccacccagggctctgagtgcatcacctccgccagctttgatgtggacatcgagaactttgtccaccagcaggaacaggagcacaaacccttcttcagcgatgacccagaactggacaatctgatggtgaaggcaatccaggtcctgagaatccacctgctggagctggagaaagtcaatgaactctgcaaggacttttgtaaccgttacatcacctgcctcaaaaccaagatgcacagcgacaacctgctcaggaatgatctaggggggccctactcccccaaccagccctccatcaaccttcactcacaggacctcctgcagaattcccccaattccatgtccggagtctccaataacccccaggggattgtggtcccagcctcagcgctccagcagggcaacatcgccatgacaaccgtcaactcacaagttgtgtcaggtggagccttataccaaccggttaccatggtaacctcccagggtcaggtggtcacccaagcaatcccccagggagccatccagatccagaacacacaggttaaccttgacctcacctccctcctggacaatgaggataagaagtccaagaacaaacgaggagtcttgcccaagcatgccaccaatataatgcgttcttggctcttccagcatctcatgcacccctaccccacggaggatgagaagaggcagatcgcagcccagaccaacctcaccctcctgcaagtaaacaactggttcatcaatgcccggaggcgcatcctgcagcccatgcttgatgccagcaacccagatcctgcccccaaagccaagaagatcaagtctcagcaccggcccacccaaagattctggcccaactccatcgctgcgggggtgctgcagcagcagggcggtgccccagggacaaaccccgatggttccatcaacttggacaacctgcagtccctgtcctcagacagtgccaccatggccatgcagcaggctatgatggctgcacacgatgactcattggatgggacagaagaagaggatgaggatgagatggaagaggaggaggaggaggagctggaggaggaggtcgacgagctgcagacgacaaatgtcagcgacctgggcttggaacacagtgactccctggagtagtcgggcagcccagatggcactgatcactgagcaggagaggagtgtcgccgggaggccttcagggtgggggggaaggggacatgggcaggaagcaccgagggagttgggccctagcttccccaaatcagtagcttgaagaaaggcaaaggaga

SEQ ID NO: 15749 - DNA, 3687 bp, Homo sapiens
  source 1..3687: mol_type = unassigned DNA
gtcccgagcagtgctgggaagtataggctgtgttgtcacgccggtgtcagtctgatgaagattggcatcaggtgaagtctggagcaggacttctgaggctttctatcctccatgctgctcactagaaaaggggctgtgaactgtgctttggctctagcagacaggaagaaattctggcccagctggaagtagaaagaggggagtgagtctcctgaggaccatctcagaggccccgggatcacccgaacagtcctccatgtgaatcaatcccatgatgcaacatgcctccccagcccccgctctgacgatgatggccacgcagaatgtcccgcccccaccctaccaggacagcccacagatgacggcaaccgcccagccaccctccaaggcccaggctgtccacatctctgccccctcagctgctgccagcacacctgtgcccagtgcccccatcgacccccaggcccagctggaggctgacaagcgagctgtatacaggcaccctcttttcccgctcctgacgctgctgtttgagaaatgtgaacaggccacccagggctctgagtgcatcacctccgccagctttgatgtggacatcgagaactttgtccaccagcaggaacaggagcacaaacccttcttcagcgatgacccagaactggacaatctgatggtgaaggcaatccaggtcctgagaatccacctgctggagctggagaaagtcaatgaactctgcaaggacttttgtaaccgttacatcacctgcctcaaaaccaagatgcacagcgacaacctgctcaggaatgatctaggggggccctactcccccaaccagccctccatcaaccttcactcacaggacctcctgcagaattcccccaattccatgtccggagtctccaataacccccaggggattgtggtcccagcctcagcgctccagcagggcaacatcgccatgacaaccgtcaactcacaagttgtgtcaggtggagccttataccaaccggttaccatggtaacctcccagggtcaggtggtcacccaagcaatcccccagggagccatccagatccagaacacacaggttaaccttgacctcacctccctcctggacaatgaggataagaagtccaagaacaaacgaggagtcttgcccaagcatgccaccaatataatgcgttcttggctcttccagcatctcatgcacccctaccccacggaggatgagaagaggcagatcgcagcccagaccaacctcaccctcctgcaagtaaacaactggttcatcaatgcccggaggcgcatcctgcagcccatgcttgatgccagcaacccagatcctgcccccaaagccaagaagatcaagtctcagcaccggcccacccaaagattctggcccaactccatcgctgcgggggtgctgcagcagcagggcggtgccccagggacaaaccccgatggttccatcaacttggacaacctgcagtccctgtcctcagacagtgccaccatggccatgcagcaggctatgatggctgcacacgatgactcattggatgggacagaagaagaggatgaggatgagatggaagaggaggaggaggaggagctggaggaggaggtcgacgagctgcagacgacaaatgtcagcgacctgggcttggaacacagtgactccctggagtagtcgggcagcccagatggcactgatcactgagcaggagaggagtgtcgccgggaggccttcagggtgggggggaaggggacatgggcaggaagcaccgagggagttgggccctagcttccccaaatcagtagcttgaagaaaggcaaaggagacacctgttccttcccaaccaccgagcttcaatgaggaccccagccccacttccctggaactgccgaggactctgtttggcggggccagtcgagcagcctgtgtggaaagacaggagtgagatctggactcaccaaatccctgaggatagatggcacccatggcccccacccacggaaggacttgagttgtttacaagccctgcactgaggcagattggtgctgttcgcagagtaggcctttgcccgggggcagacttagaaggaaggggagagacaaagggggactgagtttcatccccagaagtttctcagctcctttgacagacattcaagggcaggagggagccccaaagcataaccagtggccagaggagtgggagggcctgaggcatcacatcttgcagatcagaatgggatggaatccaccaggctccagctcatccctccaaggccctgtctctgcgcacagcaaccatggacatgggagaaagggatgggagccacagtgcccttcactctctcctggaaaccaactgtaagctggtgggctcaacctgtgggaggttaagaggagtcccttctgggttgactccaagagccaaggagatggcagaccctgggctaggaaccatatggaggtgactttgaggccacagctgtccctaggtgatcacagaacttagctcctttaacaacaggacaatggttttttaccctagatgttcccaccttcagtgctccacgccctccatagaccttcagagaaggtgaaaccaggttatctgggaatctttccagcccgcaggtcgccacggccatccctttgctcccagcctggctccatcagcctccagcttcctttcttcattctgtccttcagggaaggcagaagaaacattggaaagcatctagtccagtgggaagccaggggttggagaaggtgctacatccctcttcccatcaatatcctaaatgtgggggagggcccagagaatggcacccaagagcctgcggggatgcccatcccacacaccccacccagctgttctaaccctgctatccacagccctggaggaactggggctcctggaaggaggaggaggctctccactgtccaccctaacacataccctcccacccaccttccagacccccttggttggcaccctctcctccggttccctctcaccccatggctgtgaatgacaggacaggtcacacgtgtgttttccattgggtttaatttaatggacgtgcagtttcatttgtaaattgtgcattggccacctccttcagtggcaggatgtgagtggctacctggctcaactggaggggaccccttgggccctctggggcttcccctcccccacctggttggggtagagcaaaaggatggtcactcttccgaggtctccctgaaatgaatgtatttctcccccaaaagagctgatatttaatgttttaataaggatttttgagaaacaaataaccttatttataatctgggtgatccaatcattttttactcccttttgatgccatacatagaggaaagtctagcttttttggcgtgagacttttgcaatgtgcagtgggataaaatgcatttccttttctggttcgtttttcttgttaacacgcgcacacagacacacacacacaccgttccactcaccacctggacaggcgtcccccagcacggacacactggcacacaggtgcccacatctcttcctctcagcccctccacctgcctaatgttatgcaacctccttctgatgtatccaccaaaccagtactgaatgtggccgagacgttttcagtaaatcttattacctaccgtaa

SEQ ID NO: 15750 - DNA, 588 bp, Homo sapiens
  source 1..588: mol_type = unassigned DNA
gtataggctgtgttgtcacgccggtgtcagtctgatgaagattggcatcaggtgaagtctggagcaggacttctgaggctttctatcctccatgctgctcactagaaaaggggctgtgaactgtgctttggctctagcagacaggaagaaattctggcccagctggaagtagaaagaggggagtgagtctcctgaggaccatctcagaggccccgggatcacccgaacagtcctccatgtgaatcaatcccatgatgcaacatgcctccccagcccccgctctgacgatgatggccacgcagaatgtcccgcccccaccctaccaggacagcccacagatgacggcaaccgcccagccaccctccaaggcccaggctgtccacatctctgccccctcagctgctgccagcacacctgtgcccagtgcccccatcgacccccaggcccagctggaggctgacaagcgagctgtatacagatggtgaaggcaatccaggtcctgagaatccacctgctggagctggagaaagtcaatgaactctgcaaggacttttgtaaccgttacatcacctgcctcaaaaccaagat

SEQ ID NO: 15751 - DNA, 559 bp, Homo sapiens
  source 1..559: mol_type = unassigned DNA
ataggctgtgttgtcacgccggtgtcagtctgatgaagattggcatcaggtgaagtctggagcaggacttctgaggctttctatcctccatgctgctcactagaaaaggggctgtgaactgtcctccatgtgaatcaatcccatgatgcaacatgcctccccagcccccgctctgacgatgatggccacgcagaatgtcccgcccccaccctaccaggacagcccacagatgacggcaaccgcccagccaccctccaaggcccaggctgtccacatctctgccccctcagctgctgccagcacacctgtgcccagtgcccccatcgacccccaggcccagctggaggctgacaagcgagctgtatacagatggtgaaggcaatccaggtcctgagaatccacctgctggagctggagaaagtcaatgaactctgcaaggacttttgtaaccgttacatcacctgcctcaaaaccaagatgcacagcgacaacctgctcaggaatgatctaggggggccctactcccccaaccagccctccatcaaccttcactcacagg

SEQ ID NO: 15752 - DNA, 545 bp, Homo sapiens
  source 1..545: mol_type = unassigned DNA
gtgttgtcacgccggtgtcagtctgatgaagattggcatcaggtgaagtctggagcaggacttctgaggctttctatcctccatgctgctcactagaaaaggggctgtgaactattgcatctacagacagtcagagtgcccgcaagaaatcaggcaatgagcgtaaaaacaacagactcgatccaccccgctcgaccagatcttgatgggaacctatgctcgaagggtgctttggctctagcagacaggaagaaattctggcccagctggaagtagaaagaggggagtgagtctcctgaggaccatctcagaggccccgggatcacccgaacatatgccatgataagggctggatctgttatggtgagattgggccccaactccaaaggaccttgcccaggattttgtcctccatgtgaatcaatcccatgatgcaacatgcctccccagcccccgctctgacgatgatggccacgcagaatgtcccgcccccaccctaccaggacagcccacagatgacggcaaccgcccagccaccctccaag

SEQ ID NO: 15753 - DNA, 521 bp, Homo sapiens
  source 1..521: mol_type = unassigned DNA
tcagtctgatgaagattggcatcaggtgaagtctggagcaggacttctgaggctttctatcctccatgctgctcactagaaaaggggctgtgaactgtctcctcggcagctgctgagctgcagaatttatggaagcccttcacgctttgtgacagactgctaatgaaagagaggccaggcttctgcgtctgccttctttggtttctaatttgtccagggattctatccccaagtgggggcaagcgacttggaagccaggggggccacacagagccctgcagcctgtcagcagggcttggcttgaaaggcccctgctgagggccacccagggggcagagggttgctcccagctccaagtacctgccagggatgtgaaacatgctctgggattaatgggaaccagatgggcaggacagcccctccacctggcctccaccggagaaatgctcagatttctggcattgtgctgaagcttttcttaggagttctctgagactgttttttcgctccaggccacatgc

SEQ ID NO: 15754 - DNA, 1654 bp, Homo sapiens
  source 1..1654: mol_type = unassigned DNA
agtctgatgaagattggcatcaggtgaagtctggagcaggacttctgaggctttctatcctccatgctgctcactagaaaaggggctgtgaactgtgctttggctctagcagacaggaagaaattctggcccagctggaagtagaaagaggggagtgagtctcctgaggaccatctcagaggccccgggatcacccgaacagtcctccatgtgaatcaatcccatgatgcaacatgcctccccagcccccgctctgacgatgatggccacgcagaatgtcccgcccccaccctaccaggacagcccacaggcaccctcttttcccgctcctgacgctgctgtttgagaaatgtgaacaggccacccagggctctgagtgcatcacctccgccagctttgatgtggacatcgagaactttgtccaccagcaggaacaggagcacaaacccttcttcagcgatgacccagaactggacaatctgatggtgaaggcaatccaggtcctgagaatccacctgctggagctggagaaagtcaatgaactctgcaaggacttttgtaaccgttacatcacctgcctcaaaaccaagatgcacagcgacaacctgctcaggaatgatctaggggggccctactcccccaaccagccctccatcaaccttcactcacaggacctcctgcagaattcccccaattccatgtccggagtctccaataacccccaggggattgtggtcccagcctcagcgctccagcagggcaacatcgccatgacaaccgtcaactcacaagttgtgtcaggtggagccttataccaaccggttaccatggtaacctcccagggtcaggtggtcacccaagcaatcccccagggagccatccagatccagaacacacaggttaaccttgacctcacctccctcctggacaatgaggataagaagtccaagaacaaacgaggagtcttgcccaagcatgccaccaatataatgcgttcttggctcttccagcatctcatgcacccctaccccacggaggatgagaagaggcagatcgcagcccagaccaacctcaccctcctgcaagtaaacaactggttcatcaatgcccggaggcgcatcctgcagcccatgcttgatgccagcaacccagatcctgcccccaaagccaagaagatcaagtctcagcaccggcccacccaaagattctggcccaactccatcgctgcgggggtgctgcagcagcagggcggtgccccagggacaaaccccgatggttccatcaacttggacaacctgcagtccctgtcctcagacagtgccaccatggccatgcagcaggctatgatggctgcacacgatgactcattggatgggacagaagaagaggatgaggatgagatggaagaggaggaggaggaggagctggaggaggaggtcgacgagctgcagacgacaaatgtcagcgacctgggcttggaacacagtgactccctggagtagtcgggcagcccagatggcactgatcactgagcaggagaggagtgtcgccgggaggccttcagggtgggggggaaggggacatgggcaggaagcaccgagggagttgggccctagcttccccaaatcagtagcttgaagaaaggcaaaggaga

SEQ ID NO: 15755 - DNA, 521 bp, Homo sapiens
  source 1..521: mol_type = unassigned DNA
attgccaaatgagcgacactaacaagagtgatgctctcagaggaaggacagactgagtggactgcaaggataggggagacttctggaagaggtggatggtgtggcagacccttgacactcattccccttcagcaggcttggaatgtggggatgactatccccattttcacatatggcaaaggcccaagccacacagctggtgaagtctggagcaggacttctgaggctttctatcctccatgctgctcactagaaaaggggctgtgaactgtgctttggctctagcagacaggaagaaattctggcccagctggaagtagaaagaggggagtgagtctcctgaggaccatctcagaggccccgggatcacccgaacagtcctccatgtgaatcaatcccatgatgcaacatgcctccccagcccccgctctgacgatgatggccacgcagaatgtcccgcccccaccctaccaggacagcccacagatgacggcaaccgcccagccaccctccaaggccca

SEQ ID NO: 15756 - DNA, 604 bp, Homo sapiens
  source 1..604: mol_type = unassigned DNA
aaggcactttagcaggaatctggcggcagagaggccgattgatgagatgccgaggtctgcagccccaactggaggcgccccggaagagtgagatggagtggggagggggtggaccgggcaggggaggaggcaaagagtctgtttccctggcccaaggaggccgagtggagccggcccagagatgaacgcatctgggagctgccaaggtgctttggctctagcagacaggaagaaattctggcccagctggaagtagaaagaggggagtgagtctcctgaggaccatctcagaggccccgggatcacccgaacagtcctccatgtgaatcaatcccatgatgcaacatgcctccccagcccccgctctgacgatgatggccacgcagaatgtcccgcccccaccctaccaggacagcccacagatgacggcaaccgcccagccaccctccaaggcccaggctgtccacatctctgccccctcagctgctgccagcacacctgtgcccagtgcccccatcgacccccaggcccagctggaggctgacaagcgagctgtatacagatggtgaaggcaatccaggtcctgagaatccacctgctggag

SEQ ID NO: 15757 - DNA, 340 bp, Homo sapiens
  source 1..340: mol_type = unassigned DNA
agcaggaatctggcggcagagaggccgattgatgagatgccgaggtctgcagccccaactggaggcgccccggaagagtgagatggagtggggagggggtggaccgggcaggggaggaggcaaagagtctgtttccctggcccaaggaggccgagtggagccggcccagagatgaacgcatctgggagctgccaaggtgctttggctctagcagacaggaagaaattctggcccagctggaagtagaaagaggggagtgagtctcctgaggaccatctcagaggccccgggatcacccgaacaatgacggcaaccgcccagccaccctccaaggcccagg

SEQ ID NO: 15758 - DNA, 554 bp, Homo sapiens
  source 1..554: mol_type = unassigned DNA
tatctcccaggtttgctgctggggtggccgcagaaccgggagtcggtcacagagttcacagacgaggtcacatggaggagaagcctggtgccaggaacaagctaggagtaactggaccacgatgacgcctgtgctttggctctagcagacaggaagaaattctggcccagctggaagtagaaagaggggagtgagtctcctgaggaccatctcagaggccccgggatcacccgaacagtcctccatgtgaatcaatcccatgatgcaacatgcctccccagcccccgctctgacgatgatggccacgcagaatgtcccgcccccaccctaccaggacagcccacagatgacggcaaccgcccagccaccctccaaggcccaggctgtccacatctctgccccctcagctgctgccagcacacctgtgcccagtgcccccatcgacccccaggcccagctggaggctgacaagcgagctgtatacaggcaccctcttttcccgctcctgacgctgctgtttgagaaatgtgaacaggccacccagggctctgagt

SEQ ID NO: 15759 - DNA, 591 bp, Homo sapiens
  source 1..591: mol_type = unassigned DNA
tacagtggctccatgggcctcagtgaccacattgagagagagttgaatggcaaatacaggagaaatggctgcaagggaaattacagaatagaggacatcctggagaggcctggagaggggagaacacagcccggaagcccctcctctctgaccacccctgcacttcttgccttccctgctgagagctgctctacccttttttgcaggtgctttggctctagcagacaggaagaaattctggcccagctggaagtagaaagaggggagtgagtctcctgaggaccatctcagaggccccgggatcacccgaacaatgacggcaaccgcccagccaccctccaaggcccaggctgtccacatctctgccccctcagctgctgccagcacacctgtgcccagtgcccccatcgacccccaggcccagctggaggctgacaagcgagctgtatacaggcaccctcttttcccgctcctgacgctgctgtttgagaaatgtgaacaggccacccagggctctgagtgcatcacctccgccagctttgatgtggacatcgagaactttgtccaccagcaggaacaggagcacaaacc

SEQ ID NO: 15760 - DNA, 4531 bp, Homo sapiens
  source 1..4531: mol_type = unassigned DNA
ccttcttcagcgatgacccagaactggacaatctgatggtgaaggcaatccaggtcctgagaatccacctgctggagctggagaaagtcaatgaactctgcaaggacttttgtaaccgttacatcacctgcctcaaaaccaagatgcacagcgacaacctgctcaggaatgatctaggggggccctactcccccaaccagccctccatcaaccttcactcacaggaaaccaagagagttgccttctggacctgggtctggggaggagctagaaggagggaggggggcaggcaggaaggggaaaggacggaagaggactctggggctgtagggtctaagctctcagtgtcattgtcacaaaccacgcctccctcactgccaggacctcctgcagaattcccccaattccatgtccggagtctccaataacccccaggggattgtggtcccagcctcagcgctccagcagggcaacatcgccatgacaaccgtcaactcacaagttgtgtcaggtcggtgcaaagactgggaagggtgattgtgggaattccctgggaggagaaagggtggccccgaggcggttccaggggtgggggttgtcctccaccgagggaggggctcccagctcagtttcttgactaaagttttctgtaagtttatagacggttagcgccaagacccaattgtgatggtttagaacaaatttgggtcaaaatctcatgagcccctgagaggaccaagtaaggctgttgtcccttccccgaagcacctcccaccagaggctctgtcctaggctctagacaccatcccccacccacccataaagcagaaagccatagctcgctacccaagggctccaagtagagggtctttacacatgagtgccaaatgaactgggaaccctgcttgccctcgctcctacccactcccatggcaggggaccccaaaactggttgtctcctcaggtggagccttataccaaccggttaccatggtaacctcccagggtcaggtggtcacccaagcaatcccccagggagccatccagatccagaacacacaggtgagtgtgtgtaggtgtgtgcacatgtgcatggtgtgggctagggcacctgtaatcgcttcttatctgccaggcactttacacgggtgactcattgaatcctcatcatcctctaagaggtatcattacccctactttacagataagaagctgggtcttggaaaggttttatcaactcctgggattttgctgcctccctcctggggttacatcaaaggatcctgcacttcctattcctgtctgcagactgagccgctgtgtccctcagtggtagagagtgcacacacaaaggaagagtagaaagatcggaagtcagagtctgggatctgacattaactctgggatctctgataagtcacctaacctctctgagcctcagacttcttattgataaaagggggattaatagcaactgcacacagcctagccaacctacagggctgctgtgagaatgaaccacagcgatggataggaaagtgctttgcaaactgtaaagtaccacagaaatgctgataactacttgacagcttatggcaaattcatatcttctcctgttctctctgcatggccctgtttcctctgtctttctctctctctctctctctctctctctctctctctctctctctctctcccccccttccccatctcttcctccttgtccttcttcccttctcccatcacccaagcctcacctccactctctgaggggctggcatgggctgagagggaaaggtgacctccccagggccctaggaatgagccgggaaaggggctggcagccaagcctgccgtcgctatggcaacaggtccccagccgctgccctcacaggctgctgatgctgattttctctccacgtgccctgaaggttaaccttgacctcacctccctcctggacaatgaggataagaagtccaagaacaaacgaggagtcttgcccaagcatgccaccaatataatgcgttcttggctcttccagcatctcatgcacccctaccccacggaggatgagaagaggcagatcgcagcccagaccaacctcaccctcctgcaagtaaacaactggttcatcaatgcccggaggcgcatcctgcagcccatgcttgatgccagcaacccagatcctgcccccaaagccaagaagatcaagtctcagcaccggcccacccaaagattctggcccaactccatcgctgcgggggtgctgcagcagcagggcggtgccccagggacaaaccccgatggttccatcaacttggacaacctgcagtccctgtcctcagacagtgccaccatggccatgcagcaggctatgatggctgcacacgatgactcattggatgggacagaagaagaggatgaggatgagatggaagaggaggaggaggaggagctggaggaggaggtcgacgagctgcagacgacaaatgtcagcgacctgggcttggaacacagtgactccctggagtagtcgggcagcccagatggcactgatcactgagcaggagaggagtgtcgccgggaggccttcagggtgggggggaaggggacatgggcaggaagcaccgagggagttgggccctagcttccccaaatcagtagcttgaagaaaggcaaaggagacacctgttccttcccaaccaccgagcttcaatgaggaccccagccccacttccctggaactgccgaggactctgtttggcggggccagtcgagcagcctgtgtggaaagacaggagtgagatctggactcaccaaatccctgaggatagatggcacccatggcccccacccacggaaggacttgagttgtttacaagccctgcactgaggcagattggtgctgttcgcagagtaggcctttgcccgggggcagacttagaaggaaggggagagacaaagggggactgagtttcatccccagaagtttctcagctcctttgacagacattcaagggcaggagggagccccaaagcataaccagtggccagaggagtgggagggcctgaggcatcacatcttgcagatcagaatgggatggaatccaccaggctccagctcatccctccaaggccctgtctctgcgcacagcaaccatggacatgggagaaagggatgggagccacagtgcccttcactctctcctggaaaccaactgtaagctggtgggctcaacctgtgggaggttaagaggagtcccttctgggttgactccaagagccaaggagatggcagaccctgggctaggaaccatatggaggtgactttgaggccacagctgtccctaggtgatcacagaacttagctcctttaacaacaggacaatggttttttaccctagatgttcccaccttcagtgctccacgccctccatagaccttcagagaaggtgaaaccaggttatctgggaatctttccagcccgcaggtcgccacggccatccctttgctcccagcctggctccatcagcctccagcttcctttcttcattctgtccttcagggaaggcagaagaaacattggaaagcatctagtccagtgggaagccaggggttggagaaggtgctacatccctcttcccatcaatatcctaaatgtgggggagggcccagagaatggcacccaagagcctgcggggatgcccatcccacacaccccacccagctgttctaaccctgctatccacagccctggaggaactggggctcctggaaggaggaggaggctctccactgtccaccctaacacataccctcccacccaccttccagacccccttggttggcaccctctcctccggttccctctcaccccatggctgtgaatgacaggacaggtcacacgtgtgttttccattgggtttaatttaatggacgtgcagtttcatttgtaaattgtgcattggccacctccttcagtggcaggatgtgagtggctacctggctcaactggaggggaccccttgggccctctggggcttcccctcccccacctggttggggtagagcaaaaggatggtcactcttccgaggtctccctgaaatgaatgtatttctcccccaaaagagctgatatttaatgttttaataaggatttttgagaaacaaataaccttatttataatctgggtgatccaatcattttttactcccttttgatgccatacatagaggaaagtctagcttttttggcgtgagacttttgcaatgtgcagtgggataaaatgcatttccttttctggttcgtttttcttgttaacacgcgcacacagacacacacacacaccgttccactcaccacctggacaggcgtcccccagcacggacacactggcacacaggtgcccacatctcttcctctcagcccctccacctgcctaatgttatgcaacctccttctgatgtatccaccaaaccagtactgaatgtggccgagacgttttcagtaaatcttattacctaccgtaa

SEQ ID NO: 15761 - DNA, 756 bp, Homo sapiens
  source 1..756: mol_type = unassigned DNA
gcgccgggccagggatggagtcctggacacctcggccgtcagcagtggcctctgggatgagctgggaggctggcgggatccggaccacgagccggcctgaggccggcgtgtgctccctggcgctgccctctgacctgcagctggaccgccggggcgccgaggggccggaggccgagcggctgcgggcagcccgcgtccaggagcaggtccgcgcccgcctcttgcagctgggacagcagccgcggcacaacggggccgctgagcccgagcctgaggccgagactgccagaggcacatccagggggcagtaccacaccctgcaggctggcttcagctctcgctctcagggcctgagtggggacaagacctcgggcttccggcccatcgccaagccggcctacagcccagcctcctggtcctcccgctccgccgtggatctgagctgcagtcggaggctgagttcagcccacaacgggggcagcgcctttggggccgctgggtacgggggtgcccagcccacccctcccatgcccaccaggcccgtgtccttccatgagcgcggtggggttgggagccgggccgactatgacacactctccctgcgctcgctgcggctggggcccgggggcctggacgaccgctacagcctggtgtctgagcagctggagcccgcggccacctccacctacagggcctttgcgtacgagcgccaggccagctccagctccagccgggcaggggggctggactggcccg

SEQ ID NO: 15762 - DNA, 1111 bp, Homo sapiens
  source 1..1111: mol_type = unassigned DNA
cctggggtgcaggagcagtggtgccagggtcccagaagccagagagggttttggaggcctctgtagggggtgagggggtcctggggcctgaggccggcgtgtgctccctggcgctgccctctgacctgcagctggaccgccggggcgccgaggggccggaggccgagcggctgcgggcagcccgcgtccaggagcaggtccgcgcccgcctcttgcagctgggacagcagccgcggcacaacggggccgctgagcccgagcctgaggccgagactgccagaggcacatccagggggcagtaccacaccctgcaggctggcttcagctctcgctctcagggcctgagtggggacaagacctcgggcttccggcccatcgccaagccggcctacagcccagcctcctggtcctcccgctccgccgtggatctgagctgcagtcggaggctgagttcagcccacaacgggggcagcgcctttggggccgctgggtacgggggtgcccagcccacccctcccatgcccaccaggcccgtgtccttccatgagcgcggtggggttgggagccgggccgactatgacacactctccctgcgctcgctgcggctggggcccgggggcctggacgaccgctacagcctggtgtctgagcagctggagcccgcggccacctccacctacagggcctttgcgtacgagcgccaggccagctccagctccagccgggcaggggggctggactggcccgaggccactgaggtttccccgagccggaccatccgtgcccctgccgtgcggaccctgcagcgattccagagcagccaccggagccgcggggtaggcggggcagtgccgggggccgtcctggagccagtggctcgagcgccatctgtgcgcagcctcagcctcagcctggctgactcgggccacctgccggacgtgcatgggttcaacagctacggtagccaccgaaccctgcagagactcagcagcggttttgatgacattgacctgccctcagcagtcaagtacctcatggcttcagaccccaacctgcaggtgctgggagcggcctacatccagcacaagtgctacagcgatgcagccgccaa

SEQ ID NO: 15763 - DNA, 847 bp, Homo sapiens
  source 1..847: mol_type = unassigned DNA
gcagtggtgccagggtcccagaagccagagagggttttggaggcctctgtaggggcctgaggccggcgtgtgctccctggcgctgccctctgacctgcagctggaccgccggggcgccgaggggccggaggccgagcggctgcgggcagcccgcgtccaggagcaggtccgcgcccgcctcttgcagctgggacagcagccgcggcacaacggggccgctgagcccgagcctgaggccgagactgccagaggcacatccagggggcagtaccacaccctgcaggctggcttcagctctcgctctcagggcctgagtggggacaagacctcgggcttccggcccatcgccaagccggcctacagcccagcctcctggtcctcccgctccgccgtggatctgagctgcagtcggaggctgagttcagcccacaacgggggcagcgcctttggggccgctgggtacgggggtgcccagcccacccctcccatgcccaccaggcccgtgtccttccatgagcgcggtggggttgggagccgggccgactatgacacactctccctgcgctcgctgcggctggggcccgggggcctggacgaccgctacagcctggtgtctgagcagctggagcccgcggccacctccacctacagggcctttgcgtacgagcgccaggccagctccagctccagccgggcaggggggctggactggcccgaggccactgaggtttccccgagccggaccatccgtgcccctgccgtgcggaccctgcagcgattccagagcagccaccggagccgcggggtaggcggggcagtgccgggggccgtcctggagccagtggct

SEQ ID NO: 15764 - DNA, 940 bp, Homo sapiens
  source 1..940: mol_type = unassigned DNA
ctcagggctgggcaggcgtctgtcttcaggcggctctggcctgaggccggcgtgtgctccctggcgctgccctctgacctgcagctggaccgccggggcgccgaggggccggaggccgagcggctgcgggcagcccgcgtccaggagcaggtccgcgcccgcctcttgcagctgggacagcagccgcggcacaacggggccgctgagcccgagcctgaggccgagactgccagaggcacatccagggggcagtaccacaccctgcaggctggcttcagctctcgctctcagggcctgagtggggacaagacctcgggcttccggcccatcgccaagccggcctacagcccagcctcctggtcctcccgctccgccgtggatctgagctgcagtcggaggctgagttcagcccacaacgggggcagcgcctttggggccgctgggtacgggggtgcccagcccacccctcccatgcccaccaggcccgtgtccttccatgagcgcggtggggttgggagccgggccgactatgacacactctccctgcgctcgctgcggctggggcccgggggcctggacgaccgctacagcctggtgtctgagcagctggagcccgcggccacctccacctacagggcctttgcgtacgagcgccaggccagctccagctccagccgggcaggggggctggactggcccgaggccactgaggtttccccgagccggaccatccgtgcccctgccgtgcggaccctgcagcgattccagagcagccaccggagccgcggggtaggcggggcagtgccgggggccgtcctggagccagtggctcgagcgccatctgtgcgcagcctcagcctcagcctggctgactcgggccacctgccggacgtgcatgggttcaacagctacggtagccaccgaaccctgcagagactca

SEQ ID NO: 15765 - DNA, 2809 bp, Homo sapiens
  source 1..2809: mol_type = unassigned DNA
ggcctcgagggacaggacgtgaagatagttgggtttggaggcggccgccaggcccaggcccggtggacctgccgccatgcaggacggtaacttcctgctgtcggccctgcagcctgaggccggcgtgtgctccctggcgctgccctctgacctgcagctggaccgccggggcgccgaggggccggaggccgagcggctgcgggcagcccgcgtccaggagcaggtccgcgcccgcctcttgcagctgggacagcagccgcggcacaacggggccgctgagcccgagcctgaggccgagactgccagaggcacatccagggggcagtaccacaccctgcaggctggcttcagctctcgctctcagggcctgagtggggacaagacctcgggcttccggcccatcgccaagccggcctacagcccagcctcctggtcctcccgctccgccgtggatctgagctgcagtcggaggctgagttcagcccacaacgggggcagcgcctttggggccgctgggtacgggggtgcccagcccacccctcccatgcccaccaggcccgtgtccttccatgagcgcggtggggttgggagccgggccgactatgacacactctccctgcgctcgctgcggctggggcccgggggcctggacgaccgctacagcctggtgtctgagcagctggagcccgcggccacctccacctacagggcctttgcgtacgagcgccaggccagctccagctccagccgggcaggggggctggactggcccgaggccactgaggtttccccgagccggaccatccgtgcccctgccgtgcggaccctgcagcgattccagagcagccaccggagccgcggggtaggcggggcagtgccgggggccgtcctggagccagtggctcgagcgccatctgtgcgcagcctcagcctcagcctggctgactcgggccacctgccggacgtgcatgggttcaacagctacggtagccaccgaaccctgcagagactcagcagcggttttgatgacattgacctgccctcagcagtcaagtacctcatggcttcagaccccaacctgcaggtgctgggagcggcctacatccagcacaagtgctacagcgatgcagccgccaagaagcaggcccgcagccttcaggccgtgcctaggctggtgaagctcttcaaccacgccaaccaggaagtgcagcgccatgccacaggtgccatgcgcaacctcatctacgacaacgctgacaacaagctggccctggtggaggagaacgggatcttcgagctgctgcggacactgcgggagcaggatgatgagcttcgcaaaaatgtcacagggatcctgtggaacctttcatccagcgaccacctgaaggaccgcctggccagagacacgctggagcagctcacagacctggtgttgagccccctgtcgggggctgggggtccccccctcatccagcagaacgcctcggaggcagagatcttctacaacgccaccggcttcctcaggaacctcagctcagcctctcaggccactcgccagaagatgcgggagtgccacgggctggtggacgccctggtcacctctatcaaccacgccctggacgcgggcaaatgcgaggacaagagcgtggagaacgcggtgtgcgtcctgcggaacctgtcctaccgcctctacgacgagatgccgccgtccgcgctgcagcggctggagggtcgcggccgcagggacctggcgggggcgccgccgggagaggtcgtgggctgcttcacgccgcagagccggcggctgcgcgagctgcccctcgccgccgatgcgctcaccttcgcggaggtgtccaaggaccccaagggcctcgagtggctgtggagcccccagatcgtggggctgtacaaccggctgctgcagcgctgcgagctcaaccggcacacgacggaggcggccgccggggcgctgcagaacatcacggcaggcgaccgcaggtgggcgggggtgctgagccgcctggccctggagcaggagcgtattctgaaccccctgctagaccgtgtcaggaccgccgaccaccaccagctgcgctcactgactggcctcatccgaaacctgtctcggaacgctaggaacaaggacgagatgtccacgaaggtggtgagccacctgatcgagaagctgccgggcagcgtgggtgagaagtcgcccccagccgaggtgctggtcaacatcatagctgtgctcaacaacctggtggtggccagccccatcgctgcccgagacctgctgtattttgacggactccgaaagctcatcttcatcaagaagaagcgggacagccccgacagtgagaagtcctcccgggcagcatccagcctcctggccaacctgtggcagtacaacaagctccaccgtgacttccgggcgaagggctatcggaaggaggacttcctgggcccataggtgaagccttctggaggagaaggtgacgtggcccagcgtccaagggacagactcagctccaggctgcttggcagcccagcctggaggagaaggctaatgacggaggggcccctcgctggggcccctgtgtgcatctttgagggtcctgggccaccaggaggggcagggtcttatagctggggacttggcttccgcagggcagggggtggggcagggctcaaggctgctctggtgtatggggtggtgacccagtcacattggcagaggtgggggttggctgtggcctggcagtatcttgggatagccagcactgggaataaagatggccatgaacagtca

SEQ ID NO: 15766 - DNA, 590 bp, Homo sapiens
  source 1..590: mol_type = unassigned DNA
agttgggtttggaggcggccgccaggcccaggcccggtggacctgccgccatgcaggacggtaacttcctgctgtcggccctgcagcctgaggccggcgtgtgctccctggcgctgccctctgacctgcagctggaccgccggggcgccgaggggccggaggccgagcggctgcgggcagcccgcgtccaggagcaggtccgcgcccgcctcttgcagctgggacagcagccgcggcacaacggggccgctgagcccgagcctgaggccgagactgccagaggcacatccagggggcagtaccacaccctgcaggctggcttcagctctcgctctcagggcctgagtggggacaagacctcggtgagcgatgggcccagcccgagggggacgatctgagctctgcagtctggagagtgggaggctctgcagcgggcccggacacaggtgagcccaggcacgccctcaccgccccctctcgacccacagggcttccggcccatcgccaagccggcctacagcccagcctcctggtcctcccgctccgccgtggatctgagctgcagtcggaggctgagttcagcccacaac

SEQ ID NO: 15767 - DNA, 687 bp, Homo sapiens
  source 1..687: mol_type = unassigned DNA
agttgggtttggaggcggccgccaggcccaggcccggtggacctgccgccatgcaggacggtaacttcctgctgtcggccctgcagcctgaggccgagactgccagaggcacatccagggggcagtaccacaccctgcaggctggcttcagctctcgctctcagggcctgagtggggacaagacctcgggcttccggcccatcgccaagccggcctacagcccagcctcctggtcctcccgctccgccgtggatctgagctgcagtcggaggctgagttcagcccacaacgggggcagcgcctttggggccgctgggtacgggggtgcccagcccacccctcccatgcccaccaggcccgtgtccttccatgagcgcggtggggttgggagccgggccgactatgacacactctccctgcgctcgctgcggctggggcccgggggcctggacgaccgctacagcctggtgtctgagcagctggagcccgcggccacctccacctacagggcctttgcgtacgagcgccaggccagctccagctccagccgggcaggggggctggactggcccgaggccactgaggtttccccgagccggaccatccgtgcccctgccgtgcggaccctgcagcgattccagagcagccaccggagccgcggggtaggcggggcagtgccgggggccg

SEQ ID NO: 15768 - DNA, 441 bp, Homo sapiens
  source 1..441: mol_type = unassigned DNA
cagggagacagtgtcactctcctgtgaccgggcacagatgaggtttgggcacaggaggggctcaaaaggagtcagtgtgggccggggcaggccaggctggcttcctggaggaggctgggcactgtaccatggcaaggattggagaactgatgtcagaggccctggcacattcctcctggcgaccaggaggcacatccagggggcagtaccacaccctgcaggctggcttcagctctcgctctcagggcctgagtggggacaagacctcgggcttccggcccatcgccaagccggcctacagcccagcctcctggtcctcccgctccgccgtggatctgagctgcagtcggaggctgagttcagcccacaacgggggcagcgcctttggggccgctgggtacgggggtgcccagcccacccctcccatgcccaccaggcccg

SEQ ID NO: 15769 - DNA, 312 bp, Homo sapiens
  source 1..312: mol_type = unassigned DNA
tcgggccacctgccggacgtgcatgggttcaacagctacggtagccaccgaaccctgcagagactcagcagcggttttgatgacattgacctgccctcagcagtcaagtacctcatggcttcagaccccaacctgcaggtgctgggagcggcctacatccagcacaagtgctacagcgatgcagccgccaagaagcaggtgaccaccccgaccacccactcgctgccccctggtgacctccttcgtgggccccaccacctcccactgtcctctgctcactgagcacccctcatgatccccaagctgactggg

SEQ ID NO: 15770 - DNA, 532 bp, Homo sapiens
  source 1..532: mol_type = unassigned DNA
aagtgctacagcgatgcagccgccaagaagcaggcccgcagccttcaggccgtgcctaggctggtgaagctcttcaaccacgccaaccaggaagtgcagcgccatgccacaggtgccatgcgcaacctcatctacgacaacgctgacaacaagctggccctggtggaggagaacgggatcttcgagctgctgcggacactgcgggagcaggatgatgagcttcgcaaaaatgtcacagggatcctgtggaacctttcatccagcgaccacctgaaggaccgcctggccagagacacgctggagcagctcacagacctggtgttgagccccctgtcgggggctgggggtccccccctcatccagcagaacgcctcggaggcagagatcttctacaacgccaccggcttcctcaggtgcgccagcctcgggcagcggggtggggattgcaggcgcgggtcactgtggggactccgcctggcctggcgttcgcagcccacacaccgcacgcctcgcgctggggatgggcgtgcga

SEQ ID NO: 15771 - DNA, 495 bp, Homo sapiens
  source 1..495: mol_type = unassigned DNA
attttgacggactccgaaagctcatcttcatcaagaagaagcgggacagccccgacagtgagaagtcctcccgggcagcatccagcctcctggccaacctgtggcagtacaacaagctccaccgtgacttccgggcggtacgtttcccgagcccagggcaagcagggacccgggtgcagggcatgggacgccgggggagggtcagtgaagaggcccatgggaggatggagaccagggacccagagaggaagggtccgggccacacccagcacactgcaggagggacagcgggcagagggccacatgggcagacatgcaccctgaccttgggcctctctccactgtagaagggctatcggaaggaggacttcctgggcccataggtgaagccttctggaggagaaggtgacgtggcccagcgtccaagggacagactcagctccaggctgcttggcagcccagcctggaggagaaggctaatgacggaggggcccc

SEQ ID NO: 15772 - DNA, 2594 bp, Homo sapiens
  source 1..2594: mol_type = unassigned DNA
cttcctggaagggtgcgataaggccgggcgaggtgcctgggatgcttctccccttccgcgaggaagagatctaattgggtagggcgggtgtagactagcctgccgagccgcccgctggcacctgcagcctcctgggcgcccgccgggccccggcgagaaagttgttaaagggagcgaggtggttgttcctggggtccgaggcgcgcctctcacgccctgcccaacagaagccgcagtcccgtggggtctggagacgcagtttcctgttaatgacaataaatccctgctccccctgcctcagacatctacgcagcgaaatcgagcctggccttgagggtccacaccgcgagggaagatgcgtgcgcccattccagagcctaagcctggagacctgattgagatttttcgccctttctacagacactgggccatctatgttggcgatggatatgtggttcatctggcccctccaagtgaggtcgcaggagctggtgcagccagtgtcatgtccgccctgactgacaaggccatcgtgaagaaggaattgctgtatgatgtggccgggagtgacaagtaccaggtcaacaacaaacatgatgacaagtactcgccgctgccctgcagcaaaatcatccagcgggcggaggagctggtggggcaggaggtgctctacaagctgaccagtgagaactgcgagcactttgtgaatgagctgcgctatggagtcgcccgcagtgaccaggtcagagatgtcatcatcgctgcaagcgttgcaggaatgggcttggcagccatgagccttattggagtcatgttctcaagaaacaagcgacaaaagcaataactgaaaaagactgtcctgtcagcgatgactttatacatcaagggggtcttgttttgctagagagtttggggtttggtttgtggatttcattgtgatttataataaggcttattttcacagaataaaataaagcaaaacgagggaggattttattgggggaagtgcagcaagaactgcctggtgtgaagtctgttcagggaacagccgggctgtcttcctggtcagggattgtctttcactttctttttgcgtgctgtgttctttgcattgcaggaggcagagtccagctccagttatctcaagtagagggcgtttctggtcgtcaggatacatgcggggcggaagggagacagaaagacataatacacaagaacagaaagcagcagacagccaggacccttggcccggaactagatctaggatggcctctgagactcagcagctggagtctgtagatgttcagctgagttgaaaaaaaaaaagtcctcggctataaggaaatttagtatagatgcttgccaatcttactaaaatttcccttattttcctttgctctacacgtctttcctttgccttgttgcttccatctccttggcactcctgcttcctcactgcttctgcttgccatgatccccaagtctctgacccaccttcctgcctgctcctctcctcccacattggctcagattctttccccgctgtctgtgggtccacactcccagtggcacctccaggagagaatctgattggctcagttcgccagataactcaactttcccattggctacctttgggtcaggtgatctccactagacctatcgcctatgcctgatggtgggtcacatggtgcaaatgttgcctgagagcttagtggattagggatgtggctgggctcatggttgacgtccctgctgctgagcccttacgggtcaggctgggagaaggtaccatgttgtgtgactggtcatttgaggtcttgcagctgttgcttgctgggcttggcaggtgttcaaagtgaccatttttctgaagggtttttttctgagtattcctcagatgtactcccctggggccgacggtctttccttccacagggcgatgcttccctacttgcttgtgaatgtttccttcatctccaggttgtctggggacaattctgtcttttggaggcctgggcaggatttacagagggctccatgccagctccttcctgccgggtccacttctggtgtagggtaaacacctgcccattcatgtcctagtgttgatagaataatcattttctttcagtacagtttcctttttttttttttttgccccggctttttagatgtagcacttaatgccagttctcgagctccccaaacttaagggacacaggtcaacaagcagtaggtctttggaagctcgctctctcacatggtataaggtgagggggacacatggaatgtaaacctccaaactaattatgggggaaaaaggaatgagaaaaacaaacacaagaaggcaaaacaaaaacacctggttcaattaaaaacaacaacaaagcaaaacaaaaaaaacccaaaaccaaaccacacaataaatgagaaaaaaattacataaaacagatgacatgtatagaaataaaaaaatagaatggaggaactaattccaaatatataagtaatcctaagtggactaaatttgcaaagtaaaaggcaaacattacactggattaaaaaacaaatccagggaatacagtttacag

SEQ ID NO: 15773 - DNA, 678 bp, Homo sapiens
  source 1..678: mol_type = unassigned DNA
acgccctgcccaacagaagccgcagtcccgtggggtctggagacgcagtttcctgttaatgacaataaatccctgctccccctgcctcagacatctacgcagcgaaatcgagcctggccttgagggtccacaccgcgagggaagatgcgtgcgcccattacactgggccatctatgttggcgatggatatgtggttcatctggcccctccaagtgaggtcgcaggagctggtgcagccagtgtcatgtccgccctgactgacaaggccatcgtgaagaaggaattgctgtatgatgtggccgggagtgacaagtaccaggtcaacaacaaacatgatgacaagtactcgccgctgccctgcagcaaaatcatccagcgggcggaggagctggtggggcaggaggtgctctacaagctgaccagtgagaactgcgagcactttgtgaatgagctgcgctatggagtcgcccgcagtgaccaggtcagagatgtcatcatcgctgcaagcgttgcaggaatgggcttggcagccatgagccttattggagtcatgttctcaagaaacaagcgacaaaagcaataactgaaaaagactgtcctgtcagcgatgactttatacatcaagggggtcttgttttgctagagagtttggggtttggtttgtggatttcattgtga

SEQ ID NO: 15774 - DNA, 243 bp, Homo sapiens
  source 1..243: mol_type = unassigned DNA
cttgggttaaaaagtattctgaaagcatcctcactgtcctccctggtcccgcacagtgccagagccgggggtcttggactgagtcagagttgcatgggtgcatctggagggaccttgattggagagaggtgaggtcgcaggagctggtgcagccagtgtcatgtccgccctgactgacaaggccatcgtgaagaaggaattgctgtatgatgtggccgggagtgacaagtaccaggtcaacaa

SEQ ID NO: 15775 - DNA, 430 bp, Homo sapiens
  source 1..430: mol_type = unassigned DNA
agcctcccgagtagctgggactacaggcacccgccacctcgcccggctaattttttgtatttttagtagagacggggtttcactgtgttagccaggatggtctcgatctcctgacctcgtgatccacccgcctcggcctcccaaagtcctgggattacgggcgtgagccaccgcgcccggcctatactggtctctctactcctctgcgtcctgcaacacaggagccctcataaggaaatgaagacccaaagaagtagttggtgtcagttacttctacaccgaattggacaaagaataccagagcctaagcctggagacctgattgagatttttcgccctttctacagacactgggccatctatgttggcgatggatatgtggttcatctggcccctccaagtgaggtcgcaggagctggtgcagccagtg

SEQ ID NO: 15776 - DNA, 1099 bp, Homo sapiens
  source 1..1099: mol_type = unassigned DNA
gggtgacctcacgccggcccggccaccgcggccattagacccggtccaattgctggggctgcagcgctgcctccgagaccgcgagacatctacgcagcgaaatcgagcctggccttgagggtccacaccgcgagggaagatgcgtgcgcccattccagagcctaagcctggagacctgattgagatttttcgccctttctacagacactgggccatctatgttggcgatggatatgtggttcatctggcccctccaagtgaggtcgcaggagctggtgcagccagtgtcatgtccgccctgactgacaaggccatcgtgaagaaggaattgctgtatgatgtggccgggagtgacaagtaccaggtcaacaacaaacatgatgacaagtactcgccgctgccctgcagcaaaatcatccagcgggcggaggagctggtggggcaggaggtgctctacaagctgaccagtgagaactgcgagcactttgtgaatgagctgcgctatggagtcgcccgcagtgaccaggtcagagatgtcatcatcgctgcaagcgttgcaggaatgggcttggcagccatgagccttattggagtcatgttctcaagaaacaagcgacaaaagcaataactgaaaaagactgtcctgtcagcgatgactttatacatcaagggggtcttgttttgctagagagtttggggtttggtttgtggatttcattgtgatttataataaggcttattttcacagaataaaataaagcaaaacgagggaggattttattgggggaagtgcagcaagaactgcctggtgtgaagtctgttcagggaacagccgggctgtcttcctggtcagggattgtctttcactttctttttgcgtgctgtgttctttgcattgcaggaggcagagtccagctccagttatctcaagtagagggcgtttctggtcgtcaggatacatgcggggcggaagggagacagaaagacataatacacaagaacagaaagcagcagacagccaggacccttggcccggaactagatctaggatggcctctgagactcagcagctggagtctgtagatgttcagctgagttg

SEQ ID NO: 15777 - DNA, 957 bp, Homo sapiens
  source 1..957: mol_type = unassigned DNA
catggaccccagccagagcctaagcctggagacctgattgagatttttcgccctttctacagacactgggccatctatgttggcgatggatatgtggttcatctggcccctccaagtgaggtcgcaggagctggtgcagccagtgtcatgtccgccctgactgacaaggccatcgtgaagaaggaattgctgtatgatgtggccgggagtgacaagtaccaggtcaacaacaaacatgatgacaagtactcgccgctgccctgcagcaaaatcatccagcgggcggaggagctggtggggcaggaggtgctctacaagctgaccagtgagaactgcgagcactttgtgaatgagctgcgctatggagtcgcccgcagtgaccaggtcagagatgtcatcatcgctgcaagcgttgcaggaatgggcttggcagccatgagccttattggagtcatgttctcaagaaacaagcgacaaaagcaataactgaaaaagactgtcctgtcagcgatgactttatacatcaagggggtcttgttttgctagagagtttggggtttggtttgtggatttcattgtgatttataataaggcttattttcacagaataaaataaagcaaaacgagggaggattttattgggggaagtgcagcaagaactgcctggtgtgaagtctgttcagggaacagccgggctgtcttcctggtcagggattgtctttcactttctttttgcgtgctgtgttctttgcattgcaggaggcagagtccagctccagttatctcaagtagagggcgtttctggtcgtcaggatacatgcggggcggaagggagacagaaagacataatacacaagaacagaaagcagcagacagccaggacccttggcccggaactagatctaggatggcctctgagactcagcagctggagtctgtagatgttcagctgagttg

SEQ ID NO: 15778 - DNA, 2697 bp, Homo sapiens
  source 1..2697: mol_type = unassigned DNA
atgggggcgtgggccctggcaagtgcactcctcagccaatcagcgtcctgcccggctggtggattcggttacaagcccaagatcaccccatactccagcctctttcctcctcctcccgcagctccattcattggtcccgccgcaccgggcctgctgggctccgcttccgttccactgctcagctgccgcctggtggggccaccaagggcaggcatcccaggggctttgtctgactggactgggccagtgcagaatgggggttcaggcagggctgtttgggatgctgggcttcctgggggtggccctggggggctcccctgccctccgctggtacaggacctcctgccacttgaccaaggccgtccctggcaacccactggggtacctgagcttcctggccaaggatgctcagggactggccctgatccatgcccgctgggatgcgcataggaggctgcagtcatgtagctgggaggatgagccggagctcaccgcagcctacggtgctctctgtgctcatgagactgcctggggctccttcatccacacccccggacccgagctgcagagagcactggccactcttcagagtcagtgggaggcatgccgagcgcttgaggagagtccagcaggggccaggaagaagcgagcagcagggcagagtggagtccctggtggagggcaccagcgagagaagagaggatggaccatgcctggcacactgtggtgtggagttggagattctgctgggaactcctcggagctgggggtcttccagggacctgatctctgttgccgggaacatgaccgctgcccacagaacatctcacccttgcagtacaactatggcatccgaaactaccgattccacaccatctcccactgtgactgtgacaccaggtttcagcaatgcctacagaatcagcacgactccatctcggacatcgtgggcgtggccttcttcaacgtgctggagatcccctgctttgtgctggaggagcaggaggcgtgtgtggcgtggtactggtggggcgggtgtaggatgtacggcacagtgcccctcgctcgcctgcagcccaggaccttctacaatgcctcctggagctcccgggccacctccccaactcccagctcccggagcccagcccctcccaagcctcgacagaagcagcaccttcggaaggggccaccacatcagaaagggtccaagcgccccagcaaagccaacaccacagccctccaggaccctatggtctctcccaggcttgatgtggcccccacaggcctccagggcccacagggtggcctaaaacctcagggtgcccgctgggtctgccgcagcttccgccgccacctggaccagtgtgagcaccagattgggccccgggaaatcgagttccagctgctcaacagcgcccaagagcccctcttccactgcaactgcacgcgccgtctggcacgcttcctgaggctccacagcccacccgaggttaccaacatgctttgggagctgctgggcacaacctgcttcaagctggcccctccactggactgtgtggaaggcaaaaactgttccagagaccctagggccatcagggtgtcagcccggcacttgcggaggcttcagcagaggcgacaccagctccaggataaaggcacagatgagaggcagccatggccttcagagcccctgagaggccccatgtcattctacaaccagtgcctgcagctaacccaggcagccaggagacccgacaggcagcagaagtcctggagccagtgacctcagtttcagctttcctgggcaccagcctggaccttgcccatggctatgccaagccttgggaatctcagcctcccctccgtaggttagactgaagcatggcagaggctgttgtggacaatcaagaggatgaatggggggatctcaaggcccaaatgctggaccacatctcctgctgttctgggtaaccttgagctatgtatgacacaactcttctatgcctggatgtggtgttcaggaagctcattctgatgccctgggctttggccttgccagggaacttcacatacagatgagaatggggaaagggtaacttattgcagcagccccaggcagtaccaggaggaggtacatgtatgtccgtgttgcaaaaataatacatgcctcaaaaacctgcctaggggagccctagtgcctgggtgctgtggcctgaggtagcaggtgggaagttagggatgtcacagaaatgtctgtgtctgaatccaggattggggtgggtgttggagagggctttcagctcccctcctcccaggggggcctctttttttaacggctgccgtgcccttcctggcccagccctaaacctaaattcaaatctcctccatgcctttgcgcaaaggacctccctcttgcactctaagccttagtttcctcctctaaaaaaagggggtctctaaacaggagctacctcatagggttgttgaggattaagtgaaccaatacatatacagtgcttagcacttaataagtattcccccctgcgacacctagctgaactatggtttggtgtctgatcttgagaggttgatgtaaccttttaaaggcctcagttcgctcacctgtgaaatgggtctaagaatagcactgatctcacagggttgtgatgcagattaaaggagatggcatgtgtaatg

SEQ ID NO: 15779 - DNA, 2875 bp, Homo sapiens
  source 1..2875: mol_type = unassigned DNA
aggataagactttctctaagtccggagctgaaaaaggatcctgactgaaagctagaggcattgaggagcctgaagattctcaggttttaaagacgctagagtgccaaagaagactttgaagtgtgaaaacatttcctgtaattgaaaccaaaatgtcatttatagatccttaccagcacattatagtggagcaccagtattcccacaagtttacggtagtggtgttacgtgccaccaaagtgacaaagggggcctttggtgacatgcttgatactccagatccctatgtggaactttttatctctacaacccctgacagcaggaagagaacaagacatttcaataatgacataaaccctgtgtggaatgagacctttgaatttattttggatcctaatcaggaaaatgttttggagattacgttaatggatgccaattatgtcatggatgaaactctagggacagcaacatttactgtatcttctatgaaggtgggagaaaagaaagaagttccttttattttcaaccaagtcactgaaatggttctagaaatgtctcttgaagtttgctcatgcccagacctacgatttagtatggctctgtgtgatcaggagaagactttcagacaacagagaaaagaacacataagggagagcatgaagaaactcttgggtccaaagaatagtgaaggattgcattctgcacgtgatgtgcctgtggtagccatattgggttcaggtgggggtttccgagccatggtgggattctctggtgtgatgaaggcattatacgaatcaggaattctggattgtgctacctacgttgctggtctttctggctccacctggtatatgtcaaccttgtattctcaccctgattttccagagaaagggccagaggagattaatgaagaactaatgaaaaatgttagccacaatccccttttacttctcacaccacagaaagttaaaagatatgttgagtctttatggaagaagaaaagctctggacaacctgtcacctttactgatatctttgggatgttaataggagaaacactaattcataatagaatgaatactactctgagcagtttgaaggaaaaagttaatactgcacaatgccctttacctcttttcacctgtcttcatgtcaaacctgacgtttcagagctgatgtttgcagattgggttgaatttagtccatacgaaattggcatggctaaatatggtacttttatggctcccgacttatttggaagcaaattttttatgggaacagtcgttaagaagtatgaagaaaaccccttgcatttcttaatgggtgtctggggcagtgccttttccatattgttcaacagagttttgggcgtttctggttcacaaagcagaggctccacaatggaggaagaattagaaaatattaccacaaagcatattgtgagtaatgatagctcggacagtgatgatgaatcacacgaacccaaaggcactgaaaatgaagatgctggaagtgactatcaaagtgataatcaagcaagttggattcatcgtatgataatggccttggtgagtgattcagctttattcaataccagagaaggacgtgctgggaaggtacacaacttcatgctgggcttgaatctcaatacatcttatccactgtctcctttgagtgactttgccacacaggactcctttgatgatgatgaactggatgcagctgtagcagatcctgatgaatttgagcgaatatatgagcctctggatgtcaaaagtaaaaagattcatgtagtggacagtgggctcacatttaacctgccgtatcccttgatactgagacctcagagaggggttgatctcataatctcctttgacttttctgcaaggccaagtgactctagtcctccgttcaaggaacttctacttgcagaaaagtgggctaaaatgaacaagctcccctttccaaagattgatccttatgtgtttgatcgggaagggctgaaggagtgctatgtctttaaacccaagaatcctgatatggagaaagattgcccaaccatcatccactttgttctggccaacatcaacttcagaaagtacagggctccaggtgttccaagggaaactgaggaagagaaagaaatcgctgactttgatatttttgatgacccagaatcaccattttcaaccttcaattttcaatatccaaatcaagcattcaaaagactacatgatcttatgcacttcaatactctgaacaacattgatgtgataaaagaagccatggttgaaagcattgaatatagaagacagaatccatctcgttgctctgtttcccttagtaatgttgaggcaagaagatttttcaacaaggagtttctaagtaaacccaaagcatagttcatgtactggaaatggcagcagtttctgatgctgaggcagtttgcaatcccatgacaactggatttaaaagtacagtacagatagtcgtactgatcatgagagactggctgatactcaaagttgcagttacttagctgcatgagaataatactattataagttaggttgacaaatgatgttgattatgtaaggatatacttagctacattttcagtcagtatgaacttcctgatacaaatgtagggatatatactgtatttttaaacatttctcaccaactttcttatgtgtgttctttttaaaaattttttttcttttaaaatatttaacagttcaatctcaataagacctcgcattatgtatgaatgttattcactgactagatttattcataccatgagacaacactatttttatttatatatgcatatatatacatacatgaaataaatacatcaatataaaaataa

SEQ ID NO: 15780 - DNA, 850 bp, Homo sapiens
  source 1..850: mol_type = unassigned DNA
gttttaaagacgctagagtgccaaagaagactttgaagtgtgaaaacatttcctgtaattgaaaccaaaatgtcatttatagatccttaccagcacattatagtggagcaccagtattcccacaagtttacggtagtggtgttacgtgccaccaaagtgacaaagggggcctttggtgacatgcttgatactccagatccctatgtggaactttttatctctacaacccctgacagcaggaagagaacaagacatttcaataatgacataaaccctgtgtggaatgagacctttgaatttattttggatcctaatcaggaaaatgttttggagattacgttaatggatgccaattatgtcatggatgaaactctagggacagcaacatttactgtatcttctatgaaggtgggagaaaagaaagaagttccttttattttcaaccaagtcactgaaatggttctagaaatgtctcttgaagtttgctcatgcccagacctacgatttagtatggctctgtgtgatcaggagaagactttcagacaacagagaaaagaacacataagggagagcatgaagaaactcttgggtccaaagaatagtgaaggattgcattctgcacgtgatgtatatgtcaaccttgtattctcaccctgattttccagagaaagggccagaggagattaatgaagaactaatgaaaaatgttagccacaatccccttttacttctcacaccacagaaagttaaaagatatgttgagtctttatggaagaagaaaagctctggacaacctgtcacctttactgatatctttgggatgttaataggagaaacactaattcataat

SEQ ID NO: 15781 - DNA, 5266 bp, Homo sapiens
  source 1..5266: mol_type = unassigned DNA
gtgaggctccttcaggggcctggatggcctcagccatttcacccccagccctctctccctccctctcccactgacatattgagtttcgcactttaaaaatagctctgcagcactaagaagctttctctgagcgtggatcccagccctgaaacgcaggcctcccttgacggagaactgtcctatgtgagcataatgctagctccctgcttgtctttcaggcagcgcaagaaatttctctccacaaaataggtccagatggtttgaaatattcacagagatagacgtggggctcctttagttaagccctggcttccttcagctccttaataattcatcctggcttagcttcaggaggagtctggtggcactgcttccctttcacacaaaactcccttgaaattaccccaggaggctccaacaacaccttactttgaggaccagcctcagctccacacagcccgtcctgagtcccagagaggaggctgggatgagtctccaggcctcggaaggctgtcctggcctgggaactaatgtgtttgtcccacagagcccacaaacggatgaagaaggcagcaggtcaggaagaagtttcagtgagttcgaggatacacaggacctggacactcctggtctcccacctttctgtcctatggctccttggggctctgaggaggggctgtctccatgccacctgttgacagtgagggtcatccggatgaaaaatgtccggcaggctgatatgctgagccagacagactgttttgtgagcctctggctgcccaccgcctctcagaagaagctgaggacaaggaccatctccaactgcccaaatccagagtggaatgaaagcttcaacttccagatccagagccgagtgaagaacgtgctagagttgagtgtctgtgatgaagacacagtgacaccagatgaccatctcctgacagttctctatgacctcaccaagctctgtttccgaaagaaaacccacgtgaagtttccactcaacccgcagggcatggaagagctggaggtggagttcctgctggaggagagtccctctccacctgagaccctcgtcaccaatggcgtgctggtgtctcgacaagtctcctgcctggaggttcatgcacaatccaggaggcggaggaagagggagaaaatgaaggacctcctggtgatggtgaacgaatcctttgagaacacccagcgtgtccggccctgcttggaaccctgctgcccaacctctgcctgcttccaaaccgctgcctgcttccactaccccaagtacttccagtcccaggtgcacgtggaagtgcccaagagtcactggagctgtgggctttgctgccgctctcgcaagaagggccccatcagccagcccctcgactgcctttccgatggtcaggtgatgaccctgcctgtgggtgagagttatgaattacacatgaagtctacaccctgccctgagacactggacgtgcggctgggcttcagcctgtgcccagcagagctggagtttctgcagaagcggaaggtcgtggtggccaaggccctgaagcaggtgctgcagctggaggaagacctgcaggaggacgaggtgccgctgatagccatcatggccactgggggtggaacaagatccatgacctccatgtatggccacctgctggggctgcagaagctgaacctcctggactgtgccagctacatcaccggtctatcaggggccacctggaccatggctaccttgtaccgtgaccctgactggtcctccaaaaacttggagcctgctatctttgaggctcggagacatgtggtaaaggacaagctaccctccctgttcccagaccagctccgcaaattccaggaggagctccggcagcgcagccaggaaggctacagggtcacctttacagacttctggggcctgctgatagagacctgcctgggggacgagagaaatgaatgcaaactgtcagatcagcgtgctgctttgagctgcggccagaaccccctgcccatctacctcaccatcaatgtcaaggatgatgtaagcaaccaggacttcagagagtggttcgagttctccccctacgaggtgggcctgcagaagtatggggccttcatcccctccgagctcttcggctccgagttcttcatggggcggctggtgaagaggatcccggagtctcgaatctgctacatgctaggcctgtggagcagcatcttctccctgaacctgctggatgcctggaacctgtcacacacctcggaggagtttttccacaggtggacaagggagaaagtgcaggacatcgaagacgagccgatcctgcctgaaatccccaaatgtgatgctaacatcctggagaccacggtagtgatcccagggtcatggctgtccaattctttccgagaaatccttacccatcggtccttcgtgtctgagtttcacaacttcctgtctgggctgcagctgcacaccaactacctccagaatggccagttctctaggtggaaagacacagtgctagatggtttcccaaaccagctgaccgagtccgcgaaccacctgtgcctgctggacactgcgttctttgtcaactccagctacccgcccctcctcaggccagagcgaaaagccgacctcatcatccacctcaactactgtgctgggtcccagacaaagcccctgaaacaaacctgtgagtactgcactgtgcagaacatccccttccccaaatacgagctgccagatgagaatgaaaatctcaaggaatgctacctgatggagaacccccaggaacccgatgcccccatcgtgactttcttcccactcatcaatgacactttccgaaaatacaaggcaccaggtgtagagcgaagccctgaggagctggagcagggccaggtggacatttatggtcccaaaactccctatgccaccaaggagctgacatacacagaggccacctttgacaagctggtgaaactctcagagtataacatcctgaataataaggacactctcctccaggctctgcggctcgcagtggagaagaagaagcgcctgaagggccagtgtccctcctaggccccagggagcctcccctgttctgtgtcagcttctaccatcagaggtgcaggacccctcagggctgaccaggttactacgcagccagctctgctctccggcaatgggtgtgagcaggttggcctgggctttctaacgaaaagtaaaaaattttaaaaagttgagaaagtcagaaagagagagagaggagctctgttggggttttatacccactagagtttcttcaagtgcttccctatagagaaggtggtctcatagccacaggctcccacacatctgtggagaggaaaagcctggggaagaggctgggcccccagaaacctcgactcagaggcagagcccagggctggcagccctcctctctctgtcctctacctcgtgtggcgggcctagggaaatgcacagaaggacctgagaggcactcggcgtttcactggaaaaacacttcaaaatttaaggcaattctagtcttgtgatttttgggtttttttagacggagtctcactctgttgcccaggctggagtgcaatggcgcgatctcggctcactgcaacctctgcctcccaggttcaagcaattctcttgcctcagcctcccaagtggccgggattagaggcacccgccaccatgcccagctaattttttgtatttttagtacaggctggtctggaactcctgacctcaggtgatccacctgcctcggcctcccaaagtgctgggattacaggcatgagccaacgcacccggccctagtctcattatttttataggcaattatatttcatgatttttatttttatgaatcggagtattaataggaagcatgaagctagaagatctagatggagccctagaaataagccagtctctgccacaacaaagccaaataggtggccggtttcagtggctctctccagctacccagagctccagggctggtgatccatgtcatcatgaccagacagccatgcccaagcatccagctccaaacaaatgccaggcaaagcctaagtctatagcccaggttcaccaaatgaggatctgggatggagttcagcaaggtcaggcaggctgtgggtaaatgaggttgggggccaggcaggcgatgcatccagcgctgcccactccagctgtcggtgctcactgacgaccctgctccaagagcatctctcagcctcttactgcccatctctctggctgcctcatgggattacttatttctaaatgtgattcctcttatctgtgttgtcaacaccgtgaccagtgcattccaactcttggagagtcacccacagagactgaaactgggaagaattagtgaaaaaggactaggttagccgtcagaggaagaagcccgccctttaagattgcttcctaatgaatctctgggaaaaccctgggacacagagaaacccaaagtcagcaggtctcccttcaggctgggaacataaccaaggaaatgtataaccggagccactgacaggcccaggctgatagaaggtgaaagcagaaaggcaggaagacatgaggtctgcaggaaacccagcaaccctggaaggcggagtcccctttctgggccaccatgctccctaagcagtctttgggttgtgaggaaaccagtggtgacaggtaccaaaagtttagaaaaattggcctccgatgtacatccttgctactcaaagtgcagtggggagctggttggaaatgcggaatctcaggccttagcccagctgtactaaattagaagctgcatttttcaggagattcccatccccaggcgccccccgtgattcctgtgcatattgaagtttgagaggcctggatttacgccactccctcccatgagcttggaacgtatgaatcagtgctcccttgagccactgataaactgagctctggacctgcaaaactggtccccatccaggtaatgctaacctgggacaccagccctcccctccaccagagcaactggctgcctccactttgacatcttttctttctgactgcaacagactctccttccagtatcaaagagtgagccaagcaacagacaggacttgtttatcgtaaggcgaaggcagccatgccttggattcatcaaaagtttgtgaaacgaggtttataaaatcatcatattatttgtgcatggaataaaatggccatgtgggtgaa

SEQ ID NO: 15782 - DNA, 4066 bp, Homo sapiens
  source 1..4066: mol_type = unassigned DNA
atcttttgttgagtaccagctcgcattgtgccagctaaggctttgggggctttgcatttgttatctctttaagtgctgaagacagtgctgagagttcagcacgattcgccccactttacagatgggaaagtggagacccaaggtcacagaagtggtcgctggcagaagtaggctttgagcctaggtccaatggaccctgaagctgtgtctactccagggaggtagaggctgcaggcccaatacagggtcctctctccctccagccctgagacactggacgtgcggctgggcttcagcctgtgcccagcagagctggagtttctgcagaagcggaaggtcgtggtggccaaggccctgaagcaggtgctgcagctggaggaagacctgcaggaggacgaggtgccgctgatagccatcatggccactgggggtggaacaagatccatgacctccatgtatggccacctgctggggctgcagaagctgaacctcctggactgtgccagctacatcaccggtctatcaggggccacctggaccatggctaccttgtaccgtgaccctgactggtcctccaaaaacttggagcctgctatctttgaggctcggagacatgtggtaaaggacaagctaccctccctgttcccagaccagctccgcaaattccaggaggagctccggcagcgcagccaggaaggctacagggtcacctttacagacttctggggcctgctgatagagacctgcctgggggacgagagaaatgaatgcaaactgtcagatcagcgtgctgctttgagctgcggccagaaccccctgcccatctacctcaccatcaatgtcaaggatgatgtaagcaaccaggacttcagagagtggttcgagttctccccctacgaggtgggcctgcagaagtatggggccttcatcccctccgagctcttcggctccgagttcttcatggggcggctggtgaagaggatcccggagtctcgaatctgctacatgctaggcctgtggagcagcatcttctccctgaacctgctggatgcctggaacctgtcacacacctcggaggagtttttccacaggtggacaagggagaaagtgcaggacatcgaagacgagccgatcctgcctgaaatccccaaatgtgatgctaacatcctggagaccacggtagtgatcccagggtcatggctgtccaattctttccgagaaatccttacccatcggtccttcgtgtctgagtttcacaacttcctgtctgggctgcagctgcacaccaactacctccagaatggccagttctctaggtggaaagacacagtgctagatggtttcccaaaccagctgaccgagtccgcgaaccacctgtgcctgctggacactgcgttctttgtcaactccagctacccgcccctcctcaggccagagcgaaaagccgacctcatcatccacctcaactactgtgctgggtcccagacaaagcccctgaaacaaacctgtgagtactgcactgtgcagaacatccccttccccaaatacgagctgccagatgagaatgaaaatctcaaggaatgctacctgatggagaacccccaggaacccgatgcccccatcgtgactttcttcccactcatcaatgacactttccgaaaatacaaggcaccaggtgtagagcgaagccctgaggagctggagcagggccaggtggacatttatggtcccaaaactccctatgccaccaaggagctgacatacacagaggccacctttgacaagctggtgaaactctcagagtataacatcctgaataataaggacactctcctccaggctctgcggctcgcagtggagaagaagaagcgcctgaagggccagtgtccctcctaggccccagggagcctcccctgttctgtgtcagcttctaccatcagaggtgcaggacccctcagggctgaccaggttactacgcagccagctctgctctccggcaatgggtgtgagcaggttggcctgggctttctaacgaaaagtaaaaaattttaaaaagttgagaaagtcagaaagagagagagaggagctctgttggggttttatacccactagagtttcttcaagtgcttccctatagagaaggtggtctcatagccacaggctcccacacatctgtggagaggaaaagcctggggaagaggctgggcccccagaaacctcgactcagaggcagagcccagggctggcagccctcctctctctgtcctctacctcgtgtggcgggcctagggaaatgcacagaaggacctgagaggcactcggcgtttcactggaaaaacacttcaaaatttaaggcaattctagtcttgtgatttttgggtttttttagacggagtctcactctgttgcccaggctggagtgcaatggcgcgatctcggctcactgcaacctctgcctcccaggttcaagcaattctcttgcctcagcctcccaagtggccgggattagaggcacccgccaccatgcccagctaattttttgtatttttagtacaggctggtctggaactcctgacctcaggtgatccacctgcctcggcctcccaaagtgctgggattacaggcatgagccaacgcacccggccctagtctcattatttttataggcaattatatttcatgatttttatttttatgaatcggagtattaataggaagcatgaagctagaagatctagatggagccctagaaataagccagtctctgccacaacaaagccaaataggtggccggtttcagtggctctctccagctacccagagctccagggctggtgatccatgtcatcatgaccagacagccatgcccaagcatccagctccaaacaaatgccaggcaaagcctaagtctatagcccaggttcaccaaatgaggatctgggatggagttcagcaaggtcaggcaggctgtgggtaaatgaggttgggggccaggcaggcgatgcatccagcgctgcccactccagctgtcggtgctcactgacgaccctgctccaagagcatctctcagcctcttactgcccatctctctggctgcctcatgggattacttatttctaaatgtgattcctcttatctgtgttgtcaacaccgtgaccagtgcattccaactcttggagagtcacccacagagactgaaactgggaagaattagtgaaaaaggactaggttagccgtcagaggaagaagcccgccctttaagattgcttcctaatgaatctctgggaaaaccctgggacacagagaaacccaaagtcagcaggtctcccttcaggctgggaacataaccaaggaaatgtataaccggagccactgacaggcccaggctgatagaaggtgaaagcagaaaggcaggaagacatgaggtctgcaggaaacccagcaaccctggaaggcggagtcccctttctgggccaccatgctccctaagcagtctttgggttgtgaggaaaccagtggtgacaggtaccaaaagtttagaaaaattggcctccgatgtacatccttgctactcaaagtgcagtggggagctggttggaaatgcggaatctcaggccttagcccagctgtactaaattagaagctgcatttttcaggagattcccatccccaggcgccccccgtgattcctgtgcatattgaagtttgagaggcctggatttacgccactccctcccatgagcttggaacgtatgaatcagtgctcccttgagccactgataaactgagctctggacctgcaaaactggtccccatccaggtaatgctaacctgggacaccagccctcccctccaccagagcaactggctgcctccactttgacatcttttctttctgactgcaacagactctccttccagtatcaaagagtgagccaagcaacagacaggacttgtttatcgtaaggcgaaggcagccatgccttggattcatcaaaagtttgtgaaacgaggtttataaaatcatcatattatttgtgcatggaataaaatggccatgtgggtg

SEQ ID NO: 15783 - DNA, 826 bp, Homo sapiens
  source 1..826: mol_type = unassigned DNA
gctttgagctgcggccagaaccccctgcccatctacctcaccatcaatgtcaaggatgatgtaagcaaccaggacttcagagagtggttcgagttctccccctacgaggtgggcctgcagaagtatggggccttcatcccctccgagctcttcggctccgagttcttcatggggcggctggtgaagaggatcccggagtctcgaatctgctacatgctaggcctgtggagcagcatcttctccctgaacctgctggatgcctggaacctgtcacacacctcggaggagtttttccacaggtggacaagggagaaagtgcaggacatcgaagacgagccgatcctgcctgaaatccccaaatgtgatgctaacatcctggagaccacggtagtgatcccagggtcatggctgtccaattctttccgagaaatccttacccatcggtccttcgtgtctgagtttcacaacttcctgtctgggctgcagctgcacaccaactacctccagaatggccagttctctaggtggaaaggtaaccctacctggctactccttgaggcctgcctccatatggaggaggaagatgtggatgtcaaggctgccatggataaagaataagaaaacttctctggctatgttcactgggccaggcacctctctccccatggtgttttccacatttggtggtgtcgtcttgaacactgtatgtgtctggcagcagggagtggtgtgggtacttaactcactgcatctgtacagtcattctatacagaatctgtacaacagtcctagcaggtagaagttggccccatgttacagatgggga

SEQ ID NO: 15784 - DNA, 1871 bp, Homo sapiens
  source 1..1871: mol_type = unassigned DNA
aatgtcagtgcccgcccctgcttacaggctggggccatctgtaggcttggacaggaggggtttggggagacatggcctgctgtctgggaaaatattgataacatgttcccaggatgaggcatttctgacccttgttgtggtggaacgtggtgttccttgtactttctcccagcagaatatgataagaggcaggctatttctcatggcctgaatccctgtggaatatttcactttaagcacggtctgtgaaatggcgggggacttacaaaatggtgcagattggactttcttgccttctactttaatataaaaggaagaggggcgttgttgattatctggctgtttcctgtcgaattaggggcactgtaaccagggtttgggttttgaagtagtgggtgttcgactttagagttgttttcctggaagcgctgatactggacttagtggaggagaacgacggtatcaatgtgtttctggatgactgcctggacaagggagttcagcttttgggagactgactgggctatgaaggatggtagaggacagtcttcagcctgagacccatccctagttatatcttctggacagattcctagaagtgggattactggctcaaaagtgtacctttctactctgcagaggctggaaaggcaaaaatgatggctaaggcttccttgcagtggccgtgccattttgaatttccactggcattgaatgagagtccctgttccacatccttggcagcatttgtggtgttaacgttttggattttagccatcctcgtagccgctgatacagaagcctgagggaacacactcccccctacgtccttctccaacacagcagagccaggaaggacccggatggaagttaggacaaagaggcccagaattggcacagataccaacagaccattcgttgaagaagaaatccaaatggccataagaaccccagagatgaaaggcctcctcccactggcttggttcctggcttgtagtgtgcctgctgtgcaaggaggcttgctggacctaaaatcaatgatcgagaaggtgacagggaagaacgccctgacaaactacggcttctacggctgttactgcggctggggcggccgaggaacccccaaggatggcaccgattggtgctgttgggcgcatgaccactgctatgggcggctggaggagaagggctgcaacattcgcacacagtcctacaaatacagattcgcgtggggcgtggtcacctgcgagcccgggcccttctgccatgtgaacctctgtgcctgtgaccggaagctcgtctactgcctcaagagaaacctacggagctacaacccacagtaccaatactttcccaacatcctctgctcctaggcctccccagcgagctcctcccagaccaagacttttgttctgtttttctacaacacagagtactgactctgcctggttcctgagagaggctcctaagtcacagacctcagtctttctcgaagcttggcggacccccagggccacactgtaccctccagcgagtcccaggagagtgactctggtcataggacttggtagggtcccagggtccctaggcctccacttctgagggcagcccctctggtgccaagagctctcctccaactcagggttggctgtgtctcttttcttctctgaagacagcgtcctggctccagttggaacactttcctgagatgcacttacttctcagcttctgcgatcagattatcatcaccaccaccctccagagaatttttacgcaagaagagccaaattgactctctaaatctggtgtatgggtattaaataaaattcattctcaaggctaataaaaaccacattggcattttcctctgc

SEQ ID NO: 15785 - DNA, 1513 bp, Homo sapiens
  source 1..1513: mol_type = unassigned DNA
tggcgggggacttacaaaatggtgcagattggactttcttgccttctactttaatataaaaggaagaggggcgttgttgattatctggctgtttcctgtcgaattaggggcactgtaaccagggtttgggttttgaagtagtgggtgttcgactttagagttgttttcctggaagcgctgatactggacttagtggaggagaacgacggtatcaatgtgtttctggatgactgcctggacaagggagttcagcttttgggagactgactgggctatgaagtgtacctttctactctgcagaggctggaaaggcaaaaatgatggctaaggcttccttgcagccgctgatacagaagcctgagggaacacactcccccctacgtccttctccaacacagcagagccaggaaggacccggatggaagttaggacaaagaggcccagaattggcacagataccaacagaccattcgttgaagaagaaatccaaatggccataagaaccccagagatgaaaggcctcctcccactggcttggttcctggcttgtagtgtgcctgctgtgcaaggaggcttgctggacctaaaatcaatgatcgagaaggtgacagggaagaacgccctgacaaactacggcttctacggctgttactgcggctggggcggccgaggaacccccaaggatggcaccgattgggtctcactctggttgcccaggctggagtgcaatggtgcgatctcagctcactgcatcctagaccttctgcactcaggtgattctcccacctcagcctcctgagtagctgggactgcaggtgctgttgggcgcatgaccactgctatgggcggctggaggagaagggctgcaacattcgcacacagtcctacaaatacagattcgcgtggggcgtggtcacctgcgagcccgggcccttctgccatgtgaacctctgtgcctgtgaccggaagctcgtctactgcctcaagagaaacctacggagctacaacccacagtaccaatactttcccaacatcctctgctcctaggcctccccagcgagctcctcccagaccaagacttttgttctgtttttctacaacacagagtactgactctgcctggttcctgagagaggctcctaagtcacagacctcagtctttctcgaagcttggcggacccccagggccacactgtaccctccagcgagtcccaggagagtgactctggtcataggacttggtagggtcccagggtccctaggcctccacttctgagggcagcccctctggtgccaagagctctcctccaactcagggttggctgtgtctcttttcttctctgaagacagcgtcctggctccagttggaacactttcctgagatgcacttacttctcagcttctgcgatcagattatcatcaccaccaccctccagagaatttttacgcaagaagagccaaattgactctctaaatctggtgtatgggtattaaataaaattcattctcaagg

SEQ ID NO: 15786 - DNA, 964 bp, Homo sapiens
  source 1..964: mol_type = unassigned DNA
gggggacttacaaaatggtgcagattggactttcttgccttctactttaatataaaaggaagaggggcgttgttgattatctggctgtttcctgtcgaattaggggcactgtaaccagggtttgggttttgaagtagtgggtgttcgactttagagttgttttcctggaagcgctgatactggacttagtggaggagaacgacggtatcaatgtgtttctggatgactgcctggacaagggagttcagcttttgggagactgactgggctatgaagtgtacctttctactctgcagaggctggaaaggcaaaaatgatggctaaggcttccttgcagccgctgatacagaagcctgagggaacacactcccccctacgtccttctccaacacagcagagccaggaaggacccggatggaagttaggacaaagaggcccagaattggcacagataccaacagaccattcgttgaagaagaaatccaaatggccataagctttaagattctggaggccaagaatttgactccccccggatccatggtctgtggataccaatgttccgactggagacggggagcccgcgagacccgggtctccagggtctgcccaaggaagttgctcatgggagcagacctctagagcaggatttgaggccaggccaaagagggagagaattcgccgacatctatttaacatcccttaattgttgagagcatccactgtgtgccagacacttcggtacacacagaaagaaacccagaggaggaaccccagagatgaaaggcctcctcccactggcttggttcctggcttgtagtgtgcctgctgtgcaaggaggcttgctggacctaaaatcaatgatcgagaaggtgacagggaagaacgccctgacaaactacggcttctacggctgttactgcggctggggcggccgaggaacccccaaggatggcaccgattg

SEQ ID NO: 15787 - DNA, 826 bp, Homo sapiens
  source 1..826: mol_type = unassigned DNA
tgtcgaattaggggcactgtaaccagggtttgggttttgaagtagtgggtgttcgactttagagttgttttcctggaagcgctgatactggacttagtggaggagaacgacggtatcaatgtgtttctggatgactgcctggacaagggagttcagcttttgggagactgactgggctatgaagtgtacctttctactctgcagaggctggaaaggcaaaaatgatggctaaggcttccttgcaggagaggctgcccctccagaactagactcttccttggctttaagatgtgaagtcgagcagctggaaggacagacacctcatctgaccactgttctatggaccaaaggcaggatgagcatgccgctgatacagaagcctgagggaacacactcccccctacgtccttctccaacacagcagagccaggaaggacccggatggaagttaggacaaagaggcccagaattggcacagataccaacagaccattcgttgaagaagaaatccaaatggccataagaaccccagagatgaaaggcctcctcccactggcttggttcctggcttgtagtgtgcctgctgtgcaaggaggcttgctggacctaaaatcaatgatcgagaaggtgacagggaagaacgccctgacaaactacggcttctacggctgttactgcggctggggcggccgaggaacccccaaggatggcaccgattggtgctgttgggcgcatgaccactgctatgggcggctggaggagaagggctgcaacattcgcacacagtcctacaaatacagattcgcgtggggcgtggtcacctgcg

SEQ ID NO: 15788 - DNA, 1092 bp, Homo sapiens
  source 1..1092: mol_type = unassigned DNA
tgtcgaattaggggcactgtaaccagggtttgggttttgaagtagtgggtgttcgactttagagttgttttcctggaagcgctgatactggacttagtggaggagaacgacggtatcaatgtgtttctggatgactgcctggacaagggagttcagcttttgggagactgactgggctatgaagtgtacctttctactctgcagaggctggaaaggcaaaaatgatggctaaggcttccttgcagccgctgatacagaagcctgagggaacacactcccccctacgtccttctccaacacagcagagccaggaaggacccggatggaagttaggacaaagaggcccagaattggcacagataccaacagaccattcgttgaagaagaaatccaaatggccataagctttaagattctggaggccaagaatttgactccccccggatccatggtctgtggataccaatgttccgactggagacggggagcccgcgagacccgggtctccagggtctgcccaaggaagttgctcatgggagcagacctctagagcaggatttgaggccaggccaaagagaaccccagagatgaaaggcctcctcccactggcttggttcctggcttgtagtgtgcctgctgtgcaaggaggcttgctggacctaaaatcaatgatcgagaaggtgacagggaagaacgccctgacaaactacggcttctacggctgttactgcggctggggcggccgaggaacccccaaggatggcaccgattggtgctgttgggcgcatgaccactgctatgggcggctggaggagaagggctgcaacattcgcacacagtcctacaaatacagattcgcgtggggcgtggtcacctgcgagcccgggcccttctgccatgtgaacctctgtgcctgtgaccggaagctcgtctactgcctcaagagaaacctacggagctacaacccacagtaccaatactttcccaacatcctctgctcctaggcctccccagcgagctcctcccagaccaagacttttgttctgtttttctacaacacagagtactgactctgcctggttcctgagagag

SEQ ID NO: 15789 - DNA, 483 bp, Homo sapiens
  source 1..483: mol_type = unassigned DNA
tgggtgttcgactttagagttgttttcctggaagcgctgatactggacttagtggaggagaacgacggtatcaatgtgtttctggatgactgcctggacaagggagttcagcttttgggagactgactgggctatgaagtgtacctttctactctgcagaggctggaaaggcaaaaatgatggctaaggcttccttgcagccgctgatacagaagcctgagggaacacactcccccctacgtccttctccaacacagcagagccaggaaggacccggatggaagttaggacaaagaggcccagaattggcacagataccaacagaccattcgttgaagaagaaatccaaatggccataaggtctttaagattctggaggccaagaatttgactccccccggatccatggtctgtggataccaatgttccgactggagacggggagcccgcgagacccgggtctccagggtctgcccaaggaag

SEQ ID NO: 15790 - DNA, 1161 bp, Homo sapiens
  source 1..1161: mol_type = unassigned DNA
cagggttctacccggctgggtccaggcagaagtttttcctccccacctccgggtttgtcctcatcatcggtcactcccattcacagctttaagattctggaggccaagaatttgactccccccggatccatggtctgtggataccaatgttccgactggagacggggagcccgcgagacccgggtctccagggtctgcccaaggaagttgctcatgggagcagacctctagagcaggatttgaggccaggccaaagagaaccccagagatgaaaggcctcctcccactggcttggttcctggcttgtagtgtgcctgctgtgcaaggaggcttgctggacctaaaatcaatgatcgagaaggtgacagggaagaacgccctgacaaactacggcttctacggctgttactgcggctggggcggccgaggaacccccaaggatggcaccgattggtgctgttgggcgcatgaccactgctatgggcggctggaggagaagggctgcaacattcgcacacagtcctacaaatacagattcgcgtggggcgtggtcacctgcgagcccgggcccttctgccatgtgaacctctgtgcctgtgaccggaagctcgtctactgcctcaagagaaacctacggagctacaacccacagtaccaatactttcccaacatcctctgctcctaggcctccccagcgagctcctcccagaccaagacttttgttctgtttttctacaacacagagtactgactctgcctggttcctgagagaggctcctaagtcacagacctcagtctttctcgaagcttggcggacccccagggccacactgtaccctccagcgagtcccaggagagtgactctggtcataggacttggtagggtcccagggtccctaggcctccacttctgagggcagcccctctggtgccaagagctctcctccaactcagggttggctgtgtctcttttcttctctgaagacagcgtcctggctccagttggaacactttcctgagatgcacttacttctcagcttctgcgatcagattatcatcaccaccaccctccagagaatttttacgcaagaagagccaaattgactctctaaatctggtgtatgggtattaaataaaattcattctcaaggctaataaaaa

SEQ ID NO: 15791 - DNA, 949 bp, Homo sapiens
  source 1..949: mol_type = unassigned DNA
tttaagattctggaggccaagaatttgactccccccggatccatggtctgtggataccaatgttccgactggagacggggagcccgcgagacccgggtctccagggtctgcccaaggaagttgctcatgggagcagacctctagagcaggatttgaggccaggccaaagaggaaatgccagagtggacagcatatcagatgagttctataacattccagagacaggtaagctccctgtggaaagaaggatcatggaagacttcccggaggaggaggacttgatgtagattttctgccaatgagctctggaaccccagagatgaaaggcctcctcccactggcttggttcctggcttgtagtgtgcctgctgtgcaaggaggcttgctggacctaaaatcaatgatcgagaaggtgacagggaagaacgccctgacaaactacggcttctacggctgttactgcggctggggcggccgaggaacccccaaggatggcaccgattgggtctcactctggttgcccaggctggagtgcaatggtgcgatctcagctcactgcatcctagaccttctgcactcaggtgctgttgggcgcatgaccactgctatgggcggctggaggagaagggctgcaacattcgcacacagtcctacaaatacagattcgcgtggggcgtggtcacctgcgagcccgggcccttctgccatgtgaacctctgtgcctgtgaccggaagctcgtctactgcctcaagagaaacctacggagctacaacccacagtaccaatactttcccaacatcctctgctcctaggcctccccagcgagctcctcccagaccaagacttttgttctgtttttctacaacacagagtactgactctgcctggttcctgagagaggctcctaagtcacagacctcagtctttctcgaagcttggcggaccccc

SEQ ID NO: 15792 - DNA, 1882 bp, Homo sapiens
  source 1..1882: mol_type = unassigned DNA
gccagagctgctcggcccgcagccagggggacagcggctggtcggaggctcgcagtgctgtcggcgagaagcagtcgggtttggagcgcttgggtcgcgttggtgcgcggtggaacgcgcccagggaccccagttcccgcgagcagctccgcgccgcgcctgagagactaagctgaaactgctgctcagctcccaagatggtgccacccaaattgcatgtgcttttctgcctctgcggctgcctggctgtggtttatccttttgactggcaatacataaatcctgttgcccatatgaaatcatcagcatgggtcaacaaaatacaagtactgatggctgctgcaagctttggccaaactaaaatcccccggggaaatgggccttattccgttggttgtacagacttaatgtttgatcacactaataagggcaccttcttgcgtttatattatccatcccaagataatgatcgccttgacaccctttggatcccaaataaagaatatttttggggtcttagcaaatttcttggaacacactggcttatgggcaacattttgaggttactctttggttcaatgacaactcctgcaaactggaattcccctctgaggcctggtgaaaaatatccacttgttgttttttctcatggtcttggggcattcaggacactttattctgctattggcattgacctggcatctcatgggtttatagttgctgctgtagaacacagagatagatctgcatctgcaacttactatttcaaggaccaatctgctgcagaaataggggacaagtcttggctctaccttagaaccctgaaacaagaggaggagacacatatacgaaatgagcaggtacggcaaagagcaaaagaatgttcccaagctctcagtctgattcttgacattgatcatggaaagccagtgaagaatgcattagatttaaagtttgatatggaacaactgaaggactctattgatagggaaaaaatagcagtaattggacattcttttggtggagcaacggttattcagactcttagtgaagatcagagattcagatgtggtattgccctggatgcatggatgtttccactgggtgatgaagtatattccagaattcctcagcccctcttttttatcaactctgaatatttccaatatcctgctaatatcataaaaatgaaaaaatgctactcacctgataaagaaagaaagatgattacaatcaggggttcagtccaccagaattttgctgacttcacttttgcaactggcaaaataattggacacatgctcaaattaaagggagacatagattcaaatgtagctattgatcttagcaacaaagcttcattagcattcttacaaaagcatttaggacttcataaagattttgatcagtgggactgcttgattgaaggagatgatgagaatcttattccagggaccaacattaacacaaccaatcaacacatcatgttacagaactcttcaggaatagagaaatacaattaggattaaaataggttttttaaaagtcttgtttcaaaactgtctaaaattatgtgtgtgtgtgtgtgtgtgtgtgtgtgtgtgagagagagagagagagagagagagagagagagagagaattttaatgtattttcccaaaggactcatattttaaaatgtaggctatactgtaatcgtgattgaagcttggactaagaattttttccctttagatgtaaagaaagaatacagtatacaatattcatatcagcctaaattttaattttaaagatgattccttttcagtgtcgaagttaaaaactgtttttacattactttgacagacaagtagattaaaacaggcaaaatcccagtgaaaa

SEQ ID NO: 15793 - DNA, 1747 bp, Homo sapiens
  source 1..1747: mol_type = unassigned DNA
ggaaaaccggcctgactggggggtgaattcagcagggagtaaatctgatcggcatcaggtctgcggaaaggagctggtgagcacgacaccacccaggcattgcctggctctctccgcggcgggctaagttaaccgcgggtccaggagactaagctgaaactgctgctcagctcccaagatggtgccacccaaattgcatgtgcttttctgcctctgcggctgcctggctgtggtttatccttttgactggcaatacataaatcctgttgcccatatgaaatcatcagcatgggtcaacaaaatacaagtactgatggctgctgcaagctttggccaaactaaaatcccccggggaaatgggccttattccgttggttgtacagacttaatgtttgatcacactaataagggcaccttcttgcgtttatattatccatcccaagataatgatcgccttgacaccctttggatcccaaataaagaatatttttggggtcttagcaaatttcttggaacacactggcttatgggcaacattttgaggttactctttggttcaatgacaactcctgcaaactggaattcccctctgaggcctggtgaaaaatatccacttgttgttttttctcatggtcttggggcattcaggacactttattctgctattggcattgacctggcatctcatgggtttatagttgctgctgtagaacacagagatagatctgcatctgcaacttactatttcaaggaccaatctgctgcagaaataggggacaagtcttggctctaccttagaaccctgaaacaagaggaggagacacatatacgaaatgagcaggtacggcaaagagcaaaagaatgttcccaagctctcagtctgattcttgacattgatcatggaaagccagtgaagaatgcattagatttaaagtttgatatggaacaactgaaggactctattgatagggaaaaaatagcagtaattggacattcttttggtggagcaacggttattcagactcttagtgaagatcagagattcagatgtggtattgccctggatgcatggatgtttccactgggtgatgaagtatattccagaattcctcagcccctcttttttatcaactctgaatatttccaatatcctgctaatatcataaaaatgaaaaaatgctactcacctgataaagaaagaaagatgattacaatcaggggttcagtccaccagaattttgctgacttcacttttgcaactggcaaaataattggacacatgctcaaattaaagggagacatagattcaaatgtagctattgatcttagcaacaaagcttcattagcattcttacaaaagcatttaggacttcataaagattttgatcagtgggactgcttgattgaaggagatgatgagaatcttattccagggaccaacattaacacaaccaatcaacacatcatgttacagaactcttcaggaatagagaaatacaattaggattaaaataggttttttaaaagtcttgtttcaaaactgtctaaaattatgtgtgtgtgtgtgtgtgtgtgtgtgtgtgtgagagagagagagagagagagagagagagagagagagaattttaatgtattttcccaaaggactcatattttaaaatgtaggctatactgtaatcgtgattgaagcttggactaagaattttttccctttagatgtaaagaaagaatacagtatacaatattc

SEQ ID NO: 15794 - DNA, 7322 bp, Homo sapiens
  source 1..7322: mol_type = unassigned DNA
ggcagcgcatacactacaatggctgctggaaagaggcgtaaggaaacaatttccaggcccgccgcgtccagcccgaaatatgagaaaaaaattattagaaattccgcgggcggtgtagaggcggcggacgggccggagggaggatgttaaagccccgcggttgcctcttggtgctgccttggccgtatttggcacccagaatgcttcattctgtgacggtctattaataaggttgccttgctagagtttggagcagggcctcagattggccaaaatgggaaggattggattccactctcttccacgaagagtcaatgggactggctaagatcaaagtctgaggctttttccatcagtaatcagtccctttttgctttcttttacgaccacatgaaacttgagaagccacctaaagctatatcatttagtggagttgggcagttcccaagtgtccaacaagaaggcctggtttaggctgcgatggccactgtcattcctggtgatttgtcagaagtaagagatacccagaaagtcccttcagggaaacgtaagcgtggtgaaaccaaaccaagaaaaaactttccttgccaactgtgtgacaaggcctttaacagtgttgagaaattaaaggttcactcctactctcacacaggagagaggccctacaagtgcatacaacaagactgcaccaaggcctttgtttctaagtacaaattacaaaggcacatggctactcattctcctgagaaaacccacaagtgtaattattgtgagaaaatgtttcaccggaaagatcatctgaagaatcacctccatacacacgaccctaacaaagagacgtttaagtgcgaagaatgtggcaagaactacaataccaagcttggatttaaacgtcacttggccttgcatgccgcaacaagtggtgacctcacctgtaaggtatgtttgcaaacttttgaaagcacgggagtgcttctggagcaccttaaatctcatgcaggcaagtcgtctggtggggttaaagaaaaaaagcaccagtgcgaacattgtgatcgccggttctacacccgaaaggatgtccggagacacatggtggtgcacactggaagaaaggacttcctctgtcagtattgtgcacagagatttgggcgaaaggatcacctgactcgacatatgaagaagagtcacaatcaagagcttctgaaggtcaaaacagaaccagtggatttccttgacccatttacctgcaatgtgtctgtgcctataaaagacgagctccttccggtgatgtccttaccttccagtgaactgttatcaaagccattcacaaacactttgcagttaaacctctacaacactccatttcagtccatgcagagctcgggatctgcccaccaaatgatcacaactttacctttgggaatgacatgcccaatagatatggacactgttcatccctctcaccacctttctttcaaatatccgttcagttctacctcatatgcaatttctattcctgaaaaagaacagccattaaagggggaaattgagagttacctgatggagttacaaggtggcgtgccctcttcatcccaagattctcaagcatcgtcatcatctaagctagggttggatcctcagattgggtccctagatgatggtgcaggagacctctccctatccaaaagctctatctccatcagtgaccccctaaacacaccagcattggatttttctcagttgtttaatttcatacctttaaatggtcctccctataatcctctatcagtggggagccttggaatgagctattcccaggaagaagcacattcttctgtttcccagctccccccacaaacacaggatcttcaggatcctgcaaacactatagggcttgggtctctgcactcactgtcagcagctttcaccagcagtttaagcacaagtaccaccctcccacgtttccatcaagcttttcagtaggattctgggacatggattcattacagaaatgtatgtgtagctgtgccctagatgaccatttttattttagtgcctactttaaaacagtataaaaatttctgcttttgtataatacaaattttcattaagccagtataaaatagaaactagcttttaaactgagctttggaaccatttgtgttcagttaagtttacctgggtattttgtcctgattcactgccaattgtcacattttaagacttttttttttccatataggaaagccattattagtagtaaacttttacaaatcccattttcaaattacttttagatcttaaaattttcatttttgtctaataacagtggctctaccttttgacatctggctcattaaaaaatttagcaatagaatgtaaattgtataaaaagtttgtgaataactcaagggtttaaattttcttactagcttctaaatggattaataatcaagtgcttcaaatgaattaagagtccagtttcggaagataataaatgtttgttagatacaccataatttcagatcagtatattctgaagactccctgttgtctggctaaaatatttgccatctttattatgagcctttaaggaaaacaaaccctaaacacaaagcatcagtatttatagcaaaaagagactctgttaggtgacatggcatttcgtgtcacttaatagttggccctaaattagtacacaggatattttgtcgtgtttcatccttcttaacatgctatcttttcatttaataatagtaatagtgtatggcattggggtcttcagagtcgatatataggtagatctctttagtcttttccacctttcacatccaaggggtgggtcaagtgcagccagcaatttattttcattgttggcccacggttagtccataatctagagccattgtggaactgcagccatgaggtgtgtttatcccacagtggattgactcagcctctgtgggtgacagacttctaagcaggaagatagacgtgaagcacatggttacatttgggaacttgtgtagggatcatggcccctgtagccagggttaaaaactggactttttagaagtaaagtaaaagcatatcgcttatatcatttcttgctgaatttgatatgtttttctttcccttaagaatcaaaagcagaaaacaaaaacaacagtcctactccgatgttatctttctgattcaatgtgaatccatctttccttgcaatattttggatggagaatttgaagttaaatgcattagaaaactacctgatgaactaccacaaagttttaagtgactagaaatatatacagtaaaatcccactttcatgcatctctgggaaatgataggagtattgcaaataagttgagtttgtagagggtaacaaagtaaagtaaaacaaacctatcttggttaacatgaaaataacaattgagaatatattatattcactgaataattataggcttttcctcacattagacaaccaacataatcttcttaaaggtctaattaatatatttttctaagggtcagttgggacattaacctaagaaacatatctattaagcacttgttaacaccttattttaggaccctttccgttggggatgggggcaagggtgggaggtttttagaagagtatatatctctttaaaaaaaaacagaaagaaaaatatttctgagcactcattagccctatatggaaacttctttcctttttgtagggccagttatcactgcagattgcaatgtttaccaagaatttctaaaaatgagtgcagattactgaatataatacattatttaaaatatttgggagtagtataatttgtggagaaatgtaaattgtaataatgtaaatgggggcttcaatatatatatataatacacacacacacacacatgcacacataccgcacttcatagaatcaaagttgctctctgaaggagctttggctcctgatattttatcatgctcctatatttttttaatccttggagcagtagtttttatacttatgtatttaaattttattatgaaaaattacatttattaaaaaagtgtgttccaaaggcattaaaattatatatgttaataaggaagtacatttttaaatttttcaaactgctcctagcttttgattaggagaatattttttctgaaagtaggcttttcgctctgcttcattactgcttcctttagtttctatgaaacagattgcttacctaaatctttagttgaatgattagtgttcaatattgctttaatcaccatataaaaggaaaaaaattggtgacagagcacaaatagaaaacctatttttaaatagaaatcacaaatagcaagtgtggaagcactactttattctgtttaaaatgtacttaagaagtcatcaaattagtgaactgagacattggccttagtaggctgtattcactgctaatttaaaaaagggagtaccaggatttattaagtaaagcattttggaaatggggaatagcgccatatatgtatgtatgtgtatgtgtgtgtgtgtgtgtgtatatatacacacacacacacatacttaaatcttgccctgcatgaaattcaaatacatggaggcacatcttcagggcaccagtgttaaaattttggagtcttaattttcatgtgtacacctctttgcctgttcccacccccagacttgaaataacacttcagagtaagagggaattcagctaatttgtttttaaaattgactgtagtggtcactaaaccctttttgagagaatttctattaaagatgaggcagactcgcttatttgaattgcacaatgttctaacaaggatgtaacacagaattggcttttttttccctagaaaaagattgtttgtttctatgtcaactagatatgattaaaaataagtattgccaatgctgttttcattctctagtggccagaatcattatccttgaaatttctggtagtgccttagcttggttaaaaaaaaaaaaaaaaaaaaaaaaaagggattaacattaaataaaagtagtttagaatttgggcctcagacaagatattgaacctcattcagtttcacttccacatgtatgtacaagttaggtcaccaaacacggaagtgtgagtgtggaaggatcttggcactgtaagcaatgctatccattgatgtatacaagtacctttatagttatcgatcactgttaaaactttcattttaaaatcctattaccaagttcagttttttaaaacttcaattgtcctggctgattatgcatcactctgtgtgcaacttttttatttcatttagtgtttctttcaagctgtgtatttttgcctatttgttgcttgtgctttatttttcttagtcatttgtggaatatagtgatatattgtgttaatttggacagtagcggtttttaaaaaccatatactgactgaaacatgagccagagccgattgctttattaagctaataatgaatgttaaagagtacatattttcaggatcgttcatctagtgagcaatacacatattataggccaatatttttttaaaaaatagagcttggtcaacctctatactacacatattacaagatatagcactttcaaaatgaatctaaacctttacagaaactttcttataggttatgccttttattttaagacttattataattcaagtgccattagatgatatatatgtaggcctttgatatataatgctttgtgtacaaaaatggtagatggtattttaaacaggtacatttttacagtgttttcttatcaatttgctatattgcacagaatcagtgtgtgtcttttcataaggttttacaatggtttatttttttacaaggtttacgtgtctcaaagcacactgtcttcccagtacgtaagttaaaaaataccagttcacccaagttgcttctagcctactgagatccatgtgacattggaggagatcttttaaatgtttagtattcgtcattagcaatggctggctgttagttctggtaaatgtgtgcctaagttgaatttgtcttgtttttctcacactgtgtcagcagccatgtctacaacacagataagtctgttgtgatcacatagatctacataagttgtgcagttttgtgctaaaaacccatagggagctcctttgggatcatagaaaagaagatcatgcaaccagcattggtgaaggcacactcagattgcacttagggcctttctatgatgttgtcaaccctctgaggatggaaggcagtgtcttttgatgttatctagcctagaaatgacacagaactattgctaatgtataaaacacttcattatataagcttcagtggtacagatgaaccagaatgaatgtttatcttctcagaaacactccttcaatattatattggatcatgctgctaatgtaacttgggctacaactcttcatggtgctacaaacttctctgtctcattcagtcgtatttttttatccatagaaaaaggactacattaggtgtaaaagtgtacaatatatttttatactgtgacttaatttgtcattaacaaacttttacaccaccacaatgtattcatgtgcacttgcaaaaggagatctcggacatgcaaatgttaccagaacaaacccagcttttgtccacaaggtgactgtaactcagaatggaaagtgggctttataatagggtgtggagtgaagaacatgctgtatgttactaacagccctttgaatttaacaaaaactgggaatccattaggaaacggattgcatcatacctgaacataagctggactgctgaaattgtatttttagctaatgaaaaagtgtttggactagtactctaaaaatgttctaatgataaagttttgagtcaaaatagaaaagaaaaaaatctgcattccaggccgaattttgtatatttttattgcatttaaaattgctattctgtaatattgggaaatcaagtggcttatcatgtatatcgtgtacttaaaatgtattcacaaactactgttgtatttgtataaaatatagacaaagatcatattttttgtgtgtgtataagctctgtaaaatagcaatcacattatgaagctgcagtgatactacattttaaacattcacatccaaagaagcagactatttattgtccatataccagatttaaaatattaatttgctgctaattaaataatagtactgcagcttcttgtggcctacagtgttatgtttgctgtaagaataagatatgtgaattccacaaaatatatgaataaaattatagaatggctttagataa

SEQ ID NO: 15795 - DNA, 2163 bp, Homo sapiens
  source 1..2163: mol_type = unassigned DNA
atcacaaattgctatttatctaggtaatactttttatttatgcatttatttggtcacgtaaatgtgcttagacctaataaacatatgtagttggtgaaaattaatgcatgactcgtaagcagagtatggaatgtaagcatgtgccatgaaactgcaattcttttatcctgtattttccatcatttacataccggttccatttagaggatagtccattttcacttttttttcatagattggccaaaatgggaaggattggattccactctcttccacgaagagtcaatgggactggctaagatcaaagtctgaggctttttccatcagtaatcagtccctttttgctttcttttacgaccacatgaaacttgagaagccacctaaagctatatcatttagtggagttgggcagttcccaagtgtccaacaagaaggcctggtttaggctgcgatggccactgtcattcctggtgatttgtcagaagtaagagatacccagaaagtcccttcagggaaacgtaagcgtggtgaaaccaaaccaagaaaaaactttccttgccaactgtgtgacaaggcctttaacagtgttgagaaattaaaggttcactcctactctcacacaggagagaggccctacaagtgcatacaacaagactgcaccaaggcctttgtttctaagtacaaattacaaaggcacatggctactcattctcctgagaaaacccacaagtgtaattattgtgagaaaatgtttcaccggaaagatcatctgaagaatcacctccatacacacgaccctaacaaagagacgtttaagtgcgaagaatgtggcaagaactacaataccaagcttggatttaaacgtcacttggccttgcatgccgcaacaagtggtgacctcacctgtaaggtatgtttgcaaacttttgaaagcacgggagtgcttctggagcaccttaaatctcatgcaggcaagtcgtctggtggggttaaagaaaaaaagcaccagtgcgaacattgtgatcgccggttctacacccgaaaggatgtccggagacacatggtggtgcacactggaagaaaggacttcctctgtcagtattgtgcacagagatttgggcgaaaggatcacctgactcgacatatgaagaagagtcacaatcaagagcttctgaaggtcaaaacagaaccagtggatttccttgacccatttacctgcaatgtgtctgtgcctataaaagacgagctccttccggtgatgtccttaccttccagtgaactgttatcaaagccattcacaaacactttgcagttaaacctctacaacactccatttcagtccatgcagagctcgggatctgcccaccaaatgatcacaactttacctttgggaatgacatgcccaatagatatggacactgttcatccctctcaccacctttctttcaaatatccgttcagttctacctcatatgcaatttctattcctgaaaaagaacagccattaaagggggaaattgagagttacctgatggagttacaaggtggcgtgccctcttcatcccaagattctcaagcatcgtcatcatctaagctagggttggatcctcagattgggtccctagatgatggtgcaggagacctctccctatccaaaagctctatctccatcagtgaccccctaaacacaccagcattggatttttctcagttgtttaatttcatacctttaaatggtcctccctataatcctctatcagtggggagccttggaatgagctattcccaggaagaagcacattcttctgtttcccagctccccccacaaacacaggatcttcaggatcctgcaaacactatagggcttgggtctctgcactcactgtcagcagctttcaccagcagtttaagcacaagtaccaccctcccacgtttccatcaagcttttcagtaggattctgggacatggattcattacagaaatgtatgtgtagctgtgccctagatgaccatttttattttagtgcctactttaaaacagtataaaaatttctgcttttgtataatacaaattttcattaagccagtataaaatagaaactagcttttaaactgagctttggaaccatttgtgttcagttaagtttacctgggtattttgtc

SEQ ID NO: 15796 - DNA, 1684 bp, Homo sapiens
  source 1..1684: mol_type = unassigned DNA
agctgcaagttgggctgcaggggcagcgcatacactacaatggctgctggaaagaggcgtaaggaaacaatttccaggcccgccgcgtccagcccgaaatatgagaaaaaaattattagaaattccgcgggcggtgtagaggcggcggacgggccggagggaggatgttaaagccccgcgattggccaaaatgggaaggattggattccactctcttccacgaagagtcaatgggactggctaagatcaaagtctgaggctttttccatcagtaatcaggcacatggctactcattctcctgagaaaacccacaagtgtaattattgtgagaaaatgtttcaccggaaagatcatctgaagaatcacctccatacacacgaccctaacaaagagacgtttaagtgcgaagaatgtggcaagaactacaataccaagcttggatttaaacgtcacttggccttgcatgccgcaacaagtggtgacctcacctgtaaggtatgtttgcaaacttttgaaagcacgggagtgcttctggagcaccttaaatctcatgcaggcaagtcgtctggtggggttaaagaaaaaaagcaccagtgcgaacattgtgatcgccggttctacacccgaaaggatgtccggagacacatggtggtgcacactggaagaaaggacttcctctgtcagtattgtgcacagagatttgggcgaaaggatcacctgactcgacatatgaagaagagtcacaatcaagagcttctgaaggtcaaaacagaaccagtggatttccttgacccatttacctgcaatgtgtctgtgcctataaaagacgagctccttccggtgatgtccttaccttccagtgaactgttatcaaagccattcacaaacactttgcagttaaacctctacaacactccatttcagtccatgcagagctcgggatctgcccaccaaatgatcacaactttacctttgggaatgacatgcccaatagatatggacactgttcatccctctcaccacctttctttcaaatatccgttcagttctacctcatatgcaatttctattcctgaaaaagaacagccattaaagggggaaattgagagttacctgatggagttacaaggtggcgtgccctcttcatcccaagattctcaagcatcgtcatcatctaagctagggttggatcctcagattgggtccctagatgatggtgcaggagacctctccctatccaaaagctctatctccatcagtgaccccctaaacacaccagcattggatttttctcagttgtttaatttcatacctttaaatggtcctccctataatcctctatcagtggggagccttggaatgagctattcccaggaagaagcacattcttctgtttcccagctccccccacaaacacaggatcttcaggatcctgcaaacactatagggcttgggtctctgcactcactgtcagcagctttcaccagcagtttaagcacaagtaccaccctcccacgtttccatcaagcttttcagtaggattctgggacatggattcattacagaaatgtatgtgtagctgtgccctagatgaccatttttattttagtgcctactttaaaacagtataaaaatttctgcttttgtataatacaaattttcattaagccagtataaaataga

SEQ ID NO: 15797 - DNA, 1899 bp, Homo sapiens
  source 1..1899: mol_type = unassigned DNA
agctgcaagttgggctgcaggggcagcgcatacactacaatggctgctggaaagaggcgtaaggaaacaatttccaggcccgccgcgtccagcccgaaatatgagaaaaaaattattagaaattccgcgggcggtgtagaggcggcggacgggccggagggaggatgttaaagccccgcgattggccaaaatgggaaggattggattccactctcttccacgaagagtcaatgggactggctaagatcaaagtctgaggctttttccatcagtaatcagtccctttttgctttcttttacgaccacatgaaacttgagaagccacctaaagctatatcatttagtggagttgggcagttcccaagtgtccaacaagaaggcctggtttaggctgcgatggccactgtcattcctggtgatttgtcagaagtaagagatacccagaaagtcccttcagggaaacgtaagcgtggtgaaaccaaaccaagaaaaaactttccttgccaactgtgtgacaaggcctttaacagtgttgagaaattaaaggttcactcctactctcacacaggagagaggccctacaagtgcatacaacaagactgcaccaaggcctttgtttctaagtacaaattacaaaggcacatggctactcattctcctgagaaaacccacaagtgtaattattgtgagaaaatgtttcaccggaaagatcatctgaagaatcacctccatacacacgaccctaacaaagagacgtttaagtgcgaagaatgtggcaagaactacaataccaagcttggatttaaacgtcacttggccttgcatgccgcaacaagtggtgacctcacctgtaaggtatgtttgcaaacttttgaaagcacgggagtgcttctggagcaccttaaatctcatgcaggcaagtcgtctggtggggttaaagaaaaaaagcaccagtgcgaacattgtgatcgccggttctacacccgaaaggatgtccggagacacatggtggtgcacactggaagaaaggacttcctctgtcagtattgtgcacagagatttgggcgaaaggatcacctgactcgacatatgaagaagagtcacaatcaagagcttctgaaggtcaaaacagaaccagtggatttccttgacccatttacctgcaatgtgtctgtgcctataaaagacgagctccttccggtgatgtccttaccttccagtgaactgttatcaaagccattcacaaacactttgcagttaaacctctacaacactccatttcagtccatgcagagctcgggatctgcccaccaaatgatcacaactttacctttgggaatgacatgcccaatagatatggacactgttcatccctctcaccacctttctttcaaatatccgttcagttctacctcatatgcaatttctattcctgaaaaagaacagccattaaagggggaaattgagagttacctgatggagttacaaggtggcgtgccctcttcatcccaagattctcaagcatcgtcatcatctaagctagggttggatcctcagattgggtccctagatgatggtgcaggagacctctccctatccaaaagctctatctccatcagtgaccccctaaacacaccagcattggatttttctcagttgtttaatttcatacctttaaatggtcctccctataatcctctatcagtggggagccttggaatgagctattcccaggaagaagcacattcttctgtttcccagctccccccacaaacacaggatcttcaggatcctgcaaacactatagggcttgggtctctgcactcactgtcagcagctttcaccagcagtttaagcacaagtaccaccctcccacgtttccatcaagcttttcagtag

SEQ ID NO: 15798 - DNA, 435 bp, Homo sapiens
  source 1..435: mol_type = unassigned DNA
ggcggcggcggcggcggcggcggcagctgcaagttgggctgcaggggcagcgcatacactacaatggctgctggaaagaggcgtaaggaaacaatttccaggcccgccgcgtccagcccgaaatatgagaaaaaaattattagaaattccgcgggcggtgtagaggcggcggacgggccggagggaggatgttaaagccccgcgaatcactgtctgaggaccaaaagcagaggtgctgggagggtgtggtgatggaagagccttccctttctgttactccagtgcacccacccataggagtgatggagggacaggagggataaacagcctcaaccgaagatggatatgtgtatagtttgtatccaaactgttcctttgtgtaacaagccctcccaggaacttttcatgttacattgctttgctttggaagctgat

SEQ ID NO: 15799 - DNA, 2599 bp, Homo sapiens
  source 1..2599: mol_type = unassigned DNA
agagctgagatcctacaggagtccagggctggagagaaaacctctgcgaggaaagggaaggagcaagccgtgggagggagagaggaagggagggagggaagacgaaaacacgccgaggtcccagaatttaagggacgctgtgaagcaatcatggatgcaatgaagagagggctctgctgtgtgctgctgctgtgtggagcagtcttcgtttcgcccagccaggaaatccatgcccgattcagaagaggagccagatcttaccaagtgatctgcagagatgaaaaaacgcagatgatataccagcaacatcagtcatggctgcgccctgtgctcagaagcaaccgggtggaatattgctggtgcaacagtggcagggcacagtgccactcagtgcctgtcaaaagttgcagcgagccaaggtgtttcaacgggggcacctgccagcaggccctgtacttctcagatttcgtgtgccagtgccccgaaggatttgctgggaagtgctgtgaaatagataccagggccacgtgctacgaggaccagggcatcagctacaggggcacgtggagcacagcggagagtggcgccgagtgcaccaactggaacagcagcgcgttggcccagaagccctacagcgggcggaggccagacgccatcaggctgggcctggggaaccacaactactgcagaaacccagatcgagactcaaagccctggtgctacgtctttaaggcggggaagtacagctcagagttctgcagcacccctgcctgctctgagggaaacagtgactgctactttgggaatgggtcagcctaccgtggcacgcacagcctcaccgagtcgggtgcctcctgcctcccgtggaattccatgatcctgataggcaaggtttacacagcacagaaccccagtgcccaggcactgggcctgggcaaacataattactgccggaatcctgatggggatgccaagccctggtgccacgtgctgaagaaccgcaggctgacgtgggagtactgtgatgtgccctcctgctccacctgcggcctgagacagtacagccagcctcagtttcgcatcaaaggagggctcttcgccgacatcgcctcccacccctggcaggctgccatctttgccaagcacaggaggtcgcccggagagcggttcctgtgcgggggcatactcatcagctcctgctggattctctctgccgcccactgcttccaggagaggtttccgccccaccacctgacggtgatcttgggcagaacataccgggtggtccctggcgaggaggagcagaaatttgaagtcgaaaaatacattgtccataaggaattcgatgatgacacttacgacaatgacattgcgctgctgcagctgaaatcggattcgtcccgctgtgcccaggagagcagcgtggtccgcactgtgtgccttcccccggcggacctgcagctgccggactggacggagtgtgagctctccggctacggcaagcatgaggccttgtctcctttctattcggagcggctgaaggaggctcatgtcagactgtacccatccagccgctgcacatcacaacatttacttaacagaacagtcaccgacaacatgctgtgtgctggagacactcggagcggcgggccccaggcaaacttgcacgacgcctgccagggcgattcgggaggccccctggtgtgtctgaacgatggccgcatgactttggtgggcatcatcagctggggcctgggctgtggacagaaggatgtcccgggtgtgtacaccaaggttaccaactacctagactggattcgtgacaacatgcgaccgtgaccaggaacacccgactcctcaaaagcaaatgagatcccgcctcttcttcttcagaagacactgcaaaggcgcagtgcttctctacagacttctccagacccaccacaccgcagaagcgggacgagaccctacaggagagggaagagtgcattttcccagatacttcccattttggaagttttcaggacttggtctgatttcaggatactctgtcagatgggaagacatgaatgcacactagcctctccaggaatgcctcctccctgggcagaaagtggccatgccaccctgttttcagctaaagcccaacctcctgacctgtcaccgtgagcagctttggaaacaggaccacaaaaatgaaagcatgtctcaatagtaaaagataacaagatctttcaggaaagacggattgcattagaaatagacagtatatttatagtcacaagagcccagcagggcctcaaagttggggcaggctggctggcccgtcatgttcctcaaaagcacccttgacgtcaagtctccttcccctttccccactccctggctctcagaaggtattccttttgtgtacagtgtgtaaagtgtaaatcctttttctttataaactttagagtagcatgagagaattgtatcatttgaacaactaggcttcagcatatttatagcaatccatgttagtttttactttctgttgccacaaccctgttttatactgtacttaataaattcagatatatttttcacagtttttccaaaa

SEQ ID NO: 15800 - DNA, 2706 bp, Homo sapiens
  source 1..2706: mol_type = unassigned DNA
gaacttcctccccctgctttataaaaacaggcctgcctcagctccctcatggccctgtccactgagcatcctcccgccacacagaaacccgcccagccggggccaccgaccccaccccctgcctggaaacttaaaggaggccggagctgtggggagctcagagctgagatcctacaggagtccagggctggagagaaaacctctgcgaggaaagggaaggagcaagccgtgaatttaagggacgctgtgaagcaatcatggatgcaatgaagagagggctctgctgtgtgctgctgctgtgtggagcagtcttcgtttcgcccagccaggaaatccatgcccgattcagaagaggagccagatcttaccaagtgatctgcagagatgaaaaaacgcagatgatataccagcaacatcagtcatggctgcgccctgtgctcagaagcaaccgggtggaatattgctggtgcaacagtggcagggcacagtgccactcagtgcctgtcaaaagttgcagcgagccaaggtgtttcaacgggggcacctgccagcaggccctgtacttctcagatttcgtgtgccagtgccccgaaggatttgctgggaagtgctgtgaaatagataccagggccacgtgctacgaggaccagggcatcagctacaggggcacgtggagcacagcggagagtggcgccgagtgcaccaactggaacagcagcgcgttggcccagaagccctacagcgggcggaggccagacgccatcaggctgggcctggggaaccacaactactgcagaaacccagatcgagactcaaagccctggtgctacgtctttaaggcggggaagtacagctcagagttctgcagcacccctgcctgctctgagggaaacagtgactgctactttgggaatgggtcagcctaccgtggcacgcacagcctcaccgagtcgggtgcctcctgcctcccgtggaattccatgatcctgataggcaaggtttacacagcacagaaccccagtgcccaggcactgggcctgggcaaacataattactgccggaatcctgatggggatgccaagccctggtgccacgtgctgaagaaccgcaggctgacgtgggagtactgtgatgtgccctcctgctccacctgcggcctgagacagtacagccagcctcagtttcgcatcaaaggagggctcttcgccgacatcgcctcccacccctggcaggctgccatctttgccaagcacaggaggtcgcccggagagcggttcctgtgcgggggcatactcatcagctcctgctggattctctctgccgcccactgcttccaggagaggtttccgccccaccacctgacggtgatcttgggcagaacataccgggtggtccctggcgaggaggagcagaaatttgaagtcgaaaaatacattgtccataaggaattcgatgatgacacttacgacaatgacattgcgctgctgcagctgaaatcggattcgtcccgctgtgcccaggagagcagcgtggtccgcactgtgtgccttcccccggcggacctgcagctgccggactggacggagtgtgagctctccggctacggcaagcatgaggccttgtctcctttctattcggagcggctgaaggaggctcatgtcagactgtacccatccagccgctgcacatcacaacatttacttaacagaacagtcaccgacaacatgctgtgtgctggagacactcggagcggcgggccccaggcaaacttgcacgacgcctgccagggcgattcgggaggccccctggtgtgtctgaacgatggccgcatgactttggtgggcatcatcagctggggcctgggctgtggacagaaggatgtcccgggtgtgtacaccaaggttaccaactacctagactggattcgtgacaacatgcgaccgtgaccaggaacacccgactcctcaaaagcaaatgagatcccgcctcttcttcttcagaagacactgcaaaggcgcagtgcttctctacagacttctccagacccaccacaccgcagaagcgggacgagaccctacaggagagggaagagtgcattttcccagatacttcccattttggaagttttcaggacttggtctgatttcaggatactctgtcagatgggaagacatgaatgcacactagcctctccaggaatgcctcctccctgggcagaaagtggccatgccaccctgttttcagctaaagcccaacctcctgacctgtcaccgtgagcagctttggaaacaggaccacaaaaatgaaagcatgtctcaatagtaaaagataacaagatctttcaggaaagacggattgcattagaaatagacagtatatttatagtcacaagagcccagcagggcctcaaagttggggcaggctggctggcccgtcatgttcctcaaaagcacccttgacgtcaagtctccttcccctttccccactccctggctctcagaaggtattccttttgtgtacagtgtgtaaagtgtaaatcctttttctttataaactttagagtagcatgagagaattgtatcatttgaacaactaggcttcagcatatttatagcaatccatgttagtttttactttctgttgccacaaccctgttttatactgtacttaataaattcagatatatttttcacagtttttccaaaa

SEQ ID NO: 15801 - DNA, 2516 bp, Homo sapiens
  source 1..2516: mol_type = unassigned DNA
atggccctgtccactgagcatcctcccgccacacagaaacccgcccagccggggccaccgaccccaccccctgcctggaaacttaaaggaggccggagctgtggggagctcagagctgagatcctacaggagtccagggctggagagaaaacctctgcgaggaaagggaaggagcaagccgtgaatttaagggacgctgtgaagcaatcatggatgcaatgaagagagggctctgctgtgtgctgctgctgtgtggagcagtcttcgtttcgcccagccaggaaatccatgcccgattcagaagaggagccagatcttaccaaggttgcagcgagccaaggtgtttcaacgggggcacctgccagcaggccctgtacttctcagatttcgtgtgccagtgccccgaaggatttgctgggaagtgctgtgaaatagataccagggccacgtgctacgaggaccagggcatcagctacaggggcacgtggagcacagcggagagtggcgccgagtgcaccaactggaacagcagcgcgttggcccagaagccctacagcgggcggaggccagacgccatcaggctgggcctggggaaccacaactactgcagaaacccagatcgagactcaaagccctggtgctacgtctttaaggcggggaagtacagctcagagttctgcagcacccctgcctgctctgagggaaacagtgactgctactttgggaatgggtcagcctaccgtggcacgcacagcctcaccgagtcgggtgcctcctgcctcccgtggaattccatgatcctgataggcaaggtttacacagcacagaaccccagtgcccaggcactgggcctgggcaaacataattactgccggaatcctgatggggatgccaagccctggtgccacgtgctgaagaaccgcaggctgacgtgggagtactgtgatgtgccctcctgctccacctgcggcctgagacagtacagccagcctcagtttcgcatcaaaggagggctcttcgccgacatcgcctcccacccctggcaggctgccatctttgccaagcacaggaggtcgcccggagagcggttcctgtgcgggggcatactcatcagctcctgctggattctctctgccgcccactgcttccaggagaggtttccgccccaccacctgacggtgatcttgggcagaacataccgggtggtccctggcgaggaggagcagaaatttgaagtcgaaaaatacattgtccataaggaattcgatgatgacacttacgacaatgacattgcgctgctgcagctgaaatcggattcgtcccgctgtgcccaggagagcagcgtggtccgcactgtgtgccttcccccggcggacctgcagctgccggactggacggagtgtgagctctccggctacggcaagcatgaggccttgtctcctttctattcggagcggctgaaggaggctcatgtcagactgtacccatccagccgctgcacatcacaacatttacttaacagaacagtcaccgacaacatgctgtgtgctggagacactcggagcggcgggccccaggcaaacttgcacgacgcctgccagggcgattcgggaggccccctggtgtgtctgaacgatggccgcatgactttggtgggcatcatcagctggggcctgggctgtggacagaaggatgtcccgggtgtgtacaccaaggttaccaactacctagactggattcgtgacaacatgcgaccgtgaccaggaacacccgactcctcaaaagcaaatgagatcccgcctcttcttcttcagaagacactgcaaaggcgcagtgcttctctacagacttctccagacccaccacaccgcagaagcgggacgagaccctacaggagagggaagagtgcattttcccagatacttcccattttggaagttttcaggacttggtctgatttcaggatactctgtcagatgggaagacatgaatgcacactagcctctccaggaatgcctcctccctgggcagaaagtggccatgccaccctgttttcagctaaagcccaacctcctgacctgtcaccgtgagcagctttggaaacaggaccacaaaaatgaaagcatgtctcaatagtaaaagataacaagatctttcaggaaagacggattgcattagaaatagacagtatatttatagtcacaagagcccagcagggcctcaaagttggggcaggctggctggcccgtcatgttcctcaaaagcacccttgacgtcaagtctccttcccctttccccactccctggctctcagaaggtattccttttgtgtacagtgtgtaaagtgtaaatcctttttctttataaactttagagtagcatgagagaattgtatcatttgaacaactaggcttcagcatatttatagcaatccatgttagtttttactttctgttgccacaaccctgttttatactgtacttaataaattcagatatatttttcacagtttttcc

SEQ ID NO: 15802 - DNA, 2030 bp, Homo sapiens
  source 1..2030: mol_type = unassigned DNA
agagctgagatcctacaggagtccagggctggagagaaaacctctgcgaggaaagggaaggagcaagccgtgaatttaagggacgctgtgaagcaatcatggatgcaatgaagagagggctctgctgtgtgctgctgctgtgtggagcagtcttcgtttcgcccagccaggaaatccatgcccgattcagaagaggagccagatcttaccaagtgatctgcagagatgaaaaaacgcagatgatataccagcaacatcagtcatggctgcgccctgtgctcagaagcaaccgggtggaatattgctggtgcaacagtggcagggcacagtgccactcagtgcctgtcaaaagttgcagcgagccaaggtgtttcaacgggggcacctgccagcaggccctgtacttctcagatttcgtgtgccagtgccccgaaggatttgctgggaagtgctgtgaaatagactcaaagccctggtgctacgtctttaaggcggggaagtacagctcagagttctgcagcacccctgcctgctctgagggaaacagtgactgctactttgggaatgggtcagcctaccgtggcacgcacagcctcaccgagtcgggtgcctcctgcctcccgtggaattccatgatcctgataggcaaggtttacacagcacagaaccccagtgcccaggcactgggcctgggcaaacataattactgccggaatcctgatggggatgccaagccctggtgccacgtgctgaagaaccgcaggctgacgtgggagtactgtgatgtgccctcctgctccacctgcggcctgagacagtacagccagcctcagtttcgcatcaaaggagggctcttcgccgacatcgcctcccacccctggcaggctgccatctttgccaagcacaggaggtcgcccggagagcggttcctgtgcgggggcatactcatcagctcctgctggattctctctgccgcccactgcttccaggagaggtttccgccccaccacctgacggtgatcttgggcagaacataccgggtggtccctggcgaggaggagcagaaatttgaagtcgaaaaatacattgtccataaggaattcgatgatgacacttacgacaatgacattgcgctgctgcagctgaaatcggattcgtcccgctgtgcccaggagagcagcgtggtccgcactgtgtgccttcccccggcggacctgcagctgccggactggacggagtgtgagctctccggctacggcaagcatgaggccttgtctcctttctattcggagcggctgaaggaggctcatgtcagactgtacccatccagccgctgcacatcacaacatttacttaacagaacagtcaccgacaacatgctgtgtgctggagacactcggagcggcgggccccaggcaaacttgcacgacgcctgccagggcgattcgggaggccccctggtgtgtctgaacgatggccgcatgactttggtgggcatcatcagctggggcctgggctgtggacagaaggatgtcccgggtgtgtacaccaaggttaccaactacctagactggattcgtgacaacatgcgaccgtgaccaggaacacccgactcctcaaaagcaaatgagatcccgcctcttcttcttcagaagacactgcaaaggcgcagtgcttctctacagacttctccagacccaccacaccgcagaagcgggacgagaccctacaggagagggaagagtgcattttcccagatacttcccattttggaagttttcaggacttggtctgatttcaggatactctgtcagatgggaagacatgaatgcacactagcctctccaggaatgcctcctccctgggcagaaagtggccatgccaccctgttttcagctaaagcccaacctcctgacctgtcaccgtgagcagctttggaaacaggaccacaaaaatgaaagcatgtctcaatagtaaaagataacaagatctttcaggaaagacggattgcattagaaatagacagtata

SEQ ID NO: 15803 - DNA, 1655 bp, Homo sapiens
  source 1..1655: mol_type = unassigned DNA
agagctgagatcctacaggagtccagggctggagagaaaacctctgcgaggaaagggaaggagcaagccgtgaatttaagggacgctgtgaagcaatcatggatgcaatgaagagagggctctgctgtgtgctgctgctgtgtggagcagtcttcgtttcgcccagccaggaaatccatgcccgattcagaagaggagccagatcttaccaagtgatctgcagagatgaaaaaacgcagatgatataccagcaacatcagtcatggctgcgccctgtgctcagaagcaaccgggtggaatattgctggtgcaacagtggcagggcacagtgccactcagtgcctgtcaaaagaaacagtgactgctactttgggaatgggtcagcctaccgtggcacgcacagcctcaccgagtcgggtgcctcctgcctcccgtggaattccatgatcctgataggcaaggtttacacagcacagaaccccagtgcccaggcactgggcctgggcaaacataattactgccggaatcctgatggggatgccaagccctggtgccacgtgctgaagaaccgcaggctgacgtgggagtactgtgatgtgccctcctgctccacctgcggcctgagacagtacagccagcctcagtttcgcatcaaaggagggctcttcgccgacatcgcctcccacccctggcaggctgccatctttgccaagcacaggaggtcgcccggagagcggttcctgtgcgggggcatactcatcagctcctgctggattctctctgccgcccactgcttccaggagaggtttccgccccaccacctgacggtgatcttgggcagaacataccgggtggtccctggcgaggaggagcagaaatttgaagtcgaaaaatacattgtccataaggaattcgatgatgacacttacgacaatgacattgcgctgctgcagctgaaatcggattcgtcccgctgtgcccaggagagcagcgtggtccgcactgtgtgccttcccccggcggacctgcagctgccggactggacggagtgtgagctctccggctacggcaagcatgaggccttgtctcctttctattcggagcggctgaaggaggctcatgtcagactgtacccatccagccgctgcacatcacaacatttacttaacagaacagtcaccgacaacatgctgtgtgctggagacactcggagcggcgggccccaggcaaacttgcacgacgcctgccagggcgattcgggaggccccctggtgtgtctgaacgatggccgcatgactttggtgggcatcatcagctggggcctgggctgtggacagaaggatgtcccgggtgtgtacaccaaggttaccaactacctagactggattcgtgacaacatgcgaccgtgaccaggaacacccgactcctcaaaagcaaatgagatcccgcctcttcttcttcagaagacactgcaaaggcgcagtgcttctctacagacttctccagacccaccacaccgcagaagcgggacgagaccctacaggagagggaagagtgcattttcccagatacttcccattttggaagttttcaggacttggtctgatttcaggatactctgtcagatgggaagacatgaatgcacactagcctct

SEQ ID NO: 15804 - DNA, 1613 bp, Homo sapiens
  source 1..1613: mol_type = unassigned DNA
agagctgagatcctacaggagtccagggctggagagaaaacctctgcgaggaaagggaaggagcaagccgtgaatttaagggacgctgtgaagcaatcatggatgcaatgaagagagggctctgctgtgtgctgctgctgtgtggagcagtcttcgtttcgcccagccaggaaatccatgcccgattcagaagaggagccagatcttaccaagtgatctgcagagatgaaaaaacgcagatgatataccagcaacatcagtcatggctgcgccctgtgctcagaagcaaccgggtggaatattgctggtgcaacagtggcagggcacagtgccactcagtgcctgtcaaaagttgcagcgagccaaggtgtttcaacgggggcacctgccagcaggccctgtacttctcagatttcgtgtgccagtgccccgaaggatttgctgggaagtgctgtgaaataggaaacagtgactgctactttgggaatgggtcagcctaccgtggcacgcacagcctcaccgagtcgggtgcctcctgcctcccgtggaattccatgatcctgataggcaaggtttacacagcacagaaccccagtgcccaggcactgggcctgggcaaacataattactgccggaatcctgatggggatgccaagccctggtgccacgtgctgaagaaccgcaggctgacgtgggagtactgtgatgtgccctcctgctccacctgcggcctgagacagtacagccagcctcagtttcgcatcaaaggagggctcttcgccgacatcgcctcccacccctggcaggctgccatctttgccaagcacaggaggtcgcccggagagcggttcctgtgcgggggcatactcatcagctcctgctggattctctctgccgcccactgcttccaggagaggtttccgccccaccacctgacggtgatcttgggcagaacataccgggtggtccctggcgaggaggagcagaaatttgaagtcgaaaaatacattgtccataaggaattcgatgatgacacttacgacaatgacattgcgctgctgcagctgaaatcggattcgtcccgctgtgcccaggagagcagcgtggtccgcactgtgtgccttcccccggcggacctgcagctgccggactggacggagtgtgagctctccggctacggcaagcatgaggccttgtctcctttctattcggagcggctgaaggaggctcatgtcagactgtacccatccagccgctgcacatcacaacatttacttaacagaacagtcaccgacaacatgctgtgtgctggagacactcggagcggcgggccccaggcaaacttgcacgacgcctgccagggcgattcgggaggccccctggtgtgtctgaacgatggccgcatgactttggtgggcatcatcagctggggcctgggctgtggacagaaggatgtcccgggtgtgtacaccaaggttaccaactacctagactggattcgtgacaacatgcgaccgtgaccaggaacacccgactcctcaaaagcaaatgagatcccgcctcttcttcttcagaagacactgcaaaggcgcagtgcttctctacagacttct

SEQ ID NO: 15805 - DNA, 571 bp, Homo sapiens
  source 1..571: mol_type = unassigned DNA
gctgatggcctcctcactctacctacacacgtgcaggaggcctgtgggactgactgcctcctcgtcctttcctccccagccacctgcggcctgagacagtacagccagcctcagtttcgcatcaaaggagggctcttcgccgacatcgcctcccacccctggcaggctgccatctttgccaagcacaggaggtcgcccggagagcggttcctgtgcgggggcatactcatcagctcctgctggattctctctgccgcccactgcttccaggagaggtttccgccccaccacctgacggtgatcttgggcagaacataccgggtggtccctggcgaggaggagcagaaatttgaagtcgaaaaatacattgtccataaggaattcgatgatgacacttacgacaatgacattggtaagagctcgtcattcccggctccagttcatacagatcacacaacacacccacatgcactcacctatgtttacacacacgggcctcctcctccagcccctgcccctcctgcgtgttcctcccctcccggggacgcggccctcacgccagctcactcct

SEQ ID NO: 15806 - DNA, 604 bp, Homo sapiens
  source 1..604: mol_type = unassigned DNA
gatttgctgggaagtgctgtgaaatagataccagggccacgtgctacgaggaccagggcatcagctacaggggcacgtggagcacagcggagagtggcgccgagtgcaccaactggaacagcagcgcgttggcccagaagccctacagcgggcggaggccagacgccatcaggctgggcctggggaaccacaactactgcagaaccccagtgcccaggcactgggcctgggcaaacataattactgccggaatcctgatggggatgccaagccctggtgccacgtgctgaagaaccgcaggctgacgtgggagtactgtgatgtgccctcctgctccacctgcggcctgagacagtacagccagcctcagtttcgcatcaaaggagggctcttcgccgacatcgcctcccacccctggcaggctgccatctttgccaagcacaggaggtcgcccggagagcggttcctgtgcgggggcatactcatcagctcctgctggattctctctgccgcccactgcttccaggagaggtttccgccccaccacctgacggtgatcttgggcagaacataccgggtggtccctggcgaggaggagcagaaa

SEQ ID NO: 15807 - DNA, 584 bp, Homo sapiens
  source 1..584: mol_type = unassigned DNA
cagagttctgcagcacccctgcctgctctgagggaaacagtgactgctactttgggaatgggtcagcctaccgtggcacgcacagcctcaccgagtcgggtgcctcctgcctcccgtggaattccatgatcctgataggcaaggtttacacagcacagaaccccagtgcccaggcactgggcctgggcaaacataattactgccggtaggtagcacaggggtggggggttcaggtcttggcagaacgtgggattagggtgtgagacgggggaagatccaatgtctcaagttgcatgacagacccagtgcgtgggaagcacccatggatattatctaatccaacctcttcacttgctagaataacacatattgtgaaaagcaaggtctaccagttttccaacctaaatcccaagttaagggtcctggcctgtaaccatttagtcctcagctgttctcctgacatctttattgcaatgatttgtaagagttccgtaacaggacagctcacagttctgtctgacaaccctatgagattagaacactacattactgactgggtaacaaagttaaagagaagttctcct

SEQ ID NO: 15808 - DNA, 3462 bp, Homo sapiens
  source 1..3462: mol_type = unassigned DNA
cggccttaggcggaggtgaaggtacaagcagaaaagggagcaagaccaagtgaccttgggcaaatgcccgcttgcctcagtttcctcatctataaagaggtgggaataacagtacacacttcatggtttgctgtgaggattaaattagctaatttttgtagactgtacaacagcgcctggcacatagagcacattcttaatattttaactcacatcatccttggagctgctttgaaaatacaggggacccttgaacaacacttgtctgacctgcagggtccacttatgtatggatttttttcaaccaaaggcaggatgaaaacagtatttgtaggatgcagaactggtatacgcgtgttccacgctgcaggacttgagtgtgtgtggattgtggtagacagggctcctggaaccatggcctgagcacacagaaggaggctgtcattaggggcttccttttttatacttgacaggttgcagcgagccaaggtgtttcaacgggggcacctgccagcaggccctgtacttctcagatttcgtgtgccagtgccccgaaggatttgctgggaagtgctgtgaaatagataccagggccacgtgctacgaggaccagggcatcagctacaggggcacgtggagcacagcggagagtggcgccgagtgcaccaactggaacagcagcgcgttggcccagaagccctacagcgggcggaggccagacgccatcaggctgggcctggggaaccacaactactgcaggtgagggcacatccccaaggagggattccccctgtgagaagctgctacagctggggaaagattctgtcagatccgtcagggttctcccaagaaacataaccaatacaggatggatagatggatagatgatagacagataatagatgataggtgatagatgatagattgatagatgatagatgataggtgatagattagataaatagatgatacatacatgatagatagatgataaatagacggtagatggatgacagatagacagatgataggtgatagatagatgatagattgatagatgattgatagataaatagatgatagatacatagatgatagatggtagatagatgatagatggatagatgatagatgataggtggtagatgatagacagatgattagaaagatagatgatagatacatagatgatagacacatagatgatagacagattgacagatgatagatgattgatagatgattaaatagatgatacatagatgataatgataaatagatgatagatgatagatgataggtgatagatagattgatagatgatagaagattgatagatgatagatacataggtgatagtagatgtaagatgatagatgatagatagatagatgatagacagattgatagatgatagagagatagagatagagaaagaggagagagaaatagagagagagagagaatgtgtgtgaacccaaagtatctgagacaggtctcaatcgatttagaaagttgattttgccaaggttaaggacacccccgtgacacagcctcaggaggtcctgaggacatgtgcccaaggttgtcagggcacagcttgcctttagacgttttagggagtcatgagacatcaatcaacatgtgtgagatgtacatcggtttggtcgggaaagttgggataactcgaagcaagggcttccaggccataggtagataagagacaaaaggctgtattctgagtccttgatcagcttttcactgaacacacaattgagtctggctcagttcatctgcatttttacataaaaaatagggcagaggaagcaatcagatacgcatttgtctcagatgagcagagggatgattttctgtcctgcacctgggaagataagctatccatttacaatgccaaggtgaaagtcaacagaactgttttagggtaaagatctttaggcctgcaaggaatgtccttgtagagaattaaaaaaaaaaaaaaaaaactttgcagctatcttattgaggaataaatgagaggcaggtttgcctgacgtagttcccggcttgacatttcccttggctcatgacgttggggtcctgagatttattttcctttcacactagatagatagacatttatgttaaggaactggctgacaggatcgtgggggctggcaagtccgaaacatcttggtaagccaggctggaagtgcaggcagaagctgaggctgctctcttaaggcagaatttcttattcaggaaacctcatatttgctcttaaggcctttaagtgattggacgaggcccaactacattatctaggacaatttccttttctaaagtcaactggctgtagatattaaccacatctataaaacactttcacaactcctagatgaatgtttggttaactgactgggtgccacagcctggccaagttgacatataagactattccagtccacaccttgtcaatttggcacccatgtgcatctccttaaaccatccttcacctccaagtaaacacaggaacaaaatcatactcctgcctaacatgatagaactaccagtgtacaaccaaaaacgcactcccggctgggcgtggtggctcacgcctgtaatcccagcactttgggaagccaaggcaggtggatcacctgaggtcaggagttcaagaccagcctggccaacatggtgaaaccctgtctctactaaaaatacaaaaattagccaggcatggtggcaggcacctgtaatcccagctactcgggaagctgaggctgaagaattgcccaaatccaggaaacggaggttgcagtgagaggagatgcgccgctgcactccagcctgggataaacagcgagactctgtcaaaaaaaaaagcaccccccattcctccagaaaaggataccaaagtccttgggtcctaaaggagaggcttcacctttgacctaccctggcccttcccttggctgatttttcagaaacccagatcgagactcaaagccctggtgctacgtctttaaggcggggaagtacagctcagagttctgcagcacccctgcctgctctgagggtaagtggcagccaccccgcctttccctgaatgtccctgggggaggaaagtccaggaggacaggccgatagccctcctgcacctgaggggagaaagggggaggccaggagtgagtcattttggttgcagagggaagaaagacaggacttaggtctgtgcctgggcttggcctctgactggctatttgtctgacctggagctgatctcctcacactctgaccctcaatttcctcctctatggaggagaggatggggctgaatcagtggttttcagtccttttgagaatgaatggagattctcccttttttgattaatgggtgaatggggctttgtctctctttcgctccctctcaaactttttaatgcaaaaaaaaaaaaaaaaaaa

SEQ ID NO: 15809 - DNA, 670 bp, Homo sapiens
  source 1..670: mol_type = unassigned DNA
aaaaaaaaaaaaggacatgctacagcatggatgcaccttgaagacatttgcaaagtgaaacaaaccagtcgcaaaagaagaaacactgtctcattccacttctaggataatttaagggacgctgtgaagcaatcatggatgcaatgaagagagggctctgctgtgtgctgctgctgtgtggagcagtcttcgtttcgcccagccaggaaatccatgcccgattcagaagaggagccagatcttaccaagtgatctgcagagatgaaaaaacgcagatgatataccagcaacatcagtcatggctgcgccctgtgctcagaagcaaccgggtggaatattgctggtgcaacagtggcagggcacagtgccactcagtgcctgtcaaaagttgcagcgagccaaggtgtttcaacgggggcacctgccagcaggccctgtacttctcagatttcgtgtgccagtgccccgaaggatttgctgggaagtgctgtgaaatagataccagggccacgtgctacgaggaccagggcatcagctacaggggcacgtggagcacagcggagagtggcgccgagtgcaccaactggaacagcagcgcgttggcccagaagccctacagcgggcggaggccagacgccatcaggctgggcctggggaaccacaactactg

SEQ ID NO: 15810 - DNA, 549 bp, Homo sapiens
  source 1..549: mol_type = unassigned DNA
agttttgagaaacaggaaatttgaggaaagctgagaaagagaagatctggaaatttaagggacgctgtgaagcaatcatggatgcaatgaagagagggctctgctgtgtgctgctgctgtgtggagcagtcttcgtttcgcccagccaggaaatccatgcccgattcagaagaggagccagatcttaccaagtgatctgcagagatgaaaaaacgcagatgatataccagcaacatcagtcatggctgcgccctgtgctcagaagcaaccgggtggaatattgctggtgcaacagtggcagggcacagtgccactcagtgcctgtcaaaagttgcagcgagccaaggtgtttcaacgggggcacctgccagcaggccctgtacttctcagatttcgtgtgccagtgccccgaaggatttgctgggaagtgctgtgaaatagataccagggccacgtgctacgaggaccagggcatcagctacaggggcacgtggagcacagcggagagtggcgccgagtgcaccaactggaacagcagcgcgttggccc

SEQ ID NO: 15811 - DNA, 5074 bp, Homo sapiens
  source 1..5074: mol_type = unassigned DNA
aggacggaatttatcagaagcaggcctattgcgtacttggaaaagataactaaggactcaactattgttactccaattattttgaggactgaccctcagggatttttcttttactggacagatcaaaacaaggagacagagctactggatctcagccttgtcaaagatgccagatgtgggagacacgccaaagctcccaaggaccccaaattacgtgaacttttggatgtggggaacatcgggcgcctggagcagcgcatgatcacagtggtgtatgggcctgacctcgtgaacatctcccatttgaatctcgtggctttccaagaagaagtggccaaggaatggacaaatgaggttttcagtttggcaacaaacctgctggcccaaaacatgtccagggatgcatttctggaaaaagcctatactaaacttaagctgcaagtcactccagaagggcgtattcctctcaaaaacatatatcgcttgttttcagcagatcggaagcgagttgaaactgctttagaggcttgtagtcttccatcttcaaggaatgattcaatacctcaagaagatttcactccagaagtgtacagagttttcctcaacaacctttgccctcgacctgaaattgataacatcttttcagaatttggtgcaaaaagcaaaccatatcttaccgttgatcagatgatggattttatcaaccttaagcagcgagatcctcggcttaatgaaatactttatccacctctaaaacaagagcaagtccaagtattgattgagaagtatgaacccaacaacagcctcgccagaaaaggacaaatatcagtggatgggttcatgcgctatctgagtggagaagaaaacggagtcgtttcacctgagaaactggatttgaatgaagacatgtctcagcccctttctcactatttcattaattcctcgcacaacacctacctcacagctggccaactggctggaaactcctctgttgagatgtatcgccaagtgctcctgtctggttgtcgctgtgtggagctggactgctggaagggacggactgcagaagaggaacctgtcatcacccatggcttcaccatgacaactgaaatatctttcaaggaagtgatagaagcaattgcggagtgtgcatttaagacttcaccttttccaattctcctttcgtttgagaaccatgtggattccccaaagcagcaagccaagatggcggagtactgccgactgatctttggggatgcccttctcatggagcccctggaaaaatatccactggaatctggagttcctcttccaagccctatggatttaatgtataaaattttggtgaaaaataagaagaaatcacacaagtcatcagaaggaagcggcaaaaagaagctctcagaacaagcctccaacacctacagtgactcctccagcatgttcgagccctcatccccaggagccggagaagctgatacggaaagtgacgacgacgatgatgatgatgactgtaaaaaatcttcaatggatgaggggactgctggaagtgaggctatggccacagaagaaatgtctaatctggtgaactatattcagccagtcaagtttgagtcatttgaaatttcaaaaaaaagaaataaaagttttgaaatgtcttccttcgtggaaaccaaaggacttgaacaactcaccaagtctccagtggaatttgtagaatataacaaaatgcagcttagcaggatatatccaaaaggaacacgtgtggattcatccaactatatgcctcagctcttctggaatgcaggttgtcagatggtggcacttaatttccagacaatggacctggctatgcaaataaatatggggatgtatgaatacaacgggaagagtggctacagattgaagccagagttcatgaggaggcctgacaagcattttgatccatttactgaaggcatcgtagatgggatagtggcaaacactttgtctgttaagattatttcaggtcagtttctttctgataagaaagttgggacttacgtggaagtagatatgtttggtttgcctgtggatacaaggaggaaggcatttaagaccaaaacatcccaaggaaatgctgtgaatcctgtctgggaagaagaacctattgtgttcaaaaaggtggttcttcctactctggcctgtttgagaatagcagtttatgaagaaggaggtaaattcattggccaccgtatcttgccagtgcaagccattcggccaggctatcactatatctgtctaaggaatgaaaggaaccagcctctgacgctgcctgctgtctttgtctacatagaagtgaaagactatgtgccagacacatatgcagatgtcatcgaagctttatcaaacccaatccgatatgtgaacctgatggaacagagagctaagcaattggctgctttgacactggaagatgaagaagaagtaaagaaagaggctgatcctggagaaacaccatcagaggctccaagtgaagcgagaacgactccagcagaaaatggggtgaatcacactacaaccctgacacccaagccaccctcccaggctctccacagccagccagctccaggttctgtaaaggcacctgccaaaacagaagatcttattcagagtgtcttaacagaagtggaagcacagaccatcgaagaactaaagcaacagaaatcgtttgtgaaacttcaaaagaaacactacaaagaaatgaaagacctggttaagagacaccacaagaaaaccactgaccttatcaaagaacacactaccaagtataatgaaattcagaatgactacttgagaaggagagccgctttggaaaagtccgccaaaaaggacagtaagaaaaaatcggaacccagcagccctgatcatggttcatcaacgattgagcaagacctcgctgctctggatgctgaaatgacccaaaagttaatagacttgaaggacaaacaacagcagcagctgcttaatcttcggcaagaacagtattatagtgaaaaataccagaagcgagaacatattaaactgcttattcaaaagttgacggatgtcgcagaagagtgtcagaacaatcagttaaagaagctcaaagaaatctgtgagaaagaaaagaaagaattaaagaagaaaatggataaaaagaggcaggagaagataacagaagctaaatccaaagacaaaagtcagatggaagaggagaagacagagatgatccggtcatatatccaggaagtggtgcagtatatcaagaggctagaagaagcgcaaagtaaacggcaagaaaaactcgtagagaaacacaaggaaatacgtcagcagatcctggatgaaaagcccaagggggaaggttcctcctcattcttgtcggaaacttgccatgaggatccctctgtttcccccaactttactccccccaaccctcaagctctcaagtggtgaccaccgtccttccggccagctgcaggtggagctggagcaagaataccaagacaaattcaaaagactgcccctcgagattttggaattcgtgcaggaagccatgaaaggaaagatcagtgaagacagcaatcacggttctgcccctctctccctgtcctcagaccctggaaaagtgaaccacaagactccctccagtgaggagctgggaggagacatcccaggaaaagaatttgatactcctctgtgaatgctcctgccaggccttcagaaattgcatggccactccagcgtcatcggactctctcttattacaaagatcactgcccaggaccatcttcccgagaagcatcccttagcctaaaatccacaccaaagggagagttccagaggaatccatgaagaattcccatgcccaggctccatgtgtcatgtggaaacctccacaggtctgctagtgaagaatgcatgtatgtgagatttttgttttctttccaatagcaaattcaaagcaagcaacttgcaggctccatggaacttttaatgaaggacagtgtcttctttgaagaaaatcaagctcgtgtttttattcgaagctctggtgtaaaatatttcaaagtcatagaaatagtttgagaaatgcatagcattatttaacactattgaacagccgactttgagcattgtttcttctaactgcccctcaactaccattatcttcaagtcaacatgcatattacattttcatcctttgctttgcaagcactggtggcttgcagtttgctaatttatttatcatagagtcatcaatgtatttgttgctgacatggttttattagatactgtagtgattcaaataagttttctatttgaaaaaaaaaatcacttgattgtatccttgcccagtgaagccatcctaagacttagcaatatggattgtacatttggctgcatgagcaagtcggccgcacacttccagacagtgtgctgtttgaattgactatttgcactcaaagtctgggtattcattggttattggcctgaaatgatcaaataactacaaatgatctgttgaataaaaatagttgagctgatatatgttaagcagatattcaatcagaatgaacaggttccggtggttattttgccgtttgacattttttatggttcatttatttttaatatagagaggaagattgaatatttatctagagaatacaaagacccacatgtaaatgataggtattatctccatgtatatatgtacccacttagtcatgtaagtgcatatacacatacacacacatgagtgtagacatgtgtttattaattgacaatgacccaaatctcttccacaagacttaaaaccaaattcagggacaaatggatagagaagaaaagggtcaaacatcgagattacatggatgttaaattatatggagacgctaagaaataattgatggagccattgatgcaaaccgaagtagatttagaacttatatgaatttgatttatattttgcaagatcaaaaattagatgttaagtatcagattttaagcttgttttaatggtcaaaaaattaggacagaaataatatgg

SEQ ID NO: 15812 - DNA, 3206 bp, Homo sapiens
  source 1..3206: mol_type = unassigned DNA
aatcaagcctgggcaatggcgggcgcccctcccccagcctcgctgccgccttgcagtttgatctcagactgctgtgctagcaaccagcgagactccgtgggcgtaggaccctccgagccaggactcaactattgttactccaattattttgaggactgaccctcagggatttttcttttactggacagatcaaaacaaggagacagagctactggatctcagccttgtcaaagatgccagatgtgggagacacgccaaagctcccaaggaccccaaattacgtgaacttttggatgtggggaacatcgggcgcctggagcagcgcatgatcacagtggtgtatgggcctgacctcgtgaacatctcccatttgaatctcgtggctttccaagaagaagtggccaaggaatggacaaatgaggttttcagtttggcaacaaacctgctggcccaaaacatgtccagggatgcatttctggaaaaagcctatactaaacttaagctgcaagtcactccagaagggcgtattcctctcaaaaacatatatcgcttgttttcagcagatcggaagcgagttgaaactgctttagaggcttgtagtcttccatcttcaaggaatgattcaatacctcaagaagatttcactccagaagtgtacagagttttcctcaacaacctttgccctcgacctgaaattgataacatcttttcagaatttggtgcaaaaagcaaaccatatcttaccgttgatcagatgatggattttatcaaccttaagcagcgagatcctcggcttaatgaaatactttatccacctctaaaacaagagcaagtccaagtattgattgagaagtatgaacccaacaacagcctcgccagaaaaggacaaatatcagtggatgggttcatgcgctatctgagtggagaagaaaacggagtcgtttcacctgagaaactggatttgaatgaagacatgtctcagcccctttctcactatttcattaattcctcgcacaacacctacctcacagctggccaactggctggaaactcctctgttgagatgtatcgccaagtgctcctgtctggttgtcgctgtgtggagctggactgctggaagggacggactgcagaagaggaacctgtcatcacccatggcttcaccatgacaactgaaatatctttcaaggaagtgatagaagcaattgcggagtgtgcatttaagacttcaccttttccaattctcctttcgtttgagaaccatgtggattccccaaagcagcaagccaagatggcggagtactgccgactgatctttggggatgcccttctcatggagcccctggaaaaatatccactggaatctggagttcctcttccaagccctatggatttaatgtataaaattttggtgaaaaataagaagaaatcacacaagtcatcagaaggaagcggcaaaaagaagctctcagaacaagcctccaacacctacagtgactcctccagcatgttcgagccctcatccccaggagccggagaagctgatacggaaagtgacgacgacgatgatgatgatgactgtaaaaaatcttcaatggatgaggggactgctggaagtgaggctatggccacagaagaaatgtctaatctggtgaactatattcagccagtcaagtttgagtcatttgaaatttcaaaaaaaagaaataaaagttttgaaatgtcttccttcgtggaaaccaaaggacttgaacaactcaccaagtctccagtggaatttgtagaatataacaaaatgcagcttagcaggatatatccaaaaggaacacgtgtggattcatccaactatatgcctcagctcttctggaatgcaggttgtcagatggtggcacttaatttccagacaatggacctggctatgcaaataaatatggggatgtatgaatacaacgggaagagtggctacagattgaagccagagttcatgaggaggcctgacaagcattttgatccatttactgaaggcatcgtagatgggatagtggcaaacactttgtctgttaagattatttcaggtcagtttctttctgataagaaagttgggacttacgtggaagtagatatgtttggtttgcctgtggatacaaggaggaaggcatttaagaccaaaacatcccaaggaaatgctgtgaatcctgtctgggaagaagaacctattgtgttcaaaaaggtggttcttcctactctggcctgtttgagaatagcagtttatgaagaaggaggtaaattcattggccaccgtatcttgccagtgcaagccattcggccaggctatcactatatctgtctaaggaatgaaaggaaccagcctctgacgctgcctgctgtctttgtctacatagaagtgaaagactatgtgccagacacatatgcagatgtcatcgaagctttatcaaacccaatccgatatgtgaacctgatggaacagagagctaagcaattggctgctttgacactggaagatgaagaagaagtaaagaaagaggctgatcctggagaaacaccatcagaggctccaagtgaagcgagaacgactccagcagaaaatggggtgaatcacactacaaccctgacacccaagccaccctcccaggctctccacagccagccagctccaggttctgtaaaggcacctgccaaaacagaagatcttattcagagtgtcttaacagaagtggaagcacagaccatcgaagaactaaagcaacagaaatcgtttgtgaaacttcaaaagaaacactacaaagaaatgaaagacctggttaagagacaccacaagaaaaccactgaccttatcaaagaacacactaccaagtataatgaaattcagaatgactacttgagaaggagagccgctttggaaaagtccgccaaaaaggacagtaagaaaaaatcggaacccagcagccctgatcatggttcatcaacgattgagcaagacctcgctgctctggatgctgaaatgacccaaaagttaatagacttgaaggacaaacaacagcagcagctgcttaatcttcggcaagaacagtattatagtgaaaaataccagaagcgagaacatattaaactgcttattcaaaagttgacggatgtcgcagaagagtgtcagaacaatcagttaaagaagctcaaagaaatctgtg

SEQ ID NO: 15813 - DNA, 759 bp, Homo sapiens
  source 1..759: mol_type = unassigned DNA
agtttgatctcagactgctgtgctagcaaccagcgagactccgtgggcgtaggaccctccgagccaggcttgtcccatggcctctcatagaaatcatggaccatggaagaacaagaatatggtagacatgaaggaaatgtagagggactcaactattgttactccaattattttgaggactgaccctcagggatttttcttttactggacagatcaaaacaaggagacagagctactggatctcagccttgtcaaagatgccagatgtgggagacacgccaaagctcccaaggaccccaaattacgtgaacttttggatgtggggaacatcgggcgcctggagcagcgcatgatcacagtggtgtatgggcctgacctcgtgaacatctcccatttgaatctcgtggctttccaagaagaagtggccaaggaatggacaaatgaggttttcagtttggcaacaaacctgctggcccaaaacatgtccagggatgcatttctggaaaaagcctatactaaacttaagctgcaagtcactccagaagggcgtattcctctcaaaaacatatatcgcttgttttcagcagatcggaagcgagttgaaactgctttagaggcttgtagtcttccatcttcaaggaatgattcaatacctcaagaagatttcactccagaagtgtacagagttttcctcaacaacctttgccctcgacctgaaattgataacatcttttcagaatttggtgcaaaaagcaaacc

SEQ ID NO: 15814 - DNA, 7323 bp, Homo sapiens
  source 1..7323: mol_type = unassigned DNA
gcaaagttgggctgggagccgcggggggaaggaaggacccagcgagcgagggtggcggggaaggggggcgggggggaggaggagggaggagggaaaagagcggttagggggggcgccgggcgtgtgtcactcgctctctccctctgtgtatagaggatgtgctgaatggtgcgctttgaggcggcggcggcggaggagcagaatccgccgcgactggcagcctcggctgaccggctcggcttctcttcgccttccgaggctcctcatccaccgcgggctccagacctcgcgtcccgcccggggcatggccgggcgctgcgcccccgcgcgctctgcctgctgagcggcgccggagggaggtgcggaggccgggaggccggggaggccggcggggagcagagtcgagcgcctccggagcagagaaaggagcccgcgccccgcgccccgcgccccgcgcacggtccccagtccctgccgcgctcgcccgggccgcccggagcccagatgagcccagatggccggggctcaacccggagtgcacgccttgcaactcaagcccgtgtgcgtgtccgacagcctcaagaagggcaccaaattcgtcaagtgggatgatgactcaactattgttactccaattattttgaggactgaccctcagggatttttcttttactggacagatcaaaacaaggagacagagctactggatctcagccttgtcaaagatgccagatgtgggagacacgccaaagctcccaaggaccccaaattacgtgaacttttggatgtggggaacatcgggcgcctggagcagcgcatgatcacagtggtgtatgggcctgacctcgtgaacatctcccatttgaatctcgtggctttccaagaagaagtggccaaggaatggacaaatgaggttttcagtttggcaacaaacctgctggcccaaaacatgtccagggatgcatttctggaaaaagcctatactaaacttaagctgcaagtcactccagaagggcgtattcctctcaaaaacatatatcgcttgttttcagcagatcggaagcgagttgaaactgctttagaggcttgtagtcttccatcttcaaggaatgattcaatacctcaagaagatttcactccagaagtgtacagagttttcctcaacaacctttgccctcgacctgaaattgataacatcttttcagaatttggtgcaaaaagcaaaccatatcttaccgttgatcagatgatggattttatcaaccttaagcagcgagatcctcggcttaatgaaatactttatccacctctaaaacaagagcaagtccaagtattgattgagaagtatgaacccaacaacagcctcgccagaaaaggacaaatatcagtggatgggttcatgcgctatctgagtggagaagaaaacggagtcgtttcacctgagaaactggatttgaatgaagacatgtctcagcccctttctcactatttcattaattcctcgcacaacacctacctcacagctggccaactggctggaaactcctctgttgagatgtatcgccaagtgctcctgtctggttgtcgctgtgtggagctggactgctggaagggacggactgcagaagaggaacctgtcatcacccatggcttcaccatgacaactgaaatatctttcaaggaagtgatagaagcaattgcggagtgtgcatttaagacttcaccttttccaattctcctttcgtttgagaaccatgtggattccccaaagcagcaagccaagatggcggagtactgccgactgatctttggggatgcccttctcatggagcccctggaaaaatatccactggaatctggagttcctcttccaagccctatggatttaatgtataaaattttggtgaaaaataagaagaaatcacacaagtcatcagaaggaagcggcaaaaagaagctctcagaacaagcctccaacacctacagtgactcctccagcatgttcgagccctcatccccaggagccggagaagctgatacggaaagtgacgacgacgatgatgatgatgactgtaaaaaatcttcaatggatgaggggactgctggaagtgaggctatggccacagaagaaatgtctaatctggtgaactatattcagccagtcaagtttgagtcatttgaaatttcaaaaaaaagaaataaaagttttgaaatgtcttccttcgtggaaaccaaaggacttgaacaactcaccaagtctccagtggaatttgtagaatataacaaaatgcagcttagcaggatatatccaaaaggaacacgtgtggattcatccaactatatgcctcagctcttctggaatgcaggttgtcagatggtggcacttaatttccagacaatggacctggctatgcaaataaatatggggatgtatgaatacaacgggaagagtggctacagattgaagccagagttcatgaggaggcctgacaagcattttgatccatttactgaaggcatcgtagatgggatagtggcaaacactttgtctgttaagattatttcaggtcagtttctttctgataagaaagttgggacttacgtggaagtagatatgtttggtttgcctgtggatacaaggaggaaggcatttaagaccaaaacatcccaaggaaatgctgtgaatcctgtctgggaagaagaacctattgtgttcaaaaaggtggttcttcctactctggcctgtttgagaatagcagtttatgaagaaggaggtaaattcattggccaccgtatcttgccagtgcaagccattcggccaggctatcactatatctgtctaaggaatgaaaggaaccagcctctgacgctgcctgctgtctttgtctacatagaagtgaaagactatgtgccagacacatatgcagatgtcatcgaagctttatcaaacccaatccgatatgtgaacctgatggaacagagagctaagcaattggctgctttgacactggaagatgaagaagaagtaaagaaagaggctgatcctggagaaacaccatcagaggctccaagtgaagcgagaacgactccagcagaaaatggggtgaatcacactacaaccctgacacccaagccaccctcccaggctctccacagccagccagctccaggttctgtaaaggcacctgccaaaacagaagatcttattcagagtgtcttaacagaagtggaagcacagaccatcgaagaactaaagcaacagaaatcgtttgtgaaacttcaaaagaaacactacaaagaaatgaaagacctggttaagagacaccacaagaaaaccactgaccttatcaaagaacacactaccaagtataatgaaattcagaatgactacttgagaaggagagccgctttggaaaagtccgccaaaaaggacagtaagaaaaaatcggaacccagcagccctgatcatggttcatcaacgattgagcaagacctcgctgctctggatgctgaaatgacccaaaagttaatagacttgaaggacaaacaacagcagcagctgcttaatcttcggcaagaacagtattatagtgaaaaataccagaagcgagaacatattaaactgcttattcaaaagttgacggatgtcgcagaagagtgtcagaacaatcagttaaagaagctcaaagaaatctgtgagaaagaaaagaaagaattaaagaagaaaatggataaaaagaggcaggagaagataacagaagctaaatccaaagacaaaagtcagatggaagaggagaagacagagatgatccggtcatatatccaggaagtggtgcagtatatcaagaggctagaagaagcgcaaagtaaacggcaagaaaaactcgtagagaaacacaaggaaatacgtcagcagatcctggatgaaaagcccaagggggaaggttcctcctcattcttgtcggaaacttgccatgaggatccctctgtttcccccaactttactccccccaaccctcaagctctcaagtggtgaccaccgtccttccggccagctgcaggtggagctggagcaagaataccaagacaaattcaaaagactgcccctcgagattttggaattcgtgcaggaagccatgaaaggaaagatcagtgaagacagcaatcacggttctgcccctctctccctgtcctcagaccctggaaaagtgaaccacaagactccctccagtgaggagctgggaggagacatcccaggaaaagaatttgatactcctctgtgaatgctcctgccaggccttcagaaattgcatggccactccagcgtcatcggactctctcttattacaaagatcactgcccaggaccatcttcccgagaagcatcccttagcctaaaatccacaccaaagggagagttccagaggaatccatgaagaattcccatgcccaggctccatgtgtcatgtggaaacctccacaggtctgctagtgaagaatgcatgtatgtgagatttttgttttctttccaatagcaaattcaaagcaagcaacttgcaggctccatggaacttttaatgaaggacagtgtcttctttgaagaaaatcaagctcgtgtttttattcgaagctctggtgtaaaatatttcaaagtcatagaaatagtttgagaaatgcatagcattatttaacactattgaacagccgactttgagcattgtttcttctaactgcccctcaactaccattatcttcaagtcaacatgcatattacattttcatcctttgctttgcaagcactggtggcttgcagtttgctaatttatttatcatagagtcatcaatgtatttgttgctgacatggttttattagatactgtagtgattcaaataagttttctatttgaaaaaaaaaatcacttgattgtatccttgcccagtgaagccatcctaagacttagcaatatggattgtacatttggctgcatgagcaagtcggccgcacacttccagacagtgtgctgtttgaattgactatttgcactcaaagtctgggtattcattggttattggcctgaaatgatcaaataactacaaatgatctgttgaataaaaatagttgagctgatatatgttaagcagatattcaatcagaatgaacaggttccggtggttattttgccgtttgacattttttatggttcatttatttttaatatagagaggaagattgaatatttatctagagaatacaaagacccacatgtaaatgataggtattatctccatgtatatatgtacccacttagtcatgtaagtgcatatacacatacacacacatgagtgtagacatgtgtttattaattgacaatgacccaaatctcttccacaagacttaaaaccaaattcagggacaaatggatagagaagaaaagggtcaaacatcgagattacatggatgttaaattatatggagacgctaagaaataattgatggagccattgatgcaaaccgaagtagatttagaacttatatgaatttgatttatattttgcaagatcaaaaattagatgttaagtatcagattttaagcttgttttaatggtcaaaaaattaggacagaaataatatggacatttattagtatcttccataatttttaagtctgacacatttctattttattctaacataaaaaaacttccattatatatttactaagtatatttaattcacttaactctgtctttataagttcctattttagatggaataagagaaacaaattatatcaaggtaaaactgatcaaaagcataattgaaagttctgaaaaaagaaaaataataatatgtagaaaaatgtaacttagagagtaacacatgaacattgaagttaaaacccagaagccagatgctcacagttttattttactttaaaataaacctgtctgactgtagctttgtgaaatatcttaaaacgcaaaaaccaattgtgtcctgaaaattgtttcaagaatttaatatttttatgaaaattattttatttaactttaagcaataactagagattacaattaaattttaatcaaaatgaaggcttagttcaaacataaggaaacagtgtttgattaaaaaaaacacatctagtaagacgtaaggggaaaatcacatcctctttggagatgattatattttgatctgaagggtttggggtgttcattagacacttaataaaacttaacttccaatgaaaaagaaatcttttgtaaatcattctacttttgcactttgaaagaaaggcgttaatcataaagaagcaagaatggtcaaaatcgaatgctgcatttttataaacaaaattacagactgtctgaaattgaagaagaatgaactaataatagcattcataaccaaacacaatgatgattattgcagaacattgtatcacattttagtccagagatagaataaagttgaataaccttgacttacacaaaactgttttggtagttggatttcattatcttagtgaatttagtcattttacaatatgtttgtatttggccatttactgtaatcacatttttatatctgtacaatgacactttttgcagttgtggggtagtgtgtaacactgtccatcttgcatcattgaaactactacaatgatactatcatttaataatattaatattacttgaaatagactaagataaagaaaaggggtctgtatgatgtgcagttttgtgcctttatgtatttgccttgttctttgtcgaatgtgtgaaattccgtactgtggtttttcctataatagaaagtagagctgtgtattaaattagactgtgtctctctgatacctttacactactgagaatagcatggttttggccatgtaaaccaattttcaaagttctaatgacatagccatgtgtttttggttttttatatttcattttaaaatttgagtatcaccatacattaattaatactcctgtagtagataagctgtcattaagtaattcccaaaaaaagggccatttgcttgcattactttgaatttaatgttgcgcttgtgcactgtgttaatattgtttgtgatggattggacgttgtgactcttgccttttaagaagaaaaaaaagataggacaaagtatttgaagctcttaaaatgtacatattttggttcttctatctcaaattatttaaaatgcataattcacatttttgtaataattctatgcaattttgtggcatgatgtttcttccacttgtaattttatgtgctttcatcacaaatccaaaggaaagaataaaaatt

SEQ ID NO: 15815 - DNA, 7092 bp, Homo sapiens
  source 1..7092: mol_type = unassigned DNA
cactcgctctctccctctgtgtatagaggatgtgctgaatggtgcgctttgaggcggcggcggcggaggagcagaatccgccgcgactggcagcctcggctgaccggctcggcttctcttcgccttccgaggctcctcatccaccgcgggctccagacctcgcgtcccgcccggggcatggccgggcgctgcgcccccgcgcgctctgcctgctgagcggcgccggagggaggtgcggaggccgggaggccggggaggccggcggggagcagagtcgagcgcctccggagcagagaaaggagcccgcgccccgcgccccgcgccccgcgcacggtccccagtccctgccgcgctcgcccgggccgcccggagcccagatgagcccagatggccggggctcaacccggagtgcacgccttgcaactcaagcccgtgtgcgtgtccgacagcctcaagaagggcaccaaattcgtcaagtgggatgatgactcaactattgttactccaattattttgaggactgaccctcagggatttttcttttactggacagatcaaaacaaggagacagagctactggatctcagccttgtcaaagatgccagatgtgggagacacgccaaagctcccaaggaccccaaattacgtgaacttttggatgtggggaacatcgggcgcctggagcagcgcatgatcacagtggtgtatgggcctgacctcgtgaacatctcccatttgaatctcgtggctttccaagaagaagtggccaaggaatggacaaatgaggttttcagtttggcaacaaacctgctggcccaaaacatgtccagggatgcatttctggaaaaagcctatactaaacttaagctgcaagtcactccagaagggcgtattcctctcaaaaacatatatcgcttgttttcagcagatcggaagcgagttgaaactgctttagaggcttgtagtcttccatcttcaaggaatgattcaatacctcaagaagatttcactccagaagtgtacagagttttcctcaacaacctttgccctcgacctgaaattgataacatcttttcagaatttggtgcaaaaagcaaaccatatcttaccgttgatcagatgatggattttatcaaccttaagcagcgagatcctcggcttaatgaaatactttatccacctctaaaacaagagcaagtccaagtattgattgagaagtatgaacccaacaacagcctcgccagaaaaggacaaatatcagtggatgggttcatgcgctatctgagtggagaagaaaacggagtcgtttcacctgagaaactggatttgaatgaagacatgtctcagcccctttctcactatttcattaattcctcgcacaacacctacctcacagctggccaactggctggaaactcctctgttgagatgtatcgccaagtgctcctgtctggttgtcgctgtgtggagctggactgctggaagggacggactgcagaagaggaacctgtcatcacccatggcttcaccatgacaactgaaatatctttcaaggaagtgatagaagcaattgcggagtgtgcatttaagacttcaccttttccaattctcctttcgtttgagaaccatgtggattccccaaagcagcaagccaagatggcggagtactgccgactgatctttggggatgcccttctcatggagcccctggaaaaatatccactggaatctggagttcctcttccaagccctatggatttaatgtataaaattttggtgaaaaataagaagaaatcacacaagtcatcagaaggaagcggcaaaaagaagctctcagaacaagcctccaacacctacagtgactcctccagcatgttcgagccctcatccccaggagccggagaagctgatacggaaagtgacgacgacgatgatgatgatgactgtaaaaaatcttcaatggatgaggggactgctggaagtgaggctatggccacagaagaaatgtctaatctggtgaactatattcagccagtcaagtttgagtcatttgaaatttcaaaaaaaagaaataaaagttttgaaatgtcttccttcgtggaaaccaaaggacttgaacaactcaccaagtctccagtggaatttgtagaatataacaaaatgcagcttagcaggatatatccaaaaggaacacgtgtggattcatccaactatatgcctcagctcttctggaatgcaggttgtcagatggtggcacttaatttccagacaatggacctggctatgcaaataaatatggggatgtatgaatacaacgggaagagtggctacagattgaagccagagttcatgaggaggcctgacaagcattttgatccatttactgaaggcatcgtagatgggatagtggcaaacactttgtctgttaagattatttcaggtcagtttctttctgataagaaagttgggacttacgtggaagtagatatgtttggtttgcctgtggatacaaggaggaaggcatttaagaccaaaacatcccaaggaaatgctgtgaatcctgtctgggaagaagaacctattgtgttcaaaaaggtggttcttcctactctggcctgtttgagaatagcagtttatgaagaaggaggtaaattcattggccaccgtatcttgccagtgcaagccattcggccaggctatcactatatctgtctaaggaatgaaaggaaccagcctctgacgctgcctgctgtctttgtctacatagaagtgaaagactatgtgccagacacatatgcagatgtcatcgaagctttatcaaacccaatccgatatgtgaacctgatggaacagagagctaagcaattggctgctttgacactggaagatgaagaagaagtaaagaaagaggctgatcctggagaaacaccatcagaggctccaagtgaagcgagaacgactccagcagaaaatggggtgaatcacactacaaccctgacacccaagccaccctcccaggctctccacagccagccagctccaggttctgtaaaggcacctgccaaaacagaagatcttattcagagtgtcttaacagaagtggaagcacagaccatcgaagaactaaagcaacagaaatcgtttgtgaaacttcaaaagaaacactacaaagaaatgaaagacctggttaagagacaccacaagaaaaccactgaccttatcaaagaacacactaccaagtataatgaaattcagaatgactacttgagaaggagagccgctttggaaaagtccgccaaaaaggacagtaagaaaaaatcggaacccagcagccctgatcatggttcatcaacgattgagcaagacctcgctgctctggatgctgaaatgacccaaaagttaatagacttgaaggacaaacaacagcagcagctgcttaatcttcggcaagaacagtattatagtgaaaaataccagaagcgagaacatattaaactgcttattcaaaagttgacggatgtcgcagaagagtgtcagaacaatcagttaaagaagctcaaagaaatctgtgagaaagaaaagaaagaattaaagaagaaaatggataaaaagaggcaggagaagataacagaagctaaatccaaagacaaaagtcagatggaagaggagaagacagagatgatccggtcatatatccaggaagtggtgcagtatatcaagaggctagaagaagcgcaaagtaaacggcaagaaaaactcgtagagaaacacaaggaaatacgtcagcagatcctggatgaaaagcccaagctgcaggtggagctggagcaagaataccaagacaaattcaaaagactgcccctcgagattttggaattcgtgcaggaagccatgaaaggaaagatcagtgaagacagcaatcacggttctgcccctctctccctgtcctcagaccctggaaaagtgaaccacaagactccctccagtgaggagctgggaggagacatcccaggaaaagaatttgatactcctctgtgaatgctcctgccaggccttcagaaattgcatggccactccagcgtcatcggactctctcttattacaaagatcactgcccaggaccatcttcccgagaagcatcccttagcctaaaatccacaccaaagggagagttccagaggaatccatgaagaattcccatgcccaggctccatgtgtcatgtggaaacctccacaggtctgctagtgaagaatgcatgtatgtgagatttttgttttctttccaatagcaaattcaaagcaagcaacttgcaggctccatggaacttttaatgaaggacagtgtcttctttgaagaaaatcaagctcgtgtttttattcgaagctctggtgtaaaatatttcaaagtcatagaaatagtttgagaaatgcatagcattatttaacactattgaacagccgactttgagcattgtttcttctaactgcccctcaactaccattatcttcaagtcaacatgcatattacattttcatcctttgctttgcaagcactggtggcttgcagtttgctaatttatttatcatagagtcatcaatgtatttgttgctgacatggttttattagatactgtagtgattcaaataagttttctatttgaaaaaaaaaatcacttgattgtatccttgcccagtgaagccatcctaagacttagcaatatggattgtacatttggctgcatgagcaagtcggccgcacacttccagacagtgtgctgtttgaattgactatttgcactcaaagtctgggtattcattggttattggcctgaaatgatcaaataactacaaatgatctgttgaataaaaatagttgagctgatatatgttaagcagatattcaatcagaatgaacaggttccggtggttattttgccgtttgacattttttatggttcatttatttttaatatagagaggaagattgaatatttatctagagaatacaaagacccacatgtaaatgataggtattatctccatgtatatatgtacccacttagtcatgtaagtgcatatacacatacacacacatgagtgtagacatgtgtttattaattgacaatgacccaaatctcttccacaagacttaaaaccaaattcagggacaaatggatagagaagaaaagggtcaaacatcgagattacatggatgttaaattatatggagacgctaagaaataattgatggagccattgatgcaaaccgaagtagatttagaacttatatgaatttgatttatattttgcaagatcaaaaattagatgttaagtatcagattttaagcttgttttaatggtcaaaaaattaggacagaaataatatggacatttattagtatcttccataatttttaagtctgacacatttctattttattctaacataaaaaaacttccattatatatttactaagtatatttaattcacttaactctgtctttataagttcctattttagatggaataagagaaacaaattatatcaaggtaaaactgatcaaaagcataattgaaagttctgaaaaaagaaaaataataatatgtagaaaaatgtaacttagagagtaacacatgaacattgaagttaaaacccagaagccagatgctcacagttttattttactttaaaataaacctgtctgactgtagctttgtgaaatatcttaaaacgcaaaaaccaattgtgtcctgaaaattgtttcaagaatttaatatttttatgaaaattattttatttaactttaagcaataactagagattacaattaaattttaatcaaaatgaaggcttagttcaaacataaggaaacagtgtttgattaaaaaaaacacatctagtaagacgtaaggggaaaatcacatcctctttggagatgattatattttgatctgaagggtttggggtgttcattagacacttaataaaacttaacttccaatgaaaaagaaatcttttgtaaatcattctacttttgcactttgaaagaaaggcgttaatcataaagaagcaagaatggtcaaaatcgaatgctgcatttttataaacaaaattacagactgtctgaaattgaagaagaatgaactaataatagcattcataaccaaacacaatgatgattattgcagaacattgtatcacattttagtccagagatagaataaagttgaataaccttgacttacacaaaactgttttggtagttggatttcattatcttagtgaatttagtcattttacaatatgtttgtatttggccatttactgtaatcacatttttatatctgtacaatgacactttttgcagttgtggggtagtgtgtaacactgtccatcttgcatcattgaaactactacaatgatactatcatttaataatattaatattacttgaaatagactaagataaagaaaaggggtctgtatgatgtgcagttttgtgcctttatgtatttgccttgttctttgtcgaatgtgtgaaattccgtactgtggtttttcctataatagaaagtagagctgtgtattaaattagactgtgtctctctgatacctttacactactgagaatagcatggttttggccatgtaaaccaattttcaaagttctaatgacatagccatgtgtttttggttttttatatttcattttaaaatttgagtatcaccatacattaattaatactcctgtagtagataagctgtcattaagtaattcccaaaaaaagggccatttgcttgcattactttgaatttaatgttgcgcttgtgcactgtgttaatattgtttgtgatggattggacgttgtgactcttgccttttaagaagaaaaaaaagataggacaaagtatttgaagctcttaaaatgtacatattttggttcttctatctcaaattatttaaaatgcataattcacatttttgtaataattctatgcaattttgtggcatgatgtttcttccacttgtaattttatgtgctttcatcacaaatccaaaggaaagaataaaaatttcttaacacaaccc

SEQ ID NO: 15816 - DNA, 3095 bp, Homo sapiens
  source 1..3095: mol_type = unassigned DNA
gctctctccctctgtgtatagaggatgtgctgaatggtgcgctttgaggcggcggcggcggaggagcagaatccgccgcgactggcagcctcggctgaccggctcggcttctcttcgccttccgaggctcctcatccaccgcgggctccagacctcgcgtcccgcccggggcatggccgggcgctgcgcccccgcgcgctctgcctgctgagcggcgccggagggaggtgcggaggccgggaggccggggaggccggcggggagcagagtcgagcgcctccggagcagagaaaggagcccgcgccccgcgccccgcgccccgcgcacggtccccagtccctgccgcgctcgcccgggccgcccggagcccagatgagcccagatggccggggctcaacccggagtgcacgccttgcaactcaagcccgtgtgcgtgtccgacagcctcaagaagggcaccaaattcgtcaagtgggatgatgactcaactattgttactccaattattttgaggactgaccctcagggatttttcttttactggacagatcaaaacaaggagacagagctactggatctcagccttgtcaaagatgccagatgtgggagacacgccaaagctcccaaggaccccaaattacgtgaacttttggatgtggggaacatcgggcgcctggagcagcgcatgatcacagtggtgtatgggcctgacctcgtgaacatctcccatttgaatctcgtggctttccaagaagaagtggccaaggaatggacaaatgaggttttcagtttggcaacaaacctgctggcccaaaacatgtccagggatgcatttctggaaaaagcctatactaaacttaagctgcaagtcactccagaagggcgtattcctctcaaaaacatatatcgcttgttttcagcagatcggaagcgagttgaaactgctttagaggcttgtagtcttccatcttcaagggtggaaaaagctaatgaggctgcgaaaagtgagcagagctgtggaaaggctcccccaaaacattttcaccttcattttataaagcaaaataaaatgcttgaacctgcttgctattgcttttttgttagatgctttggaataggaaaaatataacaattaaggtcctgtccccgacttcaacaaatatttcttgagctcttactatgtgcccataggcattgagaatatggtggtgaagaaaatgaaactcaaggtttcaaggacaatagagtcttctggggaaactagccaataagcatgccaacaaatgcgtctgtaaactgggggaagtgctataaaaagaaagactggagaactactattgagaagaagggaagctcattccagaaaaagaaaacaatgctcgcaaatccctgaggctggaaataatttccctactggatttaagcaactgagaaaagaccaccgcattcaagcataaagagaaaacatgagagatggatttgcaaagacatgcaaagaatttttttccttttgcaatcacttctgattttaccttttctggataacctctggtaaaatataataatcaaaatatttaacttatgaatctagctaagggaaagaaggaatagaaaattaaatgtatgaaccaattccccgtaaattgtaattttctaaacaactggattctgagcagtcaataaatacacattgagtaatctactatgtttattatatgttcaaactttcagaccaatgtcaattgcaggcaaatttaaaaggaaaatgagattcaaataacatgagttatgtttaaattagaaaaaattatctctaacaaattaaatgtaatgataattatctgaagttggagaaaactttaaaaaacctctatgctaaaactttgaaaaattattattcatagtaaagtataatttacttggatgacttatagaattagaatgctttttaaaaatctaaaaaccaaagactgtttcagagctaggaaataaatgtttctgtgaactgactatgatgtatcaaaactctgttttaaatctctgtgataatttcattcctacataacaatgactctagaaaatatccactaattagcaaaaaattttggccatattcacaagaggtattttaaacaagccacggaagaaaagggttatataaatcatagttggttctgcgtaaatgggagcatattttgtagccaagtcatttaagctagatttaattgtgctctgtaaatagatatattaccagaaacacagtggatgtcctgttgagatttctttttaaaacatgatattactgcacattgttggggataaataaggcacttgaacttgtatcctggctgacgtgatccactagaataacatattcctttagaagatgctactctttagaaatcacagttgctagcctgaagttaccctaattgttaaaaggtagtactgtatccaaagagagagacaaagcaattactgtccttctgttaacaacccaagcatattttccagtgagacccttgaaaactgttccgtgttcaaaaaattaccactttacccacaaactttctgagaactgaaaatagtttatttgcaccaaattcccttgatttaaggcttattaacttgaaaagagctcagtgacatctggaattgtataatagtcttgccacagcactggcatacggagttgcattttaacgaagaagatcaggaataaacccatgtatttgtttcaaataataaagtttactgtagttggtgggcacacatgtaatacaaagagaaattaattattttaaatttgaagaattgtataaattttactaaatactatgaataaaatgtataaaataacttctgtgtgtaacttattagtatgttgcctttcttctgtgccttacatcctgaatataaatcagaagcaatcacttttgtagttgtgattcttaatatgactaatatcaaaattctactttaaaaccaaattaagtattccgttcattatgagtgatttacttgtagttatttcatgtattccatggctaattcaatgttttatttatagtttcagaataaaaatattgacagta

SEQ ID NO: 15817 - DNA, 2930 bp, Homo sapiens
  source 1..2930: mol_type = unassigned DNA
gaggcggcggcggcggaggagcagaatccgccgcgactggcagcctcggctgaccggctcggcttctcttcgccttccgaggctcctcatccaccgcgggctccagacctcgcgtcccgcccggggcatggccgggcgctgcgcccccgcgcgctctgcctgctgagcggcgccggagggaggtgcggaggccgggaggccggggaggccggcggggagcagagtcgagcgcctccggagcagagaaaggagcccgcgccccgcgccccgcgccccgcgcacggtccccagtccctgccgcgctcgcccgggccgcccggagcccagatgagcccagatggccggggctcaacccggagtgcacgccttgcaactcaagcccgtgtgcgtgtccgacagcctcaagaagggcaccaaattcgtcaagtgggatgatgactcaactattgttactccaattattttgaggactgaccctcagggatttttcttttactggacagatcaaaacaaggagacagagctactggatctcagccttgtcaaagatgccagatgtgggagacacgccaaagctcccaaggaccccaaattacgtgaacttttggatgtggggaacatcgggcgcctggagcagcgcatgatcacagtggtgtatgggcctgacctcgtgaacatctcccatttgaatctcgtggctttccaagaagaagtggccaaggaatggacaaatgaggttttcagtttggcaacaaacctgctggcccaaaacatgtccagggatgcatttctggaaaaagcctatactaaacttaagctgcaagtcactccagaagggcgtattcctctcaaaaacagatcggaagcgagttgaaactgctttagaggcttgtagtcttccatcttcaaggaatgattcaatacctcaagaagatttcactccagaagtgtacagagttttcctcaacaacctttgccctcgacctgaaattgataacatcttttcagaatttggtgcaaaaagcaaaccatatcttaccgttgatcagatgatggattttatcaaccttaagcagcgagatcctcggcttaatgaaatactttatccacctctaaaacaagagcaagtccaagtattgattgagaagtatgaacccaacaacagcctcgccagaaaaggacaaatatcagtggatgggttcatgcgctatctgagtggagaagaaaacggagtcgtttcacctgagaaactggatttgaatgaagacatgtctcagcccctttctcactatttcattaattcctcgcacaacacctacctcacagctggccaactggctggaaactcctctgttgagatgtatcgccaagtgctcctgtctggttgtcgctgtgtggagctggactgctggaagggacggactgcagaagaggaacctgtcatcacccatggcttcaccatgacaactgaaatatctttcaaggaagtgatagaagcaattgcggagtgtgcatttaagacttcaccttttccaattctcctttcgtttgagaaccatgtggattccccaaagcagcaagccaagatggcggagtactgccgactgatctttggggatgcccttctcatggagcccctggaaaaatatccactggaatctggagttcctcttccaagccctatggatttaatgtataaaattttggtgaaaaataagaagaaatcacacaagtcatcagaaggaagcggcaaaaagaagctctcagaacaagcctccaacacctacagtgactcctccagcatgttcgagccctcatccccaggagccggagaagctgatacggaaagtgacgacgacgatgatgatgatgactgtaaaaaatcttcaatggatgaggggactgctggaagtgaggctatggccacagaagaaatgtctaatctggtgaactatattcagccagtcaagtttgagtcatttgaaatttcaaaaaaaagaaataaaagttttgaaatgtcttccttcgtggaaaccaaaggacttgaacaactcaccaagtctccagtggaatttgtagaatataacaaaatgcagcttagcaggatatatccaaaaggaacacgtgtggattcatccaactatatgcctcagctcttctggaatgcaggttgtcagatggtggcacttaatttccagacaatgggtaagtacatgcttgttcccattctgctatgaactcacattgccaagtgtccaaaaaccattcttacataattgggggagagaaaattgccagacttcactgaaaaaataaataaaagcaaatttcaatgaagggaatatcaatgcataaaaaaagtgaattttgaaaatcgagacatgttcttcaattattctgtaaatggatctttatttctacaggctttgcattatttttcaaacaaaaatttttatgctttttaagataatacatatttattttgaaaataatggaaaattcagtaagtattttaaaaacaaactgccaggaatgctaccaactcagagattccacagtgttgacttttagctttgtaatctatgtcttttttgtctacatataaatgctttttttatgtaactactcatttaaaataaatacatatatattcatatatacatatataaacacacactcacctaagtgccatagagagacatgaatttcaatagctgcatactaagcatatttcacaattcgctaaaaacttatttctattccctaaatttcttttggaaaatattttaaaaacagaattactaacgttaaaagatgtgaacagtttaagtacctttatgaatattgccaaattgtctgtaaaaaatgttgtgctacattactccgctgtcagcaatgtttaatatgacgtggcctctcatttgcgatct

SEQ ID NO: 15818 - DNA, 706 bp, Homo sapiens
  source 1..706: mol_type = unassigned DNA
ggggaggccggcggggagcagagtcgagcgcctccggagcagagaaaggagcccgcgccccgcgccccgcgccccgcgcacggtccccagtccctgccgcgctcgcccgggccgcccggagcccagatgagcccagatggccggggctcaacccggagtgcacgccttgcaactcaagcccgtgtgcgtgtccgacagcctcaagaagggcaccaaattcgtcaagtgggatgatgactcaactattgttactccaattattttgaggactgaccctcagggatttttcttttactggacagatcaaaacaaggagacagagctactggatctcagccttgtcaaagatgccagatgtgggagacacgccaaagctcccaaggaccccaaattacgtgaacttttggatgtggggaacatcgggcgcctggagcagcgcatgatcacagtggtgtatgggcctgacctcgtgaacatctcccatttgaatctcgtggctttccaagaagaagtggccaaggtatggtggatggaaattgctaaagcttatcatcatgatctgaatccttgagctatcatactaatgcctgcaaaagactgaatttttgtcatatttagcatgtgttaaaatttcacctaaaaataattcagctgccaagtataagtgcaattaaaatacttctaaataatggcatcaacttaagaa

SEQ ID NO: 15819 - DNA, 1260 bp, Homo sapiens
  source 1..1260: mol_type = unassigned DNA
gcggggagcagagtcgagcgcctccggagcagagaaaggagcccgcgccccgcgccccgcgccccgcgcacggtccccagtccctgccgcgctcgcccgggccgcccggagcccagatgagcccagatggccggggctcaacccggagtgcacgccttgcaactcaagcccgtgtgcgtgtccgacagcctcaagaagggcaccaaattcgtcaagtgggatgatgactcaactattgttactccaattattttgaggactgaccctcagggatttttcttttactggacagatcaaaacaaggagacagagctactggatctcagccttgtcaaagatgccagatgtgggagacacgccaaagctcccaaggaccccaaattacgtgaacttttggatgtggggaacatcgggcgcctggagcagcgcatgatcacagtggtgtatgggcctgacctcgtgaacatctcccatttgaatctcgtggctttccaagaagaagtggccaaggaatggacaaatgaggttttcagtttggcaacaaacctgctggcccaaaacatgtccagggatgcatttctggaaaaagcctatactaaacttaagctgcaagtcactccagaagggcgtattcctctcaaaaacatatatcgcttgttttcagcagatcggaagcgagttgaaactgctttagaggcttgtagtcttccatcttcaagggtgagcatgtgtgttatgctatagtttgaatgttcagcccctccaaaactcatgttgaaacttaatccccaatatgacagttttgagaggtagggcctttaagaggaaattaagagcttccatgattaatgggttaatgaattaatggattatcatcggagaggaactggtggctttataagaagagaaaaacagacctgagctagcatgttcttccccctcaccatctgattccctgtgccacctctgccaaagtggagagtccccactagcaagaagacttttgccagatgtgccctctccaccttggacttcccagcctttgtaactgtaggaaatacattttgattcctatatattatacagtttcaagtattctgctatatgcatcagaaaacagagtaagactgaaaattggtaccaagaggtggggtttttgctgataacaaatatctgaaaatgtagaagcagctttggaactgggtaatgaacagaggctgaaaaaagtttatagagctagctagaaacagccaagacttg

SEQ ID NO: 15820 - DNA, 3864 bp, Homo sapiens
  source 1..3864: mol_type = unassigned DNA
cagatggccggggctcaacccggagtgcacgccttgcaactcaagcccgtgtgcgtgtccgacagcctcaagaagggcaccaaattcgtcaagtgggatgatgactcaactattgttactccaattattttgaggactgaccctcagggatttttcttttactggacagatcaaaacaaggagacagagctactggatctcagccttgtcaaagatgccagatgtgggagacacgccaaagctcccaaggaccccaaattacgtgaacttttggatgtggggaacatcgggcgcctggagcagcgcatgatcacagtggtgtatgggcctgacctcgtgaacatctcccatttgaatctcgtggctttccaagaagaagtggccaaggaatggacaaatgaggttttcagtttggcaacaaacctgctggcccaaaacatgtccagggatgcatttctggaaaaagcctatactaaacttaagctgcaagtcactccagaagggcgtattcctctcaaaaacatatatcgcttgttttcagcagatcggaagcgagttgaaactgctttagaggcttgtagtcttccatcttcaaggaatgattcaatacctcaagaagatttcactccagaagtgtacagagttttcctcaacaacctttgccctcgacctgaaattgataacatcttttcagaatttggtgcaaaaagcaaaccatatcttaccgttgatcagatgatggattttatcaaccttaagcagcgagatcctcggcttaatgaaatactttatccacctctaaaacaagagcaagtccaagtattgattgagaagtatgaacccaacaacagcctcgccagaaaaggacaaatatcagtggatgggttcatgcgctatctgagtggagaagaaaacggagtcgtttcacctgagaaactggatttgaatgaagacatgtctcagcccctttctcactatttcattaattcctcgcacaacacctacctcacagctggccaactggctggaaactcctctgttgagatgtatcgccaagtgctcctgtctggttgtcgctgtgtggagctggactgctggaagggacggactgcagaagaggaacctgtcatcacccatggcttcaccatgacaactgaaatatctttcaaggaagtgatagaagcaattgcggagtgtgcatttaagacttcaccttttccaattctcctttcgtttgagaaccatgtggattccccaaagcagcaagccaagatggcggagtactgccgactgatctttggggatgcccttctcatggagcccctggaaaaatatccactggaatctggagttcctcttccaagccctatggatttaatgtataaaattttggtgaaaaataagaagaaatcacacaagtcatcagaaggaagcggcaaaaagaagctctcagaacaagcctccaacacctacagtgactcctccagcatgttcgagccctcatccccaggagccggagaagctgatacggaaagtgacgacgacgatgatgatgatgactgtaaaaaatcttcaatggatgaggggactgctggaagtgaggctatggccacagaagaaatgtctaatctggtgaactatattcagccagtcaagtttgagtcatttgaaatttcaaaaaaaagaaataaaagttttgaaatgtcttccttcgtggaaaccaaaggacttgaacaactcaccaagtctccagtggaatttgtagaatataacaaaatgcagcttagcaggatatatccaaaaggaacacgtgtggattcatccaactatatgcctcagctcttctggaatgcaggttgtcagatggtggcacttaatttccagacaatggacctggctatgcaaataaatatggggatgtatgaatacaacgggaagagtggctacagattgaagccagagttcatgaggaggcctgacaagcattttgatccatttactgaaggcatcgtagatgggatagtggcaaacactttgtctgttaagattatttcaggtcagtttctttctgataagaaagttgggacttacgtggaagtagatatgtttggtttgcctgtggatacaaggaggaaggcatttaagaccaaaacatcccaaggaaatgctgtgaatcctgtctgggaagaagaacctattgtgttcaaaaaggtggttcttcctactctggcctgtttgagaatagcagtttatgaagaaggaggtaaattcattggccaccgtatcttgccagtgcaagccattcggccaggctatcactatatctgtctaaggaatgaaaggaaccagcctctgacgctgcctgctgtctttgtctacatagaagtgaaagactatgtgccagacacatatgcagatgtcatcgaagctttatcaaacccaatccgatatgtgaacctgatggaacagagagctaagcaattggctgctttgacactggaagatgaagaagaagtaaagaaagaggctgatcctggagaaacaccatcagaggctccaagtgaagcgagaacgactccagcagaaaatggggtgaatcacactacaaccctgacacccaagccaccctcccaggctctccacagccagccagctccaggttctgtaaaggcacctgccaaaacagaagatcttattcagagtgtcttaacagaagtggaagcacagaccatcgaagaactaaagcaacagaaatcgtttgtgaaacttcaaaagaaacactacaaagaaatgaaagacctggttaagagacaccacaagaaaaccactgaccttatcaaagaacacactaccaagtataatgaaattcagaatgactacttgagaaggagagccgctttggaaaagtccgccaaaaaggacagtaagaaaaaatcggaacccagcagccctgatcatggttcatcaacgattgagcaagacctcgctgctctggatgctgaaatgacccaaaagttaatagacttgaaggacaaacaacagcagcagctgcttaatcttcggcaagaacagtattatagtgaaaaataccagaagcgagaacatattaaactgcttattcaaaagttgacggatgtcgcagaagagtgtcagaacaatcagttaaagaagctcaaagaaatctgtgagaaagaaaagaaagaattaaagaagaaaatggataaaaagaggcaggagaagataacagaagctaaatccaaagacaaaagtcagatggaagaggagaagacagagatgatccggtcatatatccaggaagtggtgcagtatatcaagaggctagaagaagcgcaaagtaaacggcaagaaaaactcgtagagaaacacaaggaaatacgtcagcagatcctggatgaaaagcccaagggggaaggttcctcctcattcttgtcggaaacttgccatgaggatccctctgtttcccccaactttactccccccaaccctcaagctctcaagtggtgaccaccgtccttccggccaggtaggactggatgggaggggtcgcttttgagagaagggtggtgtgtagccatccagttttcaggcatcacggacttgctcgtttgtccttcatcctccctttctctacattcccatcttttttttctgctaaagttcccagccacacccatgatcatttcctcatcctttctgccttcctctggtattaatttctccatcattgtgctctctcttcctgacataaatctcattcttccatattgtcttcttcctctttctccattttgtttctctattggcaaatttggcttcctttttaatctggattttctctcttgc

SEQ ID NO: 15821 - DNA, 857 bp, Homo sapiens
  source 1..857: mol_type = unassigned DNA
actattgttactccaattattttgaggactgaccctcagggatttttcttttactggacagatcaaaacaaggagacagagctactggatctcagccttgtcaaagatgccagatgtgggagacacgccaaagctcccaaggtaggaggttgagtgttgtgcatgcaccagatgctgccttgattgtttggctgtgtcacaatatcaattaattgccccaattaaaagtttctatgttatagatgttgtaaaacacaatagccagtatgccctaaacactttcacttttattaaaagacggaaacaatgaacaaatatgtgggctcttggacagaggggcttgctttatgtcctctaattttgcctttgtttgaaaaaaaaagacaacgacaacaatgcccaagttactgggtaattctaaatgattaaaaagtacttgaaattatttgaaaaaatctttgaacctcgtaaacatatgggaactaaccgttagacatgatgaatagaactcccatatagctgaaatgctctgcaattgaaatgattccatccacaatgccaaaaggtgtatagtcttaattctgcaaatgttactagtaaagatcagcatactttgggatgaattgtgtgcagtgtcatttgttttggtttgaaaaacttactgaagaaatattcaaagaagtgtttgcagtctgtttattttttgaagataatttttaaatattggatgaagaacataattttttaagcttagatgatctggtaggatatagtagcaggatatgttgtcttgccatcaaagttaaaagctattcttcattttatttaaaatttagtactttacatacttcatttct

SEQ ID NO: 15822 - DNA, 100 bp, Homo sapiens
  source 1..100: mol_type = unassigned DNA
ggactgaccctcagggatttttcttttactggacagatcaaaacaaggtaagaaatgaggagacagagctactggatctcagccttgtcaaagatgccag

SEQ ID NO: 15823 - DNA, 3020 bp, Homo sapiens
  source 1..3020: mol_type = unassigned DNA
atgatttgacttgaggcattcggaggctaaacatccacaaggagacagagctactggatctcagccttgtcaaagatgccagatgtgggagacacgccaaagctcccaaggaccccaaattacgtgaacttttggatgtggggaacatcgggcgcctggagcagcgcatgatcacagtggtgtatgggcctgacctcgtgaacatctcccatttgaatctcgtggctttccaagaagaagtggccaaggaatggacaaatgaggttttcagtttggcaacaaacctgctggcccaaaacatgtccagggatgcatttctggaaaaagcctatactaaacttaagctgcaagtcactccagaagggcgtattcctctcaaaaacatatatcgcttgttttcagcagatcggaagcgagttgaaactgctttagaggcttgtagtcttccatcttcaaggaatgattcaatacctcaagaagatttcactccagaagtgtacagagttttcctcaacaacctttgccctcgacctgaaattgataacatcttttcagaatttggtgcaaaaagcaaaccatatcttaccgttgatcagatgatggattttatcaaccttaagcagcgagatcctcggcttaatgaaatactttatccacctctaaaacaagagcaagtccaagtattgattgagaagtatgaacccaacaacagcctcgccagaaaaggacaaatatcagtggatgggttcatgcgctatctgagtggagaagaaaacggagtcgtttcacctgagaaactggatttgaatgaagacatgtctcagcccctttctcactatttcattaattcctcgcacaacacctacctcacagctggccaactggctggaaactcctctgttgagatgtatcgccaagtgctcctgtctggttgtcgctgtgtggagctggactgctggaagggacggactgcagaagaggaacctgtcatcacccatggcttcaccatgacaactgaaatatctttcaaggaagtgatagaagcaattgcggagtgtgcatttaagacttcaccttttccaattctcctttcgtttgagaaccatgtggattccccaaagcagcaagccaagatggcggagtactgccgactgatctttggggatgcccttctcatggagcccctggaaaaatatccactggaatctggagttcctcttccaagccctatggatttaatgtataaaattttggtgaaaaataagaagaaatcacacaagtcatcagaaggaagcggcaaaaagaagctctcagaacaagcctccaacacctacagtgactcctccagcatgttcgagccctcatccccaggagccggagaagctgatacggaaagtgacgacgacgatgatgatgatgactgtaaaaaatcttcaatggatgaggggactgctggaagtgaggctatggccacagaagaaatgtctaatctggtgaactatattcagccagtcaagtttgagtcatttgaaatttcaaaaaaaagaaataaaagttttgaaatgtcttccttcgtggaaaccaaaggacttgaacaactcaccaagtctccagtggaatttgtagaatataacaaaatgcagcttagcaggatatatccaaaaggaacacgtgtggattcatccaactatatgcctcagctcttctggaatgcaggttgtcagatggtggcacttaatttccagacaatggacctggctatgcaaataaatatggggatgtatgaatacaacgggaagagtggctacagattgaagccagagttcatgaggaggcctgacaagcattttgatccatttactgaaggcatcgtagatgggatagtggcaaacactttgtctgttaagattatttcaggtcagtttctttctgataagaaagttgggacttacgtggaagtagatatgtttggtttgcctgtggatacaaggaggaaggcatttaagaccaaaacatcccaaggaaatgctgtgaatcctgtctgggaagaagaacctattgtgttcaaaaaggtggttcttcctactctggcctgtttgagaatagcagtttatgaagaaggaggtaaattcattggccaccgtatcttgccagtgcaagccattcggccaggctatcactatatctgtctaaggaatgaaaggaaccagcctctgacgctgcctgctgtctttgtctacatagaagtgaaagactatgtgccagacacatatgcagatgtcatcgaagctttatcaaacccaatccgatatgtgaacctgatggaacagagagctaagcaattggctgctttgacactggaagatgaagaagaagtaaagaaagaggctgatcctggagaaacaccatcagaggctccaagtgaagcgagaacgactccagcagaaaatggggtgaatcacactacaaccctgacacccaagccaccctcccaggctctccacagccagccagctccaggttctgtaaaggcacctgccaaaacagaagatcttattcagagtgtcttaacagaagtggaagcacagaccatcgaagaactaaagcaacagaaatcgtttgtgaaacttcaaaagaaacactacaaagaaatgaaagacctggttaagagacaccacaagaaaaccactgaccttatcaaagaacacactaccaagtataatgaaattcagaatgactacttgagaaggagagccgctttggaaaagtccgccaaaaaggacagtaagaaaaaatcggaacccagcagccctgatcatggttcatcaacgattgagcaagacctcgctgctctggatgctgaaatgacccaaaagttaatagacttgaaggacaaacaacagcagcagctgcttaatcttcggcaagaacagtattatagtgaaaaataccagaagcgagaacatattaaactgcttattcaaaagttgacggatgtcgcagaagagtgtcagaacaat

SEQ ID NO: 15824 - DNA, 3237 bp, Homo sapiens
  source 1..3237: mol_type = unassigned DNA
gaggcattcggaggctaaacatccacaaggttagttccctgaacccctataaaccttgctatttatatctcttcctcaactctgaggccctcaccctacatcggctgcagtacagattcagcctttagcgacggaattatgtactgaaacactcatttctgtgccgctgcagtggttagctttgatttttatagagatgcacatgagaaaacagtctgagcctggagagtgacttgtgggctgctaaggagacagagctactggatctcagccttgtcaaagatgccagatgtgggagacacgccaaagctcccaaggaccccaaattacgtgaacttttggatgtggggaacatcgggcgcctggagcagcgcatgatcacagtggtgtatgggcctgacctcgtgaacatctcccatttgaatctcgtggctttccaagaagaagtggccaaggaatggacaaatgaggttttcagtttggcaacaaacctgctggcccaaaacatgtccagggatgcatttctggaaaaagcctatactaaacttaagctgcaagtcactccagaagggcgtattcctctcaaaaacatatatcgcttgttttcagcagatcggaagcgagttgaaactgctttagaggcttgtagtcttccatcttcaaggaatgattcaatacctcaagaagatttcactccagaagtgtacagagttttcctcaacaacctttgccctcgacctgaaattgataacatcttttcagaatttggtgcaaaaagcaaaccatatcttaccgttgatcagatgatggattttatcaaccttaagcagcgagatcctcggcttaatgaaatactttatccacctctaaaacaagagcaagtccaagtattgattgagaagtatgaacccaacaacagcctcgccagaaaaggacaaatatcagtggatgggttcatgcgctatctgagtggagaagaaaacggagtcgtttcacctgagaaactggatttgaatgaagacatgtctcagcccctttctcactatttcattaattcctcgcacaacacctacctcacagctggccaactggctggaaactcctctgttgagatgtatcgccaagtgctcctgtctggttgtcgctgtgtggagctggactgctggaagggacggactgcagaagaggaacctgtcatcacccatggcttcaccatgacaactgaaatatctttcaaggaagtgatagaagcaattgcggagtgtgcatttaagacttcaccttttccaattctcctttcgtttgagaaccatgtggattccccaaagcagcaagccaagatggcggagtactgccgactgatctttggggatgcccttctcatggagcccctggaaaaatatccactggaatctggagttcctcttccaagccctatggatttaatgtataaaattttggtgaaaaataagaagaaatcacacaagtcatcagaaggaagcggcaaaaagaagctctcagaacaagcctccaacacctacagtgactcctccagcatgttcgagccctcatccccaggagccggagaagctgatacggaaagtgacgacgacgatgatgatgatgactgtaaaaaatcttcaatggatgaggggactgctggaagtgaggctatggccacagaagaaatgtctaatctggtgaactatattcagccagtcaagtttgagtcatttgaaatttcaaaaaaaagaaataaaagttttgaaatgtcttccttcgtggaaaccaaaggacttgaacaactcaccaagtctccagtggaatttgtagaatataacaaaatgcagcttagcaggatatatccaaaaggaacacgtgtggattcatccaactatatgcctcagctcttctggaatgcaggttgtcagatggtggcacttaatttccagacaatggacctggctatgcaaataaatatggggatgtatgaatacaacgggaagagtggctacagattgaagccagagttcatgaggaggcctgacaagcattttgatccatttactgaaggcatcgtagatgggatagtggcaaacactttgtctgttaagattatttcaggtcagtttctttctgataagaaagttgggacttacgtggaagtagatatgtttggtttgcctgtggatacaaggaggaaggcatttaagaccaaaacatcccaaggaaatgctgtgaatcctgtctgggaagaagaacctattgtgttcaaaaaggtggttcttcctactctggcctgtttgagaatagcagtttatgaagaaggaggtaaattcattggccaccgtatcttgccagtgcaagccattcggccaggctatcactatatctgtctaaggaatgaaaggaaccagcctctgacgctgcctgctgtctttgtctacatagaagtgaaagactatgtgccagacacatatgcagatgtcatcgaagctttatcaaacccaatccgatatgtgaacctgatggaacagagagctaagcaattggctgctttgacactggaagatgaagaagaagtaaagaaagaggctgatcctggagaaacaccatcagaggctccaagtgaagcgagaacgactccagcagaaaatggggtgaatcacactacaaccctgacacccaagccaccctcccaggctctccacagccagccagctccaggttctgtaaaggcacctgccaaaacagaagatcttattcagagtgtcttaacagaagtggaagcacagaccatcgaagaactaaagcaacagaaatcgtttgtgaaacttcaaaagaaacactacaaagaaatgaaagacctggttaagagacaccacaagaaaaccactgaccttatcaaagaacacactaccaagtataatgaaattcagaatgactacttgagaaggagagccgctttggaaaagtccgccaaaaaggacagtaagaaaaaatcggaacccagcagccctgatcatggttcatcaacgattgagcaagacctcgctgctctggatgctgaaatgacccaaaagttaatagacttgaaggacaaacaacagcagcagctgcttaatcttcggcaagaacagtattatagtgaaaaataccagaagcgagaacatattaaactgcttattcaaaagttgacggatgtcgcagaagagtgtcagaacaatcagttaaaga

SEQ ID NO: 15825 - DNA, 100 bp, Homo sapiens
  source 1..100: mol_type = unassigned DNA
tgccacctgcaggagacagagctactggatctcagccttgtcaaagatgccagatgtgggagacacgccaaagctcccaaggaccccaaattacgtgaac

SEQ ID NO: 15826 - DNA, 598 bp, Homo sapiens
  source 1..598: mol_type = unassigned DNA
attcaaaagtaagaacaagaagacctgattcatcatgatttaggaatggcttgtaggatagactggggacataaccacacactttttgctttcaaaatgtataactgagcagttagcagttagctgtcttttgtttccaacctaattcaattgagaagtgatataagaggaaagaaatatcccaactgcagagaagtcttcagtcaagtctcaagataatttttttaagtgatgtcaatgacataaaacaaagaggaaaggtctgtgtcgttgcttaacgatttcacgtttttgccttccaggagacagagctactggatctcagccttgtcaaagatgccagatgtgggagacacgccaaagctcccaaggaccccaaattacgtgaacttttggatgtggggaacatcgggcgcctggagcagcgcatgatcacagtggtgtatgggcctgacctcgtgaacatctcccatttgaatctcgtggctttccaagaagaagtggccaaggaatggacaaatgaggttttcagtttggcaacaaacctgctggcccaaaacatgtccagggatgcatttctggaaaaagcctatactaa

SEQ ID NO: 15827 - DNA, 560 bp, Homo sapiens
  source 1..560: mol_type = unassigned DNA
agtttgatctcagactgctgtgctagcaaccagcgagactccgtgggcgtaggaccctccgagccaggaccccaaattacgtgaacttttggatgtggggaacatcgggcgcctggagcagcgcatgatcacagtggtgtatgggcctgacctcgtgaacatctcccatttgaatctcgtggctttccaagaagaagtggccaaggaatggacaaatgaggttttcagtttggcaacaaacctgctggcccaaaacatgtccagggatgcatttctggaaaaagcctatactaaacttaagctgcaagtcactccagaagggcgtattcctctcaaaaacatatatcgcttgttttcagcagatcggaagcgagttgaaactgctttagaggcttgtagtcttccatcttcaaggtggtgcaaaaagcaaaccatatcttaccgttgatcagatgatggattttatcaaccttaagcagcgagatcctcggcttaatgaaatactttatccacctctaaaacaagagcaagtccaagtattgattgagaagtatgaaccc

SEQ ID NO: 15828 - DNA, 2996 bp, Homo sapiens
  source 1..2996: mol_type = unassigned DNA
agactgctgtgctagcaaccagcgagactccgtgggcgtaggaccctccgagccaggaccccaaattacgtgaacttttggatgtggggaacatcgggcgcctggagcagcgcatgatcacagtggtgtatgggcctgacctcgtgaacatctcccatttgaatctcgtggctttccaagaagaagtggccaaggaatggacaaatgaggttttcagtttggcaacaaacctgctggcccaaaacatgtccagggatgcatttctggaaaaagcctatactaaacttaagctgcaagtcactccagaagggcgtattcctctcaaaaacatatatcgcttgttttcagcagatcggaagcgagttgaaactgctttagaggcttgtagtcttccatcttcaaggaatgattcaatacctcaagaagatttcactccagaagtgtacagagttttcctcaacaacctttgccctcgacctgaaattgataacatcttttcagaatttggtgcaaaaagcaaaccatatcttaccgttgatcagatgatggattttatcaaccttaagcagcgagatcctcggcttaatgaaatactttatccacctctaaaacaagagcaagtccaagtattgattgagaagtatgaacccaacaacagcctcgccagaaaaggacaaatatcagtggatgggttcatgcgctatctgagtggagaagaaaacggagtcgtttcacctgagaaactggatttgaatgaagacatgtctcagcccctttctcactatttcattaattcctcgcacaacacctacctcacagctggccaactggctggaaactcctctgttgagatgtatcgccaagtgctcctgtctggttgtcgctgtgtggagctggactgctggaagggacggactgcagaagaggaacctgtcatcacccatggcttcaccatgacaactgaaatatctttcaaggaagtgatagaagcaattgcggagtgtgcatttaagacttcaccttttccaattctcctttcgtttgagaaccatgtggattccccaaagcagcaagccaagatggcggagtactgccgactgatctttggggatgcccttctcatggagcccctggaaaaatatccactggaatctggagttcctcttccaagccctatggatttaatgtataaaattttggtgaaaaataagaagaaatcacacaagtcatcagaaggaagcggcaaaaagaagctctcagaacaagcctccaacacctacagtgactcctccagcatgttcgagccctcatccccaggagccggagaagctgatacggaaagtgacgacgacgatgatgatgatgactgtaaaaaatcttcaatggatgaggggactgctggaagtgaggctatggccacagaagaaatgtctaatctggtgaactatattcagccagtcaagtttgagtcatttgaaatttcaaaaaaaagaaataaaagttttgaaatgtcttccttcgtggaaaccaaaggacttgaacaactcaccaagtctccagtggaatttgtagaatataacaaaatgcagcttagcaggatatatccaaaaggaacacgtgtggattcatccaactatatgcctcagctcttctggaatgcaggttgtcagatggtggcacttaatttccagacaatggacctggctatgcaaataaatatggggatgtatgaatacaacgggaagagtggctacagattgaagccagagttcatgaggaggcctgacaagcattttgatccatttactgaaggcatcgtagatgggatagtggcaaacactttgtctgttaagattatttcaggtcagtttctttctgataagaaagttgggacttacgtggaagtagatatgtttggtttgcctgtggatacaaggaggaaggcatttaagaccaaaacatcccaaggaaatgctgtgaatcctgtctgggaagaagaacctattgtgttcaaaaaggtggttcttcctactctggcctgtttgagaatagcagtttatgaagaaggaggtaaattcattggccaccgtatcttgccagtgcaagccattcggccaggctatcactatatctgtctaaggaatgaaaggaaccagcctctgacgctgcctgctgtctttgtctacatagaagtgaaagactatgtgccagacacatatgcagatgtcatcgaagctttatcaaacccaatccgatatgtgaacctgatggaacagagagctaagcaattggctgctttgacactggaagatgaagaagaagtaaagaaagaggctgatcctggagaaacaccatcagaggctccaagtgaagcgagaacgactccagcagaaaatggggtgaatcacactacaaccctgacacccaagccaccctcccaggctctccacagccagccagctccaggttctgtaaaggcacctgccaaaacagaagatcttattcagagtgtcttaacagaagtggaagcacagaccatcgaagaactaaagcaacagaaatcgtttgtgaaacttcaaaagaaacactacaaagaaatgaaagacctggttaagagacaccacaagaaaaccactgaccttatcaaagaacacactaccaagtataatgaaattcagaatgactacttgagaaggagagccgctttggaaaagtccgccaaaaaggacagtaagaaaaaatcggaacccagcagccctgatcatggttcatcaacgattgagcaagacctcgctgctctggatgctgaaatgacccaaaagttaatagacttgaaggacaaacaacagcagcagctgcttaatcttcggcaagaacagtattatagtgaaaaataccagaagcgagaacatattaaactgcttattcaaaagttgacggatgtcgcagaagagtgtcagaacaatcagttaaagaagctcaaagaaatctgtgag

SEQ ID NO: 15829 - DNA, 100 bp, Homo sapiens
  source 1..100: mol_type = unassigned DNA
cttcatcacactcatatataaaagaaagaaaccttgaaaatgagaggaccccaaattacgtgaacttttggatgtggggaacatcgggcgcctggagcag

SEQ ID NO: 15830 - DNA, 118 bp, Homo sapiens
  source 1..118: mol_type = unassigned DNA
ctctttgtgtattctctgaaagtctgaaaacaactgaggacaacttgaaggaccccaaattacgtgaacttttggatgtggggaacatcgggcgcctggagcagcgcatgatcacagt

SEQ ID NO: 15831 - DNA, 443 bp, Homo sapiens
  source 1..443: mol_type = unassigned DNA
cagcagatcggaagcgagttgaaactgctttagaggcttgtagtcttccatcttcaagggcattgagaatatggtggtgaagaaaatgaaactcaaggtttcaaggacaatagagtcttctggggaaactagccaataagcatgccaacaaatgcgtctgtaaactgggggaagtgctataaaaagaaagactggagaactactattgagaagaagggaagctcattccagaaaaagaaaacaatgctcgcaaatccctgaggctggaaataatttccctactggatttaagcaactgagaaaagaccaccgcattcaagcataaagagaaaacatgagagatggatttgcaaagacatgcaaagaatttttttccttttgcaatcacttctgattttaccttttctggataacctctggtaaaatataataatcaaaatatt

SEQ ID NO: 15832 - DNA, 4781 bp, Homo sapiens
  source 1..4781: mol_type = unassigned DNA
aaatactttatccacctctaaaacaagagcaagtccaagtattgattgagaagtatgaacccaacaacagcctcgccagaaaaggacaaatatcagtggatgggttcatgcgctatctgagtggagaagaaaacggagtcgtttcacctgagaaactggatttgaatgaagacatgtctcagcccctttctcactatttcattaattcctcgcacaacacctacctcacagctggccaactggctggaaactcctctgttgagatgtatcgccaagtgctcctgtctggttgtcgctgtgtggagctggactgctggaagggacggactgcagaagaggaacctgtcatcacccatggcttcaccatgacaactgaaatatctttcaaggaagtgatagaagcaattgcggagtgtgcatttaagacttcaccttttccaattctcctttcgtttgagaaccatgtggattccccaaagcagcaagccaagatggcggagtactgccgactgatctttggggatgcccttctcatggagcccctggaaaaatatccactggaatctggagttcctcttccaagccctatggatttaatgtataaaattttggtgaaaaataagaagaaatcacacaagtcatcagaaggaagcggcaaaaagaagctctcagaacaagcctccaacacctacagtgactcctccagcatgttcgagccctcatccccaggagccggagaagctgatacggaaagtgacgacgacgatgatgatgatgactgtaaaaaatcttcaatggatgaggggactgctggaagtgaggctatggccacagaagaaatgtctaatctggtgaactatattcagccagtcaagtttgagtcatttgaaatttcaaaaaaaagaaataaaagttttgaaatgtcttccttcgtggaaaccaaaggacttgaacaactcaccaagtctccagtggaatttgtagaatataacaaaatgcagcttagcaggatatatccaaaaggaacacgtgtggattcatccaactatatgcctcagctcttctggaatgcaggttgtcagatggtggcacttaatttccagacaatggacctggctatgcaaataaatatggggatgtatgaatacaacgggaagagtggctacagattgaagccagagttcatgaggaggcctgacaagcattttgatccatttactgaaggcatcgtagatgggatagtggcaaacactttgtctgttaagattatttcaggtcagtttctttctgataagaaagttgggacttacgtggaagtagatatgtttggtttgcctgtggatacaaggaggaaggcatttaagaccaaaacatcccaaggaaatgctgtgaatcctgtctgggaagaagaacctattgtgttcaaaaaggtggttcttcctactctggcctgtttgagaatagcagtttatgaagaaggaggtaaattcattggccaccgtatcttgccagtgcaagccattcggccaggctatcactatatctgtctaaggaatgaaaggaaccagcctctgacgctgcctgctgtctttgtctacatagaagtgaaagactatgtgccagacacatatgcagatgtcatcgaagctttatcaaacccaatccgatatgtgaacctgatggaacagagagctaagcaattggctgctttgacactggaagatgaagaagaagtaaagaaagaggctgatcctggagaaacaccatcagaggctccaagtgaagcgagaacgactccagcagaaaatggggtgaatcacactacaaccctgacacccaagccaccctcccaggctctccacagccagccagctccaggttctgtaaaggcacctgccaaaacagaagatcttattcagagtgtcttaacagaagtggaagcacagaccatcgaagaactaaagcaacagaaatcgtttgtgaaacttcaaaagaaacactacaaagaaatgaaagacctggttaagagacaccacaagaaaaccactgaccttatcaaagaacacactaccaagtataatgaaattcagaatgactacttgagaaggagagccgctttggaaaagtccgccaaaaaggacagtaagaaaaaatcggaacccagcagccctgatcatggttcatcaacgattgagcaagacctcgctgctctggatgctgaaatgacccaaaagttaatagacttgaaggacaaacaacagcagcagctgcttaatcttcggcaagaacagtattatagtgaaaaataccagaagcgagaacatattaaactgcttattcaaaagttgacggatgtcgcagaagagtgtcagaacaatcagttaaagaagctcaaagaaatctgtgagaaagaaaagaaagaattaaagaagaaaatggataaaaagaggcaggagaagataacagaagctaaatccaaagacaaaagtcagatggaagaggagaagacagagatgatccggtcatatatccaggaagtggtgcagtatatcaagaggctagaagaagcgcaaagtaaacggcaagaaaaactcgtagagaaacacaaggaaatacgtcagcagatcctggatgaaaagcccaagggggaaggttcctcctcattcttgtcggaaacttgccatgaggatccctctgtttcccccaactttactccccccaaccctcaagctctcaagtggtgaccaccgtccttccggccagtcatgacaagaaataattggcttgtgagaatcaacattgaagctggaaaaatgatggcatccgaacaagtagacacagccctagtcaaggcaataaactacactaaagacagaggagaaagactcaaagttgttctaacatgtgagtacctaggggtgctgcatgccgttgtgtggtttgtgtactgcatagttgtactcagccaaggaagtggatgaggccacagctttaacatgggctgctgtctgcccagaaggataatcttttccttattttatatctcatttcaggggttctccaacttctgaaatccatccagaaactccctgtatttgggtaacagtattataactttttgcaccagggcttttttgtttgtttgttaatattaattgatttttcttatgttctttatgaaagaataactcatccattaatgaaaccaaatgtgaacttagtgccttctgtgtagaaaaggctaggaatacatattgtgggagattcattacatcactggccttaatactacaccttctcatgttcccccttggctgtgtaactttctagtgtccatatgctctctcttggggtggccagtgtgacttgctttggccaatgggatattagcaaccatgacataacccgaggcttataaagttgcctgctcattgggacttgtttcactgttgcatcccagttattcacatcactccagctgacagccaaccaacaaacagccagacacgtgagcccaaccaagatcagaagaactgtcccactgagcatagtctaaattgctaacatgcaaatgcatgaaacagaccacagcaaggtaatcttacagcccaggactcagctgctgcaatctctgtgaaaggttctgctcatgaaacagagacaaccatgtgtggtgcctgcattcttggcctgcggggagtggaaaggagacaaagagtaaaacacggtgggaaagaagaaaaagaggttaagaaaagcaaatgtgcctactccaggtaattttgacttagggaccctgattaacttacacactaattaaaccatttccagattttgtgcagtctgaaagcagcccattttccccaacaccaggtcgctcaagatgaccacaggaaggttgtcatcttcatgtctaaaagccagttgacactcaagggtgtcatttcacttcagtgaaatgagaagcttcacagatgtgtagactctgaaaaatctaactggaaaacaatacagggaaatagcaatactaggcatcaaagcagcaaaaaaactactcaattatctgatatggggattatcaatggaataaatgtggggtttgttgtttgttgttgggattgttgtgggttttgtttcattttttagggtctcacttttctccaccaattagatctgtgctgtgagccacacaggttttgagtacatgttttgggactttatatcggtcagactttgccatggtaacactgtgtaacgagcagccccaaaaatctcagtggtggtcaaaagcaaacctttatttctcattcatgggttttcagtttgttcaggctaaaagtaaaatacacagattcttcacctgtctttcattccatgctgaaggagcaattgactgcctgggacatacttttctcataacagaggcaagggtgaaaaacaccaagtcatcttgattatgcaatcccatttttaatgtaaacaatgtcatgtctgcttctatttcattgagcaaagcaagtcatataggcaagcccaacatcagtggggtgataaagcacactctccaatggaaggaggaggggagcatgatcatttgctgaacagtaatgcaagatagcacaagacttgtctggggtgagagagagatcaaagctgtggatcccacccagtcttcaaccaaagcaatgtggctttgacctgttttctgtcttggacttgaataatactttatttgaaagaagtgttaaattgtttattaaaaaaaaagacaagtttgaaaa

SEQ ID NO: 15833 - DNA, 2338 bp, Homo sapiens
  source 1..2338: mol_type = unassigned DNA
ttacaaatttcacttgataatttacatggaaatatgaaagggttctttctccaagtgtcttgcaattgacttggaatcagcgagttaaacaaaagggactgagcctctaactctgggaatttcaaggctccagttacagcaaatgacatgctgtcccctccacctatgtctatgcaggtctgccttgggaaccacctcacacatcagtgccttcgctgtccatctgtgtatgttattcaaattcacataagttaagataaagatccaggatgataaaaaccaatcctgatgggtgggattagagaattacttctttctgtagttaataacacaaagcaatcctgttcaggttctttggataagcctccctactttccttcttctgttcttgttctcccttagcccaaagcagcaagccaagatggcggagtactgccgactgatctttggggatgcccttctcatggagcccctggaaaaatatccactggaatctggagttcctcttccaagccctatggatttaatgtataaaattttggtgaaaaataagaagaaatcacacaagtcatcagaaggaagcggcaaaaagaagctctcagaacaagcctccaacacctacagtgactcctccagcatgttcgagccctcatccccaggagccggagaagctgatacggaaagtgacgacgacgatgatgatgatgactgtaaaaaatcttcaatggatgaggggactgctggaagtgaggctatggccacagaagaaatgtctaatctggtgaactatattcagccagtcaagtttgagtcatttgaaatttcaaaaaaaagaaataaaagttttgaaatgtcttccttcgtggaaaccaaaggacttgaacaactcaccaagtctccagtggaatttgtagaatataacaaaatgcagcttagcaggatatatccaaaaggaacacgtgtggattcatccaactatatgcctcagctcttctggaatgcaggttgtcagatggtggcacttaatttccagacaatggacctggctatgcaaataaatatggggatgtatgaatacaacgggaagagtggctacagattgaagccagagttcatgaggaggcctgacaagcattttgatccatttactgaaggcatcgtagatgggatagtggcaaacactttgtctgttaagattatttcaggtcagtttctttctgataagaaagttgggacttacgtggaagtagatatgtttggtttgcctgtggatacaaggaggaaggcatttaagaccaaaacatcccaaggaaatgctgtgaatcctgtctgggaagaagaacctattgtgttcaaaaaggtggttcttcctactctggcctgtttgagaatagcagtttatgaagaaggaggtaaattcattggccaccgtatcttgccagtgcaagccattcggccaggctatcactatatctgtctaaggaatgaaaggaaccagcctctgacgctgcctgctgtctttgtctacatagaagtgaaagactatgtgccagacacatatgcagatgtcatcgaagctttatcaaacccaatccgatatgtgaacctgatggaacagagagctaagcaattggctgctttgacactggaagatgaagaagaagtaaagaaagaggctgatcctggagaaacaccatcagaggctccaagtgaagcgagaacgactccagcagaaaatggggtgaatcacactacaaccctgacacccaagccaccctcccaggctctccacagccagccagctccaggttctgtaaaggcacctgccaaaacagaagatcttattcagagtgtcttaacagaagtggaagcacagaccatcgaagaactaaagcaacagaaatcgtttgtgaaacttcaaaagaaacactacaaagaaatgaaagacctggttaagagacaccacaagaaaaccactgaccttatcaaagaacacactaccaagtataatgaaattcagaatgactacttgagaaggagagccgctttggaaaagtccgccaaaaaggacagtaagaaaaaatcggaacccagcagccctgatcatggttcatcaacgattgagcaagacctcgctgctctggatgctgaaatgacccaaaagttaatagacttgaaggacaaacaacagcagcagctgcttaatcttcggcaagaacagtattatagtgaaaaataccagaagcgagaacatattaaactgcttattcaaaagttgacggatgtcgcagaagagtgtcagaacaatcagttaaagaagctcaaagaaatctgtgag

SEQ ID NO: 15834 - DNA, 100 bp, Homo sapiens
  source 1..100: mol_type = unassigned DNA
ggaaaattttgaccagtaacctttgtccactggaaaagagtctatgtagaattagatgttaattacctggctatgcaaataaatatggggatgtatgaat

SEQ ID NO: 15835 - DNA, 1819 bp, Homo sapiens
  source 1..1819: mol_type = unassigned DNA
attatttcaggtcagtttctttctgataagaaagttgggacttacgtggaagtagatatgtttggtttgcctgtggatacaaggaggaaggcatttaagaccaaaacatcccaaggaaatgctgtgaatcctgtctgggaagaagaacctattgtgttcaaaaaggtggttcttcctactctggcctgtttgagaatagcagtttatgaagaaggaggtaaattcattggccaccgtatcttgccagtgcaagccattcggccaggctatcactatatctgtctaaggaatgaaaggaaccagcctctgacgctgcctgctgtctttgtctacatagaagtgaaagactatgtgccagacacatatgcagatgtcatcgaagctttatcaaacccaatccgatatgtgaacctgatggaacagagagctaagcaattggctgctttgacactggaagatgaagaagaagtaaagaaagagggtggatttctgcatgatgaaattatgagactcacccgtaatacgctggaaaaactgatggccttacctcttacccatgtggtgcccatccaaagcaagatgctgtcataagttttagtagagacgggatttcaccatgttagccaggatggtctcgatctcctgacctcgggatccacccgcctcggcctcccaaagtgctgggattacaggcatgagccaccgcgcccggccggaactgcactcttcagatgactcagacaaggaaagcatgatccaacacctctaatagcccagtaatacatatgatatttgaaaggcccttcacttaccatgttaaccattcagttaaatcctccaaatcctaattctctgctgctcaaccatcagatccaaactttcaatgcccaggacggaaatcttttcaaccagcacatcaaatggcttttcctccttctatagaacttataaaaatgatcttttcagttaccattttactggtccatctgtattctattttcagtgcacttctgttcattttggaattaggaagcgtacaaattctttttatatttaattttaacattcaagttaggcatattttgaagaaaaagatattgcaatgattgcatttgtccactagagggcaggaacttacttctgtggttcattctgcactttttttttcactacccacctaagaaaaatctagtcaatgcgactgaagtactaccaccttctgaatcttctttccttgataattgcttaattggaatttaaatctttgaatcaaattaagaaactagacattcctagtttctgtttctatcacaatttccagtaccagatttttattcactcataaaaacaaataatgggggagaaataaaatattgacttctgctgattctcttgagtgggataaggaatttggtttttgcactttggcttacagatccatatagtggaattattcgatctttcaattataatatcagaaagttcaattttagtattgtactcctataggtgctttttttcatttttcagccattgttttgcttaacttatttaactttgtatgtacggatgcctttttagtgcaacagggtagttctttgagaattatgtttacatgtagacatctctatctcagcagcaagttaagttattattacggttccttaagctgctgttatcatagagtggactgctgtaatagaaaaatttagtctttagcatatagtccatattcaaatacttgttcacagtttcctgtgtgacctctggcaagttacatgacttttaataaagtttttagtaaagacttttaataaca

SEQ ID NO: 15836 - DNA, 830 bp, Homo sapiens
  source 1..830: mol_type = unassigned DNA
agcaacagaaatcgtttgtgaaacttcaaaagaaacactacaaagaaatgaaagacctggttaagagacaccacaagaaaaccactgaccttatcaaagaacacactaccaagtataatgaaattcagaatgactacttgagaaggagagccgctttggaaaagtccgccaaaaaggacagtaagaaaaaatcggaacccagcagccctgatcatggttcatcaacgattgagcaagacctcgctgctctggatgctgaaatgacccaaaagttaatagacttgaaggacaaacaacagcagcagctgcttaatcttcggcaagaacagtattatagtgaaaaataccagaagcgagaacatattaaactgcttattcaaaagttgacggatgtcgcagaagagtgtcagaacaatcagttaaagaagctcaaagaaatctgtgagaaagaaaagaaagaattaaagaagaaaatggataaaaagaggcaggagaagataacagaagctaaatccaaagacaaaagtcagatggaagaggagaagacagagatgatccggtcatatatccaggaagtggtgcagtatatcaagaggctagaagaagcgcaaagtaaacggcaagaaaaactcgtagagaaacacaaggaaatacgtcagcagatcctggatgaaaagcccaaggttgctccatgaccatctttttgtgtctggatttgaaggttgcccatgaagattgttggttccatgtcaaactaaagcatttcttgagggtttttcttcatggcttaaaaacgttgtgccttaaagctgtgattttattaataaaat

SEQ ID NO: 15837 - DNA, 2291 bp, Homo sapiens
  source 1..2291: mol_type = unassigned DNA
tatcaaagaacacactaccaagtataatgaaattcagaatgactacttgagaaggagagccgctttggaaaagtccgccaaaaaggacagtaagaaaaaatcggaacccagcagccctgatcatggttcatcaacgattgagcaagacctcgctgctctggatgctgaaatgacccaaaagttaatagacttgaaggacaaacaacagcagcagctgcttaatcttcggcaagaacagtattatagtgaaaaataccagaagcgagaacatattaaactgcttattcaaaagttgacggatgtcgcagaagagtgtcagaacaatcagttaaagaagctcaaagaaatctgtgagaaagaaaagaaagaattaaagaagaaaatggataaaaagaggcaggagaagataacagaagctaaatccaaagacaaaagtcagatggaagaggagaagacagagatgatccggtcatatatccaggaagtggtgcagtatatcaagaggctagaagaagcgcaaagtaaacggcaagaaaaactcgtagagaaacacaaggaaatacgtcagcagatcctggatgaaaagcccaagtcatgacaagaaataattggcttgtgagaatcaacattgaagctggaaaaatgatggcatccgaacaagtagacacagccctagtcaaggcaataaactacactaaagacagaggagaaagactcaaagttgttctaacatttattcacatcactccagctgacagccaaccaacaaacagccagacacgtgagcccaaccaagatcagaagaactgtcccactgagcatagtctaaattgctaacatgcaaatgcatgaccacagcaaggtaatcttacagcccaggactcagctgctgcaatctctgtgaaaggtacttatgactaatgctgatgccaccatgaagctcaggaaacaatttacagggacatgggctgttctgagaccccacagccatgaatcgcctaatcattctgacagatttctgcagatgctgtgctcaggtcactgagtttcccagttgtcagtggtgaactggagcggaggcagaaggaaactcttcagacacactgttcccttcaggaaacaagggacaaaagggctgccctgaggagacttgggaaagtgacatttcctcaggctcgaggacatcccgaggttctgctcatgaaacagagacaaccatgtgtggtgcctgcattcttggcctgcggggagtggaaaggagacaaagagtaaaacacggtgggaaagaagaaaaagaggttaagaaaagcaaatgtgcctactccaggtaattttgacttagggaccctgattaacttacacactaattaaaccatttccagattttgtgcagtctgaaagcagcccattttccccaacaccaggtcgctcaagatgaccacaggaaggttgtcatcttcatgtctaaaagccagttgacactcaagggtgtcatttcacttcagtgaaatgagaagcttcacagatgtgtagactctgaaaaatctaactggaaaacaatacagggaaatagcaatactaggcatcaaagcagcaaaaaaactactcaattatctgatatggggattatcaatggaataaatgtggggtttgttgtttgttgttgggattgttgtgggttttgtttcattttttagggtctcacttttctccaccaattagatctgtgctgtgagccacacaggttttgagtacatgttttgggactttatatcggtcagactttgccatggtaacactgtgtaacgagcagccccaaaaatctcagtggtggtcaaaagcaaacctttatttctcattcatgggttttcagtttgttcaggctaaaagtaaaatacacagattcttcacctgtctttcattccatgctgaaggagcaattgactgcctgggacatacttttctcataacagaggcaagggtgaaaaacaccaagtcatcttgattatgcaatcccatttttaatgtaaacaatgtcatgtctgcttctatttcattgagcaaagcaagtcatataggcaagcccaacatcagtggggtgataaagcacactctccaatggaaggaggaggggagcatgatcatttgctgaacagtaatgcaagatagcacaagacttgtctggggtgagagagagatcaaagctgtggatcccacccagtcttcaaccaaagcaatgtggctttgacctgttttctgtcttggacttgaataatactttatttgaaaga

SEQ ID NO: 15838 - DNA, 321 bp, Homo sapiens
  source 1..321: mol_type = unassigned DNA
atccaggaagtggtgcagtatatcaagaggctagaagaagcgcaaagtaaacggcaagaaaaactcgtagagaaacacaaggaaatacgtcagcagatcctggatgaaaagcccaaggtaccatgatgaattcctctgtgcttttcttccatgaggttgctccatgaccatctttttgtgtctggatttgaaggttgcccatgaagattgttggttccatgtcaaactaaagcatttcttgagggtttttcttcatggcttaaaaacgttgtgccttaaagctgtgattttattaataaaataataaatcatgactgttaa

SEQ ID NO: 15839 - DNA, 122 bp, Homo sapiens
  source 1..122: mol_type = unassigned DNA
cggcaagaaaaactcgtagagaaacacaaggaaatacgtcagcagatcctggatgaaaagcccaagatccagaccgtgaactcagtcatgagatggctgccctagctccacacatcataacc

SEQ ID NO: 15840 - DNA, 3316 bp, Homo sapiens
  source 1..3316: mol_type = unassigned DNA
caaggaaatacgtcagcagatcctggatgaaaagcccaaggtggagctggagcaagaataccaagacaaattcaaaagactgcccctcgagattttggaattcgtgcaggaagccatgaaaggaaagatcagtgaagacagcaatcacggttctgcccctctctccctgtcctcagaccctggaaaagtgaaccacaagactccctccagtgaggagctgggaggagacatcccaggaaaagaatttgatactcctctgtgaatgctcctgccaggccttcagaaattgcatggccactccagcgtcatcggactctctcttattacaaagatcactgcccaggaccatcttcccgagaagcatcccttagcctaaaatccacaccaaagggagagttccagaggaatccatgaagaattcccatgcccaggctccatgtgtcatgtggaaacctccacaggtctgctagtgaagaatgcatgtatgtgagatttttgttttctttccaatagcaaattcaaagcaagcaacttgcaggctccatggaacttttaatgaaggacagtgtcttctttgaagaaaatcaagctcgtgtttttattcgaagctctggtgtaaaatatttcaaagtcatagaaatagtttgagaaatgcatagcattatttaacactattgaacagccgactttgagcattgtttcttctaactgcccctcaactaccattatcttcaagtcaacatgcatattacattttcatcctttgctttgcaagcactggtggcttgcagtttgctaatttatttatcatagagtcatcaatgtatttgttgctgacatggttttattagatactgtagtgattcaaataagttttctatttgaaaaaaaaaatcacttgattgtatccttgcccagtgaagccatcctaagacttagcaatatggattgtacatttggctgcatgagcaagtcggccgcacacttccagacagtgtgctgtttgaattgactatttgcactcaaagtctgggtattcattggttattggcctgaaatgatcaaataactacaaatgatctgttgaataaaaatagttgagctgatatatgttaagcagatattcaatcagaatgaacaggttccggtggttattttgccgtttgacattttttatggttcatttatttttaatatagagaggaagattgaatatttatctagagaatacaaagacccacatgtaaatgataggtattatctccatgtatatatgtacccacttagtcatgtaagtgcatatacacatacacacacatgagtgtagacatgtgtttattaattgacaatgacccaaatctcttccacaagacttaaaaccaaattcagggacaaatggatagagaagaaaagggtcaaacatcgagattacatggatgttaaattatatggagacgctaagaaataattgatggagccattgatgcaaaccgaagtagatttagaacttatatgaatttgatttatattttgcaagatcaaaaattagatgttaagtatcagattttaagcttgttttaatggtcaaaaaattaggacagaaataatatggacatttattagtatcttccataatttttaagtctgacacatttctattttattctaacataaaaaaacttccattatatatttactaagtatatttaattcacttaactctgtctttataagttcctattttagatggaataagagaaacaaattatatcaaggtaaaactgatcaaaagcataattgaaagttctgaaaaaagaaaaataataatatgtagaaaaatgtaacttagagagtaacacatgaacattgaagttaaaacccagaagccagatgctcacagttttattttactttaaaataaacctgtctgactgtagctttgtgaaatatcttaaaacgcaaaaaccaattgtgtcctgaaaattgtttcaagaatttaatatttttatgaaaattattttatttaactttaagcaataactagagattacaattaaattttaatcaaaatgaaggcttagttcaaacataaggaaacagtgtttgattaaaaaaaacacatctagtaagacgtaaggggaaaatcacatcctctttggagatgattatattttgatctgaagggtttggggtgttcattagacacttaataaaacttaacttccaatgaaaaagaaatcttttgtaaatcattctacttttgcactttgaaagaaaggcgttaatcataaagaagcaagaatggtcaaaatcgaatgctgcatttttataaacaaaattacagactgtctgaaattgaagaagaatgaactaataatagcattcataaccaaacacaatgatgattattgcagaacattgtatcacattttagtccagagatagaataaagttgaataaccttgacttacacaaaactgttttggtagttggatttcattatcttagtgaatttagtcattttacaatatgtttgtatttggccatttactgtaatcacatttttatatctgtacaatgacactttttgcagttgtggggtagtgtgtaacactgtccatcttgcatcattgaaactactacaatgatactatcatttaataatattaatattacttgaaatagactaagataaagaaaaggggtctgtatgatgtgcagttttgtgcctttatgtatttgccttgttctttgtcgaatgtgtgaaattccgtactgtggtttttcctataatagaaagtagagctgtgtattaaattagactgtgtctctctgatacctttacactactgagaatagcatggttttggccatgtaaaccaattttcaaagttctaatgacatagccatgtgtttttggttttttatatttcattttaaaatttgagtatcaccatacattaattaatactcctgtagtagataagctgtcattaagtaattcccaaaaaaagggccatttgcttgcattactttgaatttaatgttgcgcttgtgcactgtgttaatattgtttgtgatggattggacgttgtgactcttgccttttaagaagaaaaaaaagataggacaaagtatttgaagctcttaaaatgtacatattttggttcttctatctcaaattatttaaaatgcataattcacatttttgtaataattctatgcaattttgtggcatgatgtttcttccacttgtaattttatgtgctttcatcacaaatccaaaggaaagaataaaaatttcttaacacaaccc

SEQ ID NO: 15841 - DNA, 3351 bp, Homo sapiens
  source 1..3351: mol_type = unassigned DNA
tctgtcgcccagactggagtgcactggcgcgatctcagctcaccacaaccactgcctcctgggttcaagcgattctcctgccccagcctcccaactgcaggtggagctggagcaagaataccaagacaaattcaaaagactgcccctcgagattttggaattcgtgcaggaagccatgaaaggaaagatcagtgaagacagcaatcacggttctgcccctctctccctgtcctcagaccctggaaaagtgaaccacaagactccctccagtgaggagctgggaggagacatcccaggaaaagaatttgatactcctctgtgaatgctcctgccaggccttcagaaattgcatggccactccagcgtcatcggactctctcttattacaaagatcactgcccaggaccatcttcccgagaagcatcccttagcctaaaatccacaccaaagggagagttccagaggaatccatgaagaattcccatgcccaggctccatgtgtcatgtggaaacctccacaggtctgctagtgaagaatgcatgtatgtgagatttttgttttctttccaatagcaaattcaaagcaagcaacttgcaggctccatggaacttttaatgaaggacagtgtcttctttgaagaaaatcaagctcgtgtttttattcgaagctctggtgtaaaatatttcaaagtcatagaaatagtttgagaaatgcatagcattatttaacactattgaacagccgactttgagcattgtttcttctaactgcccctcaactaccattatcttcaagtcaacatgcatattacattttcatcctttgctttgcaagcactggtggcttgcagtttgctaatttatttatcatagagtcatcaatgtatttgttgctgacatggttttattagatactgtagtgattcaaataagttttctatttgaaaaaaaaaatcacttgattgtatccttgcccagtgaagccatcctaagacttagcaatatggattgtacatttggctgcatgagcaagtcggccgcacacttccagacagtgtgctgtttgaattgactatttgcactcaaagtctgggtattcattggttattggcctgaaatgatcaaataactacaaatgatctgttgaataaaaatagttgagctgatatatgttaagcagatattcaatcagaatgaacaggttccggtggttattttgccgtttgacattttttatggttcatttatttttaatatagagaggaagattgaatatttatctagagaatacaaagacccacatgtaaatgataggtattatctccatgtatatatgtacccacttagtcatgtaagtgcatatacacatacacacacatgagtgtagacatgtgtttattaattgacaatgacccaaatctcttccacaagacttaaaaccaaattcagggacaaatggatagagaagaaaagggtcaaacatcgagattacatggatgttaaattatatggagacgctaagaaataattgatggagccattgatgcaaaccgaagtagatttagaacttatatgaatttgatttatattttgcaagatcaaaaattagatgttaagtatcagattttaagcttgttttaatggtcaaaaaattaggacagaaataatatggacatttattagtatcttccataatttttaagtctgacacatttctattttattctaacataaaaaaacttccattatatatttactaagtatatttaattcacttaactctgtctttataagttcctattttagatggaataagagaaacaaattatatcaaggtaaaactgatcaaaagcataattgaaagttctgaaaaaagaaaaataataatatgtagaaaaatgtaacttagagagtaacacatgaacattgaagttaaaacccagaagccagatgctcacagttttattttactttaaaataaacctgtctgactgtagctttgtgaaatatcttaaaacgcaaaaaccaattgtgtcctgaaaattgtttcaagaatttaatatttttatgaaaattattttatttaactttaagcaataactagagattacaattaaattttaatcaaaatgaaggcttagttcaaacataaggaaacagtgtttgattaaaaaaaacacatctagtaagacgtaaggggaaaatcacatcctctttggagatgattatattttgatctgaagggtttggggtgttcattagacacttaataaaacttaacttccaatgaaaaagaaatcttttgtaaatcattctacttttgcactttgaaagaaaggcgttaatcataaagaagcaagaatggtcaaaatcgaatgctgcatttttataaacaaaattacagactgtctgaaattgaagaagaatgaactaataatagcattcataaccaaacacaatgatgattattgcagaacattgtatcacattttagtccagagatagaataaagttgaataaccttgacttacacaaaactgttttggtagttggatttcattatcttagtgaatttagtcattttacaatatgtttgtatttggccatttactgtaatcacatttttatatctgtacaatgacactttttgcagttgtggggtagtgtgtaacactgtccatcttgcatcattgaaactactacaatgatactatcatttaataatattaatattacttgaaatagactaagataaagaaaaggggtctgtatgatgtgcagttttgtgcctttatgtatttgccttgttctttgtcgaatgtgtgaaattccgtactgtggtttttcctataatagaaagtagagctgtgtattaaattagactgtgtctctctgatacctttacactactgagaatagcatggttttggccatgtaaaccaattttcaaagttctaatgacatagccatgtgtttttggttttttatatttcattttaaaatttgagtatcaccatacattaattaatactcctgtagtagataagctgtcattaagtaattcccaaaaaaagggccatttgcttgcattactttgaatttaatgttgcgcttgtgcactgtgttaatattgtttgtgatggattggacgttgtgactcttgccttttaagaagaaaaaaaagataggacaaagtatttgaagctcttaaaatgtacatattttggttcttctatctcaaattatttaaaatgcataattcacatttttgtaataattctatgcaattttgtggcatgatgtttcttccacttgtaattttatgtgctttcatcacaaatccaaaggaaa

SEQ ID NO: 15842 - DNA, 1669 bp, Homo sapiens
  source 1..1669: mol_type = unassigned DNA
aggagaaagactcaaagttgttctaacatgggttctccaacttctgaaatccatccagaaactccctgtatttgggtaacagtattataactttttgcaccagggcttttttgtttgtttgttaatattaattgatttttcttatgttctttatgaaagaataactcatccattaatgaaaccaaatgtgaacttagtgccttctgtgtagaaaaggctaggaatacatattgtgggagattcattacatcactggccttaatactacaccttctcatgttcccccttggctgtgtaactttctagtgtccatatgctctctcttggggtggccagtgtgacttgctttggccaatgggatattagcaaccatgacataacccgaggcttataaagttgcctgctcattgggacttgtttcactgttgcatcccagttattcacatcactccagctgacagccaaccaacaaacagccagacacgtgagcccaaccaagatcagaagaactgtcccactgagcatagtctaaattgctaacatgcaaatgcatgaccacagcaaggtaatcttacagcccaggactcagctgctgcaatctctgtgaaaggttctgctcatgaaacagagacaaccatgtgtggtgcctgcattcttggcctgcggggagtggaaaggagacaaagagtaaaacacggtgggaaagaagaaaaagaggttaagaaaagcaaatgtgcctactccaggtaattttgacttagggaccctgattaacttacacactaattaaaccatttccagattttgtgcagtctgaaagcagcccattttccccaacaccaggtcgctcaagatgaccacaggaaggttgtcatcttcatgtctaaaagccagttgacactcaagggtgtcatttcacttcagtgaaatgagaagcttcacagatgtgtagactctgaaaaatctaactggaaaacaatacagggaaatagcaatactaggcatcaaagcagcaaaaaaactactcaattatctgatatggggattatcaatggaataaatgtggggtttgttgtttgttgttgggattgttgtgggttttgtttcattttttagggtctcacttttctccaccaattagatctgtgctgtgagccacacaggttttgagtacatgttttgggactttatatcggtcagactttgccatggtaacactgtgtaacgagcagccccaaaaatctcagtggtggtcaaaagcaaacctttatttctcattcatgggttttcagtttgttcaggctaaaagtaaaatacacagattcttcacctgtctttcattccatgctgaaggagcaattgactgcctgggacatacttttctcataacagaggcaagggtgaaaaacaccaagtcatcttgattatgcaatcccatttttaatgtaaacaatgtcatgtctgcttctatttcattgagcaaagcaagtcatataggcaagcccaacatcagtggggtgataaagcacactctccaatggaaggaggaggggagcatgatcatttgctgaacagtaatgcaagatagcacaagacttgtctggggtgagagagagatcaaagctgtggatcccacccagtcttcaaccaaagcaatgtggctttgacc

SEQ ID NO: 15843 - DNA, 6458 bp, Homo sapiens
  source 1..6458: mol_type = unassigned DNA
acccaggaccccaaattacgtgaacttttggatgtggggaacatcgggcgcctggagcagcgcatgatcacagtggtgtatgggcctgacctcgtgaacatctcccatttgaatctcgtggctttccaagaagaagtggccaaggaatggacaaatgaggttttcagtttggcaacaaacctgctggcccaaaacatgtccagggatgcatttctggaaaaagcctatactaaacttaagctgcaagtcactccagaagggcgtattcctctcaaaaacatatatcgcttgttttcagcagatcggaagcgagttgaaactgctttagaggcttgtagtcttccatcttcaaggaatgattcaatacctcaagaagatttcactccagaagtgtacagagttttcctcaacaacctttgccctcgacctgaaattgataacatcttttcagaatttggtgcaaaaagcaaaccatatcttaccgttgatcagatgatggattttatcaaccttaagcagcgagatcctcggcttaatgaaatactttatccacctctaaaacaagagcaagtccaagtattgattgagaagtatgaacccaacaacagcctcgccagaaaaggacaaatatcagtggatgggttcatgcgctatctgagtggagaagaaaacggagtcgtttcacctgagaaactggatttgaatgaagacatgtctcagcccctttctcactatttcattaattcctcgcacaacacctacctcacagctggccaactggctggaaactcctctgttgagatgtatcgccaagtgctcctgtctggttgtcgctgtgtggagctggactgctggaagggacggactgcagaagaggaacctgtcatcacccatggcttcaccatgacaactgaaatatctttcaaggaagtgatagaagcaattgcggagtgtgcatttaagacttcaccttttccaattctcctttcgtttgagaaccatgtggattccccaaagcagcaagccaagatggcggagtactgccgactgatctttggggatgcccttctcatggagcccctggaaaaatatccactggaatctggagttcctcttccaagccctatggatttaatgtataaaattttggtgaaaaataagaagaaatcacacaagtcatcagaaggaagcggcaaaaagaagctctcagaacaagcctccaacacctacagtgactcctccagcatgttcgagccctcatccccaggagccggagaagctgatacggaaagtgacgacgacgatgatgatgatgactgtaaaaaatcttcaatggatgaggggactgctggaagtgaggctatggccacagaagaaatgtctaatctggtgaactatattcagccagtcaagtttgagtcatttgaaatttcaaaaaaaagaaataaaagttttgaaatgtcttccttcgtggaaaccaaaggacttgaacaactcaccaagtctccagtggaatttgtagaatataacaaaatgcagcttagcaggatatatccaaaaggaacacgtgtggattcatccaactatatgcctcagctcttctggaatgcaggttgtcagatggtggcacttaatttccagacaatggacctggctatgcaaataaatatggggatgtatgaatacaacgggaagagtggctacagattgaagccagagttcatgaggaggcctgacaagcattttgatccatttactgaaggcatcgtagatgggatagtggcaaacactttgtctgttaagattatttcaggtcagtttctttctgataagaaagttgggacttacgtggaagtagatatgtttggtttgcctgtggatacaaggaggaaggcatttaagaccaaaacatcccaaggaaatgctgtgaatcctgtctgggaagaagaacctattgtgttcaaaaaggtggttcttcctactctggcctgtttgagaatagcagtttatgaagaaggaggtaaattcattggccaccgtatcttgccagtgcaagccattcggccaggctatcactatatctgtctaaggaatgaaaggaaccagcctctgacgctgcctgctgtctttgtctacatagaagtgaaagactatgtgccagacacatatgcagatgtcatcgaagctttatcaaacccaatccgatatgtgaacctgatggaacagagagctaagcaattggctgctttgacactggaagatgaagaagaagtaaagaaagaggctgatcctggagaaacaccatcagaggctccaagtgaagcgagaacgactccagcagaaaatggggtgaatcacactacaaccctgacacccaagccaccctcccaggctctccacagccagccagctccaggttctgtaaaggcacctgccaaaacagaagatcttattcagagtgtcttaacagaagtggaagcacagaccatcgaagaactaaagcaacagaaatcgtttgtgaaacttcaaaagaaacactacaaagaaatgaaagacctggttaagagacaccacaagaaaaccactgaccttatcaaagaacacactaccaagtataatgaaattcagaatgactacttgagaaggagagccgctttggaaaagtccgccaaaaaggacagtaagaaaaaatcggaacccagcagccctgatcatggttcatcaacgattgagcaagacctcgctgctctggatgctgaaatgacccaaaagttaatagacttgaaggacaaacaacagcagcagctgcttaatcttcggcaagaacagtattatagtgaaaaataccagaagcgagaacatattaaactgcttattcaaaagttgacggatgtcgcagaagagtgtcagaacaatcagttaaagaagctcaaagaaatctgtgagaaagaaaagaaagaattaaagaagaaaatggataaaaagaggcaggagaagataacagaagctaaatccaaagacaaaagtcagatggaagaggagaagacagagatgatccggtcatatatccaggaagtggtgcagtatatcaagaggctagaagaagcgcaaagtaaacggcaagaaaaactcgtagagaaacacaaggaaatacgtcagcagatcctggatgaaaagcccaagctgcaggtggagctggagcaagaataccaagacaaattcaaaagactgcccctcgagattttggaattcgtgcaggaagccatgaaaggaaagatcagtgaagacagcaatcacggttctgcccctctctccctgtcctcagaccctggaaaagtgaaccacaagactccctccagtgaggagctgggaggagacatcccaggaaaagaatttgatactcctctgtgaatgctcctgccaggccttcagaaattgcatggccactccagcgtcatcggactctctcttattacaaagatcactgcccaggaccatcttcccgagaagcatcccttagcctaaaatccacaccaaagggagagttccagaggaatccatgaagaattcccatgcccaggctccatgtgtcatgtggaaacctccacaggtctgctagtgaagaatgcatgtatgtgagatttttgttttctttccaatagcaaattcaaagcaagcaacttgcaggctccatggaacttttaatgaaggacagtgtcttctttgaagaaaatcaagctcgtgtttttattcgaagctctggtgtaaaatatttcaaagtcatagaaatagtttgagaaatgcatagcattatttaacactattgaacagccgactttgagcattgtttcttctaactgcccctcaactaccattatcttcaagtcaacatgcatattacattttcatcctttgctttgcaagcactggtggcttgcagtttgctaatttatttatcatagagtcatcaatgtatttgttgctgacatggttttattagatactgtagtgattcaaataagttttctatttgaaaaaaaaaatcacttgattgtatccttgcccagtgaagccatcctaagacttagcaatatggattgtacatttggctgcatgagcaagtcggccgcacacttccagacagtgtgctgtttgaattgactatttgcactcaaagtctgggtattcattggttattggcctgaaatgatcaaataactacaaatgatctgttgaataaaaatagttgagctgatatatgttaagcagatattcaatcagaatgaacaggttccggtggttattttgccgtttgacattttttatggttcatttatttttaatatagagaggaagattgaatatttatctagagaatacaaagacccacatgtaaatgataggtattatctccatgtatatatgtacccacttagtcatgtaagtgcatatacacatacacacacatgagtgtagacatgtgtttattaattgacaatgacccaaatctcttccacaagacttaaaaccaaattcagggacaaatggatagagaagaaaagggtcaaacatcgagattacatggatgttaaattatatggagacgctaagaaataattgatggagccattgatgcaaaccgaagtagatttagaacttatatgaatttgatttatattttgcaagatcaaaaattagatgttaagtatcagattttaagcttgttttaatggtcaaaaaattaggacagaaataatatggacatttattagtatcttccataatttttaagtctgacacatttctattttattctaacataaaaaaacttccattatatatttactaagtatatttaattcacttaactctgtctttataagttcctattttagatggaataagagaaacaaattatatcaaggtaaaactgatcaaaagcataattgaaagttctgaaaaaagaaaaataataatatgtagaaaaatgtaacttagagagtaacacatgaacattgaagttaaaacccagaagccagatgctcacagttttattttactttaaaataaacctgtctgactgtagctttgtgaaatatcttaaaacgcaaaaaccaattgtgtcctgaaaattgtttcaagaatttaatatttttatgaaaattattttatttaactttaagcaataactagagattacaattaaattttaatcaaaatgaaggcttagttcaaacataaggaaacagtgtttgattaaaaaaaacacatctagtaagacgtaaggggaaaatcacatcctctttggagatgattatattttgatctgaagggtttggggtgttcattagacacttaataaaacttaacttccaatgaaaaagaaatcttttgtaaatcattctacttttgcactttgaaagaaaggcgttaatcataaagaagcaagaatggtcaaaatcgaatgctgcatttttataaacaaaattacagactgtctgaaattgaagaagaatgaactaataatagcattcataaccaaacacaatgatgattattgcagaacattgtatcacattttagtccagagatagaataaagttgaataaccttgacttacacaaaactgttttggtagttggatttcattatcttagtgaatttagtcattttacaatatgtttgtatttggccatttactgtaatcacatttttatatctgtacaatgacactttttgcagttgtggggtagtgtgtaacactgtccatcttgcatcattgaaactactacaatgatactatcatttaataatattaatattacttgaaatagactaagataaagaaaaggggtctgtatgatgtgcagttttgtgcctttatgtatttgccttgttctttgtcgaatgtgtgaaattccgtactgtggtttttcctataatagaaagtagagctgtgtattaaattagactgtgtctctctgatacctttacactactgagaatagcatggttttggccatgtaaaccaattttcaaagttctaatgacatagccatgtgtttttggttttttatatttcattttaaaatttgagtatcaccatacattaattaatactcctgtagtagataagctgtcattaagtaattcccaaaaaaagggccatttgcttgcattactttgaatttaatgttgcgcttgtgcactgtgttaatattgtttgtgatggattggacgttgtgactcttgccttttaagaagaaaaaaaagataggacaaagtatttgaagctcttaaaatgtacatattttggttcttctatctcaaattatttaaaatgcataattcacatttttgtaataattctatgcaattttgtggcatgatgtttcttccacttgtaattttatgtgctttcatcacaaatccaaaggaaagaataaaaatttcttaac

SEQ ID NO: 15844 - DNA, 6576 bp, Homo sapiens
  source 1..6576: mol_type = unassigned DNA
acccaggaccccaaattacgtgaacttttggatgtggggaacatcgggcgcctggagcagcgcatgatcacagtggtgtatgggcctgacctcgtgaacatctcccatttgaatctcgtggctttccaagaagaagtggccaaggaatggacaaatgaggttttcagtttggcaacaaacctgctggcccaaaacatgtccagggatgcatttctggaaaaagcctatactaaacttaagctgcaagtcactccagaagggcgtattcctctcaaaaacatatatcgcttgttttcagcagatcggaagcgagttgaaactgctttagaggcttgtagtcttccatcttcaaggaatgattcaatacctcaagaagatttcactccagaagtgtacagagttttcctcaacaacctttgccctcgacctgaaattgataacatcttttcagaatttggtgcaaaaagcaaaccatatcttaccgttgatcagatgatggattttatcaaccttaagcagcgagatcctcggcttaatgaaatactttatccacctctaaaacaagagcaagtccaagtattgattgagaagtatgaacccaacaacagcctcgccagaaaaggacaaatatcagtggatgggttcatgcgctatctgagtggagaagaaaacggagtcgtttcacctgagaaactggatttgaatgaagacatgtctcagcccctttctcactatttcattaattcctcgcacaacacctacctcacagctggccaactggctggaaactcctctgttgagatgtatcgccaagtgctcctgtctggttgtcgctgtgtggagctggactgctggaagggacggactgcagaagaggaacctgtcatcacccatggcttcaccatgacaactgaaatatctttcaaggaagtgatagaagcaattgcggagtgtgcatttaagacttcaccttttccaattctcctttcgtttgagaaccatgtggattccccaaagcagcaagccaagatggcggagtactgccgactgatctttggggatgcccttctcatggagcccctggaaaaatatccactggaatctggagttcctcttccaagccctatggatttaatgtataaaattttggtgaaaaataagaagaaatcacacaagtcatcagaaggaagcggcaaaaagaagctctcagaacaagcctccaacacctacagtgactcctccagcatgttcgagccctcatccccaggagccggagaagctgatacggaaagtgacgacgacgatgatgatgatgactgtaaaaaatcttcaatggatgaggggactgctggaagtgaggctatggccacagaagaaatgtctaatctggtgaactatattcagccagtcaagtttgagtcatttgaaatttcaaaaaaaagaaataaaagttttgaaatgtcttccttcgtggaaaccaaaggacttgaacaactcaccaagtctccagtggaatttgtagaatataacaaaatgcagcttagcaggatatatccaaaaggaacacgtgtggattcatccaactatatgcctcagctcttctggaatgcaggttgtcagatggtggcacttaatttccagacaatggacctggctatgcaaataaatatggggatgtatgaatacaacgggaagagtggctacagattgaagccagagttcatgaggaggcctgacaagcattttgatccatttactgaaggcatcgtagatgggatagtggcaaacactttgtctgttaagattatttcaggtcagtttctttctgataagaaagttgggacttacgtggaagtagatatgtttggtttgcctgtggatacaaggaggaaggcatttaagaccaaaacatcccaaggaaatgctgtgaatcctgtctgggaagaagaacctattgtgttcaaaaaggtggttcttcctactctggcctgtttgagaatagcagtttatgaagaaggaggtaaattcattggccaccgtatcttgccagtgcaagccattcggccaggctatcactatatctgtctaaggaatgaaaggaaccagcctctgacgctgcctgctgtctttgtctacatagaagtgaaagactatgtgccagacacatatgcagatgtcatcgaagctttatcaaacccaatccgatatgtgaacctgatggaacagagagctaagcaattggctgctttgacactggaagatgaagaagaagtaaagaaagaggctgatcctggagaaacaccatcagaggctccaagtgaagcgagaacgactccagcagaaaatggggtgaatcacactacaaccctgacacccaagccaccctcccaggctctccacagccagccagctccaggttctgtaaaggcacctgccaaaacagaagatcttattcagagtgtcttaacagaagtggaagcacagaccatcgaagaactaaagcaacagaaatcgtttgtgaaacttcaaaagaaacactacaaagaaatgaaagacctggttaagagacaccacaagaaaaccactgaccttatcaaagaacacactaccaagtataatgaaattcagaatgactacttgagaaggagagccgctttggaaaagtccgccaaaaaggacagtaagaaaaaatcggaacccagcagccctgatcatggttcatcaacgattgagcaagacctcgctgctctggatgctgaaatgacccaaaagttaatagacttgaaggacaaacaacagcagcagctgcttaatcttcggcaagaacagtattatagtgaaaaataccagaagcgagaacatattaaactgcttattcaaaagttgacggatgtcgcagaagagtgtcagaacaatcagttaaagaagctcaaagaaatctgtgagaaagaaaagaaagaattaaagaagaaaatggataaaaagaggcaggagaagataacagaagctaaatccaaagacaaaagtcagatggaagaggagaagacagagatgatccggtcatatatccaggaagtggtgcagtatatcaagaggctagaagaagcgcaaagtaaacggcaagaaaaactcgtagagaaacacaaggaaatacgtcagcagatcctggatgaaaagcccaagggggaaggttcctcctcattcttgtcggaaacttgccatgaggatccctctgtttcccccaactttactccccccaaccctcaagctctcaagtggtgaccaccgtccttccggccagctgcaggtggagctggagcaagaataccaagacaaattcaaaagactgcccctcgagattttggaattcgtgcaggaagccatgaaaggaaagatcagtgaagacagcaatcacggttctgcccctctctccctgtcctcagaccctggaaaagtgaaccacaagactccctccagtgaggagctgggaggagacatcccaggaaaagaatttgatactcctctgtgaatgctcctgccaggccttcagaaattgcatggccactccagcgtcatcggactctctcttattacaaagatcactgcccaggaccatcttcccgagaagcatcccttagcctaaaatccacaccaaagggagagttccagaggaatccatgaagaattcccatgcccaggctccatgtgtcatgtggaaacctccacaggtctgctagtgaagaatgcatgtatgtgagatttttgttttctttccaatagcaaattcaaagcaagcaacttgcaggctccatggaacttttaatgaaggacagtgtcttctttgaagaaaatcaagctcgtgtttttattcgaagctctggtgtaaaatatttcaaagtcatagaaatagtttgagaaatgcatagcattatttaacactattgaacagccgactttgagcattgtttcttctaactgcccctcaactaccattatcttcaagtcaacatgcatattacattttcatcctttgctttgcaagcactggtggcttgcagtttgctaatttatttatcatagagtcatcaatgtatttgttgctgacatggttttattagatactgtagtgattcaaataagttttctatttgaaaaaaaaaatcacttgattgtatccttgcccagtgaagccatcctaagacttagcaatatggattgtacatttggctgcatgagcaagtcggccgcacacttccagacagtgtgctgtttgaattgactatttgcactcaaagtctgggtattcattggttattggcctgaaatgatcaaataactacaaatgatctgttgaataaaaatagttgagctgatatatgttaagcagatattcaatcagaatgaacaggttccggtggttattttgccgtttgacattttttatggttcatttatttttaatatagagaggaagattgaatatttatctagagaatacaaagacccacatgtaaatgataggtattatctccatgtatatatgtacccacttagtcatgtaagtgcatatacacatacacacacatgagtgtagacatgtgtttattaattgacaatgacccaaatctcttccacaagacttaaaaccaaattcagggacaaatggatagagaagaaaagggtcaaacatcgagattacatggatgttaaattatatggagacgctaagaaataattgatggagccattgatgcaaaccgaagtagatttagaacttatatgaatttgatttatattttgcaagatcaaaaattagatgttaagtatcagattttaagcttgttttaatggtcaaaaaattaggacagaaataatatggacatttattagtatcttccataatttttaagtctgacacatttctattttattctaacataaaaaaacttccattatatatttactaagtatatttaattcacttaactctgtctttataagttcctattttagatggaataagagaaacaaattatatcaaggtaaaactgatcaaaagcataattgaaagttctgaaaaaagaaaaataataatatgtagaaaaatgtaacttagagagtaacacatgaacattgaagttaaaacccagaagccagatgctcacagttttattttactttaaaataaacctgtctgactgtagctttgtgaaatatcttaaaacgcaaaaaccaattgtgtcctgaaaattgtttcaagaatttaatatttttatgaaaattattttatttaactttaagcaataactagagattacaattaaattttaatcaaaatgaaggcttagttcaaacataaggaaacagtgtttgattaaaaaaaacacatctagtaagacgtaaggggaaaatcacatcctctttggagatgattatattttgatctgaagggtttggggtgttcattagacacttaataaaacttaacttccaatgaaaaagaaatcttttgtaaatcattctacttttgcactttgaaagaaaggcgttaatcataaagaagcaagaatggtcaaaatcgaatgctgcatttttataaacaaaattacagactgtctgaaattgaagaagaatgaactaataatagcattcataaccaaacacaatgatgattattgcagaacattgtatcacattttagtccagagatagaataaagttgaataaccttgacttacacaaaactgttttggtagttggatttcattatcttagtgaatttagtcattttacaatatgtttgtatttggccatttactgtaatcacatttttatatctgtacaatgacactttttgcagttgtggggtagtgtgtaacactgtccatcttgcatcattgaaactactacaatgatactatcatttaataatattaatattacttgaaatagactaagataaagaaaaggggtctgtatgatgtgcagttttgtgcctttatgtatttgccttgttctttgtcgaatgtgtgaaattccgtactgtggtttttcctataatagaaagtagagctgtgtattaaattagactgtgtctctctgatacctttacactactgagaatagcatggttttggccatgtaaaccaattttcaaagttctaatgacatagccatgtgtttttggttttttatatttcattttaaaatttgagtatcaccatacattaattaatactcctgtagtagataagctgtcattaagtaattcccaaaaaaagggccatttgcttgcattactttgaatttaatgttgcgcttgtgcactgtgttaatattgtttgtgatggattggacgttgtgactcttgccttttaagaagaaaaaaaagataggacaaagtatttgaagctcttaaaatgtacatattttggttcttctatctcaaattatttaaaatgcataattcacatttttgtaataattctatgcaattttgtggcatgatgtttcttccacttgtaattttatgtgctttcatcacaaatccaaaggaaagaataaaaatttcttaac

SEQ ID NO: 15845 - DNA, 12024 bp, Homo sapiens
  source 1..12024: mol_type = unassigned DNA
atctaccaccttaaaaccctgatctagaaaaaatatatattcatgataggaagttataactaagaaaatttatttgcctcttaatgctcctgaatgaaaggaattatccctttgttctttgggaggacttgtgtatctgagattgttgtaataatcagtcattttattaaaaccttgacatgatcaccagggaggaaaaatagagcaatagtcaaaacctgtgtgttagtccaagatgacttctgaagaaatgacagcttctgttctcatacctgtgactcagagaaaagtggtttctgcccagtcggctgcagatgaaagtagtgaaaaggtctcagacatcaatatttcaaaagcacatactgtcagacgaagtggggagacttctcataccatctcacaactgaacaaacttaaagaagaaccttctggaagcaacttgccaaagattctctcaatagcgagggagaaaatagtgagtgatgagaacagtaatgaaaaatgttgggagaaaatcatgccagattctgcgaaaaaccttaacattaactgcaacaacatattgagaaaccatcagcatggccttcctcagagacaattttatgaaatgtacaactctgttgctgaggaagacttgtgtttagaaactggaattccttctccactggaaagaaaggtgttccctggaattcaactggaactagacagaccttccatgggcattagtcctttaggaaatcagtcagtgatcatagagacaggcagagcacaccctgacagcagaagggcagtatttcattttcattatgaagttgacagaagaatgtcagacactttctgtaccctatcagaaaacttaattttagacgattgtggaaattgtgtaccactacctgggggtgaggagaagcaaaagaaaaactatgtggcatatacctgtaaactgatggaattggccaaaaattgtgataataagaatgagcagctgcagtgtgatcattgtgacaccttgaatgataaatacttttgctttgaaggctcttgtgagaaggttgacatggtatattcaggtgatagcttttgtaggaaagactttactgacagtcaagctgccaagacctttttgagccattttgaggacttccctgataattgtgatgatgtagaagaagacgcttttaaaagcaaaaaggagcgatccactttgttagtcaggagattctgtaaaaatgacagagaagttaagaaatctgtgtatactggaacaagagcaattgtgagaactctgccttctggccacattgggctgactgcatggagttacatagatcagaagagaaatggtcccttactgccttgtgggagagtaatggaacccccgtcaacagtggagataaggcaagatgggagccaacgtctgtcagaagcccagtggtatcctatctacaatgcagtgagaagagaagaaacagaaaatacagttggatctctactccatttcctcaccaagctcccagcctccgagacagcccatggaaggataagcgttggtccatgcttaaagcaatgtgtccgagacactgtatgtgagtatcgcgccaccctccaaaggacttcaatatcgcagtacatcaccggttctctcctagaagcaaccacgtctttgggagcaagaagtggccttctcagtacttttggaggatccactggacgaatgatgctgaaagaacgccagccaggcccctctgtggccaattccaatgccctcccttcaagttcagctgggatcagcaaggagctgatcgatctgcagcctctcatccagttcccagaggaagtcgccagcatcctgatggagcaagagcagactatttaccgcagggtcttgccagtcgactacctttgcttcttaacacgggacttgggcactcctgaatgccagagctccttgccctgcctcaaagcatccatctcagcgtcgattcttaccactcagaatggagagcacaatgcccttgaagatctggtgatgaggtttaatgaggtgagctcctgggtgacatggctgatcctcacggcaggctccatggaggagaagcgagaagtcttttcatatttggtgcatgtggccaaatgctgctggaacatgggcaactacaacgctgtcatggagttcttggctggcctcaggtcaagaaaagttttaaaaatgtggcagttcatggaccagtctgatattgagaccatgaggagcctgaaggatgctatggcccagcatgagtcctcttgtgagtacagaaaggtggtgacacgtgccctgcacatccctggctgtaaggtggttccattctgtggggtgtttctgaaggagctctgtgaagtgcttgacggcgcctccggtctcatgaagctttgcccgcggtacaattcccaagaagaaactttagagtttgtagcagattacagtggacaagataatttcttacaacgagtgggacaaaatggcttaaagaattcggagaaggagtccactgtcaacagcatctttcaggtcatccggagctgcaatcgaagtctggagacagacgaggaggacagccccagtgaaggaaacagctccaggaaaagctccttgaaggataaaagccgatggcagtttataattggagatttgttggattcagacaatgacatctttgagcaatccaaagaatacgactctcatggttcagaggactcacagaaggccttcgaccatgggacggagctcatcccttggtacgtgctgtccatccaagccgatgtgcaccagttcctgctgcagggggccacggtcatccactacgaccaggacacacacctctctgcccgctgcttcctccagcttcagcccgacaatagcaccttgacctgggtaaagcccacaactgcctccccagccagcagtaaagcaaaacttggtgtacttaataacacagctgagcctggaaaattcccactactgggtaatgctggattaagtagcctgacggaaggggtcttggatctttttgcagtgaaggctgtatacatgggccaccctggcattgatatacacactgtgtgtgttcagaacaaactgggtagcatgttcctgtcagagactggtgtgacattgctctatgggcttcagaccacagacaacagattattgcacttcgtggcaccaaagcacacagctaaaatgctcttcagcggattattggaactcactagagctgtgagaaagatgaggaaattccctgaccaaagacagcagtggctgcggaaacagtacgtcagcctttatcaggaggatggacggtatgaaggcccaactttggctcacgctgtggagttgtttggtggcagacggtggagtgctcgaaaccccagccccggaacatcagcaaagaatgctgagaagcccaatatgcagagaaacaataccctgggcataagcactaccaagaaaaagaagaaaatcctcatgaggggtgagagtggagaggtaactgacgatgagatggcaacccgaaaggccaagatgcacaaagagtgtcgaagccggagtggttctgatcctcaagacattaatgaacaagaagaatcagaggtgaatgccatcgctaaccctccaaaccccctcccttccagaagagcccactctttgaccacagctgggtcccccaacttggctgccgggacgtcatctcccatcaggccagtgtcctcccctgtgctgtcttcttcaaacaagagcccatccagtgcttggagcagtagtagctggcacgggcggatcaaaggcggcatgaagggatttcagagcttcatggtttcagatagcaacatgagttttgttgaatttgttgagctgttcaaatcattcagtgtcaggagccgcaaggacctgaaggatctgtttgatgtctatgcagtgccctgcaaccgatctggctccgagtcagccccactctacaccaacctgacaattgatgaaaacaccagcgatcttcagcctgacctagatctgttgaccagaaatgtctcggatttggggttgttcattaagagtaaacagcagctatcggacaaccagaggcagatatctgatgccattgctgctgcaagcattgtgacaaatggcactgggattgagagcacatctctgggcatttttggggtgggcatacttcagctcaacgatttcctcgtgaattgccaaggagaacactgcacttatgatgaaatcctcagcatcatccagaagttcgagcctagcatcagtatgtgtcatcagggactaatgtcatttgaagggtttgccaggtttctgatggataaagaaaattttgcctcaaaaaatgatgagtcacaggagaacattaaagaactgcagctacccctctcatactattacatcgaatcttcgcacaatacctacctcacgggccatcagctcaaaggagaatcctcggtagaactctacagccaggtccttttgcaaggctgtcgaagtgtagaattggactgctgggacggagacgatgggatgcccatcatttatcatggacatacgctgacaaccaagatccccttcaaggaagtggttgaagccattgatcgcagtgccttcatcaactctgacctgccaatcatcatatcgattgagaaccactgttcattgcctcagcaacgaaaaatggcagaaattttcaagactgtgtttggagaaaagctggtgactaaattcttatttgagactgatttctcagatgatccaatgcttccttcacctgaccaactcagaaagaaagttcttcttaaaaacaagaagctaaaagcccatcagacgccagtggatatcttaaagcaaaaggctcatcagttagcatctatgcaagtgcaggcttataatggtgggaatgccaacccccgacctgccaataatgaggaagaggaagatgaggaggacgaatatgattatgactatgaatccctttctgatgacaacattctggaagacagacctgaaaataaatcatgtaatgacaagcttcagtttgaatataatgaagaaatcccaaagaggataaagaaagcagataactctgcttgcaacaaaggaaaggtttatgatatggaactgggagaagaattttatcttgatcagaataaaaaggaaagcagacagattgcaccagagctttctgaccttgtaatctattgtcaagcagtaaaatttccaggactgtcaactctaaatgcatctggctctagcagaggaaaagaaaggaaaagcaggaagtccatttttggcaacaatccgggcagaatgagcccaggggagacagcatcatttaacaaaacatctggaaaaagttcctgtgaaggcattcgacagacctgggaggaatcttcttcccctctcaacccaaccacgtccctcagtgctatcattagaactcccaaatgttatcatatctcgtcgctgaatgaaaatgccgccaaacgtctgtgtcgcaggtattctcagaaactgacccagcacaccgcctgtcagctgctgagaacttaccctgctgccacccgcatcgactcttccaacccgaaccccctcatgttctggctccatgggatacagcttgtggcactcaactaccagactgatgatctccctttacatttaaatgctgcaatgtttgaggcaaatggtggttgtggttatgtattgaaacctccagttctgtgggacaagaactgccccatgtatcagaagttttctccactagaaagagatctggacagcatggatcctgcagtctattctttaactattgtctctggtcagaatgtgtgccccagtaatagcatgggaagcccgtgcattgaagtcgacgtcctgggcatgcctctggacagctgccatttccgcacaaagcccatccatcgaaacaccctgaaccccatgtggaacgagcagtttctgttccacgttcacttcgaagatcttgtatttcttcgttttgcagttgtggaaaacaatagttcagcggtaactgctcagagaatcattccactgaaagctttaaaacgaggatatcgacatcttcagctgcgaaaccttcacaatgaagtcttggagatttctagtttattcattaacagcagaaggatggaagaaaattcctctggcaataccatgtcagcctcttcgatgtttaatacagaagaaagaaaatgtttgcagactcacagagtcacggtgcatggggtcccagggccagagccctttaccgttttcactattaatggaggcaccaaggcaaagcagcttctgcagcaaattctgacaaatgaacaagacatcaaacctgttaccacagactattttttgatggaagaaaaatattttatatctaaagaaaagaatgaatgtaggaaacaaccattccagagagccattggtccagaagaggagatcatgcaaattttaagcagctggtttccagaagagggatacatgggcaggattgtcttaaaaacccagcaggaaaacctagaagagaaaaacattgttcaagatgacaaagaggtgatcttgagctcagaggaggagagtttctttgtccaagtgcatgatgtttctccagagcaacctcgaacagtcatcaaagcaccccgcgtcagcactgcacaggatgtcattcagcagaccttatgcaaagccaaatattcctacagcatcctgagcaaccccaatccaagcgactatgtgcttttggaagaggtggtgaaagacactaccaacaagaagactaccacaccaaagtcctctcagcgggtccttctggatcaggagtgtgtgtttcaagcccaaagcaagtggaaaggtgcaggaaaattcatccttaagctaaaggagcaggtgcaggcatctcgagaagataaaaagaaaggcatttctttcgcaagtgaactcaagaagctcaccaagtcaactaaacagccccgaggacttacatcaccttctcagctcttgacctcagaaagtatccaaaccaaggaggagaaacctgtgggtggcttgtcctccagtgacacaatggattaccgacagtgactaagggcagcatgtttaacccaggtgaagatctttaagcaagaagttaaagagtgaacatggtggaaaaaatataattattttcatcagacttaaactggaaattgatgatttctgaactgaagccttcacacatgtgagatccatgctgaggagaagcaaaatggcacagggctagttgccaccaaccaatttactgatgaatgaagcccaggggactgccattttataaatgtcagcagttggaaaaatcgtcacgaattgacttagagcaagggtcagcaagcttgtctgtaaagggccaaacagtaaatattttagggctgggggccataaaatatgttgcaaccacccaattctgccattgtagtgcaaaagcagccatagacaacacatacatgaacgaacgtggctgtattccaataaaactttatttatggacactgaaattggaatttcatatatttttcacatgtcacaaatactcttgttttgactttttttcaaccatttaaaaacttaaaaactattcttaattcaggggccatacaaaaacaggtggcaggctagatttggcccaaggaccttaatttgccaacacaactaagagaagagaactgggaacaaggagcacaaagatctgaaaacaggaaaggaagtttagccatacattttatggccgagaattagaagcttagaattagaagctttggggcatttcaagtgtaaatatgtcctataacataagagtcattaaaattcaatttagttcctgtattgtgtaccacagtgcactcctctttaggatttttttacatatagaaataatattgggttttttttaaggttattgcctattcagttaatagggttgctttaaaaaaggttattgcttaatcatagattagattactcatttttggttttcaaaatgaatttagaatgacgtataatttaatatctactgaattgcaatgtcttaacaagaaacctaacaattttttaaagcaaaagtagattgagttggcgtttaaatttattttgcaaggtttgtactgacactatacttatatatttattatacatcgctctcttgatattgccatggattagaagcattagttctcagtacttgaagacaaacttctaaaaagaaaatatatgctctgaacatctgaaatgggctagactttcaagtaaaattgcttcatttctcattaactgaagagctattgatccaagtcatacttgccatttaatgtaaattatttttaaactttgctgtacaaaaccattaagtgtaaaggattcttcatattcttagtatgaagcaaattatgaattttaaaaatgaaatatgtattcctctaaaacccaaacttttatctttccattggtatctttgaattttaagacacttttcttcaaattacaaaacactaaaactcactcctaaacttcactttgagaaacttttttaaccaattataaaaataaaaccatccccatgtgtttcttgcatattctaaaaacagaagtgttaaaaatacaccacacaggctgggcagagtggctcacgcctgtaactccagcactttgggaggccaagatgggcggatcaggacagagaatgaggccatcctggccaacatggtgaaacccaatctctactaaaagtacaaaaattagctgagcgtggtggcacgtgcctgtaatcccagctactcgggaggctgaggcaggagaatcacttgaacctgggaggtggaggctgcagtgagccaagatcgcaccaccacgctccagcctggtgacagagcgagactccgtctcaaaaaaaaaaaaaaaaaaaaaaaaaaaaaaaaaaacaccatacagctttcatgtcattgaaagttcttactgggtcaaagccttaaggctagaactaccattttcttgtcaacagaattcaggctattccagtttgatgtaatctatacagtagtacagttttaagtcaaatattcattctaacaaatgcacaatgctgctccattttaaaaatattccggaaacactttatcaagcctctataagtgaacatgccaaacagtttgccctaccacgtgttgaaaactgagttgctggtctaagtggctagaggccaaatgaaaactgtgcagagtaacaagatgaaaagactcgtctctttaggtttatcacatttgattctgatgctaagcgctgccccactcctcctccatgacctttaacacaggtgtatgttttacaacataaatctgagactgaagttgagaccaggttgtttagcaagtgagagaatccagcctactgcctaggttgcatcccaatttagttgtttatcacattttgaggtgaaagtacatacttcattgtatttgagtctttgggattacagaaagaacacattgtttcaaaatgtaaagagttggctgggcacagtggctcatgcctgtaatcccaacactctgggaggctgaggtgggtggatcacctgaggtctggagttcgaggccaacatggtgaaacccgtctctactaaaaatacaaaaattagctgggtactaaaaatacaaaaattagtggtggtgggcacctgtaaatcccagctattggggaggctgaggcaggagagaattgcctgaactcaagacgcagaggttgcagtgagtggagactgtgccactgcactccagcctgggtacaagagtgagactccatctcaaaaaaaaaaaaaaaaagtaaagagtctagtctactattatacacaaatggccagcacaatctgatgttggctgaaaatatttaagttttatttaaagctttctgaattaaacagctatattatgccaagtgaaagaaattatcctaaatagccactatgactatacccattaccatttcacactttttaggccaccagaaatctgggtagcaaactcttctcattaaagttgatgtggacaagaatctaaatatgcaagttggggtcattacaaaattttaagaagcatcactgaaagtgaagagaaaggagcatgaattctgtcactctattcagtgatgccaaatctgtaggaatgatcctatctgggtagaaagtgccctttgaggggtaaagcttcttttcatgtcatcattagcaagtaaaagttatttacaaattctccagttgggagtcaatatgaagtctagactcaacaaaagttgagttacaagtgacttgtttttaatcaaacttgctttcttttatgggaggcttttatgcctcccatctcaatacctctggagacactggaagctcattaatgaaagtgggccctctatgatatgtatcaatttaccttttgctaactacatcgtccccttcctttcttctctcctcttccaatatctctatagacttctgtcctctgcccagagacccacaggccttgcttaattctggaaagttatcagggcttgcttactggcccaataaaattgaattaactctaaaacacaaaactccacatctatgctcccatgctagtaaagaagagtaggattttcctggctggtgtctttgatcttacattggcagcctgcagggaaagtgctctcatggtgaaagtctctgaccccttttcagttgcttatatatcagcagtgaggccagaaaagatatacctgggaccccaaaaaagttagagagaaaagggagattgtctcttatacagagtctagacttgggtcaatattccccatgatccattgttaataatttatgtgttctctgccatccttatgtagcagcttcctaaaagcaatccttggctgatggctatggattctgacataggaatacctgaaatgagtccctttgaaacacatactgagtctctatgattaccaagttattcttttttttttttttttttttgaggcaaagtctcactctgttgcccagcctggagtgcagtggtacgatctcgactcaccacaacctccacctcccaggttcaagtgattctcctgcctcagcctcccaagtagctgggactacaggtgtgcgccatgtccgtctaattttttttattttcagtagagacgggggtttcactatgttggtaaggctggtctcgaactcctgacctcgtgatccacccgcctcagcctcccaaagtgctgggattacaggcgtgagccaccacacctggcctacctactcttatacatctcttagattcaaaacatactatgcacaagcctgtcaccaaacagatctctgaaaccttccctattgcagatgacataggtctctaaacttttgacacaagtaattctaacactgaattgggtactgtcgcatttttcaaaagcgttatgtggatgatttgactcagcatggaagactgaggttgtcttacacccattatttcccaccccactcttaagtgccagcatagtgctaaacacacagtaggtgctcattatttgtctagttaaaaaacaaattaaggctgtagcttaatatagcctcaggatatgtgtgtgcctgtgtgtgtgtgtgtgtgtgtgtgtgtgtgtgtgtgtgtgtgtttaaacataagcttacatataagcgtatgtaagttaatgcacaaatatatttcctcaaattcacataggatactcaaatatagatgtataattttgtagtcccactgtgattctccatatgtataacaagaaaattaaaggcataatacagctgtgaaatagctgatgagtttctattttaagctgatttttcaccagaagtatagtttctgctgccaaagtaaagtataaatgtatttgtatatgtgtggaaaataaataatttgtgacatgta

SEQ ID NO: 15846 - DNA, 6514 bp, Homo sapiens
  source 1..6514: mol_type = unassigned DNA
atggtttcagaaggaagtgcagcaggaagagactttgcaggaatggaagaggtgaggcagctccacgtgagattctgcaaagggattaagatttggcaccaggcttggtttctgtgcagcctcttaggcagagagccccaggagagggaagcaggctgtcagctgtggctttgcacgctctcagctgtcttgaaggttggttggctcttcccgctctctgaggtacccaattttaccttgttaaaggatggatgtggatgctggaggcttaaagaagaccagatctacaatgcagtgagaagagaagaaacagaaaatacagttggatctctactccatttcctcaccaagctcccagcctccgagacagcccatggaaggataagcgttggtccatgcttaaagcaatgtgtccgagacactgtatgtgagtatcgcgccaccctccaaaggacttcaatatcgcagtacatcaccggttctctcctagaagcaaccacgtctttgggagcaagaagtggccttctcagtacttttggaggatccactggacgaatgatgctgaaagaacgccagccaggcccctctgtggccaattccaatgccctcccttcaagttcagctgggatcagcaaggagctgatcgatctgcagcctctcatccagttcccagaggaagtcgccagcatcctgatggagcaagagcagactatttaccgcagggtcttgccagtcgactacctttgcttcttaacacgggacttgggcactcctgaatgccagagctccttgccctgcctcaaagcatccatctcagcgtcgattcttaccactcagaatggagagcacaatgcccttgaagatctggtgatgaggtttaatgaggtgagctcctgggtgacatggctgatcctcacggcaggctccatggaggagaagcgagaagtcttttcatatttggtgcatgtggccaaatgctgctggaacatgggcaactacaacgctgtcatggagttcttggctggcctcaggtcaagaaaagttttaaaaatgtggcagttcatggaccagtctgatattgagaccatgaggagcctgaaggatgctatggcccagcatgagtcctcttgtgagtacagaaaggtggtgacacgtgccctgcacatccctggctgtaaggtggttccattctgtggggtgtttctgaaggagctctgtgaagtgcttgacggcgcctccggtctcatgaagctttgcccgcggtacaattcccaagaagaaactttagagtttgtagcagattacagtggacaagataatttcttacaacgagtgggacaaaatggcttaaagaattcggagaaggagtccactgtcaacagcatctttcaggtcatccggagctgcaatcgaagtctggagacagacgaggaggacagccccagtgaaggaaacagctccaggaaaagctccttgaaggataaaagccgatggcagtttataattggagatttgttggattcagacaatgacatctttgagcaatccaaagaatacgactctcatggttcagaggactcacagaaggccttcgaccatgggacggagctcatcccttggtacgtgctgtccatccaagccgatgtgcaccagttcctgctgcagggggccacggtcatccactacgaccaggacacacacctctctgcccgctgcttcctccagcttcagcccgacaatagcaccttgacctgggtaaagcccacaactgcctccccagccagcagtaaagcaaaacttggtgtacttaataacacagctgagcctggaaaattcccactactgggtaatgctggattaagtagcctgacggaaggggtcttggatctttttgcagtgaaggctgtatacatgggccaccctggcattgatatacacactgtgtgtgttcagaacaaactgggtagcatgttcctgtcagagactggtgtgacattgctctatgggcttcagaccacagacaacagattattgcacttcgtggcaccaaagcacacagctaaaatgctcttcagcggattattggaactcactagagctgtgagaaagatgaggaaattccctgaccaaagacagcagtggctgcggaaacagtacgtcagcctttatcaggaggatggacggtatgaaggcccaactttggctcacgctgtggagttgtttggtggcagacggtggagtgctcgaaaccccagccccggaacatcagcaaagaatgctgagaagcccaatatgcagagaaacaataccctgggcataagcactaccaagaaaaagaagaaaatcctcatgaggggtgagagtggagaggtaactgacgatgagatggcaacccgaaaggccaagatgcacaaagagtgtcgaagccggagtggttctgatcctcaagacattaatgaacaagaagaatcagaggtgaatgccatcgctaaccctccaaaccccctcccttccagaagagcccactctttgaccacagctgggtcccccaacttggctgccgggacgtcatctcccatcaggccagtgtcctcccctgtgctgtcttcttcaaacaagagcccatccagtgcttggagcagtagtagctggcacgggcggatcaaaggcggcatgaagggatttcagagcttcatggtttcagatagcaacatgagttttgttgaatttgttgagctgttcaaatcattcagtgtcaggagccgcaaggacctgaaggatctgtttgatgtctatgcagtgccctgcaaccgatctggctccgagtcagccccactctacaccaacctgacaattgatgaaaacaccagcgatcttcagcctgacctagatctgttgaccagaaatgtctcggatttggggttgttcattaagagtaaacagcagctatcggacaaccagaggcagatatctgatgccattgctgctgcaagcattgtgacaaatggcactgggattgagagcacatctctgggcatttttggggtgggcatacttcagctcaacgatttcctcgtgaattgccaaggagaacactgcacttatgatgaaatcctcagcatcatccagaagttcgagcctagcatcagtatgtgtcatcagggactaatgtcatttgaagggtttgccaggtttctgatggataaagaaaattttgcctcaaaaaatgatgagtcacaggagaacattaaagaactgcagctacccctctcatactattacatcgaatcttcgcacaatacctacctcacgggccatcagctcaaaggagaatcctcggtagaactctacagccaggtccttttgcaaggctgtcgaagtgtagaattggactgctgggacggagacgatgggatgcccatcatttatcatggacatacgctgacaaccaagatccccttcaaggaagtggttgaagccattgatcgcagtgccttcatcaactctgacctgccaatcatcatatcgattgagaaccactgttcattgcctcagcaacgaaaaatggcagaaattttcaagactgtgtttggagaaaagctggtgactaaattcttatttgagactgatttctcagatgatccaatgcttccttcacctgaccaactcagaaagaaagttcttcttaaaaacaagaagctaaaagcccatcagacgccagtggatatcttaaagcaaaaggctcatcagttagcatctatgcaagtgcaggcttataatggtgggaatgccaacccccgacctgccaataatgaggaagaggaagatgaggaggacgaatatgattatgactatgaatccctttctgatgacaacattctggaagacagacctgaaaataaatcatgtaatgacaagcttcagtttgaatataatgaagaaatcccaaagaggataaagaaagcagataactctgcttgcaacaaaggaaaggtttatgatatggaactgggagaagaattttatcttgatcagaataaaaaggaaagcagacagattgcaccagagctttctgaccttgtaatctattgtcaagcagtaaaatttccaggactgtcaactctaaatgcatctggctctagcagaggaaaagaaaggaaaagcaggaagtccatttttggcaacaatccgggcagaatgagcccaggggagacagcatcatttaacaaaacatctggaaaaagttcctgtgaaggcattcgacagacctgggaggaatcttcttcccctctcaacccaaccacgtccctcagtgctatcattagaactcccaaatgttatcatatctcgtcgctgaatgaaaatgccgccaaacgtctgtgtcgcaggtattctcagaaactgacccagcacaccgcctgtcagctgctgagaacttaccctgctgccacccgcatcgactcttccaacccgaaccccctcatgttctggctccatgggatacagcttgtggcactcaactaccagactgatgatctccctttacatttaaatgctgcaatgtttgaggcaaatggtggttgtggttatgtattgaaacctccagttctgtgggacaagaactgccccatgtatcagaagttttctccactagaaagagatctggacagcatggatcctgcagtctattctttaactattgtctctggtcagaatgtgtgccccagtaatagcatgggaagcccgtgcattgaagtcgacgtcctgggcatgcctctggacagctgccatttccgcacaaagcccatccatcgaaacaccctgaaccccatgtggaacgagcagtttctgttccacgttcacttcgaagatcttgtatttcttcgttttgcagttgtggaaaacaatagttcagcggtaactgctcagagaatcattccactgaaagctttaaaacgaggatatcgacatcttcagctgcgaaaccttcacaatgaagtcttggagatttctagtttattcattaacagcagaaggatggaagaaaattcctctggcaataccatgtcagcctcttcgatgtttaatacagaagaaagaaaatgtttgcagactcacagagtcacggtgcatggggtcccagggccagagccctttaccgttttcactattaatggaggcaccaaggcaaagcagcttctgcagcaaattctgacaaatgaacaagacatcaaacctgttaccacagactattttttgatggaagaaaaatattttatatctaaagaaaagaatgaatgtaggaaacaaccattccagagagccattggtccagaagaggagatcatgcaaattttaagcagctggtttccagaagagggatacatgggcaggattgtcttaaaaacccagcaggaaaacctagaagagaaaaacattgttcaagatgacaaagaggtgatcttgagctcagaggaggagagtttctttgtccaagtgcatgatgtttctccagagcaacctcgaacagtcatcaaagcaccccgcgtcagcactgcacaggatgtcattcagcagaccttatgcaaagccaaatattcctacagcatcctgagcaaccccaatccaagcgactatgtgcttttggaagaggtggtgaaagacactaccaacaagaagactaccacaccaaagtcctctcagcgggtccttctggatcaggagtgtgtgtttcaagcccaaagcaagtggaaaggtgcaggaaaattcatccttaagctaaaggagcaggtgcaggcatctcgagaagataaaaagaaaggcatttctttcgcaagtgaactcaagaagctcaccaagtcaactaaacagccccgaggacttacatcaccttctcagctcttgacctcagaaagtatccaaaccaaggaggagaaacctgtgggtggcttgtcctccagtgacacaatggattaccgacagtgactaagggcagcatgtttaacccaggtatagtaagtcattgcaccatcctggaacagggcttaacttaaactactttgtaaggaaggcataattagtacaatgtcttttatcttttccaacaggaggatgtcccttgaaggcaggtaggaatgggaccttaaaacaggaaaagggctctgaagatatgtgtaacatgatatgctattgaacaccgcctataaagaaaaagggaaagaggctgggcgtggtggcgcatgcctgtaatcccagcactttgggaggccaaggcaggcagatcacctgaggtcagttcaagaccagcctgaccaacatggagaaaccccgtctctactaaaaatacaaaattagctgggcatggtggtgcatgcctataatcccagctactggggaggctgaggcaggagaatcacttgaacttggaaggcagaggttgcagtgagctgagatcacaccattgcactccagcctgggcaatgagagtgaaaactccgtctcaaaaaaaaaaaaa

SEQ ID NO: 15847 - DNA, 670 bp, Homo sapiens
  source 1..670: mol_type = unassigned DNA
caggcatctcgagaagataaaaagaaaggcatttctttcgcaagtgaactcaagaagctcaccaagtcaactaaacagccccgaggacttacatcaccttctcagctcttgacctcagaaagtatccaaaccaaggaggagaaacctgtgggtggcttgtcctccagtgacacaatggattaccgacagtgactaagggcagcatgtttaacccaggaggatgtcccttgaaggcaggtaggaatgggaccttaaaacaggaaaagggctctgaagatatgtgtaacatgatatgctattgaacaccgcctataaagaaaaagggaaagaggctgggcgtggtggcgcatgcctgtaatcccagcactttgggaggccaaggcaggcagatcacctgaggtcagttcaagaccagcctgaccaacatggagaaaccccgtctctactaaaaatacaaaattagctgggcatggtggtgcatgcctataatcccagctactggggaggctgaggcaggagaatcacttgaacttggaaggcagaggttgcagtgagctgagatcacaccattgcactccagcctgggcaatgagagtgaaaactccgtctcaaaaaaaaaaaaagaaaaaaaaaaatatatatatgtaacttgagcttttgtaattttaga

SEQ ID NO: 15848 - DNA, 6500 bp, Homo sapiens
  source 1..6500: mol_type = unassigned DNA
accctgcacgttgcaggatttttcactgtgatttgagattgggcttcattcagtgggtcgtggtgattaatggtttcagaaggaagtgcagcaggaagagactttgcaggaatggaagaggtgaggcagctccacgtgagattctgcaaagggattaagatttggcaccaggcttggtttctgtgcagcctcttaggcagagagccccaggagagggaagcaggctgtcagctgtggctttgcacgctctcagctgtcttgaaggttggttggctcttcccgctctctgaggtacccaattttaccttgttaaaggatggatgtggatgctggaggcttaaagaagaccagatctacaatgcagtgagaagagaagaaacagaaaatacagttggatctctactccatttcctcaccaagctcccagcctccgagacagcccatggaaggataagcgttggtccatgcttaaagcaatgtgtccgagacactgtatgtgagtatcgcgccaccctccaaaggacttcaatatcgcagtacatcaccggttctctcctagaagcaaccacgtctttgggagcaagaagtggccttctcagtacttttggaggatccactggacgaatgatgctgaaagaacgccagccaggcccctctgtggccaattccaatgccctcccttcaagttcagctgggatcagcaaggagctgatcgatctgcagcctctcatccagttcccagaggaagtcgccagcatcctgatggagcaagagcagactatttaccgcagggtcttgccagtcgactacctttgcttcttaacacgggacttgggcactcctgaatgccagagctccttgccctgcctcaaagcatccatctcagcgtcgattcttaccactcagaatggagagcacaatgcccttgaagatctggtgatgaggtttaatgaggtgagctcctgggtgacatggctgatcctcacggcaggctccatggaggagaagcgagaagtcttttcatatttggtgcatgtggccaaatgctgctggaacatgggcaactacaacgctgtcatggagttcttggctggcctcaggtcaagaaaagttttaaaaatgtggcagttcatggaccagtctgatattgagaccatgaggagcctgaaggatgctatggcccagcatgagtcctcttgtgagtacagaaaggtggtgacacgtgccctgcacatccctggctgtaaggtggttccattctgtggggtgtttctgaaggagctctgtgaagtgcttgacggcgcctccggtctcatgaagctttgcccgcggtacaattcccaagaagaaactttagagtttgtagcagattacagtggacaagataatttcttacaacgagtgggacaaaatggcttaaagaattcggagaaggagtccactgtcaacagcatctttcaggtcatccggagctgcaatcgaagtctggagacagacgaggaggacagccccagtgaaggaaacagctccaggaaaagctccttgaaggataaaagccgatggcagtttataattggagatttgttggattcagacaatgacatctttgagcaatccaaagaatacgactctcatggttcagaggactcacagaaggccttcgaccatgggacggagctcatcccttggtacgtgctgtccatccaagccgatgtgcaccagttcctgctgcagggggccacggtcatccactacgaccaggacacacacctctctgcccgctgcttcctccagcttcagcccgacaatagcaccttgacctgggtaaagcccacaactgcctccccagccagcagtaaagcaaaacttggtgtacttaataacacagctgagcctggaaaattcccactactgggtaatgctggattaagtagcctgacggaaggggtcttggatctttttgcagtgaaggctgtatacatgggccaccctggcattgatatacacactgtgtgtgttcagaacaaactgggtagcatgttcctgtcagagactggtgtgacattgctctatgggcttcagaccacagacaacagattattgcacttcgtggcaccaaagcacacagctaaaatgctcttcagcggattattggaactcactagagctgtgagaaagatgaggaaattccctgaccaaagacagcagtggctgcggaaacagtacgtcagcctttatcaggaggatggacggtatgaaggcccaactttggctcacgctgtggagttgtttggtggcagacggtggagtgctcgaaaccccagccccggaacatcagcaaagaatgctgagaagcccaatatgcagagaaacaataccctgggcataagcactaccaagaaaaagaagaaaatcctcatgaggggtgagagtggagaggtaactgacgatgagatggcaacccgaaaggccaagatgcacaaagagtgtcgaagccggagtggttctgatcctcaagacattaatgaacaagaagaatcagaggtgaatgccatcgctaaccctccaaaccccctcccttccagaagagcccactctttgaccacagctgggtcccccaacttggctgccgggacgtcatctcccatcaggccagtgtcctcccctgtgctgtcttcttcaaacaagagcccatccagtgcttggagcagtagtagctggcacgggcggatcaaaggcggcatgaagggatttcagagcttcatggtttcagatagcaacatgagttttgttgaatttgttgagctgttcaaatcattcagtgtcaggagccgcaaggacctgaaggatctgtttgatgtctatgcagtgccctgcaaccgatctggctccgagtcagccccactctacaccaacctgacaattgatgaaaacaccagcgatcttcagcctgacctagatctgttgaccagaaatgtctcggatttggggttgttcattaagagtaaacagcagctatcggacaaccagaggcagatatctgatgccattgctgctgcaagcattgtgacaaatggcactgggattgagagcacatctctgggcatttttggggtgggcatacttcagctcaacgatttcctcgtgaattgccaaggagaacactgcacttatgatgaaatcctcagcatcatccagaagttcgagcctagcatcagtatgtgtcatcagggactaatgtcatttgaagggtttgccaggtttctgatggataaagaaaattttgcctcaaaaaatgatgagtcacaggagaacattaaagaactgcagctacccctctcatactattacatcgaatcttcgcacaatacctacctcacgggccatcagctcaaaggagaatcctcggtagaactctacagccaggtccttttgcaaggctgtcgaagtgtagaattggactgctgggacggagacgatgggatgcccatcatttatcatggacatacgctgacaaccaagatccccttcaaggaagtggttgaagccattgatcgcagtgccttcatcaactctgacctgccaatcatcatatcgattgagaaccactgttcattgcctcagcaacgaaaaatggcagaaattttcaagactgtgtttggagaaaagctggtgactaaattcttatttgagactgatttctcagatgatccaatgcttccttcacctgaccaactcagaaagaaagttcttcttaaaaacaagaagctaaaagcccatcagacgccagtggatatcttaaagcaaaaggctcatcagttagcatctatgcaagtgcaggcttataatggtgggaatgccaacccccgacctgccaataatgaggaagaggaagatgaggaggacgaatatgattatgactatgaatccctttctgatgacaacattctggaagacagacctgaaaataaatcatgtaatgacaagcttcagtttgaatataatgaagaaatcccaaagaggataaagaaagcagataactctgcttgcaacaaaggaaaggtttatgatatggaactgggagaagaattttatcttgatcagaataaaaaggaaagcagacagattgcaccagagctttctgaccttgtaatctattgtcaagcagtaaaatttccaggactgtcaactctaaatgcatctggctctagcagaggaaaagaaaggaaaagcaggaagtccatttttggcaacaatccgggcagaatgagcccaggggagacagcatcatttaacaaaacatctggaaaaagttcctgtgaaggcattcgacagacctgggaggaatcttcttcccctctcaacccaaccacgtccctcagtgctatcattagaactcccaaatgttatcatatctcgtcgctgaatgaaaatgccgccaaacgtctgtgtcgcaggtattctcagaaactgacccagcacaccgcctgtcagctgctgagaacttaccctgctgccacccgcatcgactcttccaacccgaaccccctcatgttctggctccatgggatacagcttgtggcactcaactaccagactgatgatctccctttacatttaaatgctgcaatgtttgaggcaaatggtggttgtggttatgtattgaaacctccagttctgtgggacaagaactgccccatgtatcagaagttttctccactagaaagagatctggacagcatggatcctgcagtctattctttaactattgtctctggtcagaatgtgtgccccagtaatagcatgggaagcccgtgcattgaagtcgacgtcctgggcatgcctctggacagctgccatttccgcacaaagcccatccatcgaaacaccctgaaccccatgtggaacgagcagtttctgttccacgttcacttcgaagatcttgtatttcttcgttttgcagttgtggaaaacaatagttcagcggtaactgctcagagaatcattccactgaaagctttaaaacgaggatatcgacatcttcagctgcgaaaccttcacaatgaagtcttggagatttctagtttattcattaacagcagaaggatggaagaaaattcctctggcaataccatgtcagcctcttcgatgtttaatacagaagaaagaaaatgtttgcagactcacagagtcacggtgcatggggtcccagggccagagccctttaccgttttcactattaatggaggcaccaaggcaaagcagcttctgcagcaaattctgacaaatgaacaagacatcaaacctgttaccacagactattttttgatggaagaaaaatattttatatctaaagaaaagaatgaatgtaggaaacaaccattccagagagccattggtccagaagaggagatcatgcaaattttaagcagctggtttccagaagagggatacatgggcaggattgtcttaaaaacccagcaggaaaacctagaagagaaaaacattgttcaagatgacaaagaggtgatcttgagctcagaggaggagagtttctttgtccaagtgcatgatgtttctccagagcaacctcgaacagtcatcaaagcaccccgcgtcagcactgcacaggatgtcattcagcagaccttatgcaaagccaaatattcctacagcatcctgagcaaccccaatccaagcgactatgtgcttttggaagaggtggtgaaagacactaccaacaagaagactaccacaccaaagtcctctcagcgggtccttctggatcaggagtgtgtgtttcaagcccaaagcaagtggaaaggtgcaggaaaattcatccttaagctaaaggagcaggtgcaggcatctcgagaagataaaaagaaaggcatttctttcgcaagtgaactcaagaagctcaccaagtcaactaaacagccccgaggacttacatcaccttctcagctcttgacctcagaaagtatccaaaccaaggaggagaaacctgtgggtggcttgtcctccagtgacacaatggattaccgacagtgactaagggcagcatgtttaacccaggtgaagatctttaagcaagaagttaaagagtgaacatggtggaaaaaatataattattttcatcagacttaaactggaaattgatgatttctgaactgaagccttcacacatgtgagatccatgctgaggagaagcaaaatggcacagggctagttgccaccaaccaatttactgatgaatgaagcccaggggactgccattttataaatgtcagcagttggaaaaatcgtcacgaattgacttagagcaagggtcagcaagcttgtctgtaaagggccaaacagtaaatattttagggctgggggccataaaatatgttgcaaccacccaattctgccattgtagtgcaaaagcagccatagacaacacatacatgaacgaacgtggctgtattccaataaaactttatttatggacactg

SEQ ID NO: 15849 - DNA, 3525 bp, Homo sapiens
  source 1..3525: mol_type = unassigned DNA
ataatgccttgagggctttaacgcgctgcacgaagcatgcatgtctcatacccaaagtagccacagcgcctgcattcccacaatagcggcagccccgagcagatgcttccagcgtgcttatctggctgtgcttttcactttgggacaaagttctataatcatatctcatggatttattttctccacactataaagcctgaattgtgaagatctcatcatgccataaagggcagcatgagccaagttctgggggctgctaaggatttctttgccttttttccccccaccctttttggaaatgtgtatcaggaaaaggctttgcctttagagagaaattgtactgctcttgccaataatgtgtaatagtattaaatttaatggcagaccttgaagtgtataaaaacttaagtccagaaaaagttgaaagatgcatgagtgtgatgcagtccgggacacagatgatcaagctgaaacgtggaaccaaagggcttgtccgcctcttttacctggatgagcaccggacacgcctccgatggcgaccctctaggaagagtgagaaggcaaaaatacttattgattccatttacaaagtgactgagggccggcagtctgaaatattccacagacaagctgaggggaacttcgaccccagctgctgcttcaccatctaccatggcaaccacatggagtccctggacctcatcacctccaaccccgaggaggcccgcacctggatcacaggcctcaagtacctgatggctggcatcagtgatgaagactcccttgccaaaaggcagaggacccatgaccaatgggtgaagcagacctttgaggaagctgataagaatggtgacggcttgctgaatattgaagagatacatcagctgatgcataaactgaatgttaatctgccccgaagaaaagtcagacaaatgtttcaggaagccgacacagatgagaatcagggaactttgacatttgaagagttctgtgttttttacaaaatgatgtctttgagacgagacctttatttgttacttttgagctacagtgacaagaaagatcacctaactgtggaagaactggctcagtttttgaaggtggagcaaaagatgaataatgtgacaacggactattgtcttgacatcataaagaagtttgaagtttcagaagaaaataaggtgaaaaatgttcttggcatagaaggcttcacgaacttcatgcgtagtcctgcctgtgacatatttaacccattgcaccatgaagtgtaccaagacatggatcagcccctctgcaactactacattgcttcctctcacaatacatacctgactggagaccagctcctttctcagtccaaagtggatatgtatgcacgggtgctgcaagagggctgtcgctgtgtggaagttgactgttgggatggcccagatggagagccagtagtacatcatggttacactctcacttcaaaaattctcttcagagatgttgtggagaccatcaacaagcatgcctttgtgaagaatgagtttcctgttatattgtctatcgagaatcactgcagtatccagcagcaaaggaagattgctcagtacctgaaaggaatattcggagacaaactggacctgtcatctgttgatacaggggagtgcaagcagcttccaagccctcaaagtttgaaaggcaaaattctagtgaagggtaagaagttgccttatcaccttggggatgatgcagaggaaggggaagtttctgatgaggacagtgcagatgaaattgaagacgagtgcaaattcaagctccattatagtaatgggaccactgagcatcaggtggaatctttcataaggaaaaaactggagtcactgttaaaagaatctcaaattcgagataaagaagatcctgatagtttcacagtgcgggcactactgaaggccacgcatgaaggcttaaatgcacacctgaagcagagtccagatgtaaaggaaagtggaaagaaatcacatggacgatccctcatgaccaactttggaaaacataagaaaactacaaaatcacggtctaaatcttacagtactgatgatgaggaagacacacagcagagtactggcaaggagggtggccagctgtacagattgggtcgccgaaggaaaaccatgaagctctgccgagaactctctgatttggttgtgtacacaaactccgtggccgctcaggacattgtggatgacggaaccacaggaaatgtgttatcattcagtgaaacaagagcacatcaggttgttcagcaaaaatcagagcagttcatgatttataatcaaaagcaactcacgaggatttacccctctgcctaccgcattgattccagtaacttcaaccctctcccctactggaacgcaggctgccagctagtggcactgaattatcaatctgaaggacgaatgatgcagttaaaccgagccaaattcaaggcaaatggcaattgtggctatgtcctcaaaccccagcaaatgtgcaaaggtactttcaaccctttctctggtgaccctcttcctgccaaccccaaaaagcagctcatcctgaaagttatcagtggacagcaactccccaaacctccagactccatgtttggagatcgaggcgagatcattgacccttttgttgaagttgaaattattggattgccagtagattgttgtaaagatcaaacccgtgtggtagatgacaatggatttaaccctgtgtgggaagaaacactgacatttacagtacacatgccagaaatagctttggttcggttccttgtgtgggatcacgatcccattggacgagactttgttggacaaagaactgtgaccttcagcagcttagtgcctggctaccggcatgtctatttggaaggactgacagaagcatccatatttgtacacataaccatcaatgaaatctatggaaagaacagacaactccagggtctgaagggactgttcaataagaatcctaggcacagttcttcagaaaacaattcccattatgtacggaagcgatccattggagatagaattctgcgacgcacagctagcgccccagccaaaggcaggaaaaagagcaaaatgggcttccaagaaatggtggagataaaggattctgtgtccgaggccacaagagatcaagatggcgtgctgaggaggaccacacgcagtttgcaagcacgccctgtctctatgcctgttgacagaaaccttctgggagctttgtcgctgcctgtatctgaaacagcaaaagacattgaaggaaaagaaaactctctagactctagcttttgcaggccgactgagcaggctaaagcagaaatgtgcaaagtgcctttccccagacagttagaatgtgtaatgaagatggaaatttccgagacctgaatccccaaacccagactgatctctcttctcttcttgaatataaaagtaagctggcaagatttaaaaaactgaacccaaataaatattcatcatttttttcttc

SEQ ID NO: 15850 - DNA, 6413 bp, Homo sapiens
  source 1..6413: mol_type = unassigned DNA
gagaaagcaggttgtggcggcggcgccctgctcttccccgctcgtctggggcttctgctggctagtggggagaagtgctcttctaggggggcttttctggcccttggcaggggtttggagttggagtcacaggggccaataactcatcaccccagcacttcggaggtggctccttgtgccacggactccgaggagtccttcagctactgaacactcaaagctgaggagggcaatttggttttgatgctgtgccagaaatcttctgacaatgagttactggaacttggaaaaaaggaactgtgtgcagtaccgcaggcattttctggtggacaacagtgtgtttcatgttgaaagatgcatgagtgtgatgcagtccgggacacagatgatcaagctgaaacgtggaaccaaagggcttgtccgcctcttttacctggatgagcaccggacacgcctccgatggcgaccctctaggaagagtgagaaggcaaaaatacttattgattccatttacaaagtgactgagggccggcagtctgaaatattccacagacaagctgaggggaacttcgaccccagctgctgcttcaccatctaccatggcaaccacatggagtccctggacctcatcacctccaaccccgaggaggcccgcacctggatcacaggcctcaagtacctgatggctggcatcagtgatgaagactcccttgccaaaaggcagaggacccatgaccaatgggtgaagcagacctttgaggaagctgataagaatggtgacggcttgctgaatattgaagagatacatcagctgatgcataaactgaatgttaatctgccccgaagaaaagtcagacaaatgtttcaggaagccgacacagatgagaatcagggaactttgacatttgaagagttctgtgttttttacaaaatgatgtctttgagacgagacctttatttgttacttttgagctacagtgacaagaaagatcacctaactgtggaagaactggctcagtttttgaaggtggagcaaaagatgaataatgtgacaacggactattgtcttgacatcataaagaagtttgaagtttcagaagaaaataaggtgaaaaatgttcttggcatagaaggcttcacgaacttcatgcgtagtcctgcctgtgacatatttaacccattgcaccatgaagtgtaccaagacatggatcagcccctctgcaactactacattgcttcctctcacaatacatacctgactggagaccagctcctttctcagtccaaagtggatatgtatgcacgggtgctgcaagagggctgtcgctgtgtggaagttgactgttgggatggcccagatggagagccagtagtacatcatggttacactctcacttcaaaaattctcttcagagatgttgtggagaccatcaacaagcatgcctttgtgaagaatgagtttcctgttatattgtctatcgagaatcactgcagtatccagcagcaaaggaagattgctcagtacctgaaaggaatattcggagacaaactggacctgtcatctgttgatacaggggagtgcaagcagcttccaagccctcaaagtttgaaaggcaaaattctagtgaagggtaagaagttgccttatcaccttggggatgatgcagaggaaggggaagtttctgatgaggacagtgcagatgaaattgaagacgagtgcaaattcaagctccattatagtaatgggaccactgagcatcaggtggaatctttcataaggaaaaaactggagtcactgttaaaagaatctcaaattcgagataaagaagatcctgatagtttcacagtgcgggcactactgaaggccacgcatgaaggcttaaatgcacacctgaagcagagtccagatgtaaaggaaagtggaaagaaatcacatggacgatccctcatgaccaactttggaaaacataagaaaactacaaaatcacggtctaaatcttacagtactgatgatgaggaagacacacagcagagtactggcaaggagggtggccagctgtacagattgggtcgccgaaggaaaaccatgaagctctgccgagaactctctgatttggttgtgtacacaaactccgtggccgctcaggacattgtggatgacggaaccacaggaaatgtgttatcattcagtgaaacaagagcacatcaggttgttcagcaaaaatcagagcagttcatgatttataatcaaaagcaactcacgaggatttacccctctgcctaccgcattgattccagtaacttcaaccctctcccctactggaacgcaggctgccagctagtggcactgaattatcaatctgaaggacgaatgatgcagttaaaccgagccaaattcaaggcaaatggcaattgtggctatgtcctcaaaccccagcaaatgtgcaaaggtactttcaaccctttctctggtgaccctcttcctgccaaccccaaaaagcagctcatcctgaaagttatcagtggacagcaactccccaaacctccagactccatgtttggagatcgaggcgagatcattgacccttttgttgaagttgaaattattggattgccagtagattgttgtaaagatcaaacccgtgtggtagatgacaatggatttaaccctgtgtgggaagaaacactgacatttacagtacacatgccagaaatagctttggttcggttccttgtgtgggatcacgatcccattggacgagactttgttggacaaagaactgtgaccttcagcagcttagtgcctggctaccggcatgtctatttggaaggactgacagaagcatccatatttgtacacataaccatcaatgaaatctatggaaagaacagacaactccagggtctgaagggactgttcaataagaatcctaggcacagttcttcagaaaacaattcccattatgtacggaagcgatccattggagatagaattctgcgacgcacagctagcgccccagccaaaggcaggaaaaagagcaaaatgggcttccaagaaatggtggagataaaggattctgtgtccgaggccacaagagatcaagatggcgtgctgaggaggaccacacgcagtttgcaagcacgccctgtctctatgcctgttgacagaaaccttctgggagctttgtcgctgcctgtatctgaaacagcaaaagacattgaaggaaaagaaaactctctagcagaagataaagatggcagaagaaaagggaaagcaagtataaaagatccacattttctaaatttcaacaaaaagttatcatcctcctccagtgctctgctccacaaagataccagccaaggggacaccattgtatctactgcccacatgtcagtcacaggagaacagctgggcatgtcaagtcctaggggtgggagaaccacatcaaatgccacaagcaattgccaggaaaacccctgtcccagcaagtctctctccccaaagcagcatttggctcccgatcctgtagttaaccccacacaagatctgcatggtgtgaaaatcaaggaaaagggtaatcctgaggactttgtggaagggaaaagcatcttgtcaggaagcgtcctttctcatagcaacctagaaattaagaacctggaaggtaataggggtaagggccgagctgcaacatccttttctttgtcagacgtctccatgctctgttctgacatacctgacctacattcaactgcaattctgcaggagagtgtaatttcccatcttattgacaatgtcactttaacaaatgagaatgagccgggcagttccatctcagccctgattggccagtttgatgagaccaacaatcaggctctcacagttgtttctcatcttcataataccagtgtgatgtcaggccattgtcccttgcctagcctgggcctaaaaatgcccatcaagcatggtttttgcaagggaaaatccaagtcttccttcctgtgctcatctccggagctgatagcactctcgagttctgagaccaccaaacatgcaacgaacacagtttatgaaactacctgcactcccatctctaaaaccaaaccagatgatgacctttctagtaaggccaagacagcggccttagaaagcaacctgcctggatcccctaatacttctcgtggctggttaccaaaaagtcctaccaagggagaagactgggaaacactgaagagctgcagccctgcctcttcccctgatttgaccctggaggatgtaatagctgatcccactctctgtttcaattctggggagagcagccttgtggaaattgatggagaatcagaaaatctttctctaacaacctgtgaatataggagagagggcacaagtcaacttgcttctcctttaaaactcaagtacaatcagggtgtggtagaacactttcaaagaggtttgagaaacggctactgtaaagagaccctccgcccttctgtccctgaaatattcaacaatattcaagatgtcaaaactcaaagtatttcttatctagcctatcagggtgctggctttgtgcataatcatttctcagattcagatgcaaaaatgttccagacctgtgtgccccagcaatctagtgctcaagatatgcatgtccctgtacccaagcagttggcacatcttcctttgcctgctctgaaactgcctagtccttgcaaatccaaaagtctgggggacttaacatcagaggacattgcctgcaattttgagagcaagtaccagtgtattagtaagagttttgttacaactggcattagagacaagaagggcgtgactgtgaagacaaagtcgttagagcctatagatgccctgaccgagcagcttcggaagcttgtgtcctttgaccaggaagacaactgccaagtgctatattcaaagcaggatgccaatcagctcccccgggcactggtcaggaagttgtcatccagaagtcagagcagagtgcgcaatattgctagtcgtgccaaggagaaacaggaagccaacaagcagaaagttccaaaccccagcaatggggcaggagtggttcttagaaacaaaccctcagcacccacccctgcagtgaatcgccactccaccggctcctacatcgcaggctacctgaagaacacgaaagggggtggccttgaaggccggggcatcccagagggggcatgcacggctcttcactatggccacgttgaccagttttgttcagataattctgttttgcagactgagccaagcagtgatgataaaccagaaatttattttcttttgagactgtgaattatttaaaactgcattcttaaggttttcaaggtattctgtagaatgtcagagttttcagtaaataagttccttggctttggaatgattttcaaatgtatttttaaacttgtatttgggtctccctttgacttcatgtgttctccctgttaatgcgtttgtatatagatttggtgacatttcccatgtacctattatgatctttctcccttgagttgttgtaaactgtatcagtatgaaatatgtgcatgccctagatgtgaaactcctcagcagctcgggttataatgtgtgtgtgtttcaccaagatgtcctttactgtgtcctcagattgcagtcacaaatgtagtcatttttactctctaactgttgagttgattaagagactttgcaaacgacaaagggatgaattccttactttaatctgttatcatttttcctatgtttccctctttgttcagaagcccagatgcatttttataactcagttttaaaaactttaaaatagttaccttgccttttaggatgttcttatcccacccataatgagagttgaaaggggatggatagctgctccccatgcccttcccactttttggaataggccgtgagggtgtgaggaagaaggctgtcttttgtacataaggacaaaattgtttgttttacataaattttgttacatatttttgctaatggctttgtatgtaacaagaagcgagttgccaaactacctgttgtacttttgaattttctgattgaattacagactgcgaacaacggctttcagaatgagggacttccatcagactctaatgataatagtagcacaaattgaaaacttccccaaagctttcacagaatattttctcataataaaatccaagtgaacagataattagaagaaacccttttccttcagggaaccaagcaactctattttagtactgacatgcattattttcactgtgaattcacttttttattgcatgttcagatgtccctctttgttttttttttttgtaacattaactgcaatgatgttcttcctggaattcatgaaaatataattaaaacacatttttaaaca

SEQ ID NO: 15851 - DNA, 6196 bp, Homo sapiens
  source 1..6196: mol_type = unassigned DNA
atggcagaccttgaagtgtataaaaacttaagtccagaaaaagttgaaagatgcatgagtgtgatgcagtccgggacacagatgatcaagctgaaacgtggaaccaaagggcttgtccgcctcttttacctggatgagcaccggacacgcctccgatggcgaccctctaggaagagtgagaaggcaaaaatacttattgattccatttacaaagtgactgagggccggcagtctgaaatattccacagacaagctgaggggaacttcgaccccagctgctgcttcaccatctaccatggcaaccacatggagtccctggacctcatcacctccaaccccgaggaggcccgcacctggatcacaggcctcaagtacctgatggctggcatcagtgatgaagactcccttgccaaaaggcagaggacccatgaccaatgggtgaagcagacctttgaggaagctgataagaatggtgacggcttgctgaatattgaagagatacatcagctgatgcataaactgaatgttaatctgccccgaagaaaagtcagacaaatgtttcaggaagccgacacagatgagaatcagggaactttgacatttgaagagttctgtgttttttacaaaatgatgtctttgagacgagacctttatttgttacttttgagctacagtgacaagaaagatcacctaactgtggaagaactggctcagtttttgaaggtggagcaaaagatgaataatgtgacaacggactattgtcttgacatcataaagaagtttgaagtttcagaagaaaataaggtgaaaaatgttcttggcatagaaggcttcacgaacttcatgcgtagtcctgcctgtgacatatttaacccattgcaccatgaagtgtaccaagacatggatcagcccctctgcaactactacattgcttcctctcacaatacatacctgactggagaccagctcctttctcagtccaaagtggatatgtatgcacgggtgctgcaagagggctgtcgctgtgtggaagttgactgttgggatggcccagatggagagccagtagtacatcatggttacactctcacttcaaaaattctcttcagagatgttgtggagaccatcaacaagcatgcctttgtgaagaatgagtttcctgttatattgtctatcgagaatcactgcagtatccagcagcaaaggaagattgctcagtacctgaaaggaatattcggagacaaactggacctgtcatctgttgatacaggggagtgcaagcagcttccaagccctcaaagtttgaaaggcaaaattctagtgaagggtaagaagttgccttatcaccttggggatgatgcagaggaaggggaagtttctgatgaggacagtgcagatgaaattgaagacgagtgcaaattcaagctccattatagtaatgggaccactgagcatcaggtggaatctttcataaggaaaaaactggagtcactgttaaaagaatctcaaattcgagataaagaagatcctgatagtttcacagtgcgggcactactgaaggccacgcatgaaggcttaaatgcacacctgaagcagagtccagatgtaaaggaaagtggaaagaaatcacatggacgatccctcatgaccaactttggaaaacataagaaaactacaaaatcacggtctaaatcttacagtactgatgatgaggaagacacacagcagagtactggcaaggagggtggccagctgtacagattgggtcgccgaaggaaaaccatgaagctctgccgagaactctctgatttggttgtgtacacaaactccgtggccgctcaggacattgtggatgacggaaccacaggaaatgtgttatcattcagtgaaacaagagcacatcaggttgttcagcaaaaatcagagcagttcatgatttataatcaaaagcaactcacgaggatttacccctctgcctaccgcattgattccagtaacttcaaccctctcccctactggaacgcaggctgccagctagtggcactgaattatcaatctgaaggacgaatgatgcagttaaaccgagccaaattcaaggcaaatggcaattgtggctatgtcctcaaaccccagcaaatgtgcaaaggtactttcaaccctttctctggtgaccctcttcctgccaaccccaaaaagcagctcatcctgaaagttatcagtggacagcaactccccaaacctccagactccatgtttggagatcgaggcgagatcattgacccttttgttgaagttgaaattattggattgccagtagattgttgtaaagatcaaacccgtgtggtagatgacaatggatttaaccctgtgtgggaagaaacactgacatttacagtacacatgccagaaatagctttggttcggttccttgtgtgggatcacgatcccattggacgagactttgttggacaaagaactgtgaccttcagcagcttagtgcctggctaccggcatgtctatttggaaggactgacagaagcatccatatttgtacacataaccatcaatgaaatctatggaaagtggagccctttaatactcaaccccagttatactatattgcactttctaggagctacaaagaacagacaactccagggtctgaagggactgttcaataagaatcctaggcacagttcttcagaaaacaattcccattatgtacggaagcgatccattggagatagaattctgcgacgcacagctagcgccccagccaaaggcaggaaaaagagcaaaatgggcttccaagaaatggtggagataaaggattctgtgtccgaggccacaagagatcaagatggcgtgctgaggaggaccacacgcagtttgcaagcacgccctgtctctatgcctgttgacagaaaccttctgggagctttgtcgctgcctgtatctgaaacagcaaaagacattgaaggaaaagaaaactctctagtacaaatctgaataggaaacaacttaagcagaagataaagatggcagaagaaaagggaaagcaagtataaaagatccacattttctaaatttcaacaaaaagttatcatcctcctccagtgctctgctccacaaagataccagccaaggggacaccattgtatctactgcccacatgtcagtcacaggagaacagctgggcatgtcaagtcctaggggtgggagaaccacatcaaatgccacaagcaattgccaggaaaacccctgtcccagcaagtctctctccccaaagcagcatttggctcccgatcctgtagttaaccccacacaagatctgcatggtgtgaaaatcaaggaaaagggtaatcctgaggactttgtggaagggaaaagcatcttgtcaggaagcgtcctttctcatagcaacctagaaattaagaacctggaaggtaataggggtaagggccgagctgcaacatccttttctttgtcagacgtctccatgctctgttctgacatacctgacctacattcaactgcaattctgcaggagagtgtaatttcccatcttattgacaatgtcactttaacaaatgagaatgagccgggcagttccatctcagccctgattggccagtttgatgagaccaacaatcaggctctcacagttgtttctcatcttcataataccagtgtgatgtcaggccattgtcccttgcctagcctgggcctaaaaatgcccatcaagcatggtttttgcaagggaaaatccaagtcttccttcctgtgctcatctccggagctgatagcactctcgagttctgagaccaccaaacatgcaacgaacacagtttatgaaactacctgcactcccatctctaaaaccaaaccagatgatgacctttctagtaaggccaagacagcggccttagaaagcaacctgcctggatcccctaatacttctcgtggctggttaccaaaaagtcctaccaagggagaagactgggaaacactgaagagctgcagccctgcctcttcccctgatttgaccctggaggatgtaatagctgatcccactctctgtttcaattctggggagagcagccttgtggaaattgatggagaatcagaaaatctttctctaacaacctgtgaatataggagagagggcacaagtcaacttgcttctcctttaaaactcaagtacaatcagggtgtggtagaacactttcaaagaggtttgagaaacggctactgtaaagagaccctccgcccttctgtccctgaaatattcaacaatattcaagatgtcaaaactcaaagtatttcttatctagcctatcagggtgctggctttgtgcataatcatttctcagattcagatgcaaaaatgttccagacctgtgtgccccagcaatctagtgctcaagatatgcatgtccctgtacccaagcagttggcacatcttcctttgcctgctctgaaactgcctagtccttgcaaatccaaaagtctgggggacttaacatcagaggacattgcctgcaattttgagagcaagtaccagtgtattagtaagagttttgttacaactggcattagagacaagaagggcgtgactgtgaagacaaagtcgttagagcctatagatgccctgaccgagcagcttcggaagcttgtgtcctttgaccaggaagacaactgccaagtgctatattcaaagcaggatgccaatcagctcccccgggcactggtcaggaagttgtcatccagaagtcagagcagagtgcgcaatattgctagtcgtgccaaggagaaacaggaagccaacaagcagaaagttccaaaccccagcaatggggcaggagtggttcttagaaacaaaccctcagcacccacccctgcagtgaatcgccactccaccggctcctacatcgcaggctacctgaagaacacgaaagggggtggccttgaaggccggggcatcccagagggggcatgcacggctcttcactatggccacgttgaccagttttgttcagataattctgttttgcagactgagccaagcagtgatgataaaccagaaatttattttcttttgagactgtgaattatttaaaactgcattcttaaggttttcaaggtattctgtagaatgtcagagttttcagtaaataagttccttggctttggaatgattttcaaatgtatttttaaacttgtatttgggtctccctttgacttcatgtgttctccctgttaatgcgtttgtatatagatttggtgacatttcccatgtacctattatgatctttctcccttgagttgttgtaaactgtatcagtatgaaatatgtgcatgccctagatgtgaaactcctcagcagctcgggttataatgtgtgtgtgtttcaccaagatgtcctttactgtgtcctcagattgcagtcacaaatgtagtcatttttactctctaactgttgagttgattaagagactttgcaaacgacaaagggatgaattccttactttaatctgttatcatttttcctatgtttccctctttgttcagaagcccagatgcatttttataactcagttttaaaaactttaaaatagttaccttgccttttaggatgttcttatcccacccataatgagagttgaaaggggatggatagctgctccccatgcccttcccactttttggaataggccgtgagggtgtgaggaagaaggctgtcttttgtacataaggacaaaattgtttgttttacataaattttgttacatatttttgctaatggctttgtatgtaacaagaagcgagttgccaaactacctgttgtacttttgaattttctgattgaattacagactgcgaacaacggctttcagaatgagggacttccatcagactctaatgataatagtagcacaaattgaaaacttccccaaagctttcacagaatattttctcataataaaatccaagtgaacagataattagaagaaacccttttccttcagggaaccaagcaactctattttagtactgacatgcattattttcactgtgaattcacttttttattgcatgttcagatgtccctctttgttttttttttttgtaacattaactgcaatgatgttcttcctggaattcatgaaaatataattaaaacacatttttaaac

SEQ ID NO: 15852 - DNA, 6168 bp, Homo sapiens
  source 1..6168: mol_type = unassigned DNA
atggcagaccttgaagtgtataaaaacttaagtccagaaaaagttgaaagatgcatgagtgtgatgcagtccgggacacagatgatcaagctgaaacgtggaaccaaagggcttgtccgcctcttttacctggatgagcaccggacacgcctccgatggcgaccctctaggaagagtgagaaggcaaaaatacttattgattccatttacaaagtgactgagggccggcagtctgaaatattccacagacaagctgaggggaacttcgaccccagctgctgcttcaccatctaccatggcaaccacatggagtccctggacctcatcacctccaaccccgaggaggcccgcacctggatcacaggcctcaagtacctgatggctggcatcagtgatgaagactcccttgccaaaaggcagaggacccatgaccaatgggtgaagcagacctttgaggaagctgataagaatggtgacggcttgctgaatattgaagagatacatcagctgatgcataaactgaatgttaatctgccccgaagaaaagtcagacaaatgtttcaggaagccgacacagatgagaatcagggaactttgacatttgaagagttctgtgttttttacaaaatgatgtctttgagacgagacctttatttgttacttttgagctacagtgacaagaaagatcacctaactgtggaagaactggctcagtttttgaaggtggagcaaaagatgaataatgtgacaacggactattgtcttgacatcataaagaagtttgaagtttcagaagaaaataaggtgaaaaatgttcttggcatagaaggcttcacgaacttcatgcgtagtcctgcctgtgacatatttaacccattgcaccatgaagtgtaccaagacatggatcagcccctctgcaactactacattgcttcctctcacaatacatacctgactggagaccagctcctttctcagtccaaagtggatatgtatgcacgggtgctgcaagagggctgtcgctgtgtggaagttgactgttgggatggcccagatggagagccagtagtacatcatggttacactctcacttcaaaaattctcttcagagatgttgtggagaccatcaacaagcatgcctttgtgaagaatgagtttcctgttatattgtctatcgagaatcactgcagtatccagcagcaaaggaagattgctcagtacctgaaaggaatattcggagacaaactggacctgtcatctgttgatacaggggagtgcaagcagcttccaagccctcaaagtttgaaaggcaaaattctagtgaagggtaagaagttgccttatcaccttggggatgatgcagaggaaggggaagtttctgatgaggacagtgcagatgaaattgaagacgagtgcaaattcaagctccattatagtaatgggaccactgagcatcaggtggaatctttcataaggaaaaaactggagtcactgttaaaagaatctcaaattcgagataaagaagatcctgatagtttcacagtgcgggcactactgaaggccacgcatgaaggcttaaatgcacacctgaagcagagtccagatgtaaaggaaagtggaaagaaatcacatggacgatccctcatgaccaactttggaaaacataagaaaactacaaaatcacggtctaaatcttacagtactgatgatgaggaagacacacagcagagtactggcaaggagggtggccagctgtacagattgggtcgccgaaggaaaaccatgaagctctgccgagaactctctgatttggttgtgtacacaaactccgtggccgctcaggacattgtggatgacggaaccacaggaaatgtgttatcattcagtgaaacaagagcacatcaggttgttcagcaaaaatcagagcagttcatgatttataatcaaaagcaactcacgaggatttacccctctgcctaccgcattgattccagtaacttcaaccctctcccctactggaacgcaggctgccagctagtggcactgaattatcaatctgaaggacgaatgatgcagttaaaccgagccaaattcaaggcaaatggcaattgtggctatgtcctcaaaccccagcaaatgtgcaaaggtactttcaaccctttctctggtgaccctcttcctgccaaccccaaaaagcagctcatcctgaaagttatcagtggacagcaactccccaaacctccagactccatgtttggagatcgaggcgagatcattgacccttttgttgaagttgaaattattggattgccagtagattgttgtaaagatcaaacccgtgtggtagatgacaatggatttaaccctgtgtgggaagaaacactgacatttacagtacacatgccagaaatagctttggttcggttccttgtgtgggatcacgatcccattggacgagactttgttggacaaagaactgtgaccttcagcagcttagtgcctggctaccggcatgtctatttggaaggactgacagaagcatccatatttgtacacataaccatcaatgaaatctatggaaagtggagccctttaatactcaaccccagttatactatattgcactttctaggagctacaaagaacagacaactccagggtctgaagggactgttcaataagaatcctaggcacagttcttcagaaaacaattcccattatgtacggaagcgatccattggagatagaattctgcgacgcacagctagcgccccagccaaaggcaggaaaaagagcaaaatgggcttccaagaaatggtggagataaaggattctgtgtccgaggccacaagagatcaagatggcgtgctgaggaggaccacacgcagtttgcaagcacgccctgtctctatgcctgttgacagaaaccttctgggagctttgtcgctgcctgtatctgaaacagcaaaagacattgaaggaaaagaaaactctctagcagaagataaagatggcagaagaaaagggaaagcaagtataaaagatccacattttctaaatttcaacaaaaagttatcatcctcctccagtgctctgctccacaaagataccagccaaggggacaccattgtatctactgcccacatgtcagtcacaggagaacagctgggcatgtcaagtcctaggggtgggagaaccacatcaaatgccacaagcaattgccaggaaaacccctgtcccagcaagtctctctccccaaagcagcatttggctcccgatcctgtagttaaccccacacaagatctgcatggtgtgaaaatcaaggaaaagggtaatcctgaggactttgtggaagggaaaagcatcttgtcaggaagcgtcctttctcatagcaacctagaaattaagaacctggaaggtaataggggtaagggccgagctgcaacatccttttctttgtcagacgtctccatgctctgttctgacatacctgacctacattcaactgcaattctgcaggagagtgtaatttcccatcttattgacaatgtcactttaacaaatgagaatgagccgggcagttccatctcagccctgattggccagtttgatgagaccaacaatcaggctctcacagttgtttctcatcttcataataccagtgtgatgtcaggccattgtcccttgcctagcctgggcctaaaaatgcccatcaagcatggtttttgcaagggaaaatccaagtcttccttcctgtgctcatctccggagctgatagcactctcgagttctgagaccaccaaacatgcaacgaacacagtttatgaaactacctgcactcccatctctaaaaccaaaccagatgatgacctttctagtaaggccaagacagcggccttagaaagcaacctgcctggatcccctaatacttctcgtggctggttaccaaaaagtcctaccaagggagaagactgggaaacactgaagagctgcagccctgcctcttcccctgatttgaccctggaggatgtaatagctgatcccactctctgtttcaattctggggagagcagccttgtggaaattgatggagaatcagaaaatctttctctaacaacctgtgaatataggagagagggcacaagtcaacttgcttctcctttaaaactcaagtacaatcagggtgtggtagaacactttcaaagaggtttgagaaacggctactgtaaagagaccctccgcccttctgtccctgaaatattcaacaatattcaagatgtcaaaactcaaagtatttcttatctagcctatcagggtgctggctttgtgcataatcatttctcagattcagatgcaaaaatgttccagacctgtgtgccccagcaatctagtgctcaagatatgcatgtccctgtacccaagcagttggcacatcttcctttgcctgctctgaaactgcctagtccttgcaaatccaaaagtctgggggacttaacatcagaggacattgcctgcaattttgagagcaagtaccagtgtattagtaagagttttgttacaactggcattagagacaagaagggcgtgactgtgaagacaaagtcgttagagcctatagatgccctgaccgagcagcttcggaagcttgtgtcctttgaccaggaagacaactgccaagtgctatattcaaagcaggatgccaatcagctcccccgggcactggtcaggaagttgtcatccagaagtcagagcagagtgcgcaatattgctagtcgtgccaaggagaaacaggaagccaacaagcagaaagttccaaaccccagcaatggggcaggagtggttcttagaaacaaaccctcagcacccacccctgcagtgaatcgccactccaccggctcctacatcgcaggctacctgaagaacacgaaagggggtggccttgaaggccggggcatcccagagggggcatgcacggctcttcactatggccacgttgaccagttttgttcagataattctgttttgcagactgagccaagcagtgatgataaaccagaaatttattttcttttgagactgtgaattatttaaaactgcattcttaaggttttcaaggtattctgtagaatgtcagagttttcagtaaataagttccttggctttggaatgattttcaaatgtatttttaaacttgtatttgggtctccctttgacttcatgtgttctccctgttaatgcgtttgtatatagatttggtgacatttcccatgtacctattatgatctttctcccttgagttgttgtaaactgtatcagtatgaaatatgtgcatgccctagatgtgaaactcctcagcagctcgggttataatgtgtgtgtgtttcaccaagatgtcctttactgtgtcctcagattgcagtcacaaatgtagtcatttttactctctaactgttgagttgattaagagactttgcaaacgacaaagggatgaattccttactttaatctgttatcatttttcctatgtttccctctttgttcagaagcccagatgcatttttataactcagttttaaaaactttaaaatagttaccttgccttttaggatgttcttatcccacccataatgagagttgaaaggggatggatagctgctccccatgcccttcccactttttggaataggccgtgagggtgtgaggaagaaggctgtcttttgtacataaggacaaaattgtttgttttacataaattttgttacatatttttgctaatggctttgtatgtaacaagaagcgagttgccaaactacctgttgtacttttgaattttctgattgaattacagactgcgaacaacggctttcagaatgagggacttccatcagactctaatgataatagtagcacaaattgaaaacttccccaaagctttcacagaatattttctcataataaaatccaagtgaacagataattagaagaaacccttttccttcagggaaccaagcaactctattttagtactgacatgcattattttcactgtgaattcacttttttattgcatgttcagatgtccctctttgttttttttttttgtaacattaactgcaatgatgttcttcctggaattcatgaaaatataattaaaacacatttttaaac

SEQ ID NO: 15853 - DNA, 748 bp, Homo sapiens
  source 1..748: mol_type = unassigned DNA
aactttggaaaacataagaaaactacaaaatcacggtctaaatcttacagtactgatgatgaggaagacacacagcagagtactggcaaggagggtggccagctgtacagattgggtcgccgaaggaaaaccatgaagctctgccgagaactctctgatttggttgtgtacacaaactccgtggccgctcaggacattgtggatgacggaaccacaggaaatgtgttatcattcagtgaaacaagagcacatcaggttgttcagcaaaaatcagagcagttcatgatttataatcaaaagcaactcacgaggatttacccctctgcctaccgcattgattccagtaacttcaaccctctcccctactggaacgcaggctgccagctagtggcactgaattatcaatctgaaggacgaatgatgcagttaaaccgagccaaattcaaggcaaatggcaattgtggctatgtcctcaaaccccagcaaatgtgcaaaggtactttcaaccctttctctggtgaccctcttcctgccaaccccaaaaagcagctcatcctgaaagttatcagtggacagcaactccccaaacctccagactccatgtttggagatcgaggcgagatcattgacccttttgttgaagttgaaattattggattgccagtagattgttgtaaagatcaaacccgtgtggtagatgacaatggtaagatggtaatctgtgttcactttttaatgaagatggtct

SEQ ID NO: 15854 - DNA, 6128 bp, Homo sapiens
  source 1..6128: mol_type = unassigned DNA
tggaaaaaaggaactgtgtgcagtaccgcaggcattttctggtggacaacagtgtgtttcatgttgaaagatgcatgagtgtgatgcagtccgggacacagatgatcaagctgaaacgtggaaccaaagggcttgtccgcctcttttacctggatgagcaccggacacgcctccgatggcgaccctctaggaagagtgagaaggcaaaaatacttattgattccatttacaaagtgactgagggccggcagtctgaaatattccacagacaagctgaggggaacttcgaccccagctgctgcttcaccatctaccatggcaaccacatggagtccctggacctcatcacctccaaccccgaggaggcccgcacctggatcacaggcctcaagtacctgatggctggcatcagtgatgaagactcccttgccaaaaggcagaggacccatgaccaatgggtgaagcagacctttgaggaagctgataagaatggtgacggcttgctgaatattgaagagatacatcagctgatgcataaactgaatgttaatctgccccgaagaaaagtcagacaaatgtttcaggaagccgacacagatgagaatcagggaactttgacatttgaagagttctgtgttttttacaaaatgatgtctttgagacgagacctttatttgttacttttgagctacagtgacaagaaagatcacctaactgtggaagaactggctcagtttttgaaggtggagcaaaagatgaataatgtgacaacggactattgtcttgacatcataaagaagtttgaagtttcagaagaaaataaggtgaaaaatgttcttggcatagaaggcttcacgaacttcatgcgtagtcctgcctgtgacatatttaacccattgcaccatgaagtgtaccaagacatggatcagcccctctgcaactactacattgcttcctctcacaatacatacctgactggagaccagctcctttctcagtccaaagtggatatgtatgcacgggtgctgcaagagggctgtcgctgtgtggaagttgactgttgggatggcccagatggagagccagtagtacatcatggttacactctcacttcaaaaattctcttcagagatgttgtggagaccatcaacaagcatgcctttgtgaagaatgagtttcctgttatattgtctatcgagaatcactgcagtatccagcagcaaaggaagattgctcagtacctgaaaggaatattcggagacaaactggacctgtcatctgttgatacaggggagtgcaagcagcttccaagccctcaaagtttgaaaggcaaaattctagtgaagggtaagaagttgccttatcaccttggggatgatgcagaggaaggggaagtttctgatgaggacagtgcagatgaaattgaagacgagtgcaaattcaagctccattatagtaatgggaccactgagcatcaggtggaatctttcataaggaaaaaactggagtcactgttaaaagaatctcaaattcgagataaagaagatcctgatagtttcacagtgcgggcactactgaaggccacgcatgaaggcttaaatgcacacctgaagcagagtccagatgtaaaggaaagtggaaagaaatcacatggacgatccctcatgaccaactttggaaaacataagaaaactacaaaatcacggtctaaatcttacagtactgatgatgaggaagacacacagcagagtactggcaaggagggtggccagctgtacagattgggtcgccgaaggaaaaccatgaagctctgccgagaactctctgatttggttgtgtacacaaactccgtggccgctcaggacattgtggatgacggaaccacaggaaatgtgttatcattcagtgaaacaagagcacatcaggttgttcagcaaaaatcagagcagttcatgatttataatcaaaagcaactcacgaggatttacccctctgcctaccgcattgattccagtaacttcaaccctctcccctactggaacgcaggctgccagctagtggcactgaattatcaatctgaaggacgaatgatgcagttaaaccgagccaaattcaaggcaaatggcaattgtggctatgtcctcaaaccccagcaaatgtgcaaaggtactttcaaccctttctctggtgaccctcttcctgccaaccccaaaaagcagctcatcctgaaagttatcagtggacagcaactccccaaacctccagactccatgtttggagatcgaggcgagatcattgacccttttgttgaagttgaaattattggattgccagtagattgttgtaaagatcaaacccgtgtggtagatgacaatggatttaaccctgtgtgggaagaaacactgacatttacagtacacatgccagaaatagctttggttcggttccttgtgtgggatcacgatcccattggacgagactttgttggacaaagaactgtgaccttcagcagcttagtgcctggctaccggcatgtctatttggaaggactgacagaagcatccatatttgtacacataaccatcaatgaaatctatggaaagaacagacaactccagggtctgaagggactgttcaataagaatcctaggcacagttcttcagaaaacaattcccattatgtacggaagcgatccattggagatagaattctgcgacgcacagctagcgccccagccaaaggcaggaaaaagagcaaaatgggcttccaagaaatggtggagataaaggattctgtgtccgaggccacaagagatcaagatggcgtgctgaggaggaccacacgcagtttgcaagcacgccctgtctctatgcctgttgacagaaaccttctgggagctttgtcgctgcctgtatctgaaacagcaaaagacattgaaggaaaagaaaactctctagcagaagataaagatggcagaagaaaagggaaagcaagtataaaagatccacattttctaaatttcaacaaaaagttatcatcctcctccagtgctctgctccacaaagataccagccaaggggacaccattgtatctactgcccacatgtcagtcacaggagaacagctgggcatgtcaagtcctaggggtgggagaaccacatcaaatgccacaagcaattgccaggaaaacccctgtcccagcaagtctctctccccaaagcagcatttggctcccgatcctgtagttaaccccacacaagatctgcatggtgtgaaaatcaaggaaaagggtaatcctgaggactttgtggaagggaaaagcatcttgtcaggaagcgtcctttctcatagcaacctagaaattaagaacctggaaggtaataggggtaagggccgagctgcaacatccttttctttgtcagacgtctccatgctctgttctgacatacctgacctacattcaactgcaattctgcaggagagtgtaatttcccatcttattgacaatgtcactttaacaaatgagaatgagccgggcagttccatctcagccctgattggccagtttgatgagaccaacaatcaggctctcacagttgtttctcatcttcataataccagtgtgatgtcaggccattgtcccttgcctagcctgggcctaaaaatgcccatcaagcatggtttttgcaagggaaaatccaagtcttccttcctgtgctcatctccggagctgatagcactctcgagttctgagaccaccaaacatgcaacgaacacagtttatgaaactacctgcactcccatctctaaaaccaaaccagatgatgacctttctagtaaggccaagacagcggccttagaaagcaacctgcctggatcccctaatacttctcgtggctggttaccaaaaagtcctaccaagggagaagactgggaaacactgaagagctgcagccctgcctcttcccctgatttgaccctggaggatgtaatagctgatcccactctctgtttcaattctggggagagcagccttgtggaaattgatggagaatcagaaaatctttctctaacaacctgtgaatataggagagagggcacaagtcaacttgcttctcctttaaaactcaagtacaatcagggtgtggtagaacactttcaaagaggtttgagaaacggctactgtaaagagaccctccgcccttctgtccctgaaatattcaacaatattcaagatgtcaaaactcaaagtatttcttatctagcctatcagggtgctggctttgtgcataatcatttctcagattcagatgcaaaaatgttccagacctgtgtgccccagcaatctagtgctcaagatatgcatgtccctgtacccaagcagttggcacatcttcctttgcctgctctgaaactgcctagtccttgcaaatccaaaagtctgggggacttaacatcagaggacattgcctgcaattttgagagcaagtaccagtgtattagtaagagttttgttacaactggcattagagacaagaagggcgtgactgtgaagacaaagtcgttagagcctatagatgccctgaccgagcagcttcggaagcttgtgtcctttgaccaggaagacaactgccaagtgctatattcaaagcaggatgccaatcagctcccccgggcactggtcaggaagttgtcatccagaagtcagagcagagtgcgcaatattgctagtcgtgccaaggagaaacaggaagccaacaagcagaaagttccaaaccccagcaatggggcaggagtggttcttagaaacaaaccctcagcacccacccctgcagtgaatcgccactccaccggctcctacatcgcaggctacctgaagaacacgaaagggggtggccttgaaggccggggcatcccagagggggcatgcacggctcttcactatggccacgttgaccagttttgttcagataattctgttttgcagactgagccaagcagtgatgataaaccagaaatttattttcttttgagactgtgaattatttaaaactgcattcttaaggttttcaaggtattctgtagaatgtcagagttttcagtaaataagttccttggctttggaatgattttcaaatgtatttttaaacttgtatttgggtctccctttgacttcatgtgttctccctgttaatgcgtttgtatatagatttggtgacatttcccatgtacctattatgatctttctcccttgagttgttgtaaactgtatcagtatgaaatatgtgcatgccctagatgtgaaactcctcagcagctcgggttataatgtgtgtgtgtttcaccaagatgtcctttactgtgtcctcagattgcagtcacaaatgtagtcatttttactctctaactgttgagttgattaagagactttgcaaacgacaaagggatgaattccttactttaatctgttatcatttttcctatgtttccctctttgttcagaagcccagatgcatttttataactcagttttaaaaactttaaaatagttaccttgccttttaggatgttcttatcccacccataatgagagttgaaaggggatggatagctgctccccatgcccttcccactttttggaataggccgtgagggtgtgaggaagaaggctgtcttttgtacataaggacaaaattgtttgttttacataaattttgttacatatttttgctaatggctttgtatgtaacaagaagcgagttgccaaactacctgttgtacttttgaattttctgattgaattacagactgcgaacaacggctttcagaatgagggacttccatcagactctaatgataatagtagcacaaattgaaaacttccccaaagctttcacagaatattttctcataataaaatccaagtgaacagataattagaagaaacccttttccttcagggaaccaagcaactctattttagtactgacatgcattattttcactgtgaattcacttttttattgcatgttcagatgtccctctttgttttttttttttgtaacattaactgcaatgatgttcttcctggaattcatgaaaatataattaaaacacatttttaaac

SEQ ID NO: 15855 - DNA, 5450 bp, Homo sapiens
  source 1..5450: mol_type = unassigned DNA
cacgggcgggcgcggcagggcagcgtgtggggctgcgatcggcatgggctctgcgcgcggggtgcccctgctcgggctggggctcaggggacgccgggggccagcacagggcccggtgtccctcgggccgtgccggtaactgggattggcacccgccggccatggaagagcctgggcccccaggtgggctcagccaagaccaagtggagcggtgcatgggtgccatgcaagaggggatgcagatggtgaagctgcgtggcggctccaagggcctggtccgcttctactacctggacgagcaccgctcctgcatccgctggaggccctcacgcaagaacgagaaggccaagatctccatcgactccatccaggaggtgagtgaggggcggcagtcggaggtcttccagcgctaccctgacggcagcttcgaccccaactgctgcttcagcatctaccacggcagccaccgcgagtcgctggacctggtctccaccagcagcgaggtggcgcgcacctgggtcactggcctgcgctacctcatggccggcatcagcgacgaggacagcctggctcgccgccagcgcaccagggaccaatggctgaagcagacgtttgacgaggccgacaagaacggggatggcagcctgagcattggcgaggtcctgcagctgctgcacaagctcaacgtgaacctgccccggcagagggtgaagcagatgttcagggaagcggacacggatgaccaccaagggacgctgggttttgaagagttctgtgccttctacaagatgatgtccacccgccgggacctctacctgctcatgctgacctacagcaaccacaaggaccacctggatgccgccagcctgcagcgcttcctgcaggtggagcagaagatggcgggtgtgaccctcgagagctgccaggacatcatcgagcagtttgagccatgcccagaaaacaagagtaaggggctgctgggcattgatggcttcaccaactacaccaggagccctgctggtgacatcttcaaccctgagcaccaccatgtgcaccaggacatgacgcagccgctgagccactacttcatcacctcgtcccacaacacctacctcgtgggtgaccagctcatgtcccagtcacgggtggacatgtatgcttgggtcctgcaggctggctgccgctgcgtggaggtggactgctgggatgggcccgacggggagcccattgtgcaccatggctacactctgacttccaagatcctcttcaaagacgtcattgaaaccatcaacaaatatgccttcatcaagaatgagtacccagtgatcctgtccatcgaaaaccactgcagtgtcatccagcagaagaaaatggcccagtatctgactgacatccttggggacaagctggacctgtcatcagtgagcagtgaagatgccaccacactcccctctccacagatgctcaagggcaagatcctcgtgaaggggaagaagctcccagccaacatcagcgaggatgcggaggaaggcgaggtgtctgatgaggacagtgctgatgagattgacgatgactgcaagctcctcaatggggatgcatccaccaatcgaaagcgtgtagaaaacactgctaagaggaaactggattccctcatcaaagagtcgaagattcgggactgtgaggaccccaacaacttctccgtctccacactgtccccatctggaaagctcggacgcaagagcaaggctgaagaggacgtggagtctggggaggatgccggggccagcagacgcaatggccgcctcgtcgtgggaagcttctccaggcgcaagaagaagggcagcaagctgaagaaggcggccagcgtggaggagggagatgagggtcaggactccccgggaggccagagccgaggggcgacccggcagaagaagaccatgaagctgtcccgggccctctctgacctggtgaagtacaccaagtccgtggccacccacgacatagagatggaggcggcgtccagctggcaggtgtcgtccttcagcgagaccaaggcccaccagattctgcagcagaagccggcgcagtacctacgcttcaaccagcagcagctctcccgcatctacccctcctcctaccgtgtggactccagcaactacaacccgcagcccttctggaacgccggctgccaaatggttgccctgaactaccagtcagaggggcggatgctgcagctgaaccgagccaagttcagcgccaacggtggctgcggctacgtactcaagcctgggtgcatgtgccagggcgtgttcaaccccaactcggaggaccccctgcccgggcagctcaagaagcagctggtgctccggatcatcagtggccagcagcttcccaagccgcgcgactccatgctgggggaccgtggggagatcatcgacccctttgtggaggtggagatcattgggctccctgtggactgcagcagggagcagacccgcgtggtggacgacaacgggttcaaccccacctgggaggagaccctggttttcatggtgcacatgccggagatcgcgctggtccgcttcctcgtctgggaccacgatcccatcgggcgtgacttcattggccagaggacgctggccttcagcagcatgatgccaggctacagacacgtgtacctagaagggatggaagaggcctccatcttcgtgcatgtggctgtcagtgacatcagcggtaaggtcaagcaggctctgggcctaaaaggcctcttcctccgaggcccaaagcccggctcgctggacagtcatgctgctgggcggcccccggcccggccctccgttagccagcggatcctgcggcgcacggccagcgccccgaccaagagccagaagccgggccgcaggggcttcccggagctggtcctgggtacacgggacacaggctccaagggggtggcagacgatgtggtgccccccgggcccggacctgctccggaagccccagcccaggaggggcccggcagcggcagcccccgaggtaaggcgccagctgcggtggcagagaagagccctgtgcgagtgcggcccccgcgtgtcctggacggccccgggcctgctgggatggccgccacatgcatgaagtgtgtggtgggatcctgcgccggcgtgaacaccgggggcctgcagagggagcggccacccagcccggggcctgcaagcaggcaggcagccattcgccagcagccccgggcccgggctgactcactgggggccccctgctgtggcctggaccctcacgctatcccggggagaagcagagaggcccccaagggtcctggggcctggaggcagggtccaggcggtagcggctccatgtcctcggactccagcagcccagacagcccgggcatccccgaaaggtccccccgctggcctgagggtgcctgcaggcaaccgggggccctgcagggagagatgagtgccttgtttgctcaaaagctggaggagatcaggagtaaatcccccatgttctccgccgttaggaactgagagcggcgagtgacaggtaacggggcccagccccggtgtcccgtgctgtcccagcccaaggagggccccgtgtgcggcacagggcgtggactgggccccagcagcagcagggtggggacaccgagtgtgccgcgcccgggggatgcctcggggtgggagctgggcctggcgaccctcggcacagggcaccggggacaccaccctgatccgactcctctccgcctctctccctgcctccctctctctcttctgcttctccctctggctctctctcactcccccacctccccacagacacccgccccctctccacgcagcggccactccccccactgtgcagcctggaaaccatcgctgaggagcccgccccaggccctggtcccccgccaccagcggctgtccccaccagctcttctcagggacggcccccataccccacaggacccggagccaatgtggcaagccccctagaggacactgaggagccccgagacagcaggcctcggccgtgcaacggcgagggcgccggcggggcatacgagagggcccccggcagccagacggacggcaggagccagccccggaccctgggccacctgcccgtgattagaagggtgaagagtgaggggcaggtgcccacggagcccctgggagggtggcggcccctggccgctccctttccagctcctgccgtgtactccgatgccacgggcagtgacccgctgtggcagcggctggagccatgtggccaccgagacagcgtttcctcctcctccagcatgtcatccagcgacactgtcattgacctctccctgcccagcctgggcctgggccgcagccgtgagaacctcgctggagcccacatgggacgcctgccccccaggccccactcggcttcggctgcccgcccagacctgccacctgtgaccaagagcaaatccaaccccaaccttcgggctacaggccagcggcctcccatacctgacgaactgcagcccaggtccctggccccaaggatggctggcctccccttccggcctccctggggctgcctttccctggtgggcgtgcaggactgccccgtggctgccaagtccaagagcctgggcgacctcactgctgatgactttgcccctagctttgagggcggctcccgcagactgagccacagcctgggcctcccgggagggacacggcgggtgtcggggccaggggtgagacgggacaccctgacagagcagctgcgctggctcactgtcttccagcaggcaggagacatcacgtcacccaccagcctgggcccggctggggagggggtggcagggggccctggttttgtgcggcgctcctcctcccgcagccacagccgcgtgcgtgccattgccagccgggcccgccaggcccaggagcggcagcagagactgcagggcctgggccggcagggacccccagaagaggagcggggcacccccgagggcgcctgctccgtgggccacgagggcagtgtggatgcaccagcaccctccaagggagccctcgggccagcatccgcggctgctgaaaacctggtcctgctccgcctctgaccgtcagtggtgggaacctgggcggctctggaggcccagggcaggggtgggcgtgttgtttgctcaggaaacagggcagccaggcccccaaaactgtgtccccctggctgccctgtgtcccctccacccctgcctccctcctgcccctgctcccggggaggaaaggctaaagctgctggcccggggcccacaggaggggcttcgaggctggccctgccaggcagttttcccggcgttttaggatctgtacatagagaaatatttaaatttttagaagcaaaacttatacaacattaaaatgataccaagtccc

SEQ ID NO: 15856 - DNA, 4837 bp, Homo sapiens
  source 1..4837: mol_type = unassigned DNA
gcggctgcgtcagggattccttggtggccctggagggtggataggctggcctgggggccatcaggacagcaggtgacggtcaggccaatgccagccgggcctgggcacagccctgtgggggcttcggagggccctgaggaggaggaggaagaggcagaggagagaaggccccacggaggtcctgtcgccagcgctgccactgcctgacctccgctgcccgaaggccggtgggcctctgtggcctccgtgaagcaggcccggctgtcgtcaggccatgtctggtccatggccctcccccgacagccggaccaagggaacggtggcctggctggcggaggtactcctctgggttggagggagtgtggtgctgtcttcagagtggcagctcggccccctggtggagcggtgcatgggtgccatgcaagaggggatgcagatggtgaagctgcgtggcggctccaagggcctggtccgcttctactacctggacgagcaccgctcctgcatccgctggaggccctcacgcaagaacgagaaggccaagatctccatcgactccatccaggaggtgagtgaggggcggcagtcggaggtcttccagcgctaccctgacggcagcttcgaccccaactgctgcttcagcatctaccacggcagccaccgcgagtcgctggacctggtctccaccagcagcgaggtggcgcgcacctgggtcactggcctgcgctacctcatggccggcatcagcgacgaggacagcctggctcgccgccagcgcaccagggaccaatggctgaagcagacgtttgacgaggccgacaagaacggggatggcagcctgagcattggcgaggtcctgcagctgctgcacaagctcaacgtgaacctgccccggcagagggtgaagcagatgttcagggaagcggacacggatgaccaccaagggacgctgggttttgaagagttctgtgccttctacaagatgatgtccacccgccgggacctctacctgctcatgctgacctacagcaaccacaaggaccacctggatgccgccagcctgcagcgcttcctgcaggtggagcagaagatggcgggtgtgaccctcgagagctgccaggacatcatcgagcagtttgagccatgcccagaaaacaagagtaaggggctgctgggcattgatggcttcaccaactacaccaggagccctgctggtgacatcttcaaccctgagcaccaccatgtgcaccaggacatgacgcagccgctgagccactacttcatcacctcgtcccacaacacctacctcgtgggtgaccagctcatgtcccagtcacgggtggacatgtatgcttgggtcctgcaggctggctgccgctgcgtggaggtggactgctgggatgggcccgacggggagcccattgtgcaccatggctacactctgacttccaagatcctcttcaaagacgtcattgaaaccatcaacaaatatgccttcatcaagaatgagtacccagtgatcctgtccatcgaaaaccactgcagtgtcatccagcagaagaaaatggcccagtatctgactgacatccttggggacaagctggacctgtcatcagtgagcagtgaagatgccaccacactcccctctccacagatgctcaagggcaagatcctcgtgaaggggaagaagctcccagccaacatcagcgaggatgcggaggaaggcgaggtgtctgatgaggacagtgctgatgagattgacgatgactgcaagctcctcaatggggatgcatccaccaatcgaaagcgtgtagaaaacactgctaagaggaaactggattccctcatcaaagagtcgaagattcgggactgtgaggaccccaacaacttctccgtctccacactgtccccatctggaaagctcggacgcaagagcaaggctgaagaggacgtggagtctggggaggatgccggggccagcagacgcaatggccgcctcgtcgtgggaagcttctccaggcgcaagaagaagggcagcaagctgaagaaggcggccagcgtggaggagggagatgagggtcaggactccccgggaggccagagccgaggggcgacccggcagaagaagaccatgaagctgtcccgggccctctctgacctggtgaagtacaccaagtccgtggccacccacgacatagagatggaggcggcgtccagctggcaggtgtcgtccttcagcgagaccaaggcccaccagattctgcagcagaagccggcgcagtacctacgcttcaaccagcagcagctctcccgcatctacccctcctcctaccgtgtggactccagcaactacaacccgcagcccttctggaacgccggctgccaaatggttgccctgaactaccagtcagaggggcggatgctgcagctgaaccgagccaagttcagcgccaacggtggctgcggctacgtactcaagcctgggtgcatgtgccagggcgtgttcaaccccaactcggaggaccccctgcccgggcagctcaagaagcagctggtgctccggatcatcagtggccagcagcttcccaagccgcgcgactccatgctgggggaccgtggggagatcatcgacccctttgtggaggtggagatcattgggctccctgtggactgcagcagggagcagacccgcgtggtggacgacaacgggttcaaccccacctgggaggagaccctggttttcatggtgcacatgccggagatcgcgctggtccgcttcctcgtctgggaccacgatcccatcgggcgtgacttcattggccagaggacgctggccttcagcagcatgatgccaggctacagacacgtgtacctagaagggatggaagaggcctccatcttcgtgcatgtggctgtcagtgacatcagcggtaaggtcaagcaggctctgggcctaaaaggcctcttcctccgaggcccaaagcccggctcgctggacagtcatgctgctgggcggcccccggcccggccctccgttagccagcggatcctgcggcgcacggccagcgccccgaccaagagccagaagccgggccgcaggggcttcccggagctggtcctgggtacacgggacacaggctccaagggggtggcagacgatgtggtgccccccgggcccggacctgctccggaagccccagcccaggaggggcccggcagcggcagcccccgagacacccgccccctctccacgcagcggccactccccccactgtgcagcctggaaaccatcgctgaggagcccgccccaggccctggtcccccgccaccagcggctgtccccaccagctcttctcagggacggcccccataccccacaggacccggagccaatgtggcaagccccctagaggacactgaggagccccgagacagcaggcctcggccgtgcaacggcgagggcgccggcggggcatacgagagggcccccggcagccagacggacggcaggagccagccccggaccctgggccacctgcccgtgattagaagggtgaagagtgaggggcaggtgcccacggagcccctgggagggtggcggcccctggccgctccctttccagctcctgccgtgtactccgatgccacgggcagtgacccgctgtggcagcggctggagccatgtggccaccgagacagcgtttcctcctcctccagcatgtcatccagcgacactgtcattgacctctccctgcccagcctgggcctgggccgcagccgtgagaacctcgctggagcccacatgggacgcctgccccccaggccccactcggcttcggctgcccgcccagacctgccacctgtgaccaagagcaaatccaaccccaaccttcgggctacaggccagcggcctcccatacctgacgaactgcagcccaggtccctggccccaaggatggctggcctccccttccggcctccctggggctgcctttccctggtgggcgtgcaggactgccccgtggctgccaagtccaagagcctgggcgacctcactgctgatgactttgcccctagctttgagggcggctcccgcagactgagccacagcctgggcctcccgggagggacacggcgggtgtcggggccaggggtgagacgggacaccctgacagagcagctgcgctggctcactgtcttccagcaggcaggagacatcacgtcacccaccagcctgggcccggctggggagggggtggcagggggccctggttttgtgcggcgctcctcctcccgcagccacagccgcgtgcgtgccattgccagccgggcccgccaggcccaggagcggcagcagagactgcagggcctgggccggcagggacccccagaagaggagcggggcacccccgagggcgcctgctccgtgggccacgagggcagtgtggatgcaccagcaccctccaagggagccctcgggccagcatccgcggctgctgaaaacctggtcctgctccgcctctgaccgtcagtggtgggaacctgggcggctctggaggcccagggcaggggtgggcgtgttgtttgctcaggaaacagggcagccaggcccccaaaactgtgtccccctggctgccctgtgtcccctccacccctgcctccctcctgcccctgctcccggggaggaaaggctaaagctgctggcccggggcccacaggaggggcttcgaggctggccctgccaggcagttttcccggcgttttaggatctgtacatagagaaatatttaaatttttagaagcaaaacttatacaacattaaaatgataccaagtcc

SEQ ID NO: 15857 - DNA, 6453 bp, Homo sapiens
  source 1..6453: mol_type = unassigned DNA
cacagggaacgggtagggtcccacggtttggggagagacatggcagtcctcaagggctgggatcagggcgcagccagggtttctgatggctttgctgatggtcaggacccaggcatgccaggcaaggcctcagcccagcagttgccaagcgtgtagccactttgggcccgtggagagagtcgcgctgcggagcccccagggggacctgaggtcacaagagcctcgatgcacctgagcgcggagctgggggtccctggagccgctgtccccacctgcggcgctggagccctggaggtgtccaggggcttccttggaacgtggagacgtgctggttaaacgtggagccccgggccagccgggcactgggggctgcaggtggagggaggtggatgctctccctcgtgggggcgtgtcttttccacaggaaagggaaagggggagggacacgggtcagcagtggggggctgtgcagtctcgcagatcttcacccttggttcttgaactctggaccctgagccctgccgagggtcccgcaaaggtgggcaaggagctcccggctgcttggtctccgcagtgttggggctgccagcagggggacgctgggcccccggggacctgacccgtgctccctccccaccccgcagtctccatcgactccatccaggaggtgagtgaggggcggcagtcggaggtcttccagcgctaccctgacggcagcttcgaccccaactgctgcttcagcatctaccacggcagccaccgcgagtcgctggacctggtctccaccagcagcgaggtggcgcgcacctgggtcactggcctgcgctacctcatggccggcatcagcgacgaggacagcctggctcgccgccagcgcaccagggaccaatggctgaagcagacgtttgacgaggccgacaagaacggggatggcagcctgagcattggcgaggtcctgcagctgctgcacaagctcaacgtgaacctgccccggcagagggtgaagcagatgttcagggaagcggacacggatgaccaccaagggacgctgggttttgaagagttctgtgccttctacaagatgatgtccacccgccgggacctctacctgctcatgctgacctacagcaaccacaaggaccacctggatgccgccagcctgcagcgcttcctgcaggtggagcagaagatggcgggtgtgaccctcgagagctgccaggacatcatcgagcagtttgagccatgcccagaaaacaagagtaaggggctgctgggcattgatggcttcaccaactacaccaggagccctgctggtgacatcttcaaccctgagcaccaccatgtgcaccaggacatgacgcagccgctgagccactacttcatcacctcgtcccacaacacctacctcgtgggtgaccagctcatgtcccagtcacgggtggacatgtatgcttgggtcctgcaggctggctgccgctgcgtggaggtggactgctgggatgggcccgacggggagcccattgtgcaccatggctacactctgacttccaagatcctcttcaaagacgtcattgaaaccatcaacaaatatgccttcatcaagaatgagtacccagtgatcctgtccatcgaaaaccactgcagtgtcatccagcagaagaaaatggcccagtatctgactgacatccttggggacaagctggacctgtcatcagtgagcagtgaagatgccaccacactcccctctccacagatgctcaagggcaagatcctcgtgaaggggaagaagctcccagccaacatcagcgaggatgcggaggaaggcgaggtgtctgatgaggacagtgctgatgagattgacgatgactgcaagctcctcaatggggatgcatccaccaatcgaaagcgtgtagaaaacactgctaagaggaaactggattccctcatcaaagagtcgaagattcgggactgtgaggaccccaacaacttctccgtctccacactgtccccatctggaaagctcggacgcaagagcaaggctgaagaggacgtggagtctggggaggatgccggggccagcagacgcaatggccgcctcgtcgtgggaagcttctccaggcgcaagaagaagggcagcaagctgaagaaggcggccagcgtggaggagggagatgagggtcaggactccccgggaggccagagccgaggggcgacccggcagaagaagaccatgaagctgtcccgggccctctctgacctggtgaagtacaccaagtccgtggccacccacgacatagagatggaggcggcgtccagctggcaggtgtcgtccttcagcgagaccaaggcccaccagattctgcagcagaagccggcgcagtacctacgcttcaaccagcagcagctctcccgcatctacccctcctcctaccgtgtggactccagcaactacaacccgcagcccttctggaacgccggctgccaaatggttgccctgaactaccagtcagaggggcggatgctgcagctgaaccgagccaagttcagcgccaacggtggctgcggctacgtactcaagcctgggtgcatgtgccagggcgtgttcaaccccaactcggaggaccccctgcccgggcagctcaagaagcagctggtgctccggatcatcagtggccagcagcttcccaagccgcgcgactccatgctgggggaccgtggggagatcatcgacccctttgtggaggtggagatcattgggctccctgtggactgcagcagggagcagacccgcgtggtggacgacaacgggttcaaccccacctgggaggagaccctggttttcatggtgcacatgccggagatcgcgctggtccgcttcctcgtctgggaccacgatcccatcgggcgtgacttcattggccagaggacgctggccttcagcagcatgatgccaggctacagacacgtgtacctagaagggatggaagaggcctccatcttcgtgcatgtggctgtcagtgacatcagcggtaaggtcaagcaggctctgggcctaaaaggcctcttcctccgaggcccaaagcccggctcgctggacagtcatgctgctgggcggcccccggcccggccctccgttagccagcggatcctgcggcgcacggccagcgccccgaccaagagccagaagccgggccgcaggggcttcccggagctggtcctgggtacacgggacacaggctccaagggggtggcagacgatgtggtgccccccgggcccggacctgctccggaagccccagcccaggaggggcccggcagcggcagcccccgaggtaaggcgccagctgcggtggcagagaagagccctgtgcgagtgcggcccccgcgtgtcctggacggccccgggcctgctgggatggccgccacatgcatgaagtgtgtggtgggatcctgcgccggcgtgaacaccgggggcctgcagagggagcggccacccagcccggggcctgcaagcaggcaggcagccattcgccagcagccccgggcccgggctgactcactgggggccccctgctgtggcctggaccctcacgctatcccggggagaagcagagaggcccccaagggtcctggggcctggaggcagggtccaggcggtagcggctccatgtcctcggactccagcagcccagacagcccgggcatccccgaaaggtccccccgctggcctgagggtgcctgcaggcaaccgggggccctgcagggagagatgagtgccttgtttgctcaaaagctggaggagatcaggagtaaatcccccatgttctccgccggtaagcccctcttgccctgcgtggtcctcccgcacgcccctggcatggctgggcctgggtcacctgctgctgcttctgcgtggacggtgtcgcctcgtgtgctcgtgctcgtggctctgtatccgtggcactgtctccgtggcactctgctcccttggcttgcctgtggcccatagccccagccctcctgtctgagcttgaggccctgggacttgggtggagctggtttgaggcccgacaggctgggaagaaccagctgctcttgctgagggtctggggccgggactgtggcctgacatgctgggcccctccggctgggcgcttccccaaactcacctcctgggcggctggcgacctgcatggcccctgatgcctttcctgggactgggggccacgtaccatcccattcccacctccctctagggcaggctccaggggtccctactgggaagtctgatgtgggcaggtagtgcagctgctgggcgtctcctgcgcccctgggacgcctggagcctgctgagtgctgcgtggagtagattccctgggccccagggcttcgctgctttgggctgaagcaccccactagaagggtgtctccttagcctggagggagggacatacacggagcccgccccacaccaccctgcccctccagacccccctgaccaagctttcctttctgcccccacccacgctgcctccgtagttaggaactgagagcggcgagtgacaggtaacggggcccagccccggtgtcccgtgctgtcccagcccaaggagggccccgtgtgcggcacagggcgtggactgggccccagcagcagcagggtggggacaccgagtgtgccgcgcccgggggatgcctcggggtgggagctgggcctggcgaccctcggcacagggcaccggggacaccaccctgatccgactcctctccgcctctctccctgcctccctctctctcttctgcttctccctctggctctctctcactcccccacctccccacagacacccgccccctctccacgcagcggccactccccccactgtgcagcctggaaaccatcgctgaggagcccgccccaggccctggtcccccgccaccagcggctgtccccaccagctcttctcagggacggcccccataccccacaggacccggagccaatgtggcaagccccctagaggacactgaggagccccgagacagcaggcctcggccgtgcaacggcgagggcgccggcggggcatacgagagggcccccggcagccagacggacggcaggagccagccccggaccctgggccacctgcccgtgattagaagggtgaagagtgaggggcaggtgcccacggagcccctgggagggtggcggcccctggccgctccctttccagctcctgccgtgtactccgatgccacgggcagtgacccgctgtggcagcggctggagccatgtggccaccgagacagcgtttcctcctcctccagcatgtcatccagcgacactgtcattgacctctccctgcccagcctgggcctgggccgcagccgtgagaacctcgctggagcccacatgggacgcctgccccccaggccccactcggcttcggctgcccgcccagacctgccacctgtgaccaagagcaaatccaaccccaaccttcgggctacaggccagcggcctcccatacctgacgaactgcagcccaggtccctggccccaaggatggctggcctccccttccggcctccctggggctgcctttccctggtgggcgtgcaggactgccccgtggctgccaagtccaagagcctgggcgacctcactgctgatgactttgcccctagctttgagggcggctcccgcagactgagccacagcctgggcctcccgggagggacacggcgggtgtcggggccaggggtgagacgggacaccctgacagagcagctgcgctggctcactgtcttccagcaggcaggagacatcacgtcacccaccagcctgggcccggctggggagggggtggcagggggccctggttttgtgcggcgctcctcctcccgcagccacagccgcgtgcgtgccattgccagccgggcccgccaggcccaggagcggcagcagagactgcagggcctgggccggcagggacccccagaagaggagcggggcacccccgagggcgcctgctccgtgggccacgagggcagtgtggatgcaccagcaccctccaagggagccctcgggccagcatccgcggctgctgaaaacctggtcctgctccgcctctgaccgtcagtggtgggaacctgggcggctctggaggcccagggcaggggtgggcgtgttgtttgctcaggaaacagggcagccaggcccccaaaactgtgtccccctggctgccctgtgtcccctccacccctgcctccctcctgcccctgctcccggggaggaaaggctaaagctgctggcccggggcccacaggaggggcttcgaggctggccctgccaggcagttttcccggcgttttaggatctgtacatagagaaatatttaaatttttagaagcaaaacttatacaacattaaaatgataccaagtccctttc

SEQ ID NO: 15858 - DNA, 6986 bp, Homo sapiens
  source 1..6986: mol_type = unassigned DNA
gtgggggaaccctccttgctagcgttgcaaagaagggcccagctccgtcaggaatccagggatggagaactggggagcctgggccccacatgagattcatggcaggacttgtctgaggggccccagtgccagcgacccagccccctgtgcctggcccctctgtgggtctcaggacctgggtctgggctgggtgtttggaggaacctcctcccggctctcagacacctctgttttgtctgctgtggatgacttccagcttggtccccctgtggccctggcaggagtatcaccatgggagagggcaggacaggggctgggcgagcaggcctcccactagaccaggctactcctgctgtggaccagctacttccacctctgcccttggcttgccctcctcagagttctcagcctgagtgggccctggggacactgtcaccagagaccccacccctcatacccccagggacccagacccacccccagaagccatgtgacctcctcggctcagctgtgggaggcatgggctctgtcccacatgctgcggtagccacaaaggtgatccatactgggccaggtgcaccccgaggtgcccccctggaccactgcctccctccctccccctggcaccggctccagtctcctatgtgggggctggggagggggctgttggcagccatgccccagcaagcagggggcttgctgagggctgggccactgaccacctccccggcatcccctcaggcgtgttcaaccccaactcggaggaccccctgcccgggcagctcaagaagcagctggtgctccggatcatcagtggccagcagcttcccaagccgcgcgactccatgctgggggaccgtggggagatcatcgacccctttgtggaggtggagatcattgggctccctgtggactgcagcagggagcagacccgcgtggtggacgacaacgggttcaaccccacctgggaggagaccctggttttcatggtgcacatgccggagatcgcgctggtccgcttcctcgtctgggaccacgatcccatcgggcgtgacttcattggccagaggacgctggccttcagcagcatgatgccaggctacagacacgtgtacctagaagggatggaagaggcctccatcttcgtgcatgtggctgtcagtgacatcagcggtaaggtgagtgtcaccccctgccaccagccatcatggggaggggccacaccagccccttgtcccatgcccccccatgtgtccccagtgctgggtcctgaactcaggcagtgaggcctagggtcccctccccgggcctctgctcctctatctcaagaggggctgctgtgggggcctggctcctgagccaccagtgcccacctctgatctcagggctggctttgggcatctcgggcaggacaggtcctgagtgctccgggccttgccccgccctgtgtcacccatgcctgtctcagactcttgggggccttgcagcctccacccctacagtgctgccatctggcttctcagcagggaccgagtgatgcccctctcccctctactaccccccacccctctacttcctggtgtcacgtggaaggcagctgcccgggtttgcctgtgactccacacccagcatgtctgtcccctgccccaggtcagggtggggcctcggcttccgcaggaagtggtcttggtgccagccctgctgccctggctttgagctggggcccagtgccctctgggtcctgctggctgcagctggccctcggggaacccgcacacacagcaggaggggcctgcccaggcccagtgctgactctctcctgccatgctctcgggcccagaggtgccatccagcccctgccgtctatccacccatctgttcctcgtcccccaggctgcagggctccccacgccactgctgtggccgcctcacctgctccccctgtctctttggtcttgcagtcggcttctctatggccacagcctacttttagaagtgcagctctgttaggagccttgaaggtacccggtgcgcgggacagtgcggcccgccgcccctgcatgcccaggccgcaccccattagcatccatgattcctggtagcatttggagactgtcgctcatgtgacgtggatcatgacatggctccgggggccctggccatccccagccatagtggcatttacgaggcagatccagggttcagctgggtggccgccttctcactggcctctcctcccctcccctccctcagtcctccctcccctccctcagtcctccctcccctccctcagtcctccctcccctccctcagtcctccctcccctccctcagccccttccctggcgggcagcccgctggagcccccactgtgcccctcctatccccctccttctctctcctgcccccatctcggaccctcaggctgttggttctgagttcgcctcccactccctccctgtccttgccaaccatgccagtgcatgggatgagggcacccctgaggccggcgctccgagccagaatcccggatctgcttctaaatggcttcccagccactgtgaccaaatgcgtagatttgggatcttgaatcaggaagctgattcaagtgctggccatctgaacgcatctgcccagaggcgcccctgcaggggggtgacccacctgccgggcctgggccgctctgtgcacgagcacggctcgtcatgggggcgcggtgggtgctgtctcgggggcatctggcatgtgagggcccctctggcctctgcgccctggagatgcggctgcctccctctcagcagctgttctgcccaggcagggacctcctgggcccagctgtccaggaagattggctgtggccaggtgctggtgggctgggagtctgagcccatcttggcagggctcagggggcagcaagccagctgcgggccttgggggctcacatgagtggagggcagggcaagaccagaaaaggctgcctgggggaattcaggaaggcttcctggaagaggtggtacttcctagggcacgagtatcaccatgggagtgggcaggacacgggccgggcaagtgggcctcccgctgcacctggctactcctgctgtggaccagctactcctgcctgagggtggggcacacacaaccagggagtgccacgccagtgtcccctgctagcgccgggggctgcgggcctctgagcaggtgcaggctgtggtgggccaggctggggctcgaggtctctcctccggagggaaagaccttctctccatgcccctcaagggccccacatgccctggacaggtcaggcgagggcagtttctgccggaagggtggggtgggccatgtgtacttagatctgtagcagctactgtcccaggcagagctgccctagggaccctgctcctgaaggccctggtgtgtccacacacccccagcctgaggtggcccagcccctcggaccgagacacgcatggcacgtctgtggcacggtctggagagctggccctgggggagcagctgcagctgggctgggacccctggcaacagctacatgggctccttctcttgcaggtcaagcaggctctgggcctaaaaggcctcttcctccgaggcccaaagcccggctcgctggacagtcatgctgctgggcggcccccggcccggccctccgttagccagcggatcctgcggcgcacggccagcgccccgaccaagagccagaagccgggccgcaggggcttcccggagctggtcctgggtacacgggacacaggctccaagggggtggcagacgatgtggtgccccccgggcccggacctgctccggaagccccagcccaggaggggcccggcagcggcagcccccgaggtaaggcgccagctgcggtggcagagaagagccctgtgcgagtgcggcccccgcgtgtcctggacggccccgggcctgctgggatggccgccacatgcatgaagtgtgtggtgggatcctgcgccggcgtgaacaccgggggcctgcagagggagcggccacccagcccggggcctgcaagcaggcaggcagccattcgccagcagccccgggcccgggctgactcactgggggccccctgctgtggcctggaccctcacgctatcccggggagaagcagagaggcccccaagggtcctggggcctggaggcagggtccaggcggtagcggctccatgtcctcggactccagcagcccagacagcccgggcatccccgaaaggtccccccgctggcctgagggtgcctgcaggcaaccgggggccctgcagggagagatgagtgccttgtttgctcaaaagctggaggagatcaggagtaaatcccccatgttctccgccggtaagcccctcttgccctgcgtggtcctcccgcacgcccctggcatggctgggcctgggtcacctgctgctgcttctgcgtggacggtgtcgcctcgtgtgctcgtgctcgtggctctgtatccgtggcactgtctccgtggcactctgctcccttggcttgcctgtggcccatagccccagccctcctgtctgagcttgaggccctgggacttgggtggagctggtttgaggcccgacaggctgggaagaaccagctgctcttgctgagggtctggggccgggactgtggcctgacatgctgggcccctccggctgggcgcttccccaaactcacctcctgggcggctggcgacctgcatggcccctgatgcctttcctgggactgggggccacgtaccatcccattcccacctccctctagggcaggctccaggggtccctactgggaagtctgatgtgggcaggtagtgcagctgctgggcgtctcctgcgcccctgggacgcctggagcctgctgagtgctgcgtggagtagattccctgggccccagggcttcgctgctttgggctgaagcaccccactagaagggtgtctccttagcctggagggagggacatacacggagcccgccccacaccaccctgcccctccagacccccctgaccaagctttcctttctgcccccacccacgctgcctccgtagttaggaactgagagcggcgagtgacaggtaacggggcccagccccggtgtcccgtgctgtcccagcccaaggagggccccgtgtgcggcacagggcgtggactgggccccagcagcagcagggtggggacaccgagtgtgccgcgcccgggggatgcctcggggtgggagctgggcctggcgaccctcggcacagggcaccggggacaccaccctgatccgactcctctccgcctctctccctgcctccctctctctcttctgcttctccctctggctctctctcactcccccacctccccacagacacccgccccctctccacgcagcggccactccccccactgtgcagcctggaaaccatcgctgaggagcccgccccaggccctggtcccccgccaccagcggctgtccccaccagctcttctcagggacggcccccataccccacaggacccggagccaatgtggcaagccccctagaggacactgaggagccccgagacagcaggcctcggccgtgcaacggcgagggcgccggcggggcatacgagagggcccccggcagccagacggacggcaggagccagccccggaccctgggccacctgcccgtgattagaagggtgaagagtgaggggcaggtgcccacggagcccctgggagggtggcggcccctggccgctccctttccagctcctgccgtgtactccgatgccacgggcagtgacccgctgtggcagcggctggagccatgtggccaccgagacagcgtttcctcctcctccagcatgtcatccagcgacactgtcattgacctctccctgcccagcctgggcctgggccgcagccgtgagaacctcgctggagcccacatgggacgcctgccccccaggccccactcggcttcggctgcccgcccagacctgccacctgtgaccaagagcaaatccaaccccaaccttcgggctacaggccagcggcctcccatacctgacgaactgcagcccaggtccctggccccaaggatggctggcctccccttccggcctccctggggctgcctttccctggtgggcgtgcaggactgccccgtggctgccaagtccaagagcctgggcgacctcactgctgatgactttgcccctagctttgagggcggctcccgcagactgagccacagcctgggcctcccgggagggacacggcgggtgtcggggccaggggtgagacgggacaccctgacagagcagctgcgctggctcactgtcttccagcaggcaggagacatcacgtcacccaccagcctgggcccggctggggagggggtggcagggggccctggttttgtgcggcgctcctcctcccgcagccacagccgcgtgcgtgccattgccagccgggcccgccaggcccaggagcggcagcagagactgcagggcctgggccggcagggacccccagaagaggagcggggcacccccgagggcgcctgctccgtgggccacgagggcagtgtggatgcaccagcaccctccaagggagccctcgggccagcatccgcggctgctgaaaacctggtcctgctccgcctctgaccgtcagtggtgggaacctgggcggctctggaggcccagggcaggggtgggcgtgttgtttgctcaggaaacagggcagccaggcccccaaaactgtgtccccctggctgccctgtgtcccctccacccctgcctccctcctgcccctgctcccggggaggaaaggctaaagctgctggcccggggcccacaggaggggcttcgaggctggccctgccaggcagttttcccggcgttttaggatctgtacatagagaaatatttaaatttttagaagcaaaacttatacaacattaaaatgataccaagtccctt

SEQ ID NO: 15859 - DNA, 2341 bp, Homo sapiens
  source 1..2341: mol_type = unassigned DNA
ggtgggggccagccccacacaggcgggaggggtgggagttgggggcgggccgggcatcgcgatgggccctgatgccacccccactcctgtgtcccagatcatcgacccctttgtggaggtggagatcattgggctccctgtggactgcagcagggagcagacccgcgtggtggacgacaacgggttcaaccccacctgggaggagaccctggttttcatggtgcacatgccggagatcgcgctggtccgcttcctcgtctgggaccacgatcccatcgggcgtgacttcattggccagaggacgctggccttcagcagcatgatgccaggctacagacacgtgtacctagaagggatggaagaggcctccatcttcgtgcatgtggctgtcagtgacatcagcggtaaggtcaagcaggctctgggcctaaaaggcctcttcctccgaggcccaaagcccggctcgctggacagtcatgctgctgggcggcccccggcccggccctccgttagccagcggatcctgcggcgcacggccagcgccccgaccaagagccagaagccgggccgcaggggcttcccggagctggtcctgggtacacgggacacaggctccaagggggtggcagacgatgtggtgccccccgggcccggacctgctccggaagccccagcccaggaggggcccggcagcggcagcccccgagttaggaactgagagcggcgagtgacagacacccgccccctctccacgcagcggccactccccccactgtgcagcctggaaaccatcgctgaggagcccgccccaggccctggtcccccgccaccagcggctgtccccaccagctcttctcagggacggcccccataccccacaggacccggagccaatgtggcaagccccctagaggacactgaggagccccgagacagcaggcctcggccgtgcaacggcgagggcgccggcggggcatacgagagggcccccggcagccagacggacggcaggagccagccccggaccctgggccacctgcccgtgattagaagggtgaagagtgaggggcaggtgcccacggagcccctgggagggtggcggcccctggccgctccctttccagctcctgccgtgtactccgatgccacgggcagtgacccgctgtggcagcggctggagccatgtggccaccgagacagcgtttcctcctcctccagcatgtcatccagcgacactgtcattgacctctccctgcccagcctgggcctgggccgcagccgtgagaacctcgctggagcccacatgggacgcctgccccccaggccccactcggcttcggctgcccgcccagacctgccacctgtgaccaagagcaaatccaaccccaaccttcgggctacaggccagcggcctcccatacctgacgaactgcagcccaggtccctggccccaaggatggctggcctccccttccggcctccctggggctgcctttccctggtgggcgtgcaggactgccccgtggctgccaagtccaagagcctgggcgacctcactgctgatgactttgcccctagctttgagggcggctcccgcagactgagccacagcctgggcctcccgggagggacacggcgggtgtcggggccaggggtgagacgggacaccctgacagagcagctgcgctggctcactgtcttccagcaggcaggagacatcacgtcacccaccagcctgggcccggctggggagggggtggcagggggccctggttttgtgcggcgctcctcctcccgcagccacagccgcgtgcgtgccattgccagccgggcccgccaggcccaggagcggcagcagagactgcagggcctgggccggcagggacccccagaagaggagcggggcacccccgagggcgcctgctccgtgggccacgagggcagtgtggatgcaccagcaccctccaagggagccctcgggccagcatccgcggctgctgaaaacctggtcctgctccgcctctgaccgtcagtggtgggaacctgggcggctctggaggcccagggcaggggtgggcgtgttgtttgctcaggaaacagggcagccaggcccccaaaactgtgtccccctggctgccctgtgtcccctccacccctgcctccctcctgcccctgctcccggggaggaaaggctaaagctgctggcccggggcccacaggaggggcttcgaggctggccctgccaggcagttttcccggcgttttaggatctgtacatagagaaatatttaaatttttagaagcaaaacttatacaacattaaaatgataccaagtccctt

SEQ ID NO: 15860 - DNA, 4837 bp, Homo sapiens
  source 1..4837: mol_type = unassigned DNA
gcggctgcgtcagggattccttggtggccctggagggtggataggctggcctgggggccatcaggacagcaggtgacggtcaggccaatgccagccgggcctgggcacagccctgtgggggcttcggagggccctgaggaggaggaggaagaggcagaggagagaaggccccacggaggtcctgtcgccagcgctgccactgcctgacctccgctgcccgaaggccggtgggcctctgtggcctccgtgaagcaggcccggctgtcgtcaggccatgtctggtccatggccctcccccgacagccggaccaagggaacggtggcctggctggcggaggtactcctctgggttggagggagtgtggtgctgtcttcagagtggcagctcggccccctggtggagcggtgcatgggtgccatgcaagaggggatgcagatggtgaagctgcgtggcggctccaagggcctggtccgcttctactacctggacgagcaccgctcctgcatccgctggaggccctcacgcaagaacgagaaggccaagatctccatcgactccatccaggaggtgagtgaggggcggcagtcggaggtcttccagcgctaccctgacggcagcttcgaccccaactgctgcttcagcatctaccacggcagccaccgcgagtcgctggacctggtctccaccagcagcgaggtggcgcgcacctgggtcactggcctgcgctacctcatggccggcatcagcgacgaggacagcctggctcgccgccagcgcaccagggaccagtggctgaagcagacgtttgacgaggccgacaagaacggggatggcagcctgagcattggcgaggtcctgcagctgctgcacaagctcaacgtgaacctgccccggcagagggtgaagcagatgttcagggaagcggacacggatgaccaccaagggacgctgggttttgaagagttctgtgccttctacaagatgatgtccacccgccgggacctctacctgctcatgctgacctacagcaaccacaaggaccacctggatgccgccagcctgcagcgcttcctgcaggtggagcagaagatggcgggtgtgaccctcgagagctgccaggacatcatcgagcagtttgagccatgcccagaaaacaagagtaaggggctgctgggcattgatggcttcaccaactacaccaggagccctgctggtgacatcttcaaccctgagcaccaccatgtgcaccaggacatgacgcagccgctgagccactacttcatcacctcgtcccacaacacctacctcgtgggtgaccagctcatgtcccagtcacgggtggacatgtatgcttgggtcctgcaggctggctgccgctgcgtggaggtggactgctgggatgggcccgacggggagcccattgtgcaccatggctacactctgacttccaagatcctcttcaaagacgtcattgaaaccatcaacaaatatgccttcatcaagaatgagtacccagtgatcctgtccatcgaaaaccactgcagtgtcatccagcagaagaaaatggcccagtatctgactgacatccttggggacaagctggacctgtcatcagtgagcagtgaagatgccaccacactcccctctccacagatgctcaagggcaagatcctcgtgaaggggaagaagctcccagccaacatcagcgaggatgcggaggaaggcgaggtgtctgatgaggacagtgctgatgagattgacgatgactgcaagctcctcaatggggatgcatccaccaatcgaaagcgtgtagaaaacactgctaagaggaaactggattccctcatcaaagagtcgaagattcgggactgtgaggaccccaacaacttctccgtctccacactgtccccatctggaaagctcggacgcaagagcaaggctgaagaggacgtggagtctggggaggatgccggggccagcagacgcaatggccgcctcgtcgtgggaagcttctccaggcgcaagaagaagggcagcaagctgaagaaggcggccagcgtggaggagggagatgagggtcaggactccccgggaggccagagccgaggggcgacccggcagaagaagaccatgaagctgtcccgggccctctctgacctggtgaagtacaccaagtccgtggccacccacgacatagagatggaggcggcgtccagctggcaggtgtcgtccttcagcgagaccaaggcccaccagattctgcagcagaagccggcgcagtacctacgcttcaaccagcagcagctctcccgcatctacccctcctcctaccgtgtggactccagcaactacaacccgcagcccttctggaacgccggctgccaaatggttgccctgaactaccagtcagaggggcggatgctgcagctgaaccgagccaagttcagcgccaacggtggctgcggctacgtactcaagcctgggtgcatgtgccagggcgtgttcaaccccaactcggaggaccccctgcccgggcagctcaagaagcagctggtgctccggatcatcagtggccagcagcttcccaagccgcgcgactccatgctgggggaccgtggggagatcatcgacccctttgtggaggtggagatcattgggctccctgtggactgcagcagggagcagacccgcgtggtggacgacaacgggttcaaccccacctgggaggagaccctggttttcatggtgcacatgccggagatcgcgctggtccgcttcctcgtctgggaccacgatcccatcgggcgtgacttcattggccagaggacgctggccttcagcagcatgatgccaggctacagacacgtgtacctagaagggatggaagaggcctccatcttcgtgcatgtggctgtcagtgacatcagcggtaaggtcaagcaggctctgggcctaaaaggcctcttcctccgaggcccaaagcccggctcgctggacagtcatgctgctgggcggcccccggcccggccctccgttagccagcggatcctgcggcgcacggccagcgccccgaccaagagccagaagccgggccgcaggggcttcccggagctggtcctgggtacacgggacacaggctccaagggggtggcagacgatgtggtgccccccgggcccggacctgctccggaagccccagcccaggaggggcccggcagcggcagcccccgagacacccgccccctctccacgcagcggccactccccccactgtgcagcctggaaaccatcgctgaggagcccgccccaggccctggtcccccgccaccagcggctgtccccaccagctcttctcagggacggcccccataccccacaggacccggagccaatgtggcaagccccctagaggacactgaggagccccgagacagcaggcctcggccgtgcaacggcgagggcgccggcggggcatacgagagggcccccggcagccagacggacggcaggagccagccccggaccctgggccacctgcccgtgattagaagggtgaagagtgaggggcaggtgcccacggagcccctgggagggtggcggcccctggccgctccctttccagctcctgccgtgtactccgatgccacgggcagtgacccgctgtggcagcggctggagccatgtggccaccgagacagcgtttcctcctcctccagcatgtcatccagcgacactgtcattgacctctccctgcccagcctgggcctgggccgcagccgtgagaacctcgctggagcccacatgggacgcctgccccccaggccccactcggcttcggctgcccgcccagacctgccacctgtgaccaagagcaaatccaaccccaaccttcgggctacaggccagcggcctcccatacctgacgaactgcagcccaggtccctggccccaaggatggctggcctccccttccggcctccctggggctgcctttccctggtgggcgtgcaggactgccccgtggctgccaagtccaagagcctgggcgacctcactgctgatgactttgcccctagctttgagggcggctcccgcagactgagccacagcctgggcctcccgggagggacacggcgggtgtcggggccaggggtgagacgggacaccctgacagagcagctgcgctggctcactgtcttccagcaggcaggagacatcacgtcacccaccagcctgggcccggctggggagggggtggcagggggccctggttttgtgcggcgctcctcctcccgcagccacagccgcgtgcgtgccattgccagccgggcccgccaggcccaggagcggcagcagagactgcagggcctgggccggcagggacccccagaagaggagcggggcacccccgagggcgcctgctccgtgggccacgagggcagtgtggatgcaccagcaccctccaagggagccctcgggccagcatccgcggctgctgaaaacctggtcctgctccgcctctgaccgtcagtggtgggaacctgggcggctctggaggcccagggcaggggtgggcgtgttgtttgctcaggaaacagggcagccaggcccccaaaactgtgtccccctggctgccctgtgtcccctccacccctgcctccctcctgcccctgctcccggggaggaaaggctaaagctgctggcccggggcccacaggaggggcttcgaggctggccctgccaggcagttttcccggcgttttaggatctgtacatagagaaatatttaaatttttagaagcaaaacttatacaacattaaaatgataccaagtcc

SEQ ID NO: 15861 - DNA, 568 bp, Homo sapiens
  source 1..568: mol_type = unassigned DNA
gccctttgctgcggcagctttctgttctccctggctccctgcacggaactgagctttggtgtgtgatgcgctgctggcccaggctacaccccgacaagggacaccgggggccccgggagcagagagacctcagagcagcctcctcctgcctcctgtggacggccggccccagctggtgatcccagccagtcccagctttcagttgctgcccccaccgacagtcctcagtccctccatgatggctcccccgacagccggcccccttcctggcccagctcttccgcctgaggacccagggccggatccggagagcaggtggcttttcttgagcgccaacattctgcccgtggtggagcggtgcatgggtgccatgcaagaggggatgcagatggtgaagctgcgtggcggctccaagggcctggtccgcttctactacctggacgagcaccgctcctgcatccgctggaggccctcacgcaagaacgagaaggccaagatctccatcgactccatccaggaggtgagtgaggggcggcagtcggaggtcttccagcgctaccctgacggc

SEQ ID NO: 15862 - DNA, 5450 bp, Homo sapiens; identical to SEQ ID NO: 15855
  source 1..5450: mol_type = unassigned DNA

SEQ ID NO: 15863 - DNA, 4837 bp, Homo sapiens; identical to SEQ ID NO: 15856
  source 1..4837: mol_type = unassigned DNA

SEQ ID NO: 15864 - DNA, 6453 bp, Homo sapiens; identical to SEQ ID NO: 15857
  source 1..6453: mol_type = unassigned DNA

SEQ ID NO: 15865 - DNA, 3781 bp, Homo sapiens
  source 1..3781: mol_type = unassigned DNA
ggcgcgcacctgggtcactggcctgcgctacctcatggccggcatcagcgacgaggacagcctggctcgccgccagcgcaccagggaccaatggctgaagcagacgtttgacgaggccgacaagaacggggatggcagcctgagcattggcgaggtcctgcagctgctgcacaagctcaacgtgaacctgccccggcagagggtgaagcagatgttcagggaagcggacacggatgaccaccaagggacgctgggttttgaagagttctgtgccttctacaagatgatgtccacccgccgggacctctacctgctcatgctgacctacagcaaccacaaggaccacctggatgccgccagcctgcagcgcttcctgcaggtggagcagaagatggcgggtgtgaccctcgagagctgccaggacatcatcgagcagtttgagccatgcccagaaaacaagagtaaggggctgctgggcattgatggcttcaccaactacaccaggagccctgctggtgacatcttcaaccctgagcaccaccatgtgcaccaggacatgacgcagccgctgagccactacttcatcacctcgtcccacaacacctacctcgtgggtgaccagctcatgtcccagtcacgggtggacatgtatgcttgggtcctgcaggctggctgccgctgcgtggaggtggactgctgggatgggcccgacggggagcccattgtgcaccatggctacactctgacttccaagatcctcttcaaagacgtcattgaaaccatcaacaaatatgccttcatcaagaatgagtacccagtgatcctgtccatcgaaaaccactgcagtgtcatccagcagaagaaaatggcccagtatctgactgacatccttggggacaagctggacctgtcatcagtgagcagtgaagatgccaccacactcccctctccacagatgctcaagggcaagatcctcgtgaaggggaagaagctcccagccaacatcagcgaggatgcggaggaaggcgaggtgtctgatgaggacagtgctgatgagattgacgatgactgcaagctcctcaatggggatgcatccaccaatcgaaagcgtgtagaaaacactgctaagaggaaactggattccctcatcaaagagtcgaagattcgggactgtgaggaccccaacaacttctccgtctccacactgtccccatctggaaagctcggacgcaagagcaaggctgaagaggacgtggagtctggggaggatgccggggccagcagacgcaatggccgcctcgtcgtgggaagcttctccaggcgcaagaagaagggcagcaagctgaagaaggcggccagcgtggaggagggagatgagggtcaggactccccgggaggccagagccgaggggcgacccggcagaagaagaccatgaagctgtcccgggccctctctgacctggtgaagtacaccaagtccgtggccacccacgacatagagatggaggcggcgtccagctggcaggtgtcgtccttcagcgagaccaaggcccaccagattctgcagcagaagccggcgcagtacctacgcttcaaccagcagcagctctcccgcatctacccctcctcctaccgtgtggactccagcaactacaacccgcagcccttctggaacgccggctgccaaatgggcgtgttcaaccccaactcggaggaccccctgcccgggcagctcaagaagcagctggtgctccggatcatcagtggccagcagcttcccaagccgcgcgactccatgctgggggaccgtggggagatcatcgacccctttgtggaggtggagatcattgggctccctgtggactgcagcagggagcagacccgcgtggtggacgacaacgggttcaaccccacctgggaggagaccctggttttcatggtgcacatgccggagatcgcgctggtccgcttcctcgtctgggaccacgatcccatcgggcgtgacttcattggccagaggacgctggccttcagcagcatgatgccaggctacagacacgtgtacctagaagggatggaagaggcctccatcttcgtgcatgtggctgtcagtgacatcagcggtaaggtcaagcaggctctgggcctaaaaggcctcttcctccgaggcccaaagcccggctcgctggacagtcatgctgctgggcggcccccggcccggccctccgttagccagcggatcctgcggcgcacggccagcgccccgaccaagagccagaagccgggccgcaggggcttcccggagctggtcctgggtacacgggacacaggctccaagggggtggcagacgatgtggtgccccccgggcccggacctgctccggaagccccagcccaggaggggcccggcagcggcagcccccgagacacccgccccctctccacgcagcggccactccccccactgtgcagcctggaaaccatcgctgaggagcccgccccaggccctggtcccccgccaccagcggctgtccccaccagctcttctcagggacggcccccataccccacaggacccggagccaatgtggcaagccccctagaggacactgaggagccccgagacagcaggcctcggccgtgcaacggcgagggcgccggcggggcatacgagagggcccccggcagccagacggacggcaggagccagccccggaccctgggccacctgcccgtgattagaagggtgaagagtgaggggcaggtgcccacggagcccctgggagggtggcggcccctggccgctccctttccagctcctgccgtgtactccgatgccacgggcagtgacccgctgtggcagcggctggagccatgtggccaccgagacagcgtttcctcctcctccagcatgtcatccagcgacactgtcattgacctctccctgcccagcctgggcctgggccgcagccgtgagaacctcgctggagcccacatgggacgcctgccccccaggccccactcggcttcggctgcccgcccagacctgccacctgtgaccaagagcaaatccaaccccaaccttcgggctacaggccagcggcctcccatacctgacgaactgcagcccaggtccctggccccaaggatggctggcctccccttccggcctccctggggctgcctttccctggtgggcgtgcaggactgccccgtggctgccaagtccaagagcctgggcgacctcactgctgatgactttgcccctagctttgagggcggctcccgcagactgagccacagcctgggcctcccgggagggacacggcgggtgtcggggccaggggtgagacgggacaccctgacagagcagctgcgctggctcactgtcttccagcaggcaggagacatcacgtcacccaccagcctgggcccggctggggagggggtggcagggggccctggttttgtgcggcgctcctcctcccgcagccacagccgcgtgcgtgccattgccagccgggcccgccaggcccaggagcggcagcagagactgcagggcctgggccggcagggacccccagaagaggagcggggcacccccgagggcgcctgctccgtgggccacgagggcagtgtggatgcaccagcaccctccaagggagccctcgggccagcatccgcggctgctgaaaacctggtcctgctccgcctctgaccgtcagtggtgggaacctgggcggctctggaggcccagggcaggggtgggcgtgttgtttgc

SEQ ID NO: 15866 - DNA, 6986 bp, Homo sapiens; identical to SEQ ID NO: 15858
  source 1..6986: mol_type = unassigned DNA

SEQ ID NO: 15867 - DNA, 2341 bp, Homo sapiens; identical to SEQ ID NO: 15859
  source 1..2341: mol_type = unassigned DNA

SEQ ID NO: 15868 - DNA, 4837 bp, Homo sapiens; identical to SEQ ID NO: 15860
  source 1..4837: mol_type = unassigned DNA

SEQ ID NO: 15869 - DNA, 5125 bp, Homo sapiens
  source 1..5125: mol_type = unassigned DNA
atcgggccgccggcgtccgggctccagaggccgcctggctgggcgcccggtgccttttgtctggcgcagggccggcgtttgcatcacatttcggatacctccctctctttttcgcctctccttctgcctcccgctcacatcgcctccccactcccgccaccgtcccccgccggactgctagcctcctagaccgaagcccgaggacgtctctgcccgagcgatgtcccctctccagaaagttgccgccgccgccgccgccgccgccactgccgccgctgggcggtgaaacaaagtctggcggggccgcctcccggtgcaggagcgcaccggtgcctagcggctggactccgctgccgggcgtcccgctttcccccggggagccctaaacgctccaggccatggccgagggcgcggccggcagggaggatccggcgccgcccgacgcggcggggggcgaagacgacccccgagtgggcccggatgccgccggggactgcgtgacggcggcctctgggggccggatgagggaccgtcgcagcggggtcgcactgccaggcgccgcggggaccccagcggacagcgaggcgggcctcctggaggcagcacgggcgaccccccggcgcagcagcatcatcaaggatccttcaaaccaaaaatgtggtggaagaaagaaaaccgtgtctttcagcagcatgccatcggaaaagaaaattagcagtgcaaatgactgcatcagcttcatgcaagctggctgtgagttgaagaaagtccggccaaattctcgcatttacaaccgttttttcactctggacacagaccttcaagctcttcgctgggaaccttcaaagaaagacctcgagaaagccaagcttgatatttctgccataaaagagatcagactggggaaaaacacggaaacatttagaaacaatggccttgctgaccagatctgtgaggactgtgccttttccatactccacggggaaaactatgagtctctggacctagttgccaattcagcagatgtggcaaacatctgggtgtctgggttacggtacctggtttctcgaagtaagcagcctcttgattttatggagggcaaccagaacacaccacggttcatgtggttgaaaacagtgtttgaagcagcagatgttgatgggaatgggattatgttggaagacacctctgtagagttaataaaacaactcaaccctactctgaaggaagccaagatcaggttaaagtttaaagaaatccagaagagcaaggaaaaactaaccacccgcgtgaccgaagaggaattttgtgaagctttttgtgaactttgcaccaggccagaagtgtatttcttacttgtacagatatctaaaaacaaagaatatttggatgccaatgatctcatgctctttttagaagctgagcaaggagtcacccatatcaccgaggatatatgcttagacatcataaggagatacgaactttctgaagagggacgtcaaaaagggtttcttgcaattgatggctttacccagtatttattgtcatcagaatgtgacatttttgatcctgagcaaaagaaggttgcccaagatatgacccagccattatctcactactatatcaatgcctctcataacacctatctaatagaagaccagttcagggggccagctgacatcaatgggtacattagagctttgaaaatgggctgtcgaagcgttgaactcgatgtaagtgatggttcagataatgaaccaatcctttgtaatcgaaataacatgacaacccatgtttcctttcgaagtgtcatagaggtaataaataaatttgcctttgttgcttctgaatacccactcattctttgcttgggaaatcactgctccttgccgcagcagaaggtaatggctcaacagatgaaaaaggtctttggcaataaactctatactgaagcacctttgccctcagaatcctacctcccatcaccagaaaaattaaaaagaatgatcattgtgaaaggaaagaagttgccttctgatccagatgtgttagaaggagaagtaacagatgaagatgaagaagctgaaatgtctcgaaggatgtcggtagattacaatggtgagcagaagcaaatccgactctgtagggagctctctgatttggtgtctatttgtaaatctgttcaatacagggattttgaactatctatgaaaagccaaaactattgggaaatgtgttcatttagtgaaacagaggccagccgcattgcaaatgagtacccagaggattttgttaattataataagaagttcttatcaagaatctatccaagtgccatgaggatcgattccagtaacttgaatccacaggacttttggaattgtggctgtcagattgtagcaatgaattttcagactccgggtccaatgatggaccttcacacgggctggtttcttcaaaacgggggatgtggttatgttctaaggccgtctataatgcgagatgaagtttcttacttcagcgcaaatacaaagggcattctacctggggtgtctcctctagctcttcatatcaagatcatcagtggtcagaatttcccaaagcccaagggagcttgtgccaaaggggatgtcatagatccctatgtttgtatagagatacacggaattccagcggattgttcggaacaaagaactaaaactgtacagcaaaacagtgataatcctatttttgatgaaacttttgagttccaagtaaacctacctgagctggccatgatccgttttgttgttctggatgatgactacattggggatgagtttatagggcaatatacgataccatttgaatgtttgcagcctggatatcggcatgttcccctgcgttcttttgtgggtgacatcatggagcacgtaaccctttttgtccacatagcaataactaatcgaagtggaggaggaaaggcacagaagcgcagtctttcagtgagaatggggaagaaagttcgggaatataccatgctcaggaatatcggtcttaaaaccattgatgacatctttaaaatagcggttcatccattacgagaagccatagatatgagagaaaatatgcagaatgcaatcgtgtctattaaggaactatgtggactccctccaattgccagtctgaagcagtgcctgttaactctgtcatctcggctcatcaccagtgacaatactccttcagtctcacttgtgatgaaagacagctttccttacctggagcctctgggtgcaattccagatgtgcagaaaaagatgctgactgcttatgatctgatgattcaagagagccggtttctcatagaaatggcggacacagtccaggaaaagattgtacagtgtcagaaagcagggatggagttccatgaagaacttcataatttgggggcaaaagaaggcttgaagggaagaaaactcaacaaagcaactgagagctttgcttggaacattacagtattgaagggccaaggagatctgttgaagaatgccaagaatgaagctatagaaaacatgaagcagatccagctggcatgcctgtcctgtggactgagtaaagcccccagcagcagtgctgaggccaagagcaagcgcagcctggaagccatagaggagaaggaaagtagtgaggagaatgggaagctgtgactctgggcattatcgacacgttcacccatcttatcaaggactctggtttctcattcttgttttctttctttaaatgttttataagttcacaaaatggtgccctatatggggtattggacatagatattttcacaatgtcagtatttcagtgtagttaatttatctaaattaaagcctttagtatcagtgttttaaattctgagacatgtgtcaacacccctgtgtggatgcctgtggaagagtgtgtgtgtgtgtgtgtgtgtgtgtgtgtggcagagagagagaaagagagagagagagagaaattctgttaaaatctattctgtgttgcattattcatttagtgagttattccttgatcattttgggacaattgttttaatctgaaattctaaagagcacttactgtaacctgttgctgtgtttaatttgacttctctgcctttgacatttaatttagtgatcttagcatagcttattattgaaggaagccaaatttatcaaagcatagatgttttggtagattaaatatagattagaaaaattcctaagaatcagagtagaaataaaagtgaatgaaagattaaacagatgatgagaatttctaaaaagattagcaaggtcatttcttcagtcagaaaactttaaaaaatatttattaaataaaatcaatttttaggaagttttctgtagtcatttactaaacatatgatttcactagaaaagctgatcataagtgaatttatacctacctgtgtggtactctgaaacacactgaaagctctgttgcaattaggattttgatgtgacaataatattgttgtataatttcgagatttgtaggaaggtctcattcttccaagctgagagtctagcactcattttctataacagatatggcagcttagaggtgttggctttgtttggatgtaatttagggtactaaatttaaatttaaagatattgttcaaacaatatcatatcatcacattgagctgatataaattctgtgggtccgataatatctttgtgataatttaagagctaaccagttaccacacatctatgatataaccctaacacacacagaaaagcatacatgcaaaaagaaatgactaattagggtacatttataattgcatctaggtaatttttaccctaatgtcttcataaagtacttgagtgtaatgtttgttacctccaacagaactaaatgttctatggttatgaaagaatatatttatttaaagcattgcttttattttgaaaagcttcttaattaatttgattaacaaatatgctaatttggggaaacctagagaagataattgttgaaattttgcaaatataaacatctcctatagcttctgtgttatttctgacttcttaacactattatgtttatgttgcacattactgaaagagtaaagatatgaaaa

SEQ ID NO: 15870 - DNA, 6665 bp, Homo sapiens
  source 1..6665: mol_type = unassigned DNA
atcgggccgccggcgtccgggctccagaggccgcctggctgggcgcccggtgccttttgtctggcgcagggccggcgtttgcatcacatttcggatacctccctctctttttcgcctctccttctgcctcccgctcacatcgcctccccactcccgccaccgtcccccgccggactgctagcctcctagaccgaagcccgaggacgtctctgcccgagcgatgtcccctctccagaaagttgccgccgccgccgccgccgccgccactgccgccgctgggcggtgaaacaaagtctggcggggccgcctcccggtgcaggagcgcaccggtgcctagcggctggactccgctgccgggcgtcccgctttcccccggggagccctaaacgctccaggccatggccgagggcgcggccggcagggaggatccggcgccgcccgacgcggcggggggcgaagacgacccccgagtgggcccggatgccgccggggactgcgtgacggcggcctctgggggccggatgagggaccgtcgcagcggggtcgcactgccaggcgccgcggggaccccagcggacagcgaggcgggcctcctggaggcagcacgggcgaccccccggcgcagcagcatcatcaagatgggactgtgtagttgcaggaaaacagctcagagtttccactgattcttcattatggatccttcaaaccaaaaatgtggtggaagaaagaaaaccgtgtctttcagcagcatgccatcggaaaagaaaattagcagtgcaaatgactgcatcagcttcatgcaagctggctgtgagttgaagaaagtccggccaaattctcgcatttacaaccgttttttcactctggacacagaccttcaagctcttcgctgggaaccttcaaagaaagacctcgagaaagccaagcttgatatttctgccataaaagagatcagactggggaaaaacacggaaacatttagaaacaatggccttgctgaccagatctgtgaggactgtgccttttccatactccacggggaaaactatgagtctctggacctagttgccaattcagcagatgtggcaaacatctgggtgtctgggttacggtacctggtttctcgaagtaagcagcctcttgattttatggagggcaaccagaacacaccacggttcatgtggttgaaaacagtgtttgaagcagcagatgttgatgggaatgggattatgttggaagacacctctgtagagttaataaaacaactcaaccctactctgaaggaagccaagatcaggttaaagtttaaagaaatccagaagagcaaggaaaaactaaccacccgcgtgaccgaagaggaattttgtgaagctttttgtgaactttgcaccaggccagaagtgtatttcttacttgtacagatatctaaaaacaaagaatatttggatgccaatgatctcatgctctttttagaagctgagcaaggagtcacccatatcaccgaggatatatgcttagacatcataaggagatacgaactttctgaagagggacgtcaaaaagggtttcttgcaattgatggctttacccagtatttattgtcatcagaatgtgacatttttgatcctgagcaaaagaaggttgcccaagatatgacccagccattatctcactactatatcaatgcctctcataacacctatctaatagaagaccagttcagggggccagctgacatcaatgggtacattagagctttgaaaatgggctgtcgaagcgttgaactcgatgtaagtgatggttcagataatgaaccaatcctttgtaatcgaaataacatgacaacccatgtttcctttcgaagtgtcatagaggtaataaataaatttgcctttgttgcttctgaatacccactcattctttgcttgggaaatcactgctccttgccgcagcagaaggtaatggctcaacagatgaaaaaggtctttggcaataaactctatactgaagcacctttgccctcagaatcctacctcccatcaccagaaaaattaaaaagaatgatcattgtgaaaggaaagaagttgccttctgatccagatgtgttagaaggagaagtaacagatgaagatgaagaagctgaaatgtctcgaaggatgtcggtagattacaatggtgagcagaagcaaatccgactctgtagggagctctctgatttggtgtctatttgtaaatctgttcaatacagggattttgaactatctatgaaaagccaaaactattgggaaatgtgttcatttagtgaaacagaggccagccgcattgcaaatgagtacccagaggattttgttaattataataagaagttcttatcaagaatctatccaagtgccatgaggatcgattccagtaacttgaatccacaggacttttggaattgtggctgtcagattgtagcaatgaattttcagactccgggtccaatgatggaccttcacacgggctggtttcttcaaaacgggggatgtggttatgttctaaggccgtctataatgcgagatgaagtttcttacttcagcgcaaatacaaagggcattctacctggggtgtctcctctagctcttcatatcaagatcatcagtggtcagaatttcccaaagcccaagggagcttgtgccaaaggggatgtcatagatccctatgtttgtatagagatacacggaattccagcggattgttcggaacaaagaactaaaactgtacagcaaaacagtgataatcctatttttgatgaaacttttgagttccaagtaaacctacctgagctggccatgatccgttttgttgttctggatgatgactacattggggatgagtttatagggcaatatacgataccatttgaatgtttgcagcctggatatcggcatgttcccctgcgttcttttgtgggtgacatcatggagcacgtaaccctttttgtccacatagcaataactaatcgaagtggaggaggaaaggcacagaagcgcagtctttcagtgagaatggggaagaaagttcgggaatataccatgctcaggaatatcggtcttaaaaccattgatgacatctttaaaatagcggttcatccattacgagaagccatagatatgagagaaaatatgcagaatgcaatcgtgtctattaaggaactatgtggactccctccaattgccagtctgaagcagtgcctgttaactctgtcatctcggctcatcaccagtgacaatactccttcagtctcacttgtgatgaaagacagctttccttacctggagcctctgggtgcaattccagatgtgcagaaaaagatgctgactgcttatgatctgatgattcaagagagccggtttctcatagaaatggcggacacagtccaggaaaagattgtacagtgtcagaaagcagggatggagttccatgaagaacttcataatttgggggcaaaagaaggcttgaagggaagaaaactcaacaaagcaactgagagctttgcttggaacattacagtattgaagggccaaggagatctgttgaagaatgccaagaatgaagctatagaaaacatgaagcagatccagctggcatgcctgtcctgtggactgagtaaagcccccagcagcagtgctgaggccaagagcaagcgcagcctggaagccatagaggagaaggaaagtagtgaggagaatgggaagctgtgactctgggcattatcgacacgttcacccatcttatcaaggactctggtttctcattcttgttttctttctttaaatgttttataagttcacaaaatggtgccctatatggggtattggacatagatattttcacaatgtcagtatttcagtgtagttaatttatctaaattaaagcctttagtatcagtgttttaaattctgagacatgtgtcaacacccctgtgtggatgcctgtggaagagtgtgtgtgtgtgtgtgtgtgtgtgtgtgtggcagagagagagaaagagagagagagagagaaattctgttaaaatctattctgtgttgcattattcatttagtgagttattccttgatcattttgggacaattgttttaatctgaaattctaaagagcacttactgtaacctgttgctgtgtttaatttgacttctctgcctttgacatttaatttagtgatcttagcatagcttattattgaaggaagccaaatttatcaaagcatagatgttttggtagattaaatatagattagaaaaattcctaagaatcagagtagaaataaaagtgaatgaaagattaaacagatgatgagaatttctaaaaagattagcaaggtcatttcttcagtcagaaaactttaaaaaatatttattaaataaaatcaatttttaggaagttttctgtagtcatttactaaacatatgatttcactagaaaagctgatcataagtgaatttatacctacctgtgtggtactctgaaacacactgaaagctctgttgcaattaggattttgatgtgacaataatattgttgtataatttcgagatttgtaggaaggtctcattcttccaagctgagagtctagcactcattttctataacagatatggcagcttagaggtgttggctttgtttggatgtaatttagggtactaaatttaaatttaaagatattgttcaaacaatatcatatcatcacattgagctgatataaattctgtgggtccgataatatctttgtgataatttaagagctaaccagttaccacacatctatgatataaccctaacacacacagaaaagcatacatgcaaaaagaaatgactaattagggtacatttataattgcatctaggtaatttttaccctaatgtcttcataaagtacttgagtgtaatgtttgttacctccaacagaactaaatgttctatggttatgaaagaatatatttatttaaagcattgcttttattttgaaaagcttcttaattaatttgattaacaaatatgctaatttggggaaacctagagaagataattgttgaaattttgcaaatataaacatctcctatagcttctgtgttatttctgacttcttaacactattatgtttatgttgcacattactgaaagagtaaagatatgaaaaaaacacttattgttttcttttattgtgaattgaaaaagcaaagctaatgaaaatgggttactacatcaaaaatatcttaaagagtttgctatttccatggaccagatatgatgaaattattccctgggtttaaaactgggcactcgaggaggaggtacctgaagtcatttgaaggcaagtttccaatgatgctacaatggcctgaaaaaatttctttaccctctgttatatttaacttgctggtaggaggaatagtggaatgcaggtgttaagccctttgtggtgaaaaagaggttctatagacagaaacaaaacccaccttacatcagctgattggttgattttactagtgtacctcttcatctacttgaattctatttggtaaatccatgtctttactggatatacagttaggtgggaagaggagataaaggatgacaaactctcaaacaatatttatacatttatttactccagggtcaaatccaatccttggaagtagcttctctagtttattttatttgtcccagagctctactcacacttaggacccacccaaaaattctcaaaaacgtaatatggattctgcctcatctgatgctatttctggcagtgggttgtcagccatactctgcttcattccactgggtgtccttgctagatggggagtgagatgtggagcagggaggagctttggattctgggagtggaggtggcaagggaaaagtctcctagtctcctgtgatgttcctgcctccagatagaatagcaaaaacaaacaatttttttttgtgtattatgcctccatgacattgttacattctatgaggagcatctgtctcctttctagacttgaactgtggtagaaaaagcccccttctctcttctatctacttagatttggtgatgctaggaatgtagtgttttagatattaattctatttttatttattcatttttacatcaccaataggatctgaggtggagatggcgggtattatcactggcattttacaggtgagaaagcccaaagccactgaggtaattaatggaataattgattttgaacttgggtctgtctgatttcatgtgcaagattatatacttagtgattttgattttaagtttattcttaacattttaaaccagactattaactcttacctttataaccacagatacaaagaactgtatcatttattttctgaatataaaatattaatggtcaatataaaaatacaaaaatagagaactatatacaacagaaaagcaaaattacccactaataacattttgatttatatccctttagacactgtttagagtttatacatatatgtaaatatgcttgtattttaacaaaattgagatattatataaactgtttgtagcagggtgtttaaaattttaacaatatgttatggatatctttctgtgtcaataaatgtgtatttacattagagttccaagcatttgaactgaa

SEQ ID NO: 15871 - DNA, 3083 bp, Homo sapiens
  source 1..3083: mol_type = unassigned DNA
attgcagggtctttctgatgtgatttcttatagcacctctcaagaaaatgaagaataaacttcaggatccttcaaaccaaaaatgtggtggaagaaagaaaaccgtgtctttcagcagcatgccatcggaaaagaaaattagcagtgcaaatgactgcatcagcttcatgcaagctggctgtgagttgaagaaagtccggccaaattctcgcatttacaaccgttttttcactctggacacagaccttcaagctcttcgctgggaaccttcaaagaaagacctcgagaaagccaagcttgatatttctgccataaaagagatcagactggggaaaaacacggaaacatttagaaacaatggccttgctgaccagatctgtgaggactgtgccttttccatactccacggggaaaactatgagtctctggacctagttgccaattcagcagatgtggcaaacatctgggtgtctgggttacggtacctggtttctcgaagtaagcagcctcttgattttatggagggcaaccagaacacaccacggttcatgtggttgaaaacagtgtttgaagcagcagatgttgatgggaatgggattatgttggaagacacctctgtagagttaataaaacaactcaaccctactctgaaggaagccaagatcaggttaaagtttaaagaaatccagaagagcaaggaaaaactaaccacccgcgtgaccgaagaggaattttgtgaagctttttgtgaactttgcaccaggccagaagtgtatttcttacttgtacagatatctaaaaacaaagaatatttggatgccaatgatctcatgctctttttagaagctgagcaaggagtcacccatatcaccgaggatatatgcttagacatcataaggagatacgaactttctgaagagggacgtcaaaaagggtttcttgcaattgatggctttacccagtatttattgtcatcagaatgtgacatttttgatcctgagcaaaagaaggttgcccaagatatgacccagccattatctcactactatatcaatgcctctcataacacctatctaatagaagaccagttcagggggccagctgacatcaatgggtacattagagctttgaaaatgggctgtcgaagcgttgaactcgatgtaagtgatggttcagataatgaaccaatcctttgtaatcgaaataacatgacaacccatgtttcctttcgaagtgtcatagaggtaataaataaatttgcctttgttgcttctgaatacccactcattctttgcttgggaaatcactgctccttgccgcagcagaaggtaatggctcaacagatgaaaaaggtctttggcaataaactctatactgaagcacctttgccctcagaatcctacctcccatcaccagaaaaattaaaaagaatgatcattgtgaaaggaaagaagttgccttctgatccagatgtgttagaaggagaagtaacagatgaagatgaagaagctgaaatgtctcgaaggatgtcggtagattacaatggtgagcagaagcaaatccgactctgtagggagctctctgatttggtgtctatttgtaaatctgttcaatacagggattttgaactatctatgaaaagccaaaactattgggaaatgtgttcatttagtgaaacagaggccagccgcattgcaaatgagtacccagaggattttgttaattataataagaagttcttatcaagaatctatccaagtgccatgaggatcgattccagtaacttgaatccacaggacttttggaattgtggctgtcagattgtagcaatgaattttcagactccgggtccaatgatggaccttcacacgggctggtttcttcaaaacgggggatgtggttatgttctaaggccgtctataatgcgagatgaagtttcttacttcagcgcaaatacaaagggcattctacctggggtgtctcctctagctcttcatatcaagatcatcagtggtcagaatttcccaaagcccaagggagcttgtgccaaaggggatgtcatagatccctatgtttgtatagagatacacggaattccagcggattgttcggaacaaagaactaaaactgtacagcaaaacagtgataatcctatttttgatgaaacttttgagttccaagtaaacctacctgagctggccatgatccgttttgttgttctggatgatgactacattggggatgagtttatagggcaatatacgataccatttgaatgtttgcagcctggatatcggcatgttcccctgcgttcttttgtgggtgacatcatggagcacgtaaccctttttgtccacatagcaataactaatcgaagtggaggaggaaaggcacagaagcgcagtctttcagtgagaatggggaagaaagttcgggaatataccatgctcaggaatatcggtcttaaaaccattgatgacatctttaaaatagcggttcatccattacgagaagccatagatatgagagaaaatatgcagaatgcaatcgtgtctattaaggaactatgtggactccctccaattgccagtctgaagcagtgcctgttaactctgtcatctcggctcatcaccagtgacaatactccttcagtctcacttgtgatgaaagacagctttccttacctggagcctctgggtgcaattccagatgtgcagaaaaagatgctgactgcttatgatctgatgattcaagagagccggtttctcatagaaatggcggacacagtccaggaaaagattgtacagtgtcagaaagcagggatggagttccatgaagaacttcataatttgggggcaaaagaaggcttgaagggaagaaaactcaacaaagcaactgagagctttgcttggaacattacagtattgaagggccaaggagatctgttgaagaatgccaagaatgaagctatagaaaacatgaagcagatccagctggcatgcctgtcctgtggactgagtaaagcccccagcagcagtgctgaggccaagagcaagcgcagcctggaagccatagaggagaag

SEQ ID NO: 15872 - DNA, 236 bp, Homo sapiens
  source 1..236: mol_type = unassigned DNA
gatctgaggtggagatggcgggtattatcactggcattttacagcgatgagtcaacaagaagtttacagcactgagaaagacgagtcaacaacagaaggaaaaaaatccagagaaaatggcacttgctgcattggaatgaaagataatctgcagaaggtaaatggacaggagagattttcatcattttaaatgtatttgcaatgaccatgatttatattaaagtttctcttctctg

SEQ ID NO: 15873 - DNA, 1195 bp, Homo sapiens
  source 1..1195: mol_type = unassigned DNA
tgagaaggaacagtcaaagatattgcaggaagaccagtagtacatggaagtcaaaggagagagcatcaagaaagagatgcgatgagtcaacaagaagtttacagcactgagaaagacgagtcaacaacagaaggaaaaaaatccagagaaaatggcacttgctgcattggaatgaaagataatctgcagaaggacctgctcagtggcaataaacattggcattcttggaaacagtgtttgcctaagaatcttctgtctgcctttgttgctttggccatattatgataagggcatgactggatttaccaaaatgggcatgattggatctacttattctcttatcagacaccttttcctagacaacatcctgaaacataagaataagcacaaaaatgaacatattacatcaaacgtaccactgagaagaatggtaagtttaacagtttcccacgtgggaggcatattgacgattacaattttaagttagcagaacaccagctcacatggaaacagtctcctccgtgaattctttctttggctgacagacatgagatgttagctgtctaagaagaccttcacaccaacaccttcttagaagatattgtaagataacaatccttgagtggaacctgaattctttctaaacactgcatgtaggaaaacaagaggcagttcacacaatcacttaacacctcttcttaaaagtgaatccttgaaggagtggtgttcaaatatttaagtacattagatactttatacacgccacatccaaaatgctcagtattcctaatacatttcattttctcccaagttttaatggttgatgcacaatcacattaatttcctattaatttctaggaatatgtacacagtagccttaggagaaagaagataactattactttacatttttaactgttttgttttcatgtccatgagagaaaaattaaagtaagttaaaaaattaactcagacactctatttatttttaggaagacatacaccccccacagggagacttttacatgttgtaataatgttcacaaacagctactctttaagtgtaacactattctaagcctcttttcctccattttatttcatatacatttatgcatctgcatgcatatataaccacatgtatttatatttagtaggtatagtttattacacataaatctaaatatctatcata

SEQ ID NO: 15874 - DNA, 5979 bp, Homo sapiens
  source 1..5979: mol_type = unassigned DNA
attttacaggatccttcaaaccaaaaatgtggtggaagaaagaaaaccgtgtctttcagcagcatgccatcggaaaagaaaattagcagtgcaaatgactgcatcagcttcatgcaagctggctgtgagttgaagaaagtccggccaaattctcgcatttacaaccgttttttcactctggacacagaccttcaagctcttcgctgggaaccttcaaagaaagacctcgagaaagccaagcttgatatttctgccataaaagagatcagactggggaaaaacacggaaacatttagaaacaatggccttgctgaccagatctgtgaggactgtgccttttccatactccacggggaaaactatgagtctctggacctagttgccaattcagcagatgtggcaaacatctgggtgtctgggttacggtacctggtttctcgaagtaagcagcctcttgattttatggagggcaaccagaacacaccacggttcatgtggttgaaaacagtgtttgaagcagcagatgttgatgggaatgggattatgttggaagacacctctgtagagttaataaaacaactcaaccctactctgaaggaagccaagatcaggttaaagtttaaagaaatccagaagagcaaggaaaaactaaccacccgcgtgaccgaagaggaattttgtgaagctttttgtgaactttgcaccaggccagaagtgtatttcttacttgtacagatatctaaaaacaaagaatatttggatgccaatgatctcatgctctttttagaagctgagcaaggagtcacccatatcaccgaggatatatgcttagacatcataaggagatacgaactttctgaagagggacgtcaaaaagggtttcttgcaattgatggctttacccagtatttattgtcatcagaatgtgacatttttgatcctgagcaaaagaaggttgcccaagatatgacccagccattatctcactactatatcaatgcctctcataacacctatctaatagaagaccagttcagggggccagctgacatcaatgggtacattagagctttgaaaatgggctgtcgaagcgttgaactcgatgtaagtgatggttcagataatgaaccaatcctttgtaatcgaaataacatgacaacccatgtttcctttcgaagtgtcatagaggtaataaataaatttgcctttgttgcttctgaatacccactcattctttgcttgggaaatcactgctccttgccgcagcagaaggtaatggctcaacagatgaaaaaggtctttggcaataaactctatactgaagcacctttgccctcagaatcctacctcccatcaccagaaaaattaaaaagaatgatcattgtgaaaggaaagaagttgccttctgatccagatgtgttagaaggagaagtaacagatgaagatgaagaagctgaaatgtctcgaaggatgtcggtagattacaatggtgagcagaagcaaatccgactctgtagggagctctctgatttggtgtctatttgtaaatctgttcaatacagggattttgaactatctatgaaaagccaaaactattgggaaatgtgttcatttagtgaaacagaggccagccgcattgcaaatgagtacccagaggattttgttaattataataagaagttcttatcaagaatctatccaagtgccatgaggatcgattccagtaacttgaatccacaggacttttggaattgtggctgtcagattgtagcaatgaattttcagactccgggtccaatgatggaccttcacacgggctggtttcttcaaaacgggggatgtggttatgttctaaggccgtctataatgcgagatgaagtttcttacttcagcgcaaatacaaagggcattctacctggggtgtctcctctagctcttcatatcaagatcatcagtggtcagaatttcccaaagcccaagggagcttgtgccaaaggggatgtcatagatccctatgtttgtatagagatacacggaattccagcggattgttcggaacaaagaactaaaactgtacagcaaaacagtgataatcctatttttgatgaaacttttgagttccaagtaaacctacctgagctggccatgatccgttttgttgttctggatgatgactacattggggatgagtttatagggcaatatacgataccatttgaatgtttgcagcctggatatcggcatgttcccctgcgttcttttgtgggtgacatcatggagcacgtaaccctttttgtccacatagcaataactaatcgaagtggaggaggaaaggcacagaagcgcagtctttcagtgagaatggggaagaaagttcgggaatataccatgctcaggaatatcggtcttaaaaccattgatgacatctttaaaatagcggttcatccattacgagaagccatagatatgagagaaaatatgcagaatgcaatcgtgtctattaaggaactatgtggactccctccaattgccagtctgaagcagtgcctgttaactctgtcatctcggctcatcaccagtgacaatactccttcagtctcacttgtgatgaaagacagctttccttacctggagcctctgggtgcaattccagatgtgcagaaaaagatgctgactgcttatgatctgatgattcaagagagccggtttctcatagaaatggcggacacagtccaggaaaagattgtacagtgtcagaaagcagggatggagttccatgaagaacttcataatttgggggcaaaagaaggcttgaagggaagaaaactcaacaaagcaactgagagctttgcttggaacattacagtattgaagggccaaggagatctgttgaagaatgccaagaatgaagctatagaaaacatgaagcagatccagctggcatgcctgtcctgtggactgagtaaagcccccagcagcagtgctgaggccaagagcaagcgcagcctggaagccatagaggagaaggaaagtagtgaggagaatgggaagctgtgactctgggcattatcgacacgttcacccatcttatcaaggactctggtttctcattcttgttttctttctttaaatgttttataagttcacaaaatggtgccctatatggggtattggacatagatattttcacaatgtcagtatttcagtgtagttaatttatctaaattaaagcctttagtatcagtgttttaaattctgagacatgtgtcaacacccctgtgtggatgcctgtggaagagtgtgtgtgtgtgtgtgtgtgtgtgtgtgtggcagagagagagaaagagagagagagagagaaattctgttaaaatctattctgtgttgcattattcatttagtgagttattccttgatcattttgggacaattgttttaatctgaaattctaaagagcacttactgtaacctgttgctgtgtttaatttgacttctctgcctttgacatttaatttagtgatcttagcatagcttattattgaaggaagccaaatttatcaaagcatagatgttttggtagattaaatatagattagaaaaattcctaagaatcagagtagaaataaaagtgaatgaaagattaaacagatgatgagaatttctaaaaagattagcaaggtcatttcttcagtcagaaaactttaaaaaatatttattaaataaaatcaatttttaggaagttttctgtagtcatttactaaacatatgatttcactagaaaagctgatcataagtgaatttatacctacctgtgtggtactctgaaacacactgaaagctctgttgcaattaggattttgatgtgacaataatattgttgtataatttcgagatttgtaggaaggtctcattcttccaagctgagagtctagcactcattttctataacagatatggcagcttagaggtgttggctttgtttggatgtaatttagggtactaaatttaaatttaaagatattgttcaaacaatatcatatcatcacattgagctgatataaattctgtgggtccgataatatctttgtgataatttaagagctaaccagttaccacacatctatgatataaccctaacacacacagaaaagcatacatgcaaaaagaaatgactaattagggtacatttataattgcatctaggtaatttttaccctaatgtcttcataaagtacttgagtgtaatgtttgttacctccaacagaactaaatgttctatggttatgaaagaatatatttatttaaagcattgcttttattttgaaaagcttcttaattaatttgattaacaaatatgctaatttggggaaacctagagaagataattgttgaaattttgcaaatataaacatctcctatagcttctgtgttatttctgacttcttaacactattatgtttatgttgcacattactgaaagagtaaagatatgaaaaaaacacttattgttttcttttattgtgaattgaaaaagcaaagctaatgaaaatgggttactacatcaaaaatatcttaaagagtttgctatttccatggaccagatatgatgaaattattccctgggtttaaaactgggcactcgaggaggaggtacctgaagtcatttgaaggcaagtttccaatgatgctacaatggcctgaaaaaatttctttaccctctgttatatttaacttgctggtaggaggaatagtggaatgcaggtgttaagccctttgtggtgaaaaagaggttctatagacagaaacaaaacccaccttacatcagctgattggttgattttactagtgtacctcttcatctacttgaattctatttggtaaatccatgtctttactggatatacagttaggtgggaagaggagataaaggatgacaaactctcaaacaatatttatacatttatttactccagggtcaaatccaatccttggaagtagcttctctagtttattttatttgtcccagagctctactcacacttaggacccacccaaaaattctcaaaaacgtaatatggattctgcctcatctgatgctatttctggcagtgggttgtcagccatactctgcttcattccactgggtgtccttgctagatggggagtgagatgtggagcagggaggagctttggattctgggagtggaggtggcaagggaaaagtctcctagtctcctgtgatgttcctgcctccagatagaatagcaaaaacaaacaatttttttttgtgtattatgcctccatgacattgttacattctatgaggagcatctgtctcctttctagacttgaactgtggtagaaaaagcccccttctctcttctatctacttagatttggtgatgctaggaatgtagtgttttagatattaattctatttttatttattcatttttacatcaccaataggatctgaggtggagatggcgggtattatcactggcattttacaggtgagaaagcccaaagccactgaggtaattaatggaataattgattttgaacttgggtctgtctgatttcatgtgcaagattatatacttagtgattttgattttaagtttattcttaacattttaaaccagactattaactcttacctttataaccacagatacaaagaactgtatcatttattttctgaatataaaatattaatggtcaatataaaaatacaaaaatagagaactatatacaacagaaaagcaaaattacccactaataacattttgatttatatccctttagacactgtttagagtttatacatatatgtaaatatgcttgtattttaacaaaattgagatattatataaactgtttgtagcagggtgtttaaaattttaacaatatgttatggatatctttctgtgtcaataaatgtgtatttacattagagttccaagcatttgaactgaa

SEQ ID NO: 15875 - DNA, 7704 bp, Homo sapiens
  source 1..7704: mol_type = unassigned DNA
attggattagcggcagcagcctgccagcctgcccgaggagtgctgggaccagcgcgctgcacgccgactggcacgatggcctcgtctcaggggaaaaacgagctgaaattagccgactggatggcaactctgccggagagcatgcacagcatccccctcaccaatttagccattccagggtctcatgattccttcagcttctacattgatgaagcctctccagtaggtcctgagcagccagaaactgtccagaattttgtctctgtgtttggaactgtggccaaaaagctcatgcggaaatggttagccactcagacaatgaattttactggccagctaggagctggaattcgttattttgatcttcgaatttccaccaagcccagagaccccgacaatgaactctattttgctcatggtttgttcagtgccaaagtcaatgaaggccttgaggagatcaatgcattcctcacagatcaccataaggaggtagtgttcttggacttcaaccacttttatgggatgcagaaatatcaccatgaaaaactggtccaaatgctgaaagacatctatggaaataaaatgtgcccagcgatttttgcccaggaagttagtttaaagtacctgtgggagaaggactatcaagtgctggtcttctaccatagtccagtggctctggaagtgccctttctctggcctgggcagatgatgccagcaccctgggccaacaccacagaccccgagaaactgatccagtttcttcaagcatccatcactgagagaagaaagaagggatcgttttttatatctcaggtggtgctgacccccaaagctagcactgtggtcaaaggggtggcaagtggcctcagagaaacaatcacagaaagagctcttcctgccatgatgcagtgggtccgcacgcagaagccaggagagagtggcatcaatattgtcactgccgattttgtagaacttggtgactttatcagcactgtcataaagctcaactatgtctttgatgaaggagaagccaacacttgatagcactacttggagtttccatgaataagatggagaaagctcattgtattagggcatactatctgtaaacactctgatcttcctattccactgagtctctgaagggaatagggctggtagtgggtgggaaaaggggaaaaactgtttcttcagtgattacaatcatactcttcattactataaatatttcatttcccatttgatgagcaaaatctacttctagtgttaggaataaaaaaaaaagaccagtaactttgtttttcaaaattagtctttgtaacatagaattcatgagtgtttacttgattaggttctctatttccagcctatgactcctacgctgtctataccctgcaacctttctgctccctctcttgctcgctctttttaatcagatgctgtatgggaatcaaaacaattgaatgcccaacattttgtgtattacattgttgtcttaaaacttactagttttgtgggacttgttataatgctctatagtcatccacagttgggcaatcatagctaatttttggtcatagaaaatctgcatcaaatcagtttccatgcatcagtaatattgaaggtcataatcagtgatttttgttatatgaaaataatagtgtttcacagtatttctatttaaggcagctataaatataggagaaaaatgtttttggagagctgtgaatgccaatttcagagggaaaaatggttgaggggtgaaagagatgtatggcattttaatttggcaatctcttaaataatattgccctgcaagtacccagtaaatggtaaggtacaagtgtgttaaaattgaaaactctgaaaataactctttaaaaagccctcttaatgatgctcttgatgaaagaaaaagacagaaggaaggaaggaaggaaggaaggaaggaaggaaggaaggaaggaaggaaaggaagaaaggaagggagggaggaagggagggaagaagggagggaaggacagaaggaaggacgggaggaaggaaggaagggaggaaggaaggaaggaagagagggagggagggaggaagagagggagggagggaggaagagaggaaggaagaagaaaaagactgcaagctttcctgccaatttgggattttcaaatatttaattctaaattccagattttaaggaagatttttcaagaaactgcaagtttttgacttgaaggaaagaaagaggaaggctggtagaagcagttagagcaatgtgtttgaaattatgtccatgaaatcacagggatctctgaaatatctttaggaaacttgaaatttatgaggtctgaatggacttgtttaaaattggctctgactcctcacttctgagtttcatcctatccgagggatgagattaaggcagaggcaaaagtttcacacaaagtttctgcaacctaacgtttaatagtccgggtctacagggaagaacaatgacacagcttgagcgttacttcctccttcgtgtcattgtgatatttgacaactctaaaaaataaaaaaaaaaaacttagagcacaataatccttgcctatgtacttcacaggaatattgtgaggtgtttataaaattataaaatttgatgaaattcttacaattattaattattttattttcatgtttagaaataatcacaccccaatagtttcctaggataatacagtccatgcaaagtagggtcatagagaaataaaagcatgccctcagcttttaatgaacttaaatgtagcacatatggcttaatctcttagacttagataagggagttcaattcaaaaccatatatgtcaagaccacaaataatcaagagttgatttcaagattataaatactcatgatcagaaaatagtacttattagcaattaaagggaggaaaagaaattgtttatactgaagagaatgtttatgaggagtgtgtatgtacctgtggtataccaaatagcatacatgtacacacaaaaatgtgtgtatacatttgggttgtgtgtatacatcttgccatatacaatatacaaacatatgcccattcctgtgatagcatacaaattcaaacatacagaaacacacacagatatggacacagtacaattcttcttttcaaatgaagacattgataatattaaataatttaattttaagactgaaacccttaatattgtgtgaaaaagagtaataaaacctttgaaagtagagtagatgatcacatcaaagtatttttgtaaaagaattctagtgtaggacttaattatttttaaaatatatttcttctcttctttccattttcccttcccttgtagttttattatctttctgtcttttacacctgctctttatgtgaaaatgtatatgaatccttttaaaatgattaggattattgaaatgtatgtcccgtaaatttggtttttgggcagactttctctctaactggctattcattcatccttcaggaggatcttagccaagaatatttgcaatgacacatgaatttaattttataaatataatggaaaacagatttttcatcatatcatgaataaaatatagaggtaactatgttgtattttcttgaacctagatactttctcatagtgtttgcttagaattaactttgtcctatttgtcaactgggttctggaaaaaaacaaacatgatgaagcttttgaataattgtgcagttttttaactagggaaagctttgtactgctgctaatgatatgcacccagaaaccttgttagacaaaaggcagtttcaagccaatgctatggtttccatgtggacatacagtgcctatgtagcaggcacttagagtaaatggacttgccttaatttataaaggagggaagaggtagaagggaaccatgggtcctccagctagagggggagtttactaaaagggagtccttggaaaggggaatggagagaaggtgcctttgactgtcttctatccattagttctgccctggagcacactggggaagcaggctgcgggccttccaaaagtaaaaaatggtgatatgcaatcgaagcttatccttagcctatgcacatttgtctcagctgggcattgtcttttcagagagcttgtagcacaagggctacacatgggcgccaagatggtggtagatacaccttggtgcactttttgttttacttgtttcttaagactatttcacaagtcctgtgaggcaaaaaaacaaaacaaaacaaaacaaccaaacaaatacaatctaacttttacccaatctacagcaggaaatcaaaggagtgggtggaatgagagaaaatatgcaaagagatcatttttaagtttgatttcctgtctgtaattttcaaggactaatatagcaaatttttcttctgccattatcatttatgtctccctatttaccacacaataatgtaaatgcagagaatgaggaggcatcttttaaaagccttaggatattctatatgatgacctcaatattgactttcagccatactgggaaaacttacttttcatggagtgccacctaacagtgaatgtattagagtataaaatgtttgccatgtatacacctgtatgtgcacatacacacattacacacacacacagaatgcacatttcacacacatatacttattattcaagttgaaactgcactctaatcaatctgagtctattgctgtttcaactcttaaaatcaatatctcctacattagtagatataaacataattcaaatatttaaatatttaagaggagaaaagtaactagaaaaccaatgaaaagtgaggccatcagaaatagaaaatgcctggcacgaacagtctatctaaattctcaatttcacttcaaattagagaatccataatggactagaatataaattacaaacacatacacacatcttcacttaaagttgttttaagttctttgaagttctgacatgtttttagccagggttatttgttcaggttcttccttgttaggattccagactggaaagttggaagtctcaggaaatgcatgtttccatgagttttttagtttcacagttttacagatccaacgacacaatcttttaatctttggtcactcaaccaaacaggagttccgtaggcagagtgctcactttgaattgctaatagaaaataatgcacagtgtcctcaggatatgctaaacaaggtttttaagagcattttattttacagcactttagtcttttcagctagatttcagtgacactatggtgtaaatgctatatctgccataacttattggtggctcctgtgttacatacagttttaaataatgctctaaattgtttgttttcccaatgataatgataaagtgttctgtagaatttgtaaaacatgtcaattgaatctgttgaaaattgtgtaattgttatttcaattgtgatactattttgtaggtaatagttttaaacgtatatttgtatgagtcaaaagtatgtgcttgtatgtggtatgtgtgtgtaagtatataatatcttatcaaaaatcaaacttatcctaaagaaaaagggcacattgtgaccagccttaatttattaacacttttttgttgtttttgcaatttggatttaaaattgaaacagaaattaagtttttgttaaaaatggtgtcttttaattttgtgaggaatgggctttagaacctatctgagttcccacaagcaaactgtccaccttgtgaggtaccccattgcttttcgtaataatcaaacatcaattcatatattaacttcattttcatacagactaatttgttttcatcaacaatagaaccagtacacctttaaagttgaccttcccaacatggcacccatttttctttaatgataaattttccatgaaaaattgtttctccaaaccattactttttaaaattcaatcttcccaagtaagatgaactgccttggtgttaggagagcttttaaaggcccatccatactaggtggttccaacatggttctcttctcgagaaaacaagcatgcaacccacacacttttctggtctgccccacgtgtagaattagtctagcaatagaaaactcatgactgacaaggatctacacatgtggtcatgcttgaagcaaaaattctgtgaccttctttgggcttggatctgattacagaatattaattaactttcttatttcctttctttctccatccttagttattccttttcaatatttagagttgccaggtaaaatacaggatatccagtgaaatttaaatttcagataaacagtatttctttagcatatttctcatatatttaatcagacatactttcactttaaaaaaagtttatctgaaattcaaatgtaactgggtatgtcctatatattttttcctaaatctcacaattctatccacactgcctttctatctttttcagctgggctatctataaggggcgagatctacctccctccatacccttgtgttcagacaccttatgaatatctgcagtcataatgtccttcaagaaagaaaacattggtcagctctaggtcctgcaaatgctttttgaaggacgaactcaaatacagatgggataatcaagtaaatatcttcataggatcaatgccaccatgttcaacacttccctttgccagcctgttgtgaggtccaagtttccccattaatcccttatatagcatttcccagtaactgggacaaccaaaaacacaccgacatattagaaatgctcctgaaaagtggcaacaccgcctaactcagtaccaggacctcttttaaattcaatttcttttttctttcagagagataacaaacgaattcattatttcccccattcacatcttaccacaaattatttttatcaggttaaaactggtcatctacggaattgtagaaaggtgacataggaactgtcttcactgctggaagaataaaagagtctgaggtatagacactgccctggtgacaccttctcagaacattgttgggggacaggggaggcaggcgcaagtaggggatagaatctgaccctgacatgcagctatcacctggcagagagactcgtcaaagcaaattataacgaccagtactatttttttttggaattgaaaacccaagaagccctaaaataagaacagtgagatcaaaggctggtttctaaaacaatgcagaaaatagaaccatgttggaattcctaaattctagctttcaaatactactgtttccaacagtgaatccttgacagagactgaatgcagatggaattttgaaacattttcagtagctacctcctctcctgaaattcctataagtggcagaggaaaatccaaatcctttaatataacatgtccatctcatgactcctgcttacacacatttgtgttgatttgcttcatttctggaggatgggaatttgcagagctggtgacatttccttcattagacaccagaaattcaccagagagagacagatctgtgccttctctttttaggatctggttattgatactttaataaatgtggtgtaaagaaaatccatggctacagtctgtatagaaaatgtgaattttttaaataagattgtgttcttaatgtaaaaaataaaagtttatttgtattcagtgaaatgcctaataaagtcctggtaccaat

SEQ ID NO: 15876 - DNA, 7538 bp, Homo sapiens
  source 1..7538: mol_type = unassigned DNA
gtaaactctagcggggctagagcaaacattggattagcggcagcagcctgccagcctgcccgaggagtgctgggaccagcgcgctgcacgccgactggcacgatggcctcgtctcaggggaaaaacgagctgaaattagccgactggatggcaactctgccggagagcatgcacagcatccccctcaccaatttagccattccagggtctcatgattccttcagcttctacattgatgaagcctctccagtaggtcctgagcagccagaaactgtccagaattttgtctctgtgtttggaactgtggccaaaaagctcatgcggaaatggttagccactcagacaatgaattttactggccagctaggagctggaattcgttattttgatcttcgaatttccaccaagcccagagaccccgacaatgaactctattttgctcatggtttgttcagtgccaaagtcaatgaaggccttgaggagatcaatgcattcctcacagatcaccataaggaggtagtgttcttggacttcaaccacttttatgggatgcagaaatatcaccatgaaaaactggtccaaatgctgaaagacatctatggaaataaaatgtgcccagcgatttttgcccaggaagttagtttaaagtacctgtgggagaaggactatcaagtgctggtcttctaccatagtccagtggctctggaagtgccctttctctggcctgggcagatgatgccagcaccctgggccaacaccacagaccccgagaaactgatccagtttcttcaagcatccatcactgagagaagaaagaagggatcgttttttatatctcaggtggtgctgacccccaaagctagcactgtggtcaaaggggtggcaagtggcctcagagaaacaatcacagaaagagctcttcctgccatgatgcagtgggtccgcacgcagaagccaggagagagtggcatcaatattgtcactgccgattttgtagaacttggtgactttatcagcactgtcataaagctcaactatgtctttgatgaaggagaagccaacacttgatagcactacttggagtttccatgaataagatggagaaagctcattgtattagggcatactatctgtaaacactctgatcttcctattccactgagtctctgaagggaatagggctggtagtgggtgggaaaaggggaaaaactgtttcttcagtgattacaatcatactcttcattactataaatatttcatttcccatttgatgagcaaaatctacttctagtgttaggaataaaaaaaaaagaccagtaactttgtttttcaaaattagtctttgtaacatagaattcatgagtgtttacttgattaggttctctatttccagcctatgactcctacgctgtctataccctgcaacctttctgctccctctcttgctcgctctttttaatcagatgctgtatgggaatcaaaacaattgaatgcccaacattttgtgtattacattgttgtcttaaaacttactagttttgtgggacttgttataatgctctatagtcatccacagttgggcaatcatagctaatttttggtcatagaaaatctgcatcaaatcagtttccatgcatcagtaatattgaaggtcataatcagtgatttttgttatatgaaaataatagtgtttcacagtatttctatttaaggcagctataaatataggagaaaaatgtttttggagagctgtgaatgccaatttcagagggaaaaatggttgaggggtgaaagagatgtatggcattttaatttggcaatctcttaaataatattgccctgcaagtacccagtaaatggtaaggtacaagtgtgttaaaattgaaaactctgaaaataactctttaaaaagccctcttaatgatgctcttgatgaaagaaaaagacagaaggaaggaagaagaaaaagactgcaagctttcctgccaatttgggattttcaaatatttaattctaaattccagattttaaggaagatttttcaagaaactgcaagtttttgacttgaaggaaagaaagaggaaggctggtagaagcagttagagcaatgtgtttgaaattatgtccatgaaatcacagggatctctgaaatatctttaggaaacttgaaatttatgaggtctgaatggacttgtttaaaattggctctgactcctcacttctgagtttcatcctatccgagggatgagattaaggcagaggcaaaagtttcacacaaagtttctgcaacctaacgtttaatagtccgggtctacagggaagaacaatgacacagcttgagcgttacttcctccttcgtgtcattgtgatatttgacaactctaaaaaataaaaaaaaaaaacttagagcacaataatccttgcctatgtacttcacaggaatattgtgaggtgtttataaaattataaaatttgatgaaattcttacaattattaattattttattttcatgtttagaaataatcacaccccaatagtttcctaggataatacagtccatgcaaagtagggtcatagagaaataaaagcatgccctcagcttttaatgaacttaaatgtagcacatatggcttaatctcttagacttagataagggagttcaattcaaaaccatatatgtcaagaccacaaataatcaagagttgatttcaagattataaatactcatgatcagaaaatagtacttattagcaattaaagggaggaaaagaaattgtttatactgaagagaatgtttatgaggagtgtgtatgtacctgtggtataccaaatagcatacatgtacacacaaaaatgtgtgtatacatttgggttgtgtgtatacatcttgccatatacaatatacaaacatatgcccattcctgtgatagcatacaaattcaaacatacagaaacacacacagatatggacacagtacaattcttcttttcaaatgaagacattgataatattaaataatttaattttaagactgaaacccttaatattgtgtgaaaaagagtaataaaacctttgaaagtagagtagatgatcacatcaaagtatttttgtaaaagaattctagtgtaggacttaattatttttaaaatatatttcttctcttctttccattttcccttcccttgtagttttattatctttctgtcttttacacctgctctttatgtgaaaatgtatatgaatccttttaaaatgattaggattattgaaatgtatgtcccgtaaatttggtttttgggcagactttctctctaactggctattcattcatccttcaggaggatcttagccaagaatatttgcaatgacacatgaatttaattttataaatataatggaaaacagatttttcatcatatcatgaataaaatatagaggtaactatgttgtattttcttgaacctagatactttctcatagtgtttgcttagaattaactttgtcctatttgtcaactgggttctggaaaaaaacaaacatgatgaagcttttgaataattgtgcagttttttaactagggaaagctttgtactgctgctaatgatatgcacccagaaaccttgttagacaaaaggcagtttcaagccaatgctatggtttccatgtggacatacagtgcctatgtagcaggcacttagagtaaatggacttgccttaatttataaaggagggaagaggtagaagggaaccatgggtcctccagctagagggggagtttactaaaagggagtccttggaaaggggaatggagagaaggtgcctttgactgtcttctatccattagttctgccctggagcacactggggaagcaggctgcgggccttccaaaagtaaaaaatggtgatatgcaatcgaagcttatccttagcctatgcacatttgtctcagctgggcattgtcttttcagagagcttgtagcacaagggctacacatgggcgccaagatggtggtagatacaccttggtgcactttttgttttacttgtttcttaagactatttcacaagtcctgtgaggcaaaaaaacaaaacaaaacaaaacaaccaaacaaatacaatctaacttttacccaatctacagcaggaaatcaaaggagtgggtggaatgagagaaaatatgcaaagagatcatttttaagtttgatttcctgtctgtaattttcaaggactaatatagcaaatttttcttctgccattatcatttatgtctccctatttaccacacaataatgtaaatgcagagaatgaggaggcatcttttaaaagccttaggatattctatatgatgacctcaatattgactttcagccatactgggaaaacttacttttcatggagtgccacctaacagtgaatgtattagagtataaaatgtttgccatgtatacacctgtatgtgcacatacacacattacacacacacacagaatgcacatttcacacacatatacttattattcaagttgaaactgcactctaatcaatctgagtctattgctgtttcaactcttaaaatcaatatctcctacattagtagatataaacataattcaaatatttaaatatttaagaggagaaaagtaactagaaaaccaatgaaaagtgaggccatcagaaatagaaaatgcctggcacgaacagtctatctaaattctcaatttcacttcaaattagagaatccataatggactagaatataaattacaaacacatacacacatcttcacttaaagttgttttaagttctttgaagttctgacatgtttttagccagggttatttgttcaggttcttccttgttaggattccagactggaaagttggaagtctcaggaaatgcatgtttccatgagttttttagtttcacagttttacagatccaacgacacaatcttttaatctttggtcactcaaccaaacaggagttccgtaggcagagtgctcactttgaattgctaatagaaaataatgcacagtgtcctcaggatatgctaaacaaggtttttaagagcattttattttacagcactttagtcttttcagctagatttcagtgacactatggtgtaaatgctatatctgccataacttattggtggctcctgtgttacatacagttttaaataatgctctaaattgtttgttttcccaatgataatgataaagtgttctgtagaatttgtaaaacatgtcaattgaatctgttgaaaattgtgtaattgttatttcaattgtgatactattttgtaggtaatagttttaaacgtatatttgtatgagtcaaaagtatgtgcttgtatgtggtatgtgtgtgtaagtatataatatcttatcaaaaatcaaacttatcctaaagaaaaagggcacattgtgaccagccttaatttattaacacttttttgttgtttttgcaatttggatttaaaattgaaacagaaattaagtttttgttaaaaatggtgtcttttaattttgtgaggaatgggctttagaacctatctgagttcccacaagcaaactgtccaccttgtgaggtaccccattgcttttcgtaataatcaaacatcaattcatatattaacttcattttcatacagactaatttgttttcatcaacaatagaaccagtacacctttaaagttgaccttcccaacatggcacccatttttctttaatgataaattttccatgaaaaattgtttctccaaaccattactttttaaaattcaatcttcccaagtaagatgaactgccttggtgttaggagagcttttaaaggcccatccatactaggtggttccaacatggttctcttctcgagaaaacaagcatgcaacccacacacttttctggtctgccccacgtgtagaattagtctagcaatagaaaactcatgactgacaaggatctacacatgtggtcatgcttgaagcaaaaattctgtgaccttctttgggcttggatctgattacagaatattaattaactttcttatttcctttctttctccatccttagttattccttttcaatatttagagttgccaggtaaaatacaggatatccagtgaaatttaaatttcagataaacagtatttctttagcatatttctcatatatttaatcagacatactttcactttaaaaaaagtttatctgaaattcaaatgtaactgggtatgtcctatatattttttcctaaatctcacaattctatccacactgcctttctatctttttcagctgggctatctataaggggcgagatctacctccctccatacccttgtgttcagacaccttatgaatatctgcagtcataatgtccttcaagaaagaaaacattggtcagctctaggtcctgcaaatgctttttgaaggacgaactcaaatacagatgggataatcaagtaaatatcttcataggatcaatgccaccatgttcaacacttccctttgccagcctgttgtgaggtccaagtttccccattaatcccttatatagcatttcccagtaactgggacaaccaaaaacacaccgacatattagaaatgctcctgaaaagtggcaacaccgcctaactcagtaccaggacctcttttaaattcaatttcttttttctttcagagagataacaaacgaattcattatttcccccattcacatcttaccacaaattatttttatcaggttaaaactggtcatctacggaattgtagaaaggtgacataggaactgtcttcactgctggaagaataaaagagtctgaggtatagacactgccctggtgacaccttctcagaacattgttgggggacaggggaggcaggcgcaagtaggggatagaatctgaccctgacatgcagctatcacctggcagagagactcgtcaaagcaaattataacgaccagtactatttttttttggaattgaaaacccaagaagccctaaaataagaacagtgagatcaaaggctggtttctaaaacaatgcagaaaatagaaccatgttggaattcctaaattctagctttcaaatactactgtttccaacagtgaatccttgacagagactgaatgcagatggaattttgaaacattttcagtagctacctcctctcctgaaattcctataagtggcagaggaaaatccaaatcctttaatataacatgtccatctcatgactcctgcttacacacatttgtgttgatttgcttcatttctggaggatgggaatttgcagagctggtgacatttccttcattagacaccagaaattcaccagagagagacagatctgtgccttctctttttaggatctggttattgatactttaataaatgtggtgtaaagaaaatccatggctacagtctgtatagaaaatgtgaattttttaaataagattgtgttcttaatgtaaaaaataaaagtttatttgtattcagtgaaatgcctaataaagtcctggtacc

SEQ ID NO: 15877 - DNA, 694 bp, Homo sapiens
  source 1..694: mol_type = unassigned DNA
tgtgattaggcccacctgatcaaatgtaaaaacatgcatgggatatttgattacgtaacaaccagctaaaactgagagcacacagccttcggaaacccccaaggtgtcgaggaggatcagatccagataagagaagatgattccttctagtcctgtaaaatttcctgtcatccttagctgctgggttgattgaaatttgatctctacatttcaaaatcaaactagtgaatacagtttgtctttcaagagaatcagaggcatcgtaactcctaccaagttaatgaggaaactgaggctcagatcagatgagaactcacttaaatccactcaatgtgtagatggtagagctgggactagcaacattgctgcagcccattgttggcctctctcttcactttatcattgcccaagaatgaggatatgcagtaaacagaattcagtagcagtttacatagtacagcattctgcaaaaattgcatgaaatgtggacacaagatgtactgtatgacttaattacctgtcattctctgacaccattactacctactagaagttcaaataatttatctttaacattgcaatatctgataaactttttaaaatgtaaataattcaaagccttgaaaatctatcatgaatctgctcaacatttcaaagtgactattttgaaatgcctataaatgctatatacctg

SEQ ID NO: 15878 - DNA, 5855 bp, Homo sapiens
  source 1..5855: mol_type = unassigned DNA
ccgccaacgcgcaggtgctagcggccccttcgccctgcagcccctttgcttttactctgtccaaagttaacatgtcactgaaaaacgagccacgggtaaatacctctgcactgcagaaaattgctgctgacatgagtaatatcatagaaaatctggacacgcgggaactccactttgagggagaggaggtagactacgacgtgtctcccagcgatcccaagatacaagaagtgtatatccctttctctgctatttataacactcaaggatttaaggagcctaatatacagacgtatctctccggctgtccaataaaagcacaagttctggaagtggaacgcttcacatctacaacaagggtaccaagtattaatctttacactattgaattaacacatggggaatttaaatggcaagttaagaggaaattcaagcattttcaagaatttcacagagagctgctcaagtacaaagcctttatccgcatccccattcccactagaagacacacgtttaggaggcaaaacgtcagagaggagcctcgagagatgcccagtttgccccgttcatctgaaaacatgataagagaagaacaattccttggtagaagaaaacaactggaagattacttgacaaagatactaaaaatgcccatgtatagaaactatcatgccacaacagagtttcttgatataagccagctgtctttcatccatgatttgggaccaaagggcatagaaggtatgataatgaaaagatctggaggacacagaataccaggcttgaattgctgtggtcagggaagagcctgctacagatggtcaaaaagatggttaatagtgaaagattcctttttattgtatatgaaaccagacagcggtgccattgccttcgtcctgctggtagacaaagaattcaaaattaaggtggggaagaaggagacagaaacgaaatatggaatccgaattgataatctttcaaggacacttattttaaaatgcaacagctatagacatgctcggtggtggggaggggctatagaagaattcatccagaaacatggcaccaactttctcaaagatcatcgatttgggtcatatgctgctatccaagagaatgctttagctaaatggtatgttaatgccaaaggatattttgaagatgtggcaaatgcaatggaagaggcaaatgaagagatttttatcacagactggtggctgagtccagaaatcttcctgaaacgcccagtggttgagggaaatcgttggaggttggactgcattcttaaacgaaaagcacaacaaggagtgaggatcttcataatgctctacaaagaggtggaactcgctcttggcatcaatagtgaatacaccaagaggactttgatgcgtctacatcccaacataaaggtgatgagacacccggatcatgtgtcatccaccgtctatttgtgggctcaccatgagaagcttgtcatcattgaccaatcggtggcctttgtgggagggattgacctggcctatggaaggtgggacgacaatgagcacagactcacagacgtgggcagtgtgaagcgggtcacttcaggaccgtctctgggttccctcccacctgccgcaatggagtctatggaatccttaagactcaaagataaaaatgagcctgttcaaaacctacccatccagaagagtattgatgatgtggattcaaaactgaaaggaataggaaagccaagaaagttctccaaatttagtctctacaagcagctccacaggcaccacctgcacgacgcagatagcatcagcagcattgacagcacctccaataccgggtccatccgtagtttacagacaggtgtgggagagctgcatggggaaaccagattctggcatggaaaggactactgcaatttcgtcttcaaagactgggttcaacttgataaaccttttgctgatttcattgacaggtactccacgccccggatgccctggcatgacattgcctctgcagtccacgggaaggcggctcgtgatgtggcacgtcacttcatccagcgctggaacttcacaaaaattatgaaatcaaaatatcggtccctttcttatccttttctgcttccaaagtctcaaacaacagcccatgagttgagatatcaagtgcctgggtctgtccatgctaacgtacagttgctccgctctgctgctgattggtctgctggtataaagtaccatgaagagtccatccacgccgcttacgtccatgtgatagagaacagcaggcactatatctatatcgaaaaccagtttttcataagctgtgctgatgacaaagttgtgttcaacaagataggcgatgccattgcccagaggatcctgaaagctcacagggaaaaccagaaataccgggtatatgtcgtgataccacttctgccagggttcgaaggagacatttcaaccggcggaggaaatgctctacaggcaatcatgcacttcaactacagaaccatgtgcagaggagaaaattccatccttggacagttaaaagcagagcttggtaatcagtggataaattacatatcattctgtggtcttagaacacatgcagagctcgaaggaaacctagtaactgagcttatctatgtccacagcaagttgttaattgctgatgataacactgttattattggctctgccaacataaatgaccgcagcatgctgggaaagcgtgacagtgaaatggctgtcattgtgcaagatacagagactgttccttcagtaatggatggaaaagagtaccaagctggccggtttgcccgaggacttcggctacagtgctttagggttgtccttggctatcttgatgacccaagtgaggacattcaggatccagtgagtgacaaattcttcaaggaggtgtgggtttcaacagcagctcgaaatgctacaatttatgacaaggttttccggtgccttcccaatgatgaagtacacaatttaattcagctgagagactttataaacaagcccgtattagctaaggaagatcccattcgagctgaggaggaactgaagaagatccgtggatttttggtgcaattccccttttatttcttgtctgaagaaagcctactgccttctgttgggaccaaagaggccatagtgcccatggaggtttggacttaagagatattcattggcagctcaaagacttccaccctggagaccacactgcacacagtgacttcctggggatgtcatagccaaagccaggcctgacgcattctcgtatccaacccaaggaccttttggaatgactggggagggctgcagtcacattgatgtaaggactgtaaacatcagcaagactttataattccttctgcctaacttgtaaaaagggggctgcattcttgttggtagcatgtactctgttgagtaaaacacatattcaaattccgtataccaaaatccatttcctttgtaacaagaatttaccagtaactgtgatctaggttgccaaaagttgtctgaatctccttattcttctctgatcttcatttatgcagccaatgtctagctggacctgccctcatcttgcagttcatacaggcactgtttgagagattgtttattattagatgttgtaatgctgcttcaagattcttcatggttacatgggatgcccctgctcatctggtcctgaagtagtaacattcacccaaatgaggatatagtcattattccttttcagtcactgtacgaacacggcagactttagcctacacagtagactgtgttaggcacttctggtaacattgacactgtatcttgacaccactaagcaacaggaaggaataaattccaatattgagacagagatttatttcattttgctcccaaaggcactgacaacatgagtccttgtgattaggcccacctgatcaaatgtaaaaacatgcatgggatatttgattacgtaacaaccagctaaaactgagagcacacagccttcggaaacccccaaggtgtcgaggaggatcagatccagataagagaagatgattccttctagtcctgtaaaatttcctgtcatccttagctgctgggttgattgaaatttgatctctacatttcaaaatcaaactagtgaatacagtttgtctttcaagagaatcagaggcatcgtaactcctaccaagttagtaagtatgagtctaaccttgtttgacattcaggtcttctgctacattatcttctttgagaaaaattaattgattataaaatatgtgctacttcacttacattattaaatatgtattaacgcctctcaccagggcttccagtgaagttacaatgccctagtctgtgaattagtctggaaacgtgtttttccttttcggatgttagagtaccctttgataaactaaattttactaagctgaacaactctgacagtctaaagagctaatgtgggttaccaaaaggcctgtacctgtaaaacaaaatgcaggtgtaatgattatacatgtctatggattacctggacatactctcatttgggttgttcttcaaagaagcaagcagccgatccctgttttcataaagctaatacttcagttggaaaaattaaacaggagcacaaagtcagggataggggttagcagaagagagaaatagtgtcacatcaagggcaggatctcatagctagggaacatttcacaaataaggtgagattttgtaaccaataataaaaatgaatgtttttataagtaaataacttatttttcatatggctaaagatggtaaaatgacttcattctatagccattgtaaataagaatttgctattgatgaaagaagttcagattggcatttgaagtattgagtgtatgggatctctaaggatttcttagattttatatttaaatattttttaaaccttagaggagtcaacaaactggctcttgattttcagcaccctactctcatgaaaaaagcctgaaaggaccctttcccttataagtaatttaatccaatttctccccattttatagatgaggaaactgaggctcagatcagatgagaactcacttaaatccactcaatgtgtagatggtagagctgggactagcaacattgctgcagcccattgttggcctctctcttcactttatcattgcccaagaatgaggatatgcagtaaacagaattcaggcaagatacctctaagctgttttgaaccctctgatattttgtatttatgtgtttgtctgtctccccctactagaatgtaagctccatggggcagggacttcactgtattttgttcatagtgtatccccagagcctggaccagtgcttggcacataggagatggcaataaatgcttgtagaattaataaacaaggtgaaggagagagctaatgaaatgaaaatcttagtctcatataagaagtcttactactgctttctatggcaagttccttttctattgcatcttcccaaagacaagatgctcatctgcaaaggggtgataagatttacttggagggattttatggaaaattcagtgcaataattgcttttttttttttttttgcagtagcagtttacatagtacagcattctgcaaaaattgcatgaaatgtggacacaagatgtactgtatgacttaattacctgtcattctctgacaccattactacctactagaagttcaaataatttatctttaacattgcaatatctgataaactttttaaaatgtaaataattcaaagccttgaaaatctatcatgaatctgctcaacatttcaaagtgactattttgaaatgcctataaatgctatatacctg

SEQ ID NO: 15879 - DNA, 5604 bp, Homo sapiens
  source 1..5604: mol_type = unassigned DNA
ccctccctcccgctgagctccagctgtgccagaggcacccgagccctgagagtccgccgccaacgcgcaggtgctagcggccccttcgccctgcagcccctttgcttttactctgtccaaagttaacatgtcactgaaaaacgagccacgggtaaatacctctgcactgcagaaaattgctgctgacatgagtaatatcatagaaaatctggacacgcgggaactccactttgagggagaggaggtagactacgacgtgtctcccagcgatcccaagatacaagaagtgtatatccctttctctgctatttataacactcaaggatttaaggagcctaatatacagacgtatctctccggctgtccaataaaagcacaagttctggaagtggaacgcttcacatctacaacaagggtaccaagtattaatctttacactattgaattaacacatggggaatttaaatggcaagttaagaggaaattcaagcattttcaagaatttcacagagagctgctcaagtacaaagcctttatccgcatccccattcccactagaagacacacgtttaggaggcaaaacgtcagagaggagcctcgagagatgcccagtttgccccgttcatctgaaaacatgataagagaagaacaattccttggtagaagaaaacaactggaagattacttgacaaagatactaaaaatgcccatgtatagaaactatcatgccacaacagagtttcttgatataagccagctgtctttcatccatgatttgggaccaaagggcatagaaggtatgataatgaaaagatctggaggacacagaataccaggcttgaattgctgtggtcagggaagagcctgctacagatggtcaaaaagatggttaatagtgaaagattcctttttattgtatatgaaaccagacagcggtgccattgccttcgtcctgctggtagacaaagaattcaaaattaaggtggggaagaaggagacagaaacgaaatatggaatccgaattgataatctttcaaggacacttattttaaaatgcaacagctatagacatgctcggtggtggggaggggctatagaagaattcatccagaaacatggcaccaactttctcaaagatcatcgatttgggtcatatgctgctatccaagagaatgctttagctaaatggtatgttaatgccaaaggatattttgaagatgtggcaaatgcaatggaagaggcaaatgaagagatttttatcacagactggtggctgagtccagaaatcttcctgaaacgcccagtggttgagggaaatcgttggaggttggactgcattcttaaacgaaaagcacaacaaggagtgaggatcttcataatgctctacaaagaggtggaactcgctcttggcatcaatagtgaatacaccaagaggactttgatgcgtctacatcccaacataaaggtgatgagacacccggatcatgtgtcatccaccgtctatttgtgggctcaccatgagaagcttgtcatcattgaccaatcggtggcctttgtgggagggattgacctggcctatggaaggtgggacgacaatgagcacagactcacagacgtgggcagtgtgaagcgggtcacttcaggaccgtctctgggttccctcccacctgccgcaatggagtctatggaatccttaagactcaaagataaaaatgagcctgttcaaaacctacccatccagaagagtattgatgatgtggattcaaaactgaaaggaataggaaagccaagaaagttctccaaatttagtctctacaagcagctccacaggcaccacctgcacgacgcagatagcatcagcagcattgacagcacctccagttattttaatcactatagaagtcatcacaatttaatccatggtttaaaaccccacttcaaactctttcacccgtccagtgagtctgagcaaggactcactagacctcatgctgataccgggtccatccgtagtttacagacaggtgtgggagagctgcatggggaaaccagattctggcatggaaaggactactgcaatttcgtcttcaaagactgggttcaacttgataaaccttttgctgatttcattgacaggtactccacgccccggatgccctggcatgacattgcctctgcagtccacgggaaggcggctcgtgatgtggcacgtcacttcatccagcgctggaacttcacaaaaattatgaaatcaaaatatcggtccctttcttatccttttctgcttccaaagtctcaaacaacagcccatgagttgagatatcaagtgcctgggtctgtccatgctaacgtacagttgctccgctctgctgctgattggtctgctggtataaagtaccatgaagagtccatccacgccgcttacgtccatgtgatagagaacagcaggcactatatctatatcgaaaaccagtttttcataagctgtgctgatgacaaagttgtgttcaacaagataggcgatgccattgcccagaggatcctgaaagctcacagggaaaaccagaaataccgggtatatgtcgtgataccacttctgccagggttcgaaggagacatttcaaccggcggaggaaatgctctacaggcaatcatgcacttcaactacagaaccatgtgcagaggagaaaattccatccttggacagttaaaagcagagcttggtaatcagtggataaattacatatcattctgtggtcttagaacacatgcagagctcgaaggaaacctagtaactgagcttatctatgtccacagcaagttgttaattgctgatgataacactgttattattggctctgccaacataaatgaccgcagcatgctgggaaagcgtgacagtgaaatggctgtcattgtgcaagatacagagactgttccttcagtaatggatggaaaagagtaccaagctggccggtttgcccgaggacttcggctacagtgctttagggttgtccttggctatcttgatgacccaagtgaggacattcaggatccagtgagtgacaaattcttcaaggaggtgtgggtttcaacagcagctcgaaatgctacaatttatgacaaggttttccggtgccttcccaatgatgaagtacacaatttaattcagctgagagactttataaacaagcccgtattagctaaggaagatcccattcgagctgaggaggaactgaagaagatccgtggatttttggtgcaattccccttttatttcttgtctgaagaaagcctactgccttctgttgggaccaaagaggccatagtgcccatggaggtttggacttaagagatattcattggcagctcaaagacttccaccctggagaccacactgcacacagtgacttcctggggatgtcatagccaaagccaggcctgacgcattctcgtatccaacccaaggaccttttggaatgactggggagggctgcagtcacattgatgtaaggactgtaaacatcagcaagactttataattccttctgcctaacttgtaaaaagggggctgcattcttgttggtagcatgtactctgttgagtaaaacacatattcaaattccgtataccaaaatccatttcctttgtaacaagaatttaccagtaactgtgatctaggttgccaaaagttgtctgaatctccttattcttctctgatcttcatttatgcagccaatgtctagctggacctgccctcatcttgcagttcatacaggcactgtttgagagattgtttattattagatgttgtaatgctgcttcaagattcttcatggttacatgggatgcccctgctcatctggtcctgaagtagtaacattcacccaaatgaggatatagtcattattccttttcagtcactgtacgaacacggcagactttagcctacacagtagactgtgttaggcacttctggtaacattgacactgtatcttgacaccactaagcaacaggaaggaataaattccaatattgagacagagatttatttcattttgctcccaaaggcactgacaacatgagtccttgtgattaggcccacctgatcaaatgtaaaaacatgcatgggatatttgattacgtaacaaccagctaaaactgagagcacacagccttcggaaacccccaaggtgtcgaggaggatcagatccagataagagaagatgattccttctagtcctgtaaaatttcctgtcatccttagctgctgggttgattgaaatttgatctctacatttcaaaatcaaactagtgaatacagtttgtctttcaagagaatcagaggcatcgtaactcctaccaagttagtaagtatgagtctaaccttgtttgacattcaggtcttctgctacattatcttctttgagaaaaattaattgattataaaatatgtgctacttcacttacattattaaatatgtattaacgcctctcaccagggcttccagtgaagttacaatgccctagtctgtgaattagtctggaaacgtgtttttccttttcggatgttagagtaccctttgataaactaaattttactaagctgaacaactctgacagtctaaagagctaatgtgggttaccaaaaggcctgtacctgtaaaacaaaatgcaggtgtaatgattatacatgtctatggattacctggacatactctcatttgggttgttcttcaaagaagcaagcagccgatccctgttttcataaagctaatacttcagttggaaaaattaaacaggagcacaaagtcagggataggggttagcagaagagagaaatagtgtcacatcaagggcaggatctcatagctagggaacatttcacaaataaggtgagattttgtaaccaataataaaaatgaatgtttttataagtaaataacttatttttcatatggctaaagatggtaaaatgacttcattctatagccattgtaaataagaatttgctattgatgaaagaagttcagattggcatttgaagtattgagtgtatgggatctctaaggatttcttagattttatatttaaatattttttaaaccttagaggagtcaacaaactggctcttgattttcagcaccctactctcatgaaaaaagcctgaaaggaccctttcccttataagtaatttaatccaatttctccccattttatagatgaggaaactgaggctcagatcagatgagaactcacttaaatccactcaatgtgtagatggtagagctgggactagcaacattgctgcagcccattgttggcctctctcttcactttatcattgcccaagaatgaggatatgcagtaaacagaattcaggcaagatacctctaagctgttttgaaccctctgatattttgtatttatgtgtttgtctgtctccccctactagaatgtaagctccatggggcagggacttcactgtattttgttcatagtgtatccccagagcctggaccagtgcttggcacataggagatggcaataaatgcttgtagaattaataaacaaggtgaaggagagagctaatgaaatgaaaa

SEQ ID NO: 15880 - DNA, 839 bp, Homo sapiens
  source 1..839: mol_type = unassigned DNA
tccatgctaacgtacagttgctccgctctgctgctgattggtctgctggtataaagtaccatgaagagtccatccacgccgcttacgtccatgtgatagagaacagcaggcactatatctatatcgaaaaccagtttttcataagctgtgctgatgacaaagttgtgttcaacaagataggcgatgccattgcccagaggatcctgaaagctcacagggaaaaccagaaataccgggtatatgtcgtgataccacttctgccagggttcgaaggagacatttcaaccggcggaggaaatgctctacaggcaatcatgcacttcaactacagaaccatgtgcagaggagaaaattccatccttggacagttaaaagcagagcttggtaatcagtggataaattacatatcattctgtggtcttagaacacatgcagagctcgaaggaaacctagtaactgagcttatctatgtccacagcaagttgttaattgctgatgataacactgttattattggctctgccaacataaatgaccgcagcatgctgggaaagcgtgacagtgaaatggctgtcattgtgcaagatacagagactgttccttcagtaatggatggaaaagagtaccaagctggccggtttgcccgaggacttcggctacagtgctttaggtctaaaatgactccaggtgtcgaagatccctgatctttggcaagaagatgcaaattttaaactaatctgtggtgaagcagagagaatactgggctaggaagctgggctcgtttcagctgtgcgatcctaaataagtccattcaataaagtgttatttagaactttcaa

SEQ ID NO: 15881 - DNA, 701 bp, Homo sapiens
  source 1..701: mol_type = unassigned DNA
cctttgtgttctgccatgattgtgaggcctccccagccatgtggaactttgctccgctctgctgctgattggtctgctggtataaagtaccatgaagagtccatccacgccgcttacgtccatgtgatagagaacagcaggcactatatctatatcgaaaaccagtttttcataagctgtgctgatgacaaagttgtgttcaacaagataggcgatgccattgcccagaggatcctgaaagctcacagggaaaaccagaaataccgggtatatgtcgtgataccacttctgccagggttcgaaggagacatttcaaccggcggaggaaatgctctacaggcaatcatgcacttcaactacagaaccatgtgcagaggagaaaattccatccttggacagttaaaagcagagcttggtaatcagtggataaattacatatcattctgtggtcttagaacacatgcagagctcgaaggaaacctagtaactgagcttatctatgtccacagcaagttgttaattgctgatgataacactgttattattggctctgccaacataaatgaccgcagcatgctgggaaagcgtgacagtgaaatggctgtcattgtgcaagatacagagactgttccttcagtaatggatggaaaagagtaccaagctggccggtttgcccgaggacttcggctacagtgctttag

SEQ ID NO: 15882 - DNA, 576 bp, Homo sapiens
  source 1..576: mol_type = unassigned DNA
ttttaatagcctctctttctgaaatctaacacgaattttataacttttccatttacctacctcaaaacaactatcatgtccctattagtagcattacaaaagtgatattcatgtaactgtttttagcatttagatatatatgtagcatcttctcatagaagcacttgttctgtttttacttgtgttaggattaaacctacagatactgcatgggattggttgttttgaaacctctgtaattattttctcctttacatattttcagaaccatgtgcagaggagaaaattccatccttggacagttaaaagcagagcttggtaatcagtggataaattacatatcattctgtggtcttagaacacatgcagagctcgaaggaaacctagtaactgagcttatctatgtccacagcaagttgttaattgctgatgataacactgttattattggctctgccaacataaatgaccgcagcatgctgggaaagcgtgacagtgaaatggctgtcattgtgcaagatacagagactgttccttcagtaatggatggaaaagagtaccaagctggccggtttg

SEQ ID NO: 15883 - DNA, 1773 bp, Homo sapiens
  source 1..1773: mol_type = unassigned DNA
cttgttagcccacagcctgtaatagaatggacagatgccaccctagttgtgtcttaagaaattaagaagcttttaggtgtttaataaatgagagttgagcctccctttctgggactcacctgaaccacagtctctgagggggtcttgctgcattcacagataccgggtccatccgtagtttacagacaggtgtgggagagctgcatggggaaaccagattctggcatggaaaggactactgcaatttcgtcttcaaagactgggttcaacttgataaaccttttgctgatttcattgacaggtactccacgccccggatgccctggcatgacattgcctctgcagtccacgggaaggcggctcgtgatgtggcacgtcacttcatccagcgctggaacttcacaaaaattatgaaatcaaaatatcggtccctttcttatccttttctgcttccaaagtctcaaacaacagcccatgagttgagatatcaagtgcctgggtctgtccatgctaacgtacagttgctccgctctgctgctgattggtctgctggtataaagtaccatgaagagtccatccacgccgcttacgtccatgtgatagagaacagcaggcactatatctatatcgaaaaccagtttttcataagctgtgctgatgacaaagttgtgttcaacaagataggcgatgccattgcccagaggatcctgaaagctcacagtcttgctctgtcacccaagctgaagtgcagtggtgtgatcttggcttactgcaacctccatctcccgggttcaagcaattctcctgcctcagcctcccgagtatctgggattacaggcacccgccaccacactcagctaatttttttgtatttttggtggagacggggtttcaccatgtcggccaggctagctttgaactcctaacctcaagtgatccgcccacctcggcctcccaaagtgcccctcatgcttcttataactgtagaagagctactgcttgcctgtaagtgggtggtatgggaaataccacactgggaaatctgaaattattgggggaccagatgtctggagacctggattctctccagctctgttatccacaggtatgtgaccttctgagtacgtcagtttgtccttctgacacgctgtttcttcaccaaccacgaataatattatctgttctacgtagcttatatgaatatatgtgaaagtagtttgtaagctgtaaagcaccagttcatgtaagaacttattatagcatttccatgatattcatcatctggaaatatgttgttcactgtaaattgaagcaaggataaagaggcatcatattcaaatcagctgtttcaaaattagtatttatgctagaaaaagaaatgttttaatttaaaagatgcttaaatgttccgtattttaaattattggacggctacttctggataagaaaaatttgttttggtttctcacgactggctgttgttcatcatgtgacttgtttaggcacacgattacaacactctgtctagaggtttgctgccagaaacctatagctgactcttcctgggaatcaatttttgatttccctgttattgatctgataacactctccccaaaatataaagtaaaacaaaatgtattctgaagcataatatgtgtttagtttagtattgttttaattttagatgctatttactttgttgttatttgaagatatgcaagccttctaattgaaatcagcaattgatataattgaataaaaatgttaccaaat

SEQ ID NO: 15884 - DNA, 491 bp, Homo sapiens
  source 1..491: mol_type = unassigned DNA
taacaaaaaggaacaataaacttgtctttcaggtatgttaatgccaaaggatattttgaagatgtggcaaatgcaatggaagaggcaaatgaagagatttttatcacagactggtggctgagtccagaaatcttcctgaaacgcccagtggttgagggaaatcgttggaggttggactgcattcttaaacgaaaagcacaacaaggagtgaggatcttcataatgctctacaaagaggtggaactcgctcttggcatcaatagtgaatacaccaagaggactttgatgcgtctacatcccaacataaaggtgatgagacacccggatcatgtgtcatccaccgtctatttgtgggctcaccatgagaagcttgtcatcattgaccaatcggtggcctttgtgggagggattgacctggcctatggaaggtgggacgacaatgagcacagactcacagacgtgggcagtgtgaagcgggtcacttcaggacc

SEQ ID NO: 15885 - DNA, 996 bp, Homo sapiens
  source 1..996: mol_type = unassigned DNA
cgccaacgcgcaggtgctagcggccccttcgccctgcagcccctttgcttttactctgtccaaagttaacatgtcactgaaaaacgagccacgggtaaatacctctgcactgcagaaaattgctgctgacatgagtaatatcatagaaaatctggacacgcgggaactccactttgagggagaggaggtagactacgacgtgtctcccagcgatcccaagatacaagaagtgtatatccctttctctgctatttataacactcaaggatttaaggagcctaatatacagacgtatctctccggctgtccaataaaagcacaagttctggaagtggaacgcttcacatctacaacaagggtaccaagtattaatctttacactattgaattaacacatggggaatttaaatggcaagttaagaggaaattcaagcattttcaagaatttcacagagagctgctcaagtacaaagcctttatccgcatccccattcccactagaagacacacgtttaggaggcaaaacgtcagagaggagcctcgagagatgcccagtttgccccgttcatctgaaaacatgataagagaagaacaattccttggtagaagaaaacaactggaagattacttgacaaagatactaaaaatgcccatgtatagaaactatcatgccacaacagagtttcttgatataagccagctgtctttcatccatgatttgggaccaaagggcatagaaggtatgataatgaaaagatctggaggacacagaataccaggcttgaattgctgtggtcagggaagagcctgctacagatggtcaaaaagatggttaatagtgaaagattcctttttattgtatatgaaaccagacagcggtgccattgccttcgtcctgctggtagacaaagaattcaaaattaaggtggggaagaaggagacagaaacgaaatatggaatccgaattgataatctttcaaggtacacatttcaaat

SEQ ID NO: 15886 - DNA, 831 bp, Homo sapiens
  source 1..831: mol_type = unassigned DNA
agactacgacgtgtctcccagcgatcccaagatacaagaagtgtatatccctttctctgctatttataacactcaaggatttaaggagcctaatatacagacgtatctctccggctgtccaataaaagcacaagttctggaagtggaacgcttcacatctacaacaagggtaccaagtattaatctttacactattgaattaacacatggggaatttaaatggcaagttaagaggaaattcaagcattttcaagaatttcacagagagctgctcaagtacaaagcctttatccgcatccccattcccactagaagacacacgtttaggaggcaaaacgtcagagaggagcctcgagagatgcccagtttgccccgttcatctgaaaacatgataagagaagaacaattccttggtagaagaaaacaactggaagattacttgacaaagatactaaaaatgcccatgtatagaaactatcatgccacaacagagtttcttgatataagccagctgtctttcatccatgatttgggaccaaagggcatagaaggtatgataatgaaaagatctggaggacacagaataccaggcttgaattgctgtggtcagggaagagcctgctacagatggtcaaaaaggctgtcagaacccacctgtctgtgtgcacagcagtctgggaagtgtcaacagctcccaggagcagccatcagccaagaactgatcggagtccagccccatcctcctcagttggggtgactctgcagcagtctctacactgtctcccagaactccttagctggcttacagcacagctgcccacaataaaaagc

SEQ ID NO: 15887 - DNA, 646 bp, Homo sapiens
  source 1..646: mol_type = unassigned DNA
aggcacccgagccctgagagtccgccgccaacgcgcaggtgctagcggccccttcgccctgcagcccctttgcttttactctgtccaaagttaacatgtcactgaaaaacgagccacgggtaaatacctctgcactgcagaaaattgctgctgacatgagtaatatcatagaaaatctggacacgcgggaactccactttgagggagaggaggtagactacgacgtgtctcccagcgatcccaagatacaagaaggtaccaagtattaatctttacactattgaattaacacatggggaatttaaatggcaagttaagaggaaattcaagcattttcaagaatttcacagagagctgctcaagtacaaagcctttatccgcatccccattcccactagaagacacacgtttaggaggcaaaacgtcagagaggagcctcgagagatgcccagtttgccccgttcatctgaaaacatgataagagaagaacaattccttggtagaagaaaacaactggaagattacttgacaaagatactaaaaatgcccatgtatagaaactatcatgccacaacagagtttcttgatataagccagctgtctttcatccatgatttgggaccaaagggcatgtaagttgcaataa

SEQ ID NO: 15888 - DNA, 621 bp, Homo sapiens
  source 1..621: mol_type = unassigned DNA
agccaaaactgggcttgggaacaggaaggctttgcccgtttatttggattctcagggtagtcgattttgccacctcttggctatcagctgccttggagattggtttcatagtaaggattctttctttaaggtgatatggagcaactgctttcacaggggcaccagcccctttgcttttactctgtccaaagttaacatgtcactgaaaaacgagccacgggtaaatacctctgcactgcagaaaattgctgctgacatgagtaatatcatagaaaatctggacacgcgggaactccactttgagggagaggaggtagactacgacgtgtctcccagcgatcccaagatacaagaagtgtatatccctttctctgctatttataacactcaaggatttaaggagcctaatatacagacgtatctctccggctgtccaataaaagcacaagttctggaagtggaacgcttcacatctacaacaagggtaccaagtattaatctttacactattgaattaacacatggggaatttaaatggcaagttaagaggaaattcaagcattttcaagaatttcacagagagctgctcaagtacaaagcctttatccgcatccccattcc

SEQ ID NO: 15889 - DNA, 558 bp, Homo sapiens
  source 1..558: mol_type = unassigned DNA
atgacttaagttgccttgagggagtcagccaaaactgggcttgggaacaggaaggctttgcccgtttatttggattctcagggtagtcgattttgccacctcttggctatcagctgccttggagattggtttcatagtaaggattctttctttaaggtgatatggagcaactgctttcacaggggcaccaggttggtaaaaactcaaagctaacaccattcagaacttacctaatgatgtttgaaaaagaggcggtaggctgataactgcttcctaggaagacctaccaacttcaccagcatgctcattactctcatcattgttgttggaacattttgttcttgggtacaagcttactttacacacatctggttactatgtttgttctggaagacggcagcctcatggagtgactagagaacacttgatactgagctctggaaatcgttttttaacagctttattgatattgtataatttacagatcatcaagttaagccctttaaagtatacaattcattggttttttgaatatctacagagttgtgtgaccataac

SEQ ID NO: 15890 - DNA, 1012 bp, Homo sapiens
  source 1..1012: mol_type = unassigned DNA
ccgccgccaacgcgcaggtgctagcggccccttcgccctgcagatattcccactctggccactgcccaaaggggctcttatctgaggaatactgctgacttcgtgtacctagttttacagagccatctttctgaagcataaattagattacattattctacagcttaaatccctccatgaacttcccatcacccaagagtggatctgaaacgccttagagtgtcattcaagacccttctgtatgtggctgccatgcatttttttcaactttatttccagccttgcaatgtacatacatccatctctgtcccacgccctctgcagggctttttggttccagaacgtgccatgtgcttttctcctttggagctctttgaataggatgcccttcctcccttgtctgcctgtagatagaaaaatcctgtgcattggtgagttggccctgaccaccattttcttagcatgctgaattacttctgttcccctctgtgtttgcacagctttgtttgtgcacagtagacttttggctgggccatgtagactgcctcctccatgagtttgccagctttttgaggacaatgtctgttttattcatcctcgaattctcagtgcctagcagagtgcatagcacagggtagttatgcaatacatattggagtaaaggaatacagttcaaaaaaacagtctcattaacagatgcaaaccaactcctctcatgacgcagagaatctaagctcaaacaaattaccagagttggcagttgaagtactatatatagacagaacttaataaatgcttttctttgtcttaagcctttgatgacagtgatgtgtttttatgaacgtagataaccacaagcagatgtgtcaaagctcttttgtccaggaataaactgagtttcgtcatcatcttgacagtactttcctggatgagtgttcaggaaacatgaaaagtttttaaacaattcaacaaatgtgtaataaaagtttgttaccttgttttatttgttgtt

SEQ ID NO: 15891 - DNA, 1506 bp, Homo sapiens
  source 1..1506: mol_type = unassigned DNA
aggtgcaagaaggcttataaagactccagcaaagctccagtctcttaattatgtcacctcagggtgatgcggtcgagttatgaaactttgggaaaagagaacaaggaacgcgggcgatcagaggcccagtcgcgagacctgccccgctggggcctccagccggcaccgcgacgccccgggacctggcaccgcctcgctccacccctgcgaatccggggcgaatccgggcggagagttcctgccggccgcgcagcgcagagccccctccggcccgccctctctccctccctcccgctgagctccagctgtgccagaggcacccgagccctgagagtccgccgccaacgcgcaggtgctagcggccccttcgccctgcaggagagaatatcctttgaccctacgtggaagcctacaagaaggggaattctgggcaatgtggttcagcccagccacatcacatactattatttagtagtcatgaagagagagacatagacagtgaagagtaagtgaagaatttgagggtcatcagccattgtgaactcatcaaaatattcccactctggccactgcccaaaggggctcttatctgaggaatactgctgacttcgtgtacctagttttacagagccatctttctgaagcataaattagattacattattctacagcttaaatccctccatgaacttcccatcacccaagagtggatctgaaacgccttagagtgtcattcaagacccttctgtatgtggctgccatgcatttttttcaactttatttccagccttgcaatgtacatacatccatctctgtcccacgccctctgcagggctttttggttccagaacgtgccatgtgcttttctcctttggagctctttgaataggatgcccttcctcccttgtctgcctgtagatagaaaaatcctgtgcattggtgagttggccctgaccaccattttcttagcatgctgaattacttctgttcccctctgtgtttgcacagctttgtttgtgcacagtagacttttggctgggccatgtagactgcctcctccatgagtttgccagctttttgaggacaatgtctgttttattcatcctcgaattctcagtgcctagcagagtgcatagcacagggtagttatgcaatacatattggagtaaaggaatacagttcaaaaaaacagtctcattaacagatgcaaaccaactcctctcatgacgcagagaatctaagctcaaacaaattaccagagttggcagttgaagtactatatatagacagaacttaataaatgcttttctttgtcttaagcctttgatgacagtgatgtgtttttatgaacgtagataaccacaagcagatgtgtcaaagctcttttgtccaggaataaactgagtttcgtcatcatcttgacagtactttcctggatgagtgttcaggaaacatgaaaagtttttaaacaattcaacaaatgtgtaataaaagtttgttaccttg

SEQ ID NO: 15892 - DNA, 174 bp, Homo sapiens
  source 1..174: mol_type = unassigned DNA
atgtcactgaaaaacgagccacgggtaaatacctctgcactgcagaaaattgctgctgacatgagtaatatcatagaaaatctggacacgcgggaactccactttgagggagaggaggtagactacgacgtgtctcccagcgatcccaagatacaagaaggtaccaagtattaa

SEQ ID NO: 15893 - DNA, 2906 bp, Homo sapiens
  source 1..2906: mol_type = unassigned DNA
ccagcccgcagagcacggtcctgggggtgtgatcacagctgctgaccgcggctcccgccgtgtgatgtgaccactcggaggtggggcgagggggccgggggccagcagcagggagtgtgtaaaaggtcttcttcctcacaatacgattgaaggtgtttgggacgtagggctcagatccaggagtgccgtcctccaagccttccataggattttgtgacgcccttgagaaccgcccttgtagactcagtcctgaactaccgccacgcctgtatttgctcctcctcatctcggattattgctttctttacttcctctgtgaagcactaaatactagtagctttttaagaacagaccacaacagtttcttcgtttgaccattactaagtctgcctccaaaatggggagttccgttaactttatcagccagccctgccaattttagttaagataagccttcgtgggcctccaaaggcctctgagagactaggtacccagagacctctgaggtatgttaaatggtttagttcgtggtggtgcaatgaaaacttaaagaaggaaaggaatctgcaatttgaactgttaacagaccccacatttacacactgcctatttgaataagaatctctttcagtattaaatgttttgtgacacacaaatgaatttgtacacagtcttttagcttgaatttgtagacagcctttaaatgttgtttggggatctttggactaattgtataagcgctcagtctggtctcaaactcatgatctcaggttatccatgcgcctcggcctccgaaaatgctgcgattataggcgtgagccaccactcccagccccttcttgtgatgatgtgagatgataaaatgcctgtgtgaagatgaagtgaggcgaataacctaggcagtgtgacataagtggaaaacgccagaaataaacaattcatgttataaattgtgcaccattctgagtagtgtgatgaaatcttgcactcctccattccatcctgccagcattgccagtcactcggtggccatctctgtgatcagattaacagtggttttatcagtatcatagggcttatgttcaagtaactgtattttacttaataatggctacaaagtgcaaaagtagcgatataatatttttggaccatggttgactgcaggtaactgaaattttagttacatgaaaccacagataaggggggactgcactacacataaaataggcataagtaacctcaagacaatagacattattaaaatatagaaaagtaataaagaagtgataaatggagaacttttgctttaatataatttattgtaagtttatataatttaatttttagtaacttcaatttttaatattttaatttttaatgatttatgtgtttaacaactgactcacaaaattgctgaaaatttcccaatcttgatgaaaatttcccagtctgctctcaggagcctatatgagccagcccagaataccactggagttataattttagaagattaccttggtagcaatctgtagaaatgttttgtaggggagctacagtagggatcaaaagtggagacagattacgaaatgtcttcagaccctgccagcatgagggttcaaatgatgtctagtcagtggagatcacgcaaatttcactggtttgtgttcccacgtggatccgtaggaccttcaatgcaagtctccttcaggtattcctggtggtatcttggcattgtctcacatgtgttttgagagccccacttccttggggagtcttccgctttggcttccttgttgatgaccgtgggccaaagggctttgtgtgtgaggctccacctcagccatagctggtgtcctcctgaagaggatttatgccaaaaggagtcacatgccaggacttgtttttttcaagtttgcaaatctggggggagggtggggctctagaaagatgctggaacctggtatgtgccctgcagaaatgtccttgactccttttgtcaccaggagcctaaatttactgtgtttctctgtgactcacagaggcagggggaaagacaatcctctccacttcttcctgcagctacttgctccatcagcctcagccagtctggggctgggcagggaaacaggccctcttccttctcctggtttgtcccctggtttgctcagcgagaccttcgtgtctgagggcccccttctcaccttgcagatcagctggtgtggtactgaatgcctgatggatggccaggggcccctgatccatctgcattcccagaatataagaatctcatttggggccacccagcccccactactcttagtatatgaaataaggtggaatagataagaggatggaactggcccctgggtgcatgatggggccaataacggaggtacagggtgcatatgtggctgggctgtgagacagggaaagaggatggaattgagatgcaaggtagaaaagcatgactatgttcagtttgggacttgatgaaatagatactggtaggacagttcactaggcactgggccttcaggagaaagagaagaaaggaatggtggcattgggagtagtaaagctgtgggtatgaatgagtatctatgagactcacctccctgtgaggacatagaatgaggagacacagtctacaggtagactaggtcgagttcagaagcctgaagaacaccagtgtttaagggatggtgttgggaaagggagccaggccagccagagaggaatgttccggaactctgaaaggaaggaaatggcaggaacaaaggagctggggcacaacagtggtgactcacactgggaacacttcggcccattgtgtttatgcttatagtttcccaagtttatcttttcagggttatgattacgttaacctcacctccctccctccctct

SEQ ID NO: 15894 - DNA, 2007 bp, Homo sapiens
  source 1..2007: mol_type = unassigned DNA
aggacaaagaggaagtagctggaaggggaaggagccagctgcagagaggaggaggtgagctgcagagaagaggaggttggtgtggagcacaggcagcaccgagcctgccccgtgagctgagggcctgcagtctgcggctggaatcaggatagacaccaaggcaggacccccagagagctggagctgctggtgatgccaggctgccctgtgcagatgctgaagcctctttggaaagcagcagtggcccccacatggccatgctccatgccgccccgccgcccgtgggacagagaggctggcacgttgcaggtcctgggagcgctggctgtgctgtggctgggctccgtggctcttatctgcctcctgtggcaagtgccccgtcctcccacctggggccaggtgcagcccaaggacgtgcccaggtcctgggagcatggctccagcccagcttgggagcccctggaagcagaggccaggcagcagagggactcctgccagcttgtccttgtggaaagcatcccccaggacctgccatctgcagccggcagcccctctgcccagcctctgggccaggcctggctgcagctgctggacactgcccaggagagcgtccacgtggcttcatactactggtccctcacagggcctgacatcggggtcaacgactcgtcttcccagctgggagaggctcttctgcagaagctgcagcagctgctgggcaggaacatttccctggctgtggccaccagcagcccgacactggccaggacatccaccgacctgcaggttctggctgcccgaggtgcccatgtacgacaggtgcccatggggcggctcaccaggggtgttttgcactccaaattctgggttgtggatggacggcacatatacatgggcagtgccaacatggactggcggtctctgacgcaggtgaaggagcttggcgctgtcatctataactgcagccacctggcccaagacctggagaagaccttccagacctactgggtactgggggtgcccaaggctgtcctccccaaaacctggcctcagaacttctcatctcacttcaaccgtttccagcccttccacggcctctttgatggggtgcccaccactgcctacttctcagcgtcgccaccagcactctgtccccagggccgcacccgggacctggaggcgctgctggcggtgatggggagcgcccaggagttcatctatgcctccgtgatggagtatttccccaccacgcgcttcagccaccccccgaggtactggccggtgctggacaacgcgctgcgggcggcagccttcggcaagggcgtgcgcgtgcgcctgctggtcggctgcggactcaacacggaccccaccatgttcccctacctgcggtccctgcaggcgctcagcaaccccgcggccaacgtctctgtggacgtgaaagtcttcatcgtgccggtggggaaccattccaacatcccattcagcagggtgaaccacagcaagttcatggtcacggagaaggcagcctacataggcacctccaactggtcggaggattacttcagcagcacggcgggggtgggcttggtggtcacccagagccctggcgcgcagcccgcgggggccacggtgcaggagcagctgcggcagctctttgagcgggactggagttcgcgctacgccgtcggcctggacggacaggctccgggccaggactgcgtttggcagggctgaggggggcctctttttctctcggcgaccccgccccgcacgcgccctcccctctgaccccggcctgggcttcagccgcttcctcccgcaagcagcccgggtccgcactgcgccaggagccgcctgcgaccgcccgggcgtcgcaaaccgcccgcctgctctctgatttccgagtccagccccccctgagccccacctcctccagggagccctccaggaagccccttccctgactcctggcccacaggccaggcctaaaaaaaactcgtggcttcc

SEQ ID NO: 15895 - DNA, 6515 bp, Homo sapiens
  source 1..6515: mol_type = unassigned DNA
agaggaagtagctggaaggggaaggagccagctgcagagaggaggaggtgagctgcagagaagaggaggttggtgtggagcacaggcagcaccgagcctgccccgtgagctgagggcctgcagtctgcggctggaatcaggatagacaccaaggcaggacccccagagatgctgaagcctctttggaaagcagcagtggcccccacatggccatgctccatgccgccccgccgcccgtgggacagagaggctggcacgttgcaggtcctgggagcgctggctgtgctgtggctgggctccgtggctcttatctgcctcctgtggcaagtgccccgtcctcccacctggggccaggtgcagcccaaggacgtgcccaggtcctgggagcatggctccagcccagcttgggagcccctggaagcagaggccaggcagcagagggactcctgccagcttgtccttgtggaaagcatcccccaggacctgccatctgcagccggcagcccctctgcccagcctctgggccaggcctggctgcagctgctggacactgcccaggagagcgtccacgtggcttcatactactggtccctcacagggcctgacatcggggtcaacgactcgtcttcccagctgggagaggctcttctgcagaagctgcagcagctgctgggcaggaacatttccctggctgtggccaccagcagcccgacactggccaggacatccaccgacctgcaggttctggctgcccgaggtgcccatgtacgacaggtgcccatggggcggctcaccaggggtgttttgcactccaaattctgggttgtggatggacggcacatatacatgggcagtgccaacatggactggcggtctctgacgcaggtgaaggagcttggcgctgtcatctataactgcagccacctggcccaagacctggagaagaccttccagacctactgggtactgggggtgcccaaggctgtcctccccaaaacctggcctcagaacttctcatctcacttcaaccgtttccagcccttccacggcctctttgatggggtgcccaccactgcctacttctcagcgtcgccaccagcactctgtccccagggccgcacccgggacctggaggcgctgctggcggtgatggggagcgcccaggagttcatctatgcctccgtgatggagtatttccccaccacgcgcttcagccaccccccgaggtactggccggtgctggacaacgcgctgcgggcggcagccttcggcaagggcgtgcgcgtgcgcctgctggtcggctgcggactcaacacggaccccaccatgttcccctacctgcggtccctgcaggcgctcagcaaccccgcggccaacgtctctgtggacgtgaaagtcttcatcgtgccggtggggaaccattccaacatcccattcagcagggtgaaccacagcaagttcatggtcacggagaaggcagcctacataggcacctccaactggtcggaggattacttcagcagcacggcgggggtgggcttggtggtcacccagagccctggcgcgcagcccgcgggggccacggtgcaggagcagctgcggcagctctttgagcgggactggagttcgcgctacgccgtcggcctggacggacaggctccgggccaggactgcgtttggcagggctgaggggggcctctttttctctcggcgaccccgccccgcacgcgccctcccctctgaccccggcctgggcttcagccgcttcctcccgcaagcagcccgggtccgcactgcgccaggagccgcctgcgaccgcccgggcgtcgcaaaccgcccgcctgctctctgatttccgagtccagccccccctgagccccacctcctccagggagccctccaggaagccccttccctgactcctggcccacaggccaggcctaaaaaaaactcgtggcttcccggtgcctctgtgtgagtcccgcgcgggcggcccttcatcctcttgccaagggcccgcctctatgcgcccgcccctgcgaaactgcgccgcgcgaccgccgtggcagcgcctcagctagccccgggtccgcgagaacctggggcggggcggggcggggaccagacgggcctcccaggcggagcgaaccctccacctcccaccccgcgccgggctgccgcgctccggaacccaaattcccgccccgaggctgccgggggaagcgagaggcgcggagcccacgcccgggactccagcggaggaaacgcagaccaaggcgcagcgccgcgcacccaccgccagggggcagctcctacggcgccggacaggggcggcgcgggaggggagcggggctgaggggaccgggagggcgggaggggacctgcgactgaggggacagggagggcgggaggcgacccgcggctgagtgagggaagggcgggaggggacccgcggctgaggggaccgggagggcgggaggcgacccgcggctgagtgaggggagggtgggaggggacccgcggctgaggggacagggagggcgggaggggacccgcggctgaggggaccgggagggcgggaggcgacccggggctgagtgaggggagggcgggaggggagcggggctgaggggaccgggagggcgggaggggacctgcgactgaggggacggggaggatgtgaggcgatccggggctgagtgaggggagggtgggaggggacccgcggctgaggggacggggagggcgggaggggacccgcggctgaggggacggggagggcgggaggcgacccggggctgaggggacggggagggcgggaggggacccgcggctgaggggacaggtcctgcgtgcgggctggggagacaggcgggcgagggtaggggtgcacaaggctgtgtggtttgtgggctgttgtgcagggtgggtccaagcatgtgggggcaggcttgtcctggggatgcagtgcccagggttggtggatggggctgagaggaccagcatttgagctggagggcaggaaggtgactccagtctgagaccaggacttggatgcagctccactggaactcaccctatcctgggagccacctgggcacctgtcctgcagatgcaggatttgaacccaggtttggcaactcagttcccactcttctgctatgaatgctgggtcagaaggattctcaaaacaccctggcttatctcacctgatggttcctgaccaagaccacagggtaccctcccctggtggaggtccatggggccatgctaggctggagttcagggatggctcagcggtatgaaggagcactggatgctgaatggaccccagggtgccccgaatgctctcccggtcttgaggcaccactttcctacccttctctacttctctccttttcctacccttctctacttttttctttcctacatttgtgtccctgccacactgtgaactcagccatatcttcctcttccctctttgctttggggaaagctagcaaagttcatctcaggtacagtacaagttacttttctgttcgattagtgacctcatacttcccccatctaaaggacaccttagacttcagcattctgtctgtgcagaaatctcctacacccatcctgcctccctgcccaagcttgtgaaaagcttgctgcagatgctgcagggggatagggatccacatagccctgcaaggccttcaggagcttctgggggctgctttgtgtgtgagctgcacttggccaagccaagctctggcagttgcagtggctgctccctgtggcttcctatccctcattcatgctccatatctcctcagtaaccatctggcaaaaagcttcgtggcaacacctggctcagaagccgatatcatcccagactaagctctgccctccagggttgcacgtgtgggtttgctccctggttcttggccttatacctgaatgtgtctcagagcacttggcctgctctcttggcctgccaactatgttctaggagggctctgtgctccaggctgtgatttggacaactggctggtggccctcagccagtgaaaggcctctttccacacacctggggactggcagtcacacctcagtggcactgacagaggcctgcttcaaggcagatgcctattccaaaggaaatccagcttgacaaggcttgggagaccccaggagggtgccacaatgtggccccttctgggctatagcagacagactctagaatggctcccttgacccccacctgctggtatgcatgcccttgtgtgatctcaccttgagtgtgtgcaggacctgtgccttgttgtaaccaatagaatacagaggtaaggggatgtcactcctgtgacaccttgtgatcatgtgacataagattataacattatcaaggaatagcagtctatcccttgctagctttaaaaagtgagctgctaggctatgagctgtcctatgaagaggcccatgtagcagggtactggggttgcctccagcccccaactagcaagaaactggggccctcaatcatcccatccacaaggagttgagtgtggctagcaacaacgtgagcttcagaagtggctgctttcctggtcatacctgaaggggagaccacagccccagctgacatcttgattgtagcctaatgggaccttgagcagagaacccaacaaagccacacttgggctcctgatccacagaaactgggagatcataaatgtgtgttgttttaagttgctaatttgtagtgatgttcttatgcagcatagataactcatacacagagaaccaaggccacgcgagaaccctgtgggggcccctgctgctcagccactcctcacatgctgggacagctgtctctctggcctctagcaccaaggtccccactatcccaggccttgactcttggatcagagagggacaaaagccccatggagccaagcagactcctccccctgggctgcactcacctagcttgtctggcacacacaagttggagtagagaaggcaggaagccctgggaagggagagggtgatggccttgcttaactgggatgagtgtccaccaaatttcccttcccacttcccctgctcatgagcccccaggggacctgtgtcagttcactttctagaggcttctatgtgccctaacttggatgacacccacgggcctccccaactcagcacagggaacatatgcccatggtggcatggggaaagaacccagcctctcccctgcccaggctcctgcaccccatagctgtcacccctctggaacctctcagggcagcacgagtggtagcctcggagtggccttcaccctccaggcactgcggtcctccagattggctcacagcccagctcttgctcccatatccacagccatgagagcagccacctccccagggggccataagcgcttctcaccaggagcccacctaggccaggagggagctgggggcaagttccaactgcccccttgaacactgcatacccatgaatctggcaggggcatctgggaagagatttgaccactgaaagactgtagggaaacccttgaacctcaatccgctacgccacgtggatttgcttcctgtgggctgcccaagagcgcctctgtggtgaaggaagcttctgaggatgggccactaaagatggccaaggtcacctttctgtgctgtccccactctgcactccatctcccatcccacactgcctccagctggagggagggagggagggttgtacgtctgtgtccctgccacactgtgaactcagccctatcttccttgtcttcctcacagcctctggctcagaggaggacctggacaaatggatgataggtaggcaaccacccaaatgttcctcattgactgttctctagagctgcttagtagagaccaggagtgtgtgggaggaaagccctggtaaacttcgaccctgagacagaagacctcagcagccttcagcatgggatgcagcactttctttattgcccatccagggaacagccaagccagctccatctgcattctggctgcagcgtgtacattaggggactcaggggccacagtgtgggaccgtgcacactggcaaggcactggcggatgctggcaggccagtggacatggatagatgagaatgacaactcacagatgtcctagcttctgctggcccagctgccagccactggccatcacccttttgcccagcatgtgtgcattgtcacccaaaacatcttgaaacttgccattagtgaggcattcaacaaagaagtaagctaagtgagtaggaaacagtgtttcctggaatataccgcactctgcctgaaataggaaaactatgtttgccgggaagcagcagcagcaggaaagaagttataccaaaaacgacttgtacaccacagacattataaccctttcctcaaagaaacagtcatgttctgttgggtattatggacaggtctctggaaatttatctaataaagaccaacaaacttccccagcagt

SEQ ID NO: 15896 - DNA, 883 bp, Homo sapiens
  source 1..883: mol_type = unassigned DNA
agagaagaggaggttggtgtggagcacaggcagcaccgagcctgccccgtgagctgagggcctgcagtctgcggctggaatcaggatagacaccaaggcaggacccccagagatgctgaagcctctttggaaagcagcagtggcccccacatggccatgctccatgccgccccgccgcccgtgggacagagaggctggcacggtcctgggagcgctggctgtgctgtggctgggctccgtggctcttatctgcctcctgtggcaagtgccccgtcctcccacctggggccaggtgcagcccaaggacgtgcccaggtcctgggagcatggctccagcccagcttgggagcccctggaagcagaggccaggcagcagagggactcctgccagcttgtccttgtggaaagcatcccccaggacctgccatctgcagccggcagcccctctgcccagcctctgggccaggcctggctgcagctgctggacactgcccaggagagcgtccacgtggcttcatactactggtccctcacagggcctgacatcggggtcaacgactcgtcttcccagctgggagaggctcttctgcagaagctgcagcagctgctgggcaggaacatttccctggctgtggccaccagcagcccgacactggccaggacatccaccgacctgcaggttctggctgcccgaggtgcccatgtacgacaggtgcccatggggcggctcaccaggggtgttttgcactccaaattctgggttgtggatggacggcacatatacatgggcagtgccaacatggactggcggtctctgacgcaggtgaaggagcttggcgctgtcatctataactgcagccacctggcccaagacctggagaag

SEQ ID NO: 15897 - DNA, 691 bp, Homo sapiens
  source 1..691: mol_type = unassigned DNA
gagaagaggaggttggtgtggagcacaggcagcaccgagcctgccccgtgagctgagggcctgcagtctgcggctggaatcaggatagacaccaaggcaggacccccagagatgctgaagcctctttggaaagcagcagtggcccccacatggccatgctccatgccgccccgccgcccgtgggacagagaggctggcacgttgcaggtcctgggagcgctggctgtgctgtggctgggctccgtggctcttatctgcctcctgtggcaagtgccccgtcctcccacctggggccaggtgcagcccaaggacgtgcccaggtcctgggagcatggctccagcccagcttgggagcccctggaagcagaggccaggcagcagagggactcctgccagcttgtccttgtggaaagcatcccccaggacctgccatctgcagccggcagcccctctgcccagcctctgggccaggcctggctgcagctgctggacactgcccaggagagcgtccacgtggcttcatactactggtccctcacagggcctgacatcggggtcaacgactcgtcttcccagctggtgcgccccgccctggccccaccgcatcctggtgctggaaacacagcaagtcaggctgcctatctatgcaggcgtctcgggcaccaggcccgggggctcagcttggtggtag

SEQ ID NO: 15898 - DNA, 628 bp, Homo sapiens
  source 1..628: mol_type = unassigned DNA
gcaagtggggaccagtcgggcagggactgcacctgccccaacatccctggcctgggtggagtggggtggaggccccacagaggggtttttctcccacagcgcctgactttggtccctgcaggtgaaggagcttggcgctgtcatctataactgcagccacctggcccaagacctggagaagaccttccagacctactgggtactgggggtgcccaaggctgtcctccccaaaacctggcctcagaacttctcatctcacttcaaccgtttccagcccttccacggcctctttgatggggtgcccaccactgcctacttctcagcgtcgccaccagcactctgtccccagggccgcacccgggacctggaggcgctgctggcggtgatggggagcgcccaggagttcatctatgcctccgtgatggagtatttccccaccacgcgcttcagccaccccccgaggtactggccggtgctggacaacgcgctgcgggcggcagccttcggcaagggcgtgcgcgtgcgcctgctggtcggctgcggactcaacacggaccccaccatgttcccctacctgcggtccctgcaggcgctcagcaaccccgcggccaacgtctctgtggacgtg

SEQ ID NO: 15899 - DNA, 667 bp, Homo sapiens
  source 1..667: mol_type = unassigned DNA
aacgtctctgtggacgtggtgagggcgtgctcccggccgggcgtgggaaaggcggccctcctgccgcccttcctgacgcgctgcctctgctcccctaagaaagtcttcatcgtgccggtggggaaccattccaacatcccattcagcagggtgaaccacagcaagttcatggtcacggagaaggcagcctacataggcacctccaactggtcggaggattacttcagcagcacggcgggggtgggcttggtggtcacccagagccctggcgcgcagcccgcgggggccacggtgcaggagcagctgcggcagctctttgagcgggactggagttcgcgctacgccgtcggcctggacggacaggctccgggccaggactgcgtttggcagggctgaggggggcctctttttctctcggcgaccccgccccgcacgcgccctcccctctgaccccggcctgggcttcagccgcttcctcccgcaagcagcccgggtccgcactgcgccaggagccgcctgcgaccgcccgggcgtcgcaaaccgcccgcctgctctctgatttccgagtccagccccccctgagccccacctcctccagggagccctccaggaagccccttccctgactcctggcccacaggccaggcctaaaaaaaactcgtggctt

SEQ ID NO: 15900 - DNA, 8721 bp, Homo sapiens
  source 1..8721: mol_type = unassigned DNA
cacctcgccctccctccttccgccccgcgcctcccgcgatcgccccctcccgcccggccgcgctcccagctggcgctcagcaccccgcgctccccgcgcccgctcgctcctccagctcctccagctcagtctccagctccacctccggctcccgctgggcctcccgctcgccctccgcgcccggctccccgcgcgcccgtcccgagtccgctgctcgccggcggccgcccggtcatgtcaggatggagatccggcagcacgagtggctctcggcctccccccatgagggcttcgagcagatgaggctcaaaagccgccccaaggagccctccccaagcctgacccgagtgggcgcgaacttctacagcagcgtcaagcagcaggactacagcgccagcgtctggcttcggaggaaagacaagctggagcactcccagcagaagtgcatcgtgatctttgccctggtgtgctgctttgccattctggttgcactgatcttttcagccgtggacatcatgggagaggatgaggatggactctcagaaaaaaattgccaaaataaatgtcgaattgccctggtggaaaatattcctgaaggccttaactattcagaaaatgcaccatttcacttatcacttttccaaggctggatgaatttactcaacatggccaaaaagtctgttgacatagtgtcttcccattgggatctcaaccacactcatccatcagcatgtcagggtcaacgtctttttgaaaagttgctccagctgacttcgcaaaatattgaaatcaagctagtgagtgatgtaacagctgattcaaaggtattagaagccttgaaattaaagggagccgaggtgacgtacatgaacatgaccgcttacaacaagggccggctgcagtcctccttctggatcgtggacaaacagcacgtgtatatcggcagtgccggtttggactggcaatccctgggacagatgaaagaactcggtgtcatcttctacaactgcagctgcctggtcctagatttacaaaggatatttgctctatatagttcattaaaattcaaaagcagagtgcctcaaacctggtccaaaagactctatggagtctatgacaatgaaaagaaattgcaacttcagttgaatgaaaccaaatctcaagcatttgtatcgaattctccaaaactcttttgccctaaaaacagaagttttgacatagatgccatctacagtgtgatagatgatgccaagcagtatgtgtacatcgctgtcatggactacctgcctatctccagcacaagcaccaaaaggacttactggccagacttggatgcaaaaataagagaagcattagttttacgaagcgttagagttcgactccttttaagcttctggaaggaaactgatccccttacgtttaactttatttcatctcttaaagcgatttgcactgaaatagccaactgcagtttgaaagttaaattttttgatctggaaagagagaatgcttgtgctacaaaagaacaaaagaatcacacctttcctaggttaaatcgcaacaagtacatggtgacagatggagcagcttatattggaaattttgattgggtagggaatgatttcactcagaatgctggcacgggccttgttatcaaccaggcagatgtgaggaacaacagaagcatcattaagcaacttaaagatgtgtttgaaagggactggtattcaccgtatgccaaaaccttacagccaaccaaacagccgaactgctcaagcctgttcaaactcaaacccctctccaacaaaactgccacagacgacacaggcggaaaggatccccggaacgtataacatgatgaagaaactgacaggacagctctgtatttcatatttatacataaaggacttgaggagagaaaaaacactttaatatgtctctttttttagggaaaaagcacacttataaaaaatattctctgaacaacacataatacctatctaacaatatcttagcgtcgtgtacactaaaattaagacttttgtatttgttacctctgacagagaatgtcattctggcgtagaagttagtttttacgtttgcatacaaattttaagactttcattcctgctcctttctagttttagaactttttctgctgacctacccggtcagttgttaggaagcttagcatgaggtgggctctttaacaccattctgagaactgttgatttagagaggaaggtgaggattttgccttggagaagagactgataaaaccaagtgtttattcttgtaaatcgtctccaagacctacacagtcagctaagcatgaatagcttacatctcatgccagccttcaacacccttgaaaaatatccttttctgtcttgctcattttcttcttataccataagttttatttggtatcattttctcttctcacaaaatgttcctattatatagcattttctgtattcacctcaacattacttctaactatgataacatcttttgaaaacatacaaatttttcagaatggatactaagtggaaatagcagtctttcattttcacctttcaactgaatccttttttcccctaccgaattggtatttaaaaaaaatcacagtcagcaatatgtatcctttctctcaagctcagaaaaattatgtagccacctgctaatatccagcaagctatcaagtctgcattttgggaataaagtagtttttcacatttttgttcagtttatggtattataaaggaaaaaatctctatgcgtcagtggattttaatttctttagaatcattatgctgttaagagtatgccagcaaacgtttctagagctatttaatataccttctgctatttaatataccaaatgcttttcagagaaatgcaatttaaatactgtgcttaacatattttactaagaagcagaaatattgaattattgttctataacgtaattgtgtgttgttgttttatatctatacaatatatacccctgtattaatggagaccattgctacactagggagaggcatggcctcttcagagcccacagcaggtggccgggatgtccagttccaatgttgttcccgactctgtgactcaaagcggagcccctcactgcttggcctcgggcttctcttggtaatgtagacggtaataactcacctacctcgcaaggatgttgtcacggtaggaaatatttataacttgttttgaaatcaaaagaacctatataaatgctaagcattataatatataatctttttcttgaaataaactttgtcatatcttgatggaatcaacaccaggtcctcccccagaatccacaaaggaaaacaaattcacagcttcctgttgcaaatgtggatgaaaagagcacagccccacagaaaccctggtggagatctggattgtcaacatttcaatagaacattgcgttgggctgctttggcatgaataacatcaacacaaaactagacgtcgtgctagagctggttcttcaggaccataatatacatgtattttcagagcaaggaaacactcagttattctttttcatttctggagacttgatttctaaatgccaaaagagtgatcgaggagcctgtgaatcttatccaatggatttacttaatatagaatggctatgttggttatccagtgagtgatcacattacttcccttcttgttatttgcaagtattgcttcactagatatttaaccagttgatcaagagagctggaaggaagctgtatttttaagggtagcatggttttatgactaattgggagattctcactgaaattcttcatcaataatagccagtccctaagactctaaatatttaccatatacacaatccatatttgagttgggagttataactctgccagttatcccaataaagtaaacgtggctttggtgatgattttaaaaagaaagcagcctgggtgcggtggctcacgcctgtcatcccagcgctttggaaggccaaggcaggaggattgcttgaggccaagagtttgagaccagcctgggtagcatagcaagatcctgcctctaaaaataaataaatacagaaaggaaagaaggaatcagaataggagtggagacaaacctaccaagttcacactcagacaaacaaaagcgacctgagttggttttaaaaaggacatctaaagggagaaaaaaaaaccaaataaactaaaatttgttagttctcaagttgtcccctgaagtattcatccacagccatgggacactcataggcttggtgtcatggggccccttcactgtcactatctgctgtatgtgctacgagaagagaatgtcatccattacggaatgaccatcattgccatttccttttgaggcctggcaaaatgctatcaccaggagccgcatcccaggcttttctgccaagcagcagcagcagatgcctaccagacacagcaagcccctaatcaggggagtctgggcagcggtggtgactccatggggccacactgtccttctgtggcagccagaaaagtgacccccataccaagagtgtcagaaatgggttcatgtctcccaagagaacatttcattctgcagaactttctttcatttggatgctttagctatccctctagagacggctttcctttcttttagacttgtttctgtgctaaacaaactatcaacctccattcccccccacccctaaatatcccaggaattactttccaggagggaaagaatgcaaaacaaaaacaggttaatttgacaccctctggtggatgtccatgccagaaattatgaggagcagggtgactactccccattaacattcctggatttatttcccaagaggcaaaaaggaaaacaaacacaattagagactatatcttggatttcagtaccactaacactaacttagtgccttatgtatcctcaagtgttgattttaaacaatgacttattctatgagaacacttctctctcctgtggaattcaaatgaccttccgatgggcctaccagttgaaaacttccatttgagcagtgacagtttttatgctgcctgttctcttcccaagccccatcacctttatccacccccccgccaaatcaaatcattgcacacaccatcaaagatcaatactgtgggcctccactgcattgtcactggccactagcctatcaaataattgaatctctgcttgtccaaccattggagaggaagtggaagagtgagatgacatccatgctttgtaaacaacaagctttaggtacctgaacctgatagaaacaaggaatgctgaaaatgtccccactgacttaaaagaatgctgtaaagagatgctttgcagacttcctaggtcctgtggcacagagaatgaaaaccagcgtctttaacaagtcaaagcagacaaagaaacaaaaggtctgcggatacactttgcacctgtgtaactctgggcaccattcgggccctctctgtgctactgtttgtctcatgtctgaatggttcttggtgagaggggtctgatcacatttttggttgatctcaccctttgaaaaatgtgggggattttttttgaaatgcagttaatggtttaagtgcctcgatgaacctgggatggatagaagctcatttcccaccagcctgtggctatactcagtgactctgattcattctgtttgtttttaggaacttttattgaactaaattccaaggggggagaaaagaccataagaatttcttgataagatcagatccagggtctatctgtctcaggaattctatcctacaattaacttttttttttttccacacgtatgaccactggtgtgtgtttctgtgtccaaaattcatttcattatttttaactttaggaatgtaaaacgctgccattacttgcatagaacagccacttcctataatgaaagatactttgttattgtttattcaaactcagtccttacgaacagccccatatattgtggacaaatgtttcattcttttatctttctgtacttgttcccaatgaactggtgtgctttattatacaccttttaaaggcaaaattaatataacttccatttggcccaaggtaaaaaattttccaatttgatttggattagcatctttcattttccttttatatgttgttaacaaaatagctgcttaccattttcaccttattgacttaaatggacggaggcttttgaatagccctgacatcaaccccagttcgcagcctgtctttctcatttgagagaattcccatctttggctgaattatgaagatgctgctttatacagtgactcaatgggtattcctcagaagtttcttgaagatgtaaaaatgaaattttcttatttttgacccattagcagtcttgtatttacaaggttctaaaacttcactggtcattaacgcttcttttggcaatttgaaaaaaaaaagttacatttaatagactattacacattttcttttgctatgttcaactactaaacttctaattctgttacaaaaggtatcttgaatttttaatgttcctttatgtaaataggataaacttgtacctggacatatctatattattaaccttaagatccctaaataaatgggtttgataaagggttgaatttgggggaatcattaaaattatcaaacctttcgtataaccagatgctcagttttttcagaagtaaatattagatggctttttcatactgtgagatgaggcatttctttttctcctcaagctgatctcagaaacaaatcagtctctcatcagtaaccaagctgtactgtggtaaattatgaagaaggtagatgcgactggtccaatgggcccactgttttgtatattcacacaaggaggcatctttgaaacactatacctatctctttctctaaaaaaaaaaaaaaaaaaaaaaaaaaaacctttccaataaatgttcattctgagtacattaatttttagtgagaaaaagaaacaatcatagagaccccactagagaacctagtgtctgctcagcaaacccatattgagctgtagagcatactttaacagccatctcaaccagctcacccaacgtgtaaattcccttcccatttgggcatagaagttgacagcctagagtgtcaggacggccgagtggtctgaggctccagactcaaggtgagaagctgaaaacctacttgagccaaacaatttggagtgctttatatggttcctttctcaagacccacacaggataaaattttgttgatttactaaagtaatttggatttgaggcagtcttatctctgaaaggatatgcacagcatgtaataaggtgggtgctgttttcataaagagaatcaatctgagaggcatacttttaaaaaaaaaactatcattggagaggttagcaaaggcttaaaagtgaactttgagtctgcaatagtcaatagtattctgattttattggcagtttctgaatgctacaatttcgtgtttttttttaaaaaaatgggctaacagtgcgatgacagtcatgtacaaggagtccaattaaatcatagtaagggtgaagattatttgtgatttatttttatatgagagataaattagtaaggagaaaagatctctttttatgaagtggatatctggctctcaaacccattccttttggctcagacattaaaaaattattaattcccttatggactctcctattccccatgggcggaaaattctgaaaagcagatgagacattctgagccccttgcaagacaaacacagatggtttctaatttagagttttcccacacaaatgcacaaccaatcttggaaatatgacctcaattcccaggattaaaaacgttgaaattatatgttactttccaatataaatagaggatgaagatctttaaagacaactcagaaaatatgatccaataacattcaaatcagagcgtaatctacaatttcacttaatagttaaaagtgaagattagctgcttctttaaaaggggtgagttattaaaggcaacatcctagaaaatgtaataacaagaaggcaacaccatattttcagcaaagttatggtactgataaagcactttgaaaatcctctgtaggaaaatgtcattgagaaacaaaggccaatttgtctccagtgataaagctatctctcattcatatttcataggtggatctatagttttcctggtgtcttggagagaccctacctccacagctcctgcaggagcaaaaccatgttttctgccatgtgagctctctacactggccacagctgattgtaccaaggttcagtacccgacccaaagagactcattttcaggccagagggcggcctaaggaatgaaagtgtacctagcagtggtattcttgtttgatggtacctggccccaccaatcacggccctcttttagggagtttgaacaccagaaagtaaatgatgaataggaagcacagccagaatagacacagtcaccgtaatggtgactctgagaacagtgacagcagttacttctgcagtcaagacaatttgaggtcttgttgattcaccattctgctcttagcttactggagaaatacttgactcctgaacaatgagtctggactttgtagttcctgggttgctttttttttttcttcctttcttatgtattgacataaataaactcacattaactgaa

SEQ ID NO: 15901 - DNA, 2830 bp, Homo sapiens
  source 1..2830: mol_type = unassigned DNA
attctctgcctctgaaggctccagaggctgtgggaagcagcacatcagcgacagctcctggctgctggactccgcagggagggaaggaagattggtcgcaatgtcccagcagaagtgcatcgtgatctttgccctggtgtgctgctttgccattctggttgcactgatcttttcagccgtggacatcatgggagaggatgaggatggactctcagaaaaaaattgccaaaataaatgtcggtaagagggtcaacgtctttttgaaaagttgctccagctgacttcgcaaaatattgaaatcaagctagtgagtgatgtaacagctgattcaaaggtattagaagccttgaaattaaagggagccgaggtgacgtacatgaacatgaccgcttacaacaagggccggctgcagtcctccttctggatcgtggacaaacagcacgtgtatatcggcagtgccggtttggactggcaatccctgggacagatgaaagaactcggtgtcatcttctacaactgcagctgcctggtcctagatttacaaaggatatttgctctatatagttcattaaaattcaaaagcagagtgcctcaaacctggtccaaaagactctatggagtctatgacaatgaaaagaaattgcaacttcagttgaatgaaaccaaatctcaagcatttgtatcgaattctccaaaactcttttgccctaaaaacagaagttttgacatagatgccatctacagtgtgatagatgatgccaagcagtatgtgtacatcgctgtcatggactacctgcctatctccagcacaagcaccaaaaggacttactggccagacttggatgcaaaaataagagaagcattagttttacgaagcgttagagttcgactccttttaagcttctggaaggaaactgatccccttacgtttaactttatttcatctcttaaagcgatttgcactgaaatagccaactgcagtttgaaagttaaattttttgatctggaaagagagaatgcttgtgctacaaaagaacaaaagaatcacacctttcctaggttaaatcgcaacaagtacatggtgacagatggagcagcttatattggaaattttgattgggtagggaatgatttcactcagaatgctggcacgggccttgttatcaaccaggcagatgtgaggaacaacagaagcatcattaagcaacttaaagatgtgtttgaaagggactggtattcaccgtatgccaaaaccttacagccaaccaaacagccgaactgctcaagcctgttcaaactcaaacccctctccaacaaaactgccacagacgacacaggcggaaaggatccccggaacgtataacatgatgaagaaactgacaggacagctctgtatttcatatttatacataaaggacttgaggagagaaaaaacactttaatatgtctctttttttagggaaaaagcacacttataaaaaatattctctgaacaacacataatacctatctaacaatatcttagcgtcgtgtacactaaaattaagacttttgtatttgttacctctgacagagaatgtcattctggcgtagaagttagtttttacgtttgcatacaaattttaagactttcattcctgctcctttctagttttagaactttttctgctgacctacccggtcagttgttaggaagcttagcatgaggtgggctctttaacaccattctgagaactgttgatttagagaggaaggtgaggattttgccttggagaagagactgataaaaccaagtgtttattcttgtaaatcgtctccaagacctacacagtcagctaagcatgaatagcttacatctcatgccagccttcaacacccttgaaaaatatccttttctgtcttgctcattttcttcttataccataagttttatttggtatcattttctcttctcacaaaatgttcctattatatagcattttctgtattcacctcaacattacttctaactatgataacatcttttgaaaacatacaaatttttcagaatggatactaagtggaaatagcagtctttcattttcacctttcaactgaatccttttttcccctaccgaattggtatttaaaaaaaatcacagtcagcaatatgtatcctttctctcaagctcagaaaaattatgtagccacctgctaatatccagcaagctatcaagtctgcattttgggaataaagtagtttttcacatttttgttcagtttatggtattataaaggaaaaaatctctatgcgtcagtggattttaatttctttagaatcattatgctgttaagagtatgccagcaaacgtttctagagctatttaatataccttctgctatttaatataccaaatgcttttcagagaaatgcaatttaaatactgtgcttaacatattttactaagaagcagaaatattgaattattgttctataacgtaattgtgtgttgttgttttatatctatacaatatatacccctgtattaatggagaccattgctacactagggagaggcatggcctcttcagagcccacagcaggtggccgggatgtccagttccaatgttgttcccgactctgtgactcaaagcggagcccctcactgcttggcctcgggcttctcttggtaatgtagacggtaataactcacctacctcgcaaggatgttgtcacggtaggaaatatttataacttgttttgaaatcaaaagaacctatataaatgctaagcattataatatataatctttttcttgaaataaactttgtcatatcttgatggaatcaa

SEQ ID NO: 15902 - DNA, 2729 bp, Homo sapiens
  source 1..2729: mol_type = unassigned DNA
gtaggtgccgcaaggagccggcgagcggagcgcccgctcgggaccgcagccgccgggcgacgtcgccgccgcaccgggcacttctgtctccccggagcagctcctccagctcagtctccagctccacctccggctcccgctgggcctcccgctcgccctccgcgcccggctccccgcgcgcccgtcccgagtccgctgctcgccggcggccgcccggtcatgtcaggatggagatccggcagcacgagtggctctcggcctccccccatgagggcttcgagcagatgaggctcaaaagccgccccaaggagccctccccaagcctgacccgagtgggcgcgaacttctacagcagcgtcaagcagcaggactacagcgccagcgtctggcttcggaggaaagacaagctggagcactcccagcagaagtgcatcgtgatctttgccctggtgtgctgctttgccattctggttgcactgatcttttcagccgtggacatcatgggagaggatgaggatggactctcagaaaaaaattgccaaaataaatgtcggtaagagaattgccctggtggaaaatattcctgaaggccttaactattcagaaaatgcaccatttcacttatcacttttccaaggctggatgaatttactcaacatggccaaaaagtctgttgacatagtgtcttcccattgggatctcaaccacactcatccatcagcatgtcagggtcaacgtctttttgaaaagttgctccagctgacttcgcaaaatattgaaatcaagctagtgagtgatgtaacagctgattcaaaggtattagaagccttgaaattaaagggagccgaggtgacgtacatgaacatgaccgcttacaacaagggccggctgcagtcctccttctggatcgtggacaaacagcacgtgtatatcggcagtgccggtttggactggcaatccctgggacagatgaaagaactcggtgtcatcttctacaactgcagctgcctggtcctagatttacaaaggatatttgctctatatagttcattaaaattcaaaagcagagtgcctcaaacctggtccaaaagactctatggagtctatgacaatgaaaagaaattgcaacttcagttgaatgaaaccaaatctcaagcatttgtatcgaattctccaaaactcttttgccctaaaaacagaagttttgacatagatgccatctacagtgtgatagatgatgccaagcagtatgtgtacatcgctgtcatggactacctgcctatctccagcacaagcaccaaaaggacttactggccagacttggatgcaaaaataagagaagcattagttttacgaagcgttagagttcgactccttttaagcttctggaaggaaactgatccccttacgtttaactttatttcatctcttaaagcgatttgcactgaaatagccaactgcagtttgaaagttaaattttttgatctggaaagagagaatgcttgtgctacaaaagaacaaaagaatcacacctttcctaggttaaatcgcaacaagtacatggtgacagatggagcagcttatattggaaattttgattgggtagggaatgatttcactcagaatgctggcacgggccttgttatcaaccaggcagatgtgaggaacaacagaagcatcattaagcaacttaaagatgtgtttgaaagggactggtattcaccgtatgccaaaaccttacagccaaccaaacagccgaactgctcaagcctgttcaaactcaaacccctctccaacaaaactgccacagacgacacaggcggaaaggatccccggaacgtataacatgatgaagaaactgacaggacagctctgtatttcatatttatacataaaggacttgaggagagaaaaaacactttaatatgtctctttttttagggaaaaagcacacttataaaaaatattctctgaacaacacataatacctatctaacaatatcttagcgtcgtgtacactaaaattaagacttttgtatttgttacctctgacagagaatgtcattctggcgtagaagttagtttttacgtttgcatacaaattttaagactttcattcctgctcctttctagttttagaactttttctgctgacctacccggtcagttgttaggaagcttagcatgaggtgggctctttaacaccattctgagaactgttgatttagagaggaaggtgaggattttgccttggagaagagactgataaaaccaagtgtttattcttgtaaatcgtctccaagacctacacagtcagctaagcatgaatagcttacatctcatgccagccttcaacacccttgaaaaatatccttttctgtcttgctcattttcttcttataccataagttttatttggtatcattttctcttctcacaaaatgttcctattatatagcattttctgtattcacctcaacattacttctaactatgataacatcttttgaaaacatacaaatttttcagaatggatactaagtggaaatagcagtctttcattttcacctttcaactgaatccttttttcccctaccgaattggtatttaaaaaaaatcacagtcagcaatatgtatcctttctctcaagctcagaaaaattatgtagccacctgctaatatccagcaagctatcaagtctgcattttgggaataaagtagtttttcac

SEQ ID NO: 15903 - DNA, 1353 bp, Homo sapiens
  source 1..1353: mol_type = unassigned DNA
cggagcgcccgctcgggaccgcagccgccgggcgacgtcgccgccgcaccgggcacttctgtctccccggagcaggttcctttccctccctgtcccctctcgtcccccttctccccgtccgtccccctccgcccccgcccccgcccccgcccgcacctcgccctccctccttccgccccgcgcctcccgcgatcgccccctcccgcccggccgcgctcccagctggcgctcagcaccccgcgctccccgcgcccgctcgctcctccagctcctccagctcagtctccagctccacctccggctcccgctgggcctcccgctcgccctccgcgcccggctccccgcgcgcccgtcccgagtccgctgctcgccggcggccgcccggtcatgtcaggatggagatccggcagcacgagtggctctcggcctccccccatgagggcttcgagcagatgaggctcaaaagccgccccaaggagccctccccaagcctgacccgagtgggcgcgaacttctacagcagcgtcaagcagcaggactacagcgccagcgtctggcttcggaggaaagacaagctggagcactcccagcagaagtgcatcgtgatctttgccctggtgtgctgctttgccattctggttgcactgatcttttcagccgtggacatcatgggagaggatgaggatggactctcagaaaaaaattgccaaaataaatgtcgaattgccctggtggaaaatattcctgaaggccttaactattcagaaaatgcaccatttcacttatcacttttccaaggctggatgaatttactcaacatggccaaaaagtctgttgacatagtgtcttcccattgggatctcaaccacactcatccatcagcatgtcagggtcaacgtctttttgaaaagttgctccagctgacttcgcaaaatattgaaatcaagctagtgagtgatgtaacagctgattcaaaggagccgaggtgacgtacatgaacatgaccgcttacaacaagggccggctgcagtcctccttctggatcgtggacaaacagcacgtgtatatcggcagtgccggtttggactggcaatccctgggacagatgaaagaactcggtgtcatcttctacaactgcagctgcctggtcctagatttacaaaggatatttgctctatatagttcattaaaattcaaaagcagagtgcctcaaacctggtccaaaagactctatggagtctatgacaatgaaaagaaattgcaacttcagttgaatgaaaccaaatctcaagcatttgtatcggtgagttgttttccctttctcctccccttctccttcttcctccaaaggct

SEQ ID NO: 15904 - DNA, 557 bp, Homo sapiens
  source 1..557: mol_type = unassigned DNA
gaaaagttgctccagctgacttcgcaaaatattgaaatcaagctagtgagtgatgtaacagctgattcaaaggtattagaagccttgaaattaaagggcaaatgaattaacagggatgcaggaggctttttctgaaggacttttccccactctctgcactggaagacacgagaactacactaaaataatgttccaggcaaagccttctgttaacaacatgcctctctgtgaggtgtgtgatgaggatctctgggccagcatagcccttccttgaaaggaagttggacaccaacagcttcaagaacggcaaggagcacagcaggttcctactccagcttgcgatgtgatcattgcctgaagcttcttctcttgttaattagagaacctgattcttctaaagtgtctccactctcctttataacatacagacacatgctttccctccttctcccccaaatcctgatactctcatattcttcttaccattcccttcctttccatggcccaggagcatttcccatttgaaatttctgagtttctcagactgaatgaagact

SEQ ID NO: 15905 - DNA, 490 bp, Homo sapiens
  source 1..490: mol_type = unassigned DNA
gggaagcagcacatcagcgacagctcctggctgctggactccgcagggagggaaggaagattggtcgcaatgtcccagcagaagtgcatcgtgatctttgccctggtgtgctgctttgccattctggttgcactgatcttttcagccgtggacatcatgggagaggatgaggatggactctcagaaaaaaattgccaaaataaatgtcgaattgccctggtggaaaatattcctgaaggccttaactattcagaaaatgcaccatttcacttatcacttttccaaggctggatgaatttactcaacatggccaaaaagtctgttgacatagtgtcttcccattgggatctcaaccacactcatccatcagcatgtcagggtcaacgtctttttgaaaagttgctccagctgacttcgcaaaatattgaaatcaagctagtgagtgatgtaacagctgattcaaaggtattagaagccttgaaattaaagg

SEQ ID NO: 15906 - DNA, 3305 bp, Homo sapiens
  source 1..3305: mol_type = unassigned DNA
gtaggtgccgcaaggagccggcgagcggagcgcccgctcgggaccgcagccgccgggcgacgtcgccgccgcaccgggcacttctgtctccccggagcagctcctccagctcagtctccagctccacctccggctcccgctgggcctcccgctcgccctccgcgcccggctccccgcgcgcccgtcccgagtccgctgctcgccggcggccgcccggtcatgtcaggatggagatccggcagcacgagtggctctcggcctccccccatgagggcttcgagcagatgaggctcaaaagccgccccaaggagccctccccaagcctgacccgagtgggcgcgaacttctacagcagcgtcaagcagcaggactacagcgccagcgtctggcttcggaggaaagacaagctggagcactcccagcagaagtgcatcgtgatctttgccctggtgtgctgctttgccattctggttgcactgatcttttcagccgtggacatcatgggagaggatgaggatggactctcagaaaaaaattgccaaaataaatgtcgaattgccctggtggaaaatattcctgaaggccttaactattcagaaaatgcaccatttcacttatcacttttccaaggctggatgaatttactcaacatggccaaaaagtctgttgacatagtgtcttcccattgggatctcaaccacactcatccatcagcatgtcagggtcaacgtctttttgaaaagttgctccagctgacttcgcaaaatattgaaatcaagctagtgagtgatgtaacagctgattcaaaggtattagaagccttgaaattaaagggagccgaggtgacgtacatgaacatgaccgcttacaacaagggccggctgcagtcctccttctggatcgtggacaaacagcacgtgtatatcggcagtgccggtttggactggcaatccctgggacagatgaaagaactcggtgtcatcttctacaactgcagctgcctggtcctagatttacaaaggatatttgctctatatagttcattaaaattcaaaagcagagtgcctcaaacctggtccaaaagactctatggagtctatgacaatgaaaagaaattgcaacttcagttgaatgaaaccaaatctcaagcatttgtatcgaattctccaaaactcttttgccctaaaaacagaagttttgacatagatgccatctacagtgtgatagatgatgccaagcagtatgtgtacatcgctgtcatggactacctgcctatctccagcacaagcaccaaaaggacttactggccagacttggatgcaaaaataagagaagcattagttttacgaagcgttagagttcgactccttttaagcttctggaaggaaactgatccccttacgtttaactttatttcatctcttaaagcgatttgcactgaaatagccaactgcagtttgaaagttaaattttttgatctggaaagagagaatgcttgtgctacaaaagaacaaaagaatcacacctttcctaggttaaatcgcaacaagtacatggtgacagatggagcagcttatattggaaattttgattgggtagggaatgatttcactcagaatgctggcacgggccttgttatcaaccaggcagatgtgaggaacaacagaagcatcattaagcaacttaaagatgtgtttgaaagggactggtattcaccgtatgccaaaaccttacagccaaccaaacagccgaactgctcaagcctgttcaaactcaaacccctctccaacaaaactgccacagacgacacaggcggaaaggatccccggaacgtataacatgatgaagaaactgacaggacagctctgtatttcatatttatacataaaggacttgaggagagaaaaaacactttaatatgtctctttttttagggaaaaagcacacttataaaaaatattctctgaacaacacataatacctatctaacaatatcttagcgtcgtgtacactaaaattaagacttttgtatttgttacctctgacagagaatgtcattctggcgtagaagttagtttttacgtttgcatacaaattttaagactttcattcctgctcctttctagttttagaactttttctgctgacctacccggtcagttgttaggaagcttagcatgaggtgggctctttaacaccattctgagaactgttgatttagagaggaaggtgaggattttgccttggagaagagactgataaaaccaagtgtttattcttgtaaatcgtctccaagacctacacagtcagctaagcatgaatagcttacatctcatgccagccttcaacacccttgaaaaatatccttttctgtcttgctcattttcttcttataccataagttttatttggtatcattttctcttctcacaaaatgttcctattatatagcattttctgtattcacctcaacattacttctaactatgataacatcttttgaaaacatacaaatttttcagaatggatactaagtggaaatagcagtctttcattttcacctttcaactgaatccttttttcccctaccgaattggtatttaaaaaaaatcacagtcagcaatatgtatcctttctctcaagctcagaaaaattatgtagccacctgctaatatccagcaagctatcaagtctgcattttgggaataaagtagtttttcacatttttgttcagtttatggtattataaaggaaaaaatctctatgcgtcagtggattttaatttctttagaatcattatgctgttaagagtatgccagcaaacgtttctagagctatttaatataccttctgctatttaatataccaaatgcttttcagagaaatgcaatttaaatactgtgcttaacatattttactaagaagcagaaatattgaattattgttctataacgtaattgtgtgttgttgttttatatctatacaatatatacccctgtattaatggagaccattgctacactagggagaggcatggcctcttcagagcccacagcaggtggccgggatgtccagttccaatgttgttcccgactctgtgactcaaagcggagcccctcactgcttggcctcgggcttctcttggtaatgtagacggtaataactcacctacctcgcaaggatgttgtcacggtaggaaatatttataacttgttttgaaatcaaaagaacctatataaatgctaagcattataatatataatctttttcttgaaataaactttgtcatatcttgatggaatcaa

SEQ ID NO: 15907 - DNA, 3018 bp, Homo sapiens
  source 1..3018: mol_type = unassigned DNA
ggtgatacgtttgtgccacatgaaacattctctgcctctgaaggctccagaggctgtgggaagcagcacatcagcgacagctcctggctgctggactccgcagggagggaaggaagattggtcgcaatgtcccagcagaagtgcatcgtgatctttgccctggtgtgctgctttgccattctggttgcactgatcttttcagccgtggacatcatgggagaggatgaggatggactctcagaaaaaaattgccaaaataaatgtcgaattgccctggtggaaaatattcctgaaggccttaactattcagaaaatgcaccatttcacttatcacttttccaaggctggatgaatttactcaacatggccaaaaagtctgttgacatagtgtcttcccattgggatctcaaccacactcatccatcagcatgtcagggtcaacgtctttttgaaaagttgctccagctgacttcgcaaaatattgaaatcaagctagtgagtgatgtaacagctgattcaaaggtattagaagccttgaaattaaagggagccgaggtgacgtacatgaacatgaccgcttacaacaagggccggctgcagtcctccttctggatcgtggacaaacagcacgtgtatatcggcagtgccggtttggactggcaatccctgggacagatgaaagaactcggtgtcatcttctacaactgcagctgcctggtcctagatttacaaaggatatttgctctatatagttcattaaaattcaaaagcagagtgcctcaaacctggtccaaaagactctatggagtctatgacaatgaaaagaaattgcaacttcagttgaatgaaaccaaatctcaagcatttgtatcgaattctccaaaactcttttgccctaaaaacagaagttttgacatagatgccatctacagtgtgatagatgatgccaagcagtatgtgtacatcgctgtcatggactacctgcctatctccagcacaagcaccaaaaggacttactggccagacttggatgcaaaaataagagaagcattagttttacgaagcgttagagttcgactccttttaagcttctggaaggaaactgatccccttacgtttaactttatttcatctcttaaagcgatttgcactgaaatagccaactgcagtttgaaagttaaattttttgatctggaaagagagaatgcttgtgctacaaaagaacaaaagaatcacacctttcctaggttaaatcgcaacaagtacatggtgacagatggagcagcttatattggaaattttgattgggtagggaatgatttcactcagaatgctggcacgggccttgttatcaaccaggcagatgtgaggaacaacagaagcatcattaagcaacttaaagatgtgtttgaaagggactggtattcaccgtatgccaaaaccttacagccaaccaaacagccgaactgctcaagcctgttcaaactcaaacccctctccaacaaaactgccacagacgacacaggcggaaaggatccccggaacgtataacatgatgaagaaactgacaggacagctctgtatttcatatttatacataaaggacttgaggagagaaaaaacactttaatatgtctctttttttagggaaaaagcacacttataaaaaatattctctgaacaacacataatacctatctaacaatatcttagcgtcgtgtacactaaaattaagacttttgtatttgttacctctgacagagaatgtcattctggcgtagaagttagtttttacgtttgcatacaaattttaagactttcattcctgctcctttctagttttagaactttttctgctgacctacccggtcagttgttaggaagcttagcatgaggtgggctctttaacaccattctgagaactgttgatttagagaggaaggtgaggattttgccttggagaagagactgataaaaccaagtgtttattcttgtaaatcgtctccaagacctacacagtcagctaagcatgaatagcttacatctcatgccagccttcaacacccttgaaaaatatccttttctgtcttgctcattttcttcttataccataagttttatttggtatcattttctcttctcacaaaatgttcctattatatagcattttctgtattcacctcaacattacttctaactatgataacatcttttgaaaacatacaaatttttcagaatggatactaagtggaaatagcagtctttcattttcacctttcaactgaatccttttttcccctaccgaattggtatttaaaaaaaatcacagtcagcaatatgtatcctttctctcaagctcagaaaaattatgtagccacctgctaatatccagcaagctatcaagtctgcattttgggaataaagtagtttttcacatttttgttcagtttatggtattataaaggaaaaaatctctatgcgtcagtggattttaatttctttagaatcattatgctgttaagagtatgccagcaaacgtttctagagctatttaatataccttctgctatttaatataccaaatgcttttcagagaaatgcaatttaaatactgtgcttaacatattttactaagaagcagaaatattgaattattgttctataacgtaattgtgtgttgttgttttatatctatacaatatatacccctgtattaatggagaccattgctacactagggagaggcatggcctcttcagagcccacagcaggtggccgggatgtccagttccaatgttgttcccgactctgtgactcaaagcggagcccctcactgcttggcctcgggcttctcttggtaatgtagacggtaataactcacctacctcgcaaggatgttgtcacggtaggaaatatttataacttgttttgaaatcaaaagaacctatataaatgctaagcattataatatataatctttttcttgaaataaactttgtcatatcttgatggaatcaa

SEQ ID NO: 15908 - DNA, 3999 bp, Homo sapiens
  source 1..3999: mol_type = unassigned DNA
gatgctgccggcccgaggctgagccaccctccccgcggagttcccgcccggccctctgcaatccggagcccaagccgccggctacgcgccctgcgcccccttggtgccgcgtccagtgcccagcgcgctttgatgctgcagctccgggccgggccgctctgcttctctgctcgctgggacgctctccgacggctccgccctcgcctctcgccccgagtccctgctgaccccggggaggtggggtccgggccgggcacagccccgctgaggcaggatgttcacgtccaagtccaactcggtgtcgccctcgccgtccctggagcaggctgactcggacgccctggatatcagcaccaaagtgcagctctacggcgtgctgtggaagaggcctttcggcaggccgtcggccaagtggtcccggcggtttttcatcatcaaagagagctttctgctttactactctgagagcgaaaaaaagagctttgaaaccaataaatacttcaatatacatcctaaggtgaggcggcccctcccagggccacagcaggggagggcccagtgcgggcatcagagcttgcatcttgtgaggggaggggactgcgctcttgctctggcctagcagagagtctggagagcaaatcctcttggggcaaaagaccccctgcccctgtcctgggctggaccctcactctcctgtgccccagaccctgccccaacccttcctcttctctctgaacatcagttctggcctctgtcccatggccccagggtctagcttccatcctggggcacttggcaggaactggctttgtccaggggcccccagaacccctgagtgaccccagttgggtggggtgggggctgcctgttctggttcttcctcagggcgtcatccctctggggggctgcctggtggagcccaaggaagagcctagcatgccctatgccatgaagatctcccaccaggacttccatgtgagtaaagctcttccctcagcctgggctccgcaggagcagaccagcctctcaggcctcttcaggacacacatcccatgtcctggcctgggagaggggcatcagcacccagggatgtggggtgggtgacagggcagagctgggcctccatcaccctcagcgtggctgcctctcaggcatgcgcatggctcctcttcctggcaggggaacatcttgcttgctgctgagtcggagtttgagcagacccagtggctggagatgctgcaggagtctgggaaggtgtaagtgctcacagccaggagggcagcctgcagatccaggatggggtgggcggggctgcccctgaactccctgcctctctgctgggatcctggtgggcacagggccagggctgtgggagatggctagggtaggggagagcagacaggccaggttttagagcatctgtgaggggtcccctgagtgagcttgaaaagtgtctaggtcacaggtggcaggtgtgggtaccatttgtctccaactcttgggagttgtatttgatgcctcctgacacccatctcacctccccaggcccataattaattctagcaaggactagagctagtgctttgtaaattagggtcaagatcacagaaatctcctgccaacccagtccatttttatgtaaaccactgtcctgacacctgcctagtcaggctaggtcatgcttttagttccaaaaacaccgaccgtgtgctctgtggcaggccttgcactgggtagcggacattcagtaatgtaaaaaagccacccaggaagcaatctcctccctgctctaaaagtgctgttggcccagcccccagtggcccactttgcagcctgggccagcctccagctactgtaactgatccgtgctggtgacatgcccagagccatgggtgccagagtgaatgcaagttgagattctggaggagaaagggtgggcgagtacaaaacgtatgccttctctttcccctctacccttctgttttaatgattttctgtttcttcctcttctctcctctgtcccatctgccctccctccccaggacctggaagaatgcccagctgggagaagccatgatcaaaagcctggaggcccaggggctgcagttggctaaggaaaagcaggagtatttaggttggctggaggggtggttccctaatggtagcagcacttggggaccaggggctatagccaggggcttggtaaaggatgcagcagggatgagggtctctcaggtggggctatgagggaacagagaccagtttggcacctggagggcttcctggtacactacgcatccttttggccaacatgactgaaggcaggagcgtctgatggttaagagcctgggctctggatccagcttcatcatttgtcacccatctcagctgtgtatatctttaggcagctcagcctctctaagcctcaatttcctcatccttaaaatcgagttaaaaatagtctctagcttttagaggattgggttaaatgagacaatgtctgtaagtgcttgagccagacatgcagtaagggctccataagtggagttgatgttgttatcctatcctgggtccccagggtctggcttgtccccagtacccttgccccaggccattttaaaccttgccacagcattccagaccttgtgcccctgacaggttggtaaacatgcactgtttgggagagaagatgagactgagggtttgccttcagcctgggaccctctcccctctgcctgcttagacacttggggccccagcacttgctcccctatgcctgcttcagaacttcctaggttctgccctccttactagccagacattagtgcaggtggaaggtgggtgtgggactagcccaggtgcagcaggcctgggggatgcagagactgctttgaacttccaaggatgaggcccctcataaccctaggaaaagaaaaagcaggatgatgatgggggaaggagggtggcagcttccatcaccaggagctggcccaccctctggctggcagggctgcaggccccttccttgggagatgctgggggtgacagcgaccacctcaggcaccagctccctcaggacctcagagcactttcctgattgtgtgtgcatgtgtgtgtgtgtgcttgttttggcagacaaactgatggaagagaccgaagaactctgccttcagagggagcagagagaggtaggtgcacaccaaggggctctcagcagccgtggtgtaatggctcacgtttctagcactagggaatgatgcaggggagctgggtgcacagaggacttgctagaagatcagatggggcagggcggggaggccaaatgggatcacagtgcttgcttgggacttgctgtaacttgttggtaagaagtgtctttctccttaccaacccctgggagtaaagtgaaaagggtgggtgatgaccttctagagaaagagccatccaaagtgtcatcagctgcatcagttggtaatgagctgcttgtcaatgatgttcacgggagctataatgccctctgttatccatagagggctatctggcacctgagggtgattgggcttgatgatctcagaagttccttcattctctgaatgtcaaaagtccacagcaggctaagcactggcttgaggcagactggagggtaaaggagactcttgccttgtgtgaaggaggggagccaccgaagccctcttcttcatttagaatctcagtgcaggctgggcgcagtggctcacgcctgtaatcccagcactgtgggaggccaaggcgggtggatcacctgaggtcgggaattcaagaccagcctggccaacatggtgaaaccccgtctctactaaaaatacaaaaataagccgggcgtggtagcgggcgcctgtagtcccagctactcgggaggctgaggcaggagaatggcgtgaacccgggaggcggagcttgcagtgagccgagatcgcgccactgcactccagcctgggcgacagagcgagactccgtctc

SEQ ID NO: 15909 - DNA, 4865 bp, Homo sapiens
  source 1..4865: mol_type = unassigned DNA
ccggagcccaagccgccggctacgcgccctgcgcccccttggtgccgcgtccagtgcccagcgcgctttgatgctgcagctccgggccgggccgctctgcttctctgctcgctgggacgctctccgacggctccgccctcgcctctcgccccgagtccctgctgaccccggggaggtggggtccgggccgggcacagccccgctgaggcaggatgttcacgtccaagtccaactcggtgtcgccctcgccgtccctggagcaggctgactcggacgccctggatatcagcaccaaagtgcagctctacggcgtgctgtggaagaggcctttcggcaggccgtcggccaagtggtcccggcggtttttcatcatcaaagagagctttctgctttactactctgagagcgaaaaaaagagctttgaaaccaataaatacttcaatatacatcctaagggcgtcatccctctggggggctgcctggtggagcccaaggaagagcctagcatgccctatgccatgaagatctcccaccaggacttccatgggaacatcttgcttgctgctgagtcggagtttgagcagacccagtggctggagatgctgcaggagtctgggaaggtgacctggaagaatgcccagctgggagaagccatgatcaaaagcctggaggcccaggggctgcagttggctaaggaaaagcaggagtatttagacaaactgatggaagagaccgaagaactctgccttcagagggagcagagagaggagcttgagcgccttaaccaggtgctggaggccgagaagcagcagttcgaggaggtggtgcaggagctgagaatggagcaggagcagatcaagagggagctggaactgactgcaagatgccttaagggtgtagaacaagagaaaaaggaactgaggcacctcacggagtccttgcagcagacactggaggaactctccatagagaagaagaaaaccctggaaatgctggaggagaacgagaaccacctgcagacactggccaatcagagtgagcagccccctcccagtgggggcctccatagcaacctccggcagatcgaggagaagatgcagcagctcttagaggagaagctcctggcagagaagcggatgaaggagaacgaggagcgctcacgggccctggaggaggagcgtgagttctactccagccagtcccaggcactgcagaactcgctgcaggagctgacggcagagaagcagcaggctgagcgggagctcaaggctgaggtgaaggtccgcatggacctggagaggcgtctccgggaggcagaaggggccttgcgaagcctggaacaggggctgaattccaaggtgcggaataaggagaaggaggagaggatgcgggctgatgtgagccatctgaaaaggttctttgaggagtgcatccggaatgccgagctggaggccaagatgcctgtgatcatgaagaactccgtgtacatccataaggcagccactcgccgcatcaagagctgccgcttccaccgacgccggtccagcacctcctggaatgacatgaagccgtcccagtccttcatgacctcccagctggatgccaacaacatggaggagctaaaggaggtggccaagcggctcagcagggaccagcgcttccgggaatccatctaccacatcatggccacccagcctggagccccctcggcactctcccggggtggaaagtgatgggcgctcctcccctgcttcccaagtctcccctggatgggcgggggaggggaaggggtggcagagggaggcctcactctaccagctcctggcctctctggtctggagcctatgtctcctctgggccggagctccacttgggggccagccttgccctcaaaggacatggacgctgccttcctcatcctcaccccacaccccacctttgggtccacaccagggccatgcaggcctgagctgggtgctggttgtcatggtgaggtgaggacaggacctggttgtatgtggagatttgtgtcggttagggagtggggtggggaggtgctgtctaccactgtgccatcaggcagggtctgccccactgaggaagatggcagccctccctggtgcccactggacctctctgggactctgctgccctgcccgtggtcctcatgtagaaaggccttgcctccctaccttgacattcccttttccccagggtttcctaaccctccctttgcttctgacactcagcaaaatgtccctcagctgagacccctcatttacaccacatcatgctgtgcaggaggaaaggggcctaggacagcagcttctgggctcctgacataccacacacccgccacagtgccgcttttcctgagctcaggccctggctgtggggccacccactgattcccctcctcctctggtgagctcactcacagccttggcaccctgcaagggtagaatgatggcaccagtccctcctgcctgtgtacctagggccctggctgggagctggggccagcagtgatgctgggggctcccccagaggacacgtaacaagctcaggagtgggctgggcacagtggctcatgcctgtaatcccagcactttgagaggccgaggcgggaggattacttgaagtcaggagtttgagaccagcctggccaatacggcaaaaccctgtctctacaaaaaataaaaaaaataaaataaatagctgggcatggtggtgcatgcctgtagtcccagctacttgggagactgaaatgaggggattgattgagcctgggaggttgaggctgcagtgagctgagattgtgccactgcactccagccagggtaacagagcaagaccctgtctcaaacaaacacaaggaaaacaagctcaggagtgaaggaaagtcactctggttcctgcattatgtacttctggttgcgcagggaggcagtgttcctgctggtcgagagatcacagatatctccttcccagctgcccctgcttcagtcaccttgctgcctcctctccctgcagagatttcagcctgtgaagcaatgtgaccatgaactctggcagctggggaccctgggcctgtgatgaggccagtagtcattggttggctcagtgtcattgggagtgaagctgaaacgccaatctgcagcttctgtggaagaccaccaccctccagggggctgaagggtgtgtctgtctctcactcatggacagacagactgcccagaccctctccctgcaggcccaccctccaaagctacctgaggctattggcctccagaaaaggggtccacctgggatcagggtgctcttggacactgttgacattaaaggtgctcattctttgctgcttggaaaaccaagaagttctgagagataaacagatggcttcggggcaagtcccagcaaaaagtgcaagaacctgggagcccacaacctattctgtgggaagaggagcattgttgcctctaagaacacatgcacatctgctgctaggctggccgagcccaggccgggctgccctgctctttgctcagtgcttcctgccaaaactaatctcagtggttcctttcagtgatgggtggactttggtggcttcatacagtctctgcagaatctagctggggagagggctgagtcagtttggaataaatgcatttgacagggctgagcctaaatgtaaaactttaaacgtgtataacatgcataaacctggaacttgtttctctaacacgtatgaaggatgaactttgaattgaaggggaatatttataaaaccaagattactgtttccttttttttaaaagaattaatcatggcttgcttttagagagatctttcataattttcagatgcatttgtttttcttgggcgagctattaaccagacaggaaagtgctagtcttcgtttgctttgtactgctgtaacagaatacctgagactgggtaatttataaggaacagaaatgtactggctcacagatatggtggctaagacgtccaatatcaaggtgctggcatctggcaaggaccttcttgttgcatcatcccatggttgacaggcaaagagagggtgagagagcaagaggggccaaacttattcttttataacaaacccaccccctcgataatgacattaatcctttcataagggagagtcttcatggccaaatcacctcttaaatgttccacctcttgcggatcacctgaggtcaggagtttgagaccagcctggccaatatggcgaaaccccacctgtactaaaaatacaaaaattagctgggcgtggtggtgggtgcctatagtcccagctactcaggaggctgagacaggagaatcacttgaacctgggaggtggaggttgcagtgagccgagattgtgctattgtactccagcctgggcaacatgagtgaaactctgtctcagaaaaaaaaaaaaggtcccacctcttaatattgttacaatggcaatcaaatttctttttttaatcctgcaaactactgggatagtaattaaatttcagtgtgagtttgggagggaacaaacattcaaactgtagcagtgcttttccatgcacatttaccaatcgatacttcctcctattctcaccctgtattttccatgcctcaggcaagtctgaattatcttcagccaactgaacaatccataagtgtttattcgttaaaagctcactatgtacctagcactgtaaatagaaaaatagcaacatctctatatcaaaatacgtaggagtggaaattacttagtggagatatgttgatgtaatttttttaatttttaaaaacaaaactcttattccttggccaattaaatgcatttcctgcagtatcta

SEQ ID NO: 15910 - DNA, 635 bp, Homo sapiens
  source 1..635: mol_type = unassigned DNA
ccatgctgtctcgggaggcggtgatagcagaatctccctggggtgccctccccaggcagcaatgccaggatgcctgtgtccacctccctccaccaggatggcagccaggagcggccggtgagcctgacctctaccacctcctcgtcgggctcctcctgtgacagtcgcagtgccatggaggagcccagcagctccgaggctcccgccaagaatggggcaggctccctgagaagccggcatctgcccaacagcaacaacaactccagcagctggttgaacgtgaaggggcccctctccccgttcaacagccgggcagcggcagggcctgcacaccacaagctcagctacctgggccgagtggtgcgggagatcgtggagacagagcgcatgtacgtacaggacctgcgcagcatcgtggaggactacctcttgaagatcattgacacacccgggctgctgaagccagaacaggtcagcgccctctttgggaacatagaaaatatctacgcgctgaacagccagctcctcagagacctggacagctgcaatagtgaccccgtggctgtggccagctgctttgtggaaaggagccaagagtttgatatctacactcagtattgcaacaattaccccaa

SEQ ID NO: 15911 - DNA, 2118 bp, Homo sapiens
  source 1..2118: mol_type = unassigned DNA
cctcgctccctcctgccctcccgctgcagctccggctccgctcgacttcctgccgggcgctggcaagccgcgcgctgcctggggtctccgggggccgcgcttgcagctggccgagtccgggccagctgaggggctggcggtgggcgggagcggtcggcggcctcagccccttcagagagcgactttcaaactcgcgcccgcgtcgcggcagcacctgggcagccccgcacgccgtgcgcgtcccgagcccgcggggcagctaccgctcgaatctccctggggtgccctccccaggcagcaatgccaggatgcctgtgtccacctccctccaccaggatggcagccaggagcggccggtgagcctgacctctaccacctcctcgtcgggctcctcctgtgacagtcgcagtgccatggaggagcccagcagctccgaggctcccgccaagaatggggcaggctccctgagaagccggcatctgcccaacagcaacaacaactccagcagctggttgaacgtgaaggggcccctctccccgttcaacagccgggcagcggcagggcctgcacaccacaagctcagctacctgggccgagtggtgcgggagatcgtggagacagagcgcatgtacgtacaggacctgcgcagcatcgtggagagccaagagtttgatatctacactcagtattgcaacaattaccccaactccgtggccgccctgacggaatgcatgcgggacaagcagcaggccaagttctttcgggaccggcaggagctgctacagcactcgctgcccttgggctcctacctgctgaagccagtccagcgcatcctcaagtaccacctgctgctccaggaaattgccaagcattttgatgaagaagaggatggctttgaggtggtggaggatgccattgacaccatgacctgtgtggcctggtacatcaacgacatgaagaggaggcatgagcacgcggtccggctccaggagattcagtcactcctcatcaactggaaggggcccgacctgaccacctacggggagcttgtcctggagggcacattccgcgtgcatcgcgtgcgcaatgaaaggacctttttcctctttgacaaaacactgcttatcaccaagaagcggggcgatcactttgtctacaagggcaacatcccgtgctcctccctgatgctgatcgaaagcaccagagactccctgtgcttcactgtcacccactacaagcacagcaagcagcagtacagcatccaggccaagacagtggaggagaaacggaactggactcaccacatcaagaggctcatcctagagaaccaccatgccaccattccccagaaggccaaggaagccatcttggaaatggattcctattatcccaatcggtaccgctgcagcccagagcggctgaagaaggcttggtcctcccaggatgaggtgtccaccaatgtgcgccaggggcgccggcaatctgagccaaccaaacacctgctcaggcaactcaacgagaaagcccgagcagcaggaatgaagggaaaggggcgcagggagtctgaaagctccaggagcagcagaaggcccagtggccggtctccaaccagtactgagaagcgcatgagcttcgagtccatttcttccctgccagaggttgagccggaccctgaggctgggagtgagcaagaggtattttctgctgtggaagggcccagtgccgaggagacgccttcagacacagaatctccagaagtcctggagacacagcttgatgcccaccagggccttctggggatggaccccccaggtgacatggtggacttcgtggcagctgagagcactgaggaccttaaggccctgagcagcgaggaggaagaagaaatgggaggtgccgcccaggagcctgagagccttctgccaccctctgtgctggaccaggccagcgtcattgcggagcgatttgtcagcagcttctctcggcggagcagcgtggcacaggaggacagcaagtccagtggctttgggagcccgcggctggtcagccggagcagcagcgtgctcagcctggagggcagcgagaagggcctggcccggcatggcagtgccacagact

SEQ ID NO: 15912 - DNA, 10351 bp, Homo sapiens
  source 1..10351: mol_type = unassigned DNA
ctcagccccttcagagagcgactttcaaactcgcgcccgcgtcgcggcagcacctgggcagccccgcacgccgtgcgcgtcccgagcccgcggggcagctaccgctcgaatctccctggggtgccctccccaggcagcaatgccaggatgcctgtgtccacctccctccaccaggatggcagccaggagcggccggtgagcctgacctctaccacctcctcgtcgggctcctcctgtgacagtcgcagtgccatggaggagcccagcagctccgaggctcccgccaagaatggggcaggctccctgagaagccggcatctgcccaacagcaacaacaactccagcagctggttgaacgtgaaggggcccctctccccgttcaacagccgggcagcggcagggcctgcacaccacaagctcagctacctgggccgagtggtgcgggagatcgtggagacagagcgcatgtacgtacaggacctgcgcagcatcgtggaggactacctcttgaagatcattgacacacccgggctgctgaagccagaacaggtcagcgccctctttgggaacatagaaaatatctacgcgctgaacagccagctcctcagagacctggacagctgcaatagtgaccccgtggctgtggccagctgctttgtggaaaggagccaagagtttgatatctacactcagtattgcaacaattaccccaactccgtggccgccctgacggaatgcatgcgggacaagcagcaggccaagttctttcgggaccggcaggagctgctacagcactcgctgcccttgggctcctacctgctgaagccagtccagcgcatcctcaagtaccacctgctgctccaggaaattgccaagcattttgatgaagaagaggatggctttgaggtggtggaggatgccattgacaccatgacctgtgtggcctggtacatcaacgacatgaagaggaggcatgagcacgcggtccggctccaggagattcagtcactcctcatcaactggaaggggcccgacctgaccacctacggggagcttgtcctggagggcacattccgcgtgcatcgcgtgcgcaatgaaaggacctttttcctctttgacaaaacactgcttatcaccaagaagcggggcgatcactttgtctacaagggcaacatcccgtgctcctccctgatgctgatcgaaagcaccagagactccctgtgcttcactgtcacccactacaagcacagcaagcagcagtacagcatccaggccaagacagtggaggagaaacggaactggactcaccacatcaagaggctcatcctagagaaccaccatgccaccattccccagaaggccaaggaagccatcttggaaatggattcctattatcccaatcggtaccgctgcagcccagagcggctgaagaaggcttggtcctcccaggatgaggtgtccaccaatgtgcgccaggggcgccggcaatctgagccaaccaaacacctgctcaggcaactcaacgagaaagcccgagcagcaggaatgaagggaaaggggcgcagggagtctgaaagctccaggagcagcagaaggcccagtggccggtctccaaccagtactgagaagcgcatgagcttcgagtccatttcttccctgccagaggttgagccggaccctgaggctgggagtgagcaagaggtattttctgctgtggaagggcccagtgccgaggagacgccttcagacacagaatctccagaagtcctggagacacagcttgatgcccaccagggccttctggggatggaccccccaggtgacatggtggacttcgtggcagctgagagcactgaggaccttaaggccctgagcagcgaggaggaagaagaaatgggaggtgccgcccaggagcctgagagccttctgccaccctctgtgctggaccaggccagcgtcattgcggagcgatttgtcagcagcttctctcggcggagcagcgtggcacaggaggacagcaagtccagtggctttgggagcccgcggctggtcagccggagcagcagcgtgctcagcctggagggcagcgagaagggcctggcccggcatggcagtgccacagactccctcagctgtcagctctccccagaagtggacatcagtgtgggggtggccacagaggacagcccttctgtcaatgggatggagcccccaagcccaggctgcccagtggagcctgaccggtcttcctgcaagaagaaggaatcagcactctccacccgagaccggctgttgctagacaagattaagagctattatgaaaatgcagaacaccatgatgcaggcttcagcgtccgtcgccgggagagcctctcctacatccccaaaggactggtaagaaactccatctccaggttcaacagccttccccggccagacccagagccagtacctccagtggggagcaagagacaggtgggctcccggccgacttcgtgggccctgtttgagctcccaggaccaagccaggcagtcaaaggggacccacctcccatctcagatgctgagttccgcccatcttcagaaattgtgaagatctgggagggaatggagtcttccggagggagccctgggaaggggccaggccagggccaggccaatggctttgacctgcatgagccactcttcatcctggaggagcatgagctgggagccatcacagaggagtcggccactgcctccccggaaagctcctctcccactgaggggcgcagcccggcccacctggcccgggagctgaaagagctggtgaaggagctgagcagcagtacccagggggagctggtggccccactgcacccccgcatcgtgcagctctcccacgtaatggacagccacgtgagcgagcgcgtcaagaacaaggtctaccagctggcccgccagtacagcctccggatcaagagcaacaagccagtgatggccaggccaccactgcagtgggaaaaggtggcccctgagagggatgggaagagccccactgtgccctgtctacaggaagaggctggagagccattaggtggcaaaggtaagaggaagccggtgctgtctctatttgactatgagcagctgatggcccaggagcacagccctcccaagccctcctcggctggggagatgtcaccacagcgtttcttcttcaacccgtctgctgtcagccagaggaccacctcgcctgggggccggccctccgcccggagccccctcagccccacagagaccttcagctggcccgacgtccgtgagctctgctccaagtatgcctcccgcgatgaggcacgccgagcagggggcggccggccccgcggcccacccgtcaacaggagccactcggtgccggagaacatggtagagccacctctgtcgggcagggtgggccgctgccgcagcctgagcaccaagaggggccggggaggcggagaggctgcccaatcccctgggcctctgccccagagcaagccggatggaggcgagaccctgtatgtcactgcagacctcaccctggaggacaaccggcgggtgattgtcatggagaagggaccccttcccagccccactgcagggctggaggagagcagtggccagggaccaagctcaccggtggccctgctggggcaggttcaggacttccagcagtctgcagagtgccagccgaaggaagagggttccagggacccggcagacccgagccagcagggcagagtgagaaaccttagagagaagttccaggccttgaactctgtcggttgatgctgactcctgggggagggaggagtcatgttggaggttggggaagaacctgggcatccttcccctcaagcctgggctcatggagcccctgcccagggccctcaggtgggcggaaagtccatcccctccgcccttcaggaaggatgctcccgtgtgcaggggtctcctgcctgtgccatccactggggctcgagacaatttcccactcacctgtgaggccggtgtggctgcttcccttgtaaatagttgttctctggtaagaagccaaatatttaagctcacttcttcccagagagaggaagctctgctcaggcctccagcgttggctggccatggccacagccagatggaggagcccatccccaggagactcaggcagtggcctggagaggctttgttctgtaacggtgccttttcttagggtccaggcaggaatgaagccaataatttattgctttccattctgtggtatgatgtgcgtgtgcgtgagtgtgtggcccctgtttattcccctcctgtcaagaatgaagtggattcagttcaggtacttttgagggttgttgtgctgaccctgtggttgtcgctgatgtacacacatttcattatttgccaatggtgcaataaccactgctgaccaacccactatgtgtgaactccttcctaggcttggctggggtagggaaggttattcatgggccagggatgtcttagggagatggagacatggaggttgttccttccacactcaattgtcacttgggcttatgaaacataaggcacccgggtactggtgggggaggtggggcaggaggatgtgagggcgggctttttctttctgctgcctagactcccatgggcttctctgtctagcagcagcctgctgtcctgtctagggtagggggtcccgcatgccagccttttgctcttttccccaagggccagagttggaccaagaaaaagggaggtggtgaggtggatagactgtttttctcataagcagatgctcccagtatctggtgccttttgcgtttctctccggtccccaggaaacatcctagaagacaaggattttttttttttttttttttgagacagagtcttattctgtcacccaggctggagtgcaatggcgtgatcttggcttactgcaacctccgcctcccaggttcaagcaattctcgttgtctcagcctcccaggtcgctgggactacaggcatgagccaccacacccagctaattttttgtatttttagtagagacggggtttcgccgtgttgaccaggctggtctcgaacttctgacctcaggtgatccacccacctcggcctcccaaagtgctgggattacaggggtgagccactgcatgcggctgaaggtaaggattctaaactcggagactagaaatgtcctaaaggtgtctgcaacattggatgaggagtacaagtgcatttttctgggatgattcctccctttttatcacattctcagaagtatctttgattcagaagagttaggaatgcctccctatttcagttgggttttctgccctttctccacagaggtccagactcattttgcttaattttttttctagctggggcctgggaggtagaggcttcagggcctgggtggtagagctgcctgacaagtgttcagcagggctgctgggtcagggccctgtgggccttctgacccaacctgaagatgggtctgctaagtctaacaaggtcaagggaagatcagagggacccagattcttttttatcccccacttgaaacggagtcttgctctgtcgcccaggctggagcgcagtggtgcaatcttggctcactgcaacctccgcctccctgaccctcacactgtccagtgcccttgtggttactcagcatcatatcttgagactggcctggcaggagccagtgactgtggaatgaccacagaagattcagggcagctgccagaccaggggctatctctgccctgcgctgcttctgctcaagagaggttgtcactagcctctgatcttcccttgaagaacccgactggggctcttcagagggtggggcccaggaagttgtagttaaccccttccccaggcagtccttacacggccatctaggtatgcctgggaaccttgcaccaggtcggtggttctcactggctgcccattggaattatctggggagccttctggaaacgcagtgcttacattccatctccctagaccaacagaaactgccctctggaggtgaatcccaggcttagagattctgatgattctgcggtccagtgagtgctgagatctgtcctgagctctgtggggaggggcctggactgatcactgcttggaaatgattttgccctacagtaggccttcaagttgatcaaatgcatgaatgagcaagcttttcttggagtttgtgatgaagcccaggaaccgggtgcttgcagtcgtcccataaggctcccagggacaagctagagaatctggctgtccctctgtctccatggtgccagccctcttaggctcagttcaaagggagaggaggctagttaaataagaaactgagagaaacatggagcattattgatttattagaaaaactagtaaatgggtttcctctggttggtggaagcacggttgagcaggtggaggacaggacccagctggccccagggccagccccagattgcatggtctgtgcccaacagggttgcattcctctgcagccgccgcctcctcatttcctccctgagcttgtttgtccaagccaccaagccatgtggtcccgctggcttcatcctcctctggattcctgcccccctcccatgaagggaggaagaggattcagggtcagcctaggggaccctggctccctccgataggcaggaaggaggagggatgcggaggagaggctgagccttccacgggcctcctgttaggggtgttggtggaggccaggttggggagggaagcctaaggaccctccacacctcccacagccagagtcagttgaggctgggacaaaggggaaggagagagggaaggaggaccgcctgaccttgcccagaaggagcttcctctaaactgccctgggaaggaagcctggtatgctggtgtggactggagctgtgtcaacctcgtttgggaatactgtcaaaagactgtagagtagaataaggagagaaaaaaaaaaaaagaccttgctagggcactgggagagcttagccctggtgtggcacacacagggtctcccaaagctggatgcctgcattttcagtctagttggtcgaatgtcttggagcctgggtgacaggagggatgtgtggggagctggcaacagaatggtcacatgcagctggctgccctggaccaggccaggggacctggggtggtgagatgctagctcttccactagagcccttcctttctcgggtctgtggagttgcttgctggaaatgcctcacttcaggtgctgatttggcacacgtggaagggggagggtgggcccttgtccctaggctccctaaagactggcccagggaaacagttgagggagatgtttgccaccatctgcccttcagcaaggaacctgctctctgccccagaggaggacatgcctgcaagtgcaccaaaggcctactttattgctaggtgagtgcagtcacctcactgccttggtttccccagatacagaaagaggctggtgagtgatacacactaggttccctgtatagggtcatatgtaccaaagccaaatgaagaccttgctcaccagggcgggaacctggggatgtcaggctccatcggatgacgtcttccttcctgtggctcctgcctgctgcagttggtgtcaccctgacatatagtgtcagggccacagggtggaactgatttctgccggcactggtcagcactcagggttcctcagggggcctcattctggatgcctgcccctgtggcttctacctgaacctcacccacttcatctccatggaactaaggtccttctcacggggaaggtgatagaaacttgactgcaggccctggggactttcatggtttccttgggggaaaatgcctgctgccctccgccctcccccccacccccgacccgcttgactgctctcttggacctaaccctagtttgatactgggccagaactgtgttgctttcggagtagagtggtggggaaaatatggaatgagctttctcttcctccagaagtatgacctgagcagcaaggggaaggccattcctggggacgttggttgcagagcttctggtgctcagggctggagggtggtagatatttgacctctgtactcatgtgaccccctccccgccaagacctggggccaggacgtggagaagctgatcaaggggtaccacaccttcatggctctggccctgacatttgtcccagttgtgcaggagtagctgtcacatgggtggtgataccaagacatggctgcgtctgccaccccgagaaaacagatgatcaactttactgtctgcccagccattaccctccaaagtcccagctgcagacaggatgcaattgagcatttggctttgggatgctttactgcaggtgcggggggtatccatcttatatctgggggcccacactgtcccgtagggggcctatgtctgttggatattgctggtttggctgccactgggagtggggcgagggtcccagcattgagagggagagccttaggcagtgttgtgacgcacctgtcactccttcagatcagagccctgtgccctagccacggttttcaatgaggaatggtctgaccttgctgcccttcctgggaccgcctgtggtggcacaaagggtgctagaggcactcagccaggccctgccaaccgtgggagggtaccctttgatctggggggagaagcagagaggagggatgtggtggcccctgaagtgagagtcccagttctgcggaagcccagtgggaaggaggctggcagctcccaaggccctgcacccagtctggtcccctcagccccccagagcccctggcccagagctagggctttgtgggccacctgaaggctccttcctcatgcccctagggggctggccatgcatttccagtgtcttcttcctttcccctttccctggctgccaccaggtgggaggtgacccgaagcaagacttgctttaggaacgggcagcgtttgaagaaccccatcagccttctccagctcttttttttttttttttttggttgggggtaaggggcctgtgccccctcggctcaggaggagggtgggagaggagggcgtgtgcctcagagaaccgtttcctgcccccaggcctggaggccccaaaggcgccagaggagctgggagcccctgtccctggagcggagccagcgcgggcgagggcatggagggggcgtcggcccaggacacgcgggcgaaggcagcttttgcagtgcagcgtggggcccgggggcccggcccgcgactcgactcatctcgattcgaccggcgggcggcggcgagaggaggccaaggcctgggctgcccggtctctgcgcgtcccgactccgccgcgcccgccagccccacctgctacttctttttggggaagaagctgaatctcttctccttgtctttcttgccgaggctggcgtcggggccggagagggaaggcaggggcaggctctgcgccttgacgcggatgctctgggactcgttgatggcggtgctcacgccctgcagccaggacagcatctcctcctgcggggcggagggtcacggtggagtctggaggcccacagccccccacctcccgggccaggcaacaatggtgggggctcttgggactgccccttctgagggggcctccagggcaagcggcctggggtcctccacctacccccttcttagccaggtctgggctaggctgcccgcgcttacctcatccttgccatggaagagccactcgctgccattactcagcctaggaggacaaagggtttcctgtcatggagacacctctggagggggcgctgggcagagggctggctctgatcccacaataccctgagccgaacatccagacccctctcaggcagcccagcactttctgagaggtcaaagtctggaccatcagcctctttgatttgaaaaacccctgaggagcagctcaggcctggcactggtcccctacagagggcctctgccctgccactaatgccaaatcaagccatcaacccgagctttcaaaggccaggaaggcctcacctcagcttaaagacgtgcttcttcttcttgtagttggcagcaatctcacagatggcatgtctcagggccaggggttcctccccatggtagggcatccccagggccaggttcttggcatccttgtagaaggttagctcactgttcctgagcacacagtacaggttgttccaggacctgcaaagatgcagacaggcaggtcacccacatcctgatatggtatctctagagtcaattcctatagcttcaccattaaaaaaaattacacca

SEQ ID NO: 15913 - DNA, 554 bp, Homo sapiens
  source 1..554: mol_type = unassigned DNA
agtatcccctgtgcttaattgctggaggtttgtgcaggtcctcagccctgtggcgctcacctcccagggctgtggcctgggtccctacccagcggggacctgcagaattgtgtcgggaagttgcatttcctgggctagggccccccagcaatcaggaatgagagaaatgcagaaagtatgacccacacgcagaactggttctgaatagaacatttattgacgaagttttgcaggaggcggcgggcgctttaattcccgaggctgttggtggcagctcgctgctcaccccaagcctgttaactgctaggttgccggtgctggggacaatgcggctgcccggcccctcgccaccctcgtggtgcccggatgggagctctcctgaggaaagcgaatctccctggggtgccctccccaggcagcaatgccaggatgcctgtgtccacctccctccaccaggatggcagccaggagcggccggtgagcctgacctctaccacctcctcgtcgggctcctcctgtgacagtcgcagtgccatggaggagcccagcagctc

SEQ ID NO: 15914 - DNA, 658 bp, Homo sapiens
  source 1..658: mol_type = unassigned DNA
gtgagccatcatgcctggccgagaaagcgagttttctagaagactgattcactgattgatgactgactggattgattcatgttgcaagatggaagaggtcatggctggggcatacttaagagaactggagacccaatctccctggggtgccctccccaggcagcaatgccaggatgcctgtgtccacctccctccaccaggatggcagccaggagcggccggtgagcctgacctctaccacctcctcgtcgggctcctcctgtgacagtcgcagtgccatggaggagcccagcagctccgaggctcccgccaagaatggggcaggctccctgagaagccggcatctgcccaacagcaacaacaactccagcagctggttgaacgtgaaggggcccctctccccgttcaacagccgggcagcggcagggcctgcacaccacaagctcagctacctgggccgagtggtgcgggagatcgtggagacagagcgcatgtacgtacaggacctgcgcagcatcgtggaggactacctcttgaagatcattgacacacccgggctgctgaagccagaacaggtcagcgccctctttgggaacatagaaaatatctacgcgctgaacagccagctcctcagagacctggacagctgcaatagtga

SEQ ID NO: 15915 - DNA, 244 bp, Homo sapiens
  source 1..244: mol_type = unassigned DNA
gggcctgcacaccacaagctcagctacctgggccgagtggtgcgggagatcgtggagacagagcgcatgtacgtacaggacctgcgcagcatcgtggaggactacctcttgaagatcattgacacacccgggctgctgaagccagaacaggtcagcgccctctttgggaacatagaaaatatctacgcgctgaacagagccaagagtttgatatctacactcagtattgcaacaattaccccaa

SEQ ID NO: 15916 - DNA, 4403 bp, Homo sapiens
  source 1..4403: mol_type = unassigned DNA
gtttgatatctacactcagtattgcaacaattaccccaactccgtggccgccctgacggaatgcatgcgggacaagcagcaggccaagttctttcgggaccggcaggagctgctacagcactcgctgcccttgggctcctacctgctgaagccagtccagcgcatcctcaagtaccacctgctgctccaggaaattgccaagcattttgatgaagaagaggatggctttgaggtggtggaggatgccattgacaccatgacctgtgtggcctggtacatcaacgacatgaagaggaggcatgagcacgcggtccggctccaggagattcagtcactcctcatcaactggaaggggcccgacctgaccacctacggggagcttgtcctggagggcacattccgcgtgcatcgcgtgcgcaatgaaaggacctttttcctctttgacaaaacactgcttatcaccaagaagcggggcgatcactttgtctacaagggcaacatcccggtaaccaggccctgccccatctcctctgccatcttctctccttcccaaaggatctgggctccccttcttgtctgcttcttggggctccagcaccacccttctgagatcaccctccctgcttccccaggctgtcaaccttgtgcttgactgtcctttccctctgcccctagtgctcctccctgatgctgatcgaaagcaccagagactccctgtgcttcactgtcacccactacaagcacagcaagcagcagtacagcatccaggccaagacagtggaggagaaacggaactggactcaccacatcaagaggctcatcctagagaaccaccatgccaccattccccagaaggccaaggaagccatcttggaaatggattcctattatcccaatcggtaccgctgcagcccagagcggctgaagaaggcttggtcctcccaggatgaggtgtccaccaatgtgcgccaggggcgccggcaatctgagccaaccaaacacctgctcaggcaactcaacgagaaaggtgagtgtgtgaggtggccagccattcccagtgagcgggggaggaggagggaggaggggaagcagccgacaacctggggtgtgacctgagggtggaggattgtcagaatagtgtagagggaactctgcctccattccccccagaagagggcctcgcccctggctggctgaggagaggggctggagctctcccccatgcacaggcctcatgccctttcctccggaaacaatgagagccgagcaacaggcacagacctgcgctgctctgtggcccctgggcccctgctctgtcagtcattcttttgaaagcccaggagactaggtgagggttctgggagcaggagcccccagtgaggacttccccagggagctgtccagaggtctttttcctgcttactgatctcttcccctcccctcccctgcccctcgcccgtgtgctgggggacccggtggtgatgtctgcagcccgagcagcaggaatgaagggaaaggggcgcagggagtctgaaagctccaggagcagcagaaggcccagtggccggtctccaaccagtactgagaagcgcatgagcttcgagtccatttcttccctgccagaggttgagccggaccctgaggctgggagtgagcaagaggtattttctgctgtggaagggcccagtgccgaggagacgccttcagacacagaatctccagaagtcctggagacacagcttgatgcccaccagggccttctggggatggaccccccaggtgacatggtggacttcgtggcagctgagagcactgaggaccttaaggccctgagcagcgaggaggaagaagaaatgggaggtgccgcccaggagcctgagagccttctgccaccctctgtgctggaccaggccagcgtcattgcggagcgatttgtcagcagcttctctcggcggagcagcgtggcacaggaggacagcaagtccagtggctttgggagcccgcggctggtcagccggagcagcagcgtgctcagcctggagggcagcgagaagggcctggcccggcatggcagtgccacagactccctcagctgtcagctctccccagaagtggacatcagtgtgggggtggccacagaggacagcccttctgtcaatgggatggagcccccaagcccaggctgcccagtggagcctgaccggtcttcctgcaagaagaaggaatcagcactctccacccgagaccggctgttgctagacaagattaagagctattatgaaaatgcagaacaccatgatgcaggcttcagcgtccgtcgccgggagagcctctcctacatccccaaaggactggtaagaaactccatctccaggttcaacagccttccccggccagacccagagccagtacctccagtggggagcaagagacaggtgggctcccggccgacttcgtgggccctgtttgagctcccaggaccaagccaggcagtcaaaggggacccacctcccatctcagatgctgagttccgcccatcttcagaaattgtgaagatctgggagggaatggagtcttccggagggagccctgggaaggggccaggccagggccaggccaatggctttgacctgcatgagccactcttcatcctggaggagcatgagctgggagccatcacagaggagtcggccactgcctccccggaaagctcctctcccactgaggggcgcagcccggcccacctggcccgggagctgaaagagctggtgaaggagctgagcagcagtacccagggggagctggtggccccactgcacccccgcatcgtgcagctctcccacgtaatggacagccacgtgagcgagcgcgtcaagaacaaggtctaccagctggcccgccagtacagcctccggatcaagagcaacaagccagtgatggccaggccaccactgcagtgggaaaaggtggcccctgagagggatgggaagagccccactgtgccctgtctacaggaagaggctggagagccattaggtggcaaaggtaagaggaagccggtgctgtctctatttgactatgagcagctgatggcccaggagcacagccctcccaagccctcctcggctggggagatgtcaccacagcgtttcttcttcaacccgtctgctgtcagccagaggaccacctcgcctgggggccggccctccgcccggagccccctcagccccacagagaccttcagctggcccgacgtccgtgagctctgctccaagtatgcctcccgcgatgaggcacgccgagcagggggcggccggccccgcggcccacccgtcaacaggagccactcggtgccggagaacatggtagagccacctctgtcgggcagggtgggccgctgccgcagcctgagcaccaagaggggccggggaggcggagaggctgcccaatcccctgggcctctgccccagagcaagccggatggaggcgagaccctgtatgtcactgcagacctcaccctggaggacaaccggcgggtgattgtcatggagaagggaccccttcccagccccactgcagggctggaggagagcagtggccagggaccaagctcaccggtggccctgctggggcaggttcaggacttccagcagtctgcagagtgccagccgaaggaagagggttccagggacccggcagacccgagccagcagggcagagtgagaaaccttagagagaagttccaggccttgaactctgtcggttgatgctgactcctgggggagggaggagtcatgttggaggttggggaagaacctgggcatccttcccctcaagcctgggctcatggagcccctgcccagggccctcaggtgggcggaaagtccatcccctccgcccttcaggaaggatgctcccgtgtgcaggggtctcctgcctgtgccatccactggggctcgagacaatttcccactcacctgtgaggccggtgtggctgcttcccttgtaaatagttgttctctggtaagaagccaaatatttaagctcacttcttcccagagagaggaagctctgctcaggcctccagcgttggctggccatggccacagccagatggaggagcccatccccaggagactcaggcagtggcctggagaggctttgttctgtaacggtgccttttcttagggtccaggcaggaatgaagccaataatttattgctttccattctgtggtatgatgtgcgtgtgcgtgagtgtgtggcccctgtttattcccctcctgtcaagaatgaagtggattcagttcaggtacttttgagggttgttgtgctgaccctgtggttgtcgctgatgtacacacatttcattatttgccaatggtgcaataaccactgctgacc

SEQ ID NO: 15917 - DNA, 3106 bp, Homo sapiens
  source 1..3106: mol_type = unassigned DNA
tttcaggtctctctggaggacctgacagggcatgaaggcaacgagaagggggctgggccggagcccccaggctcagaggaggaggaggaggagcaggaggagagcctggcggtggcggagcaggtagccgactttgccagctccctgctggccgccctccactgctggcactatcgggccaacgctttacttttctcccggggcgctatgggaaaggggcgcagggagtctgaaagctccaggagcagcagaaggcccagtggccggtctccaaccagtactgagaagcgcatgagcttcgagtccatttcttccctgccagaggttgagccggaccctgaggctgggagtgagcaagaggtattttctgctgtggaagggcccagtgccgaggagacgccttcagacacagaatctccagaagtcctggagacacagcttgatgcccaccagggccttctggggatggaccccccaggtgacatggtggacttcgtggcagctgagagcactgaggaccttaaggccctgagcagcgaggaggaagaagaaatgggaggtgccgcccaggagcctgagagccttctgccaccctctgtgctggaccaggccagcgtcattgcggagcgatttgtcagcagcttctctcggcggagcagcgtggcacaggaggacagcaagtccagtggctttgggagcccgcggctggtcagccggagcagcagcgtgctcagcctggagggcagcgagaagggcctggcccggcatggcagtgccacagactccctcagctgtcagctctccccagaagtggacatcagtgtgggggtggccacagaggacagcccttctgtcaatgggatggagcccccaagcccaggctgcccagtggagcctgaccggtcttcctgcaagaagaaggaatcagcactctccacccgagaccggctgttgctagacaagattaagagctattatgaaaatgcagaacaccatgatgcaggcttcagcgtccgtcgccgggagagcctctcctacatccccaaaggactggtaagaaactccatctccaggttcaacagccttccccggccagacccagagccagtacctccagtggggagcaagagacaggtgggctcccggccgacttcgtgggccctgtttgagctcccaggaccaagccaggcagtcaaaggggacccacctcccatctcagatgctgagttccgcccatcttcagaaattgtgaagatctgggagggaatggagtcttccggagggagccctgggaaggggccaggccagggccaggccaatggctttgacctgcatgagccactcttcatcctggaggagcatgagctgggagccatcacagaggagtcggccactgcctccccggaaagctcctctcccactgaggggcgcagcccggcccacctggcccgggagctgaaagagctggtgaaggagctgagcagcagtacccagggggagctggtggccccactgcacccccgcatcgtgcagctctcccacgtaatggacagccacgtgagcgagcgcgtcaagaacaaggtctaccagctggcccgccagtacagcctccggatcaagagcaacaagccagtgatggccaggccaccactgcagtgggaaaaggtggcccctgagagggatgggaagagccccactgtgccctgtctacaggaagaggctggagagccattaggtggcaaaggtaagaggaagccggtgctgtctctatttgactatgagcagctgatggcccaggagcacagccctcccaagccctcctcggctggggagatgtcaccacagcgtttcttcttcaacccgtctgctgtcagccagaggaccacctcgcctgggggccggccctccgcccggagccccctcagccccacagagaccttcagctggcccgacgtccgtgagctctgctccaagtatgcctcccgcgatgaggcacgccgagcagggggcggccggccccgcggcccacccgtcaacaggagccactcggtgccggagaacatggtagagccacctctgtcgggcagggtgggccgctgccgcagcctgagcaccaagaggggccggggaggcggagaggctgcccaatcccctgggcctctgccccagagcaagccggatggaggcgagaccctgtatgtcactgcagacctcaccctggaggacaaccggcgggtgattgtcatggagaagggaccccttcccagccccactgcagggctggaggagagcagtggccagggaccaagctcaccggtggccctgctggggcaggttcaggacttccagcagtctgcagagtgccagccgaaggaagagggttccagggacccggcagacccgagccagcagggcagagtgagaaaccttagagagaagttccaggccttgaactctgtcggttgatgctgactcctgggggagggaggagtcatgttggaggttggggaagaacctgggcatccttcccctcaagcctgggctcatggagcccctgcccagggccctcaggtgggcggaaagtccatcccctccgcccttcaggaaggatgctcccgtgtgcaggggtctcctgcctgtgccatccactggggctcgagacaatttcccactcacctgtgaggccggtgtggctgcttcccttgtaaatagttgttctctggtaagaagccaaatatttaagctcacttcttcccagagagaggaagctctgctcaggcctccagcgttggctggccatggccacagccagatggaggagcccatccccaggagactcaggcagtggcctggagaggctttgttctgtaacggtgccttttcttagggtccaggcaggaatgaagccaataatttattgctttccattctgtggtatgatgtgcgtgtgcgtgagtgtgtggcccctgtttattcccctcctgtcaagaatgaagtggattcagttcaggtacttttgagggttgttgtgctgaccctgtggttgtcgctgatgtacacacatttcattatttgccaatggtgcaataaccactgctgaccaacc

SEQ ID NO: 15918 - DNA, 3001 bp, Homo sapiens
  source 1..3001: mol_type = unassigned DNA
cctgacagggcatgaaggcaacgagaagggggctgggccggagcccccaggctcagaggaggaggaggaggagcaggaggagagcctggcggtggcggagcagggaaaggggcgcagggagtctgaaagctccaggagcagcagaaggcccagtggccggtctccaaccagtactgagaagcgcatgagcttcgagtccatttcttccctgccagaggttgagccggaccctgaggctgggagtgagcaagaggtattttctgctgtggaagggcccagtgccgaggagacgccttcagacacagaatctccagaagtcctggagacacagcttgatgcccaccagggccttctggggatggaccccccaggtgacatggtggacttcgtggcagctgagagcactgaggaccttaaggccctgagcagcgaggaggaagaagaaatgggaggtgccgcccaggagcctgagagccttctgccaccctctgtgctggaccaggccagcgtcattgcggagcgatttgtcagcagcttctctcggcggagcagcgtggcacaggaggacagcaagtccagtggctttgggagcccgcggctggtcagccggagcagcagcgtgctcagcctggagggcagcgagaagggcctggcccggcatggcagtgccacagactccctcagctgtcagctctccccagaagtggacatcagtgtgggggtggccacagaggacagcccttctgtcaatgggatggagcccccaagcccaggctgcccagtggagcctgaccggtcttcctgcaagaagaaggaatcagcactctccacccgagaccggctgttgctagacaagattaagagctattatgaaaatgcagaacaccatgatgcaggcttcagcgtccgtcgccgggagagcctctcctacatccccaaaggactggtaagaaactccatctccaggttcaacagccttccccggccagacccagagccagtacctccagtggggagcaagagacaggtgggctcccggccgacttcgtgggccctgtttgagctcccaggaccaagccaggcagtcaaaggggacccacctcccatctcagatgctgagttccgcccatcttcagaaattgtgaagatctgggagggaatggagtcttccggagggagccctgggaaggggccaggccagggccaggccaatggctttgacctgcatgagccactcttcatcctggaggagcatgagctgggagccatcacagaggagtcggccactgcctccccggaaagctcctctcccactgaggggcgcagcccggcccacctggcccgggagctgaaagagctggtgaaggagctgagcagcagtacccagggggagctggtggccccactgcacccccgcatcgtgcagctctcccacgtaatggacagccacgtgagcgagcgcgtcaagaacaaggtctaccagctggcccgccagtacagcctccggatcaagagcaacaagccagtgatggccaggccaccactgcagtgggaaaaggtggcccctgagagggatgggaagagccccactgtgccctgtctacaggaagaggctggagagccattaggtggcaaaggtaagaggaagccggtgctgtctctatttgactatgagcagctgatggcccaggagcacagccctcccaagccctcctcggctggggagatgtcaccacagcgtttcttcttcaacccgtctgctgtcagccagaggaccacctcgcctgggggccggccctccgcccggagccccctcagccccacagagaccttcagctggcccgacgtccgtgagctctgctccaagtatgcctcccgcgatgaggcacgccgagcagggggcggccggccccgcggcccacccgtcaacaggagccactcggtgccggagaacatggtagagccacctctgtcgggcagggtgggccgctgccgcagcctgagcaccaagaggggccggggaggcggagaggctgcccaatcccctgggcctctgccccagagcaagccggatggaggcgagaccctgtatgtcactgcagacctcaccctggaggacaaccggcgggtgattgtcatggagaagggaccccttcccagccccactgcagggctggaggagagcagtggccagggaccaagctcaccggtggccctgctggggcaggttcaggacttccagcagtctgcagagtgccagccgaaggaagagggttccagggacccggcagacccgagccagcagggcagagtgagaaaccttagagagaagttccaggccttgaactctgtcggttgatgctgactcctgggggagggaggagtcatgttggaggttggggaagaacctgggcatccttcccctcaagcctgggctcatggagcccctgcccagggccctcaggtgggcggaaagtccatcccctccgcccttcaggaaggatgctcccgtgtgcaggggtctcctgcctgtgccatccactggggctcgagacaatttcccactcacctgtgaggccggtgtggctgcttcccttgtaaatagttgttctctggtaagaagccaaatatttaagctcacttcttcccagagagaggaagctctgctcaggcctccagcgttggctggccatggccacagccagatggaggagcccatccccaggagactcaggcagtggcctggagaggctttgttctgtaacggtgccttttcttagggtccaggcaggaatgaagccaataatttattgctttccattctgtggtatgatgtgcgtgtgcgtgagtgtgtggcccctgtttattcccctcctgtcaagaatgaagtggattcagttcaggtacttttgagggttgttgtgctgaccctgtggttgtcgctgatgtacacacatttcattatttgccaatggtgcaataaccactgctgaccaaccca

SEQ ID NO: 15919 - DNA, 462 bp, Homo sapiens
  source 1..462: mol_type = unassigned DNA
cccagtggagcctgaccggtcttcctgcaagaagaaggaatcagcactctccacccgagaccggctgttgctagacaagattaagagctattatgaaaatgcagaacaccatgatgcaggcttcagcgtccgtcgccgggagagcctctcctacatccccaaaggactggtaagaaactccatctccaggagactcaggcagtggcctggagaggctttgttctgtaacggtgccttttcttagggtccaggcaggaatgaagccaataatttattgctttccattctgtggtatgatgtgcgtgtgcgtgagtgtgtggcccctgtttattcccctcctgtcaagaatgaagtggattcagttcaggtacttttgagggttgttgtgctgaccctgtggttgtcgctgatgtacacacatttcattatttgccaatggtgcaataaccactgctgaccaac

SEQ ID NO: 15920 - DNA, 4397 bp, Homo sapiens
  source 1..4397: mol_type = unassigned DNA
gctcgacttcctgccgggcgctggcaagccgcgcgctgcctggggtctccgggggccgcgcttgcagctggccgagtccgggccagctgaggggctggcggtgggcgggagcggtcggcggcctcagccccttcagagagcgactttcaaactcgcgcccgcgtcgcggcagcacctgggcagccccgcacgccgtgcgcgtcccgagcccgcggggcagctaccgctcgaatctccctggggtgccctccccaggcagcaatgccaggatgcctgtgtccacctccctccaccaggatggcagccaggagcggccggtgagcctgacctctaccacctcctcgtcgggctcctcctgtgacagtcgcagtgccatggaggagcccagcagctccgaggctcccgccaagaatggggcaggctccctgagaagccggcatctgcccaacagcaacaacaactccagcagctggttgaacgtgaaggggcccctctccccgttcaacagccgggcagcggcagggcctgcacaccacaagctcagctacctgggccgagtggtgcgggagatcgtggagacagagcgcatgtacgtacaggacctgcgcagcatcgtggagagccaagagtttgatatctacactcagtattgcaacaattaccccaactccgtggccgccctgacggaatgcatgcgggacaagcagcaggccaagttctttcgggaccggcaggagctgctacagcactcgctgcccttgggctcctacctgctgaagccagtccagcgcatcctcaagtaccacctgctgctccaggaaattgccaagcattttgatgaagaagaggatggctttgaggtggtggaggatgccattgacaccatgacctgtgtggcctggtacatcaacgacatgaagaggaggcatgagcacgcggtccggctccaggagattcagtcactcctcatcaactggaaggggcccgacctgaccacctacggggagcttgtcctggagggcacattccgcgtgcatcgcgtgcgcaatgaaaggacctttttcctctttgacaaaacactgcttatcaccaagaagcggggcgatcactttgtctacaagggcaacatcccgtgctcctccctgatgctgatcgaaagcaccagagactccctgtgcttcactgtcacccactacaagcacagcaagcagcagtacagcatccaggccaagacagtggaggagaaacggaactggactcaccacatcaagaggctcatcctagagaaccaccatgccaccattccccagaaggccaaggaagccatcttggaaatggattcctattatcccaatcggtaccgctgcagcccagagcggctgaagaaggcttggtcctcccaggatgaggtgtccaccaatgtgcgccaggggcgccggcaatctgagccaaccaaacacctgctcaggcaactcaacgagaaagcccgagcagcaggaatgaagggaaaggggcgcagggagtctgaaagctccaggagcagcagaaggcccagtggccggtctccaaccagtactgagaagcgcatgagcttcgagtccatttcttccctgccagaggttgagccggaccctgaggctgggagtgagcaagaggtattttctgctgtggaagggcccagtgccgaggagacgccttcagacacagaatctccagaagtcctggagacacagcttgatgcccaccagggccttctggggatggaccccccaggtgacatggtggacttcgtggcagctgagagcactgaggaccttaaggccctgagcagcgaggaggaagaagaaatgggaggtgccgcccaggagcctgagagccttctgccaccctctgtgctggaccaggccagcgtcattgcggagcgatttgtcagcagcttctctcggcggagcagcgtggcacaggaggacagcaagtccagtggctttgggagcccgcggctggtcagccggagcagcagcgtgctcagcctggagggcagcgagaagggcctggcccggcatggcagtgccacagactccctcagctgtcagctctccccagaagtggacatcagtgtgggggtggccacagaggacagcccttctgtcaatgggatggagcccccaagcccaggctgcccagtggagcctgaccggtcttcctgcaagaagaaggaatcagcactctccacccgagaccggctgttgctagacaagattaagagctattatgaaaatgcagaacaccatgatgcaggcttcagcgtccgtcgccgggagagcctctcctacatccccaaaggactggtaagaaactccatctccaggttcaacagccttccccggccagacccagagccagtacctccagtggggagcaagagacaggtgggctcccggccgacttcgtgggccctgtttgagctcccaggaccaagccaggcagtcaaaggggacccacctcccatctcagatgctgagttccgcccatcttcagaaattgtgaagatctgggagggaatggagtcttccggagggagccctgggaaggggccaggccagggccaggccaatggctttgacctgcatgagccactcttcatcctggaggagcatgagctgggagccatcacagaggagtcggccactgcctccccggaaagctcctctcccactgaggggcgcagcccggcccacctggcccgggagctgaaagagctggtgaaggagctgagcagcagtacccagggggagctggtggccccactgcacccccgcatcgtgcagctctcccacgtaatggacagccacgtgagcgagcgcgtcaagaacaaggtctaccagctggcccgccagtacagcctccggatcaagagcaacaagccagtgatggccaggccaccactgcagtgggaaaaggtggcccctgagagggatgggaagagccccactgtgccctgtctacaggaagaggctggagagccattaggtggcaaaggtaagaggaagccggtgctgtctctatttgactatgagcagctgatggcccaggagcacagccctcccaagccctcctcggctggggagatgtcaccacagcgtttcttcttcaacccgtctgctgtcagccagaggaccacctcgcctgggggccggccctccgcccggagccccctcagccccacagagaccttcagctggcccgacgtccgtgagctctgctccaagtatgcctcccgcgatgaggcacgccgagcagggggcggccggccccgcggcccacccgtcaacaggagccactcggtgccggagaacatggtagagccacctctgtcgggcagggtgggccgctgccgcagcctgagcaccaagaggggccggggaggcggagaggctgcccaatcccctgggcctctgccccagagcaagccggatggaggcgagaccctgtatgtcactgcagacctcaccctggaggacaaccggcgggtgattgtcatggagaagggaccccttcccagccccactgcagggctggaggagagcagtggccagggaccaagctcaccggtggccctgctggggcaggttcaggacttccagcagtctgcagagtgccagccgaaggaagagggttccagggacccggcagacccgagccagcagggcagagtgagaaaccttagagagaagttccaggccttgaactctgtcggttgatgctgactcctgggggagggaggagtcatgttggaggttggggaagaacctgggcatccttcccctcaagcctgggctcatggagcccctgcccagggccctcaggtgggcggaaagtccatcccctccgcccttcaggaaggatgctcccgtgtgcaggggtctcctgcctgtgccatccactggggctcgagacaatttcccactcacctgtgaggccggtgtggctgcttcccttgtaaatagttgttctctggtaagaagccaaatatttaagctcacttcttcccagagagaggaagctctgctcaggcctccagcgttggctggccatggccacagccagatggaggagcccatccccaggagactcaggcagtggcctggagaggctttgttctgtaacggtgccttttcttagggtccaggcaggaatgaagccaataatttattgctttccattctgtggtatgatgtgcgtgtgcgtgagtgtgtggcccctgtttattcccctcctgtcaagaatgaagtggattcagttcaggtacttttgagggttgttgtgctgaccctgtggttgtcgctgatgtacacacatttcattatttgccaatggtgcaataaccactgctgacc

SEQ ID NO: 15921 - DNA, 5221 bp, Homo sapiens
  source 1..5221: mol_type = unassigned DNA
aaactaaggccttcctggtagccaaggagcccagcagaggggctgctgctggctgctgggattgcagaggccggggtctctgtggtgttgctttcctggaaaggagggacggcacctccagggcagccagcagtgtgggagcccattccagggcgcaaatgggcactcaggaatggaaaatccaagaaggaaccaaccaccaacaaggaaatgcagtgtgagcggcggctgcgaagtctgtgccttcaaatatacagcgcccaggggacctgtgttggacggggagcaaattggcagggctgagagcgccttggttttctgtgcagacaggtccagctgcagaaattaagactggggctgagtcggggagaagccttccatgttgagatggcaactgggcaaagcaggacggagacctgtgtgtctgattagagaggcctgtggcattggcatgtggctggaggtccaggcagggtgccaccaccgcagaggtcaagcatgaattcagtcctgacaaaacatgggtctccacctcgaagctggctcagcctttgttcaggaaccgacgaccagagccccgctgaaaagaagggactgcgctgtcagaaccccgcctgcatggacaaggggcgggcggccaaggtatgtcaccacgccgactgccagcagctgcaccgccgggggcccctcaacctctgcgaggcctgtgacagcaagttccacagcaccatgcattatgatgggcatgtccgcttcgaccttcccccacaaggctctgtgctggcccggaacgtgtccacccggtcatgcccgccgcgcaccagccccgcagtggacttggaggaggaggaggaggagagctctgtggatggcaaaggggaccggaagagcacaggcctgaaactctccaagaagaaagcaaggaggagacacacggatgacccaagcaaggaatgcttcactctgaaatttgacctgaatgtggacattgagacagagatcgtcccagccatgaagaagaagtcactgggggaggtgctgctgcctgtatttgaaaggaagggcattgcgctgggcaaagtggacatctacctggaccagtccaacacacccctgtccctcaccttcgaggcctacaggttcgggggacactaccttcgtgtcaaagccccagccaagcctggagatgagggcaaggtggagcagggcatgaaggactccaagtccctgagtttgccgattctgcggccagctgggaccgggccccccgccctggagcgtgtggacgcccagagccgccgggagagcctggacatcttggcccctggccgccgccgcaagaacatgtcggagttcctgggggaggcgagcatccccgggcaggagccccccacgccctccagctgctctctgcccagcggcagcagtggcagcaccaacactggcgacagctggaagaaccgggcggccagtcgcttcagcggctttttcagctccggccccagcaccagcgcctttggccgggaggtagacaagatggagcagctggagggcaagctgcacacctacagcctcttcgggctgcccaggctgccccgggggctgcgcttcgaccatgactcctgggaggaggagtacgatgaagacgaggatgaggacaatgcctgcctgaggctggaggacagctggcgggagctcattgatgggcatgagaagctgacccggcggcagtgccaccagcaggaggcggtgtgggagctgctgcacacggaggcctcctacatcaggaaactgcgggtgatcatcaacctgttcctgtgctgcctcctgaacctgcaagagtcagggctgctgtgtgaggtggaggcggagcgcctgttcagcaacatcccggagatcgcgcagctgcaccgcaggctgtgggctagcgtgatggcgccggtgctggagaaggcgcggcgcacgcgagcgctgctacagcccggggacttcctcaaaggcttcaagatgttcggctcgctcttcaagccctacatccgctactgcatggaggaggagggctgcatggagtacatgcgcggcctgctgcgcgacaacgacctcttccgggcctacatcacgtgggcggagaagcacccacagtgccagaggctgaagctgagcgacatgctggccaaaccccaccagcggctcaccaagtacccgctgctgctcaagtcggtgctgaggaagaccgaggagccgcgcgccaaggaggccgtcgtcgccatgatcggctccgtggagcgcttcatccaccacgtgaacgcgtgcatgcggcagcggcaggagcggcagcggctggcggccgtggtgagccgcatcgacgcctacgaggtggtggaaagcagcagcgacgaagtggacaagctcctgaaggaatttctgcacctggacttgacagcgcccatccctggcgcctccccggaggagacgcggcagctgctgctggaggggagcctgaggatgaaggaggggaaggacagcaagatggatgtgtactgcttcctcttcacggatctgctgttggtgaccaaagcagtgaagaaggcagagaggaccagggtcatcaggccacccctgctcgtggacaagattgtgtgccgggagctacgggaccctgggtccttcctccttatctacctgaatgagtttcacagtgctgtaggggcctacacgttccaggccagtggccaggccttgtgccgtggctgggtggacaccatttacaatgcccagaaccagctgcaacagctgcgtgcacaggagcccccaggcagtcagcagcccctgcagagcctggaagaggaggaggatgagcaggaggaggaagaggaggaggaggaggaggaggaggaaggcgaggacagtggcacttcagctgccagctcccctaccatcatgcggaaaagcagcggcagccccgactctcagcactgtgcctcagatggctccacggagaccctggccatggttgtggtagagcctggggacacgctgtcctcccccgagttcgacagcggtcctttcagctcccagtctgatgagacctctctcagcaccactgcctcatctgccacgcccaccagtgagctgctgcccctgggtccggtggacggccgctcctgctccatggactctgcctacggcaccctctccccaacctccttacaagactttgtggccccaggcccaatggcagagctagtgcctcgggccccagagtccccacgagttccttcccctccaccctcgccccgtctccgccgccgcacccctgtccagctgttgagctgcccgccccacctgctcaagtctaagtccgaggccagcctcctccagctgctggcaggggctggcacccatgggacaccctctgcccccagccgcagcctgtcagagctctgcctggctgttccagccccaggtattaggactcagggctcccctcaggaagctgggcccagctgggattgccgaggggcccctagccctggcagcggtcctgggctagtcggctgcctggccggggaacctgcaggctcccacaggaagaggtgtggagacctgccctcgggggcctctcccagggtccagcctgagcccccaccaggggtctctgcccagcacaggaagctgaccctggcccagctctaccgaatcaggaccaccctgctgcttaactccacgctcactgcctcggaggtctgagcagagggaggcccccaagagtgccattgaccaagagacagcagacagcctgcctcctggggcgtgccggcacctgcttcagctactgcctcctgtatgcatgagccggatgctgggcaggatccctgcctacgcccgggcccgatttgcgctttgccggactggatggagtggaggaggcccaggccacagtaccaccccacctgcccaggcagcccctcgtcacctactccccgaagttaccagctcagctcgagtcttcagggctgggctcctaggctgcccatcctacttctaccctcactggcctccagtgggattcactcctgccctgcccccaccttcccagtcccacaggccacccctggcttgggctgggttctgtgaagttacgtatttattgagcttttggttcttttataaagacttgtctagactccactgggaagagtcctttgctttggggcccagtgactcggggcacttgagttcagggcggcctccttgtgttcctgtgctcctccacttgccacggatgggccacggatggagcttgccatgggaagcactgggaagtaatggggtgtggggtgccaccagaccaacacccccagacttccccaccttcagccaccatcagagcctctccccaggtgccccccggggattcagggctgaatctgcccagttcccacactcaggccagccctcttgggaaggtgggtcctccatgggggtcccttcaggaactttttttttttttttaatacagagtctcactctgtcacctaggttggagtgcagtggtgtgatgtcggctcactgcaacctctgcctcccgggttcaaacgattctcctgccccagccactctagtagctggaactgcaggtgtgcaccaccacgccgggctagtttttgtattttaagtagagacggcatttcaccatattggtcaggctggtctcgaactcctgaccccaagtgttccgcccgcctctgcctcccatagtgctagaattacaggcctgagctactgcgcttggccccttgcggtacttttggcccaacctcctccatggctggggacgcggaggccgagagagaagtcacttgccctggctctaccttgaagtggttctcagggttggggcgagagtcggggtggggaccgagatgcagctctatcctgtgcccctggtcgcagcaggcagcccagcgcttcgcgtgttctacttggcctgtccgctgccgcctaatgagctcaggtctaggccgagcagagggggcacctggtcggactcggttgggctcgggcggccccgcctccccccgcccgccaggcgggcccttctcgacggcgcggggcgggccctgcgggcgcggggctgaaggcggaaccacgacgggcagagagcacggagccgggaagcccctgggcgcccgtcggagggctatggagcagcggccgc

SEQ ID NO: 15922 - DNA, 2664 bp, Homo sapiens
  source 1..2664: mol_type = unassigned DNA
aggctgtgggctagcgtgatggcgccggtgctggagaaggcgcggcgcacgcgagcgctgctacagcccggggacttcctcaaaggcttcaagatggtacgggcggggccgggcgcaggcgggggcactgaggcagggctggggcgccgaaaagcctccacggcccgatccggtctgcccagcatccccaacctcccccaggcccgtaaccgcacttgaccccttgtggccaagggtgaggaattacgaggcggtcgcccgggtttgagcctccacctgaccatctacccctgatccctggccacgggtggtcactttggctgaggctcagtttcctcatcaggaaacagggatcataagcttgctgcccccttggggtggtcgcccaagtgcagtaaggaagcgcttgcgcagcgcctggcgcgggccggcccgcagggagcgcgcggtaaccggcgccgtggttgttctgccccgggccagttcggctcgctcttcaagccctacatccgctactgcatggaggaggagggctgcatggagtacatgcgcggcctgctgcgcgacaacgacctcttccgggcctacatcacgtgggcggagaagcacccacagtgccagaggctgaagctgagcgacatgctggccaaaccccaccagcggctcaccaagtacccgctgctgctcaagtcggtgctgaggaagaccgaggagccgcgcgccaaggaggccgtcgtcgccatgatcggctccgtggagcgcttcatccaccacgtgaacgcgtgcatgcggcagcggcaggagcggcagcggctggcggccgtggtgagccgcatcgacgcctacgaggtggtggaaagcagcagcgacgaagtggacaagctcctgaaggaatttctgcacctggacttgacagcgcccatccctggcgcctccccggaggagacgcggcagctgctgctggaggggagcctgaggatgaaggaggggaaggacagcaagatggatgtgtactgcttcctcttcacggatctgctgttggtgaccaaagcagtgaagaaggcagagaggaccagggtcatcaggccacccctgctcgtggacaagattgtgtgccgggagctacgggaccctgggtccttcctccttatctacctgaatgagtttcacagtgctgtaggggcctacacgttccaggccagtggccaggccttgtgccgtggctgggtggacaccatttacaatgcccagaaccagctgcaacagctgcgtgcacaggagcccccaggcagtcagcagcccctgcagagcctggaagaggaggaggatgagcaggaggaggaagaggaggaggaggaggaggaggaggaaggcgaggacagtggcacttcagctgccagctcccctaccatcatgcggaaaagcagcggcagccccgactctcagcactgtgcctcagatggctccacggagaccctggccatggttgtggtagagcctggggacacgctgtcctcccccgagttcgacagcggtcctttcagctcccagtctgatgagacctctctcagcaccactgcctcatctgccacgcccaccagtgagctgctgcccctgggtccggtggacggccgctcctgctccatggactctgcctacggcaccctctccccaacctccttacaagactttgtggccccaggcccaatggcagagctagtgcctcgggccccagagtccccacgagttccttcccctccaccctcgccccgtctccgccgccgcacccctgtccagctgttgagctgcccgccccacctgctcaagtctaagtccgaggccagcctcctccagctgctggcaggggctggcacccatgggacaccctctgcccccagccgcagcctgtcagagctctgcctggctgttccagccccaggtattaggactcagggctcccctcaggaagctgggcccagctgggattgccgaggggcccctagccctggcagcggtcctgggctagtcggctgcctggccggggaacctgcaggctcccacaggaagaggtgtggagacctgccctcgggggcctctcccagggtccagcctgagcccccaccaggggtctctgcccagcacaggaagctgaccctggcccagctctaccgaatcaggaccaccctgctgcttaactccacgctcactgcctcggaggtctgagcagagggaggcccccaagagtgccattgaccaagagacagcagacagcctgcctcctggggcgtgccggcacctgcttcagctactgcctcctgtatgcatgagccggatgctgggcaggatccctgcctacgcccgggcccgatttgcgctttgccggactggatggagtggaggaggcccaggccacagtaccaccccacctgcccaggcagcccctcgtcacctactccccgaagttaccagctcagctcgagtcttcagggctgggctcctaggctgcccatcctacttctaccctcactggcctccagtgggattcactcctgccctgcccccaccttcccagtcccacaggccacccctggcttgggctgggttctgtgaagttacgtatttattgagcttttggttcttttataaagacttgtctagactcca

SEQ ID NO: 15923 - DNA, 3475 bp, Homo sapiens
  source 1..3475: mol_type = unassigned DNA
gagtcgactgagcccgtcccgcggctcccgtccccctctccccgcgcgccccatgaggctttggcagtctcggcccgagccttagagccttagacaccggggaggagaccctggtcctgttcctaggtatgtcaccacgccgactgccagcagctgcaccgccgggggcccctcaacctctgcgaggcctgtgacagcaagttccacagcaccatgcattatgatgggcatgtccgcttcgaccttcccccacaaggctctgtgctggcccggaacgtgtccacccggtcatgcccgccgcgcaccagccccgcagtggacttggaggaggaggaggaggagagctctgtggatggcaaaggggaccggaagagcacaggcctgaaactctccaagaagaaagcaaggaggagacacacggatgacccaagcaaggaatgcttcactctgaaatttgacctgaatgtggacattgagacagagatcgtcccagccatgaagaagaagtcactgggggaggtgctgctgcctgtatttgaaaggaagggcattgcgctgggcaaagtggacatctacctggaccagtccaacacacccctgtccctcaccttcgaggcctacaggttcgggggacactaccttcgtgtcaaagccccagccaagcctggagatgagggcaaggtggagcagggcatgaaggactccaagtccctgagtttgccgattctgcggccagctgggaccgggccccccgccctggagcgtgtggacgcccagagccgccgggagagcctggacatcttggcccctggccgccgccgcaagaacatgtcggagttcctgggggaggcgagcatccccgggcaggagccccccacgccctccagctgctctctgcccagcggcagcagtggcagcaccaacactggcgacagctggaagaaccgggcggccagtcgcttcagcggctttttcagctccggccccagcaccagcgcctttggccgggaggtagacaagatggagcagctggagggcaagctgcacacctacagcctcttcgggctgcccaggctgccccgggggctgcgcttcgaccatgactcctgggaggaggagtacgatgaagacgaggatgaggacaatgcctgcctgaggctggaggacagctggcgggagctcattgatgggcatgagaagctgacccggcggcagtgccaccagcaggaggcggtgtgggagctgctgcacacggaggcctcctacatcaggaaactgcgggtgatcatcaacctgttcctgtgctgcctcctgaacctgcaagagtcagggctgctgtgtgaggtggaggcggagcgcctgttcagcaacatcccggagatcgcgcagctgcaccgcaggctgtgggctagcgtgatggcgccggtgctggagaaggcgcggcgcacgcgagcgctgctacagcccggggacttcctcaaaggcttcaagatgttcggctcgctcttcaagccctacatccgctactgcatggaggaggagggctgcatggagtacatgcgcggcctgctgcgcgacaacgacctcttccgggcctacatcacgtgggcggagaagcacccacagtgccagaggctgaagctgagcgacatgctggccaaaccccaccagcggctcaccaagtacccgctgctgctcaagtcggtgctgaggaagaccgaggagccgcgcgccaaggaggccgtcgtcgccatgatcggctccgtggagcgcttcatccaccacgtgaacgcgtgcatgcggcagcggcaggagcggcagcggctggcggccgtggtgagccgcatcgacgcctacgaggtggtggaaagcagcagcgacgaagtggacaagctcctgaaggaatttctgcacctggacttgacagcgcccatccctggcgcctccccggaggagacgcggcagctgctgctggaggggagcctgaggatgaaggaggggaaggacagcaagatggatgtgtactgcttcctcttcacggatctgctgttggtgaccaaagcagtgaagaaggcagagaggaccagggtcatcaggccacccctgctcgtggacaagattgtgtgccgggagctacgggaccctgggtccttcctccttatctacctgaatgagtttcacagtgctgtaggggcctacacgttccaggccagtggccaggccttgtgccgtggctgggtggacaccatttacaatgcccagaaccagctgcaacagctgcgtgcacaggagcccccaggcagtcagcagcccctgcagagcctggaagaggaggaggatgagcaggaggaggaagaggaggaggaggaggaggaggaggaaggcgaggacagtggcacttcagctgccagctcccctaccatcatgcggaaaagcagcggcagccccgactctcagcactgtgcctcagatggctccacggagaccctggccatggttgtggtagagcctggggacacgctgtcctcccccgagttcgacagcggtcctttcagctcccagtctgatgagacctctctcagcaccactgcctcatctgccacgcccaccagtgagctgctgcccctgggtccggtggacggccgctcctgctccatggactctgcctacggcaccctctccccaacctccttacaagactttgtggccccaggcccaatggcagagctagtgcctcgggccccagagtccccacgagttccttcccctccaccctcgccccgtctccgccgccgcacccctgtccagctgttgagctgcccgccccacctgctcaagtctaagtccgaggccagcctcctccagctgctggcaggggctggcacccatgggacaccctctgcccccagccgcagcctgtcagagctctgcctggctgttccagccccagcacaggaagctgaccctggcccagctctaccgaatcaggaccaccctgctgcttaactccacgctcactgcctcggaggtctgagcagagggaggcccccaagagtgccattgaccaagagacagcagacagcctgcctcctggggcgtgccggcacctgcttcagctactgcctcctgtatgcatgagccggatgctgggcaggatccctgcctacgcccgggcccgatttgcgctttgccggactggatggagtggaggaggcccaggccacagtaccaccccacctgcccaggcagcccctcgtcacctactccccgaagttaccagctcagctcgagtcttcagggctgggctcctaggctgcccatcctacttctaccctcactggcctccagtgggattcactcctgccctgcccccaccttcccagtcccacaggccacccctggcttgggctgggttctgtgaagttacgtatttattgagcttttggttcttttataaagacttgtctagactcca

SEQ ID NO: 15924 - DNA, 3613 bp, Homo sapiens
  source 1..3613: mol_type = unassigned DNA
agatgaagaccagggagaggaaagggtggacctgaggcccccatggagaagggacgggcaggatgtatgtcaccacgccgactgccagcagctgcaccgccgggggcccctcaacctctgcgaggcctgtgacagcaagttccacagcaccatgcattatgatgggcatgtccgcttcgaccttcccccacaaggctctgtgctggcccggaacgtgtccacccggtcatgcccgccgcgcaccagccccgcagtggacttggaggaggaggaggaggagagctctgtggatggcaaaggggaccggaagagcacaggcctgaaactctccaagaagaaagcaaggaggagacacacggatgacccaagcaaggaatgcttcactctgaaatttgacctgaatgtggacattgagacagagatcgtcccagccatgaagaagaagtcactgggggaggtgctgctgcctgtatttgaaaggaagggcattgcgctgggcaaagtggacatctacctggaccagtccaacacacccctgtccctcaccttcgaggcctacaggttcgggggacactaccttcgtgtcaaagccccagccaagcctggagatgagggcaaggtggagcagggcatgaaggactccaagtccctgagtttgccgattctgcggccagctgggaccgggccccccgccctggagcgtgtggacgcccagagccgccgggagagcctggacatcttggcccctggccgccgccgcaagaacatgtcggagttcctgggggaggcgagcatccccgggcaggagccccccacgccctccagctgctctctgcccagcggcagcagtggcagcaccaacactggcgacagctggaagaaccgggcggccagtcgcttcagcggctttttcagctccggccccagcaccagcgcctttggccgggaggtagacaagatggagcagctggagggcaagctgcacacctacagcctcttcgggctgcccaggctgccccgggggctgcgcttcgaccatgactcctgggaggaggagtacgatgaagacgaggatgaggacaatgcctgcctgaggctggaggacagctggcgggagctcattgatgggcatgagaagctgacccggcggcagtgccaccagcaggaggcggtgtgggagctgctgcacacggaggcctcctacatcaggaaactgcgggtgatcatcaacctgttcctgtgctgcctcctgaacctgcaagagtcagggctgctgtgtgaggtggaggcggagcgcctgttcagcaacatcccggagatcgcgcagctgcaccgcaggctgtgggctagcgtgatggcgccggtgctggagaaggcgcggcgcacgcgagcgctgctacagcccggggacttcctcaaaggcttcaagatgttcggctcgctcttcaagccctacatccgctactgcatggaggaggagggctgcatggagtacatgcgcggcctgctgcgcgacaacgacctcttccgggcctacatcacgtgggcggagaagcacccacagtgccagaggctgaagctgagcgacatgctggccaaaccccaccagcggctcaccaagtacccgctgctgctcaagtcggtgctgaggaagaccgaggagccgcgcgccaaggaggccgtcgtcgccatgatcggctccgtggagcgcttcatccaccacgtgaacgcgtgcatgcggcagcggcaggagcggcagcggctggcggccgtggtgagccgcatcgacgcctacgaggtggtggaaagcagcagcgacgaagtggacaagctcctgaaggaatttctgcacctggacttgacagcgcccatccctggcgcctccccggaggagacgcggcagctgctgctggaggggagcctgaggatgaaggaggggaaggacagcaagatggatgtgtactgcttcctcttcacggatctgctgttggtgaccaaagcagtgaagaaggcagagaggaccagggtcatcaggccacccctgctcgtggacaagattgtgtgccgggagctacgggaccctgggtccttcctccttatctacctgaatgagtttcacagtgctgtaggggcctacacgttccaggccagtggccaggccttgtgccgtggctgggtggacaccatttacaatgcccagaaccagctgcaacagctgcgtgcacaggagcccccaggcagtcagcagcccctgcagagcctggaagaggaggaggatgagcaggaggaggaagaggaggaggaggaggaggaggaggaaggcgaggacagtggcacttcagctgccagctcccctaccatcatgcggaaaagcagcggcagccccgactctcagcactgtgcctcagatggctccacggagaccctggccatggttgtggtagagcctggggacacgctgtcctcccccgagttcgacagcggtcctttcagctcccagtctgatgagacctctctcagcaccactgcctcatctgccacgcccaccagtgagctgctgcccctgggtccggtggacggccgctcctgctccatggactctgcctacggcaccctctccccaacctccttacaagactttgtggccccaggcccaatggcagagctagtgcctcgggccccagagtccccacgagttccttcccctccaccctcgccccgtctccgccgccgcacccctgtccagctgttgagctgcccgccccacctgctcaagtctaagtccgaggccagcctcctccagctgctggcaggggctggcacccatgggacaccctctgcccccagccgcagcctgtcagagctctgcctggctgttccagccccaggtattaggactcagggctcccctcaggaagctgggcccagctgggattgccgaggggcccctagccctggcagcggtcctgggctagtcggctgcctggccggggaacctgcaggctcccacaggaagaggtgtggagacctgccctcgggggcctctcccagggtccagcctgagcccccaccaggggtctctgcccagcacaggaagctgaccctggcccagctctaccgaatcaggaccaccctgctgcttaactccacgctcactgcctcggaggtctgagcagagggaggcccccaagagtgccattgaccaagagacagcagacagcctgcctcctggggcgtgccggcacctgcttcagctactgcctcctgtatgcatgagccggatgctgggcaggatccctgcctacgcccgggcccgatttgcgctttgccggactggatggagtggaggaggcccaggccacagtaccaccccacctgcccaggcagcccctcgtcacctactccccgaagttaccagctcagctcgagtcttcagggctgggctcctaggctgcccatcctacttctaccctcactggcctccagtgggattcactcctgccctgcccccaccttcccagtcccacaggccacccctggcttgggctgggttctgtgaagttacgtatttattgagcttttggttcttttataaagacttgtctagactcca

SEQ ID NO: 15925 - DNA, 3753 bp, Homo sapiens
  source 1..3753: mol_type = unassigned DNA
ggacgctgacctcttttgaagggaggactgaggagatcaccccacccctcctccggttgggaggccagtggggcccaggggagcctgggtgccccgctgactgatgccctctgctcctcccctgcagacgaccagagccccgctgaaaagaagggactgcgctgtcagaaccccgcctgcatggacaaggggcgggcggccaaggtatgtcaccacgccgactgccagcagctgcaccgccgggggcccctcaacctctgcgaggcctgtgacagcaagttccacagcaccatgcattatgatgggcatgtccgcttcgaccttcccccacaaggctctgtgctggcccggaacgtgtccacccggtcatgcccgccgcgcaccagccccgcagtggacttggaggaggaggaggaggagagctctgtggatggcaaaggggaccggaagagcacaggcctgaaactctccaagaagaaagcaaggaggagacacacggatgacccaagcaaggaatgcttcactctgaaatttgacctgaatgtggacattgagacagagatcgtcccagccatgaagaagaagtcactgggggaggtgctgctgcctgtatttgaaaggaagggcattgcgctgggcaaagtggacatctacctggaccagtccaacacacccctgtccctcaccttcgaggcctacaggttcgggggacactaccttcgtgtcaaagccccagccaagcctggagatgagggcaaggtggagcagggcatgaaggactccaagtccctgagtttgccgattctgcggccagctgggaccgggccccccgccctggagcgtgtggacgcccagagccgccgggagagcctggacatcttggcccctggccgccgccgcaagaacatgtcggagttcctgggggaggcgagcatccccgggcaggagccccccacgccctccagctgctctctgcccagcggcagcagtggcagcaccaacactggcgacagctggaagaaccgggcggccagtcgcttcagcggctttttcagctccggccccagcaccagcgcctttggccgggaggtagacaagatggagcagctggagggcaagctgcacacctacagcctcttcgggctgcccaggctgccccgggggctgcgcttcgaccatgactcctgggaggaggagtacgatgaagacgaggatgaggacaatgcctgcctgaggctggaggacagctggcgggagctcattgatgggcatgagaagctgacccggcggcagtgccaccagcaggaggcggtgtgggagctgctgcacacggaggcctcctacatcaggaaactgcgggtgatcatcaacctgttcctgtgctgcctcctgaacctgcaagagtcagggctgctgtgtgaggtggaggcggagcgcctgttcagcaacatcccggagatcgcgcagctgcaccgcaggctgtgggctagcgtgatggcgccggtgctggagaaggcgcggcgcacgcgagcgctgctacagcccggggacttcctcaaaggcttcaagatgttcggctcgctcttcaagccctacatccgctactgcatggaggaggagggctgcatggagtacatgcgcggcctgctgcgcgacaacgacctcttccgggcctacatcacgtgggcggagaagcacccacagtgccagaggctgaagctgagcgacatgctggccaaaccccaccagcggctcaccaagtacccgctgctgctcaagtcggtgctgaggaagaccgaggagccgcgcgccaaggaggccgtcgtcgccatgatcggctccgtggagcgcttcatccaccacgtgaacgcgtgcatgcggcagcggcaggagcggcagcggctggcggccgtggtgagccgcatcgacgcctacgaggtggtggaaagcagcagcgacgaagtggacaagctcctgaaggaatttctgcacctggacttgacagcgcccatccctggcgcctccccggaggagacgcggcagctgctgctggaggggagcctgaggatgaaggaggggaaggacagcaagatggatgtgtactgcttcctcttcacggatctgctgttggtgaccaaagcagtgaagaaggcagagaggaccagggtcatcaggccacccctgctcgtggacaagattgtgtgccgggagctacgggaccctgggtccttcctccttatctacctgaatgagtttcacagtgctgtaggggcctacacgttccaggccagtggccaggccttgtgccgtggctgggtggacaccatttacaatgcccagaaccagctgcaacagctgcgtgcacaggagcccccaggcagtcagcagcccctgcagagcctggaagaggaggaggatgagcaggaggaggaagaggaggaggaggaggaggaggaggaaggcgaggacagtggcacttcagctgccagctcccctaccatcatgcggaaaagcagcggcagccccgactctcagcactgtgcctcagatggctccacggagaccctggccatggttgtggtagagcctggggacacgctgtcctcccccgagttcgacagcggtcctttcagctcccagtctgatgagacctctctcagcaccactgcctcatctgccacgcccaccagtgagctgctgcccctgggtccggtggacggccgctcctgctccatggactctgcctacggcaccctctccccaacctccttacaagactttgtggccccaggcccaatggcagagctagtgcctcgggccccagagtccccacgagttccttcccctccaccctcgccccgtctccgccgccgcacccctgtccagctgttgagctgcccgccccacctgctcaagtctaagtccgaggccagcctcctccagctgctggcaggggctggcacccatgggacaccctctgcccccagccgcagcctgtcagagctctgcctggctgttccagccccaggtattaggactcagggctcccctcaggaagctgggcccagctgggattgccgaggggcccctagccctggcagcggtcctgggctagtcggctgcctggccggggaacctgcaggctcccacaggaagaggtgtggagacctgccctcgggggcctctcccagggtccagcctgagcccccaccaggggtctctgcccagcacaggaagctgaccctggcccagctctaccgaatcaggaccaccctgctgcttaactccacgctcactgcctcggaggtctgagcagagggaggcccccaagagtgccattgaccaagagacagcagacagcctgcctcctggggcgtgccggcacctgcttcagctactgcctcctgtatgcatgagccggatgctgggcaggatccctgcctacgcccgggcccgatttgcgctttgccggactggatggagtggaggaggcccaggccacagtaccaccccacctgcccaggcagcccctcgtcacctactccccgaagttaccagctcagctcgagtcttcagggctgggctcctaggctgcccatcctacttctaccctcactggcctccagtgggattcactcctgccctgcccccaccttcccagtcccacaggccacccctggcttgggctgggttctgtgaagttacgtatttattgagcttttggttcttttataaagacttgtctagactcca

SEQ ID NO: 15926 - DNA, 3697 bp, Homo sapiens
  source 1..3697: mol_type = unassigned DNA
cccagtccccggcgtccccggcgcccccgcccgccgcccgccccccgcgcggcacggggcctgctccatggacgaccagagccccgctgaaaagaagggactgcgctgtcagaaccccgcctgcatggacaaggggcgggcggccaaggtatgtcaccacgccgactgccagcagctgcaccgccgggggcccctcaacctctgcgaggcctgtgacagcaagttccacagcaccatgcattatgatgggcatgtccgcttcgaccttcccccacaaggctctgtgctggcccggaacgtgtccacccggtcatgcccgccgcgcaccagccccgcagtggacttggaggaggaggaggaggagagctctgtggatggcaaaggggaccggaagagcacaggcctgaaactctccaagaagaaagcaaggaggagacacacggatgacccaagcaaggaatgcttcactctgaaatttgacctgaatgtggacattgagacagagatcgtcccagccatgaagaagaagtcactgggggaggtgctgctgcctgtatttgaaaggaagggcattgcgctgggcaaagtggacatctacctggaccagtccaacacacccctgtccctcaccttcgaggcctacaggttcgggggacactaccttcgtgtcaaagccccagccaagcctggagatgagggcaaggtggagcagggcatgaaggactccaagtccctgagtttgccgattctgcggccagctgggaccgggccccccgccctggagcgtgtggacgcccagagccgccgggagagcctggacatcttggcccctggccgccgccgcaagaacatgtcggagttcctgggggaggcgagcatccccgggcaggagccccccacgccctccagctgctctctgcccagcggcagcagtggcagcaccaacactggcgacagctggaagaaccgggcggccagtcgcttcagcggctttttcagctccggccccagcaccagcgcctttggccgggaggtagacaagatggagcagctggagggcaagctgcacacctacagcctcttcgggctgcccaggctgccccgggggctgcgcttcgaccatgactcctgggaggaggagtacgatgaagacgaggatgaggacaatgcctgcctgaggctggaggacagctggcgggagctcattgatgggcatgagaagctgacccggcggcagtgccaccagcaggaggcggtgtgggagctgctgcacacggaggcctcctacatcaggaaactgcgggtgatcatcaacctgttcctgtgctgcctcctgaacctgcaagagtcagggctgctgtgtgaggtggaggcggagcgcctgttcagcaacatcccggagatcgcgcagctgcaccgcaggctgtgggctagcgtgatggcgccggtgctggagaaggcgcggcgcacgcgagcgctgctacagcccggggacttcctcaaaggcttcaagatgttcggctcgctcttcaagccctacatccgctactgcatggaggaggagggctgcatggagtacatgcgcggcctgctgcgcgacaacgacctcttccgggcctacatcacgtgggcggagaagcacccacagtgccagaggctgaagctgagcgacatgctggccaaaccccaccagcggctcaccaagtacccgctgctgctcaagtcggtgctgaggaagaccgaggagccgcgcgccaaggaggccgtcgtcgccatgatcggctccgtggagcgcttcatccaccacgtgaacgcgtgcatgcggcagcggcaggagcggcagcggctggcggccgtggtgagccgcatcgacgcctacgaggtggtggaaagcagcagcgacgaagtggacaagctcctgaaggaatttctgcacctggacttgacagcgcccatccctggcgcctccccggaggagacgcggcagctgctgctggaggggagcctgaggatgaaggaggggaaggacagcaagatggatgtgtactgcttcctcttcacggatctgctgttggtgaccaaagcagtgaagaaggcagagaggaccagggtcatcaggccacccctgctcgtggacaagattgtgtgccgggagctacgggaccctgggtccttcctccttatctacctgaatgagtttcacagtgctgtaggggcctacacgttccaggccagtggccaggccttgtgccgtggctgggtggacaccatttacaatgcccagaaccagctgcaacagctgcgtgcacaggagcccccaggcagtcagcagcccctgcagagcctggaagaggaggaggatgagcaggaggaggaagaggaggaggaggaggaggaggaggaaggcgaggacagtggcacttcagctgccagctcccctaccatcatgcggaaaagcagcggcagccccgactctcagcactgtgcctcagatggctccacggagaccctggccatggttgtggtagagcctggggacacgctgtcctcccccgagttcgacagcggtcctttcagctcccagtctgatgagacctctctcagcaccactgcctcatctgccacgcccaccagtgagctgctgcccctgggtccggtggacggccgctcctgctccatggactctgcctacggcaccctctccccaacctccttacaagactttgtggccccaggcccaatggcagagctagtgcctcgggccccagagtccccacgagttccttcccctccaccctcgccccgtctccgccgccgcacccctgtccagctgttgagctgcccgccccacctgctcaagtctaagtccgaggccagcctcctccagctgctggcaggggctggcacccatgggacaccctctgcccccagccgcagcctgtcagagctctgcctggctgttccagccccaggtattaggactcagggctcccctcaggaagctgggcccagctgggattgccgaggggcccctagccctggcagcggtcctgggctagtcggctgcctggccggggaacctgcaggctcccacaggaagaggtgtggagacctgccctcgggggcctctcccagggtccagcctgagcccccaccaggggtctctgcccagcacaggaagctgaccctggcccagctctaccgaatcaggaccaccctgctgcttaactccacgctcactgcctcggaggtctgagcagagggaggcccccaagagtgccattgaccaagagacagcagacagcctgcctcctggggcgtgccggcacctgcttcagctactgcctcctgtatgcatgagccggatgctgggcaggatccctgcctacgcccgggcccgatttgcgctttgccggactggatggagtggaggaggcccaggccacagtaccaccccacctgcccaggcagcccctcgtcacctactccccgaagttaccagctcagctcgagtcttcagggctgggctcctaggctgcccatcctacttctaccctcactggcctccagtgggattcactcctgccctgcccccaccttcccagtcccacaggccacccctggcttgggctgggttctgtgaagttacgtatttattgagcttttggttcttttataaagacttgtctagactcca

SEQ ID NO: 15927 - DNA, 3550 bp, Homo sapiens
  source 1..3550: mol_type = unassigned DNA
cttgatctcccgctgtgaccagcccctctctgcctggcaggggaaagccaccaaactaaggccttcctggtagccaaggagcccagcagaggggctgctgctggctgctgggattgcagaggccggggtctctgtggtgttgctttcctggaaaggagggacggcacctccagggcagccagcagtgtgggagcccattccagggcgcaaatgggcactcaggaatggaaaatccaagaaggaaccaaccaccaacaaggaaatgcagtgtgagcggcggctgcgaagtctgtgccttcaaatatacagcgcccaggggacctgtgttggacggggagcaaattggcagggctgagagcgccttggttttctgtgcagacaggtccagctgcagaaattaagactggggctgagtcggggagaagccttccatgttgagatggcaactgggcaaagcaggacggagacctgtgtgtctgattagagaggcctgtggcattggcatgtggctggaggtccaggcagggtgccaccaccgcagaggtcaagcatgaattcagtcctgacaaaacatgggtctccacctcgaagctggctcagcctttgttcaggaaccgacgaccagagccccgctgaaaagaagggactgcgctgtcagaaccccgcctgcatggacaaggggcgggcggccaaggtatgtcaccacgccgactgccagcagctgcaccgccgggggcccctcaacctctgcgaggcctgtgacagcaagttccacagcaccatgcattatgatgggcatgtccgcttcgaccttcccccacaaggctctgtgctggcccggaacgtgtccacccggtcatgcccgccgcgcaccagccccgcagtggacttggaggaggaggaggaggagagctctgtggatggcaaaggggaccggaagagcacaggcctgaaactctccaagaagaaagcaaggaggagacacacggatgacccaagcaaggaatgcttcactctgaaatttgacctgaatgtggacattgagacagagatcgtcccagccatgaagaagaagtcactgggggaggtgctgctgcctgtatttgaaaggaagggcattgcgctgggcaaagtggacatctacctggaccagtccaacacacccctgtccctcaccttcgaggcctacaggttcgggggacactaccttcgtgtcaaagccccagccaagcctggagatgagggcaaggtggagcagggcatgaaggactccaagtccctgagtttgccgattctgcggccagctgggaccgggccccccgccctggagcgtgtggacgcccagagccgccgggagagcctggacatcttggcccctggccgccgccgcaagaacatgtcggagttcctgggggaggcgagcatccccgggcaggagccccccacgccctccagctgctctctgcccagcggcagcagtggcagcaccaacactggcgacagctggaagaaccgggcggccagtcgcttcagcggctttttcagctccggccccagcaccagcgcctttggccgggaggtagacaagatggagcagctggagggcaagctgcacacctacagcctcttcgggctgcccaggctgccccgggggctgcgcttcgaccatgactcctgggaggaggagtacgatgaagacgaggatgaggacaatgcctgcctgaggctggaggacagctggcgggagctcattgatgggcatgagaagctgacccggcggcagtgccaccagcaggaggcggtgtgggagctgctgcacacggaggcctcctacatcaggaaactgcgggtgatcatcaacctgttcctgtgctgcctcctgaacctgcaagagtcagggctgctgtgtgaggtggaggcggagcgcctgttcagcaacatcccggagatcgcgcagctgcaccgcaggctgtgggctagcgtgatggcgccggtgctggagaaggcgcggcgcacgcgagcgctgctacagcccggggacttcctcaaaggcttcaagatgttcggctcgctcttcaagccctacatccgctactgcatggaggaggagggctgcatggagtacatgcgcggcctgctgcgcgacaacgacctcttccgggcctacatcacgtgggcggagaagcacccacagtgccagaggctgaagctgagcgacatgctggccaaaccccaccagcggctcaccaagtacccgctgctgctcaagtcggtgctgaggaagaccgaggagccgcgcgccaaggaggccgtcgtcgccatgatcggctccgtggagcgcttcatccaccacgtgaacgcgtgcatgcggcagcggcaggagcggcagcggctggcggccgtggtgagccgcatcgacgcctacgaggtggtggaaagcagcagcgacgaagtggacaagctcctgaaggaatttctgcacctggacttgacagcgcccatccctggcgcctccccggaggagacgcggcagctgctgctggaggggagcctgaggatgaaggaggggaaggacagcaagatggatgtgtactgcttcctcttcacggatctgctgttggtgaccaaagcagtgaagaaggcagagaggaccagggtcatcaggccacccctgctcgtggacaagattgtgtgccgggagctacgggaccctgggtccttcctccttatctacctgaatgagtttcacagtgctgtaggggcctacacgttccaggccagtggccaggccttgtgccgtggctgggtggacaccatttacaatgcccagaaccagctgcaacagctgcgtgcacaggagcccccaggcagtcagcagcccctgcagagcctggaagaggaggaggatgagcaggaggaggaagaggaggaggaggaggaggaggaggaaggcgaggacagtggcacttcagctgccagctcccctaccatcatgcggaaaagcagcggcagccccgactctcagcactggaagctgaccctggcccagctctaccgaatcaggaccaccctgctgcttaactccacgctcactgcctcggaggtctgagcagagggaggcccccaagagtgccattgaccaagagacagcagacagcctgcctcctggggcgtgccggcacctgcttcagctactgcctcctgtatgcatgagccggatgctgggcaggatccctgcctacgcccgggcccgatttgcgctttgccggactggatggagtggaggaggcccaggccacagtaccaccccacctgcccaggcagcccctcgtcacctactccccgaagttaccagctcagctcgagtcttcagggctgggctcctaggctgcccatcctacttctaccctcactggcctccagtgggattcactcctgccctgcccccaccttcccagtcccacaggccacccctggcttgggctgggttctgtgaagttacgtatttattgagcttttggttcttttataaagacttgtctagactcca

SEQ ID NO: 15928 - DNA, 210 bp, Homo sapiens
  source 1..210: mol_type = unassigned DNA
atgtttctctactggaggaagcggggcacctacgagctggaggccctgcccggcgacctggccgagctggagctggggacggtggagcgtttctcgtggagctccaccctggacatcatcgaggacctcggggacgaccagagccccgctgaaaagaagggactgcgctgtcagaaccccgcctgcatggacaaggggcgggcggccaag

SEQ ID NO: 15929 - DNA, 4698 bp, Homo sapiens
  source 1..4698: mol_type = unassigned DNA
agcattcaaggagctccccaggagaaagagcaagttctgaggagccctctgagcccggcattggtgttgaggagggagtcagagaagagaggggcccggggccgcgcagaggcgcagaggtatgtcaccacgccgactgccagcagctgcaccgccgggggcccctcaacctctgcgaggcctgtgacagcaagttccacagcaccatgcattatgatgggcatgtccgcttcgaccttcccccacaaggctctgtgctggcccggaacgtgtccacccggtcatgcccgccgcgcaccagccccgcagtggacttggaggaggaggaggaggagagctctgtggatggcaaaggggaccggaagagcacaggcctgaaactctccaagaagaaagcaaggaggagacacacggatgacccaagcaaggaatgcttcactctgaaatttgacctgaatgtggacattgagacagagatcgtcccagccatgaagaagaagtcactgggggaggtgctgctgcctgtatttgaaaggaagggcattgcgctgggcaaagtggacatctacctggaccagtccaacacacccctgtccctcaccttcgaggcctacaggttcgggggacactaccttcgtgtcaaagccccagccaagcctggagatgagggcaaggtggagcagggcatgaaggactccaagtccctgagtttgccgattctgcggccagctgggaccgggccccccgccctggagcgtgtggacgcccagagccgccgggagagcctggacatcttggcccctggccgccgccgcaagaacatgtcggagttcctgggggaggcgagcatccccgggcaggagccccccacgccctccagctgctctctgcccagcggcagcagtggcagcaccaacactggcgacagctggaagaaccgggcggccagtcgcttcagcggctttttcagctccggccccagcaccagcgcctttggccgggaggtagacaagatggagcagctggagggcaagctgcacacctacagcctcttcgggctgcccaggctgccccgggggctgcgcttcgaccatgactcctgggaggaggagtacgatgaagacgaggatgaggacaatgcctgcctgaggctggaggacagctggcgggagctcattgatgggcatgagaagctgacccggcggcagtgccaccagcaggaggcggtgtgggagctgctgcacacggaggcctcctacatcaggaaactgcgggtgatcatcaacctgttcctgtgctgcctcctgaacctgcaagagtcagggctgctgtgtgaggtggaggcggagcgcctgttcagcaacatcccggagatcgcgcagctgcaccgcaggctgtgggctagcgtgatggcgccggtgctggagaaggcgcggcgcacgcgagcgctgctacagcccggggacttcctcaaaggcttcaagatgttcggctcgctcttcaagccctacatccgctactgcatggaggaggagggctgcatggagtacatgcgcggcctgctgcgcgacaacgacctcttccgggcctacatcacgtgggcggagaagcacccacagtgccagaggctgaagctgagcgacatgctggccaaaccccaccagcggctcaccaagtacccgctgctgctcaagtcggtgctgaggaagaccgaggagccgcgcgccaaggaggccgtcgtcgccatgatcggctccgtggagcgcttcatccaccacgtgaacgcgtgcatgcggcagcggcaggagcggcagcggctggcggccgtggtgagccgcatcgacgcctacgaggtggtggaaagcagcagcgacgaagtggacaagctcctgaaggaatttctgcacctggacttgacagcgcccatccctggcgcctccccggaggagacgcggcagctgctgctggaggggagcctgaggatgaaggaggggaaggacagcaagatggatgtgtactgcttcctcttcacggatctgctgttggtgaccaaagcagtgaagaaggcagagaggaccagggtcatcaggccacccctgctcgtggacaagattgtgtgccgggagctacgggaccctgggtccttcctccttatctacctgaatgagtttcacagtgctgtaggggcctacacgttccaggccagtggccaggccttgtgccgtggctgggtggacaccatttacaatgcccagaaccagctgcaacagctgcgtgcacaggagcccccaggcagtcagcagcccctgcagagcctggaagaggaggaggatgagcaggaggaggaagaggaggaggaggaggaggaggaggaaggcgaggacagtggcacttcagctgccagctcccctaccatcatgcggaaaagcagcggcagccccgactctcagcactgtgcctcagatggctccacggagaccctggccatggttgtggtagagcctggggacacgctgtcctcccccgagttcgacagcggtcctttcagctcccagtctgatgagacctctctcagcaccactgcctcatctgccacgcccaccagtgagctgctgcccctgggtccggtggacggccgctcctgctccatggactctgcctacggcaccctctccccaacctccttacaagactttgtggccccaggcccaatggcagagctagtgcctcgggccccagagtccccacgagttccttcccctccaccctcgccccgtctccgccgccgcacccctgtccagctgttgagctgcccgccccacctgctcaagtctaagtccgaggccagcctcctccagctgctggcaggggctggcacccatgggacaccctctgcccccagccgcagcctgtcagagctctgcctggctgttccagccccaggtattaggactcagggctcccctcaggaagctgggcccagctgggattgccgaggggcccctagccctggcagcggtcctgggctagtcggctgcctggccggggaacctgcaggctcccacaggaagaggtgtggagacctgccctcgggggcctctcccagggtccagcctgagcccccaccaggggtctctgcccagcacaggaagctgaccctggcccagctctaccgaatcaggaccaccctgctgcttaactccacgctcactgcctcggaggtctgagcagagggaggcccccaagagtgccattgaccaagagacagcagacagcctgcctcctggggcgtgccggcacctgcttcagctactgcctcctgtatgcatgagccggatgctgggcaggatccctgcctacgcccgggcccgatttgcgctttgccggactggatggagtggaggaggcccaggccacagtaccaccccacctgcccaggcagcccctcgtcacctactccccgaagttaccagctcagctcgagtcttcagggctgggctcctaggctgcccatcctacttctaccctcactggcctccagtgggattcactcctgccctgcccccaccttcccagtcccacaggccacccctggcttgggctgggttctgtgaagttacgtatttattgagcttttggttcttttataaagacttgtctagactccactgggaagagtcctttgctttggggcccagtgactcggggcacttgagttcagggcggcctccttgtgttcctgtgctcctccacttgccacggatgggccacggatggagcttgccatgggaagcactgggaagtaatggggtgtggggtgccaccagaccaacacccccagacttccccaccttcagccaccatcagagcctctccccaggtgccccccggggattcagggctgaatctgcccagttcccacactcaggccagccctcttgggaaggtgggtcctccatgggggtcccttcaggaactttttttttttttttaatacagagtctcactctgtcacctaggttggagtgcagtggtgtgatgtcggctcactgcaacctctgcctcccgggttcaaacgattctcctgccccagccactctagtagctggaactgcaggtgtgcaccaccacgccgggctagtttttgtattttaagtagagacggcatttcaccatattggtcaggctggtctcgaactcctgaccccaagtgttccgcccgcctctgcctcccatagtgctagaattacaggcctgagctactgcgcttggccccttgcggtacttttggcccaacctcctccatggctggggacgcggaggccgagagagaagtcacttgccctggctctaccttgaagtggttctcagggttggggcgagagtcggggtggggaccgagatgcagctctatcctgtgcccctggtcgcagcaggcagcccagcgcttcgcgtgttctacttggcctgtccgctgccgcctaatgagctcaggtctaggccgagcagagggggcacctggtcggactcggttgggctcgggcggccccgcctccccccgcccgccaggcgggcccttctcgacggcgcggggcgggccctgcgggcgcggggctgaaggcggaaccacgacgggcagagagcacggagccgggaagcccctgggcgcccgtcggagggctatggagcagcggccgc

SEQ ID NO: 15930 - DNA, 4725 bp, Homo sapiens
  source 1..4725: mol_type = unassigned DNA
gcagaccgcggcttcctccggccgccatggggacaggacccggtgtctccggacgcctagcagcctccaggccgggcccggggctgcccctccgggactcggagccctcctgggccgggggtcgtgcccgcgacggtgatagccaggtatgtcaccacgccgactgccagcagctgcaccgccgggggcccctcaacctctgcgaggcctgtgacagcaagttccacagcaccatgcattatgatgggcatgtccgcttcgaccttcccccacaaggctctgtgctggcccggaacgtgtccacccggtcatgcccgccgcgcaccagccccgcagtggacttggaggaggaggaggaggagagctctgtggatggcaaaggggaccggaagagcacaggcctgaaactctccaagaagaaagcaaggaggagacacacggatgacccaagcaaggaatgcttcactctgaaatttgacctgaatgtggacattgagacagagatcgtcccagccatgaagaagaagtcactgggggaggtgctgctgcctgtatttgaaaggaagggcattgcgctgggcaaagtggacatctacctggaccagtccaacacacccctgtccctcaccttcgaggcctacaggttcgggggacactaccttcgtgtcaaagccccagccaagcctggagatgagggcaaggtggagcagggcatgaaggactccaagtccctgagtttgccgattctgcggccagctgggaccgggccccccgccctggagcgtgtggacgcccagagccgccgggagagcctggacatcttggcccctggccgccgccgcaagaacatgtcggagttcctgggggaggcgagcatccccgggcaggagccccccacgccctccagctgctctctgcccagcggcagcagtggcagcaccaacactggcgacagctggaagaaccgggcggccagtcgcttcagcggctttttcagctccggccccagcaccagcgcctttggccgggaggtagacaagatggagcagctggagggcaagctgcacacctacagcctcttcgggctgcccaggctgccccgggggctgcgcttcgaccatgactcctgggaggaggagtacgatgaagacgaggatgaggacaatgcctgcctgaggctggaggacagctggcgggagctcattgatgggcatgagaagctgacccggcggcagtgccaccagcaggaggcggtgtgggagctgctgcacacggaggcctcctacatcaggaaactgcgggtgatcatcaacctgttcctgtgctgcctcctgaacctgcaagagtcagggctgctgtgtgaggtggaggcggagcgcctgttcagcaacatcccggagatcgcgcagctgcaccgcaggctgtgggctagcgtgatggcgccggtgctggagaaggcgcggcgcacgcgagcgctgctacagcccggggacttcctcaaaggcttcaagatgttcggctcgctcttcaagccctacatccgctactgcatggaggaggagggctgcatggagtacatgcgcggcctgctgcgcgacaacgacctcttccgggcctacatcacgtgggcggagaagcacccacagtgccagaggctgaagctgagcgacatgctggccaaaccccaccagcggctcaccaagtacccgctgctgctcaagtcggtgctgaggaagaccgaggagccgcgcgccaaggaggccgtcgtcgccatgatcggctccgtggagcgcttcatccaccacgtgaacgcgtgcatgcggcagcggcaggagcggcagcggctggcggccgtggtgagccgcatcgacgcctacgaggtggtggaaagcagcagcgacgaagtggacaagctcctgaaggaatttctgcacctggacttgacagcgcccatccctggcgcctccccggaggagacgcggcagctgctgctggaggggagcctgaggatgaaggaggggaaggacagcaagatggatgtgtactgcttcctcttcacggatctgctgttggtgaccaaagcagtgaagaaggcagagaggaccagggtcatcaggccacccctgctcgtggacaagattgtgtgccgggagctacgggaccctgggtccttcctccttatctacctgaatgagtttcacagtgctgtaggggcctacacgttccaggccagtggccaggccttgtgccgtggctgggtggacaccatttacaatgcccagaaccagctgcaacagctgcgtgcacaggagcccccaggcagtcagcagcccctgcagagcctggaagaggaggaggatgagcaggaggaggaagaggaggaggaggaggaggaggaggaaggcgaggacagtggcacttcagctgccagctcccctaccatcatgcggaaaagcagcggcagccccgactctcagcactgtgcctcagatggctccacggagaccctggccatggttgtggtagagcctggggacacgctgtcctcccccgagttcgacagcggtcctttcagctcccagtctgatgagacctctctcagcaccactgcctcatctgccacgcccaccagtgagctgctgcccctgggtccggtggacggccgctcctgctccatggactctgcctacggcaccctctccccaacctccttacaagactttgtggccccaggcccaatggcagagctagtgcctcgggccccagagtccccacgagttccttcccctccaccctcgccccgtctccgccgccgcacccctgtccagctgttgagctgcccgccccacctgctcaagtctaagtccgaggccagcctcctccagctgctggcaggggctggcacccatgggacaccctctgcccccagccgcagcctgtcagagctctgcctggctgttccagccccaggtattaggactcagggctcccctcaggaagctgggcccagctgggattgccgaggggcccctagccctggcagcggtcctgggctagtcggctgcctggccggggaacctgcaggctcccacaggaagaggtgtggagacctgccctcgggggcctctcccagggtccagcctgagcccccaccaggggtctctgcccagcacaggaagctgaccctggcccagctctaccgaatcaggaccaccctgctgcttaactccacgctcactgcctcggaggtctgagcagagggaggcccccaagagtgccattgaccaagagacagcagacagcctgcctcctggggcgtgccggcacctgcttcagctactgcctcctgtatgcatgagccggatgctgggcaggatccctgcctacgcccgggcccgatttgcgctttgccggactggatggagtggaggaggcccaggccacagtaccaccccacctgcccaggcagcccctcgtcacctactccccgaagttaccagctcagctcgagtcttcagggctgggctcctaggctgcccatcctacttctaccctcactggcctccagtgggattcactcctgccctgcccccaccttcccagtcccacaggccacccctggcttgggctgggttctgtgaagttacgtatttattgagcttttggttcttttataaagacttgtctagactccactgggaagagtcctttgctttggggcccagtgactcggggcacttgagttcagggcggcctccttgtgttcctgtgctcctccacttgccacggatgggccacggatggagcttgccatgggaagcactgggaagtaatggggtgtggggtgccaccagaccaacacccccagacttccccaccttcagccaccatcagagcctctccccaggtgccccccggggattcagggctgaatctgcccagttcccacactcaggccagccctcttgggaaggtgggtcctccatgggggtcccttcaggaactttttttttttttttaatacagagtctcactctgtcacctaggttggagtgcagtggtgtgatgtcggctcactgcaacctctgcctcccgggttcaaacgattctcctgccccagccactctagtagctggaactgcaggtgtgcaccaccacgccgggctagtttttgtattttaagtagagacggcatttcaccatattggtcaggctggtctcgaactcctgaccccaagtgttccgcccgcctctgcctcccatagtgctagaattacaggcctgagctactgcgcttggccccttgcggtacttttggcccaacctcctccatggctggggacgcggaggccgagagagaagtcacttgccctggctctaccttgaagtggttctcagggttggggcgagagtcggggtggggaccgagatgcagctctatcctgtgcccctggtcgcagcaggcagcccagcgcttcgcgtgttctacttggcctgtccgctgccgcctaatgagctcaggtctaggccgagcagagggggcacctggtcggactcggttgggctcgggcggccccgcctccccccgcccgccaggcgggcccttctcgacggcgcggggcgggccctgcgggcgcggggctgaaggcggaaccacgacgggcagagagcacggagccgggaagcccctgggcgcccgtcggagggctatggagcagcggccgc

SEQ ID NO: 15931 - DNA, 4715 bp, Homo sapiens
  source 1..4715: mol_type = unassigned DNA
agtttgcgctgagtcgactgagcccgtcccgcggctcccgtccccctctccccgcgcgccccatgaggctttggcagtctcggcccgagccttagagccttagacaccggggaggagaccctggtcctgttcctaggtatgtcaccacgccgactgccagcagctgcaccgccgggggcccctcaacctctgcgaggcctgtgacagcaagttccacagcaccatgcattatgatgggcatgtccgcttcgaccttcccccacaaggctctgtgctggcccggaacgtgtccacccggtcatgcccgccgcgcaccagccccgcagtggacttggaggaggaggaggaggagagctctgtggatggcaaaggggaccggaagagcacaggcctgaaactctccaagaagaaagcaaggaggagacacacggatgacccaagcaaggaatgcttcactctgaaatttgacctgaatgtggacattgagacagagatcgtcccagccatgaagaagaagtcactgggggaggtgctgctgcctgtatttgaaaggaagggcattgcgctgggcaaagtggacatctacctggaccagtccaacacacccctgtccctcaccttcgaggcctacaggttcgggggacactaccttcgtgtcaaagccccagccaagcctggagatgagggcaaggtggagcagggcatgaaggactccaagtccctgagtttgccgattctgcggccagctgggaccgggccccccgccctggagcgtgtggacgcccagagccgccgggagagcctggacatcttggcccctggccgccgccgcaagaacatgtcggagttcctgggggaggcgagcatccccgggcaggagccccccacgccctccagctgctctctgcccagcggcagcagtggcagcaccaacactggcgacagctggaagaaccgggcggccagtcgcttcagcggctttttcagctccggccccagcaccagcgcctttggccgggaggtagacaagatggagcagctggagggcaagctgcacacctacagcctcttcgggctgcccaggctgccccgggggctgcgcttcgaccatgactcctgggaggaggagtacgatgaagacgaggatgaggacaatgcctgcctgaggctggaggacagctggcgggagctcattgatgggcatgagaagctgacccggcggcagtgccaccagcaggaggcggtgtgggagctgctgcacacggaggcctcctacatcaggaaactgcgggtgatcatcaacctgttcctgtgctgcctcctgaacctgcaagagtcagggctgctgtgtgaggtggaggcggagcgcctgttcagcaacatcccggagatcgcgcagctgcaccgcaggctgtgggctagcgtgatggcgccggtgctggagaaggcgcggcgcacgcgagcgctgctacagcccggggacttcctcaaaggcttcaagatgttcggctcgctcttcaagccctacatccgctactgcatggaggaggagggctgcatggagtacatgcgcggcctgctgcgcgacaacgacctcttccgggcctacatcacgtgggcggagaagcacccacagtgccagaggctgaagctgagcgacatgctggccaaaccccaccagcggctcaccaagtacccgctgctgctcaagtcggtgctgaggaagaccgaggagccgcgcgccaaggaggccgtcgtcgccatgatcggctccgtggagcgcttcatccaccacgtgaacgcgtgcatgcggcagcggcaggagcggcagcggctggcggccgtggtgagccgcatcgacgcctacgaggtggtggaaagcagcagcgacgaagtggacaagctcctgaaggaatttctgcacctggacttgacagcgcccatccctggcgcctccccggaggagacgcggcagctgctgctggaggggagcctgaggatgaaggaggggaaggacagcaagatggatgtgtactgcttcctcttcacggatctgctgttggtgaccaaagcagtgaagaaggcagagaggaccagggtcatcaggccacccctgctcgtggacaagattgtgtgccgggagctacgggaccctgggtccttcctccttatctacctgaatgagtttcacagtgctgtaggggcctacacgttccaggccagtggccaggccttgtgccgtggctgggtggacaccatttacaatgcccagaaccagctgcaacagctgcgtgcacaggagcccccaggcagtcagcagcccctgcagagcctggaagaggaggaggatgagcaggaggaggaagaggaggaggaggaggaggaggaggaaggcgaggacagtggcacttcagctgccagctcccctaccatcatgcggaaaagcagcggcagccccgactctcagcactgtgcctcagatggctccacggagaccctggccatggttgtggtagagcctggggacacgctgtcctcccccgagttcgacagcggtcctttcagctcccagtctgatgagacctctctcagcaccactgcctcatctgccacgcccaccagtgagctgctgcccctgggtccggtggacggccgctcctgctccatggactctgcctacggcaccctctccccaacctccttacaagactttgtggccccaggcccaatggcagagctagtgcctcgggccccagagtccccacgagttccttcccctccaccctcgccccgtctccgccgccgcacccctgtccagctgttgagctgcccgccccacctgctcaagtctaagtccgaggccagcctcctccagctgctggcaggggctggcacccatgggacaccctctgcccccagccgcagcctgtcagagctctgcctggctgttccagccccaggtattaggactcagggctcccctcaggaagctgggcccagctgggattgccgaggggcccctagccctggcagcggtcctgggctagtcggctgcctggccggggaacctgcaggctcccacaggaagaggtgtggagacctgccctcgggggcctctcccagggtccagcctgagcccccaccaggggtctctgcccagcacaggaagctgaccctggcccagctctaccgaatcaggaccaccctgctgcttaactccacgctcactgcctcggaggtctgagcagagggaggcccccaagagtgccattgaccaagagacagcagacagcctgcctcctggggcgtgccggcacctgcttcagctactgcctcctgtatgcatgagccggatgctgggcaggatccctgcctacgcccgggcccgatttgcgctttgccggactggatggagtggaggaggcccaggccacagtaccaccccacctgcccaggcagcccctcgtcacctactccccgaagttaccagctcagctcgagtcttcagggctgggctcctaggctgcccatcctacttctaccctcactggcctccagtgggattcactcctgccctgcccccaccttcccagtcccacaggccacccctggcttgggctgggttctgtgaagttacgtatttattgagcttttggttcttttataaagacttgtctagactccactgggaagagtcctttgctttggggcccagtgactcggggcacttgagttcagggcggcctccttgtgttcctgtgctcctccacttgccacggatgggccacggatggagcttgccatgggaagcactgggaagtaatggggtgtggggtgccaccagaccaacacccccagacttccccaccttcagccaccatcagagcctctccccaggtgccccccggggattcagggctgaatctgcccagttcccacactcaggccagccctcttgggaaggtgggtcctccatgggggtcccttcaggaactttttttttttttttaatacagagtctcactctgtcacctaggttggagtgcagtggtgtgatgtcggctcactgcaacctctgcctcccgggttcaaacgattctcctgccccagccactctagtagctggaactgcaggtgtgcaccaccacgccgggctagtttttgtattttaagtagagacggcatttcaccatattggtcaggctggtctcgaactcctgaccccaagtgttccgcccgcctctgcctcccatagtgctagaattacaggcctgagctactgcgcttggccccttgcggtacttttggcccaacctcctccatggctggggacgcggaggccgagagagaagtcacttgccctggctctaccttgaagtggttctcagggttggggcgagagtcggggtggggaccgagatgcagctctatcctgtgcccctggtcgcagcaggcagcccagcgcttcgcgtgttctacttggcctgtccgctgccgcctaatgagctcaggtctaggccgagcagagggggcacctggtcggactcggttgggctcgggcggccccgcctccccccgcccgccaggcgggcccttctcgacggcgcggggcgggccctgcgggcgcggggctgaaggcggaaccacgacgggcagagagcacggagccgggaagcccctgggcgcccgtcggagggctatggagcagcggccgc

SEQ ID NO: 15932 - DNA, 4794 bp, Homo sapiens
  source 1..4794: mol_type = unassigned DNA
accgcggtgcactccagcccccaggaagagaggcagcttggagggggccaaattcagggtcaaagatgagtcttggggaacgggggtcgccccagaccttcgggggctcctctgtctctaaagggagcgatgcagggcacgaccagagccccgctgaaaagaagggactgcgctgtcagaaccccgcctgcatggacaaggggcgggcggccaaggtatgtcaccacgccgactgccagcagctgcaccgccgggggcccctcaacctctgcgaggcctgtgacagcaagttccacagcaccatgcattatgatgggcatgtccgcttcgaccttcccccacaaggctctgtgctggcccggaacgtgtccacccggtcatgcccgccgcgcaccagccccgcagtggacttggaggaggaggaggaggagagctctgtggatggcaaaggggaccggaagagcacaggcctgaaactctccaagaagaaagcaaggaggagacacacggatgacccaagcaaggaatgcttcactctgaaatttgacctgaatgtggacattgagacagagatcgtcccagccatgaagaagaagtcactgggggaggtgctgctgcctgtatttgaaaggaagggcattgcgctgggcaaagtggacatctacctggaccagtccaacacacccctgtccctcaccttcgaggcctacaggttcgggggacactaccttcgtgtcaaagccccagccaagcctggagatgagggcaaggtggagcagggcatgaaggactccaagtccctgagtttgccgattctgcggccagctgggaccgggccccccgccctggagcgtgtggacgcccagagccgccgggagagcctggacatcttggcccctggccgccgccgcaagaacatgtcggagttcctgggggaggcgagcatccccgggcaggagccccccacgccctccagctgctctctgcccagcggcagcagtggcagcaccaacactggcgacagctggaagaaccgggcggccagtcgcttcagcggctttttcagctccggccccagcaccagcgcctttggccgggaggtagacaagatggagcagctggagggcaagctgcacacctacagcctcttcgggctgcccaggctgccccgggggctgcgcttcgaccatgactcctgggaggaggagtacgatgaagacgaggatgaggacaatgcctgcctgaggctggaggacagctggcgggagctcattgatgggcatgagaagctgacccggcggcagtgccaccagcaggaggcggtgtgggagctgctgcacacggaggcctcctacatcaggaaactgcgggtgatcatcaacctgttcctgtgctgcctcctgaacctgcaagagtcagggctgctgtgtgaggtggaggcggagcgcctgttcagcaacatcccggagatcgcgcagctgcaccgcaggctgtgggctagcgtgatggcgccggtgctggagaaggcgcggcgcacgcgagcgctgctacagcccggggacttcctcaaaggcttcaagatgttcggctcgctcttcaagccctacatccgctactgcatggaggaggagggctgcatggagtacatgcgcggcctgctgcgcgacaacgacctcttccgggcctacatcacgtgggcggagaagcacccacagtgccagaggctgaagctgagcgacatgctggccaaaccccaccagcggctcaccaagtacccgctgctgctcaagtcggtgctgaggaagaccgaggagccgcgcgccaaggaggccgtcgtcgccatgatcggctccgtggagcgcttcatccaccacgtgaacgcgtgcatgcggcagcggcaggagcggcagcggctggcggccgtggtgagccgcatcgacgcctacgaggtggtggaaagcagcagcgacgaagtggacaagctcctgaaggaatttctgcacctggacttgacagcgcccatccctggcgcctccccggaggagacgcggcagctgctgctggaggggagcctgaggatgaaggaggggaaggacagcaagatggatgtgtactgcttcctcttcacggatctgctgttggtgaccaaagcagtgaagaaggcagagaggaccagggtcatcaggccacccctgctcgtggacaagattgtgtgccgggagctacgggaccctgggtccttcctccttatctacctgaatgagtttcacagtgctgtaggggcctacacgttccaggccagtggccaggccttgtgccgtggctgggtggacaccatttacaatgcccagaaccagctgcaacagctgcgtgcacaggagcccccaggcagtcagcagcccctgcagagcctggaagaggaggaggatgagcaggaggaggaagaggaggaggaggaggaggaggaggaaggcgaggacagtggcacttcagctgccagctcccctaccatcatgcggaaaagcagcggcagccccgactctcagcactgtgcctcagatggctccacggagaccctggccatggttgtggtagagcctggggacacgctgtcctcccccgagttcgacagcggtcctttcagctcccagtctgatgagacctctctcagcaccactgcctcatctgccacgcccaccagtgagctgctgcccctgggtccggtggacggccgctcctgctccatggactctgcctacggcaccctctccccaacctccttacaagactttgtggccccaggcccaatggcagagctagtgcctcgggccccagagtccccacgagttccttcccctccaccctcgccccgtctccgccgccgcacccctgtccagctgttgagctgcccgccccacctgctcaagtctaagtccgaggccagcctcctccagctgctggcaggggctggcacccatgggacaccctctgcccccagccgcagcctgtcagagctctgcctggctgttccagccccaggtattaggactcagggctcccctcaggaagctgggcccagctgggattgccgaggggcccctagccctggcagcggtcctgggctagtcggctgcctggccggggaacctgcaggctcccacaggaagaggtgtggagacctgccctcgggggcctctcccagggtccagcctgagcccccaccaggggtctctgcccagcacaggaagctgaccctggcccagctctaccgaatcaggaccaccctgctgcttaactccacgctcactgcctcggaggtctgagcagagggaggcccccaagagtgccattgaccaagagacagcagacagcctgcctcctggggcgtgccggcacctgcttcagctactgcctcctgtatgcatgagccggatgctgggcaggatccctgcctacgcccgggcccgatttgcgctttgccggactggatggagtggaggaggcccaggccacagtaccaccccacctgcccaggcagcccctcgtcacctactccccgaagttaccagctcagctcgagtcttcagggctgggctcctaggctgcccatcctacttctaccctcactggcctccagtgggattcactcctgccctgcccccaccttcccagtcccacaggccacccctggcttgggctgggttctgtgaagttacgtatttattgagcttttggttcttttataaagacttgtctagactccactgggaagagtcctttgctttggggcccagtgactcggggcacttgagttcagggcggcctccttgtgttcctgtgctcctccacttgccacggatgggccacggatggagcttgccatgggaagcactgggaagtaatggggtgtggggtgccaccagaccaacacccccagacttccccaccttcagccaccatcagagcctctccccaggtgccccccggggattcagggctgaatctgcccagttcccacactcaggccagccctcttgggaaggtgggtcctccatgggggtcccttcaggaactttttttttttttttaatacagagtctcactctgtcacctaggttggagtgcagtggtgtgatgtcggctcactgcaacctctgcctcccgggttcaaacgattctcctgccccagccactctagtagctggaactgcaggtgtgcaccaccacgccgggctagtttttgtattttaagtagagacggcatttcaccatattggtcaggctggtctcgaactcctgaccccaagtgttccgcccgcctctgcctcccatagtgctagaattacaggcctgagctactgcgcttggccccttgcggtacttttggcccaacctcctccatggctggggacgcggaggccgagagagaagtcacttgccctggctctaccttgaagtggttctcagggttggggcgagagtcggggtggggaccgagatgcagctctatcctgtgcccctggtcgcagcaggcagcccagcgcttcgcgtgttctacttggcctgtccgctgccgcctaatgagctcaggtctaggccgagcagagggggcacctggtcggactcggttgggctcgggcggccccgcctccccccgcccgccaggcgggcccttctcgacggcgcggggcgggccctgcgggcgcggggctgaaggcggaaccacgacgggcagagagcacggagccgggaagcccctgggcgcccgtcggagggctatggagcagcggccgc

SEQ ID NO: 15933 - DNA, 4968 bp, Homo sapiens
  source 1..4968: mol_type = unassigned DNA
gcaagttccacagcaccatgcattatgatgggcatgtccgcttcgaccttcccccacaaggctctgtgctggcccggaacgtgtccacccggtcatgcccgccgcgcaccagccccgcagtggacttggaggaggaggaggaggagagctctgtggatggcaaaggggaccggaagagcacaggcctgaaactctccaagaagaaagcaaggaggagacacacggatgacccaagcaaggaatgcttcactctgaaatttgacctgaatgtggacattgagacagagatcgtcccagccatgaagaagaagtcactggggtagggcttgatggggctcagggtggaagtgggactgggagtaggggtggccccatgttgcaggctccgggtctctgcaggtgtgacgtgtgtgtctgtgtggtggcccgtgagcgagcgcatccctgcgtgggcagacccgtgctggtgtgcacgccagtgtgagggagtgcggtggggtctgtgtacttgtgcattttaatcatgtatgcaggagccaggcctgcgtgtgggcaggcgtgtgacaggtctgccgtggtatgcagatgcgcctgtgtgagcacctctgcgggcaggtgtctgtggacctgcgtgtgatcccatgcgggcttcccttttccgttgggaaggtgggggcagctggggctgtgggtggggcgggggctcgtgggggcggggcccaagctgaagcgactggccgcctggttctaacacacatgcctcctgtcctgggggcagggaggtgctgctgcctgtatttgaaaggaagggcattgcgctgggcaaagtggacatctacctggaccagtccaacacacccctgtccctcaccttcgaggcctacaggttcgggggacactaccttcgtgtcaaagccccagccaagcctggagatgagggcaaggtggagcagggcatgaaggactccaagtccctgagtttgccgattctgcggccagctgggaccgggccccccgccctggagcgtgtggacgcccagagccgccgggagagcctggacatcttggcccctggccgccgccgcaagaacatgtcggagttcctgggggaggcgagcatccccgggcaggagccccccacgccctccagctgctctctgcccagcggcagcagtggcagcaccaacactggcgacagctggaagaaccgggcggccagtcgcttcagcggctttttcagctccggccccagcaccagcgcctttggccgggaggtagacaagatggagcagctggagggcaagctgcacacctacagcctcttcgggctgcccaggctgccccgggggctgcgcttcgaccatgactcctgggaggaggagtacgatgaagacgaggatgaggacaatgcctgcctgaggctggaggacagctggcgggagctcattgatgggcatgagaagctgacccggcggcagtgccaccagcaggaggcggtgtgggagctgctgcacacggaggcctcctacatcaggaaactgcgggtgatcatcaacctgttcctgtgctgcctcctgaacctgcaagagtcagggctgctgtgtgaggtggaggcggagcgcctgttcagcaacatcccggagatcgcgcagctgcaccgcaggctgtgggctagcgtgatggcgccggtgctggagaaggcgcggcgcacgcgagcgctgctacagcccggggacttcctcaaaggcttcaagatgttcggctcgctcttcaagccctacatccgctactgcatggaggaggagggctgcatggagtacatgcgcggcctgctgcgcgacaacgacctcttccgggcctacatcacgtgggcggagaagcacccacagtgccagaggctgaagctgagcgacatgctggccaaaccccaccagcggctcaccaagtacccgctgctgctcaagtcggtgctgaggaagaccgaggagccgcgcgccaaggaggccgtcgtcgccatgatcggctccgtggagcgcttcatccaccacgtgaacgcgtgcatgcggcagcggcaggagcggcagcggctggcggccgtggtgagccgcatcgacgcctacgaggtggtggaaagcagcagcgacgaagtggacaagctcctgaaggaatttctgcacctggacttgacagcgcccatccctggcgcctccccggaggagacgcggcagctgctgctggaggggagcctgaggatgaaggaggggaaggacagcaagatggatgtgtactgcttcctcttcacggatctgctgttggtgaccaaagcagtgaagaaggcagagaggaccagggtcatcaggccacccctgctcgtggacaagattgtgtgccgggagctacgggaccctgggtccttcctccttatctacctgaatgagtttcacagtgctgtaggggcctacacgttccaggccagtggccaggccttgtgccgtggctgggtggacaccatttacaatgcccagaaccagctgcaacagctgcgtgcacaggagcccccaggcagtcagcagcccctgcagagcctggaagaggaggaggatgagcaggaggaggaagaggaggaggaggaggaggaggaggaaggcgaggacagtggcacttcagctgccagctcccctaccatcatgcggaaaagcagcggcagccccgactctcagcactgtgcctcagatggctccacggagaccctggccatggttgtggtagagcctggggacacgctgtcctcccccgagttcgacagcggtcctttcagctcccagtctgatgagacctctctcagcaccactgcctcatctgccacgcccaccagtgagctgctgcccctgggtccggtggacggccgctcctgctccatggactctgcctacggcaccctctccccaacctccttacaagactttgtggccccaggcccaatggcagagctagtgcctcgggccccagagtccccacgagttccttcccctccaccctcgccccgtctccgccgccgcacccctgtccagctgttgagctgcccgccccacctgctcaagtctaagtccgaggccagcctcctccagctgctggcaggggctggcacccatgggacaccctctgcccccagccgcagcctgtcagagctctgcctggctgttccagccccaggtattaggactcagggctcccctcaggaagctgggcccagctgggattgccgaggggcccctagccctggcagcggtcctgggctagtcggctgcctggccggggaacctgcaggctcccacaggaagaggtgtggagacctgccctcgggggcctctcccagggtccagcctgagcccccaccaggggtctctgcccagcacaggaagctgaccctggcccagctctaccgaatcaggaccaccctgctgcttaactccacgctcactgcctcggaggtctgagcagagggaggcccccaagagtgccattgaccaagagacagcagacagcctgcctcctggggcgtgccggcacctgcttcagctactgcctcctgtatgcatgagccggatgctgggcaggatccctgcctacgcccgggcccgatttgcgctttgccggactggatggagtggaggaggcccaggccacagtaccaccccacctgcccaggcagcccctcgtcacctactccccgaagttaccagctcagctcgagtcttcagggctgggctcctaggctgcccatcctacttctaccctcactggcctccagtgggattcactcctgccctgcccccaccttcccagtcccacaggccacccctggcttgggctgggttctgtgaagttacgtatttattgagcttttggttcttttataaagacttgtctagactccactgggaagagtcctttgctttggggcccagtgactcggggcacttgagttcagggcggcctccttgtgttcctgtgctcctccacttgccacggatgggccacggatggagcttgccatgggaagcactgggaagtaatggggtgtggggtgccaccagaccaacacccccagacttccccaccttcagccaccatcagagcctctccccaggtgccccccggggattcagggctgaatctgcccagttcccacactcaggccagccctcttgggaaggtgggtcctccatgggggtcccttcaggaactttttttttttttttaatacagagtctcactctgtcacctaggttggagtgcagtggtgtgatgtcggctcactgcaacctctgcctcccgggttcaaacgattctcctgccccagccactctagtagctggaactgcaggtgtgcaccaccacgccgggctagtttttgtattttaagtagagacggcatttcaccatattggtcaggctggtctcgaactcctgaccccaagtgttccgcccgcctctgcctcccatagtgctagaattacaggcctgagctactgcgcttggccccttgcggtacttttggcccaacctcctccatggctggggacgcggaggccgagagagaagtcacttgccctggctctaccttgaagtggttctcagggttggggcgagagtcggggtggggaccgagatgcagctctatcctgtgcccctggtcgcagcaggcagcccagcgcttcgcgtgttctacttggcctgtccgctgccgcctaatgagctcaggtctaggccgagcagagggggcacctggtcggactcggttgggctcgggcggccccgcctccccccgcccgccaggcgggcccttctcgacggcgcggggcgggccctgcgggcgcggggctgaaggcggaaccacgacgggcagagagcacggagccgggaagcccctgggcgcccgtcggagggctatggagcagcggccgc

SEQ ID NO: 15934 - DNA, 6604 bp, Homo sapiens
  source 1..6604: mol_type = unassigned DNA
gggactccggcgagagcgacgcaaggtcggctgcggcggcggcccgagggcgcccgtgtgcccagtgcgcggcggggacggccgcgagctcgctggagggctccccagaataatccagaagtcgattccatcatggcagaactcaaggtggaggcgccggccagcgtagactggcagaaacgctgcctgaccctggaaactcagcttttccggttccgcctacaggccagcaagataagggagctgctggctgacaagatgcaggagctggagcagaggctgctggaggcagagcagagagcagagaacgctgagacccaggtgggtgtcatggaagagaaggtaaaactatccaatctgaagaatgtggactctgaggggagcctgcaccggaaataccaagaattgctgaaagccataaagggcaaagatgagctcatcagccagctagaggctcagctggagaagcagaagcagatgagggcagaggaagcaaaaactgttcaagaaaaagctgcaaagatcaaggaatgggtgacactcaagttggcaaagcttgagatggagaatcagcatctgaaaagccataatcagcgcctggtggagcaggtgggatcccttcaagatgcgctagaagctattcagatagctccttcacggaagctgctggtgcccccctacggagctgcagagcaggattctgtcccttcagagccgggaatccagcctatgggccaggacagtggctcccaggcccagggtctgaaggcagctgtgcttgcaccttccccaggtgccctgcagagcaaggactctgtttctgaagcagcaagccccttggaggattctagttccagcacggtccattctggggaaacagtagaggccaagccccttcaacctcatctgggaagagagagccctccccaccagccatgcatgaagcttcttaccttcagatgtagttcagcttcctggggtgagggtctggttactgctcagagagggatgctccctgggacaaagacctctgccagggaaggtggtcctggcagcagtctgaccctaccaaaggtgcgggctcctggcaccccgcgggacagcatccagttggccaaaaggcaccacagccagccccaggtgggccatgggcactttggccgtgtggtgaacattgagactgaggccttctcagccctccacccctctggccttcctgagctggagtcccgagctaggtcccgggaggaaccagagaagatggagatggaggagccacccccagcagggaagaatgaggaaagagagagcccaaaggcccttggagctgagctggaggaagtggagctgggtaacaagccacctacacccccgctgcaccagttttcatcctgggagagccggatctatgctgtggccacatcgggcatgcggctctcagatatgtctcccagaagtaatactgcatgctgcgcttcaagccctcctgcccttgtttcccctgggtctttctctggcctggtctacaagaatgtcactgtgcctgtctacacagcactgaaggggagagctacacagatcagcaacatgccctttatggacgagtcctctgggtctgacgatgactgcagctctcaggcgagtttccgaatctcggtcccctcctctgagtccaggaagaccagcggactaggcagcccccgggccatcaagagaggcgtctccatgtcctcactgagctccgagggtgactacgccatccccccggacgcctgctcactggacagtgactactcagagcctgagcacaaactgcagcgcacctcatcctactccaccgacgggctgggcctgggcggggagtcactggagaagtcgggctacctgctgaaaatggggagccaggtgaagacgtggaagaggcgctggtttgtcctgagacagggacagattatgtactacaagtccccgagtgatgtcatccggaaacctcaaggccaagtggatctgaactcccgctgccaaattgttcgaggggagggttcacagacgtttcagctcatctctgagaagaaaacctactacctgacggccgattcacccagcctgctggaggagtggatccgagtactccagagcctgctgaaggtgcaggccaccgggcctccagctctgcttcggggtggcaccaagcccaccgtgaagggctggctgaccaaggtaaagcatggccactccaaggtggtctggtgcgctcttgttgggaaaatcttctactactatcggagccatgaggacaagcgacccctgggctgcctgcctgtgcgggatgcgcacatagaggaagtagatcgatcctgtgactcagacgaggactatgaggctggaggaaccagacggttgctttcctcccactgcaccctggtgatccaccccacagagcacagccccacctacctcctcattggcaccaagcatgaaaaggatacgtggctctaccacctcacagtggctgcaggtggcagcagtgccaaggtgggcactgcctatgagcagctcattggaaaactgatggatggtgaaggagatccagattcgccgctctggaggcaccccatgctgtgctacagcaaagacggcctatacgcctccctcaccaccctgccctctgaggccttgcagacggaggccctcaagctcttcaagtcctgccagctcttcatcaacgtgccggtggaagctgcctcggtggactaccatgtgtccctggcccagaccgcactgcaggtctgcctggttcaccccgagctgcagagtgagatctactgccaactcatgaagcagaccagctgccgcccacctcagaagtactccctcatgcagtgctggcagctcctcgctctgtgtgctccacttttcctgcctcagcatcacttcctctggtatgtcaagcagcagctccaacgccatgcagatcccagaagtgaaactggccagtatgccacctactgccagcgggcagtggagcggaccctgcggaccggggagcgggaagccaggccatcgcgcatggaagtggtgtccatcctgctgcgtaaccccttccaccactccttgcccttcagcatccccgtgcactttaccaacgggacttaccatgtggttggttttgacggctcttccacggttgatgagttcctccagcggctgaaccaggagataggcatgagaaagccatcccactctggctttgccctcttcacggacgatccctcgggcagggacctggagcactgcctgcagggaagtgtcaagatctgtgatgccatctccaagtgggaacaagccatgaaggagctgcaccccggaaagtctgagggtgggacacgcgtcgtgaagctgatgtacaagaacaggctgtactttcgcagtcaagtcaaaggggagacggaccgagaacggctgctccttgcctctcaaaccagtagagagatagtggcagggaggtttcctatcaacaaggaattggctcttgagatggctgccctgatggcccaggtagaatatggggacttggagaagcctgccctgccaggccctggaggcacatcccctgccaaggctcagcatcttctccagcaggtcctagacaggttccaccccaggcgctatagacatggggcccccgctgaacagctgaggcacctggcagatatgttgaccacaaaatgggcaacattgcaaggatgctcccctcctgagtgcatccgcatctacctgaccgtggccaggaaatggcctttctttggtgctaaactttttgctgctcagcctgcccagctgtcttccaaggagaacgctctggtgtggattgctgtgaatgaggatggcgtcagcatcctggaccacaacactatgcaagtgcacatcacttacccctactcttcagtgacaacgtttggtggctgcagggatgacttcatgcttgtgattagatctatcccagacaagagctctggaaaaagccacattgagaagttgatcttccggatggctgctcccaagattgcagaagctaccttcatcatggccagctatatgaaccattgcactacaactgtgaacccccccaccaacccacccggagcctgccagctgtgggaactggatggacgacagttcttttcttctgtttcctgtgctaccaaggggccaacgttgctgtgaatatttctcctacccgattccccaacaccactagtgcctctggatttagagatatatatcctagggtatgatactactgtgacgggtctaacagcccccggctactcttgttctgtgaaatgtgtattttagtctctgtgaagcctttactctctaggtgccttataatgtttcagggctcaactttttaaaatccagacccagtgttaaaaccatttattccttttttcataagaataatgactccagatgctacctgattctagacatagacagggatgatccactgttactgagggcatcagtgctataagttaaggctttctgcactggtactctcaaggaagctaattttctttctggggggggcgggggacacagtgtcactatgtcacccagtccacagggttcaagcaattctcctgcctcagccttcggagtggctgggattacaggtgtgcgccaccatgcccggctaatttttgtatttttagtagagacggggtttcaccatgttggccaggctggtctcgaactcctgacctcaggtgatctgcccactttggcctcccaaagtgctgggattacaggcatgagccatcgcccagcccagaagctaattttttaatattgtatatggtcttatttatacttgaagttttgtgaacgtcgctaaacaggataggactaaaatttccaattctcctacactctgtcagaagcctagaactcactaaactgggctgcctttcccaaatgggaaaggtgctgacagagttggagaaaaaagaatagactcatttttccccattattggtatgtaggcattggtacagccccttctggggcagtctttgcaggataacatgctatacctgctaagattcaagctgttttcctcacactggactttaggccaaacccagtaccacgcaatgtgcaagcaagggcaggaggtaggtccaatctgacccctccctgtctcattttaatgactggacagcgctcggtgaaggctgtgttcactgtagtgggccatcatttgtttccttcttcttgtaaaagaccaagcaaatgcactctgctttttgctgctgtaagaccaccaaaaatgagtcagaaacacagaagactatttcaggcatgtgggcctggatatgctccttgagacttctggcaaacttctgctgggaattagtttgagggtgagggtacatatgtgacatttgccctagcctaagagtagcaggtaaaaaaaagtttctttcatcttttgccttactgataataccataatccccctcaattcagaccttctgattgagtgcagaggagactagacagtctcctctagacaggttgtagacacaccctcccctaacaaaaacaaaacgaaagagttcatactctgattttccaacatctaggaaactgagttttatttcctagctctaaggcagccttactatatgtcagtaaagtgctgaaaactgtatatttagcagtagcacccaaaaccaagcctttaaccccaacaatgtgtgtatcttttgcacagcaaaaactgcgaggccagaactagtttatctgaacacctcagctgctgtaagcttctcctctctcaccccgtaaactgacaagcatgatgaaaaaagaagcacatccaagtttctgcctcttttaaatgtacttgactttgcaaggcaagtagttttacagccatttctgttcacacttttcaccccacaacttggggatctagctgagacatttctacctcgaacaagtcacatgtaccacaggttcctgaataattcctgcagggctggtgacagacataacagctctggttttataatatcttgggtatctctaaggccaataaggataacattatctacccagagagtttagaagaaaagtaggagtccaaaggaagagtaaacaagaatggagctgtgttcacactgaatttggggtcaatctatttcccccaccctctctcctccccaacccttcaggaaccctttagtttattaatcttatacagaagaaactaacttagaaacaaaggattcaatatttgcttatttattctttgttaacatgagagtcccatgtctgaaaaccaaagtccaatttctgtctggccttttgtctcatccttcttggcaaaagtagcttttgaactgatataaaaaaaaatgctgagtaacagaaaagtattaatgtgcttgacaccatgactgaaatactatgatcttgtttgtcaataaaaagcagctatctgtgaaccaggtaactgtgtgttttggaagatctgtttattaacagtaaataaataagccctgtacagaacacaggcactaggttgaca

SEQ ID NO: 15935 - DNA, 3383 bp, Homo sapiens
  source 1..3383: mol_type = unassigned DNA
acaggtctgcccacccccaaagccatgctttttcctgcacatgcctggagggggtgggatgggcatcatgccgggccctgagcttcctgagacctcttgtttcaggagagccggatctatgctgtggccacatcgggcatgcggctctcagatatgtctcccagaagtaatactgcatgctgcgcttcaagccctcctgcccttgtttcccctgggtctttctctggcctggtctacaagaatgtcactgtgcctgtctacacagcactgaaggggagagctacacagatcagcaacatgccctttatggacgagtcctctgggtctgacgatgactgcagctctcaggcgagtttccgaatctcggtcccctcctctgagtccaggaagaccagcggactaggcagcccccgggccatcaagagaggcgtctccatgtcctcactgagctccgagggtgactacgccatccccccggacgcctgctcactggacagtgactactcagagcctgagcacaaactgcagcgcacctcatcctactccaccgacgggctgggcctgggcggggagtcactggagaagtcgggctacctgctgaaaatggggagccaggtgaagacgtggaagaggcgctggtttgtcctgagacagggacagattatgtactacaagtccccgagtgatgtcatccggaaacctcaaggccaagtggatctgaactcccgctgccaaattgttcgaggggagggttcacagacgtttcagctcatctctgagaagaaaacctactacctgacggccgattcacccagcctgctggaggagtggatccgagtactccagagcctgctgaaggtgcaggccaccgggcctccagctctgcttcggggtggcaccaagcccaccgtgaagggctggctgaccaaggtaaagcatggccactccaaggtggtctggtgcgctcttgttgggaaaatcttctactactatcggagccatgaggacaagcgacccctgggctgcctgcctgtgcgggatgcgcacatagaggaagtagatcgatcctgtgactcagacgaggactatgaggctggaggaaccagacggttgctttcctcccactgcaccctggtgatccaccccacagagcacagccccacctacctcctcattggcaccaagcatgaaaaggatacgtggctctaccacctcacagtggctgcaggtggcagcagtgccaaggtgggcactgcctatgagcagctcattggaaaactgatggatggtgaaggagatccagattcgccgctctggaggcaccccatgctgtgctacagcaaagacggcctatacgcctccctcaccaccctgccctctgaggccttgcagacggaggccctcaagctcttcaagtcctgccagctcttcatcaacgtgccggtggaagctgcctcggtggactaccatgtgtccctggcccagaccgcactgcaggtctgcctggttcaccccgagctgcagagtgagatctactgccaactcatgaagcagaccagctgccgcccacctcagaagtactccctcatgcagtgctggcagctcctcgctctgtgtgctccacttttcctgcctcagcatcacttcctctggtatgtcaagcagcagctccaacgccatgcagatcccagaagtgaaactggccagtatgccacctactgccagcgggcagtggagcggaccctgcggaccggggagcgggaagccaggccatcgcgcatggaagtggtgtccatcctgctgcgtaaccccttccaccactccttgcccttcagcatccccgtgcactttaccaacgggacttaccatgtggttggttttgacggctcttccacggttgatgagttcctccagcggctgaaccaggagataggcatgagaaagccatcccactctggctttgccctcttcacggacgatccctcgggcagggacctggagcactgcctgcagggaagtgtcaagatctgtgatgccatctccaagtgggaacaagccatgaaggagctgcaccccggaaagtctgagggtgggacacgcgtcgtgaagctgatgtacaagaacaggctgtactttcgcagtcaagtcaaaggggagacggaccgagaacggctgctccttgcctctcaaaccagtagagagatagtggcagggaggtttcctatcaacaaggaattggctcttgagatggctgccctgatggcccaggtagaatatggggacttggagaagcctgccctgccaggccctggaggcacatcccctgccaaggctcagcatcttctccagcaggtcctagacaggttccaccccaggcgctatagacatggggcccccgctgaacagctgaggcacctggcagatatgttgaccacaaaatgggcaacattgcaaggatgctcccctcctgagtgcatccgcatctacctgaccgtggccaggaaatggcctttctttggtgctaaactttttgctgctcagcctgcccagctgtcttccaaggagaacgctctggtgtggattgctgtgaatgaggatggcgtcagcatcctggaccacaacactatgcaagtgcacatcacttacccctactcttcagtgacaacgtttggtggctgcagggatgacttcatgcttgtgattagatctatcccagacaagagctctggaaaaagccacattgagaagttgatcttccggatggctgctcccaagattgcagaagctaccttcatcatggccagctatatgaaccattgcactacaactgtgaacccccccaccaacccacccggagcctgccagctgtgggaactggatggacgacagttcttttcttctgtttcctgtgctaccaaggggccaacgttgctgtgaatatttctcctacccgattccccaacaccactagtgcctctggatttagagatatatatcctagggtatgatactactgtgacgggtctaacagcccccggctactcttgttctgtgaaatgtgtattttagtctctgtgaagcctttactctctaggtgccttataatgtttcagggctcaactttttaaaatccagacccagtgttaaaaccatttattccttttttcataagaataatgactccagatgctacctgattctagacatagacagggatgatccactgttactgagggcatcagtgctataagttaaggctttctgcactggtactctcaaggaagctaattttctttctggggggggcgggggacacagtgtcactatgtcacccagtccacagggttcaagcaattctcctgcctcagccttcggagtggctg

SEQ ID NO: 15936 - DNA, 595 bp, Homo sapiens
  source 1..595: mol_type = unassigned DNA
atggagatcatggtccccaaagggagtcaaggggagaagatgaacagggccctggcccccctcttgagatctgtcactggcctgctcctggagggaatgccatctgcccagttctctgcttcccccacaccccttcctgggttatgcccttgagtaatctcattcctctcttccctgctcagcttcaagccctcctgcccttgtttcccctgggtctttctctggcctggtctacaagaatgtcactgtgcctgtctacacagcactgaaggggagagctacacagatcagcaacatgccctttatggacgagtcctctgggtctgacgatgactgcagctctcaggcgagtttccgaatctcggtcccctcctctgagtccaggaagaccagcggactaggcagcccccgggccatcaagagaggcgtctccatgtcctcactgagctccgagggtgactacgccatccccccggacgcctgctcactggacagtgactactcagagcctgagcacaaactgcagcgcacctcatcctactccaccgacgggctgggcctgggcggggagtcactggagaagtcgggctacctg

SEQ ID NO: 15937 - DNA, 2146 bp, Homo sapiens
  source 1..2146: mol_type = unassigned DNA
ttttttatagaagaataaaaaaccaaaagtgaaatttcctctcacgtcgcttttccctaattcctaagcccagaggaagctatcatgaatggtttagtgtttattcagtaaggccttccgatgcatttataaatatgcagcacactctcactgtctcctgtgtgcacacaaaaggtgctcatatacatgtcattctatgccttgcttgttcccctaaccacgtgaataaccacgtgtcaggtcatccttccctacctcctcctttttatttttccgagacagagtctggctctgttgccaggctggagtgcagtggtgcaaccttggctcactgcaacttccacctcctgggttcaagcgattctcctgcctcagcctcctgaatagctggaactacaggcgcgcaccaccatgcccagctaatttttgtatttttagtagagacggggtttcaccatgttggccaggatggtcttgatctcttgaccttgtgatccgcctgcctcagcctcccaaagtgctaggattacaggcatgagccaccatgcctggcccctacctcctccttctataggtgtccagtacccttggtatcgaagcaccataactattaatacctaaagctttcctccaataataatttagtctgtgtccctgtttttctctaaaatgaatgttgccatgaacatcactgtgcacatatatctttgggaacttatatctacatgtgtctgtaggacagagttctagaggtgggatttctgggcaaattatatacatgttttaatttttgacaggtactgccaaattaccttctaaaaatgccttacacactagagttttttcccccatcttctccccatactctcaccaacactgagatagtcagtcactttaaatgtttgccaatggagatgcaatcattgattgttgcgacgtccccacacatttttaaagctcgcatggcacacttagtctgtggtgtagctttctggccccctagtggcaaggagcgagggtcacagtgggcaggcattcagtcgtgatgggcagctgctttggggaccacagaagatggtgtgtgggaagggaggcctgagaagcatggaggtcatgacacaggagtgaggccaggagggaccttacactggacagttgtctgttcagagtcccggctgggggttggccacaccatgggcacttggaccaggagtgcaagctgcagggttgggagaggactgttttgcagcctgagctgcagtgagggaggggcctgtcttgcagagagctacacagatcagcaacatgccctttatggacgagtcctctgggtctgacgatgactgcagctctcaggcgagtttccgaatctcggtcccctcctctgagtccaggaagaccagcggactaggcagcccccgggccatcaagagaggcgtctccatgtcctcactgagctccgagggtgactacgccatccccccggacgcctgctcactggacagtgactactcagagcctgagcacaaactgcagcgcacctcatcctactccaccgacgggctgggcctgggcggggagtcactggagaagtcgggctacctgctgaaaatggggagccaggtgaagacgtggaagaggcgctggtttgtcctgagacagggacagattatgtactacaagtccccgagtgatgtcatccggaaacctcaaggccaagtggatctgaactcccgctgccaaattgttcgaggggagggttcacagacgtttcagctcatctctgagaagaaaacctactacctgacggccgattcacccagcctgctggaggagtggatccgagtactccagagcctgctgaaggtgcaggccaccgggcctccagctctgcttcggggtggcaccaagcccaccgtgaagggctggctgaccaaggtaaagcatggccactccaaggtggtctggtgcgctcttgttgggaaaatcttctactactatcggagccatgaggacaaggtacttctcagcctcctcacaatacccactctcctgcttcccccgaagcacatgactgccactctatgtcctgatgaaagtccctaccccacgtaaccccacaataaatacaaaatcagttggctgg

SEQ ID NO: 15938 - DNA, 5555 bp, Homo sapiens
  source 1..5555: mol_type = unassigned DNA
gaagcaccataactattaatacctaaagctttcctccaataataatttagtctgtgtccctgtttttctctaaaatgaatgttgccatgaacatcactgtgcacatatatctttgggaacttatatctacatgtgtctgtaggacagagttctagaggtgggatttctgggcaaattatatacatgttttaatttttgacaggtactgccaaattaccttctaaaaatgccttacacactagagttttttcccccatcttctccccatactctcaccaacactgagatagtcagtcactttaaatgtttgccaatggagatgcaatcattgattgttgcgacgtccccacacatttttaaagctcgcatggcacacttagtctgtggtgtagctttctggccccctagtggcaaggagcgagggtcacagtgggcaggcattcagtcgtgatgggcagctgctttggggaccacagaagatggtgtgtgggaagggaggcctgagaagcatggaggtcatgacacaggagtgaggccaggagggaccttacactggacagttgtctgttcagagtcccggctgggggttggccacaccatgggcacttggaccaggagtgcaagctgcagggttgggagaggactgttttgcagcctgagctgcagtgagggaggggcctgtcttgcagagagctacacagatcagcaacatgccctttatggacgagtcctctgggtctgacgatgactgcagctctcaggcgagtttccgaatctcggtcccctcctctgagtccaggaagaccagcggactaggcagcccccgggccatcaagagaggcgtctccatgtcctcactgagctccgagggtgactacgccatccccccggacgcctgctcactggacagtgactactcagagcctgagcacaaactgcagcgcacctcatcctactccaccgacgggctgggcctgggcggggagtcactggagaagtcgggctacctgctgaaaatggggagccaggtgaagacgtggaagaggcgctggtttgtcctgagacagggacagattatgtactacaagtccccgagtgatgtcatccggaaacctcaaggccaagtggatctgaactcccgctgccaaattgttcgaggggagggttcacagacgtttcagctcatctctgagaagaaaacctactacctgacggccgattcacccagcctgctggaggagtggatccgagtactccagagcctgctgaaggtgcaggccaccgggcctccagctctgcttcggggtggcaccaagcccaccgtgaagggctggctgaccaaggtaaagcatggccactccaaggtggtctggtgcgctcttgttgggaaaatcttctactactatcggagccatgaggacaagcgacccctgggctgcctgcctgtgcgggatgcgcacatagaggaagtagatcgatcctgtgactcagacgaggactatgaggctggaggaaccagacggttgctttcctcccactgcaccctggtgatccaccccacagagcacagccccacctacctcctcattggcaccaagcatgaaaaggatacgtggctctaccacctcacagtggctgcaggtggcagcagtgccaaggtgggcactgcctatgagcagctcattggaaaactgatggatggtgaaggagatccagattcgccgctctggaggcaccccatgctgtgctacagcaaagacggcctatacgcctccctcaccaccctgccctctgaggccttgcagacggaggccctcaagctcttcaagtcctgccagctcttcatcaacgtgccggtggaagctgcctcggtggactaccatgtgtccctggcccagaccgcactgcaggtctgcctggttcaccccgagctgcagagtgagatctactgccaactcatgaagcagaccagctgccgcccacctcagaagtactccctcatgcagtgctggcagctcctcgctctgtgtgctccacttttcctgcctcagcatcacttcctctggtatgtcaagcagcagctccaacgccatgcagatcccagaagtgaaactggccagtatgccacctactgccagcgggcagtggagcggaccctgcggaccggggagcgggaagccaggccatcgcgcatggaagtggtgtccatcctgctgcgtaaccccttccaccactccttgcccttcagcatccccgtgcactttaccaacgggacttaccatgtggttggttttgacggctcttccacggttgatgagttcctccagcggctgaaccaggagataggcatgagaaagccatcccactctggctttgccctcttcacggacgatccctcgggcagggacctggagcactgcctgcagggaagtgtcaagatctgtgatgccatctccaagtgggaacaagccatgaaggagctgcaccccggaaagtctgagggtgggacacgcgtcgtgaagctgatgtacaagaacaggctgtactttcgcagtcaagtcaaaggggagacggaccgagaacggctgctccttgcctctcaaaccagtagagagatagtggcagggaggtttcctatcaacaaggaattggctcttgagatggctgccctgatggcccaggtagaatatggggacttggagaagcctgccctgccaggccctggaggcacatcccctgccaaggctcagcatcttctccagcaggtcctagacaggttccaccccaggcgctatagacatggggcccccgctgaacagctgaggcacctggcagatatgttgaccacaaaatgggcaacattgcaaggatgctcccctcctgagtgcatccgcatctacctgaccgtggccaggaaatggcctttctttggtgctaaactttttgctgctcagcctgcccagctgtcttccaaggagaacgctctggtgtggattgctgtgaatgaggatggcgtcagcatcctggaccacaacactatgcaagtgcacatcacttacccctactcttcagtgacaacgtttggtggctgcagggatgacttcatgcttgtgattagatctatcccagacaagagctctggaaaaagccacattgagaagttgatcttccggatggctgctcccaagattgcagaagctaccttcatcatggccagctatatgaaccattgcactacaactgtgaacccccccaccaacccacccggagcctgccagctgtgggaactggatggacgacagttcttttcttctgtttcctgtgctaccaaggggccaacgttgctgtgaatatttctcctacccgattccccaacaccactagtgcctctggatttagagatatatatcctagggtatgatactactgtgacgggtctaacagcccccggctactcttgttctgtgaaatgtgtattttagtctctgtgaagcctttactctctaggtgccttataatgtttcagggctcaactttttaaaatccagacccagtgttaaaaccatttattccttttttcataagaataatgactccagatgctacctgattctagacatagacagggatgatccactgttactgagggcatcagtgctataagttaaggctttctgcactggtactctcaaggaagctaattttctttctggggggggcgggggacacagtgtcactatgtcacccagtccacagggttcaagcaattctcctgcctcagccttcggagtggctgggattacaggtgtgcgccaccatgcccggctaatttttgtatttttagtagagacggggtttcaccatgttggccaggctggtctcgaactcctgacctcaggtgatctgcccactttggcctcccaaagtgctgggattacaggcatgagccatcgcccagcccagaagctaattttttaatattgtatatggtcttatttatacttgaagttttgtgaacgtcgctaaacaggataggactaaaatttccaattctcctacactctgtcagaagcctagaactcactaaactgggctgcctttcccaaatgggaaaggtgctgacagagttggagaaaaaagaatagactcatttttccccattattggtatgtaggcattggtacagccccttctggggcagtctttgcaggataacatgctatacctgctaagattcaagctgttttcctcacactggactttaggccaaacccagtaccacgcaatgtgcaagcaagggcaggaggtaggtccaatctgacccctccctgtctcattttaatgactggacagcgctcggtgaaggctgtgttcactgtagtgggccatcatttgtttccttcttcttgtaaaagaccaagcaaatgcactctgctttttgctgctgtaagaccaccaaaaatgagtcagaaacacagaagactatttcaggcatgtgggcctggatatgctccttgagacttctggcaaacttctgctgggaattagtttgagggtgagggtacatatgtgacatttgccctagcctaagagtagcaggtaaaaaaaagtttctttcatcttttgccttactgataataccataatccccctcaattcagaccttctgattgagtgcagaggagactagacagtctcctctagacaggttgtagacacaccctcccctaacaaaaacaaaacgaaagagttcatactctgattttccaacatctaggaaactgagttttatttcctagctctaaggcagccttactatatgtcagtaaagtgctgaaaactgtatatttagcagtagcacccaaaaccaagcctttaaccccaacaatgtgtgtatcttttgcacagcaaaaactgcgaggccagaactagtttatctgaacacctcagctgctgtaagcttctcctctctcaccccgtaaactgacaagcatgatgaaaaaagaagcacatccaagtttctgcctcttttaaatgtacttgactttgcaaggcaagtagttttacagccatttctgttcacacttttcaccccacaacttggggatctagctgagacatttctacctcgaacaagtcacatgtaccacaggttcctgaataattcctgcagggctggtgacagacataacagctctggttttataatatcttgggtatctctaaggccaataaggataacattatctacccagagagtttagaagaaaagtaggagtccaaaggaagagtaaacaagaatggagctgtgttcacactgaatttggggtcaatctatttcccccaccctctctcctccccaacccttcaggaaccctttagtttattaatcttatacagaagaaactaacttagaaacaaaggattcaatatttgcttatttattctttgttaacatgagagtcccatgtctgaaaaccaaagtccaatttctgtctggccttttgtctcatccttcttggcaaaagtagcttttgaactgatataaaaaaaaa

SEQ ID NO: 15939 - DNA, 591 bp, Homo sapiens
  source 1..591: mol_type = unassigned DNA
gagtcctctgggtctgacgatgactgcagctctcaggcgagtttccgaatctcggtcccctcctctgagtccaggaagaccagcggactaggcagcccccgggccatcaagagaggtacagagaaggggagcaggggcagggtgcagcagcaaggagcccctcacctcttcccatgggcacttgaacatgggcgtccccacttgatctgagctcgtgaccccccagcagctccacccccagccccagagaccgggtcccgggtgggtggtcaagtctcagcagctcctgggctgcgtgagtcggggaggtgtgggacccgggccttgactcctcctccctcggcaaggcgtctccatgtcctcactgagctccgagggtgactacgccatccccccggacgcctgctcactggacagtgactactcagagcctgagcacaaactgcagcgcacctcatcctactccaccgacgggctgggcctgggcggggagtcactggagaagtcgggctacctgctgaaaatggggagccaggtgaagacgtggaagaggcgctggtttgtcctgagacagggacagattatgtacta

SEQ ID NO: 15940 - DNA, 1820 bp, Homo sapiens
  source 1..1820: mol_type = unassigned DNA
acttttcctgcctcagcatcacttcctctggtatgtcaagcagcagctccaacgccatgcagatcccagaagtgaaactggccagtatgccacctactgccagcgggcagtggagcggaccctgcggaccggggagcgggaagccaggccatcgcgcatggaagtggtgtccatcctgctgcgtaaccccttccaccactccttgcccttcagcatccccgtgcactttaccaacgggacttaccatgtggttggttttgacggctcttccacggttgatgagttcctccagcggctgaaccaggagataggcatgagaaagccatcccactctggctttgccctcttcacggacgatccctcgggcagggacctggagcactgcctgcagggaagtgtcaagatctgtgatgccatctccaagtgggaacaagccatgaaggagctgcaccccggaaagtctgagggctgtactttcgcagtcaagtcaaaggggagacggaccgagaacggctgctccttgcctctcaaaccagtagagagatagtggcagggaggtttcctatcaacaaggaattggctcttgagatggctgccctgatggcccaggtagaatatggggacttggagaagcctgccctgccaggccctggaggcacatcccctgccaaggctcagcatcttctccagcaggtcctagacaggttccaccccaggcgctatagacatggggcccccgctgaacagctgaggcacctggcagatatgttgaccacaaaatgggcaacattgcaaggatgctcccctcctgagtgcatccgcatctacctgaccgtggccaggaaatggcctttctttggtgctaaactttttgctgctcagcctgcccagctgtcttccaaggagaacgctctggtgtggattgctgtgaatgaggatggcgtcagcatcctggaccacaacactatgcaagtgcacatcacttacccctactcttcagtgacaacgtttggtggctgcagggatgacttcatgcttgtgattagatctatcccagacaagagctctggaaaaagccacattgagaagttgatcttccggatggctgctcccaagccccagcatcatgcagtcctcagttgggtgcttacgtgctcttctcttccttgcagcagtcctcaaggcagggcagattcctctttaagagctaaccagagcagaacactgggcctccttttctcagaagggcactgtgcatctgagaggatctccagaccaacaggagcccacaccactgggcctctgaacagcacagttatgattccctttggatattttctcccagattgcagaagctaccttcatcatggccagctatatgaaccattgcactacaactgtgaacccccccaccaacccacccggagcctgccagctgtgggaactggatggacgacagttcttttcttctgtttcctgtgctaccaaggggccaacgttgctgtgaatatttctcctacccgattccccaacaccactagtgcctctggatttagagatatatatcctagggtatgatactactgtgacgggtctaacagcccccggctactcttgttctgtgaaatgtgtattttagtctctgtgaagcctttactctctaggtgccttataatgtttcagggctcaactttttaaaatccagacccagtgttaaaaccatttattccttttttcataagaataatgactccagatgctacctgattctagacatagacagggatgatccactgttactgagggcatcagtgctataa

SEQ ID NO: 15941 - DNA, 605 bp, Homo sapiens
  source 1..605: mol_type = unassigned DNA
accaacgggacttaccatgtggttggttttgacggctcttccacggttgatgagttcctccagcggctgaaccaggagataggcatgagaaagccatcccactctggctttgccctcttcacggacgatccctcgggcagggacctggagcactgcctgcagggaagtgtcaaggtgacagcctcccactaagccagctgagcccctccctgctcagggatattggtggtggggaaagagcccatctgatgggtgtctgactgtttggtagctcatttggtgctgagcccaaggtgctgccctagtcagcatttctgtgccatcctaaaatgtacctgggcagggagaaaaaagctgttgtgtgcccttgtctctggagacaagatcgctacacacctacttccctcgagtggctgtgcagcgtccagaagaaaagcctcttcttggcttggtgtagggacagtgaggccccacgaagccactgcctacacgtgcccactcagaggctcacagctgtgtgcttggaccccctggatgtcaggtggtacccagcacctcacttttaccctttctttcagggcctatgccatgcttataggttgaac

SEQ ID NO: 15942 - DNA, 638 bp, Homo sapiens
  source 1..638: mol_type = unassigned DNA
tatgaactcactgcatgaacagggaagctgagatgctgaccaagaaataagaaagggcctccaaaagattgttggtaaaggagggacccaggtatgcccagttcatttacagtggataagctcacatccctcatgcactggccctttgcctgtgaacacagaaaccaacttgctttggccttttgtatttgcccttgctcctttccacctgctgtatccagacacctccaccagccctagtgagctcctctcaggaggttcactcagggttggaactcttctcccgcctcaggtggttggttttgacggctcttccacggttgatgagttcctccagcggctgaaccaggagataggcatgagaaagccatcccactctggctttgccctcttcacggacgatccctcgggcagggacctggagcactgcctgcagggaagtgtcaagatctgtgatgccatctccaagtgggaacaagccatgaaggagctgcaccccggaaagtctgagggtgggacacgcgtcgtgaagctgatgtacaagaacaggctgtactttcgcagtcaagtcaaaggggagacggaccgagaacggctgctccttgcctctcaaaccagtagagagatagtggcaggga

SEQ ID NO: 15943 - DNA, 594 bp, Homo sapiens
  source 1..594: mol_type = unassigned DNA
cttatcaggaaattttctgactttcttcttttgccttttcaagatctgtgatgccatctccaagtgggaacaagccatgaaggagctgcaccccggaaagtctgagggtgggacacgcgtcgtgaagctgatgtacaagaacaggctgtactttcgcagtcaagtcaaaggggagacggaccgagaacggctgctccttgcctctcaaaccagtagagagatagtggcagggaggtttcctatcaacaaggaattggctcttgagatggctgccctgatggcccaggtagaatatggggacttggagaagcctgccctgccaggccctggaggcacatcccctgccaaggctcagcatcttctccagcaggtcctagacaggttccaccccaggcgctatagacatggggcccccgctgaacagctgaggcacctggcagatatgttgaccacaaaatgggcaacattgcaaggatgctcccctcctgagtgcatccgcatctacctgaccgtggccaggaaatggcctttctttggtgctaaactttttgctgctcagcctgcccagctgtcttccaaggagaacgctctggt

SEQ ID NO: 15944 - DNA, 3670 bp, Homo sapiens
  source 1..3670: mol_type = unassigned DNA
atgagagtgaaattttgtataagcaccagctagttatagctaaagactaagtacttcctataccaattccaggaaatacagaagtagacatcctgactttctatcaatttgagtaagaaaatcccatccctccatctcagtatgtctccaggcaaatagtttccagtagtctcttggactcttacctcatccagtcccctaatctataactccaggtaccagatttcccttactaaatccagtaagcttaatggtatcttcagaatgaaccatgccctcctgttggtatgagatcagcatgaccctgcatctgctctgtgtcatactcggttatatgtttctggaggcaatacaaaataggctcataaatagtgggaaaagagtactttatctttttggaaataaaggtaacagacccagagaaagccccatccctgtttggaatccctgctgagtcctggtttcttattctcttctttgtaggctgtactttcgcagtcaagtcaaaggggagacggaccgagaacggctgctccttgcctctcaaaccagtagagagatagtggcagggaggtttcctatcaacaaggaattggctcttgagatggctgccctgatggcccaggtagaatatggggacttggagaagcctgccctgccaggccctggaggcacatcccctgccaaggctcagcatcttctccagcaggtcctagacaggttccaccccaggcgctatagacatggggcccccgctgaacagctgaggcacctggcagatatgttgaccacaaaatgggcaacattgcaaggatgctcccctcctgagtgcatccgcatctacctgaccgtggccaggaaatggcctttctttggtgctaaactttttgctgctcagcctgcccagctgtcttccaaggagaacgctctggtgtggattgctgtgaatgaggatggcgtcagcatcctggaccacaacactatgcaagtgcacatcacttacccctactcttcagtgacaacgtttggtggctgcagggatgacttcatgcttgtgattagatctatcccagacaagagctctggaaaaagccacattgagaagttgatcttccggatggctgctcccaagattgcagaagctaccttcatcatggccagctatatgaaccattgcactacaactgtgaacccccccaccaacccacccggagcctgccagctgtgggaactggatggacgacagttcttttcttctgtttcctgtgctaccaaggggccaacgttgctgtgaatatttctcctacccgattccccaacaccactagtgcctctggatttagagatatatatcctagggtatgatactactgtgacgggtctaacagcccccggctactcttgttctgtgaaatgtgtattttagtctctgtgaagcctttactctctaggtgccttataatgtttcagggctcaactttttaaaatccagacccagtgttaaaaccatttattccttttttcataagaataatgactccagatgctacctgattctagacatagacagggatgatccactgttactgagggcatcagtgctataagttaaggctttctgcactggtactctcaaggaagctaattttctttctggggggggcgggggacacagtgtcactatgtcacccagtccacagggttcaagcaattctcctgcctcagccttcggagtggctgggattacaggtgtgcgccaccatgcccggctaatttttgtatttttagtagagacggggtttcaccatgttggccaggctggtctcgaactcctgacctcaggtgatctgcccactttggcctcccaaagtgctgggattacaggcatgagccatcgcccagcccagaagctaattttttaatattgtatatggtcttatttatacttgaagttttgtgaacgtcgctaaacaggataggactaaaatttccaattctcctacactctgtcagaagcctagaactcactaaactgggctgcctttcccaaatgggaaaggtgctgacagagttggagaaaaaagaatagactcatttttccccattattggtatgtaggcattggtacagccccttctggggcagtctttgcaggataacatgctatacctgctaagattcaagctgttttcctcacactggactttaggccaaacccagtaccacgcaatgtgcaagcaagggcaggaggtaggtccaatctgacccctccctgtctcattttaatgactggacagcgctcggtgaaggctgtgttcactgtagtgggccatcatttgtttccttcttcttgtaaaagaccaagcaaatgcactctgctttttgctgctgtaagaccaccaaaaatgagtcagaaacacagaagactatttcaggcatgtgggcctggatatgctccttgagacttctggcaaacttctgctgggaattagtttgagggtgagggtacatatgtgacatttgccctagcctaagagtagcaggtaaaaaaaagtttctttcatcttttgccttactgataataccataatccccctcaattcagaccttctgattgagtgcagaggagactagacagtctcctctagacaggttgtagacacaccctcccctaacaaaaacaaaacgaaagagttcatactctgattttccaacatctaggaaactgagttttatttcctagctctaaggcagccttactatatgtcagtaaagtgctgaaaactgtatatttagcagtagcacccaaaaccaagcctttaaccccaacaatgtgtgtatcttttgcacagcaaaaactgcgaggccagaactagtttatctgaacacctcagctgctgtaagcttctcctctctcaccccgtaaactgacaagcatgatgaaaaaagaagcacatccaagtttctgcctcttttaaatgtacttgactttgcaaggcaagtagttttacagccatttctgttcacacttttcaccccacaacttggggatctagctgagacatttctacctcgaacaagtcacatgtaccacaggttcctgaataattcctgcagggctggtgacagacataacagctctggttttataatatcttgggtatctctaaggccaataaggataacattatctacccagagagtttagaagaaaagtaggagtccaaaggaagagtaaacaagaatggagctgtgttcacactgaatttggggtcaatctatttcccccaccctctctcctccccaacccttcaggaaccctttagtttattaatcttatacagaagaaactaacttagaaacaaaggattcaatatttgcttatttattctttgttaacatgagagtcccatgtctgaaaaccaaagtccaatttctgtctggccttttgtctcatccttcttggcaaaagtagcttttgaactgatataaaaaaaaatgctgagtaacagaaaagtattaatgtgcttgacaccatgactgaaatactatgatcttgtttgtcaataaaaagcagctatctgtgaaccaggtaactgtgtgttttggaagatctgtttattaacagtaaataaataagccctgtacagaacacaggcactaggttgac

SEQ ID NO: 15945 - DNA, 510 bp, Homo sapiens
  source 1..510: mol_type = unassigned DNA
tttttgctgctcagcctgcccagctgtcttccaaggagaacgctctggtgtggattgctgtgaatgaggatggcgtcagcatcctggaccacaacactatgtgacaacgtttggtggctgcagggatgacttcatgcttgtgattagatctatcccagacaagagctctggaaaaagccacattgagaagttgatcttccggatggctgctcccaagattgcagaagctaccttcatcatggccagctatatgaaccattgcactacaactgtgaacccccccaccaacccacccggagcctgccagctgtgggaactggatggacgacagttcttttcttctgtttcctgtgctaccaaggggccaacgttgctgtgaatatttctcctacccgattccccaacaccactagtgcctctggatttagagatatatatcctagggtatgatactactgtgacgggtctaacagcccccggctactcttgttctgtgaaatgtgtatttta

SEQ ID NO: 15946 - DNA, 573 bp, Homo sapiens
  source 1..573: mol_type = unassigned DNA
ttcttttacagcacctaggagattggctgaagtcagaagcacttcggcttggagactataggtggaatgccgtgtttccaagactaggagaaaaccagctgttccccattcccctaacagagcagctagggctggcctctattctgtagcacagagctttccatccagtgtgctgtggcagcatgggttctagggacatcaaaagaatgatcgcctctgcctttgagatggttagtaggtggccagagccccaaggccaagggtctcctgtcacaagcagccttgtctatttcctgcatacactgtacaaatatcatctttgttttccaagatgaggtggctggaaatcactgcttagcagatccctggatgtgccttctttctcagaaagttattatagttcaaaatctctaactatggatatatctgatgggttgtttctgtttccccagcctgcccagctgtcttccaaggagaacgctctggtgtggattgctgtgaatgaggatggcgtcagcatcctggaccacaacactatgcaagtgcacatcacttacccctactcttcagtga

SEQ ID NO: 15947 - DNA, 171 bp, Homo sapiens
  source 1..171: mol_type = unassigned DNA
ttggtggctgcagggatgacttcatgcttgtgattagatctatcccagacaagagctctggaaaaagccacattgagaagttgatcttccggatggctgctcccaagaagggcactgtgcatctgagaggatctccagaccaacaggagcccacaccactgggcctctgaa

SEQ ID NO: 15948 - DNA, 747 bp, Homo sapiens
  source 1..747: mol_type = unassigned DNA
gcttgtgattagatctatcccagacaagagctctggaaaaagccacattgagaagttgatcttccggatggctgctcccaagattgcagaagctaccttcatcatggccagctatatgaaccattgcactacaactgtgaacccccccaccaacccacccggagcctgccagctgtgggaactggatggacgacagttcttttcttctgtttcctgtgctaccaaggggccaacgttgctgtgaatatttctcctacccgattccccaacaccactagtgcctctggatttagagatatatatcctaggcaaaaactgcgaggccagaactagtttatctgaacacctcagctgctgtaagcttctcctctctcaccccgtaaactgacaagcatgatgaaaaaagaagcacatccaagtttctgcctcttttaaatgtacttgactttgcaaggcaagtagttttacagccatttctgttcacacttttcaccccacaacttggggatctagctgagacatttctacctcgaacaagtcacatgtaccacaggttcctgaataattcctgcagggctggtgacagacataacagctctggttttataatatcttgggtatctctaaggccaataaggataacattatctacccagagagtttagaagaaaagtaggagtccaaaggaagagtaaacaagaatggagctgtgttcacactgaatttggggtcaatctatttccccca

SEQ ID NO: 15949 - DNA, 2999 bp, Homo sapiens
  source 1..2999: mol_type = unassigned DNA
ctcttccttgcagcagtcctcaaggcagggcagattcctctttaaggtgctcgcatgttacccctgggttctgctgacccaacattagctacaaagtgggacagtcccacagtgctccctcttccttgttgtggggaagaccgcaaaaagacctcttttgctttagtgactttgttcctactcaatacaggaagtgttgaccagcaaaaataataattacaaaggctaagttctgatttattgttcctgactcccgtgtgattaactggaaaccctgttgttctcctttttaatcctaaagttagagtttgccaaacctactcctcctttaataccacccctgctaaaggggaggatctccagatccctttcttaagaaggccccttccctggttgtagagctaaccagagcagaacactgggcctccttttctcagaagggcactgtgcatctgagaggatctccagaccaacaggagcccacaccactgggcctctgaacagcacagttatgattccctttggatattttctcccagattgcagaagctaccttcatcatggccagctatatgaaccattgcactacaactgtgaacccccccaccaacccacccggagcctgccagctgtgggaactggatggacgacagttcttttcttctgtttcctgtgctaccaaggggccaacgttgctgtgaatatttctcctacccgattccccaacaccactagtgcctctggatttagagatatatatcctagggtatgatactactgtgacgggtctaacagcccccggctactcttgttctgtgaaatgtgtattttagtctctgtgaagcctttactctctaggtgccttataatgtttcagggctcaactttttaaaatccagacccagtgttaaaaccatttattccttttttcataagaataatgactccagatgctacctgattctagacatagacagggatgatccactgttactgagggcatcagtgctataagttaaggctttctgcactggtactctcaaggaagctaattttctttctggggggggcgggggacacagtgtcactatgtcacccagtccacagggttcaagcaattctcctgcctcagccttcggagtggctgggattacaggtgtgcgccaccatgcccggctaatttttgtatttttagtagagacggggtttcaccatgttggccaggctggtctcgaactcctgacctcaggtgatctgcccactttggcctcccaaagtgctgggattacaggcatgagccatcgcccagcccagaagctaattttttaatattgtatatggtcttatttatacttgaagttttgtgaacgtcgctaaacaggataggactaaaatttccaattctcctacactctgtcagaagcctagaactcactaaactgggctgcctttcccaaatgggaaaggtgctgacagagttggagaaaaaagaatagactcatttttccccattattggtatgtaggcattggtacagccccttctggggcagtctttgcaggataacatgctatacctgctaagattcaagctgttttcctcacactggactttaggccaaacccagtaccacgcaatgtgcaagcaagggcaggaggtaggtccaatctgacccctccctgtctcattttaatgactggacagcgctcggtgaaggctgtgttcactgtagtgggccatcatttgtttccttcttcttgtaaaagaccaagcaaatgcactctgctttttgctgctgtaagaccaccaaaaatgagtcagaaacacagaagactatttcaggcatgtgggcctggatatgctccttgagacttctggcaaacttctgctgggaattagtttgagggtgagggtacatatgtgacatttgccctagcctaagagtagcaggtaaaaaaaagtttctttcatcttttgccttactgataataccataatccccctcaattcagaccttctgattgagtgcagaggagactagacagtctcctctagacaggttgtagacacaccctcccctaacaaaaacaaaacgaaagagttcatactctgattttccaacatctaggaaactgagttttatttcctagctctaaggcagccttactatatgtcagtaaagtgctgaaaactgtatatttagcagtagcacccaaaaccaagcctttaaccccaacaatgtgtgtatcttttgcacagcaaaaactgcgaggccagaactagtttatctgaacacctcagctgctgtaagcttctcctctctcaccccgtaaactgacaagcatgatgaaaaaagaagcacatccaagtttctgcctcttttaaatgtacttgactttgcaaggcaagtagttttacagccatttctgttcacacttttcaccccacaacttggggatctagctgagacatttctacctcgaacaagtcacatgtaccacaggttcctgaataattcctgcagggctggtgacagacataacagctctggttttataatatcttgggtatctctaaggccaataaggataacattatctacccagagagtttagaagaaaagtaggagtccaaaggaagagtaaacaagaatggagctgtgttcacactgaatttggggtcaatctatttcccccaccctctctcctccccaacccttcaggaaccctttagtttattaatcttatacagaagaaactaacttagaaacaaaggattcaatatttgcttatttattctttgttaacatgagagtcccatgtctgaaaaccaaagtccaatttctgtctggccttttgtctcatccttcttggcaaaagtagcttttgaactgatataaaaaaaaatgctgagtaacagaaaagtattaatgtgcttgacaccatgactgaaatactatgatcttgtttgtcaataaaaagcagctatctgtgaaccag

SEQ ID NO: 15950 - DNA, 6981 bp, Homo sapiens
  source 1..6981: mol_type = unassigned DNA
gagctcggcttgaggcgggcgcgggctgagagtccggggatcccgggggccagtcgcggccgggacatcgggcgctgcggccggggacccgctgctgagatagacagaatatggcagagctttctgagccagagggaccagtagattggaaggaacgatgtgtagctctggagtcccaactcatgaaatttagagttcaagcaagcaagatacgagagcttttagcagagaagatgcaacagcttgagagacaagttattgatgctgaacgtcaagcagaaaaagcttttcaacaggtacaagttatggaagataaattaaaagcagctaatattcaaaccagtgaatcagagacaagattatataataagtgtcaagatctggagtcgctaatacaggaaaaagatgacgtcattcaaaacttggaattgcaacttgaagagcagaaacaaataagaatacaagaagctaaaataatagaagagaaagcagctaagataaaagaatgggtaacagttaagttaaatgagctggaattggagaatcagaatcttcgtttgatcaaccaaaaccaaactgaagagataagaacaatgcagtcaaaactacaagaagttcaaggaaagaagtcatccactgtctctacactaaagctttcggaaggccagcgcctgagcagtttgacctttgggtgctttttatctcgagcaaggagtcctcctcaagtagtaaaatctgaggaaatgagcaagatatcatcgaaagaacctgagttcactgaaggaaaagacatggaagaaatggaaattccagaaaagtctgttgataaccaagttctagaaaacaacagaggccagagaacattgcatcaaaccccttgtggctcagaacagaatcggaaaacaagaacaagctttgccacagatggtggcatctcccagaattctggggctcctgtgagtgactggagctctgatgaggaagacgggagcaaaggaagatccaagtccagatgcacatccaccctctccagtcacacatctgaggaaggggtccagtgtagcaggatgggaagtgaaatgtatctgacagcatctgatgacagcagctctatatttgaggaagagacttttggcataaagagaccagaacacaagaagctatattcttggcagcaggaggcacagtggaaagctctaaatagtcctcttggaaagggaaattctgaattaagtaaaaaggaacaagatagttcctcggatgaactgaataaaaaatttcaatcccagagactcgattattcatcttcatcgagtgaagccaacaccccaagccctattttgaccccagctttaatgccaaagcatcctaactcactctctggaaaaggaacacaattagtgccttcatcacacctgccacccccaaagttaaggattcctaatgttttcagtataagtgtagcactagccaaaaggcacttaagccagccacagttaagctctgacaggatgtttggtacaaatagaaacgctataagcatgatacgaccactgagacctcaggaaactgatcttgatctagttgatggagacagtacagaagttttagagaatatggacacgagttgtgatgatggattattttcctatgactccttggactctccaaattcagatgaccaggaacactgtgactcagcaaagaaggtggcatacagcaaacctccaactcctcccctgcaccgttttccttcttgggaaagcagaatttatgctgtagccaaatcaggtattcgaatgtctgaggccttcaatatggagagtgttaataaaaattctgctgcaaccctttcctatactacatcaggactttatacatctctgatatacaagaacatgaccaccccagtgtatacaactttgaaggggaaggcgacccaaataagtagcagccctttcctggatgactcatctgggtcagaggaagaagacagctccagatccagctcccggacgtcagagtcagactcacgcagtaggagtgggccaggcagccccagagccatgaaacgaggtgtgtctctctcctctgtggcttctgaaagtgattatgctattcctcctgatgcttactccacagacacggagtactcacagccagagcagaagctcccaaaaacttgctcatcttccagtgataatgggaaaaatgaaccactggaaaaatctggttatttattaaaaatgagtggtaaagtcaagtcttggaagcggcggtggtttgttcttaaaggtggtgaattactttactacaaatctccgagtgatgtaattagaaaaccccagggccatattgaacttagtgcatcctgtagtattttaagaggagataacaaacaaacagttcagttgaccactgaaaaacacacatactatctgactgcagattctcccaatatattggaagagtggattaaagtgttacagaatgttcttcgagtacaagctgccaacccactttccctgcagcctgagggcaaacccaccatgaagggattgctcactaaggtaaaacatggatattccaagagagtctggtgtacactaataggaaagacattatattattttcggagtcaagaagataagtttcctttaggtcagatcaaactctgggaggctaaagtggaagaggttgacagatcttgtgattcagatgaagattatgaagccagtggacgaagtctgttatccacacattatactatcgttatccatcccaaagaccaaggtccaacttacctcctaattggatccaagcatgaaaaggacacttggctttatcatctgactgttgcagctggaagcaacaatgtaaacgttggatctgaatttgaacaactggtttgcaaattgctaaatatagacggggagccttcctctcagatatggagacaccccactttgtgtcacagtaaagaaggaatcatttcccctctgacaactctaccttccgaagccctgcagacagaagctattaaattatttaagacctgccagctttttataaatgctgcagttgactctcctgcaattgattaccacatatctttagcccagagtgctttgcaaatctgcctgacacatcctgagctgcagaatgaaatttgctgtcagcttattaaacagacaagacgaagacagccacagaatcaaccaggaccattgcagggctggcagctcttggcactctgcgttgggctcttccttccccatcatcctttcctgtggctcctcaggcttcacctaaagaggaatgcagattccaggacagaatttggaaaatatgccatttactgccagcgttgtgtagaaagaacgcaacaaaatggtgacagagaagcaagaccctcaaggatggaaattctttcaactcttctccgaaacccttatcaccattctttgccctttagtatacctgtgcacttcatgaatgggatataccaggtagttggttttgacgcatctaccacagtggaagaatttttgaatactttgaaccaggacacaggaatgaggaaaccagcgcagtctggatttgcgttgttcactgacgatccttctggcagagatttagagcattgtcttcaaggaaacatcaagatttgtgacattatttccaaatgggaacaggcttccaaagaacagcagcctggaaaatgtgaaggtacaaggactgttcgtctgacatacaaaaacagactatatttctcagtgcaagctcgtggagagactgatagagaaaagttgctgttaatgtatcagacaaatgatcaaatcataaatggactttttcctctgaacaaagatctggcattagaaatggcagctcttttatctcaggtagagattggagattttgaaagacctttctcaactccagcagggcatgttaccaatcagtgcaaagtgaatcaaactctaaagcaagtcatagagaaattttatcctaaaaggtatagagatggctgttctgaagagcagttaaggcagctttgccagcgactttcaaccagatggatggccctccggggacacagtgctgctgactgtgtgcgcatttatttgacagtagccaggaagtggccattctttggtgccaagttgtttcttgcaaaacccataactccatcatcacttggaagtactttcttgtggctggctgtacatgaggatggtttaagcctcttagaatacaactccatgaggttaatagtcagctatgtgtacaagagtctaatgacctttggaggctatcaagatgattttatggtagtcattaacaatacacattcaaaggacaaaccaacagagaaattactttttgccatggcaaaacccaagattcttgaaatcactcttttgatcgccagttacataaacaacttccatcagcaaaaggcagcatttcaccacctctctgctccagcactgctctcagcccagacccggggaccccaagccagaatgatgggaagccagcctcttctgtcaagcagcagaccgaccaaaggccccaccttactctgaaagctggggagcctgaacattcactccttgtcctccatgctgtggctgtatcagctccctacaagttcgtttacacctggcagcacggcagccacacaccggtattccaaaccttaacaatgaagggggttagtctcttttatttgattcttaaatattcaaataaatattaacagtaaaacataaacacaaaatttgccaacacactaattttcttatagagtaaatgagtaagaattcatcattttttccatctcccttctcccttgtcatcagacacattgtgcaatgtggcttttcttttcttttctttttttcccctttttaatattctggcaatctttagaaagggagattccaaactcccatttggtaaaccagttgattatttggaaatgttcactgccaaaatagtaagtgctataactaaatgcgcttttaattaatgatatagtgtttggaaaggagtagaacatgcagcataagaaactgctgcagagtggtgcgaggagtacattttcagagcaggtgcagtacatcttccggctctatgaatcattatgtgagaaagcaggataacattaggtaacctgagcctcctgtgtggtattagaaagtataccgtcaccttttcacatcactggagtgtaaaatttaaaacaagatggtgattcctgacattccttggctgtcagtgctgcccagattcagaagaatattgcccacatttcactgtatttggtgctgggtcattttgaccttgctttgttaataatatctttaaaaacaaagacaatccttaaagctttgctcctcacacattaccttctaattatagtttgaaaatagattccctacacatacatacatatgtatgcacagatagggtcttgctatgttgcccaggctggtcttgaactcctggcctcaagcaatcctctctcctcagcctcccaaagtgctgggattacaagtgtgagccaccacacctggctccagaaattttattttatttttttgaggcagggtctcactctggttgcccaggctggagtgcagtggtgccatcatagctcactgtagcctcgaccttccgggatcaagcaatcccacttcagcctcttgaatagctgggactagaagcatgcaccaccatgcccatctaatatttgtatttttagtagagacaggatctccctatgttgtccagcctagtctcaaactcctgggttcaagcaatcctcccacctcggcctcccaaagtgctgggattgcaggcatgagccaccgtgcccagcctcaaaaatattttttaaaagaaaagagaaaataattcttctgtcaaaggaggttaaattttagttgatagagtacttaaatgcattactttattaggttatgtaagtggtcagtgcattccagtatgtgtcacaacagtgtagttcatattcatgataaaaatgaaactgtgataagacatgaaaattatattattaaaatgttcaattgtaatggtaatcatgagtatacttaattttatttatgtatagaatatttgtatttattttttggacatatatttatcactttgtcattttttttaaccaatttgagaaatgttagctgctgaattaatttgttgcccgagccttcatattttcttctttgctgccttctccctgtggcaatgtactgttctcacattaagccttttaaaaatgttccatactgtattagcatccttagaagggacagaactaagaaatacattgctcaaataatattttactttattgataatgacaaaaagaatattttttaaaccccatcaaaatagatttcaattgactgtttcccctacatcttttgagccacagtcgcccatcgaataagcaaatttgtttttgagaataaactggtaaccagtttgtgatgactctcagaagccttttggctgggttacagaagagtttctaagttcctagagagccatttaataattagttggtgagccagaggcttgacagagctgttacttatgtgtgagggctttattctcaggcagtagtttattcatcatttggtaagcccctccccacactcctctaatttaaacaagtagtgaaggcttatcttaaactgtgtagtaccttagacttggcatttatttttgatagagcagagataaaatattttgatggaaggaaatcaattttctgtaactgatgatgtgaaaattttattttctgggaaattatatagccattcaaaaattcaaagtatgttattatgattggttacaagagaataatgttacatgtttaattgtaatatttgtctcctatcattttcttccctttcagtcataataaatgatttacaaaaccca

SEQ ID NO: 15951 - DNA, 3623 bp, Homo sapiens
  source 1..3623: mol_type = unassigned DNA
gagagtccggggatcccgggggccagtcgcggccgggacatcgggcgctgcggccggggacccgctgctgagatagacagaatatggcagagctttctgagccagagggaccagtagattggaaggaacgatgtgtagctctggagtcccaactcatgaaatttagagttcaagcaagcaagatacgagagcttttagcagagaagatgcaacagcttgagagacaagttattgatgctgaacgtcaagcagaaaaagcttttcaacaggtacaagttatggaagataaattaaaagcagctaatattcaaaccagtgaatcagagacaagattatataataagtgtcaagatctggagtcgctaatacaggaaaaagatgacgtcattcaaaacttggaattgcaacttgaagagcagaaacaaataagaatacaagaagctaaaataatagaagagaaagcagctaagataaaagaatgggtaacagttaagttaaatgagctggaattggagaatcagaatcttcgtttgatcaaccaaaaccaaactgaagagataagaacaatgcagtcaaaactacaagttcaaggaaagaagtcatccactgtctctacactaaagctttcggaaggccagcgcctgagcagtttgacctttgggtgctttttatctcgagcaaggagtcctcctcaagtagtaaaatctgaggaaatgagcaagatatcatcgaaagaacctgagttcactgaaggaaaagacatggaagaaatggaaattccagaaaagtctgttgataaccaagttctagaaaacaacagaggccagagaacattgcatcaaaccccttgtggctcagaacagaatcggaaaacaagaacaagctttgccacagatggtggcatctcccagaattctggggctcctgtgagtgactggagctctgatgaggaagacgggagcaaaggaagatccaagtccagatgcacatccaccctctccagtcacacatctgaggaaggggtccagtgtagcaggatgggaagtgaaatgtatctgacagcatctgatgacagcagctctatatttgaggaagagacttttggcataaagagaccagaacacaagaagctatattcttggcagcaggaggcacagtggaaagctctaaatagtcctcttggaaagggaaattctgaattaagtaaaaaggaacaagatagttcctcggatgaactgaataaaaaatttcaatcccagagactcgattattcatcttcatcgagtgaagccaacaccccaagccctattttgaccccagctttaatgccaaagcatcctaactcactctctggaaaaggaacacaattagtgccttcatcacacctgccacccccaaagttaaggattcctaatgttttcagtataagtgtagcactagccaaaaggcacttaagccagccacagttaagctctgacaggatgtttggtacaaatagaaacgctataagcatgatacgaccactgagacctcaggaaactgatcttgatctagttgatggagacagtacagaagttttagagaatatggacacgagttgtgatgatggattattttcctatgactccttggactctccaaattcagatgaccaggaacactgtgactcagcaaagaaggtggcatacagcaaacctccaactcctcccctgcaccgttttccttcttgggaaagcagaatttatgctgtagccaaatcaggtattcgaatgtctgaggccttcaatatggagagtgttaataaaaattctgctgcaaccctttcctatactacatcaggactttatacatctctgatatacaagaacatgaccaccccagtgtatacaactttgaaggggaaggcgacccaaataagtagcagccctttcctggatgactcatctgggtcagaggaagaagacagctccagatccagctcccggacgtcagagtcagactcacgcagtaggagtgggccaggcagccccagagccatgaaacgaggtgtgtctctctcctctgtggcttctgaaagtgattatgctattcctcctgatgcttactccacagacacggagtactcacagccagagcagaagctcccaaaaacttgctcatcttccagtgataatgggaaaaatgaaccactggaaaaatctggttatttattaaaaatgagtggtaaagtcaagtcttggaagcggcggtggtttgttcttaaaggtggtgaattactttactacaaatctccgagtgatgtaattagaaaaccccagggccatattgaacttagtgcatcctgtagtattttaagaggagataacaaacaaacagttcagttgaccactgaaaaacacacatactatctgactgcagattctcccaatatattggaagagtggattaaagtgttacagaatgttcttcgagtacaagctgccaacccactttccctgcagcctgagggcaaacccaccatgaagggattgctcactaaggtaaaacatggatattccaagagagtctggtgtacactaataggaaagacattatattattttcggagtcaagaagataagtttcctttaggtcagatcaaactctgggaggctaaagtggaagaggttgacagatcttgtgattcagatgaagattatgaagccagtggacgaagtctgttatccacacattatactatcgttatccatcccaaagaccaaggtccaacttacctcctaattggatccaagcatgaaaaggacacttggctttatcatctgactgttgcagctggaagcaacaatgtaaacgttggatctgaatttgaacaactggtttgcaaattgctaaatatagacggggagccttcctctcagatatggagacaccccactttgtgtcacagtaaagaaggaatcatttcccctctgacaactctaccttccgaagccctgcagacagaagctattaaattatttaagacctgccagctttttataaatgctgcagttgactctcctgcaattgattaccacatatctttagcccagagtgctttgcaaatctgcctgacacatcctgagctgcagaatgaaatttgctgtcagcttattaaacagacaagacgaagacagccacagaatcaaccaggaccattgcagggctggcagctcttggcactctgcgttgggctcttccttccccatcatcctttcctgtggctcctcaggcttcacctaaagaggaatgcagattccaggtgtgcagaatactagccagctgaactgtttatgtggcctctgaaagtctacgataaatcataagtatttaacgatctgccaggtacattttcagaagaatgtatgaaacaaatattggtacaggaagcctttggttatcattgatgtggagctaggaaaatatttcctttgttatgttaaatctcttagggaagattgcaataaatacttgaaaaactgacagagaatatttttaagtgaaaagtgcatttgcatttcaagtatgaatgacttagcattagtgggtgttcattcaataaaagcaactattttgtttcctta

SEQ ID NO: 15952 - DNA, 6685 bp, Homo sapiens
  source 1..6685: mol_type = unassigned DNA
ggggatcccgggggccagtcgcggccgggacatcgggcgctgcggccggggacccgctgctgagatagacagaatatggcagagctttctgagccagagggaccagtagattggaaggaacgatgtgtagctctggagtcccaactcatgaaatttagagttcaagcaagcaagatacgagagcttttagcagagaaggactgcttgagggttctcacaacatggtggctggcttcccccagagcaagtcatccaagagaatgcaaggtggaagatgcagtgcgtcttatgacctactctcagaagtcatacttcatcatttccacaatatcctgttggttgcaaaggtcagccctatgttgtgaaggaagcaactacacatgggtgtgattaccagaagatgcaacagcttgagagacaagttattgatgctgaacgtcaagcagaaaaagcttttcaacaggtacaagttatggaagataaattaaaagcagctaatattcaaaccagtgaatcagagacaagattatataataagtgtcaagatctggagtcgctaatacaggaaaaagatgacgtcattcaaaacttggaattgcaacttgaagagcagaaacaaataagaatacaagaagctaaaataatagaagagaaagcagctaagataaaagaatgggtaacagttaagttaaatgagctggaattggagaatcagaatcttcgtttgatcaaccaaaaccaaactgaagagataagaacaatgcagtcaaaactacaagaagttcaaggaaagaagtcatccactgtctctacactaaagctttcggaaggccagcgcctgagcagtttgacctttgggtgctttttatctcgagcaaggagtcctcctcaagtagtaaaatctgaggaaatgagcaagatatcatcgaaagaacctgagttcactgaaggaaaagacatggaagaaatggaaattccagaaaagtctgttgataaccaagttctagaaaacaacagaggccagagaacattgcatcaaaccccttgtggctcagaacagaatcggaaaacaagaacaagctttgccacagatggtggcatctcccagaattctggggctcctgtgagtgactggagctctgatgaggaagacgggagcaaaggaagatccaagtccagatgcacatccaccctctccagtcacacatctgaggaaggggtccagtgtagcaggatgggaagtgaaatgtatctgacagcatctgatgacagcagctctatatttgaggaagagacttttggcataaagagaccagaacacaagaagctatattcttggcagcaggaggcacagtggaaagctctaaatagtcctcttggaaagggaaattctgaattaagtaaaaaggaacaagatagttcctcggatgaactgaataaaaaatttcaatcccagagactcgattattcatcttcatcgagtgaagccaacaccccaagccctattttgaccccagctttaatgccaaagcatcctaactcactctctggaaaaggaacacaattagtgccttcatcacacctgccacccccaaagttaaggattcctaatgttttcagtataagtgtagcactagccaaaaggcacttaagccagccacagttaagctctgacaggatgtttggtacaaatagaaacgctataagcatgatacgaccactgagacctcaggaaactgatcttgatctagttgatggagacagtacagaagttttagagaatatggacacgagttgtgatgatggattattttcctatgactccttggactctccaaattcagatgaccaggaacactgtgactcagcaaagaaggtggcatacagcaaacctccaactcctcccctgcaccgttttccttcttgggaaagcagaatttatgctgtagccaaatcaggtattcgaatgtctgaggccttcaatatggagagtgttaataaaaattctgctgcaaccctttcctatactacatcaggactttatacatctctgatatacaagaacatgaccaccccagtgtatacaactttgaaggggaaggcgacccaaataagtagcagccctttcctggatgactcatctgggtcagaggaagaagacagctccagatccagctcccggacgtcagagtcagactcacgcagtaggagtgggccaggcagccccagagccatgaaacgaggtgtgtctctctcctctgtggcttctgaaagtgattatgctattcctcctgatgcttactccacagacacggagtactcacagccagagcagaagctcccaaaaacttgctcatcttccagtgataatgggaaaaatgaaccactggaaaaatctggttatttattaaaaatgagtggtaaagtcaagtcttggaagcggcggtggtttgttcttaaaggtggtgaattactttactacaaatctccgagtgatgtaattagaaaaccccagggccatattgaacttagtgcatcctgtagtattttaagaggagataacaaacaaacagttcaggtacttaacttttttttttttttttttttttttgtatcatgccagactcaattctcaattatccaacctaatggaaaggagataggataattcagtgtttctttattcactttggggggttagtttgatgccttggaagtatgtgaaactccacgaatttttggttaaaactataatgtaagttaggtgtgtgttgagtaactcccaccacactttacctttcttcctttatactcttctttcctcatatttaatctcctaggtattttcagctgtccaactgtgaagctattttaaggaagggttatctggtaaatgaattctcaataagatgttagttatataatgtactgtgaaattcaggaatgtttgtattttaatatagaatctgaaaatgacagttcttatatgaacttcagatgccataacaccaaagtgggaaatatattggtgagcagagggagtgtgctgccaagcaagtcacactgtaggggcagctgctgcccattttactcacacataaggccagtcttgccagaaatctgttaaatttaaaacacaggctgttgagatattctagtatatgtaatttaaagtcagacactttatttctgaaatgtcttcaataaccattattttcttatattgctcctttggagggtggaggacaactttgccagaaaggtacattatcaatgtttccagtgatttgtacctgaaaacctctcaaaaatttagaaaggagaatcaaggaaagctttgtctttgggcatggcagttaagaatcatttgtaagtttctgaaatttggaaaatttgcagtgtggctaatttgagactggaacattctgagttcataatatctaatcacatgttcgttccaataatttatcttcttatatgcaagatcttcttattttatttatagttgattttgtcatttgtattaagaaacctcttctttagttgctaaaactatgctattttattatagtctttaatcattctgctcctcatttcaataagtaggaacctggccgggcgcggtggctcacgcctgtaatctcagcacttcaggaggctgaggcaggcggatcatgaggtcaggagatcgagaccatcctggctaacacggtgaaaccccgtctctactaaaaattcaaaaaaaattatccgggcatggtggcaggtgcctgtaagtcccagctgctcgggaggccgaggcaggagaatggtgtgaacccaggaggcggagcttgcagtgagccaagatggcgccactgcactccagcctgggcgacagaaagagactctgtctcaaaaaaaaaaaaaaaagaaaagtaggaacctgtaacacatttaagcaagaaagggaaaatgtgacaaataaacaagatataaaatcataaccccaaaattaggtaaactggagtaacaaagttatttccacaaaaatttaattgctgtaattctcacaaagtggttaaaatattctaactgatatggagtcatttatttagaaactgggacttgagatttagcatgtttgcttctgtgttaagtaatgacgtttgaataatgaacaaggaaatgctaacaatcctaaatcttcacagttttctttcctatacctttctcgttgcattctagttgaccactgaaaaacacacatactatctgactgcagattctcccaatatattggaagagtggattaaagtgttacagaatgttcttcgagtacaagctgccaacccactttccctgcagcctgagggcaaacccaccatgaagggattgctcactaaggtaaaacatggatattccaagagagtctggtgtacactaataggaaagacattatattattttcggagtcaagaagataagtttcctttaggtcagatcaaactctgggaggctaaagtggaagaggttgacagatcttgtgattcagatgaagattatgaagccagtggacgaagtctgttatccacacattatactatcgttatccatcccaaagaccaaggtccaacttacctcctaattggatccaagcatgaaaaggacacttggctttatcatctgactgttgcagctggaagcaacaatgtaaacgttggatctgaatttgaacaactggtttgcaaattgctaaatatagacggggagccttcctctcagatatggagacaccccactttgtgtcacagtaaagaaggaatcatttcccctctgacaactctaccttccgaagccctgcagacagaagctattaaattatttaagacctgccagctttttataaatgctgcagttgactctcctgcaattgattaccacatatctttagcccagagtgctttgcaaatctgcctgacacatcctgagctgcagaatgaaatttgctgtcagcttattaaacagacaagacgaagacagccacagaatcaaccaggaccattgcagggctggcagctcttggcactctgcgttgggctcttccttccccatcatcctttcctgtggctcctcaggcttcacctaaagaggaatgcagattccaggtgtgcagaatactagccagctgaactgtttatgtggcctctgaaagtctacgataaatcataagtatttaacgatctgccaggacagaatttggaaaatatgccatttactgccagcgttgtgtagaaagaacgcaacaaaatggtgacagagaagcaagaccctcaaggatggaaattctttcaactcttctccgaaacccttatcaccattctttgccctttagtatacctgtgcacttcatgaatgggatataccaggtagttggttttgacgcatctaccacagtggaagaatttttgaatactttgaaccaggacacaggaatgaggaaaccagcgcagtctggatttgcgttgttcactgacgatccttctggcagagatttagagcattgtcttcaaggaaacatcaagatttgtgacattatttccaaatgggaacaggcttccaaagaacagcagcctggaaaatgtgaaggtacaaggactgttcgtctgacatacaaaaacagactatatttctcagtgcaagctcgtggagagactgatagagaaaagttgctgttaatgtatcagacaaatgatcaaatcataaatggactttttcctctgaacaaagatctggcattagaaatggcagctcttttatctcaggtagagattggagattttgaaagacctttctcaactccagcagggcatgttaccaatcagtgcaaagtgaatcaaactctaaagcaagtcatagagaaattttatcctaaaaggtatagagatggctgttctgaagagcagttaaggcagctttgccagcgactttcaaccagatggatggccctccggggacacagtgctgctgactgtgtgcgcatttatttgacagtagccaggaagtggccattctttggtgccaagttgtttcttgcaaaacccataactccatcatcacttggaagtactttcttgtggctggctgtacatgaggatggtttaagcctcttagaatacaactccatgaggttaatagtcagctatgtgtacaagagtctaatgacctttggaggctatcaagatgattttatggtagtcattaacaatacacattcaaaggacaaaccaacagagaaattactttttgccatggcaaaacccaagattcttgaaatcactcttttgatcgccagttacataaacaacttccatcagcaaaaggcagcatttcaccacctctctgctccagcactgctctcagcccagacccggggaccccaagccagaatgatgggaagccagcctcttctgtcaagcagcagaccgaccaaaggccccaccttactctgaaagctggggagcctgaacattcactccttgtcctccatgctgtggctgtatcagctccctacaagttcgtttacacctggcagcacggcagccacacaccggtattccaaaccttaacaatgaagggggttagtctcttttatttgattcttaaatattcaaataaatattaacagtaaaacataaacacaaaa

SEQ ID NO: 15953 - DNA, 737 bp, Homo sapiens
  source 1..737: mol_type = unassigned DNA
atcgggcgctgcggccggggacccgctgctgagatagacagaatatggcagagctttctgagccagagggaccagtagattggaaggaacgatgtgtagctctggagtcccaactcatgaaatttagagttcaagcaagcaagatacgagagcttttagcagagaagatgcaacagcttgagagacaagttattgatgctgaacgtcaagcagaaaaagcttttcaacagacggaatcttgctctgtggcccaggctggagtgcagtggcgcgatcttggcttactgcaacctccgcctcccgggttcaagtgattctcctgcctcaatctcctgaataactgggattacaggtacaagttatggaagataaattaaaagcagctaatattcaaaccagtgaatcagagacaagattatataataagtgtcaagatctggagtcgctaatacaggaaaaagatgacgtcattcaaaacttggaattgcaacttgaagagcagaaacaaataagaatacaagaagctaaaataatagaagagaaagcagctaagataaaagaatgggtaacagttaagttaaatgagctggaattggagaatcagaatcttcgtttgatcaaccaaaaccaaactgaagagataagaacaatgcagtcaaaactacaagaagttcaaggaaagaagtcatccactgtctctacactaaagctttcggaaggccagcgcctgagcagtt

SEQ ID NO: 15954 - DNA, 580 bp, Homo sapiens
  source 1..580: mol_type = unassigned DNA
taaacactttgcatattgtcatcgctctaggaaacatgtacattactttatatgatagcaatattctgagaatttcttatgtttgtatgtacctccaaggtaacaccacttggtgaaataggcttgagactttataatcattaaatatattaaaccttgctgtttaatattttcctttttgaagtcttttaggaatctacataatattaaggtaaaattctaggtttaatactgtgataacctgagtacacacacaattttaatattttatcctttgaatttaggtacaagttatggaagataaattaaaagcagctaatattcaaaccagtgaatcagagacaagattatataataagtgtcaagatctggagtcgctaatacaggaaaaagatgacgtcattcaaaacttggaattgcaacttgaagagcagaaacaaataagaatacaagaagctaaaataatagaagagaaagcagctaagataaaagaatgggtaacagttaagttaaatgagctggaattggagaatcagaatcttcgtttgatcaaccaaaaccaaactgaagagataagaac

SEQ ID NO: 15955 - DNA, 685 bp, Homo sapiens
  source 1..685: mol_type = unassigned DNA
tttcccctctgacaactctaccttccgaagccctgcagacagaagctattaaattatttaagacctgccagctttttataaatgctgcagttgactctcctgcaattgattaccacatatctttagcccagagtgctttgcaaatctgcctgacacatcctgagctgcagaatgaaatttgctgtcagcttattaaacagacaagacgaagacagccacagaatcaaccaggaccattgcagatcatgcatatgtgaaagaagcaaaacgtttttgggttaagagagactgtcatcagcccattgcactcactcagatgtggatctctgactggcacgtggtatctaacctgtggtgcttctccctgcccagggctggcagctcttggcactctgcgttgggctcttccttccccatcatcctttcctgtggctcctcaggcttcacctaaagaggaatgcagattccaggacagaatttggaaaatatgccatttactgccagcgttgtgtagaaagaacgcaacaaaatggtgacagagaagcaagaccctcaaggatggaaattctttcaactcttctccgaaacccttatcaccattctttgccctttagtatacctgtgcacttcatgaatgggatataccaggtagttggttttgacgcatctaccacagtggaagaat

SEQ ID NO: 15956 - DNA, 538 bp, Homo sapiens
  source 1..538: mol_type = unassigned DNA
ccccatcatcctttcctgtggctcctcaggcttcacctaaagaggaatgcagattccaggacagaatttggaaaatatgccatttactgccagcgttgtgtagaaagaacgcaacaaaatggtgacagagaagcaagaccctcaaggatggaaattctttcaactcttctccgaaacccttatcaccattctttgccctttagtatacctgtgcacttcatgaatgggatataccaggtagttggttttgacgcatctaccacagtggaagaatttttgaatactttgaaccaggacacaggaatgaggaaaccagcgcagtctggatttgcgttgttcactgacgatccttctggcagagatttagagcattgtcttcaaggaaacatcaaggtgaaaccaagtccttttcaggagccaagcccaacgaacagcaaagaagctactctttacaagaagagtaaactttgcaagaagtttaattcaggagttttccaaaactttaaccaatctaatctccacgataagaaaaaaaaaa

SEQ ID NO: 15957 - DNA, 632 bp, Homo sapiens
  source 1..632: mol_type = unassigned DNA
tccaaagaacagcagcctggaaaatgtgaaggtacaaggactgttcgtctgacatacaaaaacagactatatttctcagtgcaagctcgtggagagactgatagagaaaagttgctgttaatgtatcagacaaatgatcaaatcataaatggactttttcctctgaacaaagatctggcattagaaatggcagctcttttatctcaggcagctttgccagcgactttcaaccagatggatggccctccggggacacagtgctgctgactgtgtgcgcatttatttgacagtagccaggaagtggccattctttggtgccaagttgtttcttgcaaaacccataactccatcatcacttggaagtactttcttgtggctggctgtacatgaggatggtttaagcctcttagaatacaactccatgaggttaatagtcagctatgtgtacaagagtctaatgacctttggaggctatcaagatgattttatggtagtcattaacaatacacattcaaaggacaaaccaacagagaaattactttttgccatggcaaaacccaagattcttgaaatcactcttttgatcgccagttacataaacaacttccatcagcaaaaggcagcatttcacc

SEQ ID NO: 15958 - DNA, 3720 bp, Homo sapiens
  source 1..3720: mol_type = unassigned DNA
cttgggcccccggcagccggcgggacagaacgcggagagtcgccgcctggccgggcgtagacgcggtggcagagcccgcgcggcgctggaagcgagtggcggagcggcgggacctcggcggactcgccatggaggaggagggtgtgaaggaagccggtgagaagcctcggggagcacagatggtggacaaggctggctggatcaagaagagcagtgggggcctcctgggtttctggaaagaccgatatctgctcctctgccaggcccagctgctggtctatgagaatgaggatgatcagaagtgtgtggagactgtggagctgggcagctatgagaagtgccaggaccttcgtgccctcctcaagcgaaaacaccgctttatcctgctgcgatccccagggaacaaggtcagcgacatcaaattccaggcacccaccggggaggagaaggaatcctggatcaaagccctcaatgaagggattaaccgaggcaaaaacaaggctttcgatgaggtaaaggtggacaagagctgcgccctggagcatgtgacacgggaccgggtgcgagggggccagcgacgccggccaccaacgagagtccacctgaaggaggtggccagtgcagcttctgacggtcttctgcgcctggatcttgatgttccggacagtgggccaccagtgtttgcccccagcaatcatgtcagtgaagcccaacctcgggagacaccccggcccctcatgcctcctaccaagcctttcctagcacctgagaccaccagccctggtgacagggtggagacccctgtgggggagagagccccaacccctgtctcagcaagctctgaggtctcccctgagagccaagaggactcagagaccccagcagaggaggacagtggctctgagcagcctcccaacagcgtcctgcctgacaaactgaaggtgagctgggagaaccccagcccccaggaggcccctgctgcagagagtgcagaaccgtcccaggcaccctgttctgagacttctgaggctgcccccagggagggtgggaagccccctacacccccacccaagatcttatcagagaaactgaaagcctccatgggtgagatgcaggcttctgggccacctgctccaggcacagtgcaggtctcagtgaatggcatggatgacagtcctgagcctgccaagccctctcaggctgagggcaccccaggaactcctccaaaggatgcaacaacatccacagcactgcccccctgggacctgccacctcagttccatccccgctgctcctcccttggggacttgcttggggaaggcccgcggcatcccttgcagcccagggaacggctatatcgggcccagctggaggtgaaggtggcctcggaacagacggagaaactgttgaacaaggtgctgggcagtgagccggcccctgttagtgccgaaacattgctcagccaggctgtggagcagctgaggcaggccacccaggtcctgcaggaaatgagagatttgggagagctgagccaggaagcacctgggctaagggagaagcggaaggagctggtgaccctctacaggagaagtgcaccctagggccttctgggccagaggcaccatcccttctggccatccatcaagtccatcaaggcccagccctgctgagaaatgtgcttctgcttctacagcaatggctgcaggagggccattgggcatgtcagggtttggccatgacccgaagagactcctggcgtccttcctactctgctctggccagtggtgccaggtgccacccagggctactgcctggctatctggcctggcctctgggctggggctggggctgggagcacacacgctgggacctatgtgtttgtgtggtcgttccaaactgccccagggctttgggggcggcacttggggtttctgggaatgacatcatctctgttccccatccccagtagtttacattcctgacttctgaatacagcacagctgagccccctgcagctcccatctccagctattcctaggcaaagagcctcatggctaaggcagcctcaaagccagcccctcctcccacctattctgagtagctgcagaggccttgggtccaggctctaggttcatccctcagttggggggaacgtaggacccagctggagcctcttgagggagatgagaggcctctttgtgaggaggacattagctgtgtggcctctctctctttggccctgtttccttttttgcaaaacaaggacattttctgcagccccttcctctcagtgagctatgattggagggcttaggtctggaggattcaagagtggaagaggaatttaaggggtcccctagtctagtctctgcccctggatagtgtccagccttgtatatttctgaagaggtggatcccagagtggctctgatgtccacattagaaaaacttacttgtaatgatcatgtcagccttcagaagagaatccccaccaacttctgtgcctcctcagatggggatttatctggatctctgtggttccttctcagccgaaacaggtccagtatcccagtcatttcttcaaatgctgataggggtatgttggaatccgaagccacttccccgccttcaagccccagatgggctgctctcctgtaactttctaggagaagagacattttcttctttccctttcctggtccatccctgcaccctggtcctctcccagcctctcccccacattgtccctgactctaggggcacatccagtctccatcgtgctgcagcagctggactgagggcagagcctgtaggtgcagaggccctggctcccgaggtccagccactctccctggggcctctggggtgagagcagcttccgataggacctgcccagatttctgcatgtgcacttttgtttactgaaagagagaaaggggggggtcacagcaacatgccctggcctttctgctctgttccccaaccccactgaggcctgctgcacaggtcaatgccttcgttatcgttattgtactgtcactttgttcttgaggtagtagtcaaggatcaggaggggcagatgtcttctctgggctgcgtggggccggagcagaggtgagcagcaatgcactggttcgggagcccccatcagcctccttgtgcaaactgggcccccatgccacagtctggctttccctccatctgccccaggacaagagcaagaaggacatcagttgcccagtcatgtgatcccctgccatcttgccttaggaacagccttcccccaccagcagccatggctggctggggctttagccaagccacctactgccaggaattggagcctcagttccctcctgtgtcaagtagctaactgcagcagctggactgagggcagagtctgtgggtgcagagaccctgcatgtaggtcacaggttgaggcccagccactctccctggggcctggtgggtaggcaagtagctctggggccacctcaagtgaccaaatgctattaatttccatcctttagcaggctgggccctaggcaggaagctggcttctgggagaggagtgagaacgtgcagggcctgcctagcttgcgtgcttgaggaaggtggcattccgtgcttgcctccttgaggagggtggcattctgtgtcttctgcttatgaagcgcctttcttaaagtttggcaataaatccatttttatggaacttca

SEQ ID NO: 15959 - DNA, 3569 bp, Homo sapiens
  source 1..3569: mol_type = unassigned DNA
aagtttcttgggcccccggcagccggcgggacagaacgcggagagtcgccgcctggccgggcgtagacgcggtggcagagcccgcgcggcgctggaagcgagtggcggagcggcgggacctcggcggactcgccatggaggaggaggatgatcagaagtgtgtggagactgtggagctgggcagctatgagaagtgccaggaccttcgtgccctcctcaagcgaaaacaccgctttatcctgctgcgatccccagggaacaaggtcagcgacatcaaattccaggcacccaccggggaggagaaggaatcctggatcaaagccctcaatgaagggattaaccgaggcaaaaacaaggctttcgatgaggtaaaggtggacaagagctgcgccctggagcatgtgacacgggaccgggtgcgagggggccagcgacgccggccaccaacgagagtccacctgaaggaggtggccagtgcagcttctgacggtcttctgcgcctggatcttgatgttccggacagtgggccaccagtgtttgcccccagcaatcatgtcagtgaagcccaacctcgggagacaccccggcccctcatgcctcctaccaagcctttcctagcacctgagaccaccagccctggtgacagggtggagacccctgtgggggagagagccccaacccctgtctcagcaagctctgaggtctcccctgagagccaagaggactcagagaccccagcagaggaggacagtggctctgagcagcctcccaacagcgtcctgcctgacaaactgaaggtgagctgggagaaccccagcccccaggaggcccctgctgcagagagtgcagaaccgtcccaggcaccctgttctgagacttctgaggctgcccccagggagggtgggaagccccctacacccccacccaagatcttatcagagaaactgaaagcctccatgggtgagatgcaggcttctgggccacctgctccaggcacagtgcaggtctcagtgaatggcatggatgacagtcctgagcctgccaagccctctcaggctgagggcaccccaggaactcctccaaaggatgcaacaacatccacagcactgcccccctgggacctgccacctcagttccatccccgctgctcctcccttggggacttgcttggggaaggcccgcggcatcccttgcagcccagggaacggctatatcgggcccagctggaggtgaaggtggcctcggaacagacggagaaactgttgaacaaggtgctgggcagtgagccggcccctgttagtgccgaaacattgctcagccaggctgtggagcagctgaggcaggccacccaggtcctgcaggaaatgagagatttgggagagctgagccaggaagcacctgggctaagggagaagcggaaggagctggtgaccctctacaggagaagtgcaccctagggccttctgggccagaggcaccatcccttctggccatccatcaagtccatcaaggcccagccctgctgagaaatgtgcttctgcttctacagcaatggctgcaggagggccattgggcatgtcagggtttggccatgacccgaagagactcctggcgtccttcctactctgctctggccagtggtgccaggtgccacccagggctactgcctggctatctggcctggcctctgggctggggctggggctgggagcacacacgctgggacctatgtgtttgtgtggtcgttccaaactgccccagggctttgggggcggcacttggggtttctgggaatgacatcatctctgttccccatccccagtagtttacattcctgacttctgaatacagcacagctgagccccctgcagctcccatctccagctattcctaggcaaagagcctcatggctaaggcagcctcaaagccagcccctcctcccacctattctgagtagctgcagaggccttgggtccaggctctaggttcatccctcagttggggggaacgtaggacccagctggagcctcttgagggagatgagaggcctctttgtgaggaggacattagctgtgtggcctctctctctttggccctgtttccttttttgcaaaacaaggacattttctgcagccccttcctctcagtgagctatgattggagggcttaggtctggaggattcaagagtggaagaggaatttaaggggtcccctagtctagtctctgcccctggatagtgtccagccttgtatatttctgaagaggtggatcccagagtggctctgatgtccacattagaaaaacttacttgtaatgatcatgtcagccttcagaagagaatccccaccaacttctgtgcctcctcagatggggatttatctggatctctgtggttccttctcagccgaaacaggtccagtatcccagtcatttcttcaaatgctgataggggtatgttggaatccgaagccacttccccgccttcaagccccagatgggctgctctcctgtaactttctaggagaagagacattttcttctttccctttcctggtccatccctgcaccctggtcctctcccagcctctcccccacattgtccctgactctaggggcacatccagtctccatcgtgctgcagcagctggactgagggcagagcctgtaggtgcagaggccctggctcccgaggtccagccactctccctggggcctctggggtgagagcagcttccgataggacctgcccagatttctgcatgtgcacttttgtttactgaaagagagaaaggggggggtcacagcaacatgccctggcctttctgctctgttccccaaccccactgaggcctgctgcacaggtcaatgccttcgttatcgttattgtactgtcactttgttcttgaggtagtagtcaaggatcaggaggggcagatgtcttctctgggctgcgtggggccggagcagaggtgagcagcaatgcactggttcgggagcccccatcagcctccttgtgcaaactgggcccccatgccacagtctggctttccctccatctgccccaggacaagagcaagaaggacatcagttgcccagtcatgtgatcccctgccatcttgccttaggaacagccttcccccaccagcagccatggctggctggggctttagccaagccacctactgccaggaattggagcctcagttccctcctgtgtcaagtagctaactgcagcagctggactgagggcagagtctgtgggtgcagagaccctgcatgtaggtcacaggttgaggcccagccactctccctggggcctggtgggtaggcaagtagctctggggccacctcaagtgaccaaatgctattaatttccatcctttagcaggctgggccctaggcaggaagctggcttctgggagaggagtgagaacgtgcagggcctgcctagcttgcgtgcttgaggaaggtggcattccgtgcttgcctccttgaggagggtggcattctgtgtcttctgcttatgaagcgcctttcttaaagtttggcaataaatccatttttatgg

SEQ ID NO: 15960 - DNA, 2960 bp, Homo sapiens
  source 1..2960: mol_type = unassigned DNA
gcgcgcggctccgctgggaagcgagacccgggtggcgggacaagacttgcttcccggccacgcgcgctcggccggccgtggggcggggcataggccgtgacgtgatgtcgcgtatcgagtctccgcccccttcccgcctccccgtatataagacttcgccgagcgctctcactcgcacaagtggaccggggtgttgggtgctagtcggcaccagaggcaagggtgcgaggaccacggccggctcggacgtgtgaccgcgcctagggggtggcagcgggcagtgcggggcggcaaggcgaccatggagcttttgcggactatcacctaccagccagccgccagcaccaaaatgtgcgagcaggcgctgggcaagggttgcggagcggactcgaagaagaagcggccgccgcagccccccgaggaatcgcagccacctcagtcccaggcgcaagtgcccccggcggcccctcaccaccatcaccaccattcgcactcggggccggagatctcgcggattatcgtcgaccccacgactgggaagcgctactgccggggcaaagtgctgggaaagggtggctttgcaaaatgttacgagatgacagatttgacaaataacaaagtctacgccgcaaaaattattcctcacagcagagtagctaaacctcatcaaagggaaaagattgacaaagaaatagagcttcacagaattcttcatcataagcatgtagtgcagttttaccactacttcgaggacaaagaaaacatttacattctcttggaatactgcagtagaaggtcaatggctcatattttgaaagcaagaaaggtgttgacagagccagaagttcgatactacctcaggcagattgtgtctggactgaaataccttcatgaacaagaaatcttgcacagagatctcaaactagggaacttttttattaatgaagccatggaactaaaagttggggacttcggtctggcagccaggctagaacccttggaacacagaaggagaacgatatgtggtaccccaaattatctctctcctgaagtcctcaacaaacaaggacatggctgtgaatcagacatttgggccctgggctgtgtaatgtatacaatgttactagggaggcccccatttgaaactacaaatctcaaagaaacttataggtgcataagggaagcaaggtatacaatgccgtcctcattgctggctcctgccaagcacttaattgctagtatgttgtccaaaaacccagaggatcgtcccagtttggatgacatcattcgacatgacttttttttgcagggcttcactccggacagactgtcttctagctgttgtcatacagttccagatttccacttatcaagcccagctaagaatttctttaagaaagcagctgctgctctttttggtggcaaaaaagacaaagcaagatatattgacacacataatagagtgtctaaagaagatgaagacatctacaagcttaggcatgatttgaaaaagacttcaataactcagcaacccagcaaacacaggacagatgaggagctccagccacctaccaccacagttgccaggtctggaacacccgcagtagaaaacaagcagcagattggggatgctattcggatgatagtcagagggactcttggcagctgtagcagcagcagtgaatgccttgaagacagtaccatgggaagtgttgcagacacagtggcaagggttcttcggggatgtctggaaaacatgccggaagctgattgcattcccaaagagcagctgagcacatcatttcagtgggtcaccaaatgggttgattactctaacaaatatggctttgggtaccagctctcagaccacaccgtcggtgtccttttcaacaatggtgctcacatgagcctccttccagacaaaaaaacagttcactattacgcagagcttggccaatgctcagttttcccagcaacagatgctcctgagcaatttattagtcaagtgacggtgctgaaatacttttctcattacatggaggagaacctcatggatggtggagatctgcctagtgttactgatattcgaagacctcggctctacctccttcagtggctaaaatctgataaggccctaatgatgctctttaatgatggcacctttcaggtgaatttctaccatgatcatacaaaaatcatcatctgtagccaaaatgaagaataccttctcacctacatcaatgaggataggatatctacaactttcaggctgacaactctgctgatgtctggctgttcatcagaattaaaaaatcgaatggaatatgccctgaacatgctcttacaaagatgtaactgaaagacttttcgaatggaccctatgggactcctcttttccactgtgagatctacagggaagccaaaagaatgatctagagtatgttgaagaagatggacatgtggtggtacgaaaacaattcccctgtggcctgctggactggttggaaccagaacaggctaaggcatacagttcttgactttggacaatccaagagtgaaccagaatgcagttttccttgagatacctgttttaaaaggtttttcagacaattttgcagaaaggtgcattgattcttaaattctctctgttgagagcatttcagccagaggactttggaactgtgaatatacttcctgaaggggagggagaagggaggaagctcccatgttgtttaaaggctgtaattggagcagcttttggctgcgtaactgtgaactatggccatatataattttttttcattaatttttgaagatacttgtggctggaaaagtgcattccttgttaataaactttttatttattacagcccaaagagcagtatttattatcaaaatgtctttttttttatgttgaccattttaaaccgttggcaataaagagtatgaaaacgcagaaa

SEQ ID NO: 15961 - DNA, 768 bp, Homo sapiens
  source 1..768: mol_type = unassigned DNA
ccccaaattatctctctcctgaagtcctcaacaaacaaggacatggctgtgaatcagacatttgggccctgggctgtgtaatgtatacaatgttactagggaggcccccatttgaaactacaaatctcaaagaaacttataggtgcataagggaagcaaggtatacaatgccgtcctcattgctggctcctgccaagcacttaattgctagtatgttgtccaaaaacccagaggatcgtcccagtttggatgacatcattcgacatgacttttttttgcagggcttcactccggacagactgtcttctagctgttgtcatacagttccagatttccacttatcaagcccagctaagaatttctttaagaaagcagctgctgctctttttggtggcaaaaaagacaaagcaagatatattgacacacataatagagtgtctaaagaagatgaagacatctacaagcttaggcatgatttgaaaaagacttcaataactcagcaacccagcaaacacaggacagatgaggaagctcccatgttgtttaaaggctgtaattggagcagcttttggctgcgtaactgtgaactatggccatatataattttttttcattaatttttgaagatacttgtggctggaaaagtgcattccttgttaataaactttttatttattacagcccaaagagcagtatttattatcaaaatgtctttttttttatgttgaccattttaaaccgttggcaataaagagtatgaaaacgcag

SEQ ID NO: 15962 - DNA, 275 bp, Homo sapiens
  source 1..275: mol_type = unassigned DNA
cttgcttaagtttgagaggattttcttagaataataatagagtgcatgctacaaaatctttgtaggcactaactcactctcctaatctcttccagggtggagatctgcctagtgttactgatattcgaagacctcggctctacctccttcagtggctaaaatctgataaggccctaatgatgctctttaatgatggcacctttcaggtgaatttctaccatgatcatacaaaaatcatcatctgtagccaaaatgaagaataccttctcacctac

SEQ ID NO: 15963 - DNA, 587 bp, Homo sapiens
  source 1..587: mol_type = unassigned DNA
agatgcttgactcattgcataaatcttctctcttctaaggagctccagccacctaccaccacagttgccaggtctggaacacccgcagtagaaaacaagcagcagattggggatgctattcggatgatagtcagagggactcttggcagctgtagcagcagcagtgaatgccttgaagacagtaccatgggaagtgttgcagacacagtggcaagggttcttcggggatgtctggaaaacatgccggaagctgattgcattcccaaagagcagctgagcacatcatttcagtgggtcaccaaatgggttgattactctaacaaatatggctttgggtaccagctctcagaccacaccgtcggtgtccttttcaacaatggtgctcacatgagcctccttccagacaaaaaaacagttcactattacgcagagcttggccaatgctcagttttcccagcaacagatgctcctgagcaatttattagtcaagtgacggtgctgaaatacttttctcattacatggaggagaacctcatggatggtggagatctgcctagtgttactgatattcgaagacctcggctcta

SEQ ID NO: 15964 - DNA, 557 bp, Homo sapiens
  source 1..557: mol_type = unassigned DNA
ttatcatggttcaaatatgtcatatttacttaaagtttttcttcaaaccctttgaaagggaagttaaaactaaaaggaagtcttttagttttacagtgcatgcaagtgagtttactgcgttatcttttatctggcttgtgtccattgctttttgatgagctttcccagcaattgcctcactctcatcttaatctggaattctcacccttaaatgaatttagatgcttgactcattgcataaatcttctctcttctaaggagctccagccacctaccaccacagttgccaggtctggaacacccgcagtagaaaacaagcagcagattggggatgctattcggatgatagtcagagggactcttggcagctgtagcagcagcagtgaatgccttgaagacagtaccatgggaagtgttgcagacacagtggcaagggttcttcggggatgtctggaaaacatgccggaagctgattgcattcccaaagagcagctgagcacatcatttcagtgggtcaccaaatgggttgattactctaacaaatatggctttgggta

SEQ ID NO: 15965 - DNA, 690 bp, Homo sapiens
  source 1..690: mol_type = unassigned DNA
ctggctcctgccaagcacttaattgctagtatgttgtccaaaaacccagaggatcgtcccagtttggatgacatcattcgacatgacttttttttgcagggcttcactccggacagactgtcttctagctgttgtcatacagttccagatttccacttatcaagcccagctaagaatttctttaagaaagcagctgctgctctttttggtggcaaaaaagacaaagcaagatatattgacacacataatagagtgtctaaagaagatgaagacatctacaagcttaggcatgatttgaaaaagacttcaataactcagcaacccagcaaacacaggacagatgaggtgtgttgggaaagagtaaagtagatactcacgctttacgttatttccactctttattaattagcacttggactatgattatcatggttcaaatatgtcatatttacttaaagtttttcttcaaaccctttgaaagggaagttaaaactaaaaggaagtcttttagttttacagtgcatgcaagtgagtttactgcgttatcttttatctggcttgtgtccattgctttttgatgagctttcccagcaattgcctcactctcatcttaatctggaattctcacccttaaatgaatttagatgcttgactcattgcataaatcttctctcttctaaggagctccag

SEQ ID NO: 15966 - DNA, 591 bp, Homo sapiens
  source 1..591: mol_type = unassigned DNA
tgctttatgaccattgctaaagatgtgtttctttgcacacaggtatacaatgttactagggaggcccccatttgaaactacaaatctcaaagaaacttataggtgcataagggaagcaaggtatacaatgccgtcctcattgctggctcctgccaagcacttaattgctagtatgttgtccaaaaacccagaggatcgtcccagtttggatgacatcattcgacatgacttttttttgcagggcttcactccggacagactgtcttctagctgttgtcatacagttccagatttccacttatcaagcccagctaagaatttctttaagaaagcagctgctgctctttttggtggcaaaaaagacaaagcaagatatattgacacacatagtaagttaacaagacttcttttcctttttcgtacccaatattatatttaaatttggtaaattagttaaaagagaattttatattagcataacttggccatatttgcgtattcttaaatgttgatatttatagcataataaatccataccttgaattgtgattgatagctttttattttgcaaacactaaagagggcttttgg

SEQ ID NO: 15967 - DNA, 536 bp, Homo sapiens
  source 1..536: mol_type = unassigned DNA
ttcagatgccaaaagtcaaatgtttccaaatagaaattcagtatagattttaagattttgtttaagattttgtctcccatcaagtcatgtcaagagaaccaagtttaagtagtggaatagttcctaacacgatctcaatattttgtctttccagaacgatatgtggtaccccaaattatctctctcctgaagtcctcaacaaacaaggacatggctgtgaatcagacatttgggccctgggctgtgtaatgtatacaatgttactagggaggcccccatttgaaactacaaatctcaaagaaacttataggtgcataagggaagcaaggtatacaatgccgtcctcattgctggctcctgccaagcacttaattgctagtatgttgtccaaaaacccagaggatcgtcccagtttggatgacatcattcgacatgacttttttttgcagggcttcactccggacagactgtcttctagctgttgtcatacagttccagatttccacttatcaagcccagctaagaatttctttaag

SEQ ID NO: 15968 - DNA, 1410 bp, Homo sapiens
  source 1..1410: mol_type = unassigned DNA
tttgcattcttagcctcagaactgtgtgtctcccgcagcccagagaaatgcatcttgagtctggaagcgagggctttctacatcagacctctctccctctatctgctcccagggaattttcctgacaagtctcatcagagattatttttcatgtctccccgttccaactccctccataaagctcccctttataaaagaagaagagaaactgtttgaacttgctgtttccagcaatgcatttctcttcatgagggagctttaacgaagtcgaatgcctccctctgtccaccctcctccattcctcaatttttttttttttgcttttctttcttcccatttatttatttatttaaaatatctgccgtccatttttgtgccatcctcaattccgtctcggctttgtttcctttcagggtggctttgcaaaatgttacgagatgacagatttgacaaataacaaagtctacgccgcaaaaattattcctcacagcagagtagctaaacctcatcaaagggaaaagattgacaaagaaatagagcttcacagaattcttcatcataagcatgtagtgcagttttaccactacttcgaggacaaagaaaacatttacattctcttggaatactgcagtagaaggtcaatggctcatattttgaaagcaagaaaggtgttgacagagccagaagttcgatactacctcaggcagattgtgtctggactgaaataccttcatgaacaagaaatcttgcacagagatctcaaactaggtaagtcattgacgccaaaagctgagttttgtgttagagttcttttttctctctctgtttttttttacatattaatgttcttaattgggatctcgtgtctgcaatcttgcttttgaatgggcgactttcatataacaattggctgcctggctccaaagtggatgtgtgtgtacttggttagaacgcattttcaaagggattcacattttgttttgtttatcgtctagggaacttttttattaatgaagccatggaactaaaagttggggacttcggtctggcagccaggctagaacccttggaacacagaaggagaacgatatgtggtaccccaaattatctctctcctgaagtcctcaacaaacaaggacatggctgtgaatcagacatttgggccctgggctgtgtaatgtatacaatgttactagggaggcccccatttgaaactacaaatctcaaagaaacttataggtgcataagggaagcaaggtatacaatgccgtcctcattgctggctcctgccaagcacttaattgctagtatgttgtccaaaaacccagaggatcgtcccagtttggatgacatcattcgacatgacttttttttgcagggcttcactccggacagactgtcttctagctg

SEQ ID NO: 15969 - DNA, 556 bp, Homo sapiens
  source 1..556: mol_type = unassigned DNA
ggcttttccgaggtgactggaagctaataagccttaccttgctttttcatttagattgacaaagaaatagagcttcacagaattcttcatcataagcatgtagtgcagttttaccactacttcgaggacaaagaaaacatttacattctcttggaatactgcagtagaaggtcaatggctcatattttgaaagcaagaaaggtgttgacagagccagaagttcgatactacctcaggcagattgtgtctggactgaaataccttcatgaacaagaaatcttgcacagagatctcaaactagggaacttttttattaatgaagccatggaactaaaagttggggacttcggtctggcagccaggctagaacccttggaacacagaaggagaacgatatgtggtaccccaaattatctctctcctgaagtcctcaacaaacaaggacatggctgtgaatcagacatttgggccctgggctgtgtaatgtatacaatgttactagggaggcccccatttgaaactacaaatctcaaagaaacttataggtgcataaggg

SEQ ID NO: 15970 - DNA, 580 bp, Homo sapiens
  source 1..580: mol_type = unassigned DNA
ataactgttttgacagattctcttttttccttctcctcttcttagtcaatggctcatattttgaaagcaagaaaggtgttgacagagccagaagttcgatactacctcaggcagattgtgtctggactgaaataccttcatgaacaagaaatcttgcacagagatctcaaactaggtaagtcattgacgccaaaagctgagttttgtgttagagttcttttttctctctctgtttttttttacatattaatgttcttaattgggatctcgtgtctgcaatcttgcttttgaatgggcgactttcatataacaattggctgcctggctccaaagtggatgtgtgtgtacttggttagaacgcattttcaaagggattcacattttgttttgtttatcgtctagggaacttttttattaatgaagccatggaactaaaagttggggacttcggtctggcagccaggctagaacccttggaacacagaaggagaacgatatgtggtaccccaaattatctctctcctgaagtcctcaacaaacaaggacatggctgtgaatcagacatttgggccctgggctg

SEQ ID NO: 15971 - DNA, 558 bp, Homo sapiens
  source 1..558: mol_type = unassigned DNA
catttttgtgccatcctcaattccgtctcggctttgtttcctttcagggtggctttgcaaaatgttacgagatgacagatttgacaaataacaaagtctacgccgcaaaaattattcctcacagcagagtagctaaacctcatcaaagggaaaagattgacaaagaaatagagcttcacagaattcttcatcataagcatgtagtgcagttttaccactacttcgaggacaaagaaaacatttacattctcttggaatactgcagtagaaggtcaatggctcatattttgaaagcaagaaaggtgttgacagagccagaagttcgatactacctcaggcagattgtgtctggactgaaataccttcatgaacaagaaatcttgcacagagatctcaaactagggaacttttttattaatgaagccatggaactaaaagttggggacttcggtctggcagccaggctagaacccttggaacacagaaggagaacgatatgtggtaccccaaattatctctctcctgaagtcctcaacaaacaaggacatggctgtgaat

SEQ ID NO: 15972 - DNA, 823 bp, Homo sapiens
  source 1..823: mol_type = unassigned DNA
ggccgccgcagccccccgaggaatcgcagccacctcagtcccaggcgcaagtgcccccggcggcccctcaccaccatcaccaccattcgcactcggggccggagatctcgcggattatcgtcgaccccacgactgggaagcgctactgccggggcaaagtgctgggaaagggtggctttgcaaaatgttacgagatgacagatttgacaaataacaaagtctacgccgcaaaaattattcctcacagcagagtagctaaacctcatcaaagggaaaagattgacaaagaaatagagcttcacagaattcttcatcataagcatgtagtgcagttttaccactacttcgaggacaaagaaaacatttacattctcttggaatactgcagtagaagggtaagtgtcaactcctatttgagaacatttgcttaccccgaattaacatggtattcaaagagtattttatctgggattttagctgtggcagcacttacactgcaaagttaactttcattgctcatcctgcaaagggaaaccagtgattttgataactgttttgacagattctcttttttccttctcctcttcttagtcaatggctcatattttgaaagcaagaaaggtgttgacagagccagaagttcgatactacctcaggcagattgtgtctggactgaaataccttcatgaacaagaaatcttgcacagagatctcaaactaggtaagtcattgacgccaaaagctgagttttgtgttagagttcttttttctctctctgtttttttttacatattaatgttcttaattgggatctcgtgtctgc

SEQ ID NO: 15973 - DNA, 625 bp, Homo sapiens
  source 1..625: mol_type = unassigned DNA
gcacaagtggaccggggtgttgggtgctagtcggcaccagaggcaagggtgcgaggaccacggccggctcggacgtgtgaccgcgcctagggggtggcagcgggcagtgcggggcggcaaggcgaccatggagcttttgcggactatcacctaccagccagccgccagcaccaaaatgtgcgagcaggcgctgggcaagggttgcggagcggactcgaagaagaagcggccgccgcagccccccgaggaatcgcagccacctcagtcccaggcgcaagtgcccccggcggcccctcaccaccatcaccaccattcgcactcggggccggagatctcgcggattatcgtcgaccccacgactgggaagcgctactgccggggcaaagtgctgggaaagggtggctttgcaaaatgttacgagatgacagatttgacaaataacaaagtctacgccgcaaaaattattcctcacagcagagtagctaaacctcatcaaagggaaaaggtgcgtatgactcttgagtaaagtattttctttgtgtgcaaggatggcccttccctgttaggaaaatgtcttctgcatgtgtaatcactggcttttccgaggtgactggaagctaataag

SEQ ID NO: 15974 - DNA, 2792 bp, Homo sapiens
  source 1..2792: mol_type = unassigned DNA
tccgcccccttcccgcctccccgtatataagacttcgccgagcgctctcactcgcacaagtggaccggggtgttgggtgctagtcggcaccagaggcaagggtgcgaggaccacggccggctcggacgtgtgaccgcgcctagggggtggcagcgggcagtgcggggcggcaaggcgaccatggagcttttgcggactatcacctaccagccagccgccagcaccaaaatgtgcgagcaggcgctgggcaagggttgcggagcggactcgaagaagaagcggccgccgcagccccccgaggaatcgcagccacctcagtcccaggcgcaagtgcccccggcgatctcgcggattatcgtcgaccccacgactgggaagcgctactgccggggcaaagtgctgggaaagggtggctttgcaaaatgttacgagatgacagatttgacaaataacaaagtctacgccgcaaaaattattcctcacagcagagtagctaaacctcatcaaagggaaaagattgacaaagaaatagagcttcacagaattcttcatcataagcatgtagtgcagttttaccactacttcgaggacaaagaaaacatttacattctcttggaatactgcagtagaaggtcaatggctcatattttgaaagcaagaaaggtgttgacagagccagaagttcgatactacctcaggcagattgtgtctggactgaaataccttcatgaacaagaaatcttgcacagagatctcaaactagggaacttttttattaatgaagccatggaactaaaagttggggacttcggtctggcagccaggctagaacccttggaacacagaaggagaacgatatgtggtaccccaaattatctctctcctgaagtcctcaacaaacaaggacatggctgtgaatcagacatttgggccctgggctgtgtaatgtatacaatgttactagggaggcccccatttgaaactacaaatctcaaagaaacttataggtgcataagggaagcaaggtatacaatgccgtcctcattgctggctcctgccaagcacttaattgctagtatgttgtccaaaaacccagaggatcgtcccagtttggatgacatcattcgacatgacttttttttgcagggcttcactccggacagactgtcttctagctgttgtcatacagttccagatttccacttatcaagcccagctaagaatttctttaagaaagcagctgctgctctttttggtggcaaaaaagacaaagcaagatatattgacacacataatagagtgtctaaagaagatgaagacatctacaagcttaggcatgatttgaaaaagacttcaataactcagcaacccagcaaacacaggacagatgaggagctccagccacctaccaccacagttgccaggtctggaacacccgcagtagaaaacaagcagcagattggggatgctattcggatgatagtcagagggactcttggcagctgtagcagcagcagtgaatgccttgaagacagtaccatgggaagtgttgcagacacagtggcaagggttcttcggggatgtctggaaaacatgccggaagctgattgcattcccaaagagcagctgagcacatcatttcagtgggtcaccaaatgggttgattactctaacaaatatggctttgggtaccagctctcagaccacaccgtcggtgtccttttcaacaatggtgctcacatgagcctccttccagacaaaaaaacagttcactattacgcagagcttggccaatgctcagttttcccagcaacagatgctcctgagcaatttattagtcaagtgacggtgctgaaatacttttctcattacatggaggagaacctcatggatggtggagatctgcctagtgttactgatattcgaagacctcggctctacctccttcagtggctaaaatctgataaggccctaatgatgctctttaatgatggcacctttcaggtgaatttctaccatgatcatacaaaaatcatcatctgtagccaaaatgaagaataccttctcacctacatcaatgaggataggatatctacaactttcaggctgacaactctgctgatgtctggctgttcatcagaattaaaaaatcgaatggaatatgccctgaacatgctcttacaaagatgtaactgaaagacttttcgaatggaccctatgggactcctcttttccactgtgagatctacagggaagccaaaagaatgatctagagtatgttgaagaagatggacatgtggtggtacgaaaacaattcccctgtggcctgctggactggttggaaccagaacaggctaaggcatacagttcttgactttggacaatccaagagtgaaccagaatgcagttttccttgagatacctgttttaaaaggtttttcagacaattttgcagaaaggtgcattgattcttaaattctctctgttgagagcatttcagccagaggactttggaactgtgaatatacttcctgaaggggagggagaagggaggaagctcccatgttgtttaaaggctgtaattggagcagcttttggctgcgtaactgtgaactatggccatatataattttttttcattaatttttgaagatacttgtggctggaaaagtgcattccttgttaataaactttttatttattacagcccaaagagcagtatttattatcaaaatgtctttttttttatgttgaccattttaaaccgttggcaataaagagtatgaaaacgc

SEQ ID NO: 15975 - DNA, 1930 bp, Homo sapiens
  source 1..1930: mol_type = unassigned DNA
ctcagagcggccccggagcggccgcagcgcggtggtctcggcccggctgcgccagagtccgcgcgatggagccccggccgcggcggcggcgcaggagtcgccccctggtcgccgccttcctgcgagacccgggctcgggccgcgtgtacaggcgcgggaagctgatcggcaagggcgccttcagccgctgctacaagctgacagacatgtccaccagcgccgtgttcgccctcaaggtggtgccgtgtggcggggctggggccgggtggcttcgcccgcagggaaaggtggagcgtgagattgccctgcatagccgcctgcgaccccgcaacatcgtggctttccacggacactttgctgaccgcgaccacgtgtacatggtgctggagtactgcagccgccagtctttggcccacgtgctgagggcgcggcagatcctgacggagccagaagtgcgcgactacctgcggggcctggtcagcggcctgcgctacctgcaccagcggtgcatcctgcaccgcgacctgaagctcagtaacttcttccttaacaagaacatggaggtgaagattggagacctgggactggcggccaaggtggggccagggggccgctgccacagagtactctgtgggacccctaacttcctggaccctgaggttgtctccagaaacggtcactcctgccagtaggacatctgggctctgggctgcatcatgtacacggtgctgactggcaccccacccttcatggcctcacccctgtcggagatgtaccaaaacatccgtgagggccactaccccgaacccgctcacctgtctgccaatgcgcgccgcctcatcgtgcacctcctagcacccaacccggccgagcggcccagcctggaccacctgctgcaggacgacttcttcacacagggtttcactccagaccggctgccggcccactcctgccacagtccccccatcttcgccatacccccgcctctgggcaggatcttccggaaggtgggccagcggctgctcacccagtgccggccaccctgccccttcacgcctaaagaggcctcgggtccaggagaaggtgggccagaccctgactccatggagtgggacggcgagagctccctgtctgcgaaagaggttccctgcctggaaggccccatccacctggtcgcacaagggaccctgcagagtgacctggccgggcccgaggggagccggcggccagaggtggaggcggccctcagacacctgcagctgtgcctggatgtaggccccccggccacacaggaccccctgggagagcagcagcccatcctctgggcccccaaatgggtggattattccagcaaatacggctttggctaccagctcttggacggggggcgcacgggacggcacccacatggccctgcgaccccccggagggaggggaccctccccacacctgtgccacctgctggacccggcctctgcctcctgcgcttcctggcctctgagcacgccctgctgctgctgttcagcaatgggatggtgcaggtgagcttcagtggagtcccggcccaactggtgctgagtggcgagggtgagggtttgcagctcaccctctgggagcaggggtcccctggcacctcctactccctggacgtcccgcggagccacggctgcgcccccaccaccggacagcaccttcaccacgccctccgcatgctgcagagtatctagtgcccctgagggtcagagtggacccctgcatggtagtgccagggacccaggctccatttccattcctgtggctcccccagaggggctgtcctgggggagggctggggggcacacgggaggtgggttcttgccttgtggcatgactgttcaacccagactttgctgggatctcttcctttttcattaaagacaatttgaaatgc

SEQ ID NO: 15976 - DNA, 1969 bp, Homo sapiens
  source 1..1969: mol_type = unassigned DNA
agagcggccccggagcggccgcagcgcggtggtctcggcccggctgcgccagagtccgcgcgatggagccccggccgcggcggcggcgcaggagtcgccccctggtcgccgccttcctgcgagacccgggctcgggccgcgtgtacaggcgcgggaagctgatcggcaagggcgccttcagccgctgctacaagctgacagacatgtccaccagcgccgtgttcgccctcaaggtggtgccgtgtggcggggctggggccgggtggcttcgcccgcagggaaaggtggagcgtgagattgccctgcatagccgcctgcgaccccgcaacatcgtggctttccacggacactttgctgaccgcgaccacgtgtacatggtgctggagtactgcagccgccagtctttggcccacgtgctgagggcgcggcagatcctgacggagccagaagtgcgcgactacctgcggggcctggtcagcggcctgcgctacctgcaccagcggtgcatcctgcaccgcgacctgaagctcagtaacttcttccttaacaagaacatggaggtgaagattggagacctgggactggcggccaaggtggggccagggggccgctgccacagagtactctgtgggacccctaacttcctggaccctgaggttgtctccagaaacggtcactcctgccagtaggacatctgggctctgggctgcatcatgtacacggtgctgactggcaccccacccttcatggcctcacccctgtcggagatgtaccaaaacatccgtgagggccactaccccgaacccgctcacctgtctgccaatgcgcgccgcctcatcgtgcacctcctagcacccaacccggccgagcggcccagcctggaccacctgctgcaggacgacttcttcacacagggtttcactccagaccggctgccggcccactcctgccacagtccccccatcttcgccatacccccgcctctgggcaggatcttccggaaggtgggccagcggctgctcacccagtgccggccaccctgccccttcacgcctaaagaggcctcgggtccaggagaaggtgggccagaccctgactccatggagtgggacggcgagagctccctgtctgcgaaagaggttccctgcctggaaggccccatccacctggtcgcacaagggaccctgcagagtgacctggccgggcccgaggggagccggcggccagaggtggaggcggccctcagacacctgcagctgtgcctggatgtaggccccccggccacacaggaccccctgggagagcagcagcccatcctctgggcccccaaatgggtggattattccagcaaatacggctttggctaccagctcttggacggggggcgcacgggacggcacccacatggccctgcgaccccccggaggccaagtgtgctacatgcccaactgcgggaggctggaagccttcgccctgagggatgtgcccggcctgctgggcgccaagctggccgtgctgcagctctttgccggctgcctgcggcggcggctgcgggaggaggggaccctccccacacctgtgccacctgctggacccggcctctgcctcctgcgcttcctggcctctgagcacgccctgctgctgctgttcagcaatgggatggtgcaggtgagcttcagtggagtcccggcccaactggtgctgagtggcgagggtgagggtttgcagctcaccctctgggagcaggggtcccctggcacctcctactccctggacgtcccgcggagccacggctgcgcccccaccaccggacagcaccttcaccacgccctccgcatgctgcagagtatctagtgcccctgagggtcagagtggacccctgcatggtagtgccagggacccaggctccatttccattcctgtggctcccccagaggggctgtcctgggggagggctggggggcacacg

SEQ ID NO: 15977 - DNA, 2106 bp, Homo sapiens
  source 1..2106: mol_type = unassigned DNA
tgggtgttgtgttgtgtgtccatgcatggtgactctgtgtctgggcgttgcgtgtttgtgtgtcgtattcaggcgtggtgttgtgcatccggtgctgtcttctggtccgtggcctctatgcaccaggcgtggatgtgtctgtgtctgtgtctctgtgccttcttgtgtgcatcatgtcttgtgtgtccaggcgggagggtgggagctgtgtgttgttttttccccggtgtgtgtgtggagagacctggacgcgcctgcgtccctggctgccctgtgcctctgtacgcgctgccagcttgcacacccgtgcacacctgcccactgatctgctgacccctccccacagggcgccttcagccgctgctacaagctgacagacatgtccaccagcgccgtgttcgccctcaaggtggtgccgtgtggcggggctggggccgggtggcttcgcccgcagggaaaggtggagcgtgagattgccctgcatagccgcctgcgaccccgcaacatcgtggctttccacggacactttgctgaccgcgaccacgtgtacatggtgctggagtactgcagccgccagtctttggcccacgtgctgagggcgcggcagatcctgacggagccagaagtgcgcgactacctgcggggcctggtcagcggcctgcgctacctgcaccagcggtgcatcctgcaccgcgacctgaagctcagtaacttcttccttaacaagaacatggaggtgaagattggagacctgggactggcggccaaggtggggccagggggccgctgccacagagtactctgtgggacccctaacttcctggaccctgaggttgtctccagaaacggtcactcctgccagtaggacatctgggctctgggctgcatcatgtacacggtgctgactggcaccccacccttcatggcctcacccctgtcggagatgtaccaaaacatccgtgagggccactaccccgaacccgctcacctgtctgccaatgcgcgccgcctcatcgtgcacctcctagcacccaacccggccgagcggcccagcctggaccacctgctgcaggacgacttcttcacacagggtttcactccagaccggctgccggcccactcctgccacagtccccccatcttcgccatacccccgcctctgggcaggatcttccggaaggtgggccagcggctgctcacccagtgccggccaccctgccccttcacgcctaaagaggcctcgggtccaggagaaggtgggccagaccctgactccatggagtgggacggcgagagctccctgtctgcgaaagaggttccctgcctggaaggccccatccacctggtcgcacaagggaccctgcagagtgacctggccgggcccgaggggagccggcggccagaggtggaggcggccctcagacacctgcagctgtgcctggatgtaggccccccggccacacaggaccccctgggagagcagcagcccatcctctgggcccccaaatgggtggattattccagcaaatacggctttggctaccagctcttggacggggggcgcacgggacggcacccacatggccctgcgaccccccggagggaggggaccctccccacacctgtgccacctgctggacccggcctctgcctcctgcgcttcctggcctctgagcacgccctgctgctgctgttcagcaatgggatggtgcaggtgagcttcagtggagtcccggcccaactggtgctgagtggcgagggtgagggtttgcagctcaccctctgggagcaggggtcccctggcacctcctactccctggacgtcccgcggagccacggctgcgcccccaccaccggacagcaccttcaccacgccctccgcatgctgcagagtatctagtgcccctgagggtcagagtggacccctgcatggtagtgccagggacccaggctccatttccattcctgtggctcccccagaggggctgtcctgggggagggctggggggcacacgggaggtgggttcttgccttgtggcatgactgttcaacccagactttgctgggatctcttcctttttcattaaagacaatttgaaatgctgt

SEQ ID NO: 15978 - DNA, 900 bp, Homo sapiens
  source 1..900: mol_type = unassigned DNA
atgtacacggtgctgactggcaccccacccttcatggcctcacccctgtcggagatgtaccaaaacatccgtgagggccactaccccgaacccgctcacctgtctgccaatgcgcgccgcctcatcgtgcacctcctagcacccaacccggccgagcggcccagcctggaccacctgctgcaggacgacttcttcacacagggtttcactccagaccggctgccggcccactcctgccacagtccccccatcttcgccatacccccgcctctgggcaggatcttccggaaggtgggccagcggctgctcacccagtgccggccaccctgccccttcacgcctaaagaggcctcgggtccaggagaaggtgggccagaccctgactccatggagtgggacggcgagagctccctgtctgcgaaagaggttccctgcctggaaggccccatccacctggtcgcacaagggaccctgcagagtgacctggccgggcccgaggggagccggcggccagaggtggaggcggccctcagacacctgcagctgtgcctggatgtaggccccccggccacacaggaccccctgggagagcagcagcccatcctctgggcccccaaatgggtggattattccagcaaatacggctttggctaccagctcttggacggggggcgcacgggacggcacccacatggccctgcgaccccccggagggtgagcttcagtggagtcccggcccaactggtgctgagtggcgagggtgagggtttgcagctcaccctctgggagcaggggtcccctggcacctcctactccctggacgtcccgcggagccacggctgcgcccccaccaccggacagcaccttcaccacgccctccgcatgctgcagagtatctag

SEQ ID NO: 15979 - DNA, 243 bp, Homo sapiens
  source 1..243: mol_type = unassigned DNA
ccacagtccccccatcttcgccatacccccgcctctgggcaggatcttccggaaggtgggccagcggctgctcacccagtgccggccaccctgccccttcacgcctaaagaggcctcgggtccaggagaaggtgggccagaccctgactccatggagtgggacggcgaggtgagacatcggggtgggggacacggggagacacaggtggagggcatgctggcccctgctaaaaccccctcccc

SEQ ID NO: 15980 - DNA, 400 bp, Homo sapiens
  source 1..400: mol_type = unassigned DNA
aaactgggcttgagtaacaccctagataaacatcaggaaccccactgaggctgaagtactgaaactgtggcccatgtgaaaaagaggtgcaagtgcacaaagattcatgcagagcctgctggaacagagggtggtggcggcgggttagtccacacttacacaccagcaggtatgctggggaagggccccccaggtggagtgcctgacatagggctcgctccagaggcgtctgactcagaagctcctgagagaggtgtctacttgaggtggggaggagtactatggttaatgaatacaagaaggtgtttcaggataaataggtgtgtagatgagtttattctcttctgtgtcttcaaactccaggtagtacttgtccatgaaatttctctgtaataactgg

SEQ ID NO: 15981 - DNA, 7578 bp, Homo sapiens
  source 1..7578: mol_type = unassigned DNA
cagcgcctggagccacacagggatccggagcctgggggaaaagcggcgcgggagccggcacccaccgctggaggggcggcgacggcggccgtagcgacctcgggaggcaagcggagccgccatggccgagttcccgtcgaaagttagcacgcggaccagcagtcctgcgcagggcgccgaagcctcggtgtcggcgctgcgcccggacctgggcttcgtgcgctcccgcctcggggcgctcatgctgctgcagctggtgctggggctgctggtgtgggcgctgattgcggacaccccgtaccacctgtatccggcctatggctgggtgatgttcgtcgctgtcttcctctggctggtgacaatcgtcctcttcaacctctacctgtttcagctgcacatgaagttgtacatggttccctggccactggtgttaatgatctttaacatcagcgccaccgttctctacatcaccgccttcatcgcctgctctgcggcagttgacctgacatccctgaggggcacccggccttataaccagcgcgcggctgcctcggtgcttgtaacctccaggagacctcagcttgactgtagaagatgcctgctgtagggcagttcacgttctggagtcgttcagcaccacctgcgaactctttgaccggaggaaggctgcctatacttcctgcttgctgggtctggaacagtcctggtttatgctgtttgtgctggcataaatagaatagcacggccttttattctcacaagtgactcagtttgacaataacttagtcacccttgctttgggcaggttaggtgagcttactgaatcaaagatttcaacaatatcatctaccttgaaagtctgtgaagcttggaggtcatataatcaaggtggctggccatgctgcctgctcagagctggtagagacagcagaggaaagcagctgagtactcctgagcttatttttccaacaccacagaacaacgttctctgaacaataaggtaaaagcatttctaggtaccctctgtacccttttgttattttttatttttattttttggagaccgagtcttgctctagtgcccaggctggagtgcaatggcgcaatcttggctcactgcaatctccgccttctgggttcaagcaattctcctgcctcagcctcctgagtagctgagactacaggtgagcgccaccacgcccagctgattttttgtatttttagtagagatggggtttcaccatgttagccaggatggtcttgatctcctgacttcatgatccgcctgccttagcctcccaaagtgctgggattacaggtgtgagccaccacacctggccgattttttttttttttaagagacagggtcttgctctcttgcccaggttggagtacagtgccacaactacagctcactgcagccttgactgcccaggctcaagcaatcctcccacctcagcttcctcagtagcttggactacaagtgcaggccaccatgcccagctaatttttgtttttttttttttttgagatggagtctcactttgtcacccaggctggactgcagtggcgtgatctcggctcactgcaacctctgcctcccagattcaagcgattctcctgcctcagcctcccgagtaacggactacaggtgcgtgccaccatgcctggctaatgttttgtatttttagtagagacggggtttcaccgtgttagccaggatggtctcgatctcctgacctcgtgatccgcccgtctcggcctcccaaagtgctgggattaccagcgtgagccactgtgcccggctgatttttaaattttttgtagacattgggtctcgctatattgcttaggctggtcttaaactcccagcttcaagtgatcctcccatctcagcctcccaaagcgctgagattatcggcatgaaccaccacacttggccctggtataaatattaatagcatcactttttactctaaagtctcggagtttgaataataaattagtccttccaggagtaagttataagagtttggttttaaggaagggcaatacacttaaatgtaaaacaaaatcccaggcaagttagagagctcacccctcttatgtttccaacatgaatcaaaagcctgtttcaggggggacattaaaggcattcagtcaatgctaaggctcagcagtttgtgtgactactgcttcccactggggaggagtcctaagcaagaggactggggcttcctcaccccagggcaggtgggagccccatcaaaggtggcacctgacatcacagtctaagtgtctgaggatggagagacaggctgctagtttattttaaaagaaatcagaatgtctacttataatattaagtgacaacagacttgcctcctttttgctgagcagaaagggtgaaaaaaccagccaggcatggtggctcacacctgtgatcccagcactttgggaggtgggtgatcacctgaagtcaggagttcaagaccagcctgaccaacatggtgaaaccctgtctctactaaaaatacaaaaattagctgggcgtgtttgtggacacctataatcccggctgcttgggaggctgaggcagcagaatcactggaactcgggaggtggaggttgcagtgtgccgagatcgtgccattgcactccagcctgggcaacaaaagcaaaactccattcccaaaaaaaaaagaaaaaaaaaagggtgaaaaaccaatttgcctttatcatcgttttttcatcatttaatctctggacttgtccactggccttttctcaagtaggcaggctggtccacaggtcttagcaagtgctcccagcatgcctgggctgtggtggacctcccatttatagacaaagcaagggaaagcaagcccaggagaggtggcatttaaaaaaaaaaaaaaaagaccaaagcaataattaataaccttatggcagtggctacattaaagaaagaatacaactcattgagaatggtggttcttgcgaaacacctgaagttttactcatggtacaaaagtatttaataagtgacacatcagtacagaaacacagagcttgtagcttgtcctttaaaaccagaatggccaagtgaaaagtcagtacagattcttatttttactattaaaaaaaaaaaatcaaagggacacactgggaattgaactactatgctttttcttcgttctagagatgacatatatgttttctgataagtaatctaccacacattgcactaaaccaaagcatacaaacagccagtaaagctgtgctctacctgctactcatgctgggctggacagtggaacaccatcttggtaggagagattttgacaggaagaaactgcagagtccctacctaacccagagaaccttacaaactggtttatacacaaaggattttcagcaaacatgcaaacacactaacatgctataggaatatgttttagtctatttctagcacacagcatacattcataggtgcccagtaaaataggaatgaatgtcaatgtagaaagcatttttgccttcacagtactaacaaacacctaaaaagcacacagcatataatactttgatctttaagtggataatcatggaagttccaagatcacatccactaggttagcctgagtattcatctataaaaatattttttttttcaaaaataatgcttaaaagagacttctagaaacagtgggactacatcaggaccagaagacagtgacacaaggactgcaaatgttaagactaggagtagcttttcacatggagcttttatgtagaggacgtctccttctgttgattcctacagccgagacaagatgtgatcacaggagactccaaaatctcaaactgggcttgagtaacaccctagataaacatcaggaaccccactgaggctgaagtactgaaactgtggcccatgtgaaaaagaggtgcaagtgcacaaagattcatgcagagcctgctggaacagagggtggtggcggcgggttagtccacacttacacaccagcaggtatgctggggaagggccccccaggtggagtgcctgacatagggctcgctccagaggcgtctgactcagaagctcctgagagaggtgtctacttgaggtggggaggagtactatggttaatgaatacaagaaggtgtttcaggataaataggtccaggagggttaggtcattttggttttgacctattaatacttaacataaatgaagagttacataacagagtcagtctttccaagatgtgttctgtcatcatgagctgagcctattgggctggtgacatccagaatgatcccattcattggctggaggtaggacctagtgccgcagattgttctgggaagctggcagagaagatgatttgcacaatgaagtcaccactaagccactgcttaagtccagtcctcggccttctttttcctatatgagaaaacaaccaaaggaaggactagaaagagccctggcttggaatcttgcctctgacatggggaaggcagagctgaaggtgggaacgtggacctccagagtacataggaagggaacacaggttattggttattctgcatttctgctcaatactggcctgccctagtcttaattttttttaatattatttttaaagaggtagggtcttgctctgtcacccaggctggagtatagtggcttgatcacagctaactgctgcctggaattcctgggctcaagtggtcctcctgcctcagcctcctgagtagctaggactacaggtgtgcaccactacagctgactaacttttttatttttatttttgtagagacagggtcttgatatgtcacttaggctggtcttgaactcctgggctcaagtgattctcctgccttggcctcccaaagcgctggaattgtaagtatgagccactgtgtccagcctggccctggtcattcttaaaatgcactcttaaaatgtacctcccttcactggaaaacatttttctttctttctttttttttttttttgagataggggtcttgctatgttgcccaggctggagtgcagtggctattcacaggcaccactgctgtgtaatacagccccaaactcctaggctcaagtgattctcctgcctcagccttcgaagtagctgggactacaggcatgcacaaccacacccaacaccatttctttttcttttctttttttttttttgacacagggtctgactctgtcacccaggctggactgtagcagtacaatcacagctcacagcaatctcaaccttctgggctcaagcggtcctcccacccagcccccaaagtagctgactgggactacagatgcacaccagcacaccaagctaatttttgtatttttcatagagacagggttttgccatgttgccttggctggtctcaaactcctgagctcaagccatctgcctgcctcggcctcccaaagtgctgggattataggtgtgagttaccatgcccagtctcctatttttcttataaagagcttgcattatatgaaaagcaaggcagggccaggtgcggtggctcacgcctgtaatcccaacactttgggaggccgaggcggaccatgcttcaggagtttgagaccagcctggccaacatggtgaaaccctgtctctactaaaaatacaagaattagctgggcgtggtggcaggtgcctgtagtatcagctactcgggaggctgaggcaggagtattgcttgaacctggaaggcagaggttccagtgagccaagatggtgccactgcactccagcctgggtgacaagagcaaaactctgtctcaaaaaaaaaaataaataaaagaaaggcaaggcagaatgagacctgagacctgctttttcggttttgtccttctgattaggaactctaagttggtacctgggcttgtttcatgaaaacatgagaaggtcccagccacaacagaatagcagctcactcttctgatgcctcatcggccagtttgaagggagaatgatgggggaagcgtgggaggttcatgttcggtatttctacctggaattttctaagtggctcaaagtggctaaataaataggagtagtaacttactgctctgtagtccaaaaacatttctttaaaagccagaaaatctgtgaaggtgagcagcatgtcgaatatgtcaccagccacttcatccttatggtgcctgcaaacggaacagatggctgtttcgtgaatgaatgatgagacagtcctcaagattgctttcgtttttctttccaccaccccagccccaccccccgcattatttttgttttgtttttttagagactgggtcttgctctgtcacccaggcaggagtgcaggggtgcaattatagctcactgtagccttgaactgctgggctcaagggattctccagcctcagcctcctgagtagctaggcccacaggtatgcaacaccacacctgactaatttattttttgtagggtcggggcctcactatgtcacccaggctggtcttgaactcctgggctcaagtgatcctcctcccttggcctcccaaagcactgagaacacaagcgtgagccaatgcctgatcttttcaagatttcattaaaaggtttgagggcttcctccataggacctaaccaccaacggcatgcacaggaaaacaaacaaggagcgtcttttggtcagcctagggaaggaagaaagtgagaaaacaaaacaaaacacaaaaatcagtcaagctcaactcactgtaatgttgtggtgaaggctgccatgttgaactcaggaatccgctgcagcagctgttcttcaatgtatttttctaccaaagaaatctgcaacagtggaaaggattttggtgagaccatactttgggaaaacaagacttcttttcagaaagcctgcccagccctttctaaacatttcctgaggtctgtgtgccacaatctacactgagtgccaaggataccaaagaggaccaaaacacagctcctgtcctggagaagtactcagcctggtgtggaagagaagccttagctgataatggtgctgtaacagggtggatgctctgacacaggtggagacagtgagtagcacggtacccacacccacaacccagtgcaggatgcagtaagtgggggctttgcctcctgggtagagggcatctgtgtaacagaacatacggacatggaggcagtcacaggttccttctgggcaggtttgtttatgccatgcttctgtgttaagaaaataaagtcctggaggccaaaatggattcttagatgacagaatcccagggggctgttaagaggcctcagggtaaagtgtagagacccaagggtgacgagctgaggttcctgggttccagtcttggtttttccaccaaatagttagtgatcttggtctcagttttcacttttacttaatagtcatgcatatatgactggattatatagaagaaagaaagagtatgtgaaagcagaaaggtttgtcaaaagcatgcaaatgcaaggtatgaagaactcatgtactgtgattaaaagcaggattatgataagccaaa

SEQ ID NO: 15982 - DNA, 1512 bp, Homo sapiens
  source 1..1512: mol_type = unassigned DNA
caggctcccagccccgacgcctcctgcagcgcctggagccacacagggatccggagcctgggggaaaagcggcgcgggagccggcacccaccgctggaggggcggcgacggcggccgtagcgacctcgggaggcaagcggagccgccatggccgagttcccgtcgaaagttagcacgcggaccagcagtcctgcgcagggcgccgaagcctcggtgtcggcgctgcgcccggacctgggcttcgtgcgctcccgcctcggggcgctcatgctgctgcagctggtgctggggctgctggtgtgggcgctgattgcggacaccccgtaccacctgtatccggcctatggctgggtgatgttcgtcgctgtcttcctctggctggtgacaatcgtcctcttcaacctctacctgtttcagctgcacatgaagttgtacatggttccctggccactggtgttaatgatctttaacatcagcgccaccgttctctacatcaccgccttcatcgcctgctctgcggcagttgacctgacatccctgaggggcacccggccttataaccagcgcgcggctgcctcgttctttgcgtgtttggtgatgatcgcctatggagtgagtgccttcttcagctaccaggcctggcgaggagtaggcagcaatgcggccaccagtcagatggctggcggctatgcctaaaccacctgtgccacggccccctctggggctgaagccgccgctgggtcacagagcagggtcaccctgcaagcctgaagctggggagccctgcgtggagtcagcccaacagggactgcatttgctcctctctgcccgtcagacataagctctcacagcgctaaggaagcaggcccaggctggcaggcatctcggcttgcaggaggccaactgctgagacctcttctccatcccccttattcagtggaagatgacgggggatctgaggctgtgtctctgccttgtctttagaggacttcagcgtccaagactggggcccacccttctcaccagcactaaatgcactaacaaggactccagacctgcagccccagacccgccgtagtataagcctaacaagcaacacgtagcaccttagtctttgttccaggagagctgagcaagctggtgaaaccactctccttcctttaaacaccgtttcaaccaacctctccctggagccaacctgtaaaaagtgggttgattgctgacagcatggtcttccctccctgcatttcagacataccagttactgaaagcaaatcagttttaagtgatttctcagtgctgaaaagcctgtccaggtttccttccctttcccaagcctctctctgtaatactccctttgggcgaagctaacatcggtgcctccccgaccttgctgactaggcacatgggacgcaaaggagggagggaagcaaggccttgcctggcgagttgtcatgtggttggtggtgactgttttattttttttaataaaaataaagatgagagaaatta

SEQ ID NO: 15983 - DNA, 665 bp, Homo sapiens
  source 1..665: mol_type = unassigned DNA
gacgcctcctgcagcgcctggagccacacagggatccggagcctgggggaaaagcggcgcgggagccggcacccaccgctggaggggcggcgacggcggccgtagcgacctcgggaggcaagcggagccgccatggccgagttcccgtcgaaagttagcacgcggaccagcagtcctgcgcagggcgccgaagcctcggtgtcggcgctgcgcccggacctgggcttcgtgcgctcccgcctcggggcgctcatgctgctgcagctgttaatgatctttaacatcagcgccaccgttctctacatcaccgccttcatcgcctgctctgcggcagttgacctgacatccctgaggggcacccggccttataaccagcgcgcggctgcctcgttctttgcgtgtttggtgatgatcgcctatggagtgagtgccttcttcagctaccaggcctggcgaggagtaggcagcaatgcggccaccagtcagatggctggcggctatgcctaaaccacctgtgccacggccccctctggggctgaagccgccgctgggtcacagagcagggtcaccctgcaagcctgaagctggggagccctgcgtggagtcagcccaacagggactgcatttgctcctctctgcccgtcagacataagctctcacagcgc

SEQ ID NO: 15984 - DNA, 449 bp, Homo sapiens
  source 1..449: mol_type = unassigned DNA
atcgaagccagacagctgggctccagagttcatgctgttagccactacccatgctctgctgggatggtcaggcccatcctgccgtgtgggaacagcctgacaggtgctggggctgctggtgtgggcgctgattgcggacaccccgtaccacctgtatccggcctatggctgggtgatgttcgtcgctgtcttcctctggctggtgacaatcgtcctcttcaacctctacctgtttcagctgcacatgaagttgtacatggttccctggccactggtgttaatgatctttaacatcagcgccaccgttctctacatcaccgccttcatcgcctgctctgcggcagttgacctgacatccctgaggggcacccggccttataaccagcgcgcggctgcctcgttctttgcgtgtttggtgatgatcgcctatggagtgagtgccttcttca

SEQ ID NO: 15985 - DNA, 3043 bp, Homo sapiens
  source 1..3043: mol_type = unassigned DNA
aagtgctgactgggaccgacagtgagggaggggagcccagagggaagttgataacccaaatgtcatctggtatctccagttgttcattccttgatattgctgatgataatgttacaaactgtaccagggaaagcaaacatagtcactgcccctggtaagaaggcaggggaataactatcttagaaaatttgatgaaaatcaagtttgtaaaatattaatacctgaaaagtcatatacttacatctccaacattcatttaaaactgagttgtgggatatgtaagttgcatttgtgtgcatgtgtatgtatgtatgtatgtatgcagaaacattttgatttgtggatgttttatgccttaaaatatttactggcttgaaaatatattttaactggcttaaaattttagaggtgagctccctgtgaatatccgtgttaaattgaccattttgaaatttaagacaatatatatatcgtttcagatattgttccactattttgatcagaaaagtatgctagagaaccatattttacataaaagaatatatatattaacatttttcagtcagcagatatttattttatgtcatgcccatttcattttctttttcactgttagggacttttgccgtcaggatgaaaagtgtgattattactttagtgtggatgcagatgttgttttgacaaatccaaggactttaaaaattttgattgaacaaaacagaaagatcattgctcctcttgtaactcgtcatggaaagctgtggtccaatttctggggagcattgagtcctgatggatactatgcacgatctgaagattatgtggatattgttcaagggaatagagtaggagtatggaatgtcccatatatggctaatgtgtacttaattaaaggaaagacactccgatcagagatgaatgaaaggaactattttgttcgtgataaactggatcctgatatggctctttgccgaaatgctagagaaatgactttacaaagggaaaaagactcccctactccggaaacattccaaatgctcagccccccaaagggtgtatttatgtacatttctaatagacatgaatttggaaggctattatccactgctaattacaatacttcccattataacaatgacctctggcagatttttgaaaatcctgtggactggaaggaaaagtatataaaccgtgattattcaaagattttcactgaaaatatagttgaacagccctgtccagatgtcttttggttccccatattttctgaaaaagcctgtgatgaattggtagaagaaatggaacattacggcaaatggtctgggggaaaacatcatgatagccgtatatctggtggttatgaaaatgtcccaactgatgatatccacatgaagcaagttgatctggagaatgtatggcttcattttatccgggagttcattgcaccagttacactgaaggtctttgcaggctattatacgaagggatttgcactactgaattttgtagtaaaatactcccctgaacgacagcgttctcttcgtcctcatcatgatgcttctacatttaccataaacattgcacttaataacgtgggagaagactttcagggaggtggttgcaaatttctaaggtacaattgctctattgagtcaccacgaaaaggctggagcttcatgcatcctgggagactcacacatttgcatgaaggacttcctgttaaaaatggaacaagatacattgcagtgtcatttatagatccctaagttatttacttttcattgaattgaaatttattttggatgaatgactggcatgaacacgtctttgaagttgtggctgagaagatgagaggaatatttaaataacatcaacagaacaacttcactttgggccaaacatttgaaaaactttttataaaaaattgtttgatatttcttaatgtctgctctgagccttaaaacacagattgaagaagaaaagaaagaaaaaacttaaatatttatttctatgctttgttgcctctgagaataatgacaatttatgaatttgtgtttcaaattgataaaatatttaggtacaaataacaagactaataatattttcttatttaaaaaaagcatgggaagatttttatttatcaaaatatagaggaaatgtagacaaaatggatataaatgaaaattaccatgttgtaaaaccttgaaaatcagattctaactggatttgtatgcaactaagtatttttctgaacacctatgcaggtcttatttacagtagttactaagggaacacacaaagaattacacaacgttttcctcaagaaaatggtacaaaacacaaccgaggagcgtatacagttgaaaacatttttgttttgattggaaggcagattattttatattagtattaaaaatcaaaccctatgtttctttcagatgaatcttccaaagtggattatattaagcaggtattagatttaggaaaacctttccatttcttaaagtattatcaagtgtcaagatcagcaagtgtccttaagtcaaacaggttttttttgttgttgtttttgctttgtttccttttttagaaagttctagaaaataggaaaacgaaaaatttcattgagatgagtagtgcatttaattattttttaaaaaactttttaagtacttgaattttatatcaggaaaacaaagttgttgagccttgcttcttccgttttgccctttgtctcgctccttattctttttttggggggagggttatttgcttttttatcttcctggcataatttccattttattcttctgagtgtctatgttaacttccctctatcccgcttataaaaaaattctccaacaaaaatacttgttgacttgatgttttatcacttctctaagtaaggttgaaatatccttattgtagctactgtttttaatgtaaaggttaaacttgaaaagaaattcttaatcacggtgccaaaattcattttctaacaccatgtgttagaaaattataaaaaataaaataattttagaaa

SEQ ID NO: 15986 - DNA, 3732 bp, Homo sapiens
  source 1..3732: mol_type = unassigned DNA
ccgacgacctcactcagctgcgttacgcgccgctccggctgccggccgcgcgccttgcccgccggctcccgcccgcaatcggcggctcagggcggacccgggtctctgcgttctcgcgagaagcgcggcgctgcggggccgtgggcgcctgagcccgcgcggccctcgagggccgaatatggggggatgcacggtgaagcctcagctgctgctcctggcgctcgtcctccacccctggaatccctgtctgggtgcggactcggagaagccctcgagcatccccacagataaattattagtcataactgtagcaacaaaagaaagtgatggattccatcgatttatgcagtcagccaaatatttcaattatactgtgaaggtccttggtcaaggagaagaatggagaggtggtgatggaattaatagtattggagggggccagaaagtgagattaatgaaagaagtcatggaacactatgctgatcaagatgatctggttgtcatgtttactgaatgctttgatgtcatatttgctggtggtccagaagaagttctaaaaaaattccaaaaggcaaaccacaaagtggtctttgcagcagatggaattttgtggccagataaaagactagcagacaagtatcctgttgtgcacattgggaaacgctatctgaattcaggaggatttattggctatgctccatatgtcaaccgtatagttcaacaatggaatctccaggataatgatgatgatcagctcttttacactaaagtttacattgatccactgaaaagggaagctattaacatcacattggatcacaaatgcaaaattttccagaccttaaatggagctgtagatgaagttgttttaaaatttgaaaatggcaaagccagagctaagaatacattttatgaaacattaccagtggcaattaatggaaatggacccaccaagattctcctgaattattttggaaactatgtacccaattcatggacacaggataatggctgcactctttgtgaattcgatacagtcgacttgtctgcagtagatgtccatccaaacgtatcaataggtgtttttattgagcaaccaaccccttttctacctcggtttctggacatattgttgacactggattacccaaaagaagcacttaaactttttattcataacaaagaagtttatcatgaaaaggacatcaaggtattttttgataaagctaagcatgaaatcaaaactataaaaatagtaggaccagaagaaaatctaagtcaagcggaagccagaaacatgggaatggacttttgccgtcaggatgaaaagtgtgattattactttagtgtggatgcagatgttgttttgacaaatccaaggactttaaaaattttgattgaacaaaacagaaagatcattgctcctcttgtaactcgtcatggaaagctgtggtccaatttctggggagcattgagtcctgatggatactatgcacgatctgaagattatgtggatattgttcaagggaatagagtaggagtatggaatgtcccatatatggctaatgtgtacttaattaaaggaaagacactccgatcagagatgaatgaaaggaactattttgttcgtgataaactggatcctgatatggctctttgccgaaatgctagagaaatgactttacaaagggaaaaagactcccctactccggaaacattccaaatgctcagccccccaaagggtgtatttatgtacatttctaatagacatgaatttggaaggctattatccactgctaattacaatacttcccattataacaatgacctctggcagatttttgaaaatcctgtggactggaaggaaaagtatataaaccgtgattattcaaagattttcactgaaaatatagttgaacagccctgtccagatgtcttttggttccccatattttctgaaaaagcctgtgatgaattggtagaagaaatggaacattacggcaaatggtctgggggaaaacatcatgatagccgtatatctggtggttatgaaaatgtcccaactgatgatatccacatgaagcaagttgatctggagaatgtatggcttcattttatccgggagttcattgcaccagttacactgaaggtctttgcaggctattatacgaagggatttgcactactgaattttgtagtaaaatactcccctgaacgacagcgttctcttcgtcctcatcatgatgcttctacatttaccataaacattgcacttaataacgtgggagaagactttcagggaggtggttgcaaatttctaaggtacaattgctctattgagtcaccacgaaaaggctggagcttcatgcatcctgggagactcacacatttgcatgaaggacttcctgttaaaaatggaacaagatacattgcagtgtcatttatagatccctaagttatttacttttcattgaattgaaatttattttggatgaatgactggcatgaacacgtctttgaagttgtggctgagaagatgagaggaatatttaaataacatcaacagaacaacttcactttgggccaaacatttgaaaaactttttataaaaaattgtttgatatttcttaatgtctgctctgagccttaaaacacagattgaagaagaaaagaaagaaaaaacttaaatatttatttctatgctttgttgcctctgagaataatgacaatttatgaatttgtgtttcaaattgataaaatatttaggtacaaataacaagactaataatattttcttatttaaaaaaagcatgggaagatttttatttatcaaaatatagaggaaatgtagacaaaatggatataaatgaaaattaccatgttgtaaaaccttgaaaatcagattctaactggatttgtatgcaactaagtatttttctgaacacctatgcaggtcttatttacagtagttactaagggaacacacaaagaattacacaacgttttcctcaagaaaatggtacaaaacacaaccgaggagcgtatacagttgaaaacatttttgttttgattggaaggcagattattttatattagtattaaaaatcaaaccctatgtttctttcagatgaatcttccaaagtggattatattaagcaggtattagatttaggaaaacctttccatttcttaaagtattatcaagtgtcaagatcagcaagtgtccttaagtcaaacaggttttttttgttgttgtttttgctttgtttccttttttagaaagttctagaaaataggaaaacgaaaaatttcattgagatgagtagtgcatttaattattttttaaaaaactttttaagtacttgaattttatatcaggaaaacaaagttgttgagccttgcttcttccgttttgccctttgtctcgctccttattctttttttggggggagggttatttgcttttttatcttcctggcataatttccattttattcttctgagtgtctatgttaacttccctctatcccgcttataaaaaaattctccaacaaaaatacttgttgacttgatgttttatcacttctctaagtaaggttgaaatatccttattgtagctactgtttttaatgtaaaggttaaacttgaaaagaaattcttaatcacggtgccaaaattcattttctaacaccatgtgttagaaaattataaaaaataaaataattttagaaa

SEQ ID NO: 15987 - DNA, 3665 bp, Homo sapiens
  source 1..3665: mol_type = unassigned DNA
ccgacgacctcactcagctgcgttacgcgccgctccggctgccggccgcgcgccttgcccgccggctcccgcccgcaatcggcggctcagggcggacccgggtctctgcgttctcgcgagaagcgcggcgctgcggggccgtgggcgcctgagcccgcgcggccctcgagggccgaatatggggggatgcacggtgaagcctcagctgctgctcctggcgctcgtcctccacccctggaatccctgtctgggtgcggactcggagaagccctcgagcatccccacagataaattattagtcataactgtagcaacaaaagaaagtgatggattccatcgatttatgcagtcagccaaatatttcaattatactgtgaaggtccttggtcaaggagaagaatggagaggtggtgatggaattaatagtattggagggggccagaaagtgagattaatgaaagaagtcatggaacactatgctgatcaagatgatctggttgtcatgtttactgaatgctttgatgtcatatttgctggtggtccagaagaagttctaaaaaaattccaaaaggcaaaccacaaagtggtctttgcagcagatggaattttgtggccagataaaagactagcagacaagtatcctgttgtgcacattgggaaacgctatctgaattcaggaggatttattggctatgctccatatgtcaaccgtatagttcaacaatggaatctccaggataatgatgatgatcagctcttttacactaaagtttacattgatccactgaaaagggaagctattaacatcacattggatcacaaatgcaaaattttccagaccttaaatggagctgtagatgaagttgttttaaaatttgaaaatggcaaagccagagctaagaatacattttatgaaacattaccagtggcaattaatggaaatggacccaccaagattctcctgaattattttggaaactatgtacccaattcatggacacaggataatggctgcactctttgtgaattcgatacagtcgacttgtctgcagtagatgtccatccaaacgtatcaataggtgtttttattgagcaaccaaccccttttctacctcggtttctggacatattgttgacactggattacccaaaagaagcacttaaactttttattcataacaaagaagtttatcatgaaaaggacatcaaggtattttttgataaagctaagcatgaaatcaaaactataaaaatagtaggaccagaagaaaatctaagtcaagcggaagccagaaacatgggaatggacttttgccgtcaggatgaaaagtgtgattattactttagtgtggatgcagatgttgttttgacaaatccaaggactttaaaaattttgattgaacaaaacagaaagatcattgctcctcttgtaactcgtcatggaaagctgtggtccaatttctggggagcattgagtcctgatggatactatgcacgatctgaagattatgtggatattgttcaagggaatagagtaggagtatggaatgtcccatatatggctaatgtgtacttaattaaaggaaagacactccgatcagagatgaatgaaaggaactattttgttcgtgataaactggatcctgatatggctctttgccgaaatgctagagaaatgggtgtatttatgtacatttctaatagacatgaatttggaaggctattatccactgctaattacaatacttcccattataacaatgacctctggcagatttttgaaaatcctgtggactggaaggaaaagtatataaaccgtgattattcaaagattttcactgaaaatatagttgaacagccctgtccagatgtcttttggttccccatattttctgaaaaagcctgtgatgaattggtagaagaaatggaacattacggcaaatggtctgggggaaaacatcatgatagccgtatatctggtggttatgaaaatgtcccaactgatgatatccacatgaagcaagttgatctggagaatgtatggcttcattttatccgggagttcattgcaccagttacactgaaggtctttgcaggctattatacgaagggatttgcactactgaattttgtagtaaaatactcccctgaacgacagcgttctcttcgtcctcatcatgatgcttctacatttaccataaacattgcacttaataacgtgggagaagactttcagggaggtggttgcaaatttctaaggtacaattgctctattgagtcaccacgaaaaggctggagcttcatgcatcctgggagactcacacatttgcatgaaggacttcctgttaaaaatggaacaagatacattgcagtgtcatttatagatccctaagttatttacttttcattgaattgaaatttattttggatgaatgactggcatgaacacgtctttgaagttgtggctgagaagatgagaggaatatttaaataacatcaacagaacaacttcactttgggccaaacatttgaaaaactttttataaaaaattgtttgatatttcttaatgtctgctctgagccttaaaacacagattgaagaagaaaagaaagaaaaaacttaaatatttatttctatgctttgttgcctctgagaataatgacaatttatgaatttgtgtttcaaattgataaaatatttaggtacaaataacaagactaataatattttcttatttaaaaaaagcatgggaagatttttatttatcaaaatatagaggaaatgtagacaaaatggatataaatgaaaattaccatgttgtaaaaccttgaaaatcagattctaactggatttgtatgcaactaagtatttttctgaacacctatgcaggtcttatttacagtagttactaagggaacacacaaagaattacacaacgttttcctcaagaaaatggtacaaaacacaaccgaggagcgtatacagttgaaaacatttttgttttgattggaaggcagattattttatattagtattaaaaatcaaaccctatgtttctttcagatgaatcttccaaagtggattatattaagcaggtattagatttaggaaaacctttccatttcttaaagtattatcaagtgtcaagatcagcaagtgtccttaagtcaaacaggttttttttgttgttgtttttgctttgtttccttttttagaaagttctagaaaataggaaaacgaaaaatttcattgagatgagtagtgcatttaattattttttaaaaaactttttaagtacttgaattttatatcaggaaaacaaagttgttgagccttgcttcttccgttttgccctttgtctcgctccttattctttttttggggggagggttatttgcttttttatcttcctggcataatttccattttattcttctgagtgtctatgttaacttccctctatcccgcttataaaaaaattctccaacaaaaatacttgttgacttgatgttttatcacttctctaagtaaggttgaaatatccttattgtagctactgtttttaatgtaaaggttaaacttgaaaagaaattcttaatcacggtgccaaaattcattttctaacaccatgtgttagaaaattataaaaaataaaataatttta

SEQ ID NO: 15988 - DNA, 2908 bp, Homo sapiens
  source 1..2908: mol_type = unassigned DNA
aatatggggggatgcacggtgaagcctcagctgctgctcctggcgctcgtcctccacccctggaatccctgtctgggtgcggactcggagaagccctcgagcatccccacaggtgagcaccccgcggtccgccgctgtcccgcgaggctcggccggcgggggggcagttcattcatccaccagcccttccgcggggctggccagataaattattagtcataactgtagcaacaaaagaaagtgatggattccatcgatttatgcagtcagccaaatatttcaattatactgtgaaggtccttggtcaaggagaagaatggagaggtggtgatggaattaatagtattggagggggccagaaagtgagattaatgaaagaagtcatggaacactatgctgatcaagatgatctggttgtcatgtttactgaatgctttgatgtcatatttgctggtggtccagaagaagttctaaaaaaattccaaaaggcaaaccacaaagtggtctttgcagcagatggaattttgtggccagataaaagactagcagacaagtatcctgttgtgcacattgggaaacgctatctgaattcaggaggatttattggctatgctccatatgtcaaccgtatagttcaacaatggaatctccaggataatgatgatgatcagctcttttacactaaagtttacattgatccactgaaaagggaagctattaacatcacattggatcacaaatgcaaaattttccagaccttaaatggagctgtagatgaagttgttttaaaatttgaaaatggcaaagccagagctaagaatacattttatgaaacattaccagtggcaattaatggaaatggacccaccaagattctcctgaattattttggaaactatgtacccaattcatggacacaggataatggctgcactctttgtgaattcgatacagtcgacttgtctgcagtagatgtccatccaaacgtatcaataggtgtttttattgagcaaccaaccccttttctacctcggtttctggacatattgttgacactggattacccaaaagaagcacttaaactttttattcataacaaagaagtttatcatgaaaaggacatcaaggtattttttgataaagctaagcatgaaatcaaaactataaaaatagtaggaccagaagaaaatctaagtcaagcggaagccagaaacatgggaatggacttttgccgtcaggatgaaaagtgtgattattactttagtgtggatgcagatgttgttttgacaaatccaaggactttaaaaattttgattgaacaaaacagaaagatcattgctcctcttgtaactcgtcatggaaagctgtggtccaatttctggggagcattgagtcctgatggatactatgcacgatctgaagattatgtggatattgttcaagggaatagagtaggagtatggaatgtcccatatatggctaatgtgtacttaattaaaggaaagacactccgatcagagatgaatgaaaggaactattttgttcgtgataaactggatcctgatatggctctttgccgaaatgctagagaaatgactttacaaagggaaaaagactcccctactccggaaacattccaaatgctcagccccccaaagggtgtatttatgtacatttctaatagacatgaatttggaaggctattatccactgctaattacaatacttcccattataacaatgacctctggcagatttttgaaaatcctgtggactggaaggaaaagtatataaaccgtgattattcaaagattttcactgaaaatatagttgaacagccctgtccagatgtcttttggttccccatattttctgaaaaagcctgtgatgaattggtagaagaaatggaacattacggcaaatggtctgggggaaaacatcatgatagccgtatatctggtggttatgaaaatgtcccaactgatgatatccacatgaagcaagttgatctggagaatgtatggcttcattttatccgggagttcattgcaccagttacactgaaggtctttgcaggctattatacgaagggatttgcactactgaattttgtagtaaaatactcccctgaacgacagcgttctcttcgtcctcatcatgatgcttctacatttaccataaacattgcacttaataacgtgggagaagactttcagggaggtggttgcaaatttctaaggtacaattgctctattgagtcaccacgaaaaggctggagcttcatgcatcctgggagactcacacatttgcatgaaggacttcctgttaaaaatggaacaagatacattgcagtgtcatttatagatccctaagttatttacttttcattgaattgaaatttattttggatgaatgactggcatgaacacgtctttgaagttgtggctgagaagatgagaggaatatttaaataacatcaacagaacaacttcactttgggccaaacatttgaaaaactttttataaaaaattgtttgatatttcttaatgtctgctctgagccttaaaacacagattgaagaagaaaagaaagaaaaaacttaaatatttatttctatgctttgttgcctctgagaataatgacaatttatgaatttgtgtttcaaattgataaaatatttaggtacaaataacaagactaataatattttcttatttaaaaaaagcatgggaagatttttatttatcaaaatatagaggaaatgtagacaaaatggatataaatgaaaattaccatgttgtaaaaccttgaaaatcagattctaactggatttgtatgcaactaagtatttttctgaacacctatgcaggtcttatttacagtagttactaagggaacacacaaaga

SEQ ID NO: 15989 - DNA, 761 bp, Homo sapiens
  source 1..761: mol_type = unassigned DNA
cagggatttgcactactgaattttgtagtaaaatactcccctgaacgacagcgttctcttcgtcctcatcatgatgcttctacatttaccataaacattgcacttaataacgtgggagaagactttcagggaggtggttgcaaatttctaaggtacaattgctctattgagtcaccacgaaaaggctggagcttcatgcatcctgggagactcacacatttgcatgaaggacttcctgttaaaaatggaacaagatacattgcagtgtcatttatagatccctaagttatttacttttcattgaattgaaatttattttggatgaatgactggcatgaacacgtctttgaagttgtggctgagaagatgagaggaatatttaaataacatcaacagaacaacttcactttgggccaaacatttgaaaaactttttataaaaaattgtttgatatttcttaatgtctgctctgagccttaaaacacagattgaagaagaaaagaaagaaaaaacttaaatatttatttctatgctttgttgcctctgagaataatgacaatttatgaatttgtgtttcaaattgataaaatatttaggtacaaataacaagactaataatattttcttatttaaaaaaagcatgggaagatttttatttatcaaaatatagaggaaatgtagacaaaatggatataaatgaaaattaccatgttgtaaaaccttgaaaatcagattctaactggatttgtatgcaactaagt

SEQ ID NO: 15990 - DNA, 480 bp, Homo sapiens
  source 1..480: mol_type = unassigned DNA
taaccccatcgtgagtcaaggagcatctgtaaaatgtgtaaatctattcactgtaagattacttaagttttaaaatcctgaggtacaatatttcataaataaaaattttgtatttcatagaatgacataagcatattcagaaccaggcaaagattaggctatatactgtgatttctgaaaattactattttgtccactatacataatcatttataagttgaataatttctaaaatgcatatgctttatacttttcagtgaagtatttataaagatatttgttttaatatgtacttctttttataggactggaaggaaaagtatataaaccgtgattattcaaagattttcactgaaaatatagttgaacagccctgtccagatgtcttttggttccccatattttctgaaaaagcctgtgatgaattggtagaagaaatggaacattacggcaaatggtctgggggaaaacatcatgtaa

SEQ ID NO: 15991 - DNA, 3835 bp, Homo sapiens
  source 1..3835: mol_type = unassigned DNA
taagaaaaaataaacttttaaattaaaattgttatgccaaatttgggtgtctcaaactatttgtttgcgtatgcagtagccaacttagactgtgtctatgtttgtacgtatttatacataaagggctgtagaagttacttatgtttttcttttaatggctacgagtccacatatttaatcaaatgatgaatcaaggtaagatcaattttttttaaatgcagataaatgaatagtatgactttcatagcagtgacttaaatttaaatgtacactctgaaggttgtgtgtggtaaaagtgtgtttatttagactgtgggggaaacaggtgctcttactctccagttagtcactgagctagataatactgtaatcccaagaaacgggcattgtaggccttttgtttagccctgttaatgcttcattctactaataaaactctagtaatagtaaaaaaaatcgtgtattcaatgaatattaattgaatatgccaggaactgtgttaagagtaggtgataaaaaggtgaagacatgatccattctcatcaggaaataatcttatctactacgaaccctcatgcctgtgctgcagaagctgaggtcccagagggatggattctgactagattaggggtctagggatagacagaaaagaggcctctgaaaaaccaaactgatgttattactaatgattccataatttattcattggagaatcctctgggtccacattcagaacatattttctttaatatttttcatgattgtacctagtgcttctgtctggtattttgtttgatagttgcttcgaacaaatatggtgtggagacacacactgacaacagcaaaaagtgctgactgggaccgacagtgagggaggggagcccagagggaagttgataacccaaatgtcatctggtatctccagttgttcattccttgatattgctgatgataatgttacaaactgtaccagggaaagcaaacatagtcactgcccctggtaagaaggcaggggaataactatcttagaaaatttgatgaaaatcaagtttgtaaaatattaatacctgaaaagtcatatacttacatctccaacattcatttaaaactgagttgtgggatatgtaagttgcatttgtgtgcatgtgtatgtatgtatgtatgtatgcagaaacattttgatttgtggatgttttatgccttaaaatatttactggcttgaaaatatattttaactggcttaaaattttagaggtgagctccctgtgaatatccgtgttaaattgaccattttgaaatttaagacaatatatatatcgtttcagatattgttccactattttgatcagaaaagtatgctagagaaccatattttacataaaagaatatatatattaacatttttcagtcagcagatatttattttatgtcatgcccatttcattttctttttcactgttagggacttttgccgtcaggatgaaaagtgtgattattactttagtgtggatgcagatgttgttttgacaaatccaaggactttaaaaattttgattgaacaaaacagaaagatcattgctcctcttgtaactcgtcatggaaagctgtggtccaatttctggggagcattgagtcctgatggatactatgcacgatctgaagattatgtggatattgttcaagggaatagagtaggagtatggaatgtcccatatatggctaatgtgtacttaattaaaggaaagacactccgatcagagatgaatgaaaggaactattttgttcgtgataaactggatcctgatatggctctttgccgaaatgctagagaaatgactttacaaagggaaaaagactcccctactccggaaacattccaaatgctcagccccccaaaggtgttatttttacttattttatttatttttgtttatttaatatttgatatagtatattgcctagtagtaaagtttctttaagggccttatttgcatttagcttggtaaaatgttgattttcatcagtcatctgtgtgtttgcgtgttttgtgtgacttgggcatgggtcttgtgtgatagtcaactcttggttctttgagctgatttatattttatggctgacaggtgacaaagttaaacctaagtccctttcattctttttttaggtttttatttctttttaaagggagagaagagggtagaagtaggtataaaatagaatttgattacagtaaggtttaggtgcaccttattgagttattaatcactaactcttttactattaaaacaggtccaaaaagaaacacattacctagtggtgtttgccacatttgtctggtttggggcaagaatatgagactggttttctttatctgcctttataatgtatgactcatttgcgtgttagcctttaaacattagaaaaagaaaggaatgaaacagactggtgaaatataactggcagtgaattcttgattaaaaatgtgatgctttctttgaaagagaaagaagccaaaagaggtataattcattgcactgtgtctcaaaaatatttctgctttcaaacaggaattttttccccgatgtctacatctaggatcaatgagaaagggacaaaaacagtccattcttctttttttcagttgagtgtcagtgctatctactagttttgtgtggtgtctgaattcataatcaaaatttgagttttttattttaaactatgcacattttatatgaatactaaaaatgcatgttcataaatgaaatataaagatagaaattaatatcttctatatatttttcctatgattaaatttacttttgtacctacctctaagattaatactgttattttctggcatatagggtgtatttatgtacatttctaatagacatgaatttggaaggctattatccactgctaattacaatacttcccattataacaatgacctctggcagatttttgaaaatcctgtggtatgtatttcatactcaactttattatttttctataactgtaagtggttataaatcagttggttaataatatgaaatgtggttagaggctttttaaaatgacataaggtgaaatgcacatcaaaaccacaatgagatactgtctcacaccagtcagaatggctattattaaaaagtcaaaaacaacagatatgggtgaggctacggagaaaagggaatgcttgtacgttgttggtcggaatgaatttggaaagcagtttgaagatttctcaaagatcttaaaacagagctaccatttgacccagcaattccattactgggtatatagccaaaagaaagtaagtcatttgaccaaaaacacacatgaacctgtatctgttcgttgcagcactattcacagtagcaaagacatggacttaaactaggtgttcattaatggtggattggataaagaaaatgtgttacatacacaccatagaatactatacagccataaaaaagaacaatattatgtcattttcagcaacatggagagaactggaggccattaccctaagtgaattaatggcacagaaaaccaaatactgcatgttctcacttatgagtgggagctaaacattgggtacttgtgaacataaatataggaacagtagaccctggggatcactagaggagtgagggagtagggagggggacaagggttgaaaaaccaactaatgggtactgtgctcactaccttggtgatgggatcagtcataccctaaaccttagcatcatgcattatacacttgtaacaaacctgcacatatactccctgaatccaaaagctgaaattgtttttaaaaagtaaataaaaa

SEQ ID NO: 15992 - DNA, 530 bp, Homo sapiens
  source 1..530: mol_type = unassigned DNA
gatattctagtattttttatgtcatgctgattaacatttgaataaaatttaaaacaaaaccatactaatgataattttatttttatgtttggtgtaaaacaaaggtccatccaaacgtatcaataggtgtttttattgagcaaccaaccccttttctacctcggtttctggacatattgttgacactggattacccaaaagaagcacttaaactttttattcataacaaagaagtttatcatgaaaaggacatcaaggtattttttgataaagctaagcatgaaatcaaaactataaaaatagtaggaccagaagaaaatctaagtcaagcggaagccagaaacatgggaatggacttttgccgtcaggatgaaaagtgtgattattactttagtgtggatgcagatgttgttttgacaaatccaaggactttaaaaattttgattgaacaaaacagaaagatcattgctcctcttgtaactcgtcatggaaagctgtggtccaatttctggggagcattgagtcctgat

SEQ ID NO: 15993 - DNA, 723 bp, Homo sapiens
  source 1..723: mol_type = unassigned DNA
aaggaatagatgaagagagaacatgaagggaaaaaatgacaagatttggagtccggctctataaattattagtcataactgtagcaacaaaagaaagtgatggattccatcgatttatgcagtcagccaaatatttcaattatactgtgaaggtccttggtcaaggagaagaatggagaggtggtgatggaattaatagtattggagggggccagaaagtgagattaatgaaagaagtcatggaacactatgctgatcaagatgatctggttgtcatgtttactgaatgctttgatgtcatatttgctggtggtccagaagaagttctaaaaaaattccaaaaggcaaaccacaaagtggtctttgcagcagatggaattttgtggccagataaaagactagcagacaagtatcctgttgtgcacattgggaaacgctatctgaattcaggaggatttattggctatgctccatatgtcaaccgtatagttcaacaatggaatctccaggataatgatgatgatcagctcttttacactaaagtttacattgatccactgaaaagggaagctattaacatcacattggatcacaaatgcaaaattttccagaccttaaatggagctgtagatgaagttgttttaaaatttgaaaatggcaaagccagagctaagaatacattttatgaaacattaccagtggcaattaatggaaatggaccca

SEQ ID NO: 15994 - DNA, 550 bp, Homo sapiens
  source 1..550: mol_type = unassigned DNA
atatggggggatgcacggtgaagcctcagctgctgctcctggcgctcgtcctccacccctggaatccctgtctgggtgcggactcggagaagccctcgagcatccccacagataaattattagtcataactgtagcaacaaaagaaagtgatggattccatcgatttatgcagtcagccaaatatttcaattatactgtgaagaaagaaggatctgtcagccaagtcttttctacaaataagaggagaacaaggagatacctaggtccttggtcaaggagaagaatggagaggtggtgatggaattaatagtattggagggggccagaaagtgagattaatgaaagaagtcatggaacactatgctgatcaagatgatctggttgtcatgtttactgaatgctttgatgtcatatttgctggtggtccagaagaagttctaaaaaaattccaaaaggcaaaccacaaagtggtctttgcagcagatggaattttgtggccagataaaagactagcagacaagtatcctgttgtgcacattgggaaacgct

SEQ ID NO: 15995 - DNA, 786 bp, Homo sapiens
  source 1..786: mol_type = unassigned DNA
agtcttctatgccagggctaggaaagctgccttccaaaatttggtctgggaagacattatcctgggaatgagaagcaaagcctcagctctagaagcccaaataatagcagatgacccaggctttcactggcacccagtacaggcagcaggctgcaccaagaaggctggcagtgcctcttgaggaatcccttggcagtgcaggagcctagctggactcaagaatattttgccaagggcacccagcagaaccaatggaagcagaatcacagaaataggagaagaggacaaagatactcagagagaaaaagtaaaagaccgaagaaggaggctggagagaccaggatccttccagctgaacaaagtcagccacaaagcagactagccagccggctacaattggagtcagagtcccaaagacatgggcttgttagagtgctgtgcaagatgtctggtaggggccccctttgcttccctggtggccactggattgtgtttctttggggtggcactgttctgtggctgtggacatgaagccctcactggcacagaaaagctaattgagacctatttctccaaaaactaccaagactatgagtatctcatcaatgtgatccatgccttccagtatgtcatctatggaactgcctctttcttcttcctttatggggccctcctgctggctgagggcttctacaccaccggcgcagtcaggcagatctttggcgactacaagaccaccatctgcggcaagggcctgagcgcaacggtaacagggggccagaaggg

SEQ ID NO: 15996 - DNA, 624 bp, Homo sapiens
  source 1..624: mol_type = unassigned DNA
gggctctggaggacctgggaagataccctatgaggtctgtagggagccctcaggaaaggtctgctgacgaggagaagaggacaaagatactcagagagaaaaagtaaaagaccgaagaaggaggctggagagaccaggatccttccagctgaacaaagtcagccacaaagcagactagccagccggctacaattggagtcagagtcccaaagacatgggcttgttagagtgctgtgcaagatgtctggtaggggccccctttgcttccctggtggccactggattgtgtttctttggggtggcactgttctgtggctgtggacatgaagccctcactggcacagaaaagctaattgagacctatttctccaaaaactaccaagactatgagtatctcatcaatgtgatccatgccttccagtatgtcatctatggaactgcctctttcttcttcctttatggggccctcctgctggctgagggcttctacaccaccggcgcagtcaggcagatctttggcgactacaagaccaccatctgcggcaagggcctgagcgcaacggtaacagggggccagaaggggaggggttccagaggccaacatcaagctcattctttggagcg

SEQ ID NO: 15997 - DNA, 580 bp, Homo sapiens
  source 1..580: mol_type = unassigned DNA
aatcttgcctttctcccaccccaggaaggagaagaggacaaagatactcagagagaaaaagtaaaagaccgaagaaggaggctggagagaccaggatccttccagctgaacaaagtcagccacaaagcagactagccagccggctacaattggagtcagagtcccaaagacatgggcttgttagagtgctgtgcaagatgtctggtaggggccccctttgcttccctggtggccactggattgtgtttctttggggtggcactgttctgtggctgtggacatgaagccctcactggcacagaaaagctaattgagacctatttctccaaaaactaccaagactatgagtatctcatcaatgtgatccatgccttccagtatgtcatctatggaactgcctctttcttcttcctttatggggccctcctgctggctgagggcttctacaccaccggcgcagtcaggcagatctttggcgactacaagaccaccatctgcggcaagggcctgagcgcaacggtaacagggggccagaaggggaggggttccagaggccaacatcaagctcattctttggagc

SEQ ID NO: 15998 - DNA, 588 bp, Homo sapiens
  source 1..588: mol_type = unassigned DNA
aaggcaaaatcacaggaaaagttccaggagaccataccttccttctccggagtcttccaacaggagaagaggacaaagatactcagagagaaaaagtaaaagaccgaagaaggaggctggagagaccaggatccttccagctgaacaaagtcagccacaaagcagactagccagccggctacaattggagtcagagtcccaaagacatgggcttgttagagtgctgtgcaagatgtctggtaggggccccctttgcttccctggtggccactggattgtgtttctttggggtggcactgttctgtggctgtggacatgaagccctcactggcacagaaaagctaattgagacctatttctccaaaaactaccaagactatgagtatctcatcaatgtgatccatgccttccagtatgtcatctatggaactgcctctttcttcttcctttatggggccctcctgctggctgagggcttctacaccaccggcgcagtcaggcagatctttggcgactacaagaccaccatctgcggcaagggcctgagcgcaacggtaacagggggccagaaggggaggggttccagag

SEQ ID NO: 15999 - DNA, 587 bp, Homo sapiens
  source 1..587: mol_type = unassigned DNA
acttcatggcttctcacgcttgtgctgcatatcccacaccaattagacccaaggatcagttggaagtttccaggacatcttcattttatttccaccctcaatccacatttccagatgtctctgcagcaaagcgaaattccaggagaagaggacaaagatactcagagagaaaaagtaaaagaccgaagaaggaggctggagagaccaggatccttccagctgaacaaagtcagccacaaagcagactagccagccggctacaattggagtcagagtcccaaagacatgggcttgttagagtgctgtgcaagatgtctggtaggggccccctttgcttccctggtggccactggattgtgtttctttggggtggcactgttctgtggctgtggacatgaagccctcactggcacagaaaagctaattgagacctatttctccaaaaactaccaagactatgagtatctcatcaatgtgatccatgccttccagtatgtcatctatggaactgcctctttcttcttcctttatggggccctcctgctggctgagggcttctacaccaccggcgcagtcaggcagatctt

SEQ ID NO: 16000 - DNA, 608 bp, Homo sapiens
  source 1..608: mol_type = unassigned DNA
agatgtctctgcagcaaagcgaaattccaggcaagccttagggaaaaaaggaaaaacaaagaaaatgaaacaattggcagtgaaaggcagaaagagaagatggagcccttagagaagggagtatccctgagagaagaggacaaagatactcagagagaaaaagtaaaagaccgaagaaggaggctggagagaccaggatccttccagctgaacaaagtcagccacaaagcagactagccagccggctacaattggagtcagagtcccaaagacatgggcttgttagagtgctgtgcaagatgtctggtaggggccccctttgcttccctggtggccactggattgtgtttctttggggtggcactgttctgtggctgtggacatgaagccctcactggcacagaaaagctaattgagacctatttctccaaaaactaccaagactatgagtatctcatcaatgtgatccatgccttccagtatgtcatctatggaactgcctctttcttcttcctttatggggccctcctgctggctgagggcttctacaccaccggcgcagtcaggcagatctttggcgactacaagaccaccatctgcggcaaggg

SEQ ID NO: 16001 - DNA, 3001 bp, Homo sapiens
  source 1..3001: mol_type = unassigned DNA
caggagaagaggacaaagatactcagagagaaaaagtaaaagaccgaagaaggaggctggagagaccaggatccttccagctgaacaaagtcagccacaaagcagactagccagccggctacaattggagtcagagtcccaaagacatgggcttgttagagtgctgtgcaagatgtctggtaggggccccctttgcttccctggtggccactggattgtgtttctttggggtggcactgttctgtggctgtggacatgaagccctcactggcacagaaaagctaattgagacctatttctccaaaaactaccaagactatgagtatctcatcaatgtgatccatgccttccagtatgtcatctatggaactgcctctttcttcttcctttatggggccctcctgctggctgagggcttctacaccaccggcgcagtcaggcagatctttggcgactacaagaccaccatctgcggcaagggcctgagcgcaacggtaacagggggccagaaggggaggggttccagaggccaacatcaagctcattctttggagcgggtgtgtcattgtttgggaaaatggctaggacatcccgacaagtttgtgggcatcacctatgccctgaccgttgtgtggctcctggtgtttgcctgctctgctgtgcctgtgtacatttacttcaacacctggaccacctgccagtctattgccttccccagcaagacctctgccagtataggcagtctctgtgctgatgccagaatgtatggtgttctcccatggaatgctttccctggcaaggtttgtggctccaaccttctgtccatctgcaaaacagctgagttccaaatgaccttccacctgtttattgctgcatttgtgggggctgcagctacactggtttccctgctcaccttcatgattgctgccacttacaactttgccgtccttaaactcatgggccgaggcaccaagttctgatcccccgtagaaatccccctttctctaatagcgaggctctaaccacacagcctacaatgctgcgtctcccatcttaactctttgcctttgccaccaactggccctcttcttacttgatgagtgtaacaagaaaggagagtcttgcagtgattaaggtctctctttggactctcccctcttatgtacctcttttagtcattttgcttcatagctggttcctgctagaaatgggaaatgcctaagaagatgacttcccaactgcaagtcacaaaggaatggaggctctaattgaattttcaagcatctcctgaggatcagaaagtaatttcttctcaaagggtacttccactgatggaaacaaagtggaaggaaagatgctcaggtacagagaaggaatgtctttggtcctcttgccatctataggggccaaatatattctctttggtgtacaaaatggaattcattctggtctctctattaccactgaagatagaagaaaaaagaatgtcagaaaaacaataagagcgtttgcccaaatctgcctattgcagctgggagaagggggtcaaagcaaggatctttcacccacagaaagagagcactgaccccgatggcgatggactactgaagccctaactcagccaaccttacttacagcataagggagcgtagaatctgtgtagacgaagggggcatctggccttacacctcgttagggaagagaaacagggtgttgtcagcatcttctcactcccttctccttgataacagctaccatgacaaccctgtggtttccaaggagctgagaatagaaggaaactagcttacatgagaacagactggcctgaggagcagcagttgctggtggctaatggtgtaacctgagatggccctctggtagacacaggatagataactctttggatagcatgtctttttttctgttaattagttgtgtactctggcctctgtcatatcttcacaatggtgctcatttcatggggtattatccattcagtcatcgtaggtgatttgaaggtcttgatttgttttagaatgatgcacatttcatgtattccagtttgtttattacttatttggggttgcatcagaaatgtctggagaataattctttgattatgactgttttttaaactaggaaaattggacattaagcatcacaaatgatattaaaaattggctagttgaatctattgggattttctacaagtattctgcctttgcagaaacagatttggtgaatttgaatctcaatttgagtaatctgatcgttctttctagctaatggaaaatgattttacttagcaatgttatcttggtgtgttaagagttaggtttaacataaaggttattttctcctgatatagatcacataacagaatgcaccagtcatcagctattcagttggtaagcttccaggaaaaaggacaggcagaaagagtttgagacctgaatagctcccagatttcagtcttttcctgtttttgttaactttgggttaaaaaaaaaaaaagtctgattggttttaattgaaggaaagatttgtactacagttcttttgttgtaaagagttgtgttgttcttttcccccaaagtggtttcagcaatatttaaggagatgtaagagctttacaaaaagacacttgatacttgttttcaaaccagtatacaagataagcttccaggctgcatagaaggaggagagggaaaatgttttgtaagaaaccaatcaagataaaggacagtgaagtaatccgtaccttgtgttttgttttgatttaataacataacaaataaccaacccttccctgaaaacctcacatgcatacatacacatatatacacacacaaagagagttaatcaactgaaagtgtttccttcatttctgatatagaattgcaattttaacacacataaaggataaacttttagaaacttatcttacaaagtgtattttataaaattaaagaaaataaaattaagaatgttctcaatcaaa

SEQ ID NO: 16002 - DNA, 2896 bp, Homo sapiens
  source 1..2896: mol_type = unassigned DNA
caggagaagaggacaaagatactcagagagaaaaagtaaaagaccgaagaaggaggctggagagaccaggatccttccagctgaacaaagtcagccacaaagcagactagccagccggctacaattggagtcagagtcccaaagacatgggcttgttagagtgctgtgcaagatgtctggtaggggccccctttgcttccctggtggccactggattgtgtttctttggggtggcactgttctgtggctgtggacatgaagccctcactggcacagaaaagctaattgagacctatttctccaaaaactaccaagactatgagtatctcatcaatgtgatccatgccttccagtatgtcatctatggaactgcctctttcttcttcctttatggggccctcctgctggctgagggcttctacaccaccggcgcagtcaggcagatctttggcgactacaagaccaccatctgcggcaagggcctgagcgcaacgtttgtgggcatcacctatgccctgaccgttgtgtggctcctggtgtttgcctgctctgctgtgcctgtgtacatttacttcaacacctggaccacctgccagtctattgccttccccagcaagacctctgccagtataggcagtctctgtgctgatgccagaatgtatggtgttctcccatggaatgctttccctggcaaggtttgtggctccaaccttctgtccatctgcaaaacagctgagttccaaatgaccttccacctgtttattgctgcatttgtgggggctgcagctacactggtttccctgctcaccttcatgattgctgccacttacaactttgccgtccttaaactcatgggccgaggcaccaagttctgatcccccgtagaaatccccctttctctaatagcgaggctctaaccacacagcctacaatgctgcgtctcccatcttaactctttgcctttgccaccaactggccctcttcttacttgatgagtgtaacaagaaaggagagtcttgcagtgattaaggtctctctttggactctcccctcttatgtacctcttttagtcattttgcttcatagctggttcctgctagaaatgggaaatgcctaagaagatgacttcccaactgcaagtcacaaaggaatggaggctctaattgaattttcaagcatctcctgaggatcagaaagtaatttcttctcaaagggtacttccactgatggaaacaaagtggaaggaaagatgctcaggtacagagaaggaatgtctttggtcctcttgccatctataggggccaaatatattctctttggtgtacaaaatggaattcattctggtctctctattaccactgaagatagaagaaaaaagaatgtcagaaaaacaataagagcgtttgcccaaatctgcctattgcagctgggagaagggggtcaaagcaaggatctttcacccacagaaagagagcactgaccccgatggcgatggactactgaagccctaactcagccaaccttacttacagcataagggagcgtagaatctgtgtagacgaagggggcatctggccttacacctcgttagggaagagaaacagggtgttgtcagcatcttctcactcccttctccttgataacagctaccatgacaaccctgtggtttccaaggagctgagaatagaaggaaactagcttacatgagaacagactggcctgaggagcagcagttgctggtggctaatggtgtaacctgagatggccctctggtagacacaggatagataactctttggatagcatgtctttttttctgttaattagttgtgtactctggcctctgtcatatcttcacaatggtgctcatttcatggggtattatccattcagtcatcgtaggtgatttgaaggtcttgatttgttttagaatgatgcacatttcatgtattccagtttgtttattacttatttggggttgcatcagaaatgtctggagaataattctttgattatgactgttttttaaactaggaaaattggacattaagcatcacaaatgatattaaaaattggctagttgaatctattgggattttctacaagtattctgcctttgcagaaacagatttggtgaatttgaatctcaatttgagtaatctgatcgttctttctagctaatggaaaatgattttacttagcaatgttatcttggtgtgttaagagttaggtttaacataaaggttattttctcctgatatagatcacataacagaatgcaccagtcatcagctattcagttggtaagcttccaggaaaaaggacaggcagaaagagtttgagacctgaatagctcccagatttcagtcttttcctgtttttgttaactttgggttaaaaaaaaaaaaagtctgattggttttaattgaaggaaagatttgtactacagttcttttgttgtaaagagttgtgttgttcttttcccccaaagtggtttcagcaatatttaaggagatgtaagagctttacaaaaagacacttgatacttgttttcaaaccagtatacaagataagcttccaggctgcatagaaggaggagagggaaaatgttttgtaagaaaccaatcaagataaaggacagtgaagtaatccgtaccttgtgttttgttttgatttaataacataacaaataaccaacccttccctgaaaacctcacatgcatacatacacatatatacacacacaaagagagttaatcaactgaaagtgtttccttcatttctgatatagaattgcaattttaacacacataaaggataaacttttagaaacttatcttacaaagtgtattttataaaattaaagaaaataaaattaagaatgttctcaatcaaa

SEQ ID NO: 16003 - DNA, 574 bp, Homo sapiens
  source 1..574: mol_type = unassigned DNA
agagagaaaaagtaaaagaccgaagaaggaggctggagagaccaggatccttccagctgaacaaagtcagccacaaagcagactagccagccggctacaattggagtcagagtcccaaagacatggccttgaaagccatcccctgggtacaggtctttgtcttgaaagaaagcaacagtagaaatgccttccctgcccacagcacttcaggtctaaagaagaccaagtgaggacagtgacatgatcaggaagggtcacagcagccatggcttgttagagtgctgtgcaagatgtctggtaggggccccctttgcttccctggtggccactggattgtgtttctttggggtggcactgttctgtggctgtggacatgaagccctcactggcacagaaaagctaattgagacctatttctccaaaaactaccaagactatgagtatctcatcaatgtgatccatgccttccagtatgtcatctatggaactgcctctttcttcttcctttatggggccctcctgctggctgagggcttctacaccaccggcgcagtcaggcagatctttggcgact

SEQ ID NO: 16004 - DNA, 596 bp, Homo sapiens
  source 1..596: mol_type = unassigned DNA
agagagaaaaagtaaaagaccgaagaaggaggctggagagaccaggatccttccagctgaacaaagtcagccacaaagcagactagccagccggctacaattggagtcagagtcccaaagacatggaacccacccactgatccccatccatccctagtaccagtcacggctgctctagcatttcggccttgtcaactactgcaggccctgatcaaggaggcctctgttcatggggcttgttagagtgctgtgcaagatgtctggtaggggccccctttgcttccctggtggccactggattgtgtttctttggggtggcactgttctgtggctgtggacatgaagccctcactggcacagaaaagctaattgagacctatttctccaaaaactaccaagactatgagtatctcatcaatgtgatccatgccttccagtatgtcatctatggaactgcctctttcttcttcctttatggggccctcctgctggctgagggcttctacaccaccggcgcagtcaggcagatctttggcgactacaagaccaccatctgcggcaagggcctgagcgcaacggtaacagggggccagaag

SEQ ID NO: 16005 - DNA, 532 bp, Homo sapiens
  source 1..532: mol_type = unassigned DNA
agagagaaaaagtaaaagaccgaagaaggaggctggagagaccaggatccttccagctgaacaaagtcagccacaaagcagactagccagccggctacaattggagtcagagtcccaaagacatgggcttgttagagtgctgtgcaagatgtctggtaggggccccctttgcttccctggtggccactggattgtgtttctttggggtggcactgttctgtggctgtggacatgaagccctcactggcacagaaaagctaattgagacctatttctccaaaaactaccaagactatgagtatctcatcaatgtgatcatcctcaggattttgtggcaataacaaggggtgggggaaaattgggcgcgagtctgtggcctcgtccccacccaaggctgggtcctctctaggggcctggcatttgagtgaggaagcgatggctgcagccgaacgagaaggtcaggaagaacgtggtgcccagctggcttagcctcacctttcaaaggttccctaagcaaatttcttctcaaaac

SEQ ID NO: 16006 - DNA, 479 bp, Homo sapiens
  source 1..479: mol_type = unassigned DNA
aggatccttccagctgaacaaagtcagccacaaagcagactagccagccggctacaattggagtcagagtcccaaagacatgggcttgttagagtgctgtgcaagatgtctggtaggggccccctttgcttccctggtggccactggattgtgtttctttggggtggcactgttctgtggctgtggacatgaagccctcactggcacagaaaagctaattgagacctatttctccaaaaactaccaagactatgagtatctcatcaatgtgtaagtacctgccctcccacacagacccatcttttttttccctctctccatcctggagatagagaactcttcagtaccttagtaactagcaggggactggggtggagccagaccggattcccgagtcttccctctgtgcagatctctcctgctccacattcgaagcccattcagaaaggaggggtctgcctgcctgcctgtcagcccct

SEQ ID NO: 16007 - DNA, 795 bp, Homo sapiens
  source 1..795: mol_type = unassigned DNA
ggatccttccagctgaacaaagtcagccacaaagcagactagccagccggctacaattggagtcagagtcccaaagacatgggcttgttagagtgctgtgcaagatgtctggtaggggccccctttgcttccctggtggccactggattgtgtttctttggggtggcactgttctgtggctgtggacatgaagccctcactggcacagaaaagctaattgagacctatttctccaaaaactaccaagactatgagtatctcatcaatgtgatccatgccttccagtatgtcatctatggaactgcctctttcttcttcctttatggggccctcctgctggctgagggcttctacaccaccggcgcagtcaggcagatctttggcgactacaagaccaccatctgcggcaagggcctgagcgcaacggtaacagggggccagaaggggaggggttccagaggccaacatcaagctcattctttggagcgggtgtgtcattgtttgggaaaatggctaggacatcccgacaaggtgatcatcctcaggattttgtggcaataacaaggggtgggggaaaattgggcgcgagtctgtggcctcgtccccacccaaggctgggtcctctctaggggcctggcatttgagtgaggaagcgatggctgcagccgaacgagaaggtcaggaagaacgtggtgcccagctggcttagcctcacctttcaaaggttccctaagcaaatttcttctcaaaacagaaagcatgagttttgtgggatgctttgtacaatcagaccat

SEQ ID NO: 16008 - DNA, 582 bp, Homo sapiens
  source 1..582: mol_type = unassigned DNA
gatcaggaagggtcacagcagccatggtaggtgaatggagcagcttttccttcctttcctgctttcagagcctactcagtgccaaacttacatcaaaagctcagcaagtactgattgattaatccctcttgcctacggcaaaatggccctgagggctatctctcagctctgcactggcctctgagctgtctgccaggcagggctctagaaaagagtcccaaggaagagaataaggttccccaaatcagcttcacactgcaacaaggagagaggaggaaatggtgggagactgacctgaggaacaaggcttgttagagtgctgtgcaagatgtctggtaggggccccctttgcttccctggtggccactggattgtgtttctttggggtggcactgttctgtggctgtggacatgaagccctcactggcacagaaaagctaattgagacctatttctccaaaaactaccaagactatgagtatctcatcaatgtgatccatgccttccagtatgtcatctatggaactgcctctttcttcttcctttatggggccctcctgctggctgagggcttctacacca

SEQ ID NO: 16009 - DNA, 671 bp, Homo sapiens
  source 1..671: mol_type = unassigned DNA
agttcccagattcacactgaatttccatcatggagctggtccttgaggcgggcccagggcatgggaaaggagggagggagggttgggagctcttggtgcctgcttaaagagacagcatcaggatcaacacagtcccttgatgaacctggatctgtgcttgttagagtgctgtgcaagatgtctggtaggggccccctttgcttccctggtggccactggattgtgtttctttggggtggcactgttctgtggctgtggacatgaagccctcactggcacagaaaagctaattgagacctatttctccaaaaactaccaagactatgagtatctcatcaatgtgatccatgccttccagtatgtcatctatggaactgcctctttcttcttcctttatggggccctcctgctggctgagggcttctacaccaccggcgcagtcaggcagatctttggcgactacaagaccaccatctgcggcaagggcctgagcgcaacgtttgtgggcatcacctatgccctgaccgttgtgtggctcctggtgtttgcctgctctgctgtgcctgtgtacatttacttcaacacctggaccacctgccagtctattgccttccccagcaagacctctgccagtataggcagtctctgtgctgatgccagaatgtatggtg

SEQ ID NO: 16010 - DNA, 566 bp, Homo sapiens
  source 1..566: mol_type = unassigned DNA
atattgcccaagttggagcctccagcgtagtaggatccatgccttccagtatgtcatctatggaactgcctctttcttcttcctttatggggccctcctgctggctgagggcttctacaccaccggcgcagtcaggcagatctttggcgactacaagaccaccatctgcggcaagggcctgagcgcaacgtttgtgggcatcacctatgccctgaccgttgtgtggctcctggtgtttgcctgctctgctgtgcctgtgtacatttacttcaacacctggaccacctgccagtctattgccttccccagcaagacctctgccagtataggcagtctctgtgctgatgccagaatgtatggtgttctcccatggaatgctttccctggcaaggtttgtggctccaaccttctgtccatctgcaaaacagctgagttccaaatgaccttccacctgtttattgctgcatttgtgggggctgcagctacactggtttccctgctcaccttcatgattgctgccacttacaactttgccgtccttaaactcatgggccgaggcaccaagt

SEQ ID NO: 16011 - DNA, 627 bp, Homo sapiens
  source 1..627: mol_type = unassigned DNA
gtagtaggtatggagaagccaagggaggcactaagcctctcctgttcctagaacaagttaggctcctgttccttcacccacctttcttcttgtctagctccctactcctgtgagttagcatgtctgaagggtggggcagggagagtaggtccctggttctccaggtcccagggatccatgccttccagtatgtcatctatggaactgcctctttcttcttcctttatggggccctcctgctggctgagggcttctacaccaccggcgcagtcaggcagatctttggcgactacaagaccaccatctgcggcaagggcctgagcgcaacggtaacagggggccagaaggggaggggttccagaggccaacatcaagctcattctttggagcgggtgtgtcattgtttgggaaaatggctaggacatcccgacaagtttgtgggcatcacctatgccctgaccgttgtgtggctcctggtgtttgcctgctctgctgtgcctgtgtacatttacttcaacacctggaccacctgccagtctattgccttccccagcaagacctctgccagtataggcagtctctgtgctgatgccagaatgtatggtgttctcccatggaatgctttcc

SEQ ID NO: 16012 - DNA, 543 bp, Homo sapiens
  source 1..543: mol_type = unassigned DNA
agtaggtatggagaagccaagggaggcactaagcctctcctgttcctagaacaagttaggctcctgttccttcacccacctttcttcttgtctagctccctactcctgtgagttagcatgtctgaagggtggggcagggagagtaggtccctggttctccaggtcccagggatccatgccttccagtatgtcatctatggaactgcctctttcttcttcctttatggggccctcctgctggctgagggcttctacaccaccggcgcagtcaggcagatctttggcgactacaagaccaccatctgcggcaagggcctgagcgcaacggtaacagggggccagaaggggaggggttccagaggccaacatcaagctcattctttggagcgggtgtgtcattgtttgggaaaatggctaggacatcccgacaaggtgatcatcctcaggattttgtggcaataacaaggggtgggggaaaattgggcgcgagtctgtggcctcgtccccacccaaggctgggtcctctctaggggcctggcattt

SEQ ID NO: 16013 - DNA, 560 bp, Homo sapiens
  source 1..560: mol_type = unassigned DNA
agtaggtatggagaagccaagggaggcactaagcctctcctgttcctagaacaagttaggctcctgttccttcacccacctttcttcttgtctagctccctactcctgatccatgccttccagtatgtcatctatggaactgcctctttcttcttcctttatggggccctcctgctggctgagggcttctacaccaccggcgcagtcaggcagatctttggcgactacaagaccaccatctgcggcaagggcctgagcgcaacgtttgtgggcatcacctatgccctgaccgttgtgtggctcctggtgtttgcctgctctgctgtgcctgtgtacatttacttcaacacctggaccacctgccagtctattgccttccccagcaagacctctgccagtataggcagtctctgtgctgatgccagaatgtatggtgttctcccatggaatgctttccctggcaaggtttgtggctccaaccttctgtccatctgcaaaacagctgagttccaaatgaccttccacctgtttattgctgcatttgtgggggctgcagctac

SEQ ID NO: 16014 - DNA, 861 bp, Homo sapiens
  source 1..861: mol_type = unassigned DNA
tttacaccttatctgcccaaaaacatcctctgaagcctctctaacccagggatcctcctcactcttcccctacccattccccccaccctccgttatactggggccagttatctagtagatactgccaattacccttggcagaggtgccctgctcactaatttcatttgaaggagagccctggaacctggttttaatgtctggcacacgccactccaggatctcccagtttgtgtttctacatctgcaggctgatgctgatttctaaccaccccatgtcaatcattttagtttgtgggcatcacctatgccctgaccgttgtgtggctcctggtgtttgcctgctctgctgtgcctgtgtacatttacttcaacacctggaccacctgccagtctattgccttccccagcaagacctctgccagtataggcagtctctgtgctgatgccagaatgtatggtgttctcccatggaatgctttccctggcaaggtttgtggctccaaccttctgtccatctgcaaaacagctgagttccaaatgaccttccacctgtttattgctgcatttgtgggggctgcagctacactggtttccctgctcaccttcatgattgctgccacttacaactttgccgtccttaaactcatgggccgaggcaccaagttctgatcccccgtagaaatccccctttctctaatagcgaggctctaaccacacagcctacaatgctgcgtctcccatcttaactctttgcctttgccaccaactggccctcttcttacttgatgagtgtaacaagaaaggagagtcttgcagtgattaaggtctctctttggactctcccctcttatgtacctctt

SEQ ID NO: 16015 - DNA, 566 bp, Homo sapiens
  source 1..566: mol_type = unassigned DNA
ttgtgggcatcacctatgccctgaccgttgtgtggctcctggtgtttgcctgctctgctgtgcctgtgtacatttacttcaacacctggaccacctgccagtctattgccttccccagcaagacctctgccagtataggcagtctctgtgctgatgccagaatgtatggtgttctcccatggaatgctttccctggcaaggtttgtggctccaaccttctgtccatctgcaaaacagctgaggtgagtgggttatttgggttattttacaagggagtagctaataccatacaaattacacccatggccttcaattttaaggactgaaagtttccctttgctggattttgaattagccgattgccttctacaacatgttggctaagtgtgcctgagccaatgagcatagaaggtaaaacacctgttttctctagagttgcatagaaagacttcctttccaacccttcccctcttaaaagagaagtttgtagctttaggtaaagatagagcctaatggcaaaatcccccacatgaaaattttcattcctttagttaaaaaccatatca

SEQ ID NO: 16016 - DNA, 548 bp, Homo sapiens
  source 1..548: mol_type = unassigned DNA
aaatgagaggtaaaataagtacatttgaaagggaaagcactgtattgagaacagatattatatacaaatgaggcaggggaataaaagtaaatccgggggagacaggcagtaaattatttctttgacagcaaaatgttgactttaaattttgggcccctgggcacaactgtagggaaccagttaattattttggagtactgtactatttcatgactattctgtgatctgggtgttaatgggccaggtgctatggtgtacactgaagactgggaggcccacatttagggaagtgaaaacttagttagagatgtggaattagcacacaagaaagatatcaacacattcagaaagctgtattcatgatttacagtggagcatattactgctgttgcaagaaacagttcttcctctttcattttcctgcagttccaaatgaccttccacctgtttattgctgcatttgtgggggctgcagctacactggtttccctgctcaccttcatgattgctgccacttacaactttgccgtccttaaactcatgggccg

SEQ ID NO: 16017 - DNA, 3132 bp, Homo sapiens
  source 1..3132: mol_type = unassigned DNA
atggcttctcacgcttgtgctgcatatcccacaccaattagacccaaggatcagttggaagtttccaggacatcttcattttatttccaccctcaatccacatttccagatgtctctgcagcaaagcgaaattccaggagaagaggacaaagatactcagagagaaaaagtaaaagaccgaagaaggaggctggagagaccaggatccttccagctgaacaaagtcagccacaaagcagactagccagccggctacaattggagtcagagtcccaaagacatgggcttgttagagtgctgtgcaagatgtctggtaggggccccctttgcttccctggtggccactggattgtgtttctttggggtggcactgttctgtggctgtggacatgaagccctcactggcacagaaaagctaattgagacctatttctccaaaaactaccaagactatgagtatctcatcaatgtgatccatgccttccagtatgtcatctatggaactgcctctttcttcttcctttatggggccctcctgctggctgagggcttctacaccaccggcgcagtcaggcagatctttggcgactacaagaccaccatctgcggcaagggcctgagcgcaacggtaacagggggccagaaggggaggggttccagaggccaacatcaagctcattctttggagcgggtgtgtcattgtttgggaaaatggctaggacatcccgacaagtttgtgggcatcacctatgccctgaccgttgtgtggctcctggtgtttgcctgctctgctgtgcctgtgtacatttacttcaacacctggaccacctgccagtctattgccttccccagcaagacctctgccagtataggcagtctctgtgctgatgccagaatgtatggtgttctcccatggaatgctttccctggcaaggtttgtggctccaaccttctgtccatctgcaaaacagctgagttccaaatgaccttccacctgtttattgctgcatttgtgggggctgcagctacactggtttccctgctcaccttcatgattgctgccacttacaactttgccgtccttaaactcatgggccgaggcaccaagttctgatcccccgtagaaatccccctttctctaatagcgaggctctaaccacacagcctacaatgctgcgtctcccatcttaactctttgcctttgccaccaactggccctcttcttacttgatgagtgtaacaagaaaggagagtcttgcagtgattaaggtctctctttggactctcccctcttatgtacctcttttagtcattttgcttcatagctggttcctgctagaaatgggaaatgcctaagaagatgacttcccaactgcaagtcacaaaggaatggaggctctaattgaattttcaagcatctcctgaggatcagaaagtaatttcttctcaaagggtacttccactgatggaaacaaagtggaaggaaagatgctcaggtacagagaaggaatgtctttggtcctcttgccatctataggggccaaatatattctctttggtgtacaaaatggaattcattctggtctctctattaccactgaagatagaagaaaaaagaatgtcagaaaaacaataagagcgtttgcccaaatctgcctattgcagctgggagaagggggtcaaagcaaggatctttcacccacagaaagagagcactgaccccgatggcgatggactactgaagccctaactcagccaaccttacttacagcataagggagcgtagaatctgtgtagacgaagggggcatctggccttacacctcgttagggaagagaaacagggtgttgtcagcatcttctcactcccttctccttgataacagctaccatgacaaccctgtggtttccaaggagctgagaatagaaggaaactagcttacatgagaacagactggcctgaggagcagcagttgctggtggctaatggtgtaacctgagatggccctctggtagacacaggatagataactctttggatagcatgtctttttttctgttaattagttgtgtactctggcctctgtcatatcttcacaatggtgctcatttcatggggtattatccattcagtcatcgtaggtgatttgaaggtcttgatttgttttagaatgatgcacatttcatgtattccagtttgtttattacttatttggggttgcatcagaaatgtctggagaataattctttgattatgactgttttttaaactaggaaaattggacattaagcatcacaaatgatattaaaaattggctagttgaatctattgggattttctacaagtattctgcctttgcagaaacagatttggtgaatttgaatctcaatttgagtaatctgatcgttctttctagctaatggaaaatgattttacttagcaatgttatcttggtgtgttaagagttaggtttaacataaaggttattttctcctgatatagatcacataacagaatgcaccagtcatcagctattcagttggtaagcttccaggaaaaaggacaggcagaaagagtttgagacctgaatagctcccagatttcagtcttttcctgtttttgttaactttgggttaaaaaaaaaaaaagtctgattggttttaattgaaggaaagatttgtactacagttcttttgttgtaaagagttgtgttgttcttttcccccaaagtggtttcagcaatatttaaggagatgtaagagctttacaaaaagacacttgatacttgttttcaaaccagtatacaagataagcttccaggctgcatagaaggaggagagggaaaatgttttgtaagaaaccaatcaagataaaggacagtgaagtaatccgtaccttgtgttttgttttgatttaataacataacaaataaccaacccttccctgaaaacctcacatgcatacatacacatatatacacacacaaagagagttaatcaactgaaagtgtttccttcatttctgatatagaattgcaattttaacacacataaaggataaacttttagaaacttatcttacaaagtgtattttataaaattaaagaaaataaaattaagaatgttctcaatc

SEQ ID NO: 16018 - DNA, 1397 bp, Homo sapiens
  source 1..1397: mol_type = unassigned DNA
ctcgtccctccgaggaccctggaggcggggacctcgcgtgaggaccagacctccctccgcgccccgcactgcgcgcgccctcccaggctcgggggtccccgcgtcccaggcccagggggatgggggtcgcgagaggcccggggagccggggccagcatcccccgccccggcagcaggaagtctgtgcggaggggccgcgcgcgcgcctccatcccgccccgcctggcctgggagcctccctgcccttcgctatcctgacgctggtgaacgccccgtacaagcgaggattttactgcggggatgactccatccggtacccctaccgtccagataccatcacccacgggctcatggctggggtcaccatcacggccaccgtcatccttgtctcggccggggaagcctacctggtgtacacagaccggctctattctcgctcggacttcaacaactacgtggctgctgtatacaaggtgctggggaccttcctgtttggggctgccgtgagccagtctctgacagacctggccaagtacatgattgggcgtctgaggcccaacttcctagccgtctgcgaccccgactggagccgggtcaactgctcggtctatgtgcagctggagaaggtgtgcaggggaaaccctgctgatgtcaccgaggccaggttgtctttctactcgggacactcttcctttgggatgtactgcatggtgttcttggcgctgtatgtgcaggcacgactctgttggaagtgggcacggctgctgcgacccacagtccagttcttcctggtggcctttgccctctacgtgggctacacccgcgtgtctgattacaaacaccactggagcgatgtccttgttggcctcctgcagggggcactggtggctgccctcactgtctgctacatctcagacttcttcaaagcccgacccccacagcactgtctgaaggaggaggagctggaacggaagcccagcctgtcactgacgttgaccctgggcgaggctgaccacaaccactatggatacccgcactcctcctcctgaggccggaccccgcccaggcagggagctgctgtgagtccagctgaggcccacccaggtggtccctccagccctggttaggcactgagggctctggacgggctccaggaaccctgggctgatgggagcagtgagcgggctccgctgccccctgccctgcactggaccaggagtctggagatgcctgggtagccctcagcatttggaggggaacctgttcccgtcggtccccaaatatccccttctttttatggggttaaggaagggaccgagagatcagatagttgctgttttgtaaaatgtaatgtatatgtggtttttagtaaaatagggcacctgtttcacaaacgg

SEQ ID NO: 16019 - DNA, 1383 bp, Homo sapiens
  source 1..1383: mol_type = unassigned DNA
cccctcccctcctcacctctcccctcgtgccctccccgcccctcccctcctccccttcccgcccctcccctcctctccgcgcggggcgggctccgcgccacgtgactccgcggccgggccgggacgcgacgggacgcgctgggaccggcgtcgggggtcgcggggaccatgcagcggaggtgggtcttcgtgctgctcgacgtgctgtgcttactggtcgcctccctgcccttcgctatcctgacgctggtgaacgccccgtacaagcgaggattttactgcggggatgactccatccggtacccctaccgtccagataccatcacccacgggctcatggctggggtcaccatcacggccaccgtcatccttgtctcggccggggaagcctacctggtgtacacagaccggctctattctcgctcggacttcaacaactacgtggctgctgtatacaaggtgctggggaccttcctgtttggggctgccgtgagccagtctctgacagacctggccaagtacatgattgggcgtctgaggcccaacttcctagccgtctgcgaccccgactggagccgggtcaactgctcggtctatgtgcagctggagaaggtgtgcaggggaaaccctgctgatgtcaccgaggccaggttgtctttctactcgggacactcttcctttgggatgtactgcatggtgttcttggcgctgtatgtgcaggcacgactctgttggaagtgggcacggctgctgcgacccacagtccagttcttcctggtggcctttgccctctacgtgggctacacccgcgtgtctgattacaaacaccactggagcgatgtccttgttggcctcctgcagggggcactggtggctgccctcactgtctgctacatctcagacttcttcaaagcccgacccccacagcactgtctgaaggaggaggagctggaacggaagcccagcctgtcactgacgttgaccctgggcgaggctgaccacaaccactatggatacccgcactcctcctcctgaggccggaccccgcccaggcagggagctgctgtgagtccagctgaggcccacccaggtggtccctccagccctggttaggcactgagggctctggacgggctccaggaaccctgggctgatgggagcagtgagcgggctccgctgccccctgccctgcactggaccaggagtctggagatgcctgggtagccctcagcatttggaggggaacctgttcccgtcggtccccaaatatccccttctttttatggggttaaggaagggaccgagagatcagatagttgctgttttgtaaaatgtaatgtatatgtggtttttagtaaaatagggcacctgtttcacaaacgg

SEQ ID NO: 16020 - DNA, 1228 bp, Homo sapiens
  source 1..1228: mol_type = unassigned DNA
ggccgggccgggacgcgacgggacgcgctgggaccggcgtcgggggtcgcggggaccatgcagcggagcctccctgcccttcgctatcctgacgctggtgaacgccccgtacaagcgaggattttactgcggggatgactccatccggtacccctaccgtccagataccatcacccacgggctcatggctggggtcaccatcacggccaccgtcatccttgtctcggccggggaagcctacctggtgtacacagaccggctctattctcgctcggacttcaacaactacgtggctgctgtatacaaggtgctggggaccttcctgtttggggctgccgtgagccagtctctgacagacctggccaagtacatgattgggcgtctgaggcccaacttcctagccgtctgcgaccccgactggagccgggtcaactgctcggtctatgtgcagctggagaaggtgtgcaggggaaaccctgctgatgtcaccgaggccaggttgtctttctactcgggacactcttcctttgggatgtactgcatggtgttcttggcgctgtatgtgcaggcacgactctgttggaagtgggcacggctgctgcgacccacagtccagttcttcctggtggcctttgccctctacgtgggctacacccgcgtgtctgattacaaacaccactggagcgatgtccttgttggcctcctgcagggggcactggtggctgccctcactgtctgctacatctcagacttcttcaaagcccgacccccacagcactgtctgaaggaggaggagctggaacggaagcccagcctgtcactgacgttgaccctgggcgaggctgaccacaaccactatggatacccgcactcctcctcctgaggccggaccccgcccaggcagggagctgctgtgagtccagctgaggcccacccaggtggtccctccagccctggttaggcactgagggctctggacgggctccaggaaccctgggctgatgggagcagtgagcgggctccgctgccccctgccctgcactggaccaggagtctggagatgcctgggtagccctcagcatttggaggggaacctgttcccgtcggtccccaaatatccccttctttttatggggttaaggaagggaccgagagatcagatagttgctgttttgtaaaatgtaatgtatatgtggtttttagtaaaatagggcacctgtttcacaaa

SEQ ID NO: 16021 - DNA, 6455 bp, Homo sapiens
  source 1..6455: mol_type = unassigned DNA
gatcgctccagcccaggagtttgtgaccagcctggtcaacatgagacccctgtctctacttttaaaaatttaaaaaaaaaagatattttgggcagagagaagtggctgtgcaaaggtgggtgtttgctgagttagttcaaggagcagaaaggaggctgccaggatgtgaggggcagagcgcctgaggagtttgtgtttgtctgaggggatgcgaaagggagtgttatttgggctgtgaaaaaagctcttccttgctgtctggtgagagtagaggtgggaggcctccaggccaaggcaggtgtgtggggccccaaggcccagctggtgagagaacctcacagctcccaggcttttcttccccaccagcctccctgcccttcgctatcctgacgctggtgaacgccccgtacaagcgaggattttactgcggggatgactccatccggtacccctaccgtccagataccatcacccacgggctcatggctggggtcaccatcacggccaccgtcatccttgtaaggcaggaggggctcagagggactgggtagggggatggggtggggccagctttaccctgggggcctgatgggggggtggcacagccctgccctggaggtctgtgtggggccgggggacacagccttgccctgagtggtacctgtgggtaatagggcccccttcagagtccccagctctccagcagccttggggaggcccgtgcggaggagtgagggcccctgggccgaccgagacccccactggttcctgcggctgctcttgcaggtctcggccggggaagcctacctggtgtacacagaccggctctattctcgctcggacttcaacaactacgtggctgctgtatacaaggtgctggggaccttcctgtttggggctgccgtgagccagtctctgacagacctggccaagtacatgattgggcgtctgaggcccaacttcctagccgtctgcgaccccgactggagccgggtcaactgctcggtctatgtgcagctggagaaggtgtgcaggggaaaccctgctgatgtcaccgaggccaggtgggtgtggaccagcagccttcactcttgtggggaatgggagctgaagaaggccctggagccaaatcatgaagagccagcaggcagctgagactacaggcgtgcgccaccacgcccggctaatttttgtataagttagtgcattcttgtatgtttttgaagttcatccatgttgtaacattctgtcagtttttgctttaagtattttggggttctgttgtttagtacatttacctttgtaattgttatatatttttgaaagattgaccatttcatcatcatagaatgagatatatgagttttgtctcaacaatttttgtcttgatgtctgttttgtctgatattaacatagctattctggttctctttttgttattgtttgcatggaatattttttttttccattcttggactttcaacctgtttatgtctctgactgtaaagtaagtgtcttatacctagcatgaaattgggccatgtttcttaatgtattgtccaatctctgattttttttgagacagaggctcactctgtcacccaggctggagtgcaatgatctgagctcactgcagcctcggactcccaggctcaagccatcttcccacctgagcctcccgagtagctaggactacaggaacgtgccaccacatccagctactgtttattttttttttggtagaaacggggttttgccatattgcccaggctggtcttgaactcctgagctcaagcgatccgcccactttggcctcctaaagtgctgggattacaggtgtatgccaccacatccagccagatctctgactttttttttaatgttttttaaattatatattaatctttttattgaattaaggcatttaatgaaactttgacttttaattggagtgtttatttatattcaatgtaattactgataaggaaggacctctgtcatttcgttgaggtttgcttaggttatatcttcttttttcaattcctcattactgtctttttttgtttgtttgttttgcttttaattttttttttcttttagagatgggggtcttgctatcttgcccaggacttgaactcctgggctcaaaccatcctcccacctctgccttccaagtagctggtactacgggcatacaccaccaaatccagctggtttttaaatttttttgtagaaatagggtctcaccatgttgcccaggctggtctcgaatgcctgggctcaagcaatcctctcgcctcagcctcccaaagtgctgggattagaggtgtgagccactgagcccgttcagggtaaataatcttttttttttttcttttttttttttgagacagagtctgggcccaggctggagtgcggtggtgcaatcttggctcactgcaacctccatctcctgggttcaagtgcttctcctgcctcagcctccccagtagctgggattacaggtgtgcgccaccacgcccggctaatttttgtattttcatttacttttattaattttattttttgagacagaatgttgttctgtcacccaggctggagtgcagtgtgcagtggtgtgatcttggctcactgcaacctctgcctcctgggttcaagcgattctcctacctcagattcctgagtagctaggactacaggcgtgcaccaccacgcccgactaactttttgtatttttagtagagatggggtttcatcatgttggccaggctggtctcgaactcctgatctcaggtgatccacccaccctggcctcccaaagtgctgggattacaggcgtgagccaccatgcctggccaggctgaataatcttttttttttttctttttttcggccaggctgaataatgttttttttctccttttcttttttttttttttgagaaagagtctcactgtgtcgcccaggctggagtgcggtgacgtgatcttgtctcactacagcctctgcctcctcggtttaagcaattctcctgcctcagcctcctgagtagcaggcgtgagccaccacacctggccccagccgaataatctttttttttttctttgaaacgaagtctctctcttgtcccccaggctggagagcagtggcacgatctcggctcactgtaacctctgcctcccgggttcaagagattctctgcctcagcctgccgagtaactgggattacaagtgtgtaccactatgcccagctaattttttgtattaagtagagacggggtttcaccatgttggctaggctggtctcgaactcctgacctcaggtgatccacccgcctcggcctcccaaagtgctgggattacaggctgagccaccgtgccaggccaaataatcttaattgacctattttctttgtttttttgagttggagtcttgctctgtctcccaggctggagtgcagtggcataatctcagctcactgcaacctctgcctcctgggttcaagcgattctcctgcctcagcctcacgagtagctgggattacaggcgtgtgcctctgcgcccagctaatttttgtatttttagtagagacggggtttcgccatgttggccaggctggtctcgaactcccgacctttgtgatctgcccgtctctgcctcccaaagtgctgggatgacaggtgtgagccgctgtgcccggccaattgacctattttcaagttcattgtcttttttcttctgcttcctcagacctgctattgagcctccctcaagtgatttttcatttcagataaccaaatctttatttggttcctttttataacttctttctctttattgatattctctgtttggtgagacattgttctcatattcctttggctctttgaacatagtatttatttatttttacttttttctttgaacatattttaaatggctaactaaaagtgtttgtctagaacccaggcttggtggcacacaactgttgtcacagctatttgggagggtgaggcaggaggatcgctggagcccagaagttcaagtcaggccctctcttagaaagtgtctagtaagtccaacatctgggtgtcctgagggacaatttctattattacatttttttccctgtgtattggccacacctgtgtttttctacatgccttgtaattttttttttttttttgagacagagtctcaccctattgccaggttggagtgcagtggcgatctcggctcactgcaacctccacctcccaagttcaagcaaatctcctgcctcagcctcccaagtagctgggactacaggcatgtgctaccacacccagctaatttttgtatttttggtacagacggcgtttcaccgtgtgggccaggatggtctcggtctcttgacctcgtgatccgcctgcctcggcctcccaaagtcctgggattacaggagtgagccaccgcacccccggcctgttttgctttgttttaaactgggtgtttagaatattataatgtagcaactctggaaatatgatcctacgccctctcccgggtttgttcttgctgtttgttgcagtagttatttgtttaatgacttttctggttgtaaagtctgtattttttgtcacgtatggccgtttcttcctattcttttagcccagtggtcagtgataggacagagatttccttaaacatctggaatcaaaaaaacccataaaaccctcccagagtttgtagaagggtctgtgtgcatgtggggtcagcccttccgcggttaaacacattttcaactctgccttagcttttgcttcctgtgtgtgcggagcctgaaggcggccagacgtgagagcttagcttcggccctcgcaggcctctcctgagctcctgcacagctctgtctgcgttccaggcccccatcgcccagagcattttattccctggcctgtttggttagtctgttgtttgcctcatctgctgtctgtggccccaggcagcagagaataataaatttgttgtgaatgtttcctacaaatatcccccaggtagcacctcagcactgggagaatgtccagtcaggtgagatcaaggccagcccttgagccatactcccgtccacagttgcaaataaagtctgttcttggaatcctcaggccaccaccagtctaggcagtgggagagggaccaggatgagttaaaatgcgacaaggccgtttgttctgagattcagctggtttatcttgataagtcttctggtggctgcaagcttttgagtagttccaaaaaagttgattgtgacttttttgccatttttaaaaattgcttttgaagtttcttgctctgctattttcttgatgtccttcaccgaatcttgaatttatataaaaataagtcttccctcagttccgcagatgggagaaaatcctgaaaagaaacatggtgaaaatgaaactgtggtgttgcctgcttgccagacatgattgtctgccctgggttttgggttcaggcctcagagtcttcacggatgaggcatctcatgccacagccccagtcagagactcttattccattatcagatgactggaacagaaaaggggaacagtttctgctactgggatttgagtgcatctaacagcagcagcctccgtgtcgagccctcccttctgtgggcggggcggggacaagggggaggttggaaggcgctgagtgagccacctgccccttctccttcctcaggttgtctttctactcgggacactcttcctttgggatgtactgcatggtgttcttggcgctgtatgtgcaggcacgactctgttggaagtgggcacggctgctgcgacccacagtccagttcttcctggtggcctttgccctctacgtgggctacacccgcgtgtctgattacaaacaccactggagcgatgtccttgttggcctcctgcagggggcactggtggctgccctcactgtctgctacatctcagacttcttcaaagcccgacccccacagcactgtctgaaggaggaggagctggaacggaagcccagcctgtcactgacgttgaccctgggcgaggctgaccacaaccactatggatacccgcactcctcctcctgaggccggaccccgcccaggcagggagctgctgtgagtccagctgaggcccacccaggtggtccctccagccctggttaggcactgagggctctggacgggctccaggaaccctgggctgatgggagcagtgagcgggctccgctgccccctgccctgcactggaccaggagtctggagatgcctgggtagccctcagcatttggaggggaacctgttcccgtcggtccccaaatatccccttctttttatggggttaaggaagggaccgagagatcagatagttgctgttttgtaaaatgtaatgtatatgtggtttttagtaaaatagggcacctgtttcac

SEQ ID NO: 16022 - DNA, 850 bp, Homo sapiens
  source 1..850: mol_type = unassigned DNA
tccgcggccgggccgggacgcgacgggacgcgctgggaccggcgtcgggggtcgcggggaccatgcagcggaggtgggtcttcgtgctgctcgacgtgctgtgcttactgcctccctgcccttcgctatcctgacgctggtgaacgccccgtacaagcgaggattttactgcggggatgactccatccggtacccctaccgtccagataccatcacccacgggctcatggctggggtcaccatcacggccaccgtcatccttgtctcggccggggaagcctacctggtgtacacagaccggctctattctcgctcggacttcaacaactacgtggctgctgtatacaaggtgctggggaccttcctgtttggggctgccgtgagccagtctctgacagacctggccaagtacatgattgggcgtctgaggcccaacttcctagccgtctgcgaccccgactggagccgggtcaactgctcggtctatgtgcagctggagaaggtgtgcaggggaaaccctgctgatgtcaccgaggccaggttgtctttctactcgggacactcttcctttgggatgtactgcatggtgttcttggcgctgtatgtgcaggcacgactctgttggaagtgggcacggctgctgcgacccacagtccagttcttcctggtggcctttgccctctacgtgggctacacccgcgtgtctgattacaaacaccactggagcgatgtccttgttggcctcctgcagggggcactggtggctgccctcactgtctgctacatctcagacttcttcaaagcccgacccccacagcactgtctgaaggaggaggagctggaacggaag

SEQ ID NO: 16023 - DNA, 541 bp, Homo sapiens
  source 1..541: mol_type = unassigned DNA
ccgtgagccagtctctgacagacctggccaagtacatgattgggcgtctgaggcccaacttcctagccgtctgcgaccccgactggagccgggtcaactgctcggtctatgtgcagctggagaaggtgtgcaggggaaaccctgctgatgtcaccgaggccaggttgtctttctactcgggacactcttcctttgggatgtactgcatggtgttcttggcgctgtatgtgcaggcacgactctgttggaagtgggcacggctgctgcgacccacagtccagttcttcctggtggcctttgccctctacgtgggctacacccgcgtgtctgattacaaacaccactggagcgatgtccttgttggcctcctgcagggggcactggtggctgccctcactgtgagcttctaaccctaactctatcccctgtgttgtccagagaccactccccagccaaccctagtgctgccctgggtacccttgccccactgagtccttccttgggcctcctccctgtcagtcctccctgggaccccttcccc

SEQ ID NO: 16024 - DNA, 581 bp, Homo sapiens
  source 1..581: mol_type = unassigned DNA
gacgcgacgggacgcgctgggaccggcgtcgggggtcgcggggaccatgcagcggaggtgggtcttcgtgctgctcgacgtgctgtgcttactggtcggcttttcttccccaccagcctccctgcccttcgctatcctgacgctggtgaacgccccgtacaagcgaggattttactgcggggatgactccatccggtacccctaccgtccagataccatcacccacgggctcatggctggggtcaccatcacggccaccgtcatccttgtctcggccggggaagcctacctggtgtacacagaccggctctattctcgctcggacttcaacaactacgtggctgctgtatacaaggtgctggggaccttcctgtttggggctgccgtgagccagtctctgacagacctggccaagtacatgattgggcgtctgaggcccaacttcctagccgtctgcgaccccgactggagccgggtcaactgctcggtctatgtgcagctggagaaggtgtgcaggggaaaccctgctgatgtcaccgaggccaggttgtctttctactcgggacactcttcctttggga

SEQ ID NO: 16025 - DNA, 687 bp, Homo sapiens
  source 1..687: mol_type = unassigned DNA
ggatcgctccagcccaggagtttgtgaccagcctggtcaacatgagacccctgtctctacttttaaaaatttaaaaaaaaaagatattttgggcagagagaagtggctgtgcaaaggtgggtgtttgctgagttagttcaaggagcagaaaggaggctgccaggatgtgaggggcagagcgcctgaggagtttgtgtttgtctgaggggatgcgaaagggagtgttatttgggctgtgaaaaaagctcttccttgctgtctggtgagagtagaggtgggaggcctccaggccaaggcaggtgtgtggggccccaaggcccagctggtgagagaacctcacagctcccaggcttttcttccccaccagcctccctgcccttcgctatcctgacgctggtgaacgccccgtacaagcgaggattttactgcggggatgactccatccggtacccctaccgtccagataccatcacccacgggctcatggctggggtcaccatcacggccaccgtcatccttgtctcggccggggaagcctacctggtgtacacagaccggctctattctcgctcggacttcaacaactacgtggctgctgtatacaaggtgctggggaccttcctgtttggggctgccgtgagccagtctctgacagacctggccaagtacatgattgggcgtctgagg

SEQ ID NO: 16026 - DNA, 3292 bp, Homo sapiens
  source 1..3292: mol_type = unassigned DNA
agtgcagaaaacaaacccaggcgatcacagcagcagccgccgcggcagcagcaccaacagcaggaggagcaggaggagccggaggaggaggaggaggaggaggcaaagttagagttggggctggcgctccggagttgctgggctcagcgcagctcccattcattaaggaaccagctgcggaggaaggtggccgagcgcccgcgctgcccactcgctcgctcgcgcactcagacgcgcgccacaacagcgcgccccaagctgcgcagctctgcaaaagtttctgctcgggatctggctctcttccccttggactttagaacgatttagggttgacagaggaaagcagaggcgcgcaggaggagcagaaaacaccaccttctgcagttggaggcaggcagccccggctgcactctagccgccgcgcccggagccggggccgacccgccactatccgcagcagcctcggccaggaggcgacccgggcgcctgggtgtgtggctgctgttgcgggacgtcttcgcggggcgggaggctcgcgccgcagccagcgccatgcaaaactacaagtacgacaaagcgatcgtcccggagagcaagaacggcggcagcccggcgctcaacaacaacccgaggaggagcggcagcaagcgggtgctgctcatctgcctcgacctcttctgcctcttcatggcgggcctccccttcctcatcatcgagacaagcaccatcaagccttaccaccgagggttttactgcaatgatgagagcatcaagtacccactgaaaactggtgagacaataaatgacgctgtgctctgtgccgtggggatcgtcattgccatcctcgcgatcatcacgggggaattctaccggatctattacctgaagaagtcgcggtcgacgattcagaacccctacgtggcagcactctataagcaagtgggctgcttcctctttggctgtgccatcagccagtctttcacagacattgccaaagtgtccatagggcgcctgcgtcctcacttcttgagtgtctgcaaccctgatttcagccagatcaactgctctgaaggctacattcagaactacagatgcagaggtgatgacagcaaagtccaggaagccaggaagtccttcttctctggccatgcctccttctccatgtacactatgctgtatttggtgctatacctgcaggcccgcttcacttggcgaggagcccgcctgctccggcccctcctgcagttcaccttgatcatgatggccttctacacgggactgtctcgcgtatcagaccacaagcaccatcccagtgatgttctggcaggatttgctcaaggagccctggtggcctgctgcatagttttcttcgtgtctgacctcttcaagactaagacgacgctctccctgcctgcccctgctatccggaaggaaatcctttcacctgtggacattattgacaggaacaatcaccacaacatgatgtaggtgccacccacctcctgagctgtttttgtaaaatgactgctgacagcaagttcttgctgctctccaatctcatcagacagtagaatgtagggaaaaacttttgcccgactgatttttaaaaaggaaaaaaaaaatgttttactatgtggccttccaaaataggtagtgtttgcctatgtggaaacaacagcaaactaacaccaagtgccagagtcctggatgtgcaattggtttaagtgttcatgttctagtgaacacagcttgttcaggaacaaacactaaaacgatttgagtagaggctgctggtcaccttttgtgacctgaggaatcccaggcctgtgagaaaagcaaaaattcacattgcagcacatgatgccagaaatagcactgaatcaagaaaatagccattgcggagctgccctcttgagtctttctgtccatcccattctattctgtactgtgactttagttcaggaagttttgttttgtgttttaaataaaaggaaagagcaagtttgctcagtcaagtgatcagatcccgaatctagattcccagttctaaggccttatcacctcccctgcccataggccaacaaccatagttcctcacattagtgattagcagactctttgtggacgagtgaatttcacaaacagcacaatttcagaagaaatcgagggcacaggccctcacttttcttcttttgacgcatcatcctgtgatgttgaaatgtcaattgcaggatgctgatgttgtgcacgtcaatcaccgggcacttgcatactcttagaaacagttcgacttcggttactgccttctcccttgaaatccttgctgcgtgcccaccaggatttcctgtgagggcccaggaatgagcaaggcatggtctgccaccagctgacggaaagcagccttctgtacaacagatgggagggtgaagggggcagaatgaaaatcgaaccaaccttttagctgttgcaaatcagaaggagccagagaagcaggcagtctcatgcatgagaggttacccttcaggatgacagagctgagggtctttgtaggagttgctcttgctgtgtaaagcactattgtcttggggttgagccctagggcagttcttggtaggttctgctgggcagaacatatgggttaaatctcggtagagagtttccctcatcctctatccgtaagtgtccttccatgcaaggtcccactctaggtgatagacagggaccccttctactgaacctttgaggaaaggaggaaggaagaaatgcgtttagatcttggatgcagacctttcaaagggttaaatgtaaccatatggatcaaccacatgcacatccttactacagaatccgtcctttcatttcaacttatagcaagctatgatttttatatataaatattatataaataatgtataaaacattaaaagttaactatgtaagatattatttctgaaacaatttagctatatccactatgattataaactgtgtctcgacctgtgttatttacattagctgcttaaaaaagcattgagttaatttttttaaatatcaactaaaatatcatagttctgtggtagacattgttttataatgaaataactgcaactagagaaaactgtataaaaacattaaattgtcagtatttttgtaaggttccattttgtaaagagaataatattcaaagacttttgtagcatacaaagtgaaaacttgtatctgcgaaactatacttgtattaaatgtgctttttaaataaaagctcgtaacacaactaattaaggacttgcaa

SEQ ID NO: 16027 - DNA, 696 bp, Homo sapiens
  source 1..696: mol_type = unassigned DNA
agaccagaggaacagcctcaagttcagtcggacctttctaaggaggttttgttggaattccacaagaccctagttctgaaggtaggacaaagaaggagaagagaactgcactgacagactatacctgcaggcccgcttcacttggcgaggagcccgcctgctccggcccctcctgcagttcaccttgatcatgatggccttctacacgggactgtctcgcgtatcagaccacaagcaccatcccagtgatgttctggcaggatttgctcaaggagccctggtggcctgctgcatagttttcttcgtgtctgacctcttcaagactaagacgacgctctccctgcctgcccctgctatccggaaggaaatcctttcacctgtggacattattgacaggaacaatcaccacaacatgatgtaggtgccacccacctcctgagctgtttttgtaaaatgactgctgacagcaagttcttgctgctctccaatctcatcagacagtagaatgtagggaaaaacttttgcccgactgatttttaaaaaggaaaaaaaaaatgttttactatgtggccttccaaaataggtagtgtttgcctatgtggaaacaacagcaaactaacaccaagtgccagagtcctggatgtgcaattggtttaagtgttcatgttctagtgaacacagcttgttcaggaacaa

SEQ ID NO: 16028 - DNA, 2039 bp, Homo sapiens
  source 1..2039: mol_type = unassigned DNA
gtttagcaggcaacggcctcagtgtgatcttttttgtcagtattcttattttttcctcttaagtttttccaataatacatttttataatttcaaaatgattataaagtagtctgctgtcttccatgtctgcttatttgaaatagtgttccacgtagttgaggattcagtcctagacacttatggctaagaatgattctgggatcttccactcttctgtctcatcaagactggccactggcttgctcttttcttgccaccgaaggaaggtgtccatctgtcccaggaaggacaaactcatgtcttcagcactgccacaggtctatctttaggccatcagccacctcccctccgctctcttcccttctcctgcctctccaagtgctttgatttgtagtcggaagttcctcttgtccacttgcctcttccccctcatttcccaagttcccacaggaacctgggaataggttgtgcccagaggttagaacggaaactgcagcaagataactctgaggggacaatgcccagttgacgtcatttcaactactttgcttcagctagaggtggttttttttttaatcttccatttttcttcaggttactcttctactccaccctgtctagtgtctgtcaacttctatttgaaaattccctggcattgtctcgttggtttattgtttccttatattctcattcaatatccatagttccaagtggtgacttagaaatgtgtccttgatagagttgctttcttctgaagcagaagcatctcattggggatataataacttcctcttatcattgcatatttaatttccgtgctgacaccaggtagtgtagggattatatagccgtaatccccagggaaatacacaaatgtgttaagtaagttgtcatcaattgtaaaaaaagaaacctttacaagccctggttactgctctttaattattagtttcagtcaagaggaagataaaaggaaactatcatttattacgttcctactatgtggcagtgtgctaaggccatttacatatattatattgctcagctttccctggtttatctccctagataaactctatttttcctattttttagtgtgagaactaagactcagcatttatttatttatttacttacttacttacttatttatttttttgaggcagagtctcactctgttgcccagaccgaactgcagtggtgcgatctcggctcactgcgacctccgcctcctgggttcaagtgattttcctgcctcagcctcctgagtagctgggactataggcacatgccatcacacccagataatttttgtatttttattacagatgaggtttcactatgttggccagactggtctcaaacacctgacctcaggtgatctgcccacctcagccacacgaagtgctgggattacagacgtgagccaccgtgcctagccaggctcagcatttaaataactggcttgaggtcatgttcaaattgctgtatctacaacatgccacccaaggtccagatgatccctgttcgtagaaatgtagtgtgtgtcacctggggttatagtgcatgtgagtggggagtcacttaatgtctgttcctttttgtctcctttctccagctatacctgcaggcccgcttcacttggcgaggagcccgcctgctccggcccctcctgcagttcaccttgatcatgatggccttctacacgggactgtctcgcgtatcagaccacaagcaccatcccagtgatgttctggcaggatttgctcaaggagccctggtggcctgctgcatagttttcttcgtgtctgacctcttcaagactaagacgacgctctccctgcctgcccctgctatccggaaggaaatcctttcacctgtggacattattgacaggaacaatcaccacaacatgatgtaggtgccacccacctcctgagctgtttttgtaaaatgactgctgacagcaagttcttgctgctctccaatctcatcagacagtagaatgtagggaaaaacttttgcccgactgattttt

SEQ ID NO: 16029 - DNA, 646 bp, Homo sapiens
  source 1..646: mol_type = unassigned DNA
gggcgagggggcggaccccgagccgcgaggggcgcggggcgggcgcggggtcccgggagagggcgctgggcgcttcgggcccagatcatctttcttgctgacaagtatcatctaggaatcactctacctcgctggcaattttgagaaaatagccagttatttttgtgctgaactttcatctggttaagggtcattccttcagtagtcaagtgagtaagaaaagacctattctgcttttgagcgggcctccccttcctcatcatcgagacaagcaccatcaagccttaccaccgagggttttactgcaatgatgagagcatcaagtacccactgaaaactggtgagacaataaatgacgctgtgctctgtgccgtggggatcgtcattgccatcctcgcgatcatcacgggggaattctaccggatctattacctgaagaagtcgcggtcgacgattcagaacccctacgtggcagcactctataagcaagtgggctgcttcctctttggctgtgccatcagccagtctttcacagacattgccaaagtgtccatagggcgcctgcgtcctcacttcttgagtgtctgcaaccctgatttcagccagatcaactgctctgaaggctacattcagaactacagatgca

SEQ ID NO: 16030 - DNA, 597 bp, Homo sapiens
  source 1..597: mol_type = unassigned DNA
gggcgcggggcgggcgcggggtcccgggagagggcgctgggcgcttcgggcccagatcatctttcttgctgacaagtatcatctaggaatcactctacctcgctggcaattttgagaaaatagccagttatttttgtgctgaactttcatctggttaagggtcattccttcagtagtcaagacctcgtgaaataaaagtgcagaaaacaaacccaggcgatcacagcagcagccgccgcggcagcagcaccaacagcaggaggagcaggaggagccggaggaggaggaggaggaggaggcaaagttagagttggggctggcgctccggagttgctgggctcagcgcagctcccattcattaaggaaccagctgcggaggaaggtggccgagcgcccgcgctgcccactcgctcgctcgcgcactcagacgcgcgccacaacagcgcgccccaagctgcgcagctctgcaaaagtttctgctcgggatctggctctcttccccttggactttagaacgatttagggttgacagaggaaagcagaggcgcgcaggaggagcagaaaacaccaccttctgcagttggaggcaggcagccc

SEQ ID NO: 16031 - DNA, 885 bp, Homo sapiens
  source 1..885: mol_type = unassigned DNA
agggtctggcgagccggcgccggccgagctgcgggagccgcggagagcaccagctgacgccgcgggagctgctccggccgcaccatgcgggagctggccattgagatcggggtgcgagccctgctcttcggagtcttcgtttttacagagtttttggatccgttccagagagtcatccagccagaagagatctggctctataaaaatcctttggtgcaatcagataacatacctacccgcctcatgtttgcaatttctttcctcacacccctggctgttatttgtgtggtgaaaattatccggcgaacagacaagactgaaattaaggaagccttcttagcggtgtccttggctcttgctttgaatggagtctgcacaaacactattaaattaatagtgggaagacctcgccccgatttcttttaccgctgctttccagatggagtgatgaactcggaaatgcattgcacaggtgaccccgatctggtgtccgagggccgcaaaagcttccccagcatccattcctcctttgccttttcgggccttggcttcacgacgttctacttggcgggcaagctgcactgcttcaccgagagtgggcggggaaagagctggcggctctgtgctgccatcctgcccttgtactgcgccatgatgattgccctgtcccgcatgtgcgactacaagcatcactggcaagattcctttgtgggtggagtcatcggcctcatttttgcatacatttgctacagacagcactatcctcctctggccaacacagcttgccataaaccctacgttagtctgcgagtcccagcctcactgaagaaagaggagaggcccacagctgacagcgcacccagcttgcctctggaggggatcacc

SEQ ID NO: 16032 - DNA, 1135 bp, Homo sapiens
  source 1..1135: mol_type = unassigned DNA
atgcatggaattggtccttctggcagttttacagagtttttggatccgttccagagagtcatccagccagaagagatctggctctataaaaatcctttggtgcaatcagataacatacctacccgcctcatgtttgcaatttctttcctcacacccctggctgttatttgtgtggtgaaaattatccggcgaacagacaagactgaaattaaggaagccttcttagcggtgtccttggctcttgctttgaatggagtctgcacaaacactattaaattaatagtgggaagacctcgccccgatttcttttaccgctgctttccagatggagtgatgaactcggaaatgcattgcacaggtgaccccgatctggtgtccgagggccgcaaaagcttccccagcatccattcctcctttgccttttcgggccttggcttcacgacgttctacttggcgggcaagctgcactgcttcaccgagagtgggcggggaaagagctggcggctctgtgctgccatcctgcccttgtactgcgccatgatgattgccctgtcccgcatgtgcgactacaagcatcactggcaagattcctttgtgggtggagtcatcggcctcatttttgcatacatttgctacagacagcactatcctcctctggccaacacagcttgccataaaccctacgttagtctgcgagtcccagcctcactgaagaaagaggagaggcccacagctgacagcgcacccagcttgcctctggaggggatcaccgaaggcccggtatgaccagtgtcctgggaggatggacactaagccctgggcacatctgccaccctgacatcataacacaatagaaatggttttctgtagtgtatttttcatcagttgtttctcaaagtcatcgtacttctgcttctgtttcactgatggtgttcctgctactttaaatgtctacttccaacatccttgaatttgcaagtgaaggacaacaatctctgagagacgtgtggaagaggctgtgaaggtggggtttggggagcttggccgattcgtctatctgaaatgtttgctgtaacagccaccttcctatgttttcatggttgtaaaacataataaaacctcccacgtggaagac

SEQ ID NO: 16033 - DNA, 352 bp, Homo sapiens
  source 1..352: mol_type = unassigned DNA
tcaccgagagtgggcggggaaagagctggcggctctgtgctgccatcctgcccttgtactgcgccatgatgattgccctgtcccgcatgtgcgactacaagcatcactggcaagcagtgggaaggagtcagccaagcaggagaatggctgcgcctatttgctcttgagagaacatcaccagctgctgtgtcccaagtccagttccagagcagcgtactgggcccctggtctacatgcactgaaacttatgctgccatcacggacatgtctaaaataaaagagcttttcttttatttgtacttcttttcctgctttgctattgtggattaataaaattacatgcatgaaatta

SEQ ID NO: 16034 - DNA, 1521 bp, Homo sapiens
  source 1..1521: mol_type = unassigned DNA
cgggcttcccctccccggtccgcgggtgcccggcgcgggcccaggaggcggaggcggctcctggggagagggatccgggagtccctgaggcggccccggctccgcactaggaggcggggtccgcagtatcgccagcggccggcgcggcttcccggagccccggagcccgaggcgcgaggtttaggctgagccctccccggcgcctgcccccgcccggcgcccgcctccgcccccgcccgcggcctggagcgcgcctccctcgcctcccagggtctggcgagccggcgccggccgagctgcgggagccgcggagagcaccagctgacgccgcgggagctgctccggccgcaccatgcgggagctggccattgagatcggggtgcgagccctgctcttcggagtcttcgtttttacagagtttttggatccgttccagagagtcatccagccagaagagatctggctctataaaaatcctttggtgcaatcagataacatacctacccgcctcatgtttgcaatttctttcctcacacccctggctgttatttgtgtggtgaaaattatccggcgaacagacaagactgaaattaaggaagccttcttagcggtgtccttggctcttgctttgaatggagtctgcacaaacactattaaattaatagtgggaagacctcgccccgatttcttttaccgctgctttccagatggagtgatgaactcggaaatgcattgcacaggtgaccccgatctggtgtccgagggccgcaaaagcttccccagcatccattcctcctttgccttttcgggccttggcttcacgacgttctacttggcgggcaagctgcactgcttcaccgagagtgggcggggaaagagctggcggctctgtgctgccatcctgcccttgtactgcgccatgatgattgccctgtcccgcatgtgcgactacaagcatcactggcaagattcctttgtgggtggagtcatcggcctcatttttgcatacatttgctacagacagcactatcctcctctggccaacacagcttgccataaaccctacgttagtctgcgagtcccagcctcactgaagaaagaggagaggcccacagctgacagcgcacccagcttgcctctggaggggatcaccgaaggcccggtatgaccagtgtcctgggaggatggacactaagccctgggcacatctgccaccctgacatcataacacaatagaaatggttttctgtagtgtatttttcatcagttgtttctcaaagtcatcgtacttctgcttctgtttcactgatggtgttcctgctactttaaatgtctacttccaacatccttgaatttgcaagtgaaggacaacaatctctgagagacgtgtggaagaggctgtgaaggtggggtttggggagcttggccgattcgtctatctgaaatgtttgctgtaacagccaccttcctatgttttcatggttgtaaaacataataaaacctcccacgtggaagacttgg

SEQ ID NO: 16035 - DNA, 2495 bp, Homo sapiens
  source 1..2495: mol_type = unassigned DNA
ctccgccccctccgcgccagccttttgctctttcctttcattaaacaaacaggagatcctgaaacctggaccctgtgcaagctgcagcgccaggaggaggcagcggaggaagcagagcgcgggatgggcgcccagcggcatctgtgatcccgcgcacctccgccccacgggcgcgcgcacaaacacggacacacacatacacacactcgcgcacacactcgcacaaacacacactcgtacacgcccgcgccgctcgctcgccggcttgctctcccacgcaagcggaatgcagcagcgcctggagagcgtgtctcggaccgccgcctgaatgtacctcgctcccgggagccggacggcccagtagggcgcactggaggacgctccgctgcgggagcctggacagtttttgacggtgcagtcttgctatatggtgtgagaaatggctgtaggaaacaacactcaacgaagttattccatcatcccgtgttttatatttgttgagcttgtcatcatggctgggacagtgctgcttgcctactacttcgaatgcactgacacttttcaggtgcatatccaaggattcttctgtcaggacggagacttaatgaagccttacccagggacagaggaagaaagcttcatcacccctctggtgctctattgtgtgctggctgccaccccaactgctattatttttattggtgagatatccatgtatttcataaaatcaacaagagaatccctgattgctcaggagaaaacaattctgaccggagaatgctgttacctgaaccccttacttcgaaggatcataagattcacaggggtgtttgcatttggactttttgctactgacatttttgtaaacgccggacaagtggtcactgggcacttaacgccatacttcctgactgtgtgcaagccaaactacaccagtgcagactgccaagcgcaccaccagtttataaacaatgggaacatttgtactggggacctggaagtgatagaaaaggctcggagatcctttccctccaaacacgctgctctgagcatttactccgccttatatgccacgatgtatattacaagcacaatcaagacgaagagcagtcgactggccaagccggtgctgtgcctcggaactctctgcacagccttcctgacaggcctcaaccgggtctctgagtatcggaaccactgctcggacgtgattgctggtttcatcctgggcactgcagtggccctgtttctgggaatgtgtgtggttcataactttaaaggaacgcaaggatctccttccaaacccaagcctgaggatccccgtggagtacccctaatggctttcccaaggatagaaagccctctggaaaccttaagtgcacagaatcactctgcgtccatgaccgaagttacctgagacgactgatgtgtcacaagctgttttttaaaatcatcttccaattctatacttcaaaacacacagttgctcaatgtcaaactgtgatgacaaatattacgtttatctagttagaagctaatgttttgtacattttttgtatgaggaagtgatgtagcttgccctgattttttttttttttttttggtcagctttaatatatttatgccagaattttaaaaccaacaaaattttcttgttcaagcgtgcattgaagaaccacatttattcaatggttgacgttgttttgtgatatttgtacacaaattttcttttctcagttttataaacacagaatataacaattcactttaaacttttattaccacagttgctgcctcctccagaatttttgaattttaataaaaggcaaacttttgagctgcaggaaggacaatgttggttaataataaatctcaaagtcaattgtagaaaaaaaattgtcttcaaaaagaatgttgcactctgatctcttaacaaattgttacgttcaaagtttaaagtgatatattaacaaagtcacctagttatacaaacaattgtcagagaattctggatttggagggtattggggttatatgattctttcttagataatggcctctactaaataactcaagatctttctggaatgtcttctggcaggcaggtgccactgtcagcttttctccaaaaagcagccaacatcagcctcccctgtcaactcaacagttttgtatctcatattatatggactttatatgaaaatgaatattttacagtttgcacagtattattttacagaaaaggaatcagagaatctacaacatagggccccagaacaacagtttcactttgtggcttttaattattctagaattttaactgcatctcatttttctagcatggtgagaactaatatgtaactcctttgattgaaggagctcttttgtccgtacctatcagaatgttttcttgacacttccatgttggctcttctcagctttttttgtacatattttttttttctaaagagaagaaaaagttatcacaaaatgta

SEQ ID NO: 16036 - DNA, 472 bp, Homo sapiens
  source 1..472: mol_type = unassigned DNA
cagaaagtgagccagatggagctggaatgtagaggactcgtcgtgagcggggagcccacttggtcagctcagtgaaggctctccctcagacgccaacatctacatgcggatatggaagcctggacagtttttgacggtgcagtcttgctatatggtgtgagaaatggctgtaggaaacaacactcaacgaagttattccatcatcccgtgttttatatttgttgagcttgtcatcatggctgggacagtgctgcttgcctactacttcgaatgcactgacacttttcaggtgcatatccaaggattcttctgtcaggacggagacttaatgaagccttacccagggacagaggaagaaagcttcatcacccctctggtgctctattgtgtgctggctgccaccccaactgctattatttttattggtgagatatccatgtatttcataaaatcaacaagagaatccctgatt

SEQ ID NO: 16037 - DNA, 1086 bp, Homo sapiens
  source 1..1086: mol_type = unassigned DNA
aattctctaggttgcaaattgggaggattaggaacaagtaagagagatccatgcaggatggacaagaaaaaaaagttttataccaaaaattgtatttcatggcattagggcagtctactggggtaaggcactatgcagtactaggcaattagaattctattcactagctatgtgcacaagcggctcctgacctggtcattttggctgtaaaactattcatgcctggacagtttttgacggtgcagtcttgctatatggtgtgagaaatggctgtaggaaacaacactcaacgaagttattccatcatcccgtgttttatatttgttgaggaggaagcaaccctcaaagtgagatgtttaatttattgctggaagctgtagtctccgaagattttcagctctctaatgtgtgaatgaagagcttggccggtggagcagcaacaaaggagataaattagttcttctgtagcttaccctgacacaaacataaatagaagtctaaaaatctgggagaggaaagatggtttattctttttcttgttgtattgttgttcttattttgcatggaaattctcttagaactgtcttagaaataggcaggcaaaagggaagggaagtaggacacagaagacattgagtgggaaggaggtgaatctcaaagtggctctcatgattctcatgtatttcattcaccaaacacttattgtttacctatattattccaggtactataacaaggatatcacaaaacttggtaaaaaatgtcaacttgaccaatgaatatcttttcactgtttttttaattatgaaagaatttaatcacagaaaataactgacatccctgcacctaccatcaagacaaaatcttaaagttttgtcatatttgcttcaaatatttttgtcaaggaaaataaaatgttacagatatggccaaaatcctattgtcctgaagccagaagtcattatatgtatgaagtttggggcttcttttccctacatgtttcccatgcatggtttatattttcctacatatgtatatattcataaatattttaggaaaattttacataaatgacactatgctgaa

SEQ ID NO: 16038 - DNA, 2318 bp, Homo sapiens
  source 1..2318: mol_type = unassigned DNA
aattctctaggttgcaaattgggaggattaggaacaagtaagagagatccatgcaggatggacaagaaaaaaaagttttataccaaaaattgtatttcatggcattagggcagtctactggggtaaggcactatgcagtactaggcaattagaattctattcactagctatgtgcacaagcggctcctgacctggtcattttggctgtaaaactattcatgcctggacagtttttgacggtgcagtcttgctatatggtgtgagaaatggctgtaggaaacaacactcaacgaagttattccatcatcccgtgttttatatttgttgagcttgtcatcatggctgggacagtgctgcttgcctactacttcgaatgcactgacacttttcaggtgcatatccaaggattcttctgtcaggacggagacttaatgaagccttacccagggacagaggaagaaagcttcatcacccctctggtgctctattgtgtgctggctgccaccccaactgctattatttttattggtgagatatccatgtatttcataaaatcaacaagagaatccctgattgctcaggagaaaacaattctgaccggagaatgctgttacctgaaccccttacttcgaaggatcataagattcacaggggtgtttgcatttggactttttgctactgacatttttgtaaacgccggacaagtggtcactgggcacttaacgccatacttcctgactgtgtgcaagccaaactacaccagtgcagactgccaagcgcaccaccagtttataaacaatgggaacatttgtactggggacctggaagtgatagaaaaggctcggagatcctttccctccaaacacgctgctctgagcatttactccgccttatatgccacgatgtatattacaagcacaatcaagacgaagagcagtcgactggccaagccggtgctgtgcctcggaactctctgcacagccttcctgacaggcctcaaccgggtctctgagtatcggaaccactgctcggacgtgattgctggtttcatcctgggcactgcagtggccctgtttctgggaatgtgtgtggttcataactttaaaggaacgcaaggatctccttccaaacccaagcctgaggatccccgtggagtacccctaatggctttcccaaggatagaaagccctctggaaaccttaagtgcacagaatcactctgcgtccatgaccgaagttacctgagacgactgatgtgtcacaagctgttttttaaaatcatcttccaattctatacttcaaaacacacagttgctcaatgtcaaactgtgatgacaaatattacgtttatctagttagaagctaatgttttgtacattttttgtatgaggaagtgatgtagcttgccctgattttttttttttttttttggtcagctttaatatatttatgccagaattttaaaaccaacaaaattttcttgttcaagcgtgcattgaagaaccacatttattcaatggttgacgttgttttgtgatatttgtacacaaattttcttttctcagttttataaacacagaatataacaattcactttaaacttttattaccacagttgctgcctcctccagaatttttgaattttaataaaaggcaaacttttgagctgcaggaaggacaatgttggttaataataaatctcaaagtcaattgtagaaaaaaaattgtcttcaaaaagaatgttgcactctgatctcttaacaaattgttacgttcaaagtttaaagtgatatattaacaaagtcacctagttatacaaacaattgtcagagaattctggatttggagggtattggggttatatgattctttcttagataatggcctctactaaataactcaagatctttctggaatgtcttctggcaggcaggtgccactgtcagcttttctccaaaaagcagccaacatcagcctcccctgtcaactcaacagttttgtatctcatattatatggactttatatgaaaatgaatattttacagtttgcacagtattattttacagaaaaggaatcagagaatctacaacatagggccccagaacaacagtttcactttgtggcttttaattattctagaattttaactgcatctcatttttctagcatggtgagaactaatatgtaactcctttgattgaaggagctcttttgtccgtacctatcagaatgttttcttgacacttccatgttggctcttctcagctttttttgtacatattttttttttctaaagagaagaaaaagttatcacaaaa

SEQ ID NO: 16039 - DNA, 748 bp, Homo sapiens
  source 1..748: mol_type = unassigned DNA
ggagggagtgtgctctgaggggcaagggctgctccgaagccctgctaatgtctctgtgtggccatgctgtattttcagcttgtcatcatggctgggacagtgctgcttgcctactacttcgaatgcactgacacttttcaggtgcatatccaaggattcttctgtcaggacggagacttaatgaagccttacccagggacagaggaagaaagcttcatcacccctctggtgctctattgtgtgctggctgccaccccaactgctattatttttattggtgagatatccatgtatttcataaaatcaacaagagaatccctgattgctcaggagaaaacaattctgaccggagaatgctgttacctgaaccccttacttcgaaggatcataagattcacaggggtgtttgcatttggactttttgctactgacatttttgtaaacgccggacaagtggtcactgggcacttaacgccatacttcctgactgtgtgcaagccaaactacaccagtgcagactgccaagcgcaccaccagtttataaacaatgggaacatttgtactggggacctggaagtgatagaaaaggctcggagatcctttccctccaaacacgctgctctgagcatttactccgccttatatgccacgatgtatattacaagcacaatcaagacgaagagcagtcgactggccaagccggtgctgtgcctcggaactctctgcacagccttcctgacaggcctca

SEQ ID NO: 16040 - DNA, 2495 bp, Homo sapiens; identical to SEQ ID NO: 16035
  source 1..2495: mol_type = unassigned DNA

SEQ ID NO: 16041 - DNA, 472 bp, Homo sapiens; identical to SEQ ID NO: 16036
  source 1..472: mol_type = unassigned DNA

SEQ ID NO: 16042 - DNA, 1086 bp, Homo sapiens; identical to SEQ ID NO: 16037
  source 1..1086: mol_type = unassigned DNA

SEQ ID NO: 16043 - DNA, 2318 bp, Homo sapiens; identical to SEQ ID NO: 16038
  source 1..2318: mol_type = unassigned DNA

SEQ ID NO: 16044 - DNA, 748 bp, Homo sapiens; identical to SEQ ID NO: 16039
  source 1..748: mol_type = unassigned DNA

SEQ ID NO: 16045 - DNA, 5369 bp, Homo sapiens
  source 1..5369: mol_type = unassigned DNA
gagctgtcattcctgggtagcaacaagctgtcagttaatgcctacctcagcctacttttcagtatgggatccaagatctcatttcgtggaggtaggggttggttttcttgctatgggtcagcgcgctggagcagggcttctgatccttagcattctttaatagcattcctagagtgacctaggaggctccccaggaggagactaggtggcttagctcctcagcctaactactgcagaaaccaggagtgcgtcctccttttcggattcttgacgtcaagctccgacagccttggagcgtcgcaagggcggtagagagctgagggagggtgacagggaggggaagccattgcagcaacagcttggaggagggagctggacgtcgtctctcgccagaaaaacggggagcaggagccagactaggggaggaagaggactggcccgctcagggaatagctgggttgctgcaaaaaggggcggggagaaggcgggggcgctgcatgcagcgcgctggctccagcggtggccgcggggaatgtgacatcagcggcgccgggcgcttggggctggaggaggcagctcgcctcagctgcgctgtgcacacctcgcccgggggaggacgcagacccgggcaggcggcagggatgtcggcgaaggagaggccaaagggcaaagtgatcaaggacagcgtcaccctcctgccctgcttttatttcgtcgagttgcctatattggcatcatcggtggttagcctctatttcctcgaactcacagatgtcttcaaacctgtgcactctggatttagctgctatgaccggagtcttagcatgccgtacattgaaccaacccaggaggcaattccattcctcatgttgcttagcttggcttttgctggacctgcaattacgattatggtaggagaaggaattctctactgttgcctctccaaaagaagaaatggggtcggactagagcccaacattaatgctggaggctgcaacttcaattccttcctcagacgagctgtcagattcgttggtgttcatgtatttggattatgctctacagctctcattacagatatcatacagctgtccacaggatatcaagcaccttactttctgactgtgtgcaaaccaaactatacctctctgaatgtatcttgcaaagaaaattcctacattgtggaagatatttgctcaggatctgacctcacagttatcaacagtggcagaaagtccttcccttctcaacatgcaacccttgctgcctttgcagctgtgtatgtttcgatgtacttcaattccacattaacggattcctctaagcttctgaaacctctcttggtcttcacatttatcatctgtggaataatctgcgggctaacacggataactcagtataagaaccacccagttgatgtctattgtggctttttaataggaggaggaattgcactgtacttgggcttgtatgctgtggggaatttcctgcccagtgatgagagtatgtttcagcacagagacgccctcaggtctctgacagacctcaatcaagatcccaaccgacttttatctgctaaaaatggtagcagcagtgatggaattgctcatacagaaggcatcctcaaccgaaaccacagagatgctagctctctgacaaatctcaaaagagcaaatgctgatgtggaaatcattactccacggagccccatggggaaggagaacatggttaccttcagcaataccttgccgcgagccaataccccatctgtagaagaccctgtcagaagaaatgcgagcattcatgcctctatggattccgctcgatcaaagcagctcctcacccagtggaagaataagaatgaaagtcgaaagttgtccttgcaagttatagagcctgagcctgggcagtcaccacccagatccatagaaatgaggtcaagctcagagccatcgagggtaggggtgaatggagaccaccatggtcctggcaatcagtacctcaaaatccagcctggcgctgtccccggatgtaacaacagcatgcctggagggccaagagtgtccattcagtcccgtcctgggtcctcacagttggtgcacatccctgaggagactcaggaaaacataagcacctcccccaaaagcagctctgctcgggccaagtggttaaaagctgctgaaaagactgtggcctgtaacagaagcaacagccagccccgaatcatgcaagtcatagccatgtccaagcagcagggtgtcctccaaagcagccccaagaacactgaaggcagcacggtctcctgcactggctccatccgctataaaaccttgacagaccatgagcccagtgggatagtgagggttgaggctcacccagagaacaacaggcccatcatacagatcccgtccactgaaggtgaaggcagtggctcctggaagtggaaagcccctgaaaagggcagccttcgccaaacttacgagctcaacgatctcaacagggactcagaaagctgtgagtctctgaaagacagctttggttctggagatcgcaagagaagcaacattgatagcaatgagcatcaccaccacggaattaccaccatccgcgtcaccccagtagagggcagcgaaattggctcagagacgctgtccatttcttcttcccgcgactccaccctgcggagaaagggcaatatcattctaatccctgaaagaagcaacagccccgaaaacactagaaatatcttctacaaaggaacctcccccacacgggcttataaggattgagtgatgtccattccatcattagggctactcgcaaaagaccatatgttgattctacctgtgttctgttccagcgaattgggaagtctcaccaagctagattgtctaccatcagcccagaactctgtaacttttcagaactgctatactcaaacttgcagatctcacatcaaggagagggaaaagcacaatgcaagaacctaactaacgtgatgatatgaagagttttcttaagacctgtcgtcaaacttaaaaggttttgcagagggcagtatcaaaagaaagtggttttcttcaaatgtatactattttacttcctgaatgtgccaactttggggatttttctttatagtgagctgtgggaacccagaacacacacgttttccctacagcagaggccatgcagtattatatattcattttgcagaatctgcacctacagctcaatacgggtggtgctgattattatagtacatataccatgtaaactctcaaactctatttagctgtgaaatagtggtgtgcaattccttgttaaagaaatgctactttattaagaagatgctggctgctttgtgttagaataggacaccccgcagcttctctgtagtggctctgtcacagtcaaaaaatgaaaaggtttttgtgcgtttcttcaaaattctgctttcttcaacatcaaaaattgtgtagaaatattttcagtgaaagggaataactagtacttttctgcatagtttttcttctgcttactttttatttaagtataggtactgctaatgaatctgttttcttagtgagtaaatttgcataattttataaatattattttagagaatcttttgaaattgttgtgatcatattttgctttctatggcttctccttaacttattgattaattttttgaagttatagatatgttctcctattttaaaagcaaaaataacaattgacattccttgagcaaaatatactgctgtgaatttgcaaacaagaaatctgagccaaaacttgacattgtgggttacattgccagaaatgttggtcaagtttgcccttagatgtctacaactagctggcataggttgccatcttaacaagtaatctaaaagtcccattcggttctacattattaactttttttttctatatcctgatgaccagtaaattagagccacactggttaagtttgactcgtctctaaaacgtttttgttaattggacaccaagaggaagaatctgaaaaaaaaatgcatgttggtaagtaaaagtatctcacggtacaaattaagaatgactttcttcaaaatatctgaataggtgcagttttagtttaacatgcaaacaaccattgttgctacctatcctgaatcaagccttgagcctaaatcaaagcaaaccaataccattgataagaagaagataaaaacaaaatattttggagtgttttccaacttaaagtatgaagacatactcagttcttggaacttagtattaaaccttttttatgccatttcataagaattccgatatatacttgatgattgccaaggggatgaaaggaaacaacagagatggttgatctgatcttagctcactttccaataacagaaggagttgtttacagatgaatagtatcacatcattatcaatttccacatgaaaaaggtggagctttctagaaaaaccaacctctaaggcattaggaatttagctgaaaccagcagaattgaaaactctggcaataaaacatggactcaaccatatcccttctggcaatttccttctcagagaggggagtgggaataaaatgttgccttccccacttctcaccaccaccgccatcatgacgctcatactggcttttgcctgtttgtagaggaaaaggtgggctggttttagtactctgaaggacaaaaacaagcaaacaaaaacccctgctgcagcatttcaggtgcagtatgatatttcctaatctttcctatttcttaacaaaagattttaaagtacttctctagtcattgaagtttttttttctttacataaatattgatatattctttttctactcaaagtgccaaaggctacagtttttaatgacttaacaaattgtaccacattgttaaggacatataatgatagacactagaactcagacctctgcatgtatatttgataacatgtcttttgtaaaacaaaaattacaaaaaaatttgtttacattccactggtaccttaatttaaaataaatcagactaaaaggtggtatctcttcttagtgttctatttatcttatttgctaatgggagcacttcttcctttgttaggctgtgctttactgataaaaccaagtattgaataaagagagttaattatctttttaaagtaaataaaattatgaaaatatatatagtatatataaagtactgtgtttaaaaaaatgttatgcaatgttttccaaactgataaagtttgtaaagtgctataaatgtattttgttaagtacagataaaagctattgtgtgagtatattgtgctaaaatcatagaaataaagattagatttcttcatcaaaattggaa

SEQ ID NO: 16046 - DNA, 4505 bp, Homo sapiens
  source 1..4505: mol_type = unassigned DNA
cttaagtatctgtttagaagtttaggaattttctatactgtcttcttgaaatcaacttagagaaaatgaacacaatagattttaagatcttaattcactaatgtttaatgaatatgtttgatgctgacacaaccaccaacttggtaacaatttctttcattttgcctataggtgttcatgtatttggattatgctctacagctctcattacagatatcatacagctgtccacaggatatcaagcaccttactttctgactgtgtgcaaaccaaactatacctctctgaatgtatcttgcaaagaaaattcctacattgtggaagatatttgctcaggatctgacctcacagttatcaacagtggcagaaagtccttcccttctcaacatgcaacccttgctgcctttgcagctgtgtatgtttcgatgtacttcaattccacattaacggattcctctaagcttctgaaacctctcttggtcttcacatttatcatctgtggaataatctgcgggctaacacggataactcagtataagaaccacccagttgatgtctattgtggctttttaataggaggaggaattgcactgtacttgggcttgtatgctgtggggaatttcctgcccagtgatgagagtatgtttcagcacagagacgccctcaggtctctgacagacctcaatcaagatcccaaccgacttttatctgctaaaaatggtagcagcagtgatggaattgctcatacagaaggcatcctcaaccgaaaccacagagatgctagctctctgacaaatctcaaaagagcaaatgctgatgtggaaatcattactccacggagccccatggggaaggagaacatggttaccttcagcaataccttgccgcgagccaataccccatctgtagaagaccctgtcagaagaaatgcgagcattcatgcctctatggattccgctcgatcaaagcagctcctcacccagtggaagaataagaatgaaagtcgaaagttgtccttgcaagttatagagcctgagcctgggcagtcaccacccagatccatagaaatgaggtcaagctcagagccatcgagggtaggggtgaatggagaccaccatggtcctggcaatcagtacctcaaaatccagcctggcgctgtccccggatgtaacaacagcatgcctggagggccaagagtgtccattcagtcccgtcctgggtcctcacagttggtgcacatccctgaggagactcaggaaaacataagcacctcccccaaaagcagctctgctcgggccaagtggttaaaagctgctgaaaagactgtggcctgtaacagaagcaacagccagccccgaatcatgcaagtcatagccatgtccaagcagcagggtgtcctccaaagcagccccaagaacactgaaggcagcacggtctcctgcactggctccatccgctataaaaccttgacagaccatgagcccagtgggatagtgagggttgaggctcacccagagaacaacaggcccatcatacagatcccgtccactgaaggtgaaggcagtggctcctggaagtggaaagcccctgaaaagggcagccttcgccaaacttacgagctcaacgatctcaacagggactcagaaagctgtgagtctctgaaagacagctttggttctggagatcgcaagagaagcaacattgatagcaatgagcatcaccaccacggaattaccaccatccgcgtcaccccagtagagggcagcgaaattggctcagagacgctgtccatttcttcttcccgcgactccaccctgcggagaaagggcaatatcattctaatccctgaaagaagcaacagccccgaaaacactagaaatatcttctacaaaggaacctcccccacacgggcttataaggattgagtgatgtccattccatcattagggctactcgcaaaagaccatatgttgattctacctgtgttctgttccagcgaattgggaagtctcaccaagctagattgtctaccatcagcccagaactctgtaacttttcagaactgctatactcaaacttgcagatctcacatcaaggagagggaaaagcacaatgcaagaacctaactaacgtgatgatatgaagagttttcttaagacctgtcgtcaaacttaaaaggttttgcagagggcagtatcaaaagaaagtggttttcttcaaatgtatactattttacttcctgaatgtgccaactttggggatttttctttatagtgagctgtgggaacccagaacacacacgttttccctacagcagaggccatgcagtattatatattcattttgcagaatctgcacctacagctcaatacgggtggtgctgattattatagtacatataccatgtaaactctcaaactctatttagctgtgaaatagtggtgtgcaattccttgttaaagaaatgctactttattaagaagatgctggctgctttgtgttagaataggacaccccgcagcttctctgtagtggctctgtcacagtcaaaaaatgaaaaggtttttgtgcgtttcttcaaaattctgctttcttcaacatcaaaaattgtgtagaaatattttcagtgaaagggaataactagtacttttctgcatagtttttcttctgcttactttttatttaagtataggtactgctaatgaatctgttttcttagtgagtaaatttgcataattttataaatattattttagagaatcttttgaaattgttgtgatcatattttgctttctatggcttctccttaacttattgattaattttttgaagttatagatatgttctcctattttaaaagcaaaaataacaattgacattccttgagcaaaatatactgctgtgaatttgcaaacaagaaatctgagccaaaacttgacattgtgggttacattgccagaaatgttggtcaagtttgcccttagatgtctacaactagctggcataggttgccatcttaacaagtaatctaaaagtcccattcggttctacattattaactttttttttctatatcctgatgaccagtaaattagagccacactggttaagtttgactcgtctctaaaacgtttttgttaattggacaccaagaggaagaatctgaaaaaaaaatgcatgttggtaagtaaaagtatctcacggtacaaattaagaatgactttcttcaaaatatctgaataggtgcagttttagtttaacatgcaaacaaccattgttgctacctatcctgaatcaagccttgagcctaaatcaaagcaaaccaataccattgataagaagaagataaaaacaaaatattttggagtgttttccaacttaaagtatgaagacatactcagttcttggaacttagtattaaaccttttttatgccatttcataagaattccgatatatacttgatgattgccaaggggatgaaaggaaacaacagagatggttgatctgatcttagctcactttccaataacagaaggagttgtttacagatgaatagtatcacatcattatcaatttccacatgaaaaaggtggagctttctagaaaaaccaacctctaaggcattaggaatttagctgaaaccagcagaattgaaaactctggcaataaaacatggactcaaccatatcccttctggcaatttccttctcagagaggggagtgggaataaaatgttgccttccccacttctcaccaccaccgccatcatgacgctcatactggcttttgcctgtttgtagaggaaaaggtgggctggttttagtactctgaaggacaaaaacaagcaaacaaaaacccctgctgcagcatttcaggtgcagtatgatatttcctaatctttcctatttcttaacaaaagattttaaagtacttctctagtcattgaagtttttttttctttacataaatattgatatattctttttctactcaaagtgccaaaggctacagtttttaatgacttaacaaattgtaccacattgttaaggacatataatgatagacactagaactcagacctctgcatgtatatttgataacatgtcttttgtaaaacaaaaattacaaaaaaatttgtttacattccactggtaccttaatttaaaataaatcagactaaaaggtggtatctcttcttagtgttctatttatcttatttgctaatgggagcacttcttcctttgttaggctgtgctttactgataaaaccaagtattgaataaagagagttaattatctttttaaagtaaataaaattatgaaaatatatatagtatatataaagtactgtgtttaaaaaaatgttatgcaatgttttccaaactgataaagtttgtaaagtgctataaatgtattttgttaagtacagataaaagctattgtgtgagtatattgtgctaaaatcatagaaataaagattagatttcttcatcaaaattggaa

SEQ ID NO: 16047 - DNA, 4846 bp, Homo sapiens
  source 1..4846: mol_type = unassigned DNA
gaagccattgcagcaacagcttggaggagggagctggacgtcgtctctcgccagaaaaacggggagcaggagccagactaggggaggaagaggactggcccgctcagggaatagctgggttgctgcaaaaaggggcggggagaaggcgggggcgctgcatgcagcgcgctggctccagcggtggccgcggggaatgtgacatcagcggcgccgggcgcttggggctggaggaggcagctcgcctcagctgcgctgtgcacacctcgcccgggggaggacgcagacccgggcaggcggcagggatgtcggcgaaggagaggccaaagggcaaagtgatcaaggacagcgtcaccctcctgccctgcttttatttcgtcgagttgcctatattggcatcatcggtggttagcctctatttcctcgaactcacagatgtcttcaaacctgtgcactctggatttagctgctatgaccggagtcttagcatgccgtacattgaaccaacccaggaggcaattccattcctcatgttgcttagcttggcttttgctggacctgcaattacgattatggtaggagaaggaattctctactgttgcctctccaaaagaagaaatggggtcggactagagcccaacattaatgctggaggctgcaacttcaattccttcctcagacgagctgtcagattcgttggtgttcatgtatttggattatgctctacagctctcattacagatatcatacagctgtccacaggatatcaagcaccttactttctgactgtgtgcaaaccaaactatacctctctgaatgtatcttgcaaagaaaattcctacattgtggaagatatttgctcaggatctgacctcacagttatcaacagtggcagaaagtccttcccttctcaacatgcaacccttgctgcctttgcagctgtgtatgtttcgggcttgtatgctgtggggaatttcctgcccagtgatgagagtatgtttcagcacagagacgccctcaggtctctgacagacctcaatcaagatcccaaccgacttttatctgctaaaaatggtagcagcagtgatggaattgctcatacagaaggcatcctcaaccgaaaccacagagatgctagctctctgacaaatctcaaaagagcaaatgctgatgtggaaatcattactccacggagccccatggggaaggagaacatggttaccttcagcaataccttgccgcgagccaataccccatctgtagaagaccctgtcagaagaaatgcgagcattcatgcctctatggattccgctcgatcaaagcagctcctcacccagtggaagaataagaatgaaagtcgaaagttgtccttgcaagttatagagcctgagcctgggcagtcaccacccagatccatagaaatgaggtcaagctcagagccatcgagggtaggggtgaatggagaccaccatggtcctggcaatcagtacctcaaaatccagcctggcgctgtccccggatgtaacaacagcatgcctggagggccaagagtgtccattcagtcccgtcctgggtcctcacagttggtgcacatccctgaggagactcaggaaaacataagcacctcccccaaaagcagctctgctcgggccaagtggttaaaagctgctgaaaagactgtggcctgtaacagaagcaacagccagccccgaatcatgcaagtcatagccatgtccaagcagcagggtgtcctccaaagcagccccaagaacactgaaggcagcacggtctcctgcactggctccatccgctataaaaccttgacagaccatgagcccagtgggatagtgagggttgaggctcacccagagaacaacaggcccatcatacagatcccgtccactgaaggtgaaggcagtggctcctggaagtggaaagcccctgaaaagggcagccttcgccaaacttacgagctcaacgatctcaacagggactcagaaagctgtgagtctctgaaagacagctttggttctggagatcgcaagagaagcaacattgatagcaatgagcatcaccaccacggaattaccaccatccgcgtcaccccagtagagggcagcgaaattggctcagagacgctgtccatttcttcttcccgcgactccaccctgcggagaaagggcaatatcattctaatccctgaaagaagcaacagccccgaaaacactagaaatatcttctacaaaggaacctcccccacacgggcttataaggattgagtgatgtccattccatcattagggctactcgcaaaagaccatatgttgattctacctgtgttctgttccagcgaattgggaagtctcaccaagctagattgtctaccatcagcccagaactctgtaacttttcagaactgctatactcaaacttgcagatctcacatcaaggagagggaaaagcacaatgcaagaacctaactaacgtgatgatatgaagagttttcttaagacctgtcgtcaaacttaaaaggttttgcagagggcagtatcaaaagaaagtggttttcttcaaatgtatactattttacttcctgaatgtgccaactttggggatttttctttatagtgagctgtgggaacccagaacacacacgttttccctacagcagaggccatgcagtattatatattcattttgcagaatctgcacctacagctcaatacgggtggtgctgattattatagtacatataccatgtaaactctcaaactctatttagctgtgaaatagtggtgtgcaattccttgttaaagaaatgctactttattaagaagatgctggctgctttgtgttagaataggacaccccgcagcttctctgtagtggctctgtcacagtcaaaaaatgaaaaggtttttgtgcgtttcttcaaaattctgctttcttcaacatcaaaaattgtgtagaaatattttcagtgaaagggaataactagtacttttctgcatagtttttcttctgcttactttttatttaagtataggtactgctaatgaatctgttttcttagtgagtaaatttgcataattttataaatattattttagagaatcttttgaaattgttgtgatcatattttgctttctatggcttctccttaacttattgattaattttttgaagttatagatatgttctcctattttaaaagcaaaaataacaattgacattccttgagcaaaatatactgctgtgaatttgcaaacaagaaatctgagccaaaacttgacattgtgggttacattgccagaaatgttggtcaagtttgcccttagatgtctacaactagctggcataggttgccatcttaacaagtaatctaaaagtcccattcggttctacattattaactttttttttctatatcctgatgaccagtaaattagagccacactggttaagtttgactcgtctctaaaacgtttttgttaattggacaccaagaggaagaatctgaaaaaaaaatgcatgttggtaagtaaaagtatctcacggtacaaattaagaatgactttcttcaaaatatctgaataggtgcagttttagtttaacatgcaaacaaccattgttgctacctatcctgaatcaagccttgagcctaaatcaaagcaaaccaataccattgataagaagaagataaaaacaaaatattttggagtgttttccaacttaaagtatgaagacatactcagttcttggaacttagtattaaaccttttttatgccatttcataagaattccgatatatacttgatgattgccaaggggatgaaaggaaacaacagagatggttgatctgatcttagctcactttccaataacagaaggagttgtttacagatgaatagtatcacatcattatcaatttccacatgaaaaaggtggagctttctagaaaaaccaacctctaaggcattaggaatttagctgaaaccagcagaattgaaaactctggcaataaaacatggactcaaccatatcccttctggcaatttccttctcagagaggggagtgggaataaaatgttgccttccccacttctcaccaccaccgccatcatgacgctcatactggcttttgcctgtttgtagaggaaaaggtgggctggttttagtactctgaaggacaaaaacaagcaaacaaaaacccctgctgcagcatttcaggtgcagtatgatatttcctaatctttcctatttcttaacaaaagattttaaagtacttctctagtcattgaagtttttttttctttacataaatattgatatattctttttctactcaaagtgccaaaggctacagtttttaatgacttaacaaattgtaccacattgttaaggacatataatgatagacactagaactcagacctctgcatgtatatttgataacatgtcttttgtaaaacaaaaattacaaaaaaatttgtttacattccactggtaccttaatttaaaataaatcagactaaaaggtggtatctcttcttagtgttctatttatcttatttgctaatgggagcacttcttcctttgttaggctgtgctttactgataaaaccaagtattgaataaagagagttaattatctttttaaagtaaataaaattatgaaaatatatatagtatatataaagtactgtgtttaaaaaaatgttatgcaatgttttccaaactgataaagtttgtaaagtgctataaatgtattttgttaagtacagataaaagctattgtgtgagtatattgtgctaaaatcatagaaataaagattagatttcttcatc

SEQ ID NO: 16048 - DNA, 3706 bp, Homo sapiens
  source 1..3706: mol_type = unassigned DNA
atgcgcagtggcgcgagcgcagcggctacgcgggcgcggagaggtagccgcagagtggacctgcaggtacttggatctccagtgggagctgccctctcgaaggcaggacagcggtggcggcagatataaagacctgaagatagtcttttctgtccaaagatggaaaacagtactactaccatttctcgggaggagcttgaagaactacaagaggcatttaataaaatagatattgacaatagtgggtatgtcagtgactatgaacttcaagacctgtttaaggaagcaagccttcctctgcctggctacaaggtgcgcgagattgtggagaaaattctatcagttgctgacagcaacaaagatggcaaaatcagttttgaagagtttgtgtcactaatgcaagaattaaaaagcaaagatatcagcaaaacattccgaaaaataattaacaagagggaagggattactgctattggaggaacttcaactatttccagtgagggcacacagcattcttattcagaggaagaaaaagtggcttttgttaactggataaacaaagccctggagaatgaccctgactgtaagcatcttatacccatgaatcccaatgatgatagtcttttcaagtcacttgcagatggcatccttctttgcaaaatgatcaacttatctgaaccagatacaattgatgaaagagccatcaataagaaaaagctcacgccattcactatttctgaaaatttaaacctagctctgaattctgcctcagccattggttgtacagtggtcaacattggtgcatcagatctcaaagaaggaaaacctcacttggtcttgggacttctctggcagatcatcaaagttggcctttttgctgatattgagatttccaggaatgaagctctgattgcattgttaaatgaaggtgaggaactagaggagctgatgaagctttctcccgaggaattactgctgcgatgggtgaactaccatctgaccaatgcaggatggcataccatcagcaacttcagccaagacattaaggactcgagagcctattttcatctgcttaatcagattgcccctaaaggtggggaagatggacctgccattgccattgacctttcaggaattaatgagacaaatgacctgaagcgtgctggactcatgcttcaagaagcagataaactgggctgcaaacagtttgttactcctgcagatgtggtttcaggcaatcctaaacttaatttagcttttgtagctaatttgtttaacacatacccgtgcctgcacaagccgaataataatgacatcgatatgaatttactggaaggagagagcaaggaagagagaacatttcggaactggatgaattccttgggagtcaacccatacattaatcatttgtacagtgaccttgcagatgctttagtgatctttcagctctatgagatgatccgagtgccagtcaactggagccatgtcaacaaacctccttatcctgcccttggagggaacatgaagaagattgaaaactgtaactatgcagtggaacttgggaagaacaaggccaaattctccttggttggcattgctgggcaggacctaaatgaagggaattcaacacttaccctggcattggtatggcagctgatgagaaggtacacattgaatgtgttatcggatcttggagagggtgaaaaagtaaatgatgaaattataattaaatgggtcaatcagactcttaaaagtgcaaacaaaaagacttctatttccagcttcaaggataaatctataagcacaagtttacctgtcctagatttaatagatgccattgcaccaaatgcagttcgtcaagaaatgatcaggagagaaaacttatctgatgaggacaagctgaacaatgctaaatacgccatttcagttgctcgaaagatcggtgcccggatatatgcattacctgatgacctcgtagaagtgaaaccaaagatggttatgacggtgtttgcatgcttaatgggaaaaggactgaacagaataaaataatcatttcatatgattttctgccacattaaacatattgtatgcctcacagtttacaggattctgaaatgtagtgggtgtaaaaccagagattatttgtatgctcaaaatagttatatattcattaatgaattcaatatcctgttcatactagttagagctggtcagcctttttgggtaacacagttaatttaccaactgatacagataatagaatatattcataatcaagctgatacttcatgattaaattatttttgttgcttaaaagtcgtattagacaagactaaatcattcttttttatggttcaaaaaagatgaatacaaacgtttttgcaggttctgctgtgaaatgtggtttgatttttttggtgtgttaattttgatcataaatgcattcatactcataatccagtttaatccttttatttgcttcctccaactatttaaagtggtccaaaaacacttttctgtaagtttctatactgtctaaaaccttatggtgaccagaattgtttattaatatcaaacttttttatatatgagaactaattcttgaataaaccccaaagttcactctcttgtttaagtagcagcagctttttacttaaaatttaattttaactacattgatactttacacatcctagtttggtaacacagctttaactatgtcatgcaacatatatatgttggtaggatgttattagagagatatgtgtgcatatatatttttttgcacctgaatcacccagcttttcataagtggtatgtttaattggtcattcagccaaccatcagtattttccccccacaacatgtgtaacacttttcagtctgtggatatctgatacattaagatttctttttataagtattcattttgaatgtgcatatagttatttgaccccttccaaatacttgtagccaaacattggctagaacatcccaagatatgctgacactgtcctgttagcttcatattatacttgctagtttaggtctctatagaagccctatataatttagaatatgcccactgaatatctttaatagaaagtaacataaagctagtattcaatgtagagtattttcatatgtttttcacagcccgttacaaattggcaatgtttggttaatgtttgtattacttggaaatcgctacagcttggactatttttttctaaatttttagcattagtccatttctgctgctaacaattgaatccagaaatctactttctccatcttccactgttagtgccagtgagcaatactgttgtgcaacaaaaatgtcactttatctcagtgtgaatgagtagtctaaattccctttctaccattgatttaaatatatatattggtaagagagactgcccatgtgtttagaatagaattttttaaatgaaatgatcaacaggtggaatttgaaatatattcttctacaaaagagatttctttcccttttatattttgatgattgttttcttaagattaagatatgttcttgctcttttataagattatttaaattatgtttccctctgattttttttcaccattgtatttactaagttattggatttacatgaaatctggcactttagggtgttctttttctcacagagtatatttaataaaaatgctgtgtatatagaaa

SEQ ID NO: 16049 - DNA, 608 bp, Homo sapiens
  source 1..608: mol_type = unassigned DNA
gcgggcgcggagaggtagccgcagagtggacctgcaggtacttggatctccagtgggagctgccctctcgaaggcaggacagcggtggcggcagagacagagtctccctgtgttgcccaggctggtcttgaactcctggcctcaagcaatccacctgccttggcctcccaaagtgctgcaattacagggaaggccagcgttggattgtgtaggttgcaaaatgcagtacctcagacttgcaactctgaaaagcactgtttgaaatctctgtaaagagtgaaaaacttcaagttttaaccaatgagtgttttagaggttaaagtttaaactctgacttggaagcacgctgggtaggactcctctgctcactcagactcaagttggatcatcagaatctctcttgtgttgctgtgaatgatttgcattgaaattcccagctagaactggaggaaagaggattacaaaccaggagatataaagacctgaagatagtcttttctgtccaaagatggaaaacagtactactaccatttctcgggaggagcttgaagaactacaagaggcatttaataaaatagatattgacaatagtgggtatgtcagtgact

SEQ ID NO: 16050 - DNA, 580 bp, Homo sapiens
  source 1..580: mol_type = unassigned DNA
gggcgcggagaggtagccgcagagtggacctgcaggtacttggatctccagtgggagctgccctctcgaaggcaggacagcggtggcggcagagacagagtctccctgtgttgcccaggctggtcttgaactcctggcctcaagcaatccacctgccttggcctcccaaagtgctgcaattacagatataaagacctgaagatagtcttttctgtccaaagatggaaaacagtactactaccatttctcgggaggagcttgaagaactacaagaggcatttaataaaatagatattgacaatagtgggtatgtcagtgactatgaacttcaagacctgtttaaggaagcaagccttcctctgcctggctacaaggtgcgcgagattgtggagaaaattctatcagttgctgacagcaacaaagatggcaaaatcagttttgaagagtttgtgtcactaatgcaagaattaaaaagcaaagatatcagcaaaacattccgaaaaataattaacaagagggaagggattactgctattggaggaacttcaactatttccagtgagggcacacagcattctta

SEQ ID NO: 16051 - DNA, 574 bp, Homo sapiens
  source 1..574: mol_type = unassigned DNA
agccgcagagtggacctgcaggtacttggatctccagtgggagctgccctctcgaaggcaggacagcggtggcggcagggaaggccagcgttggattgtgtaggttgcaaaatgcagtacctcagacttgcaactctgaaaagcactgtttgaaatctctgtaaagagtgaaaaacttcaagttttaaccaatgagtgttttagaggttaaagtttaaactctgacttggaagcacgctgggtaggactcctctgctcactcagactcaagttggatcatcagaatctctcttgtgttgctgtgaatgatttgcattgaaattcccagctagaactggaggaaagaggattacaaaccaggagatataaagacctgaagatagtcttttctgtccaaagatggaaaacagtactactaccatttctcgggaggagcttgaagaactacaagaggcatttaataaaatagatattgacaatagtgggtatgtcagtgactatgaacttcaagacctgtttaaggaagcaagccttcctctgcctggctacaaggtgcgcgagattgtggagaaaa

SEQ ID NO: 16052 - DNA, 1038 bp, Homo sapiens
  source 1..1038: mol_type = unassigned DNA
agagtggacctgcaggtacttggatctccagtgggagctgccctctcgaaggcaggacagcggtggcggcagatattgacaatagtgggtatgtcagtgactatgaacttcaagacctgtttaaggaagcaagccttcctctgcctggctacaaggtgcgcgagattgtggagaaaattctatcagttgctgacagcaacaaagatggcaaaatcagttttgaagagtttgtgtcactaatgcaagaattaaaaagcaaagatatcagcaaaacattccgaaaaataattaacaagagggaagggattactgctattggaggaacttcaactatttccagtgagggcacacagcattcttattcagaggaagaaaaagtggcttttgttaactggataaacaaagccctggagaatgaccctgactgtaagcatcttatacccatgaatcccaatgatgatagtcttttcaagtcacttgcagatggcatccttctttgcaaaatgatcaacttatctgaaccagatacaattgatgaaagagccatcaataagaaaaagctcacgccattcactatttctgaaaatttaaacctagctctgaattctgcctcagccattggttgtacagtggtcaacattggtgcatcagatctcaaagaaggaaaacctcacttggtcttgggacttctctggcagatcatcaaagttggcctttttgctgatattgagatttccaggaatgaagctctgattgcattgttaaatgaaggtgaggaactagaggagctgatgaagctttctcccgaggaattactgctgcgatgggtgaactaccatctgaccaatgcaggatggcataccatcagcaacttcagccaagacattaaggactcgagagcctattttcatctgcttaatcagattgcccctaaaggtggggaagatggacctgccattgccattgacctttcaggaattaatgagacaaatgacctgaagcgtgctggactcatgcttcaagaagcagataaactgg

SEQ ID NO: 16053 - DNA, 567 bp, Homo sapiens
  source 1..567: mol_type = unassigned DNA
agtggacctgcaggtacttggatctccagtgggagctgccctctcgaaggcaggacagcggtggcggcagccacggtgttggatacacttgtatgaggcttcagctgtgctgcataaatttcttgaagaacctgtgagccagaagcaaaatttcaggacagggggcacacactgaacttgaagaaacattttccaagatgctaaaagtatggcttctactcatttttcccaaaaactgaagtaaaatgctaaaaagaatccatgtcatctgccagatttccaaaggctgtttttgagttcttctctaagatgttttcctccataaatgtgtacagcattaaagaagcccctgcagcatcttggagataatataaagacctgaagatagtcttttctgtccaaagatggaaaacagtactactaccatttctcgggaggagcttgaagaactacaagaggcatttaataaaatagatattgacaatagtgggtatgtcagtgactatgaacttcaagacctgtttaaggaagcaagccttcctctgcctggctacaaggtgcgcgaga

SEQ ID NO: 16054 - DNA, 564 bp, Homo sapiens
  source 1..564: mol_type = unassigned DNA
acttggatctccagtgggagctgccctctcgaaggcaggacagcggtggcggcagccacggtgttggatacacttgtatgaggcttcagctgtgctgcataaatttcttgaagaacctgtgagccagaagcaaaatttcaggacagggggcacacactgaacttgaaatataaagacctgaagatagtcttttctgtccaaagatggaaaacagtactactaccatttctcgggaggagcttgaagaactacaagaggcatttaataaaatagatattgacaatagtgggtatgtcagtgactatgaacttcaagacctgtttaaggaagcaagccttcctctgcctggctacaaggtgcgcgagattgtggagaaaattctatcagttgctgacagcaacaaagatggcaaaatcagttttgaagagtttgtgtcactaatgcaagaattaaaaagcaaagatatcagcaaaacattccgaaaaataattaacaagagggaagggattactgctattggaggaacttcaactatttccagtgagggcacacagcattcttatt

SEQ ID NO: 16055 - DNA, 3755 bp, Homo sapiens
  source 1..3755: mol_type = unassigned DNA
atcaagattaatatctgtagtaataggcagaacacttcagtgtggaattgcttcttttctttggtcaaacactaactttggcagaggatagacacagcttaggaagactgaattttaagtcttctgaattgtttttctggacttccaaatctcaagtgataagaccagcagaagcagatataaagacctgaagatagtcttttctgtccaaagatggaaaacagtactactaccatttctcgggaggagcttgaagaactacaagaggcatttaataaaatagatattgacaatagtgggtatgtcagtgactatgaacttcaagacctgtttaaggaagcaagccttcctctgcctggctacaaggtgcgcgagattgtggagaaaattctatcagttgctgacagcaacaaagatggcaaaatcagttttgaagagtttgtgtcactaatgcaagaattaaaaagcaaagatatcagcaaaacattccgaaaaataattaacaagagggaagggattactgctattggaggaacttcaactatttccagtgagggcacacagcattcttattcagaggaagaaaaagtggcttttgttaactggataaacaaagccctggagaatgaccctgactgtaagcatcttatacccatgaatcccaatgatgatagtcttttcaagtcacttgcagatggcatccttctttgcaaaatgatcaacttatctgaaccagatacaattgatgaaagagccatcaataagaaaaagctcacgccattcactatttctgaaaatttaaacctagctctgaattctgcctcagccattggttgtacagtggtcaacattggtgcatcagatctcaaagaaggaaaacctcacttggtcttgggacttctctggcagatcatcaaagttggcctttttgctgatattgagatttccaggaatgaagctctgattgcattgttaaatgaaggtgaggaactagaggagctgatgaagctttctcccgaggaattactgctgcgatgggtgaactaccatctgaccaatgcaggatggcataccatcagcaacttcagccaagacattaaggactcgagagcctattttcatctgcttaatcagattgcccctaaaggtggggaagatggacctgccattgccattgacctttcaggaattaatgagacaaatgacctgaagcgtgctggactcatgcttcaagaagcagataaactgggctgcaaacagtttgttactcctgcagatgtggtttcaggcaatcctaaacttaatttagcttttgtagctaatttgtttaacacatacccgtgcctgcacaagccgaataataatgacatcgatatgaatttactggaaggagagagcaaggaagagagaacatttcggaactggatgaattccttgggagtcaacccatacattaatcatttgtacagtgaccttgcagatgctttagtgatctttcagctctatgagatgatccgagtgccagtcaactggagccatgtcaacaaacctccttatcctgcccttggagggaacatgaagaagattgaaaactgtaactatgcagtggaacttgggaagaacaaggccaaattctccttggttggcattgctgggcaggacctaaatgaagggaattcaacacttaccctggcattggtatggcagctgatgagaaggtacacattgaatgtgttatcggatcttggagagggtgaaaaagtaaatgatgaaattataattaaatgggtcaatcagactcttaaaagtgcaaacaaaaagacttctatttccagcttcaaggataaatctataagcacaagtttacctgtcctagatttaatagatgccattgcaccaaatgcagttcgtcaagaaatgatcaggagagaaaacttatctgatgaggacaagctgaacaatgctaaatacgccatttcagttgctcgaaagatcggtgcccggatatatgcattacctgatgacctcgtagaagtgaaaccaaagatggttatgacggtgtttgcatgcttaatgggaaaaggactgaacagaataaaataatcatttcatatgattttctgccacattaaacatattgtatgcctcacagtttacaggattctgaaatgtagtgggtgtaaaaccagagattatttgtatgctcaaaatagttatatattcattaatgaattcaatatcctgttcatactagttagagctggtcagcctttttgggtaacacagttaatttaccaactgatacagataatagaatatattcataatcaagctgatacttcatgattaaattatttttgttgcttaaaagtcgtattagacaagactaaatcattcttttttatggttcaaaaaagatgaatacaaacgtttttgcaggttctgctgtgaaatgtggtttgatttttttggtgtgttaattttgatcataaatgcattcatactcataatccagtttaatccttttatttgcttcctccaactatttaaagtggtccaaaaacacttttctgtaagtttctatactgtctaaaaccttatggtgaccagaattgtttattaatatcaaacttttttatatatgagaactaattcttgaataaaccccaaagttcactctcttgtttaagtagcagcagctttttacttaaaatttaattttaactacattgatactttacacatcctagtttggtaacacagctttaactatgtcatgcaacatatatatgttggtaggatgttattagagagatatgtgtgcatatatatttttttgcacctgaatcacccagcttttcataagtggtatgtttaattggtcattcagccaaccatcagtattttccccccacaacatgtgtaacacttttcagtctgtggatatctgatacattaagatttctttttataagtattcattttgaatgtgcatatagttatttgaccccttccaaatacttgtagccaaacattggctagaacatcccaagatatgctgacactgtcctgttagcttcatattatacttgctagtttaggtctctatagaagccctatataatttagaatatgcccactgaatatctttaatagaaagtaacataaagctagtattcaatgtagagtattttcatatgtttttcacagcccgttacaaattggcaatgtttggttaatgtttgtattacttggaaatcgctacagcttggactatttttttctaaatttttagcattagtccatttctgctgctaacaattgaatccagaaatctactttctccatcttccactgttagtgccagtgagcaatactgttgtgcaacaaaaatgtcactttatctcagtgtgaatgagtagtctaaattccctttctaccattgatttaaatatatatattggtaagagagactgcccatgtgtttagaatagaattttttaaatgaaatgatcaacaggtggaatttgaaatatattcttctacaaaagagatttctttcccttttatattttgatgattgttttcttaagattaagatatgttcttgctcttttataagattatttaaattatgtttccctctgattttttttcaccattgtatttactaagttattggatttacatgaaatctggcactttagggtgttctttttctcacagagtatatttaataaaaatgctgtgtatat

SEQ ID NO: 16056 - DNA, 635 bp, Homo sapiens
  source 1..635: mol_type = unassigned DNA
aataggcagaacacttcagtgtggaattgcttcttttctttggtcaaacactaactttggcagaggatagacacagcttaggaagactgaattttaagtcttctgaattgtttttctggacttccaaatctcaagtgataagaccagcagaagcagggaaggccagcgttggattgtgtaggttgcaaaatgcagtacctcagacttgcaactctgaaaagcactgtttgaaatctctgtaaagagtgaaaaacttcaagttttaaccaatgagtgttttagaggttaaagtttaaactctgacttggaagcacgctgggtaggactcctctgctcactcagactcaagttggatcatcagaatctctcttgtgttgctgtgaatgatttgcattgaaattcccagctagaactggaggaaagaggattacaaaccaggagatataaagacctgaagatagtcttttctgtccaaagatggaaaacagtactactaccatttctcgggaggagcttgaagaactacaagaggcatttaataaaatagatattgacaatagtgggtatgtcagtgactatgaacttcaagacctgtttaaggaagcaagccttcctctgcctggctacaaggtgcg

SEQ ID NO: 16057 - DNA, 2258 bp, Homo sapiens
  source 1..2258: mol_type = unassigned DNA
aattctccataggaacactatcaagtctttttccataaaagtcagataaaagaaagatcacatttcttgatattctttgaagcaactttatttttattgtcatgcttcatcctgcccgaatactgccaagtctttctcaggcacctggaatctgctcctcagcctctgttgtcctgggtctaatgtagagcaaaaggctgagaggaagctcttctattctccatcatcggtcttcagtggctacctgggaaacaccccttggcttagtcggcagattctctccgatataaagacctgaagatagtcttttctgtccaaagatggaaaacagtactactaccatttctcgggaggagcttgaagaactacaagaggcatttaataaaatagatattgacaatagtgggtatgtcagtgactatgaacttcaagacctgtttaaggaagcaagccttcctctgcctggctacaaggtgcgcgagattgtggagaaaattctatcagttgctgacagcaacaaagatggcaaaatcagttttgaagagtttgtgtcactaatgcaagaattaaaaagcaaagatatcagcaaaacattccgaaaaataattaacaagagggaagggattactgctattggaggaacttcaactatttccagtgagggcacacagcattcttattcagaggaagaaaaagtggcttttgttaactggataaacaaagccctggagaatgaccctgactgtaagcatcttatacccatgaatcccaatgatgatagtcttttcaagtcacttgcagatggcatccttctttgcaaaatgatcaacttatctgaaccagatacaattgatgaaagagccatcaataagaaaaagctcacgccattcactatttctgaaaatttaaacctagctctgaattctgcctcagccattggttgtacagtggtcaacattggtgcatcagatctcaaagaaggaaaacctcacttggtcttgggacttctctggcagatcatcaaagttggcctttttgctgatattgagatttccaggaatgaagctctgattgcattgttaaatgaaggtgaggaactagaggagctgatgaagctttctcccgaggaattactgctgcgatgggtgaactaccatctgaccaatgcaggatggcataccatcagcaacttcagccaagacattaaggactcgagagcctattttcatctgcttaatcagattgcccctaaaggtggggaagatggacctgccattgccattgacctttcaggaattaatgagacaaatgacctgaagcgtgctggactcatgcttcaagaagcagataaactgggctgcaaacagtttgttactcctgcagatgtggtttcaggcaatcctaaacttaatttagcttttgtagctaatttgtttaacacatacccgtgcctgcacaagccgaataataatgacatcgatatgaatttactggaaggagagagcaaggaagagagaacatttcggaactggatgaattccttgggagtcaacccatacattaatcatttgtacagtgaccttgcagatgctttagtgatctttcagctctatgagatgatccgagtgccagtcaactggagccatgtcaacaaacctccttatcctgcccttggagggaacatgaagaagattgaaaactgtaactatgcagtggaacttgggaagaacaaggccaaattctccttggttggcattgctgggcaggacctaaatgaagggaattcaacacttaccctggcattggtatggcagctgatgagaaggtacacattgaatgtgttatcggatcttggagagggtgaaaaagtaaatgatgaaattataattaaatgggtcaatcagactcttaaaagtgcaaacaaaaagacttctatttccagcttcaaggataaatctataagcacaagtttacctgtcctagatttaatagatgccattgcaccaaatgcagttcgtcaagaaatgatcaggagagaaaacttatctgatgaggacaagctgaacaatgctaaatacgccatttcagttgctcgaaagatcggtgcccggatatatgcattacctgatgacctcgtagaagtgaaaccaaagatggttatgacggtgtttgcatgcttaatgggaaaaggactgaacagaataaaataatcatttcatatgattttctgccacattaaacatattgtatgcctcaca

SEQ ID NO: 16058 - DNA, 403 bp, Homo sapiens
  source 1..403: mol_type = unassigned DNA
gtacttcctctgtaccttatattgcttagttaaatgtttccaaaggcttcatgctttttttataatattgctttttctagatataaagacctgaagatagtcttttctgtccaaagatggaaaacagtactactaccatttctcgggaggagcttgaagaactacaagaggcatttaataaaatagatattgacaatagtgggtatgtcagtgactatgaacttcaagacctgtttaaggaagcaagccttcctctgcctggctacaaggtgcgcgagattgtggagaaaattctatcagttgctgacagcaacaaagatggcaaaatcagttttgaagagtttgtgtcactaatgcaagaattaaaaagcaaagatatcagcaaaacattccgaaaaataat

SEQ ID NO: 16059 - DNA, 749 bp, Homo sapiens
  source 1..749: mol_type = unassigned DNA
ctgaagcgtgctggactcatgcttcaagaagcagataaactgggctgcaaacagtttgttactcctgcagatgtggtttcaggcaatcctaaacttaatttagcttttgtagctaatttgtttaacacatacccgtgcctgcacaagccgaataataatgacatcgatatgaatttactggaaggagagagcaaggaagagagaacatttcggaactggatgaattccttgggagtcaacccatacattaatcatttgtacagtgaccttgcagatgctttagtgatctttcagctctatgagatgatccgagtgccagtcaactggagccatgtcaacaaacctccttatcctgcccttggagggaacatgaagaaggtgaatgaaataatggccatggatatattgttattgttctgatatgaaacaaagaatttagagtttcatgaagttatacgtgctctgtccccacaattctgattcagaccaaaatgtgttaagcttaatagcctttttacaagtttgctttaataaatttgaagatgaaggcaatccctctagtcagacactttatataactattttcatctttatcaagtcatagtacttaatgttctttgagatgtcctgtaaatgtattctttttttacaattggtataacgttctgaatgtttattggttatccactcatttattcaacagatatttatcaattacctaatacctatacagtgttatgcaggatgta

SEQ ID NO: 16060 - DNA, 2233 bp, Homo sapiens
  source 1..2233: mol_type = unassigned DNA
gagtcccagttcctctccttaaccaccggacaaacgtctctggagtctctccaatgagcaagaaagcaagtcgggggtaggggaggggcctcacaccagggggtgggcgcagtccctcctccagctccttcaccctccagtagtctcgtgggtccccgagcgccagcgcgggaaccgggaaaaggaaaccgtgttgtgtacgtaagattcaggaaacgaaaccaggagccgcgggtgttggcgcaaaggttactcccagacccttttccggctgacttctgagaaggttgcgcagcagctgtgcccggcagtctagaggcgcagaagaggaagccatcgcctggccccggctctctggaccttgtctcgctcgggagcggaaacagcggcagccagagaactgttttaatcatggacaaacaaaactcacagatgaatgcttctcacccggaaacaaacttgccagttgggtatcctcctcagtatccaccgacagcattccaaggacctccaggatatagtggctaccctgggccccaggtcagctacccacccccaccagccggccattcaggtcctggcccagctggctttcctgtcccaaatcagccagtgtataatcagccagtatataatcagccagttggagctgcaggggtaccatggatgccagcgccacagcctccattaaactgtccacctggattagaatatttaagtcagatagatcagatactgattcatcagcaaattgaacttctggaagttttaacaggttttgaaactaataacaaatatgaaattaagaacagctttggacagagggtttactttgcagcggaagatactgattgctgtacccgaaattgctgtgggccatctagaccttttaccttgaggattattgataatatgggtcaagaagtcataactctggagagaccactaagatgtagcagctgttgttgtccctgctgccttcaggagatagaaatccaagctcctcctggtgtaccaataggttatgttattcagacttggcacccatgtctaccaaagtttacaattcaaaatgagaaaagagaggatgtactaaaaataagtggtccatgtgttgtgtgcagctgttgtggagatgttgattttgagattaaatctcttgatgaacagtgtgtggttggcaaaatttccaagcactggactggaattttgagagaggcatttacagacgctgataactttggaatccagttccctttagaccttgatgttaaaatgaaagctgtaatgattggtgcctgtttcctcattgacttcatgttttttgaaagcactggcagccaggaacaaaaatcaggagtgtggtagtggattagtgaaagtctcctcaggaaatctgaagtctgtatattgattgagactatctaaactcatacctgtatgaattaagctgtaaggcctgtagctctggttgtatacttttgcttttcaaattatagtttatcttctgtataactgatttataaaggtttttgtacattttttaatactcattgtcaatttgagaaaaaggacatatgagtttttgcatttattaatgaaacttcctttgaaaaactgctttgaattatgatctctgattcattgtccattttactaccaaatattaactaaggccttattaatttttatataaattatatcttgtcctattaaatctagttacaatttatttcatgcataagagctaatgttattttgcaaatgccatatattcaaaaaagctcaaagataattttctttactattatgttcaaataatattcaatatgcatattatctttaaaaagttaaatgtttttttaatcttcaagaaatcatgctacacttaacttctcctagaagctaatctataccataatattttcatattcacaagatattaaattaccaattttcaaattattgttagtaaagaacaaaatgattctctcccaaagaaagacacattttaaatactccttcactctaaaactctggtattataacttttgaaagttaatatttctacatgaaatgtttagctcttacactctatccttcctagaaaatggtaattgagattactcagatattaattaaatacaatatcatatatatattcacagagtataaacctaaataatgatctattagattcaaatatttgaaataaaaacttgatttttttgta

SEQ ID NO: 16061 - DNA, 1384 bp, Homo sapiens
  source 1..1384: mol_type = unassigned DNA
gccccggctctctggaccttgtctcgctcgggagcggaaacagcggcagccagagcataaaatacacaagaggatttttatggaatggctccttgttacaaggaccacataaacccattttgaattattcaaccattgctgaacttcttgaaactgttttaatcatggacaaacaaaactcacagatgaatgcttctcacccggaaacaaacttgccagttgggtatcctcctcagtatccaccgacagcattccaagatagatcagatactgattcatcagcaaattgaacttctggaagattaaatctcttgatgaacagtgtgtggttggcaaaatttccaagcactggactggaattttgagagaggcatttacagacgctgataactttggaatccagttccctttagaccttgatgttaaaatgaaagctgtaatgattggtgcctgtttcctcattgacttcatgttttttgaaagcactggcagccaggaacaaaaatcaggagtgtggtagtggattagtgaaagtctcctcaggaaatctgaagtctgtatattgattgagactatctaaactcatacctgtatgaattaagctgtaaggcctgtagctctggttgtatacttttgcttttcaaattatagtttatcttctgtataactgatttataaaggtttttgtacattttttaatactcattgtcaatttgagaaaaaggacatatgagtttttgcatttattaatgaaacttcctttgaaaaactgctttgaattatgatctctgattcattgtccattttactaccaaatattaactaaggccttattaatttttatataaattatatcttgtcctattaaatctagttacaatttatttcatgcataagagctaatgttattttgcaaatgccatatattcaaaaaagctcaaagataattttctttactattatgttcaaataatattcaatatgcatattatctttaaaaagttaaatgtttttttaatcttcaagaaatcatgctacacttaacttctcctagaagctaatctataccataatattttcatattcacaagatattaaattaccaattttcaaattattgttagtaaagaacaaaatgattctctcccaaagaaagacacattttaaatactccttcactctaaaactctggtattataacttttgaaagttaatatttctacatgaaatgtttagctcttacactctatccttcctagaaaatggtaattgagattactcagatattaattaaatacaatatcatatatatattcacagagtataaacctaaataatgatctattagattcaaatatttgaaataaaaacttgatttttttgt

SEQ ID NO: 16062 - DNA, 701 bp, Homo sapiens
  source 1..701: mol_type = unassigned DNA
agtctagaggcgcagaagaggaagccatcgcctggccccggctctctggaccttgtctcgctcgggagcggaaacagcggcagccagagaactgttttaatcatggacaaacaaaactcacagatgaatgcttctcacccggaaacaaacttgccagttgggtatcctcctcagtatccaccgacagcattccaagatagatcagatactgattcatcagcaaattgaacttctggaagattaaatctcttgatgaacagtgtgtggttggcaaaatttccaagcactggactggaattttgagagaggcatttacagacgctgataactttggaatccagttccctttagaccttgatgttaaaatgaaagctgtaatgattggtgcctgtttcctcattgacttcatgttttttgaaagcactggcagccaggaacaaaaatcaggagtgtggtagtggattagtgaaagtctcctcaggaaatctgaagtctgtatattgattgagactatctaaactcatacctgtatgaattaagctgtaaggcctgtagctctggttgtatacttttgcttttcaaattatagtttatcttctgtataactgatttataaaggtttttgtacattttttaatactcattgtcaatttgagaaaaaggacatatgagtttttgcatttattaatgaaacttccttt

SEQ ID NO: 16063 - DNA, 1443 bp, Homo sapiens
  source 1..1443: mol_type = unassigned DNA
cttcaccctccagtagtctcgtgggtccccgagcgccagcgcgggaaccgggaaaaggaaaccgtgttgtgtacgtaagattcaggaaacgaaaccaggagccgcgggtgttggcgcaaaggttactcccagacccttttccggctgacttctgagaaggttgcgcagcagctgtgcccggcagtctagaggcgcagaagaggaagccatcgcctggccccggctctctggaccttgtctcgctcgggagcggaaacagcggcagccagagactcacagatgaatgcttctcacccggaaacaaacttgccagttgggtatcctcctcagtatccaccgacagcattccaaggacctccaggatatagtggctaccctgggccccaggtcagctacccacccccaccagccggccattcaggtcctggcccagctggctttcctgtcccaaatcagccagtgtataatcagccagtatataatcagccagttggagctgcaggggtaccatggatgccagcgccacagcctccattaaactgtccacctggattagaatatttaagtcagatagatcagatactgattcatcagcaaattgaacttctggaagttttaacaggttttgaaactaataacaaatatgaaattaagaacagctttggacagagggtttactttgcagcggaagatactgattgctgtacccgaaattgctgtgggccatctagaccttttaccttgaggattattgataatatgggtcaagaagtcataactctggagagaccactaagatgtagcagctgttgttgtccctgctgccttcaggagatagaaatccaagctcctcctggtgtaccaataggttatgttattcagacttggcacccatgtctaccaaagtttacaattcaaaatgagaaaagagaggatgtactaaaaataagtggtccatgtgttgtgtgcagctgttgtggagatgttgattttgagattaaatctcttgatgaacagtgtgtggttggcaaaatttccaagcactggactggaattttgagagaggcatttacagacgctgataactttggaatccagttccctttagaccttgatgttaaaatgaaagctgtaatgattggtgcctgtttcctcattgacttcatgttttttgaaagcactggcagccaggaacaaaaatcaggagtgtggtagtggattagtgaaagtctcctcaggaaatctgaagtctgtatattgattgagactatctaaactcatacctgtatgaattaagctgtaaggcctgtagctctggttgtatacttttgcttttcaaattatagtttatcttctgtataactgatttataaaggtttttgtacattttttaatactcattgtcaatttgagaaaaaggacatatgagtttttgcatttatt

SEQ ID NO: 16064 - DNA, 983 bp, Homo sapiens
  source 1..983: mol_type = unassigned DNA
agtctagaggcgcagaagaggaagccatcgcctggccccggctctctggaccttgtctcgctcgggagcggaaacagcggcagccagaggaccacataaacccattttgaattattcaaccattgctgaacttcttgaaactgttttaatcatggacaaacaaaactcacagatgaatgcttctcacccggaaacaaacttgccagttgggtatcctcctcagtatccaccgacagcattccaagatagatcagatactgattcatcagcaaattgaacttctggaagttttaacaggttttgaaactaataacaaatatgaaattaagaacagctttggacagagggtttactttgcagcggaagatactgattgctgtacccgaaattgctgtgggccatctagaccttttaccttgaggattattgataatatgggtcaagaagtcataactctggagagaccactaagatgtagcagctgttgttgtccctgctgccttcaggagatagaaatccaagctcctcctggtgtaccaataggttatgttattcagacttggcacccatgtctaccaaagtttacaattcaaaatgagaaaagagaggatgtactaaaaataagtggtccatgtgttgtgtgcagctgttgtggagatgttgattttgagattaaatctcttgatgaacagtgtgtggttggcaaaatttccaagcactggactggaattttgagagaggcatttacagacgctgataactttggaatccagttccctttagaccttgatgttaaaatgaaagctgtaatgattggtgcctgtttcctcattgacttcatgttttttgaaagcactggcagccaggaacaaaaatcaggagtgtggtagtggattagtgaaagtctcctcaggaaatctgaagtctgtatattgattgagactatctaaactcatacctgtatgaattaagctgtaaggcct

SEQ ID NO: 16065 - DNA, 996 bp, Homo sapiens
  source 1..996: mol_type = unassigned DNA
aaaggttactcccagacccttttccggctgacttctgagaaggttgcgcagcagctgtgcccggcagtctagaggcgcagaagaggaagccatcgcctggccccggctctctggaccttgtctcgctcgggagcggaaacagcggcagccagagaactgttttaatcatggacaaacaaaactcacagatgaatgcttctcacccggaaacaaacttgccagttgggtatcctcctcagtatccaccgacagcattccaagatagatcagatactgattcatcagcaaattgaacttctggaagttttaacaggttttgaaactaataacaaatatgaaattaagaacagctttggacagagggtttactttgcagcggaagatactgattgctgtacccgaaattgctgtgggccatctagaccttttaccttgaggattattgataatatgggtcaagaagtcataactctggagagaccactaagatgtagcagctgttgttgtccctgctgccttcaggagatagaaatccaagctcctcctggtgtaccaataggttatgttattcagacttggcacccatgtctaccaaagtttacaattcaaaatgagaaaagagaggatgtactaaaaataagtggtccatgtgttgtgtgcagctgttgtggagatgttgattttgagattaaatctcttgatgaacagtgtgtggttggcaaaatttccaagcactggactggaattttgagagaggcatttacagacgctgataactttggaatccagttccctttagaccttgatgttaaaatgaaagctgtaatgattggtgcctgtttcctcattgacttcatgttttttgaaagcactggcagccaggaacaaaaatcaggagtgtggtagtggattagtgaaagtctcctcaggaaatctgaagtctgtatattgattgagactatctaaactcatacctgtatgaattaagctgtaagg

SEQ ID NO: 16066 - DNA, 581 bp, Homo sapiens
  source 1..581: mol_type = unassigned DNA
catcgcctggccccggctctctggaccttgtctcgctcgggagcggaaacagcggcagccagagaactgttttaatcatggacaaacaaaactcacagatgaatgcttctcacccggaaacaaacttgccagttgggtatcctcctcagtatccaccgacagcattccaagatagatcagatactgattcatcagcaaattgaacttctggaagatagaaatccaagctcctcctggtgtaccaataggttatgttattcagacttggcacccatgtctaccaaagtttacaattcaaaatgagaaaagagaggatgtactaaaaataagtggtccatgtgttgtgtgcagctgttgtggagatgttgattttgagattaaatctcttgatgaacagtgtgtggttggcaaaatttccaagcactggactggaattttgagagaggcatttacagacgctgataactttggaatccagttccctttagaccttgatgttaaaatgaaagctgtaatgattggtgcctgtttcctcattgacttcatgttttttgaaagcactggcagccaggaacaaaaat

SEQ ID NO: 16067 - DNA, 984 bp, Homo sapiens
  source 1..984: mol_type = unassigned DNA
ggcgcagaagaggaagccatcgcctggccccggctctctggaccttgtctcgctcgggagcggaaacagcggcagccagaggaccacataaacccattttgaattattcaaccattgctgaacttcttgaaactgttttaatcatggacaaacaaaactcacagatgaatgcttctcacccggaaacaaacttgccagttgggtatcctcctcagtatccaccgacagcattccaagatagatcagatactgattcatcagcaaattgaacttctggaagttttaacaggttttgaaactaataacaaatatgaaattaagaacagctttggacagagggtttactttgcagcggaagatactgattgctgtacccgaaattgctgtgggccatctagaccttttaccttgaggattattgataatatgggtcaagaagtcataactctggagagaccactaagatgtagcagctgttgttgtccctgctgccttcaggaggtctgtgatcaattaccagggcactttgtaaaatagttcagcaagaatttctgccctgtcattgaacctttcatcgaacctaggcattatgattattacatttacatatattattttgcctttgtagatagaaatccaagctcctcctggtgtaccaataggttatgttattcagacttggcacccatgtctaccaaagtttacaattcaaaatgagaaaagagaggatgtactaaaaataagtggtccatgtgttgtgtgcagctgttgtggagatgttgattttgagattaaatctcttgatgaacagtgtgtggttggcaaaatttccaagcactggactggaattttgagagaggcatttacagacgctgataactttggaatccagttccctttagaccttgatgttaaaatgaaagctgtaatgattggtgcctgtttcctcattgacttcatgttttttgaaagcactggcagcca

SEQ ID NO: 16068 - DNA, 514 bp, Homo sapiens
  source 1..514: mol_type = unassigned DNA
ctggctttcctgtcccaaatcagccagtgtataatcagccagtatataatcagccagttggagctgcaggggtaccatggatgccagcgccacagcctccattaaactgtccacctggattagaatatttaagtcagatagatcagatactgattcatcagcaaattgaacttctggaagaaatccaagctcctcctggtgtaccaataggttatgttattcagacttggcacccatgtctaccaaagtttacaattcaaaatgagaaaagagaggatgtactaaaaataagtggtccatgtgttgtgtgcagctgttgtggagatgttgattttgagattaaatctcttgatgaacagtgtgtggttggcaaaatttccaagcactggactggaattttgagagaggcatttacagacgctgataactttggaatccagttccctttagaccttgatgttaaaatgaaagctgtaatgattggtgcctgtttcctcattgacttcatgttttt

SEQ ID NO: 16069 - DNA, 629 bp, Homo sapiens
  source 1..629: mol_type = unassigned DNA
aaattgttaaatatttcaggaaaactttctgaaatataatttctccgtacaatgaaacagtttttttcatatatctataaatagatacaggagcctccagttatctaatgagggttacatatggtgcataattttaataccatatttgtttcatcttacttcaaatttgaaagtacttttgctataagtttcctaaaagtatttaatacttttttttttcaatttagattaaatctcttgatgaacagtgtgtggttggcaaaatttccaagcactggactggaattttgagagaggcatttacagacgctgataactttggaatccagttccctttagaccttgatgttaaaatgaaagctgtaatgattgtaggcatatgtggaaaaaatttagtgaaacaaggaaactttaccatgactcatagtaattaaattaaaccatctaatataggagtatgaagtacaataagagtgtacattcactcaagtgtgtagacctaactaccaaattacaggaaataattggatataccagtgattctgaaattgccttcacattagaaccacctagggactttaaaaactccaaggactagtccatacctcagttcaactaaatcagaaact

SEQ ID NO: 16070 - DNA, 870 bp, Homo sapiens
  source 1..870: mol_type = unassigned DNA
gaggaagccatcgcctggccccggctctctggaccttgtctcgctcgggagcggaaacagcggcagccagagaactgttttaatcatggacaaacaaaactcacagatgaatgcttctcacccggaaacaaacttgccagttgggtatcctcctcagtatccaccgacagcattccaagatagatcagatactgattcatcagcaaattgaacttctggaagttttaacaggttttgaaactaataacaaatatgaaattaagaacagctttggacagagggtttactttgcagcggaagatactgattgctgtacccgaaattgctgtgggccatctagaccttttaccttgaggattattgataatatgggtcaagaagtcataactctggagagaccactaagatgtagcagctgttgttgtccctgctgccttcaggagatagaaatccaagctcctcctggtgtaccaataggttatgttattcagacttggcacccatgtctaccaaagtttacaattcaaaatgagaaaagagaggatgtactaaaaataagtggtccatgtgttgtgtgcagctgttgtggagatgttgattttgagattaaatctcttgatgaacagtgtgtggttggcaaaatttccaagcactggactggaattttgagagaggcatttacagacgctgataactttggaatccagttccctttagaccttgatgttaaaatgaaagctgtaatgattggtgcctgtttcctcattgtaagtctgttcttattaatcttgattatagatgctttctctaggttcattctgaaatgattcagtaaagtgtatatttcaaaatgacattttaaaatttata

SEQ ID NO: 16071 - DNA, 340 bp, Homo sapiens
  source 1..340: mol_type = unassigned DNA
tttgtagatagaaatccaagctcctcctggtgtaccaataggttatgttattcagacttggcacccatgtctaccaaagtttacaattcaaaatgagaaaagagaggatgtactaaaaataagtggtccatgtgttgtgtgcagctgttgtggagatgttgattttgagaatgatgatatcaagattaaatctcttgatgaacagtgtgtggttggcaaaatttccaagcactggactggaattttgagagaggcatttacagacgctgataactttggaatccagttccctttagaccttgatgttaaaatgaaagctgtaatgattggtgcctgtttc

SEQ ID NO: 16072 - DNA, 862 bp, Homo sapiens
  source 1..862: mol_type = unassigned DNA
gcagctgtgcccggcagtctagaggcgcagaagaggaagccatcgcctggccccggctctctggaccttgtctcgctcgggagcggaaacagcggcagccagagaactgttttaatcatggacaaacaaaactcacagatgaatgcttctcacccggaaacaaacttgccagttgggtatcctcctcagtatccaccgacagcattccaaggacctccaggatatagtggctaccctgggccccaggtcagctacccacccccaccagccggccattcaggtcctggcccagctggctttcctgtcccaaatcagccagtgtataatcagccagtatataatcagccagttggagctgcaggggtaccatggatgccagcgccacagcctccattaaactgtccacctggattagaatatttaagtcagatagatcagatactgattcatcagcaaattgaacttctggaagcggaagatactgattgctgtacccgaaattgctgtgggccatctagaccttttaccttgaggattattgataatatgggtcaagaagtcataactctggagagaccactaagatgtagcagctgttgttgtccctgctgccttcaggagatagaaatccaagctcctcctggtgtaccaataggttatgttattcagacttggcacccatgtctaccaaagtttacaattcaaaatgagaaaagagaggatgtactaaaaataagtggtccatgtgttgtgtgcagctgttgtggagatgttgattttgagattaaatctcttgatgaacagtgtgtggttggcaaaatttccaagcactggactggaattttgagagaggcatttacag

SEQ ID NO: 16073 - DNA, 701 bp, Homo sapiens
  source 1..701: mol_type = unassigned DNA
aggagccgcgggtgttggcgcaaaggttactcccagacccttttccggctgacttctgagaaggttgcgcagcagctgtgcccggcagtctagaggcgcagaagaggaagccatcgcctggccccggctctctggaccttgtctcgctcgggagcggaaacagcggcagccagagactcacagatgaatgcttctcacccggaaacaaacttgccagttgggtatcctcctcagtatccaccgacagcattccaagatagatcagatactgattcatcagcaaattgaacttctggaagttttaacaggttttgaaactaataacaaatatgaaattaagaacagctttggacagagggtttactttgcagcggaagatactgattgctgtacccgaaattgctgtgggccatctagaccttttaccttgaggattattgataatatgggtcaagaagtcataactctggagagaccactaagatgtagcagctgttgttgtccctgctgccttcaggagatagaaatccaagctcctcctggtgtaccaataggttatgttattcagacttggcacccatgtctaccaaagtttacaattcaaaatgagaaaagagaggatgtactaaaaataagtggtccatgtgttgtgtgcagctgttgtggagatgttgattttgagattaaatctcttgatgaac

SEQ ID NO: 16074 - DNA, 1198 bp, Homo sapiens
  source 1..1198: mol_type = unassigned DNA
gttcctctccttaaccaccggacaaacgtctctggagtctctccaatgagcaagaaagcaagtcgggggtaggggaggggcctcacaccagggggtgggcgcagtccctcctccagctccttcaccctccagtagtctcgtgggtccccgagcgccagcgcgggaaccgggaaaaggaaaccgtgttgtgtacgtaagattcaggaaacgaaaccaggagccgcgggtgttggcgcaaaggttactcccagacccttttccggctgacttctgagaaggttgcgcagcagctgtgcccggcagtctagaggcgcagaagaggaagccatcgcctggccccggctctctggaccttgtctcgctcgggagcggaaacagcggcagccagagcataaaatacacaagaggatttttatggaatggctccttgttacaagaactgttttaatcatggacaaacaaaactcacagatgaatgcttctcacccggaaacaaacttgccagttgggtatcctcctcagtatccaccgacagcattccaaggacctccaggatatagtggctaccctgggccccaggtcagctacccacccccaccagccggccattcaggtcctggcccagctggctttcctgtcccaaatcagccagtgtataatcagccagtatataatcagccagttggagctgcaggggtaccatggatgccagcgccacagcctccattaaactgtccacctggattagaatatttaagtcagatagatcagatactgattcatcagcaaattgaacttctggaagttttaacaggttttgaaactaataacaaatatgaaattaagaacagctttggacagagggtttactttgcagcggaagatactgattgctgtacccgaaattgctgtgggccatctagaccttttaccttgaggattattgataatatgggtcaagaagtcataactctggagagaccactaagatgtagcagctgttgttgtccctgctgccttcaggagatagaaatccaagctcctcctggtgtaccaataggttatgttattcagacttggcacccatgtctaccaaagtttacaattcaaaatgagaaaagagaggatgtactaaaaataagtggtccatgtgttgtgtgcagctgttgtggagatgttgattttgagattaaatctc

SEQ ID NO: 16075 - DNA, 817 bp, Homo sapiens
  source 1..817: mol_type = unassigned DNA
gttgcgcagcagctgtgcccggcagtctagaggcgcagaagaggaagccatcgcctggccccggctctctggaccttgtctcgctcgggagcggaaacagcggcagccagagaactgttttaatcatggacaaacaaaactcacagatgaatgcttctcacccggaaacaaacttgccagttgggtatcctcctcagtatccaccgacagcattccaaggacctccaggatatagtggctaccctgggccccaggtcagctacccacccccaccagccggccattcaggtcctggcccagctggctttcctgtcccaaatcagccagtgtataatcagccagtatataatcagccagttggagctgcaggggtaccatggatgccagcgccacagcctccattaaactgtccacctggattagaatatttaagtcagatagatcagatactgattcatcagcaaattgaacttctggaagttttaacaggttttgaaactaataacaaatatgaaattaagaacagctttggacagagggtttactttgcagcggaagatactgattgctgtacccgaaattgctgtgggccatctagaccttttaccttgaggattattgataatatgggtcaagaagtcataactctggagagaccactaagatgtagcagctgttgttgtccctgctgccttcaggaggtctgtgatcaattaccagggcactttgtaaaatagttcagcaagaatttctgccctgtcattgaacctttcatcgaacctaggcattatgattattacatttacatatattattt

SEQ ID NO: 16076 - DNA, 480 bp, Homo sapiens
  source 1..480: mol_type = unassigned DNA
ctcttcccaaaaggctttagaatgtgttcaccatcatgagctgaccaacaatttctaaattcctactcagaaacacagcaaggggaatgcagtcaagcacaaagggcttaaatgaccagataaggctgggctggatgaataaagaggaatatcctatgaatgtgactgtgtagttttagagtatcccgattcaactgttatatttgacttgtggccttgtagacagtgtgttaatgtcagatcttctttttcagaactgttttaatcatggacaaacaaaactcacagatgaatgcttctcacccggaaacaaacttgccagttgggtatcctcctcagtatccaccgacagcattccaagatagatcagatactgattcatcagcaaattgaacttctggaaggtatgtattcattgttttaatcctgtttctataaagagtagaagtttatgcagataaaggcacattgacctccaca

SEQ ID NO: 16077 - DNA, 1257 bp, Homo sapiens
  source 1..1257: mol_type = unassigned DNA
cagtagtctcgtgggtccccgagcgccagcgcgggaaccgggaaaaggaaaccgtgttgtgtacgtaagattcaggaaacgaaaccaggagccgcgggtgttggcgcaaaggttactcccagacccttttccggctgacttctgagaaggttgcgcagcagctgtgcccggcagtctagaggcgcagaagaggaagccatcgcctggccccggctctctggaccttgtctcgctcgggagcggaaacagcggcagccagagaactgttttaatcatggacaaacaaaactcacagatgaatgcttctcacccggaaacaaacttgccagttgggtatcctcctcagtatccaccgacagcattccaaggacctccaggatatagtggctaccctgggccccaggtcagctacccacccccaccagccggccattcaggtcctggcccagctggctttcctgtcccaaatcagccagtgtataatcagccagtatataatcagccagttggagctgcaggggtaccatggatgccagcgccacagcctccattaaactgtccacctggattagaatatttaagtcaggtaatttcaaagacacaaaatactcataaaaaacagaactgtgcttccagcttgcttaaccagattagcaaatgaataattcaccaaagtctgaaatagcaaaactgtattttctgctaacagattactctaattcttctaggtctggttcaattttaaagcaaaatacaaatgccttagaaaattgtattttctgttatcttaaatacaatctatgataatggccaatagcaaacatttaattagcactgtttcctgcctttgttgtatgcctgatacatgtattaactcatttaatccttattgaaagtctgtgatgtataggtgctacatttttcaaaagaagaaactgaggtccagagaggttatatagctcactctggggtgagaacctaaagagtcaagactgtttttttaatcccgaaactttggtactgagcgaagtgctctttagtctcaatactgaataattgccttataatttggaagaaaatttaaataaagtttattgttgagtttcaataagtggccccaaacaaggggttaatattttatgtataatatgactcacctttttattgtaactaataaaactgcatttttatgatgctgcttttgttctttggaagacctaattttataaatgccattaataaaggagtaaaaagtcc

SEQ ID NO: 16078 - DNA, 415 bp, Homo sapiens
  source 1..415: mol_type = unassigned DNA
tctagaggcgcagaagaggaagccatcgcctggccccggctctctggaccttgtctcgctcgggagcggaaacagcggcagccagagcataaaatacacaagaggatttttatggaatggctccttgttacaaggtactttgcatttataatcagccacagtcacctcagtttcatcccgtatcttacaagtatgatgtgctgtatactcaaagcctcaccacctgcttgccccacccatttgcttaaatgtatcaattttttctaagcttaacttttaccaaaactggagttcaacagatgaatatttttccttcttagatgttaactaaacatttttaaaggtacaaaatttatgtacaaacataacccaaatgacatggaagttacttgatttgtgacttacctctgtaatg

SEQ ID NO: 16079 - DNA, 3303 bp, Homo sapiens
  source 1..3303: mol_type = unassigned DNA
cgagacggggaagccgcgcgcggggaaggagggtccaggcgtgccggacccgcccccagaacccgcgcctagccctcccttccgcgcgcttactttgtttataacttgaaaaatcctctccgtctcccttccctgcctcctttcctttccctttcctctgccagtacaactagacccggcgtctggcgtccccggtgcccagcattctgcggggcaggcggattaattggaattcttcaaaatgtcaggtgtggtacccacagcccctgaacagcctgcaggtgaaatggaaaatcaaacaaaaccaccagatccaaggcctgatgctcctcctgaatacaattctcattttttaccaggaccccctggaacagctgtccctccacctactggctacccaggaggcttgcctatgggatactacagtccacagcaacccagtaccttccctttgtaccagccagttggtggtatccatcctgtccggtatcagcctggcaaatatcctatgccaaatcagtctgttccaataacatggatgccagggccaactcctatggcaaactgccctcctggtctggaatacttagttcagttggacaacatacatgttcttcagcattttgagcctctggaaatgatgacatgttttgaaactaataatagatatgatattaaaaacaactcagaccagatggtttacattgtaaccgaagacacagatgactttaccaggaatgcctatcggacactaaggcccttcgtcctccgggtcactgattgtatgggccgagaaatcatgacaatgcagagacccttcagatgcacctgctgttgcttctgttgcccctctgccagacaagagctggaggtgcagtgtcctcctggtgtcaccattggctttgttgcggaacattggaacctgtgcagggcggtgtacagcatccaaaatgagaagaaagaaaatgtgatgagagttcgtgggccatgctcaacctatggctgtggttcagattctgtttttgaggtcaaatcccttgatggcatatccaacatcggcagtattatccggaagtggaatggtttgttatcagcaatggcagatgctgaccattttgacattcacttcccactagacctggatgtgaagatgaaagccatgatttttggagcttgcttcctcattgacttcatgtattttgaaagatctccaccacaacgttcaagatagagagacacagcaagccatcaactatggttaattttgaaaaatggaaaagttggattgggcttacagtcagcactcagttatttgcaagtgtatttctttgctttgtagagtatttttattgggtgttaactttgacagctgagagtgggcttgcaagaacacaatctaaaagtgtgtttcaattgagtatctctctagtagaataggagttcatcctgaaaagctgtgactcattaacccagtaaacatatacaaagtaagcttaaaacactataaacatgagataagggaaaatgaatccagagttctcatattaataggtagtgaaacaataaggctttttagagcagactttgttggcataaaataacctggcttctatccctaaccctttcctacctttcctctccgtcaacatgtcctcatactgaagacaaacttgtttcaatgatagtcttcatttttaaaaacaaaaaggcaggcagacagaaataatgatgttttcttgcactaagaaggtactacttgtacacatatatcaaaacctcattctgcaaagtttttgaaggtttcaatgggaaatttgattttattacaaaataaaacattttttaatgttaaagtttatatattccatgcttgttttctcattcactggcatggatgatcaggagctgcctatatatgaaggcagaatcagactatcaggaaaggagctggccagggccacagccagtcaagatctctgagcaacttagagacattggtgtcattatatgaagcttgcatttaatacatttatacataatacatttgtacatttaattcataacgtctcttggtcacagatgccttatatataaaataagttgccagatctctaagattgcctagtacacctttgtatctcatttgatgtgatacccagaagagatcattgttttttgtttttgtttttgtttttttcaagaagatccttcgtgatcaccatgctgttctcatggtaagaactggagttatgtttttaaatttggaaatatgacattttatgtagcactttataaaaagtgaaagcgacaaattccaccgctgcttaatactgctttgcttctttttattgacatgatagataaatatgtatctacacagagtaataataataaaacacagtaaacattctatttctctatggtctacagcatgccagtaaataatatgtaggaccaataataaattatcaattacacatttttgtgttaactaattaaaagcatagtgtataagtgagtacactctaattaacttgcttctgttgcactttagttttctacctgcatatggactgcattttttttttttaacacagtcagtatgtagaatgggatgtattcttctgctgctgcttattaaataaagaaagcctgagtgttcttagatggggttattctgagatgagggtcttagcctacagttctttttgaaatgaaaggtgctttgttttttaattatattcatcttttcagggtaaatttgtttttctgagtttctcgtaatgctcatttttacatgctgctactagcttttttttttaaaaaaagtaaaagttgctgctttctaaaatattaattgccttatatttgaaagtgccattgcaatcgtaagtagactatgtatttcctataatgatgtctgatatttaaataggaaatcagacaaacaatattcagaaagtttaagcatataaactttttatttttaacttgcctaaatccctgtattccaaaacctgctgcatcataataaatatatctatatatatttagcataagacgtgatatttttaatttcttttttaaaaaattatatttgtctcttagagttaaaattttctttatataatattgtcatatgtcatagttttaatacaattcacatgatttctatgtttcttaatgatattttgttgtgtaaaattgatcggattgattaaaaaacaaattctctggaatttgtgcgttcatgctttttcgtattctttatggcttttaaataaatatacaatggttaatagt

SEQ ID NO: 16080 - DNA, 2839 bp, Homo sapiens
  source 1..2839: mol_type = unassigned DNA
ataacttgaaaaatcctctccgtctcccttccctgcctcctttcctttccctttcctctgccagtacaactagacccggcgtctggcgtccccggtgcccagcattctgcggggcaggcggtgtggtacccacagcccctgaacagcctgcaggtgaaatggaaaatcaaacaaaaccaccagatccaaggcctgatgctcctcctgaatacaattctcattttttaccaggaccccctggaacagctgtccctccacctactggctacccaggaggcttgcctatgggatactacagtccacagcaacccagtaccttccctttgtaccagccagttggtggtatccatcctgtccggtatcagcctggcaaatatcctatgccaaatcagtctgttccaataacatggatgccagggccaactcctatggcaaactgccctcctggtctggaatacttagttcagctggaggtgcagtgtcctcctggtgtcaccattggctttgttgcggaacattggaacctgtgcagggcggtgtacagcatccaaaatgagaagaaagaaaatgtgatgagagttcgtgggccatgctcaacctatggctgtggttcagattctgtttttgaggtcaaatcccttgatggcatatccaacatcggcagtattatccggaagtggaatggtttgttatcagcaatggcagatgctgaccattttgacattcacttcccactagacctggatgtgaagatgaaagccatgatttttggagcttgcttcctcattgacttcatgtattttgaaagatctccaccacaacgttcaagatagagagacacagcaagccatcaactatggttaattttgaaaaatggaaaagttggattgggcttacagtcagcactcagttatttgcaagtgtatttctttgctttgtagagtatttttattgggtgttaactttgacagctgagagtgggcttgcaagaacacaatctaaaagtgtgtttcaattgagtatctctctagtagaataggagttcatcctgaaaagctgtgactcattaacccagtaaacatatacaaagtaagcttaaaacactataaacatgagataagggaaaatgaatccagagttctcatattaataggtagtgaaacaataaggctttttagagcagactttgttggcataaaataacctggcttctatccctaaccctttcctacctttcctctccgtcaacatgtcctcatactgaagacaaacttgtttcaatgatagtcttcatttttaaaaacaaaaaggcaggcagacagaaataatgatgttttcttgcactaagaaggtactacttgtacacatatatcaaaacctcattctgcaaagtttttgaaggtttcaatgggaaatttgattttattacaaaataaaacattttttaatgttaaagtttatatattccatgcttgttttctcattcactggcatggatgatcaggagctgcctatatatgaaggcagaatcagactatcaggaaaggagctggccagggccacagccagtcaagatctctgagcaacttagagacattggtgtcattatatgaagcttgcatttaatacatttatacataatacatttgtacatttaattcataacgtctcttggtcacagatgccttatatataaaataagttgccagatctctaagattgcctagtacacctttgtatctcatttgatgtgatacccagaagagatcattgttttttgtttttgtttttgtttttttcaagaagatccttcgtgatcaccatgctgttctcatggtaagaactggagttatgtttttaaatttggaaatatgacattttatgtagcactttataaaaagtgaaagcgacaaattccaccgctgcttaatactgctttgcttctttttattgacatgatagataaatatgtatctacacagagtaataataataaaacacagtaaacattctatttctctatggtctacagcatgccagtaaataatatgtaggaccaataataaattatcaattacacatttttgtgttaactaattaaaagcatagtgtataagtgagtacactctaattaacttgcttctgttgcactttagttttctacctgcatatggactgcattttttttttttaacacagtcagtatgtagaatgggatgtattcttctgctgctgcttattaaataaagaaagcctgagtgttcttagatggggttattctgagatgagggtcttagcctacagttctttttgaaatgaaaggtgctttgttttttaattatattcatcttttcagggtaaatttgtttttctgagtttctcgtaatgctcatttttacatgctgctactagcttttttttttaaaaaaagtaaaagttgctgctttctaaaatattaattgccttatatttgaaagtgccattgcaatcgtaagtagactatgtatttcctataatgatgtctgatatttaaataggaaatcagacaaacaatattcagaaagtttaagcatataaactttttatttttaacttgcctaaatccctgtattccaaaacctgctgcatcataataaatatatctatatatatttagcataagacgtgatatttttaatttcttttttaaaaaattatatttgtctcttagagttaaaattttctttatataatattgtcatatgtcatagttttaatacaattcacatgatttctatgtttcttaatgatattttgttgtgtaaaattgatcggattgattaaaaaacaaattctctgg

SEQ ID NO: 16081 - DNA, 1442 bp, Homo sapiens
  source 1..1442: mol_type = unassigned DNA
ggccgcggtgcctgcgggcaggcgcggaggttgcgcggcgtcctgcgctagcagttcccggacactgcgctcgcgtcgcatcctcaggtggttgcagaagttccgtggtgtcgggcgcgcgtctgcactgcagacgcagagggtttgggagcgagcagtttcctgcccagggatgggggtcctggctgcacttcacgggggcggccctttcgtttcgctctgcgtgacaggtctcgcttgattgggtttctcatgggtctctggcgtttctacggcgcggctctcacggactcaggccaggccactcgcaggattaattggaattcttcaaaatgtcaggtgtggtacccacagcccctgaacagcctgcaggtgaaatggaaaatcaaacaaaaccaccagatccaaggcctgatgctcctcctgaatacaattctcattttttaccaggaccccctggaacagctgtccctccacctactggctacccaggaggcttgcctatgggatactacagtccacagcaacccagtaccttccctttgtaccagccagttggtggtatccatcctgtccggtatcagcctggcaaatatcctatgccaaatcagtctgttccaataacatggatgccagggccaactcctatggcaaactgccctcctggtctggaatacttagttcagttggacaacatacatgttcttcagcattttgagcctctggaaatgatgacatgttttgaaactaataatagatatgatattaaaaacaactcagaccagatggtttacattgtaaccgaagacacagatgactttaccaggaatgcctatcggacactaaggcccttcgtcctccgggtcactgattgtatgggccgagaaatcatgacaatgcagagacccttcagatgcacctgctgttgcttctgttgcccctctgccagacaagagctggaggtgcagtgtcctcctggtgtcaccattggctttgttgcggaacattggaacctgtgcagggcggtgtacagcatccaaaatgagaagaaagaaaatgtgatgagagttcgtgggccatgctcaacctatggctgtggttcagattctgtttttgaggtcaaatcccttgatggcatatccaacatcggcagtattatccggaagtggaatggtttgttatcagcaatggcagatgctgaccattttgacattcacttcccactagacctggatgtgaagatgaaagccatgatttttggagcttgcttcctcattgacttcatgtattttgaaagatctccaccacaacgttcaagatagagagacacagcaagccatcaactatggttaattttgaaaaatggaaaagttggattgggcttacagtcagcactcagttatttgcaagtgtatttctttgctttgtagagtatttttatt

SEQ ID NO: 16082 - DNA, 1375 bp, Homo sapiens
  source 1..1375: mol_type = unassigned DNA
aggcgtgccggacccgcccccagaacccgcgcctagccctcccttccgcgcgcttactttgtttataacttgaaaaatcctctccgtctcccttccctgcctcctttcctttccctttcctctgccagtacaactagacccggcgtctggcgtccccggtgcccagcattctgcggggcaggcggtctcgcttgattgggtttctcatgggtctctggcgtttctacggcgcggctctcacggactcaggccaggccactcgcagcttggagacacatagggcaccgtacaacaaactccagctccagaggattaattggaattcttcaaaatgtcaggtgtggtacccacagcccctgaacagcctgcaggtgaaatggaaaatcaaacaaaaccaccagatccaaggcctgatgctcctcctgaatacaattctcattttttaccaggaccccctggaacagctgtccctccacctactggctacccaggaggcttgcctatgggatactacagtccacagcaacccagtaccttccctttgtaccagccagttggtggtatccatcctgtccggtatcagcctggcaaatatcctatgccaaatcagtctgttccaataacatggatgccagggccaactcctatggcaaactgccctcctggtctggaatacttagttcagttggacaacatacatgttcttcagcattttgagcctctggaaatgatgacatgttttgaaactaataatagatatgatattaaaaacaactcagaccagatggtttacattgtaaccgaagacacagatgactttaccaggaatgcctatcggacactaaggcccttcgtcctccgggtcactgattgtatgggccgagaaatcatgacaatgcagagacccttcagatgcacctgctgttgcttctgttgcccctctgccagacaagagctggaggtgcagtgtcctcctggtgtcaccattggctttgttgcggaacattggaacctgtgcagggcggtgtacagcatccaaaatgagaagaaagaaaatgtgatgagagttcgtgggccatgctcaacctatggctgtggttcagattctgtttttgaggtcaaatcccttgatggcatatccaacatcggcagtattatccggaagtggaatggtttgttatcagcaatggcagatgctgaccattttgacattcacttcccactagacctggatgtgaagatgaaagccatgatttttggagcttgcttcctcattgacttcatgtattttgaaagatctccaccacaacgttcaagatagagagacacagcaagccatcaactatggttaattttgaaaaatggaaaagttgga

SEQ ID NO: 16083 - DNA, 807 bp, Homo sapiens
  source 1..807: mol_type = unassigned DNA
gattaattggaattcttcaaaatgtcaggtgtggtacccacagcccctgaacagcctgcaggtgaaatggaaaatcaaacaaaaccaccagatccaaggcctgatgctcctcctgaatacaattctcattttttaccaggaccccctggaacagctgtccctccacctactggctacccaggaggcttgcctatgggatactacagtccacagcaacccagtaccttccctttgtaccagccagttggtggtatccatcctgtccggtatcagcctggcaaatatcctatgccaaatcagtctgttccaataacatggatgccagggccaactcctatggcaaactgccctcctggtctggaatacttagttcagttggacaacatacatgttcttcagcattttgagcctctggaaactggaggtgcagtgtcctcctggtgtcaccattggctttgttgcggaacattggaacctgtgcagggcggtgtacagcatccaaaatgagaagaaagaaaatgtgatgagagttcgtgggccatgctcaacctatggctgtggttcagattctgtttttgaggtgaaactatgtaaaaatagtgtttctgatatttttcctactcatattaacagaccatggaaagatctggttgtagacatttttttttaatgtgaatgaataacatagtgttaggaaagagttaattaaccagttgacatcaaaagattttaaagttattgtgagtagattgaggttttccaaaatgaaagctttttttatgacttcagtacttgataaaaataaaa

SEQ ID NO: 16084 - DNA, 1054 bp, Homo sapiens
  source 1..1054: mol_type = unassigned DNA
cccagaacccgcgcctagccctcccttccgcgcgcttactttgtttataacttgaaaaatcctctccgtctcccttccctgcctcctttcctttccctttcctctgccagtacaactagacccggcgtctggcgtccccggtgcccagcattctgcggggcaggcggtctcgcttgattgggtttctcatgggtctctggcgtttctacggcgcggctctcacggactcaggccaggccactcgcaggattaattggaattcttcaaaatgtcaggtgtggtacccacagcccctgaacagcctgcaggtgaaatggaaaatcaaacaaaaccaccagatccaaggcctgatgctcctcctgaatacaattctcattttttaccaggaccccctggaacagctgtccctccacctactggctacccaggaggcttgcctatgggatactacagtccacagcaacccagtaccttccctttgtaccagccagttggtggtatccatcctgtccggtatcagcctggcaaatatcctatgccaaatcagtctgttccaataacatggatgccagggccaactcctatggcaaactgccctcctggtctggaatacttagttcagttggacaacatacatgttcttcagcattttgagcctctggaaatgatgacatgttttgaaactaataatagatatgatattaaaaacaactcagaccagatggtttacattgtaaccgaagacacagatgactttaccaggaatgcctatcggacactaaggcccttcgtcctccgggtcactgattgtatgggccgagaaatcatgacaatgcagagacccttcagatgcacctgctgttgcttctgttgcccctctgccagacaagagctggaggtgcagtgtcctcctggtgtcaccattggctttgttgcggaacattggaacctgtgcagggcggtgtacagcatccaaaatgagaagaaagaaaatgtgatgagagttcgtgggccatgctcaacctatggctgtggttcagattctgtttttgag

SEQ ID NO: 16085 - DNA, 609 bp, Homo sapiens
  source 1..609: mol_type = unassigned DNA
ctcccttccgcgcgcttactttgtttataacttgaaaaatcctctccgtctcccttccctgcctcctttcctttccctttcctctgccagtacaactagacccggcgtctggcgtccccggtgcccagcattctgcggggcaggcggattaattggaattcttcaaaatgtcaggtgtggtacccacagcccctgaacagcctgcaggtgaaatggaaaatcaaacaaaaccaccagatccaaggcctgatgctcctcctgaatacaattctcattttttaccaggaccccctggaacagctgtccctccacctactggctacccaggaggcttgcctatgggatactacagtccacagcaacccagtaccttccctttgtaccagccagttggtggtatccatcctgtccggtatcagcctggcaaatatcctatgccaaatcagtctgttccaataacatggatgccagggccaactcctatggcaaactgccctcctggtctggaatacttagttcagctggaggtgcagtgtcctcctggtgtcaccattggctttgttgcggaacattggaacctgtgcagggcggtgtacagcatccaaaatg

SEQ ID NO: 16086 - DNA, 814 bp, Homo sapiens
  source 1..814: mol_type = unassigned DNA
gtttataacttgaaaaatcctctccgtctcccttccctgcctcctttcctttccctttcctctgccagtacaactagacccggcgtctggcgtccccggtgcccagcattctgcggggcaggcgcttggagacacatagggcaccgtacaacaaactccagctccagaggattaattggaattcttcaaaatgtcaggtgtggtacccacagcccctgaacagcctgcaggtgaaatggaaaatcaaacaaaaccaccagatccaaggcctgatgctcctcctgaatacaattctcattttttaccaggaccccctggaacagctgtccctccacctactggctacccaggaggcttgcctatgggatactacagtccacagcaacccagtaccttccctttgtaccagccagttggtggtatccatcctgtccggtatcagcctggcaaatatcctatgccaaatcagtctgttccaataacatggatgccagggccaactcctatggcaaactgccctcctggtctggaatacttagttcagttggacaacatacatgttcttcagcattttgagcctctggaaatgatgacatgttttgaaactaataatagatatgatattaaaaacaactcagaccagatggtttacattgtaaccgaagacacagatgactttaccaggaatgcctatcggacactaaggcccttcgtcctccgggtcactgattgtatgggccgagaaatcatgacaatgcagagacccttcagatgcacctgctgttgcttctgttgcccctctgccagacaagag

SEQ ID NO: 16087 - DNA, 683 bp, Homo sapiens
  source 1..683: mol_type = unassigned DNA
gtgtttctcttaagcttgttacattgttttcctcataactgtactatctaacgttaaactttaacatttcttgactttttttaaatctcattctactacaatataaactgcagcacagtaggtggcagagtgtctgtctgcttcattgctgtactctcaacatctgtattagtgcctcgtacataataggtgctcaataagtatttttttaattaatgaagggacaaatgtaaggattaattggaattcttcaaaatgtcaggtgtggtacccacagcccctgaacagcctgcaggtgaaatggaaaatcaaacaaaaccaccagatccaaggcctgatgctcctcctgaatacaattctcattttttaccaggaccccctggaacagctgtccctccacctactggctacccaggaggcttgcctatgggatactacagtccacagcaacccagtaccttccctttgtaccagccagttggtggtatccatcctgtccggtatcagcctggcaaatatcctatgccaaatcagtctgttccaataacatggatgccagggccaactcctatggcaaactgccctcctggtctggaatacttagttcagttggacaacatacatgttcttcagcattttgagcctctggaaatgatgacatgttttgaaactaataatagata

SEQ ID NO: 16088 - DNA, 593 bp, Homo sapiens
  source 1..593: mol_type = unassigned DNA
aacatttcttgactttttttaaatctcattctactacaatataaactgcagcacagtaggtggcagagtgtctgtctgcttcattgctgtactctcaacatctgtattagtgcctcgtacataataggtgctcaataagtatttttttaattaatgaagggacaaatgtaaggtaactggaggttaaaaaaattacagaaatccttacctgtgttactgagtagcaatactatttattatgtatgtattttaaaggcattaacattttttatttttcaggattaattggaattcttcaaaatgtcaggtgtggtacccacagcccctgaacagcctgcaggtgaaatggaaaatcaaacaaaaccaccagatccaaggcctgatgctcctcctgaatacaattctcattttttaccaggaccccctggaacagctgtccctccacctactggctacccaggaggcttgcctatgggatactacagtccacagcaacccagtaccttccctttgtaccagccagttggtggtatccatcctgtccggtatcagcctggcaaatatcctatgccaaatcagtctgttccaataac

SEQ ID NO: 16089 - DNA, 3033 bp, Homo sapiens
  source 1..3033: mol_type = unassigned DNA
cgagacggggaagccgcgcgcggggaaggagggtccaggcgtgccggacccgcccccagaacccgcgcctagccctcccttccgcgcgcttactttgtttataacttgaaaaatcctctccgtctcccttccctgcctcctttcctttccctttcctctgccagtacaactagacccggcgtctggcgtccccggtgcccagcattctgcggggcaggcggattaattggaattcttcaaaatgtcaggtgtggtacccacagcccctgaacagcctgcaggtgaaatggaaaatcaaacaaaaccaccagatccaaggcctgatgctcctcctgaatacaattctcattttttaccaggaccccctggaacagctgtccctccacctactggctacccaggaggcttgcctatgggatactacagtccacagcaacccagtaccttccctttgtaccagccagttggtggtatccatcctgtccggtatcagcctggcaaatatcctatgccaaatcagtctgttccaataacatggatgccagggccaactcctatggcaaactgccctcctggtctggaatacttagttcagctggaggtgcagtgtcctcctggtgtcaccattggctttgttgcggaacattggaacctgtgcagggcggtgtacagcatccaaaatgagaagaaagaaaatgtgatgagagttcgtgggccatgctcaacctatggctgtggttcagattctgtttttgaggtcaaatcccttgatggcatatccaacatcggcagtattatccggaagtggaatggtttgttatcagcaatggcagatgctgaccattttgacattcacttcccactagacctggatgtgaagatgaaagccatgatttttggagcttgcttcctcattgacttcatgtattttgaaagatctccaccacaacgttcaagatagagagacacagcaagccatcaactatggttaattttgaaaaatggaaaagttggattgggcttacagtcagcactcagttatttgcaagtgtatttctttgctttgtagagtatttttattgggtgttaactttgacagctgagagtgggcttgcaagaacacaatctaaaagtgtgtttcaattgagtatctctctagtagaataggagttcatcctgaaaagctgtgactcattaacccagtaaacatatacaaagtaagcttaaaacactataaacatgagataagggaaaatgaatccagagttctcatattaataggtagtgaaacaataaggctttttagagcagactttgttggcataaaataacctggcttctatccctaaccctttcctacctttcctctccgtcaacatgtcctcatactgaagacaaacttgtttcaatgatagtcttcatttttaaaaacaaaaaggcaggcagacagaaataatgatgttttcttgcactaagaaggtactacttgtacacatatatcaaaacctcattctgcaaagtttttgaaggtttcaatgggaaatttgattttattacaaaataaaacattttttaatgttaaagtttatatattccatgcttgttttctcattcactggcatggatgatcaggagctgcctatatatgaaggcagaatcagactatcaggaaaggagctggccagggccacagccagtcaagatctctgagcaacttagagacattggtgtcattatatgaagcttgcatttaatacatttatacataatacatttgtacatttaattcataacgtctcttggtcacagatgccttatatataaaataagttgccagatctctaagattgcctagtacacctttgtatctcatttgatgtgatacccagaagagatcattgttttttgtttttgtttttgtttttttcaagaagatccttcgtgatcaccatgctgttctcatggtaagaactggagttatgtttttaaatttggaaatatgacattttatgtagcactttataaaaagtgaaagcgacaaattccaccgctgcttaatactgctttgcttctttttattgacatgatagataaatatgtatctacacagagtaataataataaaacacagtaaacattctatttctctatggtctacagcatgccagtaaataatatgtaggaccaataataaattatcaattacacatttttgtgttaactaattaaaagcatagtgtataagtgagtacactctaattaacttgcttctgttgcactttagttttctacctgcatatggactgcattttttttttttaacacagtcagtatgtagaatgggatgtattcttctgctgctgcttattaaataaagaaagcctgagtgttcttagatggggttattctgagatgagggtcttagcctacagttctttttgaaatgaaaggtgctttgttttttaattatattcatcttttcagggtaaatttgtttttctgagtttctcgtaatgctcatttttacatgctgctactagcttttttttttaaaaaaagtaaaagttgctgctttctaaaatattaattgccttatatttgaaagtgccattgcaatcgtaagtagactatgtatttcctataatgatgtctgatatttaaataggaaatcagacaaacaatattcagaaagtttaagcatataaactttttatttttaacttgcctaaatccctgtattccaaaacctgctgcatcataataaatatatctatatatatttagcataagacgtgatatttttaatttcttttttaaaaaattatatttgtctcttagagttaaaattttctttatataatattgtcatatgtcatagttttaatacaattcacatgatttctatgtttcttaatgatattttgttgtgtaaaattgatcggattgattaaaaaacaaattctctggaatttgtgcgttcatgctttttcgtattctttatggcttttaaataaatatacaatggttaatagt

SEQ ID NO: 16090 - DNA, 1731 bp, Homo sapiens
  source 1..1731: mol_type = unassigned DNA
agaccccgtcgcccggatcccctgagctgcccgccatcccacgtgaccgcgccgccccccagctccaccgctgagcccgctcgccatggccctcttcggggccctcttcctagcgctgctggcaggcgcacatgcagagttcccaggctgcaagatccgcgtcacctccaaggcgctggagctggtgaagcaggaggggctgcgctttctggagcaagagctggagactatcaccattccggacctgcggggcaaagaaggccacttctactacaacatctctgaggtgaaggtcacagagctgcaactgacatcttccgagctcgatttccagccacagcaggagctgatgcttcaaatcaccaatgcctccttggggctgcgcttccggagacagctgctctactggttcttgaaggtgtatgattttctctccacgttcatcacctcagggatgcgcttcctcctcaaccagcagatctgccctgtcctctaccacgcagggacggtcctgctcaactccctcctggacaccgtgcctgtgcgcagttctgtggacgagcttgttggcattgactattccctcatgaaggatcctgtggcttccaccagcaacctggacatggacttccggggggccttcttccccctgactgagaggaactggagcctccccaaccgggcagtggagccccagctgcaggaggaagagcggatggtgtatgtggccttctctgagttcttcttcgactctgccatggagagctacttccgggcgggggccctgcagctgttgctggtgggggacaaggtgccccacgacctggacatgctgctgagggccacctactttgggagcattgtcctgctgagcccagcagtgattgactccccattgaagctggagctgcgggtcctggccccaccgcgctgcaccatcaagccctctggcaccaccatctctgtcactgctagcgtcaccattgccctggtcccaccagaccagcctgaggtccagctgtccagcatgactatggacgcccgtctcagcgccaagatggctctccgggggaaggccctgcgcacgcagctggacctgcgcaggttccgaatctattccaaccattctgcactggagtcgctggctctgatcccattacaggcccctctgaagaccatgctgcagattggggtgatgcccatgctcaatgagcggacctggcgtggggtgcagatcccactacctgagggcatcaactttgtgcatgaggtggtgacgaaccatgcgggattcctcaccatcggggctgatctccactttgccaaagggctgcgagaggtgattgagaagaaccggcctgctgatgtcagggcgtccactgcccccacaccgtccacagcagctgtctgagccctcaatccccaagctggcagctgtcattcaggaccccaacccctctcagcccctcttttcccacattcatagcctgtagtgccccctctaacccccagtgccacagagaagacgggatttgaagctgtacccaatttaattccataatcaatctatcaattacagtccgtccaccacctccctgtgggctgtcctgagctctgttgggttcctgggatggaatcagtgcatcataaagggcattctttaagcagagaaggggccaggccaccccattcaggaactgctgcgggaataaagtgctaacttgcccccag

SEQ ID NO: 16091 - DNA, 1530 bp, Homo sapiens
  source 1..1530: mol_type = unassigned DNA
atgtagagggggccaagaaggaagcaggaccagtggatgtgaggcgtggtcgaagaacaacagaaagggtgaaggtcacagagctgcaactgacatcttccgagctcgatttccagccacagcaggagctgatgcttcaaatcaccaatgcctccttggggctgcgcttccggagacagctgctctactggttcttctatgatgggggctacatcaacgcctcagctgagggtgtgtccatccgcactggtctggagctctcccgggatcccgctggacggatgaaagtgtccaatgtctcctgccaggcctctgtctccagaatgcacgcggccttcgggggaaccttcaagaaggtgtatgattttctctccacgttcatcacctcagggatgcgcttcctcctcaaccagcagatctgccctgtcctctaccacgcagggacggtcctgctcaactccctcctggacaccgtgcctgtgcgcagttctgtggacgagcttgttggcattgactattccctcatgaaggatcctgtggcttccaccagcaacctggacatggacttccggggggccttcttccccctgactgagaggaactggagcctccccaaccgggcagtggagccccagctgcaggaggaagagcggatggtgtatgtggccttctctgagttcttcttcgactctgccatggagagctacttccgggcgggggccctgcagctgttgctggtgggggacaaggtgccccacgacctggacatgctgctgagggccacctactttgggagcattgtcctgctgagcccagcagtgattgactccccattgaagctggagctgcgggtcctggccccaccgcgctgcaccatcaagccctctggcaccaccatctctgtcactgctagcgtcaccattgccctggtcccaccagaccagcctgaggtccagctgtccagcatgactatggacgcccgtctcagcgccaagatggctctccgggggaaggccctgcgcacgcagctggacctgcgcaggttccgaatctattccaaccattctgcactggagtcgctggctctgatcccattacaggcccctctgaagaccatgctgcagattggggtgatgcccatgctcaatgagcggacctggcgtggggtgcagatcccactacctgagggcatcaactttgtgcatgaggtggtgacgaaccatgcgggattcctcaccatcggggctgatctccactttgccaaagggctgcgagaggtgattgagaagaaccggcctgctgatgtcagggcgtccactgcccccacaccgtccacagcagctgtctgagccctcaatccccaagctggcagctgtcattcaggaccccaacccctctcagcccctcttttcccacattcatagcctgtagtgccccctctaacccccagtgccacagagaagacgggatttgaagctgtacccaatttaattccataatcaatctatcaattacagtccgtccaccacc

SEQ ID NO: 16092 - DNA, 1743 bp, Homo sapiens
  source 1..1743: mol_type = unassigned DNA
ccgtcgcccggatcccctgagctgcccgccatcccacgtgaccgcgccgccccccagctccaccgctgagcccgctcgccatggccctcttcggggccctcttcctagcgctgctggcaggcgcacatgcagagttcccaggctgcaagatccgcgtcacctccaaggcgctggagctggtgaagcaggaggggctgcgctttctggagcaagagctggagactatcaccattccggacctgcggggcaaagaaggccacttctactacaacatctctgaggtgaaggtcacagagctgcaactgacatcttccgagctcgatttccagccacagcaggagctgatgcttcaaatcaccaatgcctccttggggctgcgcttccggagacagctgctctactggttcttctatgatgggggctacatcaacgcctcagctgagggtgtgtccatccgcactggtctggagctctcccgggatcccgctggacggatgaaagtgtccaatgtctcctgccaggcctctgtctccagaatgcacgcggccttcgggggaaccttcaagaaggtgtatgattttctctccacgttcatcacctcagggatgcgcttcctcctcaaccagcagatctgccctgtcctctaccacgcagggacggtcctgctcaactccctcctggacaccgtgcctgtgcgcagttctgtggacgagcttgttggcattgactattccctcatgaaggatcctgtggcttccaccagcaacctggacatggacttccggggggccttcttccccctgactgagaggaactggagcctccccaaccgggcagtggagccccagctgcaggaggaagagcggatggtgtatgtggccttctctgagttcttcttcgactctgccatggagagctacttccgggcgggggccctgcagctgttgctggtgggggacaaggtgccccacgacctggacatgctgctgagggccacctactttgggagcattgtcctgctgagcccagcagtgattgactccccattgaagctggagctgcgggtcctggccccaccgcgctgcaccatcaagccctctggcaccaccatctctgtcactgctagcgtcaccattgccctggtcccaccagaccagcctgaggtccagctgtccagcatgactatggacgcccgtctcagcgccaagatggctctccgggggaaggccctgcgcacgcagctggacctgcgcaggttccgaatctattccaaccattctgcactggagtcgctggctctgatcccattacaggcccctctgaagaccatgctgcagattggggtgatgcccatgctcaatgagcggacctggcgtggggtgcagatcccactacctgagggcatcaactttgtgcatgaggtggtgacgaaccatgcgggattcctcaccatcggggctgatctccactttgccaaagggctgcgagaggtgattgagaagaaccggcctgctgatgtcagggcgtccactgcccccacaccgtccacagcagctgtctgagccctcaatccccaagctggcagctgtcattcaggaccccaacccctctcagcccctcttttcccacattcatagcctgtagtgccccctctaacccccagtgccacagagaagacgggatttgaagctgtacccaatttaattccataatcaatctatcaattacagtccgtccaccacc

SEQ ID NO: 16093 - DNA, 2255 bp, Homo sapiens
  source 1..2255: mol_type = unassigned DNA
agtccctcgccgagccgcgtggtgcactgaagccggcgtggggaggagagccgatgaaggagaacgctaacatgggggctccaggcagaatctctaatgggagagatttaggacctgagggagccgggagacccgggagcccacggtctggtcggccacctcctctcctccccgggcgcgaggcctaggagaccgcaagccaccctccaagaatgcgcgtgcagtcgttgccgtggcaacgtgcaagcctgcatgggcccaccgctaaaggaaaggggaggttgttgggggtgtgggggctggtcccctggaggtccaaactcatcacgcggcggtagcacgagggaactgggaacgtcccctcccccgtgtcccaaatcctctgggagccagaacgcaagtcgcatcgcctctctgagcctcagtttccacatctgccatatggaggcaagattattggttccaagttccccgaagagttatctggagggtaacgatccaggctagttcccacttatggttggacgtccaaggaatgggtttaagcggctcagataactcctgcgaccccaccccacccccaggcccgctcgccatggccctcttcggggccctcttcctagcgctgctggcaggcgcacatgcagagttcccaggctgcaagatccgcgtcacctccaaggcgctggagctggtgaagcaggaggggctgcgctttctggagcaagagctggagactatcaccattccggacctgcggggcaaagaaggccacttctactacaacatctctgaggtgaaggtcacagagctgcaactgacatcttccgagctcgatttccagccacagcaggagctgatgcttcaaatcaccaatgcctccttggggctgcgcttccggagacagctgctctactggttcttctatgatgggggctacatcaacgcctcagctgagggtgtgtccatccgcactggtctggagctctcccgggatcccgctggacggatgaaagtgtccaatgtctcctgccaggcctctgtctccagaatgcacgcggccttcgggggaaccttcaagaaggtgtatgattttctctccacgttcatcacctcagggatgcgcttcctcctcaaccagcagatctgccctgtcctctaccacgcagggacggtcctgctcaactccctcctggacaccgtgcctgtgcgcagttctgtggacgagcttgttggcattgactattccctcatgaaggatcctgtggcttccaccagcaacctggacatggacttccggggggccttcttccccctgactgagaggaactggagcctccccaaccgggcagtggagccccagctgcaggaggaagagcggatggtgtatgtggccttctctgagttcttcttcgactctgccatggagagctacttccgggcgggggccctgcagctgttgctggtgggggacaaggtgccccacgacctggacatgctgctgagggccacctactttgggagcattgtcctgctgagcccagcagtgattgactccccattgaagctggagctgcgggtcctggccccaccgcgctgcaccatcaagccctctggcaccaccatctctgtcactgctagcgtcaccattgccctggtcccaccagaccagcctgaggtccagctgtccagcatgactatggacgcccgtctcagcgccaagatggctctccgggggaaggccctgcgcacgcagctggacctgcgcaggttccgaatctattccaaccattctgcactggagtcgctggctctgatcccattacaggcccctctgaagaccatgctgcagattggggtgatgcccatgctcaatgagcggacctggcgtggggtgcagatcccactacctgagggcatcaactttgtgcatgaggtggtgacgaaccatgcgggattcctcaccatcggggctgatctccactttgccaaagggctgcgagaggtgattgagaagaaccggcctgctgatgtcagggcgtccactgcccccacaccgtccacagcagctgtctgagccctcaatccccaagctggcagctgtcattcaggaccccaacccctctcagcccctcttttcccacattcatagcctgtagtgccccctctaacccccagtgccacagagaagacgggatttgaagctgtacccaatttaattccataatcaatctatcaattacagtccgtccacc

SEQ ID NO: 16094 - DNA, 1420 bp, Homo sapiens
  source 1..1420: mol_type = unassigned DNA
gccagaccccgtcgcccggatcccctgagctgcccgccatcccacgtgaccgcgccgccccccagctccaccgctgagcccgctcgccatggccctcttcggggccctcttcctagcgctgctggcaggcgcacatgcagagttcccaggctgcaagatccgcgtcacctccaaggcgctggagctggtgaagcaggaggggctgcgctttctggagcaagagctggagactatcaccattccggacctgcggggcaaagaaggccacttctactacaacatctctgagaaggtgtatgattttctctccacgttcatcacctcagggatgcgcttcctcctcaaccagcagatctgccctgtcctctaccacgcagggacggtcctgctcaactccctcctggacaccgtgcctgtgcgcagttctgtggacgagcttgttggcattgactattccctcatgaaggatcctgtggcttccaccagcaacctggacatggacttccggggggccttcttccccctgactgagaggaactggagcctccccaaccgggcagtggagccccagctgcaggaggaagagcggatggtgtatgtggccttctctgagttcttcttcgactctgccatggagagctacttccgggcgggggccctgcagctgttgctggtgggggacaaggtgccccacgacctggacatgctgctgagggccacctactttgggagcattgtcctgctgagcccagcagtgattgactccccattgaagctggagctgcgggtcctggccccaccgcgctgcaccatcaagccctctggcaccaccatctctgtcactgctagcgtcaccattgccctggtcccaccagaccagcctgaggtccagctgtccagcatgactatggacgcccgtctcagcgccaagatggctctccgggggaaggccctgcgcacgcagctggacctgcgcaggttccgaatctattccaaccattctgcactggagtcgctggctctgatcccattacaggcccctctgaagaccatgctgcagattggggtgatgcccatgctcaatgagcggacctggcgtggggtgcagatcccactacctgagggcatcaactttgtgcatgaggtggtgacgaaccatgcgggattcctcaccatcggggctgatctccactttgccaaagggctgcgagaggtgattgagaagaaccggcctgctgatgtcagggcgtccactgcccccacaccgtccacagcagctgtctgagccctcaatccccaagctggcagctgtcattcaggaccccaacccctctcagcccctcttttcccacattcatagcctgtagtgccccctctaacccccagtgccacagagaagacgggatttgaagctgtaccc

SEQ ID NO: 16095 - DNA, 6252 bp, Homo sapiens
  source 1..6252: mol_type = unassigned DNA
agctccccgcctgctcccggaggccgcagcctccagctccgctcgcgctctcgccgctcctgccggctcgcccggccccgcgctccgccgtctcctcgccgcccgcccctccgccagccccggggaccgcgcggccgcagcctgagccagggccccctccctcgtcaggaccggggcagcaagcaggccgggggcaggtccgggcacccaccatgcgaggcgagctctggctcctggtgctggtgctcagggaggctgcccgggcgctgagcccccagcccggagcaggtcacgatgagggcccaggctctggatgggctgccaaagggaccgtgcggggctggaaccggagagcccgagagagccctgggcatgtgtcagagccggacaggacccagctgagccaggacctgggtgggggcaccctggccatggacacgctgccagataacaggaccagggtggtggaggacaaccacagctattatgtgtcccgtctctatggccccagcgagccccacagccgggaactgtgggtagatgtggccgaggccaaccggagccaagtgaagatccacacaatactctccaacacccaccggcaggcttcgagagtggtcttgtcctttgatttccctttctacgggcatcctctgcggcagatcaccatagcaactggaggcttcatcttcatgggggacgtgatccatcggatgctcacagctactcagtatgtggcgcccctgatggccaacttcaaccctggctactccgacaactccacagttgtttactttgacaatgggacagtctttgtggttcagtgggaccacgtttatctccaaggctgggaagacaagggcagtttcaccttccaggcagctctgcaccatgacggccgcattgtctttgcctataaagagatccctatgtctgtcccggaaatcagctcctcccagcatcctgtcaaaaccggcctatcggatgccttcatgattctcaatccatccccggatgtgccagaatctcggcgaaggagcatctttgaatatcaccgcatagagctggaccccagcaaggtcaccagcatgtcggccgtggagttcaccccattgccgacctgcctgcagcataggagctgtgacgcctgcatgtcctcagacctgaccttcaactgcagctggtgccatgtcctccagagatgctccagtggctttgaccgctatcgccaggagtggatggactatggctgtgcacaggaggcagagggcaggatgtgcgaggacttccaggatgaggaccacgactcagcctcccctgacacttccttcagcccctatgatggagacctcaccactacctcctcctccctcttcatcgacagcctcaccacagaagatgacaccaagttgaatccctatgcaggaggagacggccttcagaacaacctgtcccccaagacaaagggcactcctgtgcacctgggcaccatcgtgggcatcgtgctggcagtcctcctcgtggcggccatcatcctggctggaatttacatcaatggccaccccacatccaatgctgcgctcttcttcatcgagcgtagacctcaccactggccagccatgaagtttcgcagccaccctgaccattccacctatgcggaggtggagccctcgggccatgagaaggagggcttcatggaggctgagcagtgctgagaacaccaagtctcccctttgaagactttgaggccacagaaaagacagttaaagcaaagaagagaagtgacttttcctggcctctcccagcatgccctgggctgagatgagatggtggtttatggctccagagctgctgctcgcttcgtcagcacaccccgaatattgaagagggggccaaaaaacaaccacatggattttttataggaacaacaacctaatctcatcctgttttgatgcaagggttctcttctgtgtcttgtaaccatgaaacagcagaagaactaacataactaactccatttttgtttaaggggcctttacctattcctgcacctaggctaggataactttagagcactgacataaaacgcaaaaacaggaatcatgccgtttgcaaaactaactctgggattaaaggggaagcatgtaaacagctaactgtttttgttaaagatttataggaatgaggaggtttggctattgtcacatgacagactgttagccaaggacaaagaagttctgcaaacctcccctggacccttgctggtgtccagatgtctgcggttgtcagccccttcctttcccccgacctaaacataaaagacaaggcaaagcccgcataattttaagacggttctttaggacattagtccaccatcttcttggtttgctggctctccgaaataaagtccctttccttgctccaactccttgtctctcaacgtattggctatgacgcagcaagcagaatgaatttggactcagttacaggctgtcaatggtctgctctgtagcagtctcagagcctccccgacccactacctggagatagccagatagccagatgccctgctcctggccacctttaaagcccctgcatatgacacaggttaactaaagtcaagattggggctgctgcattccaggttccctagactcacaagctggtccttggccaggtgcagtggctcacgcctgtaatcccagcactttgggaggctgaggcaggcggatcacctgaagtcagaagtttgagaccagcctggccaacataattaaaatgtctctactaaaaatacaaaaaattagctgggtgtggtgacgcttgcctgtatcccagctactcaggaagctgagacacgagaatcacttgaacctgggaggcagaggttgcagtgagctcagatagtgccactgcactccagcctgggtgacagagcgagactccgtctcaaaaaaaaaaaaagaaagcagatcctcatggctatagagttggcattttagccccagcttctgtagctctgaaagcctaaagaaggtattctctccatctgttaaacacagtatagtggctctcagcccttggggcatgttatcatgggagggaagtcaaataagaggagagaaaagaactcaagggggaaactgcatttttaggctttgctctcttaccttgccctttctactcagaaccaataacttctgcatcaaaacatgttacagcctgcatcaagggctttaccccaacctgcagcccagccttccctgggtgagcttgctatgcgcagccacatttaccatgtggggctccctattctgatggcctgttcggtgccgggtttactcactgccctgttctgatgtcagtgcctgtacatacctccaaaggcaggacttgcctgataaatatttttcctcctctgaactggattttataggcattaaagacaagtcgggtggctagagggctccttgagacatacctagcagggaactgcaggtggattctgttgagaggcaaagcacctgagtggttgggacacaggcagctggcatgggagggactttttttgagacagggtctcactgtgtcgcccagggcaaggatgcccaaagacaccaggttggagaggcacctgccaactacttgctttccctggagcctgcatgtgcctgtggggtggggaggcgtaggggtctacggctgcctgagatgggtgtgcacagtgtgtgaagtacctacctccttgccttgctggactgtcagccagtcgcagggccggccacaagacccatgtctccatctggtcatactccatagctaccaagttaacctgctctaaactttggagaactggatctgtccaataaacgcttatttggccaagcctgatggctcgtgcctgtactcccagcactttgggaggctgaggtgggagggttgcttgagcccaggggtttgagaccagcttgggcaacaacaacaaaaatgccaggtgtggtggggtgcacctgtagtcccagctactagggaggctgagccaggaggatcacttgagcccgggaggttgaggctgcagtggggggtcataatcatgccactgtactccagcctgggtgacagagtgagaccctgtctccgaaaaaaaaaaaaaaaaaaagaacggaaaaagaaatgcttacattgtcagggatcctgtagacaatcattaactctatgagatgcttggttctatttttttgggagactttgtccaagtgttttggcttaagaaatccataggcctctcttggtgacacatctctagtactttttgtcataaacaaacaggccatctgccgccaaatacatccactccccatgccactgacatcctatgggtcagccaggcttgctttgactgaggccgaggcatctggaactttctctgcctgcaggggctagcagcagaggcttcaccgcatcaccaccccttcctccactcctgacattctttcccttcagggatccaaaatggttggccgagctcccagtgggaaaacgtgtgctagagttggggagtgagatgagtggtgctgtccatggaatcaggccacagcaggaactgccccactggccatttgagacacacacaggtggtaaatgctctgctggtgggctgtgcttccctcattcagagagctctgttacagcccactgtgtcctttagaagcttgaaaggaacccaactctttgctgcactgtcctttttcttcctcaaattcagaccctccttccaccggcacccccctactccaccctcagctcttccttgcctggtttatcaagcagagctgaggccccacgtttccaactctgattgtcacttgcatcttcacaaaggataaaccacggagcaactggaaaaccatcagccaagcgttcggatgagtctggttattggtccacccccgaccagattcccttacacttaactcacttctttctttggcaatgaccctcatgacatgtataaatgggtatgactaagaagaggctgtgatctaacatttatttgctgccattttttactctggggagaagcagccccaactcatcactgggaaagaactccccctgcaaaccagctaaatttgataatttaaaccccctgcccctaaaacttctcacagagctggggagttggtggcaactttccaagtcaaggtcttgcttagaaagtccttcactacatggccaggtgcagtggctcacgcctgtagtcccaggtacttgggagcctgaggcaggaggattgcttgagctcaggagttcaaggctgcagagagctatgatcatcccactgcatttgtttaaaaataaatttttaaaatttgtgtgttttatcaggggtctcctgtacagtgtatctgtgtatgtttgtgtgtgtgtttgtatacagccttgtttaatgttttgagcaataagatatgcacacacaggtattttgttgctaaagagattggacaaggttgtagctgtgctcaggcttcagcttggtttgttaaattgagagataaacaatgacaagagctgccagccaaccacactattcaaaaagcaaagtgttcaccactaaagctaaccattcatctggttgcaggcaaggctaaggctctctctcctctagttcctggaacagactcacagattggcatgaagcactgatcaggggctgcactcagactccctggccaagcaaacctacaccagaagagtcagtgtcacagatatgatgcggccaatctctgtctccaaaaacctacctgaacttaatggtagaattcaaagatctggggactgagggcacccagccttctaaaacacaatgtattcatgtgtttagtgtaaactctctgcatggattctcagtgttaataataaaaggaagcattcttttacaactcctgctgtgtgcaaaagaaagtgcaaaggatttggagtggcattccgaagatcaccacacataccttggttctgatggctgctgaactccgacttcttcgctgagacatgactgtgggaacagcctccagctatctgctcatcagaggtgctttcctcaacctcctgcaccacctccaagagaaacagcctaaaaagaaaccccagctgtttacttatattggtctgtaaatccctggaagtaaaccccatgcatttttatctactgtctgaggacatacaataaatctgagaaagtctatgctgtca

SEQ ID NO: 16096 - DNA, 2659 bp, Homo sapiens
  source 1..2659: mol_type = unassigned DNA
gcggccgcagcctgagccagggccccctccctcgtcaggaccggggcagcaagcaggccgggggcaggtccgggcacccaccatgcgaggcgagctctggctcctggtgctggtgctcagggaggctgcccgggcgctgagcccccagcccggagcaggtcacgatgagggcccaggctctggatgggctgccaaagggaccgtgcggggctggaaccggagagcccgagagagccctgggcatgtgtcagagccggacaggacccagctgagccaggacctgggtgggggcaccctggccatggacacgctgccagataacaggaccagggtggtggaggacaaccacagctattatgtgtcccgtctctatggccccagcgagccccacagccgggaactgtgggtagatgtggccgaggccaaccggagccaagtgaagatccacacaatactctccaacacccaccggcaggcttcgagagtggtcttgtcctttgatttccctttctacgggcatcctctgcggcagatcaccatagcaactggaggcttcatcttcatgggggacgtgatccatcggatgctcacagctactcagtatgtggcgcccctgatggccaacttcaaccctggctactccgacaactccacagttgtttactttgacaatgggacagtctttgtggttcagtgggaccacgtttatctccaaggctgggaagacaagggcagtttcaccttccaggcagctctgcaccatgacggccgcattgtctttgcctataaagagatccctatgtctgtcccggaaatcagctcctcccagcatcctgtcaaaaccggcctatcggatgccttcatgattctcaatccatccccggatgtgccagaatctcggcgaaggagcatctttgaatatcaccgcatagagctggaccccagcaaggtcaccagcatgtcggccgtggagttcaccccattgccgacctgcctgcagcataggagctgtgacgcctgcatgtcctcagacctgaccttcaactgcagctggtgccatgtcctccagaggtccctcaacaaccaggatgaaaacacgtatgtgaattgcctggattctcagcagtgtcacggcagctcagagtcaaggcgaccttgaggatcactggagctcatgcagtcctgctagcccctacacctactcacatgggcagatgtggccttggtcctggggagctgggtgggaaggaaggcagggatgccacaaataccttcatcttccggggaagtagagggaatgggagtgcctgactacctcagcctggggaccttggctcctcttctcactatcagcagagagctgttactgaacagtgaaaggggaaggcttctttgtcaatcccatcataactctgtccttttggtcctcctgcagatgctccagtggctttgaccgctatcgccaggagtggatggactatggctgtgcacaggaggcagagggcaggatgtgcgaggacttccaggatgaggaccacgactcagcctcccctgacacttccttcagcccctatgatggagacctcaccactacctcctcctccctcttcatcgacagcctcaccacagaagatgacaccaagttgaatccctatgcaggaggagacggccttcagaacaacctgtcccccaagacaaagggcactcctgtgcacctgggcaccatcgtgggcatcgtgctggcagtcctcctcgtggcggccatcatcctggctggaatttacatcaatggccaccccacatccaatgctgcgctcttcttcatcgagcgtagacctcaccactggccagccatgaagtttcgcagccaccctgaccattccacctatgcggaggtggagccctcgggccatgagaaggagggcttcatggaggctgagcagtgctgagaacaccaagtctcccctttgaagactttgaggccacagaaaagacagttaaagcaaagaagagaagtgacttttcctggcctctcccagcatgccctgggctgagatgagatggtggtttatggctccagagctgctgctcgcttcgtcagcacaccccgaatattgaagagggggccaaaaaacaaccacatggattttttataggaacaacaacctaatctcatcctgttttgatgcaagggttctcttctgtgtcttgtaaccatgaaacagcagaagaactaacataactaactccatttttgtttaaggggcctttacctattcctgcacctaggctaggataactttagagcactgacataaaacgcaaaaacaggaatcatgccgtttgcaaaactaactctgggattaaaggggaagcatgtaaacagctaactgtttttgttaaagatttataggaatgaggaggtttggctattgtcacatgacagactgttagccaaggacaaagaagttctgcaaacctcccctggacccttgctggtgtccagatgtctgcggttgtcagccccttcctttcccccgacctaaacataaaagacaaggcaaagcccgcataattttaagacggttctttaggacattagtccaccatcttcttggtttgctggctctccgaaataaagtccctttccttgctccaa

SEQ ID NO: 16097 - DNA, 2859 bp, Homo sapiens
  source 1..2859: mol_type = unassigned DNA
gcggccgcagcctgagccagggccccctccctcgtcaggaccggggcagcaagcaggccgggggcaggtccgggcacccaccatgcgaggcgagctctggctcctggtgctggtgctcagggaggctgcccgggcgctgagcccccagcccggagcaggtcacgatgagggcccaggctctggatgggctgccaaagggaccgtgcggggctggaaccggagagcccgagagagccctgggcatgtgtcagagccggacaggacccagctgagccaggacctgggtgggggcaccctggccatggacacgctgccagataacaggaccagggtggtggaggacaaccacagctattatgtgtcccgtctctatggccccagcgagccccacagccgggaactgtgggtagatgtggccgaggccaaccggagccaagtgaagatccacacaatactctccaacacccaccggcaggcttcgagagtggtcttgtcctttgatttccctttctacgggcatcctctgcggcagatcaccatagcaactggaggcttcatcttcatgggggacgtgatccatcggatgctcacagctactcagtatgtggcgcccctgatggccaacttcaaccctggctactccgacaactccacagttgtttactttgacaatgggacagtctttgtggttcagtgggaccacgtttatctccaaggctgggaagacaagggcagtttcaccttccaggcagctctgcaccatgacggccgcattgtctttgcctataaagagatccctatgtctgtcccggaaatcagctcctcccagcatcctgtcaaaaccggcctatcggatgccttcatgattctcaatccatccccggatgtgccagaatctcggcgaaggagcatctttgaatatcaccgcatagagctggaccccagcaaggtcaccagcatgtcggccgtggagttcaccccattgccgacctgcctgcagcataggagctgtgacgcctgcatgtcctcagacctgaccttcaactgcagctggtgccatgtcctccagagtagagatgaggtttcaccgtgttagccaggacagtctcgatctcctgacctcatgatccgcccgcctcggcctcccaaagtactgggattacaggcgtgagccaccacgcccagccgcaagaagcatttttacaaagcattcagcatccttcgcatgagactcacagagcctcagaaagaatatgtaggatagaccccaggtccctcaacaaccaggatgaaaacacgtatgtgaattgcctggattctcagcagtgtcacggcagctcagagtcaaggcgaccttgaggatcactggagctcatgcagtcctgctagcccctacacctactcacatgggcagatgtggccttggtcctggggagctgggtgggaaggaaggcagggatgccacaaataccttcatcttccggggaagtagagggaatgggagtgcctgactacctcagcctggggaccttggctcctcttctcactatcagcagagagctgttactgaacagtgaaaggggaaggcttctttgtcaatcccatcataactctgtccttttggtcctcctgcagatgctccagtggctttgaccgctatcgccaggagtggatggactatggctgtgcacaggaggcagagggcaggatgtgcgaggacttccaggatgaggaccacgactcagcctcccctgacacttccttcagcccctatgatggagacctcaccactacctcctcctccctcttcatcgacagcctcaccacagaagatgacaccaagttgaatccctatgcaggaggagacggccttcagaacaacctgtcccccaagacaaagggcactcctgtgcacctgggcaccatcgtgggcatcgtgctggcagtcctcctcgtggcggccatcatcctggctggaatttacatcaatggccaccccacatccaatgctgcgctcttcttcatcgagcgtagacctcaccactggccagccatgaagtttcgcagccaccctgaccattccacctatgcggaggtggagccctcgggccatgagaaggagggcttcatggaggctgagcagtgctgagaacaccaagtctcccctttgaagactttgaggccacagaaaagacagttaaagcaaagaagagaagtgacttttcctggcctctcccagcatgccctgggctgagatgagatggtggtttatggctccagagctgctgctcgcttcgtcagcacaccccgaatattgaagagggggccaaaaaacaaccacatggattttttataggaacaacaacctaatctcatcctgttttgatgcaagggttctcttctgtgtcttgtaaccatgaaacagcagaagaactaacataactaactccatttttgtttaaggggcctttacctattcctgcacctaggctaggataactttagagcactgacataaaacgcaaaaacaggaatcatgccgtttgcaaaactaactctgggattaaaggggaagcatgtaaacagctaactgtttttgttaaagatttataggaatgaggaggtttggctattgtcacatgacagactgttagccaaggacaaagaagttctgcaaacctcccctggacccttgctggtgtccagatgtctgcggttgtcagccccttcctttcccccgacctaaacataaaagacaaggcaaagcccgcataattttaagacggttctttaggacattagtccaccatcttcttggtttgctggctctccgaaataaagtccctttccttgctccaa

SEQ ID NO: 16098 - DNA, 2605 bp, Homo sapiens
  source 1..2605: mol_type = unassigned DNA
agctggaggtagctgcctatctgattctgtttgagagtccgccaagttgggatttaaattagacatcaagaagaatttacagaccggccttgccttgttccacggtcacgatgagggcccaggctctggatgggctgccaaagggaccgtgcggggctggaaccggagagcccgagagagccctgggcatgtgtcagagccggacaggacccagctgagccaggacctgggtgggggcaccctggccatggacacgctgccagataacaggaccagggtggtggaggacaaccacagctattatgtgtcccgtctctatggccccagcgagccccacagccgggaactgtgggtagatgtggccgaggccaaccggagccaagtgaagatccacacaatactctccaacacccaccggcaggcttcgagagtggtcttgtcctttgatttccctttctacgggcatcctctgcggcagatcaccatagcaactggaggcttcatcttcatgggggacgtgatccatcggatgctcacagctactcagtatgtggcgcccctgatggccaacttcaaccctggctactccgacaactccacagttgtttactttgacaatgggacagtctttgtggttcagtgggaccacgtttatctccaaggctgggaagacaagggcagtttcaccttccaggcagctctgcaccatgacggccgcattgtctttgcctataaagagatccctatgtctgtcccggaaatcagctcctcccagcatcctgtcaaaaccggcctatcggatgccttcatgattctcaatccatccccggatgtgccagaatctcggcgaaggagcatctttgaatatcaccgcatagagctggaccccagcaaggtcaccagcatgtcggccgtggagttcaccccattgccgacctgcctgcagcataggagctgtgacgcctgcatgtcctcagacctgaccttcaactgcagctggtgccatgtcctccagaggtccctcaacaaccaggatgaaaacacgtatgtgaattgcctggattctcagcagtgtcacggcagctcagagtcaaggcgaccttgaggatcactggagctcatgcagtcctgctagcccctacacctactcacatgggcagatgtggccttggtcctggggagctgggtgggaaggaaggcagggatgccacaaataccttcatcttccggggaagtagagggaatgggagtgcctgactacctcagcctggggaccttggctcctcttctcactatcagcagagagctgttactgaacagtgaaaggggaaggcttctttgtcaatcccatcataactctgtccttttggtcctcctgcagatgctccagtggctttgaccgctatcgccaggagtggatggactatggctgtgcacaggaggcagagggcaggatgtgcgaggacttccaggatgaggaccacgactcagcctcccctgacacttccttcagcccctatgatggagacctcaccactacctcctcctccctcttcatcgacagcctcaccacagaagatgacaccaagttgaatccctatgcaggaggagacggccttcagaacaacctgtcccccaagacaaagggcactcctgtgcacctgggcaccatcgtgggcatcgtgctggcagtcctcctcgtggcggccatcatcctggctggaatttacatcaatggccaccccacatccaatgctgcgctcttcttcatcgagcgtagacctcaccactggccagccatgaagtttcgcagccaccctgaccattccacctatgcggaggtggagccctcgggccatgagaaggagggcttcatggaggctgagcagtgctgagaacaccaagtctcccctttgaagactttgaggccacagaaaagacagttaaagcaaagaagagaagtgacttttcctggcctctcccagcatgccctgggctgagatgagatggtggtttatggctccagagctgctgctcgcttcgtcagcacaccccgaatattgaagagggggccaaaaaacaaccacatggattttttataggaacaacaacctaatctcatcctgttttgatgcaagggttctcttctgtgtcttgtaaccatgaaacagcagaagaactaacataactaactccatttttgtttaaggggcctttacctattcctgcacctaggctaggataactttagagcactgacataaaacgcaaaaacaggaatcatgccgtttgcaaaactaactctgggattaaaggggaagcatgtaaacagctaactgtttttgttaaagatttataggaatgaggaggtttggctattgtcacatgacagactgttagccaaggacaaagaagttctgcaaacctcccctggacccttgctggtgtccagatgtctgcggttgtcagccccttcctttcccccgacctaaacataaaagacaaggcaaagcccgcataattttaagacggttctttaggacattagtccaccatcttcttggtttgctggctctccgaaataaagtccctttccttgctccaa

SEQ ID NO: 16099 - DNA, 2602 bp, Homo sapiens
  source 1..2602: mol_type = unassigned DNA
ctcaagcaaaacctcctggcttgtacatcaccatagcaggccccaggaatgcgagggaccctgtgtcagggcagggaccccatcatccaagacagttggcagggagagtgcaagacctgcctggtttctacaaccttccaaaggaggcagctcccgaaagaaggttttcagaacgcagggccttgggagacaggaagccagtcagactcctcgcacaaaccacagggggcaagcagtgctcctccaagaacctggccccaccagggtgctcaagggaacgaggaggacaaccacagctattatgtgtcccgtctctatggccccagcgagccccacagccgggaactgtgggtagatgtggccgaggccaaccggagccaagtgaagatccacacaatactctccaacacccaccggcaggcttcgagagtggtcttgtcctttgatttccctttctacgggcatcctctgcggcagatcaccatagcaactggaggcttcatcttcatgggggacgtgatccatcggatgctcacagctactcagtatgtggcgcccctgatggccaacttcaaccctggctactccgacaactccacagttgtttactttgacaatgggacagtctttgtggttcagtgggaccacgtttatctccaaggctgggaagacaagggcagtttcaccttccaggcagctctgcaccatgacggccgcattgtctttgcctataaagagatccctatgtctgtcccggaaatcagctcctcccagcatcctgtcaaaaccggcctatcggatgccttcatgattctcaatccatccccggatgtgccagaatctcggcgaaggagcatctttgaatatcaccgcatagagctggaccccagcaaggtcaccagcatgtcggccgtggagttcaccccattgccgacctgcctgcagcataggagctgtgacgcctgcatgtcctcagacctgaccttcaactgcagctggtgccatgtcctccagaggtccctcaacaaccaggatgaaaacacgtatgtgaattgcctggattctcagcagtgtcacggcagctcagagtcaaggcgaccttgaggatcactggagctcatgcagtcctgctagcccctacacctactcacatgggcagatgtggccttggtcctggggagctgggtgggaaggaaggcagggatgccacaaataccttcatcttccggggaagtagagggaatgggagtgcctgactacctcagcctggggaccttggctcctcttctcactatcagcagagagctgttactgaacagtgaaaggggaaggcttctttgtcaatcccatcataactctgtccttttggtcctcctgcagatgctccagtggctttgaccgctatcgccaggagtggatggactatggctgtgcacaggaggcagagggcaggatgtgcgaggacttccaggatgaggaccacgactcagcctcccctgacacttccttcagcccctatgatggagacctcaccactacctcctcctccctcttcatcgacagcctcaccacagaagatgacaccaagttgaatccctatgcaggaggagacggccttcagaacaacctgtcccccaagacaaagggcactcctgtgcacctgggcaccatcgtgggcatcgtgctggcagtcctcctcgtggcggccatcatcctggctggaatttacatcaatggccaccccacatccaatgctgcgctcttcttcatcgagcgtagacctcaccactggccagccatgaagtttcgcagccaccctgaccattccacctatgcggaggtggagccctcgggccatgagaaggagggcttcatggaggctgagcagtgctgagaacaccaagtctcccctttgaagactttgaggccacagaaaagacagttaaagcaaagaagagaagtgacttttcctggcctctcccagcatgccctgggctgagatgagatggtggtttatggctccagagctgctgctcgcttcgtcagcacaccccgaatattgaagagggggccaaaaaacaaccacatggattttttataggaacaacaacctaatctcatcctgttttgatgcaagggttctcttctgtgtcttgtaaccatgaaacagcagaagaactaacataactaactccatttttgtttaaggggcctttacctattcctgcacctaggctaggataactttagagcactgacataaaacgcaaaaacaggaatcatgccgtttgcaaaactaactctgggattaaaggggaagcatgtaaacagctaactgtttttgttaaagatttataggaatgaggaggtttggctattgtcacatgacagactgttagccaaggacaaagaagttctgcaaacctcccctggacccttgctggtgtccagatgtctgcggttgtcagccccttcctttcccccgacctaaacataaaagacaaggcaaagcccgcataattttaagacggttctttaggacattagtccaccatcttcttggtttgctggctctccgaaataaagtccctttccttgctcc

SEQ ID NO: 16100 - DNA, 2726 bp, Homo sapiens
  source 1..2726: mol_type = unassigned DNA
aagacagaccacgaggtaccccagatggaggaatgtgcaaagacgccggggctggagctggaatccgtcccgagacttctcaccttgacctcgaggaaggcaggaggtcggagacagggggtgggcaggctggggaaagaggaaacccgcaggacaagagggttgtggctcgtcacgtggccacttgagggcagcaagtagctgcagctggaggtagctgcctatctgattctgtttgagagtccgccaagttgggatttaaattagacatcaagaagaatttacagaccggccttgccttgttccacggtcacgatgagggcccaggctctggatgggctgccaaagggaccgtgcggggctggaaccggagagcccgagagagccctgggcatgtgtcagagccggacaggacccagctgagccaggacctgggtgggggcaccctggccatggacacgctgccagataacaggaccagggtggtggaggacaaccacagctattatgtgtcccgtctctatggccccagcgagccccacagccgggaactgtgggtagatgtggccgaggccaaccggagccaagtgaagatccacacaatactctccaacacccaccggcaggcttcgagagtggtcttgtcctttgatttccctttctacgggcatcctctgcggcagatcaccatagcaactggaggcttcatcttcatgggggacgtgatccatcggatgctcacagctactcagtatgtggcgcccctgatggccaacttcaaccctggctactccgacaactccacagttgtttactttgacaatgggacagtctttgtggttcagtgggaccacgtttatctccaaggctgggaagacaagggcagtttcaccttccaggcagctctgcaccatgacggccgcattgtctttgcctataaagagatccctatgtctgtcccggaaatcagctcctcccagcatcctgtcaaaaccggcctatcggatgccttcatgattctcaatccatccccggatgtgccagaatctcggcgaaggagcatctttgaatatcaccgcatagagctggaccccagcaaggtcaccagcatgtcggccgtggagttcaccccattgccgagtccctcaacaaccaggatgaaaacacgtatgtgaattgcctggattctcagcagtgtcacggcagctcagagtcaaggcgaccttgaggatcactggagctcatgcagtcctgctagcccctacacctactcacatgggcagatgtggccttggtcctggggagctgggtgggaaggaaggcagggatgccacaaataccttcatcttccggggaagtagagggaatgggagtgcctgactacctcagcctggggaccttggctcctcttctcactatcagcagagagctgttactgaacagtgaaaggggaaggcttctttgtcaatcccatcataactctgtccttttggtcctcctgcagatgctccagtggctttgaccgctatcgccaggagtggatggactatggctgtgcacaggaggcagagggcaggatgtgcgaggacttccaggatgaggaccacgactcagcctcccctgacacttccttcagcccctatgatggagacctcaccactacctcctcctccctcttcatcgacagcctcaccacagaagatgacaccaagttgaatccctatgcaggaggagacggccttcagaacaacctgtcccccaagacaaagggcactcctgtgcacctgggcaccatcgtgggcatcgtgctggcagtcctcctcgtggcggccatcatcctggctggaatttacatcaatggccaccccacatccaatgctgcgctcttcttcatcgagcgtagacctcaccactggccagccatgaagtttcgcagccaccctgaccattccacctatgcggaggtggagccctcgggccatgagaaggagggcttcatggaggctgagcagtgctgagaacaccaagtctcccctttgaagactttgaggccacagaaaagacagttaaagcaaagaagagaagtgacttttcctggcctctcccagcatgccctgggctgagatgagatggtggtttatggctccagagctgctgctcgcttcgtcagcacaccccgaatattgaagagggggccaaaaaacaaccacatggattttttataggaacaacaacctaatctcatcctgttttgatgcaagggttctcttctgtgtcttgtaaccatgaaacagcagaagaactaacataactaactccatttttgtttaaggggcctttacctattcctgcacctaggctaggataactttagagcactgacataaaacgcaaaaacaggaatcatgccgtttgcaaaactaactctgggattaaaggggaagcatgtaaacagctaactgtttttgttaaagatttataggaatgaggaggtttggctattgtcacatgacagactgttagccaaggacaaagaagttctgcaaacctcccctggacccttgctggtgtccagatgtctgcggttgtcagccccttcctttcccccgacctaaacataaaagacaaggcaaagcccgcataattttaagacggttctttaggacattagtccaccatcttcttggtttgctggctctccgaaataaagtccctttccttgctcc

SEQ ID NO: 16101 - DNA, 2082 bp, Homo sapiens
  source 1..2082: mol_type = unassigned DNA
ctcctggaaaatttctccaatggcgctcagcgttcgcacccttcctctccgcggttttctagtccctaggccccagcccactagaagccaggatgccccctcaccccgtctcccactctccagcgccccagctccttgccgtcacaagaacgaagaggacaaccacagctattatgtgtcccgtctctatggccccagcgagccccacagccgggaactgtgggtagatgtggccgaggccaaccggagccaagtgaagatccacacaatactctccaacacccaccggcaggcttcgagagtggtcttgtcctttgatttccctttctacgggcatcctctgcggcagatcaccatagcaactggaggcttcatcttcatgggggacgtgatccatcggatgctcacagctactcagtatgtggcgcccctgatggccaacttcaaccctggctactccgacaactccacagttgtttactttgacaatgggacagtctttgtggttcagtgggaccacgtttatctccaaggctgggaagacaagggcagtttcaccttccaggcagctctgcaccatgacggccgcattgtctttgcctataaagagatccctatgtctgtcccggaaatcagctcctcccagcatcctgtcaaaaccggcctatcggatgccttcatgattctcaatccatccccggatgtgccagaatctcggcgaaggagcatctttgaatatcaccgcatagagctggaccccagcaaggtcaccagcatgtcggccgtggagttcaccccattgccgacctgcctgcagcataggagctgtgacgcctgcatgtcctcagacctgaccttcaactgcagctggtgccatgtcctccagagatgctccagtggctttgaccgctatcgccaggagtggatggactatggctgtgcacaggaggcagagggcaggatgtgcgaggacttccaggatgaggaccacgactcagcctcccctgacacttccttcagcccctatgatggagacctcaccactacctcctcctccctcttcatcgacagcctcaccacagaagatgacaccaagttgaatccctatgcaggaggagacggccttcagaacaacctgtcccccaagacaaagggcactcctgtgcacctgggcaccatcgtgggcatcgtgctggcagtcctcctcgtggcggccatcatcctggctggaatttacatcaatggccaccccacatccaatgctgcgctcttcttcatcgagcgtagacctcaccactggccagccatgaagtttcgcagccaccctgaccattccacctatgcggaggtggagccctcgggccatgagaaggagggcttcatggaggctgagcagtgctgagaacaccaagtctcccctttgaagactttgaggccacagaaaagacagttaaagcaaagaagagaagtgacttttcctggcctctcccagcatgccctgggctgagatgagatggtggtttatggctccagagctgctgctcgcttcgtcagcacaccccgaatattgaagagggggccaaaaaacaaccacatggattttttataggaacaacaacctaatctcatcctgttttgatgcaagggttctcttctgtgtcttgtaaccatgaaacagcagaagaactaacataactaactccatttttgtttaaggggcctttacctattcctgcacctaggctaggataactttagagcactgacataaaacgcaaaaacaggaatcatgccgtttgcaaaactaactctgggattaaaggggaagcatgtaaacagctaactgtttttgttaaagatttataggaatgaggaggtttggctattgtcacatgacagactgttagccaaggacaaagaagttctgcaaacctcccctggacccttgctggtgtccagatgtctgcggttgtcagccccttcctttcccccgacctaaacataaaagacaaggcaaagcccgcataattttaagacggttctttaggacattagtccaccatcttcttggtttgctggctc

SEQ ID NO: 16102 - DNA, 654 bp, Homo sapiens
  source 1..654: mol_type = unassigned DNA
gttattatccttgttcaaaagaaatgataatgaagacacagagaggttagataatttgcacaaggtcacacagctagtaagtggcagagcatagatttcaacccaggcagccagatttcagatcccaaactcttaaccctccgatgccctttgtgaattccttaatagcacttatgtagtggcacagatatcagagagaacttctcttatgatccttattagacatttggggcaacttttacatgattttggaaaactacccagatggtgtcaagaacatgaatgccttactcataatgattccaactcccacccaacctcttcctgtattggataagtggacccaaaggctctgtcggctttcatctctgagactttgttagaacccaagaccccatggttcgaccttccctgctcccctgcagcccctgtctgccctaatgatctctccacaggccttcagaacaacctgtcccccaagacaaagggcactcctgtgcacctgggcaccatcgtgggcatcgtgctggcagtcctcctcgtggcggccatcatcctggctggaatttacatcaatggccaccccacatccaatgctgcgctcttcttcatcgagcgtagacctcaccactggccagccatgaagtttcgcag

SEQ ID NO: 16103 - DNA, 339 bp, Homo sapiens
  source 1..339: mol_type = unassigned DNA
cttggctcctcttctcactatcagcagagagctgttactgaacagtgaaaggggaaggcttctttgtcaatcccatcataactctgtccttttggtcctcctgcagatgctccagtggctttgaccgctatcgccaggagtggatggactatggctgtgcacaggaggcagagggcaggatgtgcgaggacttccaggatgaggaccacgactcagcctcccctgacacttccttcagcccctatgatggagacctcaccactacctcctcctccctcttcatcgacagcctcaccacagaaggccttcagaacaacctgtcccccaagacaaagggca

SEQ ID NO: 16104 - DNA, 568 bp, Homo sapiens
  source 1..568: mol_type = unassigned DNA
acgactcagcctcccctgacacttccttcagcccctatgatggagacctcaccactacctcctcctccctcttcatcgacagcctcaccacagaagatgacaccaagttgaatccctatgcaggaggagacggtgagtacagaactgcctgccctcagcgtcagacccagcgcctcttggacccaccccagaagagggtgcagcagtcgcctgggctatttttatgagtgcggagagggagcaacggcagcctgagcatcccagacctcctgctgggtggggaggcaggggggcttctgggcacaggtgccctagatcgaaggaacatgtctaccctagacatttctcatctcagccctgaacctcctgtggttcttctcctggctctctgtccttgaatattcactgcccagaaaggagtgggaggaggggaaggactgagccagggcaggtataggtggggcctgtggccatcccctctgatccccatgggctcatagtcagcaaggggtggagagcagcttctctttcctcactcaggctggcagaggacataaaattgtccgct

SEQ ID NO: 16105 - DNA, 547 bp, Homo sapiens
  source 1..547: mol_type = unassigned DNA
caaggctgggaagacaagggcagtttcaccttccaggcagctctgcaccatgacggccgcattgtctttgcctataaagagatccctatgtctgtcccggaaatcagctcctcccagcatcctgtcaaaaccggcctatcggatgccttcatgattctcaatccatccccggatgtgccagaatctcggcgaaggagcatctttgaatatcaccgcatagagctggaccccagcaaggtcaccagcatgtcggccgtggagttcaccccattgccgacctgcctgcagcataggagctgtgacgcctgcatgtcctcagacctgaccttcaactgcagctggtgccatgtcctccagaggtccctcaacaaccaggatgaaaacacatgctccagtggctttgaccgctatcgccaggagtggatggactatggctgtgcacaggaggcagagggcaggatgtgcgaggacttccaggatgaggaccacgactcagcctcccctgacacttccttcagcccctatgatggagacctcaccactacct

SEQ ID NO: 16106 - DNA, 1039 bp, Homo sapiens
  source 1..1039: mol_type = unassigned DNA
gctgcagctggaggtagctgcctatctgattctgtttgagagtccgccaagttgggatttaaattagacatcaagaagaatttacagaccggccttgccttgttccacggtcacgatgagggcccaggctctggatgggctgccaaagggaccgtgcggggctggaaccggagagcccgagagagccctgggcatgtgtcagagccggacaggacccagctgagccaggacctgggtgggggcaccctggccatggacacgctgccagataacaggaccagggtggtggtgtgggaagggaccggcagcactggcagtgcctgggagctcgtgggaaatgtggaatgtcggagtcctcagacctgcagaatcagaatccgattcccaggaggacaaccacagctattatgtgtcccgtctctatggccccagcgagccccacagccgggaactgtgggtagatgtggccgaggccaaccggagccaagtgaagatccacacaatactctccaacacccaccggcaggcttcgagagtggtcttgtcctttgatttccctttctacgggcatcctctgcggcagatcaccatagcaactggaggcttcatcttcatgggggacgtgatccatcggatgctcacagctactcagtatgtggcgcccctgatggccaacttcaaccctggctactccgacaactccacagttgtttactttgacaatgggacagtctttgtggttcagtgggaccacgtttatctccaaggctgggaagacaagggcagtttcaccttccaggcagctctgcaccatgacggccgcattgtctttgcctataaagagatccctatgtctgtcccggaaatcagctcctcccagcatcctgtcaaaaccggcctatcggatgccttcatgattctcaatccatccccggatgtgccagaatctcggcgaaggagcatctttgaatatcaccgcatagagctggaccccagcaaggtcaccagcatgtcggccgtggagttcaccccattgccg

SEQ ID NO: 16107 - DNA, 876 bp, Homo sapiens
  source 1..876: mol_type = unassigned DNA
ccaggatgccccctcaccccgtctcccactctccagcgccccagctccttgccgtcacaagaacgaagtcacgatgagggcccaggctctggatgggctgccaaagggaccgtgcggggctggaaccggagagcccgagagagccctgggcatgtgtcagagccggacaggacccagctgagccaggacctgggtgggggcaccctggccatggacacgctgccagataacaggaccagggtggtggaggacaaccacagctattatgtgtcccgtctctatggccccagcgagccccacagccgggaactgtgggtagatgtggccgaggccaaccggagccaagtgaagatccacacaatactctccaacacccaccggcaggcttcgagagtggtcttgtcctttgatttccctttctacgggcatcctctgcggcagatcaccatagcaactggaggcttcatcttcatgggggacgtgatccatcggatgctcacagctactcagtatgtggcgcccctgatggccaacttcaaccctggctactccgacaactccacagttgtttactttgacaatgggacagtctttgtggttcagtgggaccacgtttatctccaaggctgggaagacaagggcagtttcaccttccaggcagctctgcaccatgacggccgcattgtctttgcctataaagagatccctatgtctgtcccggaaatcagctcctcccagcatcctgtcaaaaccggcctatcggatgccttcatgattctcaatccatccccggatgtgccagaatctcggcgaaggagcatctttgaatatcaccgcatagagctggaccccagcaaggtcaccagcatgtcggcc

SEQ ID NO: 16108 - DNA, 268 bp, Homo sapiens
  source 1..268: mol_type = unassigned DNA
gcagtttcaccttccaggcagctctgcaccatgacggccgcattgtctttgcctataaagagatccctatgtctgtcccggaaatcagctcctcccagcatcctgtcaaaaccggcctatcggatgccttcatgattctcaatccatccccggatgtgccaggcttttcagcagagtctgcaaagcatctttggtgaaaagaaaagtcatgtgcaattagcagcatctgtttgcagaggcactcaaaacacacaggacagtgtatccg

SEQ ID NO: 16109 - DNA, 544 bp, Homo sapiens
  source 1..544: mol_type = unassigned DNA
aagcaggctgggaggcggccatcggactcttcctttgtgcagatctctctgcacagagtgccacgcacggagctttgtttcttgatgggaggacaaccacagctattatgtgtcccgtctctatggccccagcgagccccacagccgggaactgtgggtagatgtggccgaggccaaccggagccaagtgaagatccacacaatactctccaacacccaccggcaggcttcgagagtggtcttgtcctttgatttccctttctacgggcatcctctgcggcagatcaccatagcaactggaggcttcatcttcatgggggacgtgatccatcggatgctcacagctactcagtatgtggcgcccctgatggccaacttcaaccctggctactccgacaactccacagttgtttactttgacaatgggacagtctttgtggttcagtgggaccacgtttatctccaaggctgggaagacaagggcagtttcaccttccaggcagctctgcaccatgacggccgcattgtctttgcctataaagag

SEQ ID NO: 16110 - DNA, 619 bp, Homo sapiens
  source 1..619: mol_type = unassigned DNA
cagctccttgccgtcacaagaacgaagtaggtcaggggagggaagaggcatcttcgtgtcctgacctgattccttgccgtctattaaatatcctacattgcgggtcacgatgagggcccaggctctggatgggctgccaaagggaccgtgcggggctggaaccggagagcccgagagagccctgggcatgtgtcagagccggacaggacccagctgagccaggacctgggtgggggcaccctggccatggacacgctgccagataacaggaccagggtggtggaggacaaccacagctattatgtgtcccgtctctatggccccagcgagccccacagccgggaactgtgggtagatgtggccgaggccaaccggagccaagtgaagatccacacaatactctccaacacccaccggcaggcttcgagagtggtcttgtcctttgatttccctttctacgggcatcctctgcggcagatcaccatagcaactggaggcttcatcttcatgggggacgtgatccatcggatgctcacagctactcagtatgtggcgcccctgatggccaacttcaaccctggctactccgacaactccacagttgtttactttgacaatg

SEQ ID NO: 16111 - DNA, 565 bp, Homo sapiens
  source 1..565: mol_type = unassigned DNA
ctttttgctttcgcaggcgagtgaggatggagtcctggcccctgccagtggctcagcctgtgtgtgtacccagggtagaatgcaatgcgagtgagggcgaggagctccgggctgacccttggaacacggtcacgatgagggcccaggctctggatgggctgccaaagggaccgtgcggggctggaaccggagagcccgagagagccctgggcatgtgtcagagccggacaggacccagctgagccaggacctgggtgggggcaccctggccatggacacgctgccagataacaggaccagggtggtggaggacaaccacagctattatgtgtcccgtctctatggccccagcgagccccacagccgggaactgtgggtagatgtggccgaggccaaccggagccaagtgaagatccacacaatactctccaacacccaccggcaggcttcgagagtggtcttgtcctttgatttccctttctacgggcatcctctgcggcagatcaccatagcaactggaggcttcatcttcatgggggacgtgatccatcggatgctcacagct

SEQ ID NO: 16112 - DNA, 565 bp, Homo sapiens
  source 1..565: mol_type = unassigned DNA
acttgagggcagcaagtagctgcagctggaggtagctgcctatctgattctgtttgagagtccgccaagttgggatttaaattagacatcaagaagaatttacagaccggccttgccttgttccacggtcacgatgagggcccaggctctggatgggctgccaaagggaccgtgcggggctggaaccggagagcccgagagagccctgggcatgtgtcagagccggacaggacccagctgagccaggacctgggtgggggcaccctggccatggacacgctgccagataacaggaccagggtggtggaggacaaccacagctattatgtgtcccgtctctatggccccagcgagccccacagccgggaactgtgggtagatgtggccgaggccaaccggagccaagtgaagatccacacaatactctccaacacccaccggcaggcttcgagagtggtcttgtcctttgatttccctttctacgggcatcctctgcggcagatcaccatagcaactggaggaggggggtcagtggacgtcagagcatctcccttgcattagctga

SEQ ID NO: 16113 - DNA, 558 bp, Homo sapiens
  source 1..558: mol_type = unassigned DNA
agctgcagctggaggtagctgcctatctgattctgtttgagagtccgccaagttgggatttaaattagacatcaagaagaatttacagaccggccttgccttgttccacggtcacgatgagggcccaggctctggatgggctgccaaagggaccgtgcggggctggaaccggagagcccgagagagccctgggcatgtgtcagagccggacaggacccagctgagccaggacctgggtgggggcaccctggccatggacacgctgccagataacaggaccagggtggtgatggagtctcgctctgtcgccaaggctggagtgcagtggcacaatcttggctcattgcaacctcctcctcctcctgggttcaagcgattcttctacctcagcctcctgagtaactgggattacaggaggacaaccacagctattatgtgtcccgtctctatggccccagcgagccccacagccgggaactgtgggtagatgtggccgaggccaaccggagccaagtgaagatccacacaatactctccaacacccaccggcaggcttcg

SEQ ID NO: 16114 - DNA, 528 bp, Homo sapiens
  source 1..528: mol_type = unassigned DNA
acttgagggcagcaagtagctgcagctggaggtagctgcctatctgattctgtttgagagtccgccaagttgggatttaaattagacatcaagaagaatttacagaccggccttgccttgttccacgggtgattattatggcatcccactggactgcacactacttggggccatgagtgagtgaatcaatgaatgaacagcttgtgttccggaagctccttggcaacacatgcaggcggggaacgggtccagggaaaatggagctctctccagtggaaggcaggtcacgatgagggcccaggctctggatgggctgccaaagggaccgtgcggggctggaaccggagagcccgagagagccctgggcatgtgtcagagccggacaggacccagctgagccaggacctgggtgggggcaccctggccatggacacgctgccagataacaggaccagggtggtggtgtgggaagggaccggcagcactggcagtgcctgggagctcgtgggaaatgtggaatgtcggagt

SEQ ID NO: 16115 - DNA, 2822 bp, Homo sapiens
  source 1..2822: mol_type = unassigned DNA
ggcgacggcagcgcctcctccgccaccaaactcctggggctccgcgggggcttggggccacctcctcctgagcccggaggaaccctctcccgataggttccagcgtgactccctcccactccacccttttcctttcttcttcctcttttttttttttttttttaaacacatttttttcctggcttcggacctcagactgctgcagccctaaccttcccagggctcagctctttggagctgcccattcctccggctgcgagaaaggacgcgcgccctgcgtcgggcgaagaaaagaagcaaaacttgtcgggagggtttcgtcatcaacctccttcccgcaaacctaaacctcctgccggggccatccctagacagaggaaagttcctgcagagccgaccagccctagtggatctggggcaggcagcggcgctggctgtggaattagatctgttttgaacccagtggagcgcatcgctggggctcggaagtcaccgtccgcgggcaccgggttggcgctgcccgagtggaaccgacagtttgcgagcctcggctgcaagtggcctctcctccccgcggttgttgttcagtgtcgggtgagggctgcgagtgtggcaagttgcaaagagagcctcagaggtccgaagagcgctgcgctcctactcgcgttcgcttcttcctcttctcggttccctactgtgaaatcgcagcgacatttacaaaggcctccgggtcctaccgagaccgatccgcagcgtttggcccggtcgtgcctattgcatcgggagcccccgagcaccggcgaaggactggcgggtggggtagggaggtggcggcggcggcatggcgaggttcccgaaggccgacctggccgctgcaggagttatgttactttgccacttcttcacggaccagtttcagttcgccgatgggaaacccggagaccaaatccttgattggcagtatggagttactcaggccttccctcacacagaggaggaggtggaagttgattcacacgcgtacagccacaggtggaaaagaaacttggactttctcaaggcggtagacacgaaccgagcaagcgtcggccaagactctcctgagcccagaagcttcacagacctgctgctggatgatgggcaggacaataacactcagatcgagagagtgaatctgtccttcgattttccattttatggccacttcctacgtgaaatcactgtggcaaccgggggtttcatatacactggagaagtcgtacatcgaatgctaacagccacacagtacatagcacctttaatggcaaatttcgatcccagtgtatccagaaattcaactgtcagatattttgataatggcacagcacttgtggtccagtgggaccatgtacatctccaggataattataacctgggaagcttcacattccaggcaaccctgctcatggatggacgaatcatctttggatacaaagaaattcctgtcttggtcacacagataagttcaaccaatcatccagtgaaagtcggactgtccgatgcatttgtcgttgtccacaggatccaacaaattcccaatgttcgaagaagaacaatttatgaataccaccgagtagagctacaaatgtcaaaaattaccaacatttcggctgtggagatgaccccattacccacatgcctccagtttaacagatgtggcccctgtgtatcttctcagattggcttcaactgcagttggtgtagtaaacttcaaagatgttccagtggatttgatcgtcatcggcaggactgggtggacagtggatgccctgaagagtcaaaagagaagatgtgtgagaatacagaaccagtggaaacttcttctcgaaccaccacaaccgtaggagcgacaaccacccagttcagggtcctaactaccaccagaagagcagtgacttctcagtttcccaccagcctccctacagaagatgataccaagatagcactacatctaaaagataatggagcttctacagatgacagtgcagctgagaagaaagggggaaccctccacgctggcctcatcattggaatcctcatcctggtcctcattgtagccacagccattcttgtgacagtctatatgtatcaccacccaacatcagcagccagcatcttctttattgagagacgcccaagcagatggcctgcgatgaagtttagaagaggctctggacatcctgcctatgctgaagttgaaccagttggagagaaagaaggctttattgtatcagagcagtgctaaaatttctaggacagaacaacaccagtactggtttacaggtgttaagactaaaattttgcctatacctttaagacaaacaaacaaacacacacacaaacaagctctaagctgctgtagcctgaagaagacaagatttctggacaagctcagcccaggaaacaaagggtaaacaaaaaactaaaacttatacaagataccatttacactgaacatagaattccctagtggaatgtcatctatagttcactcggaacatctcccgtggacttatctgaagtatgacaagattataatgcttttggcttaggtgcagggttgcaaagggatcagaaaaaaaaaatcataataaagctttagttcatgagggatcgacacctttggttcaaatgttctctgatgtctcaaagataactgttttccaaagcctgaaccctttcactcaaaagagcaatgatgaatgtctcaagattgctaagaaaaacagcccatgcaagagtgagaacaaacacaaaataagagattttctacattttcaaaa

SEQ ID NO: 16116 - DNA, 12468 bp, Homo sapiens
  source 1..12468: mol_type = unassigned DNA
ggcgacggcagcgcctcctccgccaccaaactcctggggctccgcgggggcttggggccacctcctcctgagcccggaggaaccctctcccgataggttccagcgtgactccctcccactccacccttttcctttcttcttcctcttttttttttttttttttaaacacatttttttcctggcttcggacctcagactgctgcagccctaaccttcccagggctcagctctttggagctgcccattcctccggctgcgagaaaggacgcgcgccctgcgtcgggcgaagaaaagaagcaaaacttgtcgggagggtttcgtcatcaacctccttcccgcaaacctaaacctcctgccggggccatccctagacagaggaaagttcctgcagagccgaccagccctagtggatctggggcaggcagcggcgctggctgtggaattagatctgttttgaacccagtggagcgcatcgctggggctcggaagtcaccgtccgcgggcaccgggttggcgctgcccgagtggaaccgacagtttgcgagcctcggctgcaagtggcctctcctccccgcggttgttgttcagtgtcgggtgagggctgcgagtgtggcaagttgcaaagagagcctcagaggtccgaagagcgctgcgctcctactcgcgttcgcttcttcctcttctcggttccctactgtgaaatcgcagcgacatttacaaaggcctccgggtcctaccgagaccgatccgcagcgtttggcccggtcgtgcctattgcatcgggagcccccgagcaccggcgaaggactggcgggtggggtagggaggtggcggcggcggcatggcgaggttcccgaaggccgacctggccgctgcaggagttatgttactttgccacttcttcacggaccagtttcagttcgccgatgggaaacccggagaccaaatccttgattggcagtatggagttactcaggccttccctcacacagaggaggaggtggaagttgattcacacgcgtacagccacaggtggaaaagaaacttggactttctcaaggcggtagacacgaaccgagcaagcgtcggccaagactctcctgagcccagaagcttcacagacctgctgctggatgatgggcaggacaataacactcagatcgaggaggatacagaccacaattactatatatctcgaatatatggtccatctgattctgccagccgggatttatgggtgaacatagaccaaatggaaaaagataaagtgaagattcatggaatattgtccaatactcatcggcaagctgcaagagtgaatctgtccttcgattttccattttatggccacttcctacgtgaaatcactgtggcaaccgggggtttcatatacactggagaagtcgtacatcgaatgctaacagccacacagtacatagcacctttaatggcaaatttcgatcccagtgtatccagaaattcaactgtcagatattttgataatggcacagcacttgtggtccagtgggaccatgtacatctccaggataattataacctgggaagcttcacattccaggcaaccctgctcatggatggacgaatcatctttggatacaaagaaattcctgtcttggtcacacagataagttcaaccaatcatccagtgaaagtcggactgtccgatgcatttgtcgttgtccacaggatccaacaaattcccaatgttcgaagaagaacaatttatgaataccaccgagtagagctacaaatgtcaaaaattaccaacatttcggctgtggagatgaccccattacccacatgcctccagtttaacagatgtggcccctgtgtatcttctcagattggcttcaactgcagttggtgtagtaaacttcaaagatgttccagtggatttgatcgtcatcggcaggactgggtggacagtggatgccctgaagagtcaaaagagaagatgtgtgagaatacagaaccagtggaaacttcttctcgaaccaccacaaccgtaggagcgacaaccacccagttcagggtcctaactaccaccagaagagcagtgacttctcagtttcccaccagcctccctacagaagatgataccaagatagcactacatctaaaagataatggagcttctacagatgacagtgcagctgagaagaaagggggaaccctccacgctggcctcatcattggaatcctcatcctggtcctcattgtagccacagccattcttgtgacagtctatatgtatcaccacccaacatcagcagccagcatcttctttattgagagacgcccaagcagatggcctgcgatgaagtttagaagaggctctggacatcctgcctatgctgaagttgaaccagttggagagaaagaaggctttattgtatcagagcagtgctaaaatttctaggacagaacaacaccagtactggtttacaggtgttaagactaaaattttgcctatacctttaagacaaacaaacaaacacacacacaaacaagctctaagctgctgtagcctgaagaagacaagatttctggacaagctcagcccaggaaacaaagggtaaacaaaaaactaaaacttatacaagataccatttacactgaacatagaattccctagtggaatgtcatctatagttcactcggaacatctcccgtggacttatctgaagtatgacaagattataatgcttttggcttaggtgcagggttgcaaagggatcagaaaaaaaaaatcataataaagctttagttcatgagggatcgacacctttggttcaaatgttctctgatgtctcaaagataactgttttccaaagcctgaaccctttcactcaaaagagcaatgatgaatgtctcaagattgctaagaaaaacagcccatgcaagagtgagaacaaacacaaaataagagattttctacattttcaaaacagatgtgtggcaaaaggatgttgtttttctggtctagatccatctgtaccaacaagttcatcactttacagaacgaatctttttatccgtacaggaggttcaaaccatgtctgcctcttcctttgtaatgaatgacctttctatgagctgtgacaaaatttccgaacaattaactaaggatttgggaagagggggtggcaaacggggctttctgttttcctgcctcagcatgaaaacatctgatttatgctttatggaagccttacctccaatccccaactgttaagtcccatgaaaccacagttgctctgggctgatggaaacaaaaggaaacagtatgaagagttccttaatcatttttgaaacaaaaatgttaagggattttaaacatatgattatttttaattttatgccttttcagtactaaacacccatttcattgctgattcctgtctaagaagccattcacgtcagcatggcgatagaaagaatgaaaaaaccctgctgaatcatacagtaattttctttaaagcacatagtagttacataaatatatatatataaatatatttttgtttataactaacacaaggcaggatcttgtgactctaagagtgcgttttgtcatcaaggcaaaacagatgcaagatgcatcactgcattacttccatagagttgtaaaataatccttaatattagaatatttttctgtcacttagcaaaagtggttcagttcattgccgcgcccatcatgttcttgactatttgatccactttttcgtttatgtcaaccccttccctctctggctaaataaagtggatgcagaaagctccttaaatggagatatcgattgccttggaatcacaatcctgattttgaaaattcctcatgaatgaagaaaggaatggcatcccttgagaaggaaagtggttaatatacatactgagctcctaaagtttaaattcaggtactgagtgtacaatttcaccaacattctaacccatgaaacttttacactctgtgccaagaaactgttggcttttgtaaggtacagtgctcaacatttgcagattcaggtctcaagaagcagagatgtctcataagcagcattttcccaacagtttagcatctgtacacatctgccttggtcatcagtccactcacagagtaccatactttatcatcacaagtgtctgacgtgaacgaatgccattttctattccatatattttgctttacaattttaagtatttgatgaagatggtaactttttcctaacttagttaactattaaaaaaaattttgaaaagcaaggtgattgaaggattgtgatgacaatctctttgcagcagctatgtatggtttatgtgaagtatccccacttattcttgtggagcaggtttggtgagacagcaataaccaaatgacatgccaatattactggtgcaactggtattctacaaatgcataaggaacacatagacgacttccttttaggataaaatgatgcttctttcactaccttttgtggtagctgtggcttccaatagcaactgtttgacagttatataaatcttgcatgtgtattcttagtttgtgtcccttaagtactacttaattctcaagtagtaatgttattcttatacccttcagcgttctattttgattcaaaacaattgattcaaaacaattttgaatcaattttctattttgattcaaaacaattgataattctgtaaaaaaacataaacactgaattcttcagtgaaccaaagcaacaaataatagagaaaacttcttgaaactggagtgtgggaaaacttcttaacagaactaagagttaaaggtagtgagaagtgtgtggtgtgtgaattctttagtggtaaggggaaatgtgggctaaatccttttctttcatgaaactctcattctattttatatttctggtttgttcttgttcccatgtgagaaaacatacagtttctgaaaattcaaaatggtcatcaatgctttggactttacataattatgtattagagaaggtgcaactgtacattacttaatatactatgaacataatagaataacaaaaaaagataacaaagagatgcaaacttctggataaatcagataaatggtgctacagaggaatttagttatttcagcttaattatttgtaaaaataataatcagtgactaggtaaagatactgaaactcaagaaaaatatcttgacccatttatgtctagtgttccattattggaacgctaagcttatgggagttatttagagcctactgctcaaggtcatcaccaaggtctggttgcaaaaattcaaaaaattgcaacctcaggcataaatggcttaagcccaagagatggcactgaccataaatggtggcttgtgtgtgaagggtttggacttcaagatatactaacacctagaaaactaaaagtgcaattgacccccaattactattttagtttgaggtatcaagggcatttgccaatctcttatatgtagcttctagagttgtgctgtccaatattatatccactagccaacgtggcttttgaaattaaaattaattaaaattaaattaaaaatgtaattcttcagtcacaccagccacatttcaaaggctcaatagccacgcctggcttgtggctaccatattggataacaagaaacacttccgtggttgaagaaaattttaatggacaatgctgtgtttcatttgaattcgttgtccttgaagaaaagggaagaagaggaaagaaacaagatttggtagctcttgggcatatccaagcatttttgattttagagaggccctatggagtaatgaaaaaaatacaagctgacacagctttaaatccccactgtgttatcttgggaaaatcacttcaacctccttgagtctcaatttgcaattttggaaaagaaaaacaatttttgtcctgtctttcttgcaagattattatgcaacctgattaaatgtacagatgtgcagactcttaaaaaccttatgttaatgtaacccatataaagtacgacttttggtcgagtaccagcacaaatttgcattcaaaggaagaatagttcatcagtgcaaaaagcgttcaaaggtaatcagttcatcacgtatcttgagaaaaagagaatgcattcaaaacacaaagcaaaattgcttcagtttcttttctgcccatctgaatatttcctttagtatttgtcccacatgacatccatcccatgtatttatccactctttcacaacattgcctatgaacatccttcaactggctcagttctttattgcatagagccacttagcttctctagtttcttatgatttcctattttacacttaacagcaaaaggaggcttccatttagaaggcactatctcaaacataaataatttcatatttattttatcactgtaacactaaggagctatggcattaaaatataaaactatttggaacttaatgtaaacctttgcacatgcagactatataaagggaataaaattattttaaattatgctaatatccagatacatattctaaggttagtatcatttatcagtttttcgcaacagattcttatgttacatcttcatgagggagtataaatttgatcacgtccctagtgtctattgcccacttgagaaaggttttgccaggatccacagatcgcttcaagatgctttcgtttatgataggaaattaatatttaaataagactaattgaaaactagattatctggttctaatttcttcctcctgtgaaatgttcttttggtttgtatttctttaggtattttccaagttactgctgcttttacttcacgacctccaaccccacttttgttatcagcgtcatatgccagagtcatggcagatccagcctggacaacatagtgagacccatctctatcaaatatacatatatatatatatatatacacacacacacacacacacacaaatatacatatatatcaaatatatatgtatatttgatagagatgatagcaattatgtgtgtgtgtgtgtgtgtgtgtgtgtgtgtgttagccaagtgtggtttctcatgcctgtagtcccagctactttggaggctgaagtgtaagagttgcttgagcccatgagttagaggctgctgtgagctatgatcatgccactgcactccagcctgggcaacagagcaaaaccccatctctaaataaaaaaaaagaatcgtgagacatcatgtaatccaacctcttaatgttacagataagtaaactgaggcccaaagagatatagtaatagtcccagtgtcagtaaactgggtcttgaacttaaatgtttgtttcagttctcattgccttcatctcttaattgtcggcacttaaggccaaccaagcagcttagacagcgcagtccactcaacggtaactttatttgctatattgacaatctgctctgttctgtaatatagaacattggatcaatctttatctttttgctgacttaaggaggctgctattgttgcaatatccagagatttcaagttctagccattgcggggtctttgtggtgttttcaatttctcctctctccacccctgcccccatctgtggccatctaagttagcaatacaatttattttggccatttaaaatttttctgcctttgttttatttcttcccaaatatatttgaaaatgaatgatctatatagctgattttctgaccacatatataattgcaatttttatttgctcttcaaactattacaacatttttgtccttataaggttttttgggcagataatgcgaggtctgtggtgttaccttttatatactcctattaccttatgtttgtgaagcattttacattttacagagcactttgattcatctccctatttgttcatttatttaactgttcagttcactgaaatatttattgaacacctactggaaccaagtgactgtgctagtaacttgtgatatacagtagtgagagtccaggcatgtaaccgatcattataatacaataacatccctaaaccagactttacaagtagataggatcaacaatactctatcaattttcaactccaattttctattctacttaaaatgggaactagaaactgtttgcctgaagaatgtgtctgaaacataatatatcactgcatgtctgtgctgtagacctgttaattttatctgtgagaaaaaaagttactcaaaattctccctgacctaagaatactttctagttcactgcagtcttactgaccagatgcaacagttgaagtttgatttctcgacccaatatttctattgggttttgaattattaatatcactgttttgaggtattcagaaacaccagtgtatcaaaaaagcatttgcactttaggtgtgtgtggtggttatgtcatttattagaccatcccagacataagacaatcagggaaatcagaaaactccagcctcaaatgtgtctataatttcctgttctaccattgtcatatcataacatggtattacttcttaaggttttgattaagttgatctagcctcaacttaaattgtaatacatctgcctaattattgtctggaataacttttcaaccatccaatgcccactgctctcacaatgattattgtagagaagtaaaatggtaattattcaagtaaagtcacataatttctggagtcagtttttcataacaagtttatggaatacatcatcattggcttcttcataatatatttattatgagtgaccaaattttgcctggaggagcaaaatgctcaaaacttgttattataggttaatttccagctcactgttgacactgaaagattctgtgttactttaaacccaggataaaaggctggaaaaaaaattaaatgtaagtcataaactagtactcagcttttcctagtttctaaggcttattaacatttgcaaattactcaataaatgtctttcataatggaataacataaaagcttttgatttggcagatagtgatattttatttattttcattctggttgaaaaaaatctcagtggcttctcttcattccacgagaattttgatttttaacagcagtctctctttttctcagcattgcaaatatatatgtatatatacattcatgaccaaagtatcgcttactgaccatgcagctgtaaaccttctgtgcctatcaaacaaatacatagcatgaaactaattttagaagtttcatgggggaattttaggggaaagtataaacctaagagtgagtgaatggagatgattcatggaaaaaaaaataaaaatctaaatgtgctattaggcagagttattaacttcttttagttgttgtttgagatggggttttgctcttgttacccaggctggagtgcaatggcgtgatctcgtctcactgcaacctccgcctcccaggttcaagcgattctcctgcctcagccgcccaagtagctgggattacaggcatatgccactacagccggctaattttgtatttttagtagagacggggtttctccatgctggtcaggctggtccccagctcccgacctcaggtgatccgcccacctccgcctcccaaagtgctggaattacaggcctgagccaccgtgcctggccgagttattaacttcttaagagcaatgtgctaataaatactcattgatgaccagctcaaatttaggtcattcagacatccagacactggggcacatattctgcaagcaatgctgagacccctgacatagagaaagcaaaggatatgcctatgattagtctaaaatgcagccatcaccccccatacctcttctatggcattcatcctaacatcatggaggcctttgtcctagagaattatgtgacttgccctagagaattagtgaatgaccaaaaagagactttccatttatcttcctttgacttaaaaggcatgaaaataaggcaaaaaaatcaataaaataattttcctgaggaaaggttaagagatggcactttcctttccgggcccagagctggatttctctgagatttgaccatctcaggactcagacagactccagtgctattttctggacatttgtggtgaagcctcagccaccatgttcaaggtggtttgaatgaaaacatactcagattgtcacatttatagcagggaaataaaaactcaaattaggcatcctgcagcaggctactctgaaaataacattaggcaacatcagagcttcacttgcaaagaaatgttaaaatcattttagggaaatcagtgaagtctctttagaaacagacatcttgtgtatggcgtaacccagtcttggggccctcacggagaagagggggaagtcttttcattgattggtcaaaacaaatctctcatttgcctgatttgaagcatttcaacagtgcctggagagtacattattttcaggggaaaaaaaggagagagtcttttttatatgccagctgggatcatgggaacttcgaatgccaggaatttactactgtttctggtaattctgtgtgtagtcatttgaaatgttgaagtgtgaaaagagaagaaattgggcacttcttgcggcgggggagggggggggggcggtggctttccagattttatgccagttgcaccagcatgcagaatatttgtaatgcatttcaaagtggatataatggcaccctttgtcagaatcacaaagctcactgcggcactgctacaagaggacactgaggaaaatctggccctatgaacctagtcaaccccaagcaaaaagaatgactatgtgtgtgagtgcagcacatggccagttcgtttctcactgttttggaaagccctgtgtgccaaaccaaggacgtgtctttcagggaaaggttaattttccgaagtttattaaaatagaacttggaaaaccaagcattttgaatttattccagtcctctgggcatcattcctatttcttctgccatgtcaaggagaaattccaagcctgcattctgtcatgctaaaataaccagcccatacttctcggtgaccttctgttgaacgtacctgagcctgcaaatgtaaaaatgattgtatctgaatctgcactaatggtgtctgagagcaaaaagagtgtgacctctattggaaacctttgttcaaattcaataattcagagatgctacatacttctgcaagcttcctgattatgttcactgtaatattaatgacctaagtttgaatgtatttccttacagtccattaatttgacatccatcttttacctggggattattacaattgcaataagtcattaatgttttcttcacacagcttcttaaaccaagtttctctgcagctctttcggttctgcttacagtgtgtgggaaatctgatttttttcccctagtaatagtttgataagaaatttagtgtattgactgcctcagtgacacaatttatctttaaaggtgtggaagctggtggggaccaaatgttacctgtgtttttgctgttgattgctattttcagaagcaaaccatgtttttcacttacagtaggagtcaacaaatttgggattttagaagggggaggagggagctatttgtgtaagactgctgtcatatttgactacatattaaaaacagtaaatgagcattttgttttaatttcttaaataccttgtctttcaacatacgttttgtttcctttcttccattagtgttcaaaaggttctacccattgtggaagaaattctgtgtgcagaattcagaggcacaaggctgatggcaagatagaaagttattttgcttctaaacccaccccgatgtggaaactgatactagctagagggagctgtagaaaacaaagatttcaggattgcacagtgtgtgggcaatgggatggagactttttcccctattcccagccacagtgcccaagcgttcaagtctcctggatcagacagatgggattttagctgctgctttaaatcctagtgctggaataagtcaaggtacttcagttcagctcttgcctctgtcactaatcttgctttatgaactcctttgattttctgaataagttccagaaggttctctattattctgtccttcttccaaactggaaatggctgtatctaattctcaggatattttggatgtgtgcctcaggtaatttatgtggaatgtgtaaagcaagatgtctccaattctgaatattccttccccttttcccaatcctccactcttggactacctttataacaacaccgagtacgcacagacctgaacccatgcccaagaagcacacacaatgactggagctgtcgggaattcctgtcagtggcattccctgagcactggctctgtacaactcaattataattttttaagaatcatacctctgtatagatcttttggactgtactgattaaactttgatattgtggagtaaattcagaagtgcaattttaaa

SEQ ID NO: 16117 - DNA, 1903 bp, Homo sapiens
  source 1..1903: mol_type = unassigned DNA
ttttggcaggtctgatttaagaaaaactgaaggtgtattttcacatagtatgtcagtggtagacttcgtaattagactaaatcgtgtatatttttgcaggaggatacagaccacaattactatatatctcgaatatatggtccatctgattctgccagccgggatttatgggtgaacatagaccaaatggaaaaagataaagtgaagattcatggaatattgtccaatactcatcggcaagctgcaagagtgaatctgtccttcgattttccattttatggccacttcctacgtgaaatcactgtggcaaccgggggtttcatatacactggagaagtcgtacatcgaatgctaacagccacacagtacatagcacctttaatggcaaatttcgatcccagtgtatccagaaattcaactgtcagatattttgataatggcacagcacttgtggtccagtgggaccatgtacatctccaggataattataacctgggaagcttcacattccaggcaaccctgctcatggatggacgaatcatctttggatacaaagaaattcctgtcttggtcacacagataagttcaaccaatcatccagtgaaagtcggactgtccgatgcatttgtcgttgtccacaggatccaacaaattcccaatgttcgaagaagaacaatttatgaataccaccgagtagagctacaaatgtcaaaaattaccaacatttcggctgtggagatgaccccattacccacatgcctccagtttaacagatgtggcccctgtgtatcttctcagattggcttcaactgcagttggtgtagtaaacttcaaagatgttccagtggatttgatcgtcatcggcaggactgggtggacagtggatgccctgaagagtcaaaagagaagatgtgtgagaatacagaaccagtggaaacttcttctcgaaccaccacaaccgtaggagcgacaaccacccagttcagggtcctaactaccaccagaagagcagtgacttctcagtttcccaccagcctccctacagaagatgataccaagatagcactacatctaaaagataatggagcttctacagatgacagtgcagctgagaagaaagggggaaccctccacgctggcctcatcattggaatcctcatcctggtcctcattgtagccacagccattcttgtgacagtctatatgtatcaccacccaacatcagcagccagcatcttctttattgagagacgcccaagcagatggcctgcgatgaagtttagaagaggctctggacatcctgcctatgctgaagttgaaccagttggagagaaagaaggctttattgtatcagagcagtgctaaaatttctaggacagaacaacaccagtactggtttacaggtgttaagactaaaattttgcctatacctttaagacaaacaaacaaacacacacacaaacaagctctaagctgctgtagcctgaagaagacaagatttctggacaagctcagcccaggaaacaaagggtaaacaaaaaactaaaacttatacaagataccatttacactgaacatagaattccctagtggaatgtcatctatagttcactcggaacatctcccgtggacttatctgaagtatgacaagattataatgcttttggcttaggtgcagggttgcaaagggatcagaaaaaaaaaatcataataaagctttagttcatgagggatcgacacctttggttcaaatgttctctgatgtctcaaagataactgttttccaaagcctgaaccctttcactcaaaagagcaatgatgaatgtctcaagattgctaagaaaaacagcccatgcaagagtgagaacaaacacaaaataagagattttctacattttcaaaa

SEQ ID NO: 16118 - DNA, 9066 bp, Homo sapiens
  source 1..9066: mol_type = unassigned DNA
atgccgctgccaccgcggagcctgcaggtgctcctgctgctgctgctgttgctgctgctgctgccgggcatgtgggctgaggcaggcttgcccagggcaggcgggggttcacagccccccttccgcaccttctcggccagcgactggggcctcacccacctagtggtgcatgagcagacaggcgaggtgtatgtgggcgcagtgaaccgcatctataagctgtcggggaacctgacactgctgcgggcccacgtcacgggccctgtggaggacaacgagaagtgctacccgccgcccagcgtgcagtcctgcccccacggcctgggcagtactgacaacgtcaacaagctgctgctgctggactatgccgctaaccgcctgctggcctgtggcagcgcctcccagggcatctgccagttcctgcgtctggacgatctcttcaaactgggtgagccacaccaccgtaaggagcactacctgtccagcgtgcaggaggcaggcagcatggcgggcgtgctcattgccgggccaccgggccagggccaggccaagctcttcgtgggcacacccatcgatggcaagtccgagtacttccccacactgtccagccgtcggctcatggccaacgaggaggatgccgacatgttcggcttcgtgtaccaggatgagtttgtgtcatcacagctcaagatcccttcggacacgctgtccaagttcccggcctttgacatctactatgtgtacagcttccgcagcgagcagtttgtctactacctcacgctgcagctagacacacagctgacctcgcctgatgccgccggcgagcacttcttcacgtccaagatcgtgcggctctgtgtggacgaccccaaattctactcgtacgttgagttccccattggctgcgagcaggcgggtgtggagtaccgcctggtgcaggatgcctacctgagccggcccggccgtgccctggcccaccagctgggcctggctgaggacgaggacgtgctgttcactgtgttcgcccagggccagaagaaccgcgtgaagccaccaaaggagtcagcactgtgcctgttcacgctcagggccatcaaggagaagattaaggagcgcatccagtcctgctaccgtggtgagggcaagctctccctgccgtggctgctcaacaaggagctgggctgcatcaactcgcccctgcagatcgatgacgacttctgcgggcaggacttcaaccagcccctggggggcacagtcaccattgaggggacgcccctgttcgtggacaaggatgatggcctgaccgccgtggctgcctatgactatcggggccgcactgtggtattcgccggcacgcgaagtggccgcatccgcaagatcctggtggacctctcaaaccccggtggccggcctgccctggcctacgagagcgtcgtggcccaggagggcagccccatcctgcgagacctcgtcctcagccccaaccaccagtacctctacgccatgaccgagaagcaggtgacgcgggtgcctgtggagagctgtgtgcagtacacgtcctgtgagctgtgtctggggtcacgggacccccactgtggctggtgtgtcctgcacagcatctgctcgcggcgggacgcctgtgagcgagcagacgagccccagcgctttgctgcggacctgctgcagtgtgtgcagctgactgtgcagccccgcaatgtgtctgtcaccatgtcccaggtcccacttgtgctgcaggcctggaacgtgcctgacctctcagctggcgtcaactgctccttcgaggacttcacggaatctgagagcgtcctggaggatggccggatccactgccgctcaccctccgcccgggaggtggcgcccatcacgcggggccagggagaccagcgggtggtgaaactctacctaaagtccaaggagacagggaagaagtttgcgtctgtggacttcgtcttctacaactgcagcgtccaccagtcctgcctgtcctgtgtcaacggctcctttccctgccactggtgcaaataccgccacgtgtgcacacacaacgtggctgactgcgccttcctggagggccgtgtcaacgtgtctgaggactgcccacagatcctgccctccacgcagatctacgtgccagtgggagtggtaaaacccatcaccctggccgcacggaacctgccacagccacagtcaggccagcgtggatatgagtgcctcttccacatcccgggcagcccggcccgtgtcaccgccctgcgcttcaacagctccagcctgcagtgccagaattcctcgtactcctacgaggggaacgatgtcagcgacctgccagtgaacctgtcagtcgtgtggaacggcaactttgtcattgacaacccacagaacatccaggcgcacctctacaagtgcccggccctgcgcgagagctgcggcctctgcctcaaggccgacccgcgcttcgagtgcggatggtgcgtggccgagcgccgctgctccctgcgacaccactgcgctgccgacacacctgcatcgtggatgcacgcgcgtcacggcagcagtcgctgcaccgaccccaagatcctcaagctgtcccccgagacgggcccgaggcagggcggcacgcggctcactatcacaggcgagaacctgggcctgcgattcgaagacgtgcgtctgggcgtgcgcgtgggcaaggtgctgtgcagccctgtggagagcgagtacatcagtgcggagcagatcgtctgtgagatcggggacgccagctccgtgcgtgcccatgacgccctggtggaggtgtgtgtgcgggactgctcaccacactaccgcgccctgtcacccaagcgcttcaccttcgtgacaccaaccttctaccgtgtgagcccctcccgtgggcctctgtcagggggcacctggattggcatcgagggaagccacctgaacgcaggcagtgatgtggctgtgtcggtcggtggccggccctgctccttctcctggaggaactcccgtgagatccggtgcctgacaccccccgggcagagccctggcagcgctcccatcatcatcaacatcaaccgcgcccagctcaccaaccctgaggtgaagtacaactacaccgaggaccccaccatcctgaggatcgaccccgagtggagcatcaacagcggtgggaccctcctgacggtcacaggcaccaacctggccactgtccgtgaaccccgaatccgggccaagtatggaggcattgagagggagaacggctgcctggtgtacaatgacaccaccatggtatgccgcgccccgtctgtggccaaccctgtgcgcagcccaccagagctgggggagcggccggatgagctgggcttcgtcatggacaacgtgcgctccctgcttgtgctcaactccacctccttcctctactaccctgaccccgtactggagccactcagccccactggcctgctggagctgaagcccagctccccactcatcctcaagggccggaacctcttgccacctgcacccggcaactcccgactcaactacacggtgctcatcggctccacaccctgtaccctcaccgtgtcggagacgcaactgctgtgcgaggcgcccaacctcactgggcagcacaaggtcacggtgcgggcaggtggcttcgagttctcgccagggacactgcaggtgtactcggacagcctgctgacgctgcctgccattgtgggcattggcggaggcgggggtctcctgctgctggtcatcgtggctgtgctcatcgcctacaagcgcaagtcacgagatgctgaccgcacactcaagcggctgcagctccagatggacaacctggagtcccgcgtggccctcgaatgcaaggaagcctttgcagagctgcagacagacatccacgagctgaccaatgacctggacggtgccggcatccccttccttgactaccggacatatgccatgcgggtgctctttcctgggatcgaggaccaccctgtgctcaaggagatggaggtgcaggccaatgtggagaagtcgctgacactgttcgggcagctgctgaccaagaagcacttcctgctgaccttcatccgcacgctggaggcacagcgcagcttctccatgcgcgaccgcgggaatgtggcctcgctcatcatgacggccctgcagggcgagatggaatacgccacaggcgtgctcaagcagctgctttccgacctcatcgagaagaacctggagagcaagaaccaccccaagctgctactgcgccggactgagtcggtggcagagaagatgctaactaactggttcaccttcctcttgtataagttcctcaaggagtgcgctggggagccgctgttcatgctgtactgcgccatcaagcagcagatggagaagggccccattgacgccatcacgggtgaggcacgctactccctgagtgaggacaagctcatccggcagcagattgactacaagacactgaccctgaactgtgtgaaccctgagaatgagaatgcacctgaggtgccggtgaaggggctggactgtgacacggtcacccaggccaaggagaagctgctggacgctgcctacaagggcgtgccctactcccagcggcccaaggccgcggacatggacctggagtggcgccagggccgcatggcgcgcatcatcctgcaggacgaggacgtcaccaccaagattgacaacgattggaagaggctgaacacactggctcactaccaggtgacagacgggtcctcggtggcactggtgcccaagcagacgtccgcctacaacatctccaactcctccaccttcaccaagtccctcagcagatacgagagcatgctgcgcacggccagcagccccgacagcctgcgctcgcgcacgcccatgatcacgcccgacctggagagcggcaccaagctgtggcacctggtgaagaaccacgaccacctggaccagcgtgagggtgaccgcggcagcaagatggtctcggagatctacttgacacggctactggccaccaagggcacactgcagaagtttgtggacgacctgtttgagaccatcttcagcacggcacaccggggctcagccctgccgctggccatcaagtacatgttcgacttcctggatgagcaggccgacaagcaccagatccacgatgctgacgtgcgccacacctggaagagcaactgcctgcccctgcgcttctgggtgaacgtgatcaagaacccacagtttgtgttcgacattcacaagaacagcatcacggacgcctgcttgtcggtggtggcccagaccttcatggactcctgctccacctctgagcacaagctgggcaaggactcaccctccaacaagctgctctacgccaaggacatccccaactacaagagctgggtggagaggtactatgcagacatcgccaagatgccagccatcagcgaccaggacatgagtgcgtatctggctgagcagtcccgcctgcacctgagccagttcaacagcatgagcgccttgcacgagatctactcctacatcaccaagtacaaggatgagatcctggcagccctggagaaggatgagcaggcgcggcggcagcggctgcggagcaagctggagcaggtggtggacacgatggccctgagcagctgagccccagctgtgatcatccagcatgatgcagcgtgaggacagctgagcagggaccgggacagccctcaccgcatgcgtgtggagtgtccggtggtgctcgggccgccgcagtgcagcgactgcccggccctccctcccctgcctcacccggtcgggtcccggctcttcctgtgtggaggtgatggtacctgccacaccacagctgcgcacacagctgcttgctcaggggccgggacagcactgggtgctcaggctggccaaggaccttcattgcctggcaagagctgcccagtggccttcatgggagaagggctgacctctgaggggctgaggggtgaggccagggccctccagggggaggggtagccagcttgggctgtccccttgagaccaggacaagaggctgggggtgtcagcattcccagctttccaagctgcccccaggcggcagagtctgagggtcccggggcccggttggcagctggagaaagaggcaaaaagcccgtagccgggcaagaggagctcaagtcggtctgggcccgttgccaccgactcccacctccagcacccatgcccgctgcaccgctgccatcctcagattcaccgcgtgctctgcgcggccgaggccggagcaccacatccacctcgccccagagaggctctgctccctcctatggaggggctgtgggccaggctgctcagactcctgggtggcttccagacggaccgggcagcccctctccgtcctcagggctgtgcctctgggagccactgggccaggggccccgggtcgcagagagcacgttcccgttatttattcccctccgcgtcctacacaggctgccctggcagctgtcttcaagggtaggctgagctccccaccctggagcccctgagggcggcccctgagcactcctctctctccactctctctgtccctgccccagcggcttccagtgtggcatctcagcagtgtcctggcccctccagagcagtgggacatctggggactgtttttgtgtttaggggaaaaaattctgctgcactctgcttgggccttgaggtctgtggcagggctcctctggcccgcagtggcctggatctatctgggccatgagtgacgggcagtgaccagagggactggaggccagcggtgtccacccttgccctcagcaagagagaatgcattcttaaaagaaagctgtacatgtatatatatgcatatatatatatgtggctctagcctcaggctccagccccagtggggtactgtacagttaactgaagaagaattttaaagacgatttgaacaagaaaatgaaggcagtgggaaagcaatgccaaatggttgtggagaaagtggccggagcctccctggagtggagcagccctgaagcctgtgccccccgacctgcgggccgctgttttggtttgacatgacaaggaaaggacttcctgctgaccctgagagcctctggggtgccgcggcaccacggggcatgcatgattgtgctagcgtttagtctgagttgatctttttaaaactgcaagtgttgaatactagaggttgttagacccttttttatgttttttaattaatcagtcacttgtaaaagcaaacaagcggtccatccccttttcaaggtcacttttttgatggtaccgaagatcccatggacattaagggacagctaactgtggccagactcagccccatgtccttggccaggcccaaggagaggactcggccccatggggtgtgccagtcttgcagtccgccccagctgagtagcgtgagccagatgacgccacagagacccgcctcttccctgaacgcgggtcggtgtggagtcagtgactgctgactcagggagctccttggccccgtgggcactgtgccagggctggggccttctgctgctgccacacccagctcaggcctgggccagcccctgcccccagcccactgagggggtgggcttactccctgggcagtcttgggggccagagctgaggccagtccatattacagtggctgggctgtttttttcagtagcccctagcattggctgggattcctgttcctgggtgcgcctccacctcccttctgatgtttcctggctatggtggggtgggaacctcagtttcccccaaagtcttccctggatgctggcttcaggttgaagtccctggttcttccagttcctcacgggttaggtaggggctcctgcatcaccttcagaatccagttccaacccccactctccttaggccttgtgctctgctctgccctgccaggctgcccttgtccatgtgagtagcatgggcgggtggtggggacggcagtggtgatgaagggggtgcaccacaggcctcatgaagcagttcccacatgggcgtgtggctggggcgtggccaccacagagcacatggctgtgtctaggcgcaagcactttagcagtatctgtttacatgcgcaaggatcaagccgactacctgtgctgtctactgggacagcagtctccgagctactccgtacctccctctgccaggtcgtggagttaggccccagtccctacttgtcactggttcccactgtgctcctaactgtgcagcacctgggagctctggcctggggctggaggccctggtaggagctgcagttggaggccgttctgtgcccagcagcggtgagcggctcccatgggccctgtgtctgcagggagccagggctgcggcacatgtgctgtgaaactggcacccacctggcgtgctgctgccgccacttgcttcctgcagcacctcctaccctgctccgtgtcctccctctccccgcgcctggctcaggagtgctggaaaagctcacgcctcggcctgggagcctggcctcttgatatacctcgagcttcccctgtgctccccagccccaggaccactggccccttggcctgaggggctgggggccccacgacctgcagcgtcgagtccgggagagagcccggagcggcgtgccatctcggctcggccttgctgagagcctccgccctggctttctccctgtctggattcagtggctcacgttggtgctacacagctagaatagatatatttagagagagagatatttttaagacaaagcccacaattagctgtcctttaacaccgcagaaccccctcccagaagaagagcgatccctcggacggtccgggcgggcaccctcagccgggctctttgcagaagcagcaccgctgactgtgggcccggccctcagatgtgtacatatacggctatttcctattttactgttcttcagatttagtacttgtaaataaacacacacattaaggagagattaaacatttttgctaaaagct

SEQ ID NO: 16119 - DNA, 4446 bp, Homo sapiens
  source 1..4446: mol_type = unassigned DNA
gtttcttgctgtgtgaccttgggccaatatctgcactgccctgaccttcagagactagctgccgtcctttcactctctgaggccaggcctgggaaccctcggacaggtgtctgactttgggaaaccctcaaaggcttcctgtcacattaatggctctccatccggatctgcaccccttttcctcctccttcgtggctaacttaatgaaaccaagtttgcaaatgaaacataatttcatagacagacatgttgttggaaggtctgggatggtcttaacagctgtctctctaattaccgcagatgctaacgaggtgcctggagcctctggttacaggagcagagctgctgtttgtttgccagggccgggtaggaggcagggctgccaaacctgcccctccattgaggtgtacacacacctgaaggcccttgggcaggcaggacctacagtggaccccatgcccaggctctgggcgggcctcgcctgtgtggccaactcacccagcccagacgtgaacgtttcccagggacagctctccattcactcaattcatccagcaagtgtctgtgatgccccatgcacaggctcagccagtgctagcagtagggtatagtgagcaggccaggcagctcccactccagaggggttgccaggggtgcacaggatccttcagagaacgacagatggcggggagactcagcgaggcagtggtcgggggtacgtgtgctgggcgctccccaggagcctttctgaagagggcacattgggttgggtccacaagggcccatgaagatgccaggggaaatttctggttgtagaggcagcagttgcaaaggccctgaggtgggacaggaggcggttctcatgctacagcgcggggagccggagggtgaggggtcaggtgcccgctgagggcccggggctgtgctgctggccctgtgctgtgtgcttgggtgctggtgaacctccctgggtgggcaagcctcctcaggtgggtatgtcagtatccatgacacaccatagttgtgtcccagagtaatatgggggcccagctgggtggtccctaggaggccagtggatcacagtcacacttggagttgcgtagtatggggtccgcttgtgccatgggcggtgggccatggggagctttgtcctgagcacctccagctggggagcaggcccctgggaggctggagctaggcggggatcctgctgagaccaggggagacttctgggtgaaataggcctcggccctccctgatgcaggtcccgcgtgccacgccatgttcctcgatacactactgcgcctcctggctcatgtgtaatttagggttttcatgtgatatttgtgggatggtgggtatgttttgtttcctgattttcttgcagtctctgctgggctttgggactaaggctgtacttgcctcccaaagagttgggaagtgctgctcatttctccttgccaggaacaccatggctggcactcgacgggtggaggggcaggttgggggtaggcccgggggtcctggctgcagcctcatgccgccacccccgcaggagtgcgctggggagccgctgttcatgctgtactgcgccatcaagcagcagatggagaagggccccattgacgccatcacgggtgaggcacgctactccctgagtgaggacaagctcatccggcagcagattgactacaagacactgaccctgaactgtgtgaaccctgagaatgagaatgcacctgaggtgccggtgaaggggctggactgtgacacggtcacccaggccaaggagaagctgctggacgctgcctacaagggcgtgccctactcccagcggcccaaggccgcggacatggacctggagtggcgccagggccgcatggcgcgcatcatcctgcaggacgaggacgtcaccaccaagattgacaacgattggaagaggctgaacacactggctcactaccaggtgacagacgggtcctcggtggcactggtgcccaagcagacgtccgcctacaacatctccaactcctccaccttcaccaagtccctcagcagatacgagagcatgctgcgcacggccagcagccccgacagcctgcgctcgcgcacgcccatgatcacgcccgacctggagagcggcaccaagctgtggcacctggtgaagaaccacgaccacctggaccagcgtgagggtgaccgcggcagcaagatggtctcggagatctacttgacacggctactggccaccaagggcacactgcagaagtttgtggacgacctgtttgagaccatcttcagcacggcacaccggggctcagccctgccgctggccatcaagtacatgttcgacttcctggatgagcaggccgacaagcaccagatccacgatgctgacgtgcgccacacctggaagagcaactgcctgcccctgcgcttctgggtgaacgtgatcaagaacccacagtttgtgttcgacattcacaagaacagcatcacggacgcctgcttgtcggtggtggcccagaccttcatggactcctgctccacctctgagcacaagctgggcaaggactcaccctccaacaagctgctctacgccaaggacatccccaactacaagagctgggtggagaggtactatgcagacatcgccaagatgccagccatcagcgaccaggacatgagtgcgtatctggctgagcagtcccgcctgcacctgagccagttcaacagcatgagcgccttgcacgagatctactcctacatcaccaagtacaaggatgagatcctggcagccctggagaaggatgagcaggcgcggcggcagcggctgcggagcaagctggagcaggtggtggacacgatggccctgagcagctgagccccagctgtgatcatccagcatgatgcagcgtgaggacagctgagcagggaccgggacagccctcaccgcatgcgtgtggagtgtccggtggtgctcgggccgccgcagtgcagcgactgcccggccctccctcccctgcctcacccggtcgggtcccggctcttcctgtgtggaggtgatggtacctgccacaccacagctgcgcacacagctgcttgctcaggggccgggacagcactgggtgctcaggctggccaaggaccttcattgcctggcaagagctgcccagtggccttcatgggagaagggctgacctctgaggggctgaggggtgaggccagggccctccagggggaggggtagccagcttgggctgtccccttgagaccaggacaagaggctgggggtgtcagcattcccagctttccaagctgcccccaggcggcagagtctgagggtcccggggcccggttggcagctggagaaagaggcaaaaagcccgtagccgggcaagaggagctcaagtcggtctgggcccgttgccaccgactcccacctccagcacccatgcccgctgcaccgctgccatcctcagattcaccgcgtgctctgcgcggccgaggccggagcaccacatccacctcgccccagagaggctctgctccctcctatggaggggctgtgggccaggctgctcagactcctgggtggcttccagacggaccgggcagcccctctccgtcctcagggctgtgcctctgggagccactgggccaggggccccgggtcgcagagagcacgttcccgttatttattcccctccgcgtcctacacaggctgccctggcagctgtcttcaagggtaggctgagctccccaccctggagcccctgagggcggcccctgagcactcctctctctccactctctctgtccctgccccagcggcttccagtgtggcatctcagcagtgtcctggcccctccagagcagtgggacatctggggactgtttttgtgtttaggggaaaaaattctgctgcactctgcttgggccttgaggtctgtggcagggctcctctggcccgcagtggcctggatctatctgggccatgagtgacgggcagtgaccagagggactggaggccagcggtgtccacccttgccctcagcaagagagaatgcattcttaaaagaaagctgtacatgtatatatatgcatatatatatatgtggctctagcctcaggctccagccccagtggggtactgtacagttaactgaagaagaattttaaagacgatttgaacaagaaaatgaaggcagtgggaaagcaatgccaaatggttgtggagaaagtggccggagcctccctggagtggagcagccctgaagcctgtgccccccgacctgcgggccgctgttttggtttgacatgacaaggaaaggacttcctgctgaccctgagagcctctggggtgccgcggcaccacggggcatgcatgattgtgctagcgtttagtctgagttgatctttttaaaactgcaagtgttgaatact

SEQ ID NO: 16120 - DNA, 410 bp, Homo sapiens
  source 1..410: mol_type = unassigned DNA
cccccttaggctggggctgctgtggcagattgggagggctgtggcacattgcaggggactatggcaggttaagtgtgctgcagcaggggcggaggtatgtccctgccctgtgctggtgctgagagctgcaggcaggccccgtcccactacactgctgtgatggaggagggaaagagggccccagcggccccaccctccagctccctcctcccccagagtggcgccagggccgcatggcgcgcatcatcctgcaggacgaggacgtcaccaccaagattgacaacgattggaagaggctgaacacactggctcactaccaggtgacagacgggtcctcggtggcactggtgcccaagcagacgtccgcctacaacatctccaactcctccaccttcaccaagtccctcagc

SEQ ID NO: 16121 - DNA, 536 bp, Homo sapiens
  source 1..536: mol_type = unassigned DNA
gaaatggcactggtgtggctgagtgtctgggctcttcacttcatttaagttaagcagccacgtgtggccagtgctgccaggcagcccagctaatggcagtccctgagcctgcccctgcgcttctgggtgaacgtgatcaagaacccacagtttgtgttcgacattcacaagaacagcatcacggacgcctgcttgtcggtggtggcccagaccttcatggactcctgctccacctctgagcacaagctgggcaaggactcaccctccaacaagctgctctacgccaaggacatccccaactacaagagctgggtggagaggtactatgcagacatcgccaagatgccagccatcagcgaccaggacatgagtgcgtatctggctgagcagtcccgcctgcacctgagccagttcaacagcatgagcgccttgcacgagatctactcctacatcaccaagtacaaggatgagatcctggcagccctggagaaggatgagcaggcgcggcggcagcggctgcggagcaagctggagca

SEQ ID NO: 16122 - DNA, 13786 bp, Homo sapiens
  source 1..13786: mol_type = unassigned DNA
gcgagccgcggcggcagcaggcagcccgggagctccggcggcggccgagccagcggcggccccgctccctgccccctgcaaactttgcgagcagcccgcccggggggccgggggcgcgcccgggaggcccggctcggcccgcggccgagctctccgccgccgcagcgccagccgccgcagccaccaccgccgcagccccgcgcctccccggggagcagccggcggctcccgcggccccccagccccggccccagggcactgcccggcgagtgtctcggcaagggtgggggctgccgcggcgcggccggccgcgggctgccggggggcggccgccgctacccagagaggcgcgcagaggcgccgagagcgctccccggcgggtcccccgcgcactcgccgcgcccgggcagcggcccgaccgggcgagcatgggcggcgcggagtgacgccgctgtgcccgcttggcatcaaggacattcagcccgcgggggtggggacgaaggggggcagcccggcgtcgccaccgcagcccccgagagccgccgccgctgctcgggctccggggctgggtggaggaaaggggtgttcggaatcgatccccattttccgacctttttgttggacattacgcccaccttggacgccgcaagagaagctgtcaagccccgcaggctctgattcggcgccctccgcgttcctcggctgctcccggcttccctgtgcctcggtggagtatttgcgttcggggctggggctggaggaggcagccacacgcgcgcacacgcacacgttcagaggagggcgagaggcagcggcataggctccatctgcagtgtcaatgcggcgctcccgctgaaggagggaaacgcggcgcgtccaggggagactgcattgctgagtcctggccctctgaggggacgactgtgcctgagtgctgctgtgccactgggacccgcctctgccatgaaagccatgccctggaactggacctgccttctctcccacctcctcatggtgggcatgggctcctccactttgctcacccggcagccagccccgctgtcccagaagcagcggtcatttgtcacattccgaggagagcccgccgagggtttcaatcacctggtggtggatgagaggacaggacacatttacttgggggccgtcaatcggatttacaagctctccagcgacctgaaggtcttggtgacgcatgagacagggccggacgaggacaaccccaagtgttacccaccccgcatcgtccagacctgcaatgagcccctgaccaccaccaacaatgtcaacaagatgctcctcatagactacaaggagaacaggctgattgcctgtgggagcctgtaccaaggcatctgcaagctgctgaggctggaggacctcttcaagctgggggagccttatcataagaaggagcactatctgtcaggtgtcaacgagagcggctcagtctttggagtgatcgtctcctacagcaacctggatgacaagctgttcattgccacggcagtggatgggaagcccgagtattttcccaccatctccagccggaaactgaccaagaactctgaggcggatggcatgttcgcgtacgtcttccatgatgagttcgtggcctcgatgattaagatcccttcggacaccttcaccatcatccctgactttgatatctactatgtctatggttttagcagtggcaactttgtctactttttgaccctccaacctgagatggtgtctccaccaggctccaccaccaaggagcaggtgtatacatccaagctcgtgaggctttgcaaggaggacacagccttcaactcctatgtagaggtgcccattggctgtgagcgcagtggggtggagtaccgcctgctgcaggctgcctacctgtccaaagcgggggccgtgcttggcaggacccttggagtccatccagatgatgacctgctcttcaccgtcttctccaagggccagaagcggaaaatgaaatccctggatgagtcggccctgtgcatcttcatcttgaagcagataaatgaccgcattaaggagcggctgcagtcttgttaccggggcgagggcacgctggacctggcctggctcaaggtgaaggacatcccctgcagcagtgcgctcttaaccattgacgataacttctgtggcctggacatgaatgctcccctgggagtgtccgacatggtgcgtggaattcccgtcttcacggaggacagggaccgcatgacgtctgtcatcgcatatgtctacaagaaccactctctggcctttgtgggcaccaaaagtggcaagctgaagaagatccgggtggatggacccaggggcaacgccctccagtatgagacggtgcaggtggtggaccccggcccagtcctccgggatatggccttctccaaggaccacgagcaactctacatcatgtcagagaggcagctcaccagagtccctgtggagtcctgtggtcagtatcagagctgcggcgagtgccttggctcaggcgacccccactgtggctggtgtgtgctgcacaacacttgcacccggaaggagcggtgtgagcggtccaaggagccccgcaggtttgcctcggagatgaagcagtgtgtccggctgacggtccatcccaacaatatctccgtctctcagtacaacgtgctgctggtcctggagacgtacaatgtcccggagctgtcagctggcgtcaactgcacctttgaggacctgtcagagatggatgggctggtcgtgggcaatcagatccagtgctactcccctgcagccaaggaggtgccccggatcatcacagagaatggggaccaccatgtcgtacagcttcagctcaaatcaaaggagaccggcatgaccttcgccagcaccagctttgtcttctacaattgcagcgtccacaattcgtgcctgtcctgcgtggagagtccataccgctgccactggtgtaaataccggcatgtctgcacccatgaccccaagacctgctccttccaggaaggccgagtgaagctgcccgaggactgcccccagctgctgcgagtggacaagatcctggtgcccgtggaggtgatcaagcctatcacgctgaaggccaagaacctcccccagccccagtctgggcagcgtggctacgaatgcatcctcaacattcagggcagcgagcagcgagtgcccgccctgcgcttcaacagctccagcgtacagtgccagaacacctcttattcctatgaagggatggagatcaacaacctgcccgtggagttgacagtcgtgtggaatgggcacttcaacattgacaacccagctcagaataaagttcacctctacaagtgtggagccatgcgtgagagctgcgggctgtgcctcaaggctgacccagacttcgcatgtggctggtgccagggcccaggccagtgcaccctgcgccagcactgccctgcccaggagagccagtggctggagctgtctggtgccaaaagcaagtgcacaaacccccgcatcacagagataatcccggtgacaggcccccgggaagggggcaccaaggtcactatccgaggggagaacctgggcctggaatttcgcgacatcgcctcccatgtcaaggttgctggcgtggagtgcagccctttagtggatggttacatccctgcagaacagatcgtgtgtgagatgggggaggccaagcccagccagcatgcaggcttcgtggagatctgcgtggctgtgtgtcggcctgaattcatggcccggtcctcacagctctattacttcatgacactgactctctcagatctgaagcccagccgggggcccatgtccggagggacccaagtgaccatcacaggcaccaacctgaatgccggaagcaacgtggtggtgatgtttggaaagcagccctgtctcttccacaggcgatctccatcctacattgtctgcaacaccacatcctcagatgaggtgctagagatgaaggtgtcggtgcaggtggacagggccaagatccaccaggacctggtctttcagtatgtggaagaccccaccatcgtgcggattgagccagaatggagcattgtcagtggaaacacacccatcgccgtatgggggacccacctggacctcatacagaacccccagatccgtgccaagcatggagggaaggagcacatcaatatctgtgaggttctgaacgctactgagatgacctgtcaggcgcccgccctcgctctgggtcctgaccaccagtcagacctgaccgagaggcccgaggagtttggcttcatcctggacaacgtccagtccctgctcatcctcaacaagaccaacttcacctactatcccaacccggtgtttgaggcctttggtccctcaggaatcctggagctcaagcctggcacgcccatcatcctaaagggcaagaacctgatcccgcctgtggctgggggcaacgtgaagctgaactacactgtgctggttggggagaagccgtgcaccgtgaccgtgtcagatgtccagctgctctgcgagtcccccaacctcatcggcaggcacaaagtgatggcccgtgtcggtggcatggagtactccccggggatggtgtacattgccccggacagcccgctcagcctgcccgccatcgtcagcatcgcagtggctggcggcctcctcatcattttcatcgtggccgtgctcattgcctataaacgcaagtcccgcgaaagtgacctcacgctgaagcggctgcagatgcagatggacaacctggagtcccgtgtggccctggagtgcaaggaagcctttgccgagctgcagacggacatccatgagctgaccagtgacctggatggagccgggattccgttcctggactatagaacttacaccatgcgggtgctgttcccaggaattgaagaccaccctgtcctccgggaccttgaggtcccgggctaccggcaggagcgtgtggagaaaggcctgaagctcttcgcccagctcatcaacaacaaggtgttcctgctgtccttcatccgcacgcttgagtcccagcgtagcttctccatgcgcgaccgtggcaacgtggcctcactcatcatgaccgtgctgcagagcaagctggagtacgccactgatgtgctgaagcagctgctggccgacctcattgacaagaacctggagagcaagaaccaccctaagctgctgctcaggaggactgagtcagtggctgagaagatgctgaccaattggtttactttcctcctctacaagttcctcaaggagtgtgctggggagcccctcttctccctgttctgtgccatcaagcagcagatggagaagggccccattgacgccatcacgggcgaggcccgctactccttgagcgaggacaagctcatccgccagcagattgactacaaaaccctggtcctgagctgtgtcagcccagacaatgccaacagccccgaggtcccagtaaagatcctcaactgtgacaccatcactcaggtcaaggagaagattctggatgccatcttcaagaatgtgccttgctcccaccggcccaaagctgcagatatggatctggagtggcgacaaggaagtggggcaaggatgatcttgcaggatgaagacatcaccaccaagattgagaatgattggaagcgactgaacacactggcccactaccaggtgccagatggttccgtggtggcattagtgtccaagcaggtgacagcctataacgcagtgaacaactccaccgtctccaggacctcagcaagtaaatatgaaaacatgatccggtacacgggcagccccgacagcctccgctcacggacacctatgatcactcctgacctggagagtggagtcaagatgtggcacctagtgaagaaccacgagcacggagaccagaaggagggggaccgggggagcaagatggtgtctgaaatctacctgacccgactcctggccactaagggcacactgcagaagtttgtggatgacctctttgagaccatcttcagcacggcacaccgtggctctgccctgcccctggccatcaagtacatgtttgacttcctggatgagcaggctgataaacatggcattcatgacccgcacgtccgccatacctggaagagcaattgcctgcccctgaggttttgggtcaacatgatcaagaacccgcagtttgtgtttgacatccataagaacagcatcacagacgcctgcctctctgtggtggctcagaccttcatggactcttgctccacgtcagagcaccggctgggcaaggactcgccctccaacaagctgctgtatgccaaggacatccccagctacaagaattgggtggagaggtattactcagacatagggaagatgccagccatcagcgaccaagacatgaacgcatacctggctgagcagtcccggatgcacatgaatgagttcaacaccatgagtgcactctcagagatcttctcctatgtgggcaaatacagcgaggagatccttggacctctggaccacgatgaccagtgtgggaagcagaaactggcctacaaactagaacaagtcataaccctcatgagcttagacagctgagaaccgtccttccagggccgccctggagggggacacaccaagccgtgcctcagtctagattatcatctttaccaagtgcaagttccgactggcatcagcagcatcccctgagcagcgctgtttctctctctttctctctgcctctttccgtttctccctccttcctggatctcttctcttccagttgctctgccaacacgattggaccaagccactgaccctcagttagtccaagaatggccaggcccatggcaagggagctgaccagaagatgtcagagaggcctctgtctcccaggtgctcctgaccctgtgcatgtcagcagcagggtgcaaataacgaatgaggagccagggacaggggacatttctgtgctgctacttcaccttccactttggcagcccctgctttggtctgagccttggcctagggaagaggcaaggaaggacttcagtattatctttactgggaagacatcacctggctctcccttcccacagttccatctccagtggttcagccagtggtctgatcgctttgcagctgtgagaagaaaggctacacctcctgcatgtggctggagcagggcatgtgtgggcagctgggaggtgctccttgaggctccttctcccccactgggctggtgtccagaggcttcctgtccttttccaggtctccagagggacctgcctgccctgcctgctcccccgccagtagaaagccaggcaggagaaagaatagcaattacattccaccatggagatgctcctgaccttttcatctgaatcctagtagcagaaatgtaacacagggggagaaaaggaaagagagttgcatctaccctggaagcagaatttgttttccatttaccctcaaattcaaatgagtcacaatcatagtcataggtctagtccactaccagagccctgagtgctgtcaagagaaagcatctatctccaccctcctttgtcaaccttcatcaagggtcaacgtgaaatgcagagtgcatctaggagattctacctccagccatctccatggctccatccccatcatccttcctgagaactccatagacggctggggccaacagcctagtccctgttccctctgcagaatccggtgccattgctatgcagatgactttgtcactgggctgtccagacctctttgggaatgatttcatcaacatctcagctgtctctcatcattctccttcctcatctcttcagcagtcatccttgaaagaaacagacttaagcaaagcctcacggagacagcccaaaatgccagccaacctcagcctccagcttgtcagatctgggagggacaaagagtcgagctgatgggcctggctggaattaagaagagggacatacaaatgaccttggccttggcatccatctccccatctgttcttacatctacagatgcacgattttagccaggcaggcaaatgtgtgcctagaaattgatactaggtaagcagaggctatggggagagatggtctaatggagggttctaggaacctttcatcctaaggagaccttaggtgctgtctggtgcagtctcccatcctaagcaggagtctctgttggcacctctgctctggagttgttcaccactatgggagacaaggagaaacatcttaggtgaggttgaggagaaggattcacagtcttgccttcactccccaaacatcagacatcattccttgtcacccactcagaatgagccccccttggggaagaaaccacaccatttccagcaaagtccatggagcatccggtacttttaagaacacttgcccctttggatatgaatatgtgcacatgtgtgtgagcacatgtatgtgtgtgtgtgtgtctgccccaggtgtaggcggaaagctcaaaaggatttcttgtcctttgtaggaggatttttgaagtgttccccttctctttccccttgctcatccattcatcctgcagcttcaggacatttcaacacttacttgctttctatgctgagagctggtgggtggaaggagagggcgcttgtccataggaaatcagggtggtcgcctgccgaggcctggaccttggaacagggcatcatgtgacatcgcagaggacagatggtggaaaagacatgagcaacctaatgggaagaggaaaatgggaaacaatgcattggaagaggaagaaaaaaaataaataaccaaaggttttggcaagtgcagtaccaggtggagaagcttgacttttctatccttgatcattttattccctcccaagaagtcagtcacaggacctggaaggccagaaagggtacatgtgggagacggtctgaggaagtacctcggtcactacaatatttttgcacatataaagggttggggaggaaagagacacaaacgtatttaacacagatttgctggatggaagctgcgtgtgtgaacgtgtgtatgagtgagtgcattttgattttttttttttttttttgcacagttaagagaaaaaatcaaacaagcagaaaaaaaaaagaaaaaagacttatcacggttctgctgaagcttttattttttactggatgatgattattgttattgttactttggcggtacaggactttattttattccatgtttttgttataagaaaaatttcaaacacctcagagaaatagaaaggttaggaagaaagaggagacaaggacagacaaattttctggctgtccccatttctcctgggggaggggtttggggctggtttgactttaattggtgggtgggttgtttctgccgctctgtttgctgcagtccccgtggcctgcttggggactgagaaatttgagccaggtatccagagccacagcccatcttgcttataaaaattatcttctgctgtttgttttccatttcttccgtttggattcttggtgcacgtgtgatatggtatttaaaagcaaagacaagcaacattgtcaaaaagctgtccttgccccccatcccccacccaaatcttttttccaaactcccccagggatcttccttaccccactggcagagcaaacatccaggggctgtccatgtggcttgcgggctcccagagaaaggaattgggccaactttgtcctgtgggatggaggccccttcacggcctccctcgaggcaaagttaatttgtagggtcaccattatgttgagtcatgagcagacagaaggagagaaaaggccatcttccttaccttcccctccaacttatcccgtaccctcccagggaaaatggtaccagactgagccatcaaaatcactgacaaagtttaggtgggaattttttttgcatgttggagagagaagggcttaaggtagcagggaagaagggggctttgtggggtcctaaattttaaggaataagtagaggaagacaagaaacagagtggtaggctggtcatttctcctggccacaagtccccccagatgcagcttttacccattctttgtccttccccataaggagagaccctgacatttcttggtagctgcaaatagtgccactaagtgaaggtggccatcatgccagttacttcctcaggaaaatattttcttgccttcttctttcagtatggttttaaatttgggaacagtggataacccaagtgtcccacaggccaaggtacattccaatggcagcatgatccctgcacccaaagccagcccctaaagcctaccccttgtgcacccgcagcctggtaagtgagcttggctgcttgtgaggagctacaagtgaaagagaagttattttaaataaatcccaaagtttgaggcagactgtccaggactgttcccaggaagaagcaggagttacccacaggaaaagtctctgacctggtcccctcaggcccagctacctgcgcccaccagcagtgaaggttgatgtactggcccagcatctccacctcccccatgcaaccaggtccctggtaccgtgtctcccgttgcatgtctggcttctgcctgtgctcctcctgccacgagcatcctccctgtccctcctcattccaccgtgtctctcctgcacacatagcctctgtcccagggcgatttatccacttgagtacaggagctgctcagacctctcagcccagccctctgtgactgccccagccccatcctaccccacccaaagctgccttcctggctgtaggagctccctcgtctagccaaggccctatgggtccccatccgaggatccacaagcaatgacttcccaaatgacctccactgcaagaagaatccttaccactgtttccagagccgtgaacgatgctgtgatgggcccaggtctcagcaccaccctctgtgacctaaaaagaaaagctcaatttccatctgtcttctttcccaggaccaaggggacacagtaatgtgaagtcaaatacttaaccgagcaaagggccagtattgttatcagtcaaggacaaacctcccacctcacagacagccaagcagtgagggaaagacagacagacataggtaggaaggtgctctgcaggcacaaggcccagagaagcccctctccgggaacttcccctgctccttccaggaacagtgagcccagtgagcagccccagccagctcttcaaggccttcaaggggtctttccatgactgagtcacctccaggagctcacctgacccccagagaagacctaccccaggcagctccgtgccctggcttctccccatgccccaaatccccccccgccatccctcctggtcctcgtctacatcaagggcctcttcccctcttcctgccagctctcaggacaggtgactgggaggccttgaaccctcagcctcttcctttaaaaaaaacaaaacaaaacaaaactgtgggccatttatttgggattttggagttgtttggtttttgtttgtatatcttaatagttcgaaagtaagaagggagccctgctatggatgttaagtccaaattactcggttagtgggagcaaaacctatgacttccaaggggatgaggagaggttcagaggacaggaggagcctcccccattgaaaaaaaaaaatgggtcaggacattccctggatgaggacaatgctaggggtggcatctcacatggctgctgctattcctggtgcttccccacacttttgacagatggagtccttctcctaccgcctcctgccacctcaccctacaggcattctctatgtaggaaacaagagccttattttatagagtggggagctgagacacagcctcaggtaacactgacacagctcccgaatgaggctgggacactctgcaaacctctcctcatggtgctaagggtggcatgctcttgacaggaaacctaaatgaccactcctctcatttggaaagtaatccactgcagtaaaagtttcagacatgcaagagagagtttttttttttttactacaaatttttgctcccccataaaattattttattagagggagtatccaagttttaaaagtatatagaattttttggttgtaagagaaatacatactcattaggatcccgattaaattccttgagtagactggtgcctaccagaaagcaaagcaaagttaaacaaaacgaaacaaaatccttcatatacaaaaagaactttctgtttgtattggcagaggtagtgaggtgattcaggtaggctgaaaatcctgggttgcgggagcctcactttattccattcccacccgctttgatgtctatgcttggctctctgggctgcccctggtactgccgaatcctacacatctcttatcagctttcctcaaactttaaggaggctctgtgagggatgggtcatgggaagacccaagctttccctccgccaggattgcaaaagcaagtagacttggtctatgcagctcttcttccagcaatttctttatttggaattagaacttcctttgttagtatctttgatcttttgactcaagcacattttggaagggctcccttacaaaagtagaatttaaaacagaggatacagttaaagagcaacccaaaggacgcttaagaaaccgagaccacttcaccaaacaggactaaggaacactttcgtgcacagaagtcagccgcaatccaggcacaggacgaagatgggatacacgtgctcatctgtctgtcctcctttcctctccctccccgacgttctagttagcttgttgacttgttaaaccttctgttcttaaaatgaaaagctagcttacctcaaagaatcttgtttccattcggaaaccaacgattttgtgttttagaatggacagccctcccctcaccactccctaccttggcctggtgtccttgagacatacggtctttgcttagtcgtgtgttggctgctttgagcaggaacaaggcctccaggccctgaggtgggaaggaaggattggatgccactgccctcctccccactttagcatgtaggggccagcccatctcttccagcagggtcctgctgagttaccatagcaaccagcaactccagggtaccacaacagacaatggctcagcgagccgacgtgtggggatgatgcaggggttttggcccagccagaggacccagagttgagcttcaaatgctagagaaggggagaaacaggatggaagggtggtttaaggaaccggcaggggtctttgagtcacatagagaagccgttgaaggaggtagggcaggttatctctgttccagtcacccccttccagccccatcccacttctgtttcaaactaaagctcccacctcgaacattgaccctttgttagaacaaagcaaagcatatctttagacaacagtgttaaaatgagcctcaaatgtatgtggatgagatctctaagaagagggtcttctggttttgatttttaaagaagagtatcctagtaaaatattaaaaaaaaattaaaaagtttttaaaaaggaaacctgtgctatttaaattggagcccagttgtaacttggtaaaggcaagcttctgtacctttgttataattaattgtatacctgtgtatgtaaatataaggcattcctattttgcagttcagaacaaaaaaaacttatttgtaatatagaataaagtttattaaaaaataataaaaatgc

SEQ ID NO: 16123 - DNA, 597 bp, Homo sapiens
  source 1..597: mol_type = unassigned DNA
tcagtgttatatctcttttccatgtgcaggggaaatttaaagctgttagagacagatgaaatgggaaaaaatgatttaatgcatggacttacccaattttacccaagtagggtgggctgtataccatcctcccctgcctaggtctgtgaggcaggttttaaaagccatcctcagaactacgtgagtcgagctgtgtctggacgtatcctgcctctccagggcacactgcagaagtttgtggatgacctctttgagaccatcttcagcacggcacaccgtggctctgccctgcccctggccatcaagtacatgtttgacttcctggatgagcaggctgataaacatggcattcatgacccgcacgtccgccatacctggaagagcaattgcctgcccctgaggttttgggtcaacatgatcaagaacccgcagtttgtgtttgacatccataagaacagcatcacagacgcctgcctctctgtggtggctcagaccttcatggactcttgctccacgtcagagcaccggctgggcaaggactcgccctccaacaagctgctgtatgccaaggacatccccagctacaagaattgggtg

SEQ ID NO: 16124 - DNA, 3314 bp, Homo sapiens
  source 1..3314: mol_type = unassigned DNA
agtgtcaatgcggcgctcccgctgaaggagggaaacgcggcgcgtccagtaggggagactgcattgctgagtcctggccctctgaggggacgactgtgcctgagtgctgctgtgccactgggacccgcctctgccatgaaagccatgccctggaactggacctgccttctctcccacctcctcatggtgggcatgggctcctccactttgctcacccggcagccagccccgctgtcccagaagcagcggtcatttgtcacattccgaggagagcccgccgagggtttcaatcacctggtggtggatgagaggacaggacacatttacttgggggccgtcaatcggatttacaagctctccagcgacctgaaggtcttggtgacgcatgagacagggccggacgaggacaaccccaagtgttacccaccccgcatcgtccagacctgcaatgagcccctgaccaccaccaacaatgtcaacaagatgctcctcatagactacaaggagaacaggctgattgcctgtgggagcctgtaccaaggcatctgcaagctgctgaggctggaggacctcttcaagctgggggagccttatcataagaaggagcactatctgtcaggtgtcaacgagagcggctcagtctttggagtgatcgtctcctacagcaacctggatgacaagctgttcattgccacggcagtggatgggaagcccgagtattttcccaccatctccagccggaaactgaccaagaactctgaggcggatggcatgttcgcgtacgtcttccatgatgagttcgtggcctcgatgattaagatcccttcggacaccttcaccatcatccctgactttgatatctactatgtctatggttttagcagtggcaactttgtctactttttgaccctccaacctgagatggtgtctccaccaggctccaccaccaaggagcaggtgtatacatccaagctcgtgaggctttgcaaggaggacacagccttcaactcctatgtagaggtgcccattggctgtgagcgcagtggggtggagtaccgcctgctgcaggctgcctacctgtccaaagcgggggccgtgcttggcaggacccttggagtccatccagatgatgacctgctcttcaccgtcttctccaagggccagaagcggaaaatgaaatccctggatgagtcggccctgtgcatcttcatcttgaagcagataaatgaccgcattaaggagcggctgcagtcttgttaccggggcgagggcacgctggacctggcctggctcaaggtgaaggacatcccctgcagcagtgcgctcttaaccattgacgataacttctgtggcctggacatgaatgctcccctgggagtgtccgacatggtgcgtggaattcccgtcttcacggaggacagggaccgcatgacgtctgtcatcgcatatgtctacaagaaccactctctggcctttgtgggcaccaaaagtggcaagctgaagaagatgcctggtaccagcctctgccctacccttgagctacagacgggaccccgatcccacagagcaacagtgactctggaactcctgttctccagctgttcatcaaactgagaaaaacttcagagctgtgtaggcttatttagtgtgttgtcagccttggatattggaaaatggaaacagatgagacacatctacctccctgtgaccccagccatacatcatagctcatgtcctgccaccccaagtccttagggaaaaaagactttggagaatgtgtctctgcttagcttggctaggtagttggtctcttttctctgccccaagcgtcccatgggtaattttggacaatggagtgtaggcatgtttgactcttgtggtgttatcacttgtatatgtcagtgaaactaactgattctcccatcggaatatagttatctcttgggcctgatatatggtaggataaccttatgctcatctgtccacttctgcagccaagtcgcctggccagtgtgtgtgtgtgtgtgtgtgtgtgtgtgtgtgtgtgtgtgtgtgtatgcttatctgtgtttaaaggtgtgtgtgcatacacagggcagagaggatggagcccaccgtactgcagcatcatgtaattaactcagtgctcagaaccatcccagcctctgcgggaaagagaaaaggaagccaacagtgcctgatgagctgatcatatgtgcaaaagctctgttggcatctggtccaggagagcacccaaaaaaagttaattggtgttgtccagtctcctttccttaagactatggttacaacaaagcgtgagcagtgtctcctgcatggccactatccagcacaattccataattcccccatagagccggtggggaggaggaggtgagtggcgaaggaagtggaaacacttggtgtcatgtgctcctatcatttctactagcttactgggaaataaagtgtagtcaagagtgtatgaaggcaagatgtaaaattagcgactggtgctaatctggttacttgaaaacaagtgaaagtgctgtagatttgttctgttgctaagaaccaccacactaaacctcgtatagttcctggaggatacacaacagtgtaattctctttagggtgtgccacaggttcctggcctgtgggagggaatgaatcaggagggctcttgagaaccttcatctgtgtgcttgcactgaaagtgagtcccaaagctggagatttagtgagagcaggcaacccctctgtgtctcactgtccatattctggaggcagaggtttgtaacaggccatgtgcacctgcatagggatgggtaaagcaaggactttgaaagagttgaaaagcattataaacagttgttcagaaatacgtcccaggagttccatgtgaaactggctctgtgtgcattgaagcatggctgttgggaattctaactggtccaacactcctgcaaaacaatgtgtaaatatttaggaagaaacttgaaaatagtcaaatcctttgaactggtgacaattttttaaagaatcaattctaatttgtttcaagggtaataatcaccaagatacacatttcagcatttatttagtctatcaaaaattggaattgatatatacactcatttataggagaatggttaggtagatttggtatatttatgtagtcattgaaaacttagtttataaaggccaatcttgtaactgattcttgtgtgataacattcagtgaaaaagcatgagacaattagaaagcatgatacaatgaataaaataaaaactggaaagagaaccatcaaaatgct

SEQ ID NO: 16125 - DNA, 2004 bp, Homo sapiens
  source 1..2004: mol_type = unassigned DNA
atgagatgcagaccacatggagaccttaatgcatggagatcttgcccactagtagcgtggcccagcgttttgggacacagcccaatcagaccagtatttcccctctggagctggattgaggagggaacatggggactgaaaccttgaatgcttctgctttaattaccccgaaaagcaagtgccactgttagaaatggaaatcaggccagctgctggggcggcaagcagcaggaatgcaaatgtccatgacccctcagatccacacaaagccttctgaccttggaatttaagtaggggagactgcattgctgagtcctggccctctgaggggacgactgtgcctgagtgctgctgtgccactgggacccgcctctgccatgaaagccatgccctggaactggacctgccttctctcccacctcctcatggtgggcatgggctcctccactttgctcacccggcagccagccccgctgtcccagaagcagcggtcatttgtcacattccgaggagagcccgccgagggtttcaatcacctggtggtggatgagaggacaggacacatttacttgggggccgtcaatcggatttacaagctctccagcgacctgaaggtcttggtgacgcatgagacagggccggacgaggacaaccccaagtgttacccaccccgcatcgtccagacctgcaatgagcccctgaccaccaccaacaatgtcaacaagatgctcctcatagactacaaggagaacaggctgattgcctgtgggagcctgtaccaaggcatctgcaagctgctgaggctggaggacctcttcaagctgggggagccttatcataagaaggagcactatctgtcaggtgtcaacgagagcggctcagtctttggagtgatcgtctcctacagcaacctggatgacaagctgttcattgccacggcagtggatgggaagcccgagtattttcccaccatctccagccggaaactgaccaagaactctgaggcggatggcatgttcgcgtacgtcttccatgatgagttcgtggcctcgatgattaagatcccttcggacaccttcaccatcatccctgactttgatatctactatgtctatggttttagcagtggcaactttgtctactttttgaccctccaacctgagatggtgtctccaccaggctccaccaccaaggagcaggtgtatacatccaagctcgtgaggctttgcaaggaggacacagccttcaactcctatgtagaggtgcccattggctgtgagcgcagtggggtggagtaccgcctgctgcaggctgcctacctgtccaaagcgggggccgtgcttggcaggacccttggagtccatccagatgatgacctgctcttcaccgtcttctccaagggccagaagcggaaaatgaaatccctggatgagtcggccctgtgcatcttcatcttgaagcagataaatgaccgcattaaggagcggctgcagtcttgttaccggggcgagggcacgctggacctggcctggctcaaggtgaaggacatcccctgcagcagtgcgctcttaaccattgacgataacttctgtggcctggacatgaatgctcccctgggagtgtccgacatggtgcgtggaattcccgtcttcacggaggacagggaccgcatgacgtctgtcatcgcatatgtctacaagaaccactctctggcctttgtgggcaccaaaagtggcaagctgaagaagtccttcggcacaggtccacaagggggaatcacccaggagtggattggagtggagggagacccacctggggcgaacattgcttctcaggaacagatgctgtgtgtgtatcttcagtgctcaagtcacaaagcaatatcagatcagagagtccagcctctgctttgttgcttcctaaatgtacctgggaattcttcctaaaattactctggaaatttgaatccactttaactaaaaataaatattcatagcacagaaa

SEQ ID NO: 16126 - DNA, 13061 bp, Homo sapiens
  source 1..13061: mol_type = unassigned DNA
tgcgttcggggctggggctggaggaggcagccacacgcgcgcacacgcacacgttcagaggagggcgagaggcagcggcataggctccatctgcagtgtcaatgcggcgctcccgctgaaggagggaaacgcggcgcgtccagtaggggagactgcattgctgagtcctggccctctgaggggacgactgtgcctgagtgctgctgtgccactgggacccgcctctgccatgaaagccatgccctggaactggacctgccttctctcccacctcctcatggtgggcatgggctcctccactttgctcacccggcagccagccccgctgtcccagaagcagcggtcatttgtcacattccgaggagagcccgccgagggtttcaatcacctggtggtggatgagaggacaggacacatttacttgggggccgtcaatcggatttacaagctctccagcgacctgaaggtcttggtgacgcatgagacagggccggacgaggacaaccccaagtgttacccaccccgcatcgtccagacctgcaatgagcccctgaccaccaccaacaatgtcaacaagatgctcctcatagactacaaggagaacaggctgattgcctgtgggagcctgtaccaaggcatctgcaagctgctgaggctggaggacctcttcaagctgggggagccttatcataagaaggagcactatctgtcaggtgtcaacgagagcggctcagtctttggagtgatcgtctcctacagcaacctggatgacaagctgttcattgccacggcagtggatgggaagcccgagtattttcccaccatctccagccggaaactgaccaagaactctgaggcggatggcatgttcgcgtacgtcttccatgatgagttcgtggcctcgatgattaagatcccttcggacaccttcaccatcatccctgactttgatatctactatgtctatggttttagcagtggcaactttgtctactttttgaccctccaacctgagatggtgtctccaccaggctccaccaccaaggagcaggtgtatacatccaagctcgtgaggctttgcaaggaggacacagccttcaactcctatgtagaggtgcccattggctgtgagcgcagtggggtggagtaccgcctgctgcaggctgcctacctgtccaaagcgggggccgtgcttggcaggacccttggagtccatccagatgatgacctgctcttcaccgtcttctccaagggccagaagcggaaaatgaaatccctggatgagtcggccctgtgcatcttcatcttgaagcagataaatgaccgcattaaggagcggctgcagtcttgttaccggggcgagggcacgctggacctggcctggctcaaggtgaaggacatcccctgcagcagtgcgctcttaaccattgacgataacttctgtggcctggacatgaatgctcccctgggagtgtccgacatggtgcgtggaattcccgtcttcacggaggacagggaccgcatgacgtctgtcatcgcatatgtctacaagaaccactctctggcctttgtgggcaccaaaagtggcaagctgaagaagatccgggtggatggacccaggggcaacgccctccagtatgagacggtgcaggtggtggaccccggcccagtcctccgggatatggccttctccaaggaccacgagcaactctacatcatgtcagagaggcagctcaccagagtccctgtggagtcctgtggtcagtatcagagctgcggcgagtgccttggctcaggcgacccccactgtggctggtgtgtgctgcacaacacttgcacccggaaggagcggtgtgagcggtccaaggagccccgcaggtttgcctcggagatgaagcagtgtgtccggctgacggtccatcccaacaatatctccgtctctcagtacaacgtgctgctggtcctggagacgtacaatgtcccggagctgtcagctggcgtcaactgcacctttgaggacctgtcagagatggatgggctggtcgtgggcaatcagatccagtgctactcccctgcagccaaggaggtgccccggatcatcacagagaatggggaccaccatgtcgtacagcttcagctcaaatcaaaggagaccggcatgaccttcgccagcaccagctttgtcttctacaattgcagcgtccacaattcgtgcctgtcctgcgtggagagtccataccgctgccactggtgtaaataccggcatgtctgcacccatgaccccaagacctgctccttccaggaaggccgagtgaagctgcccgaggactgcccccagctgctgcgagtggacaagatcctggtgcccgtggaggtgatcaagcctatcacgctgaaggccaagaacctcccccagccccagtctgggcagcgtggctacgaatgcatcctcaacattcagggcagcgagcagcgagtgcccgccctgcgcttcaacagctccagcgtacagtgccagaacacctcttattcctatgaagggatggagatcaacaacctgcccgtggagttgacagtcgtgtggaatgggcacttcaacattgacaacccagctcagaataaagttcacctctacaagtgtggagccatgcgtgagagctgcgggctgtgcctcaaggctgacccagacttcgcatgtggctggtgccagggcccaggccagtgcaccctgcgccagcactgccctgcccaggagagccagtggctggagctgtctggtgccaaaagcaagtgcacaaacccccgcatcacagagataatcccggtgacaggcccccgggaagggggcaccaaggtcactatccgaggggagaacctgggcctggaatttcgcgacatcgcctcccatgtcaaggttgctggcgtggagtgcagccctttagtggatggttacatccctgcagaacagatcgtgtgtgagatgggggaggccaagcccagccagcatgcaggcttcgtggagatctgcgtggctgtgtgtcggcctgaattcatggcccggtcctcacagctctattacttcatgacactgactctctcagatctgaagcccagccgggggcccatgtccggagggacccaagtgaccatcacaggcaccaacctgaatgccggaagcaacgtggtggtgatgtttggaaagcagccctgtctcttccacaggcgatctccatcctacattgtctgcaacaccacatcctcagatgaggtgctagagatgaaggtgtcggtgcaggtggacagggccaagatccaccaggacctggtctttcagtatgtggaagaccccaccatcgtgcggattgagccagaatggagcattgtcagtggaaacacacccatcgccgtatgggggacccacctggacctcatacagaacccccagatccgtgccaagcatggagggaaggagcacatcaatatctgtgaggttctgaacgctactgagatgacctgtcaggcgcccgccctcgctctgggtcctgaccaccagtcagacctgaccgagaggcccgaggagtttggcttcatcctggacaacgtccagtccctgctcatcctcaacaagaccaacttcacctactatcccaacccggtgtttgaggcctttggtccctcaggaatcctggagctcaagcctggcacgcccatcatcctaaagggcaagaacctgatcccgcctgtggctgggggcaacgtgaagctgaactacactgtgctggttggggagaagccgtgcaccgtgaccgtgtcagatgtccagctgctctgcgagtcccccaacctcatcggcaggcacaaagtgatggcccgtgtcggtggcatggagtactccccggggatggtgtacattgccccggacagcccgctcagcctgcccgccatcgtcagcatcgcagtggctggcggcctcctcatcattttcatcgtggccgtgctcattgcctataaacgcaagtcccgcgaaagtgacctcacgctgaagcggctgcagatgcagatggacaacctggagtcccgtgtggccctggagtgcaaggaagcctttgccgagctgcagacggacatccatgagctgaccagtgacctggatggagccgggattccgttcctggactatagaacttacaccatgcgggtgctgttcccaggaattgaagaccaccctgtcctccgggaccttgaggtcccgggctaccggcaggagcgtgtggagaaaggcctgaagctcttcgcccagctcatcaacaacaaggtgttcctgctgtccttcatccgcacgcttgagtcccagcgtagcttctccatgcgcgaccgtggcaacgtggcctcactcatcatgaccgtgctgcagagcaagctggagtacgccactgatgtgctgaagcagctgctggccgacctcattgacaagaacctggagagcaagaaccaccctaagctgctgctcaggaggactgagtcagtggctgagaagatgctgaccaattggtttactttcctcctctacaagttcctcaaggagtgtgctggggagcccctcttctccctgttctgtgccatcaagcagcagatggagaagggccccattgacgccatcacgggcgaggcccgctactccttgagcgaggacaagctcatccgccagcagattgactacaaaaccctggtcctgagctgtgtcagcccagacaatgccaacagccccgaggtcccagtaaagatcctcaactgtgacaccatcactcaggtcaaggagaagattctggatgccatcttcaagaatgtgccttgctcccaccggcccaaagctgcagatatggatctggagtggcgacaaggaagtggggcaaggatgatcttgcaggatgaagacatcaccaccaagattgagaatgattggaagcgactgaacacactggcccactaccaggtgccagatggttccgtggtggcattagtgtccaagcaggtgacagcctataacgcagtgaacaactccaccgtctccaggacctcagcaagtaaatatgaaaacatgatccggtacacgggcagccccgacagcctccgctcacggacacctatgatcactcctgacctggagagtggagtcaagatgtggcacctagtgaagaaccacgagcacggagaccagaaggagggggaccgggggagcaagatggtgtctgaaatctacctgacccgactcctggccactaagggcacactgcagaagtttgtggatgacctctttgagaccatcttcagcacggcacaccgtggctctgccctgcccctggccatcaagtacatgtttgacttcctggatgagcaggctgataaacatggcattcatgacccgcacgtccgccatacctggaagagcaattgcctgcccctgaggttttgggtcaacatgatcaagaacccgcagtttgtgtttgacatccataagaacagcatcacagacgcctgcctctctgtggtggctcagaccttcatggactcttgctccacgtcagagcaccggctgggcaaggactcgccctccaacaagctgctgtatgccaaggacatccccagctacaagaattgggtggagaggtattactcagacatagggaagatgccagccatcagcgaccaagacatgaacgcatacctggctgagcagtcccggatgcacatgaatgagttcaacaccatgagtgcactctcagagatcttctcctatgtgggcaaatacagcgaggagatccttggacctctggaccacgatgaccagtgtgggaagcagaaactggcctacaaactagaacaagtcataaccctcatgagcttagacagctgagaaccgtccttccagggccgccctggagggggacacaccaagccgtgcctcagtctagattatcatctttaccaagtgcaagttccgactggcatcagcagcatcccctgagcagcgctgtttctctctctttctctctgcctctttccgtttctccctccttcctggatctcttctcttccagttgctctgccaacacgattggaccaagccactgaccctcagttagtccaagaatggccaggcccatggcaagggagctgaccagaagatgtcagagaggcctctgtctcccaggtgctcctgaccctgtgcatgtcagcagcagggtgcaaataacgaatgaggagccagggacaggggacatttctgtgctgctacttcaccttccactttggcagcccctgctttggtctgagccttggcctagggaagaggcaaggaaggacttcagtattatctttactgggaagacatcacctggctctcccttcccacagttccatctccagtggttcagccagtggtctgatcgctttgcagctgtgagaagaaaggctacacctcctgcatgtggctggagcagggcatgtgtgggcagctgggaggtgctccttgaggctccttctcccccactgggctggtgtccagaggcttcctgtccttttccaggtctccagagggacctgcctgccctgcctgctcccccgccagtagaaagccaggcaggagaaagaatagcaattacattccaccatggagatgctcctgaccttttcatctgaatcctagtagcagaaatgtaacacagggggagaaaaggaaagagagttgcatctaccctggaagcagaatttgttttccatttaccctcaaattcaaatgagtcacaatcatagtcataggtctagtccactaccagagccctgagtgctgtcaagagaaagcatctatctccaccctcctttgtcaaccttcatcaagggtcaacgtgaaatgcagagtgcatctaggagattctacctccagccatctccatggctccatccccatcatccttcctgagaactccatagacggctggggccaacagcctagtccctgttccctctgcagaatccggtgccattgctatgcagatgactttgtcactgggctgtccagacctctttgggaatgatttcatcaacatctcagctgtctctcatcattctccttcctcatctcttcagcagtcatccttgaaagaaacagacttaagcaaagcctcacggagacagcccaaaatgccagccaacctcagcctccagcttgtcagatctgggagggacaaagagtcgagctgatgggcctggctggaattaagaagagggacatacaaatgaccttggccttggcatccatctccccatctgttcttacatctacagatgcacgattttagccaggcaggcaaatgtgtgcctagaaattgatactaggtaagcagaggctatggggagagatggtctaatggagggttctaggaacctttcatcctaaggagaccttaggtgctgtctggtgcagtctcccatcctaagcaggagtctctgttggcacctctgctctggagttgttcaccactatgggagacaaggagaaacatcttaggtgaggttgaggagaaggattcacagtcttgccttcactccccaaacatcagacatcattccttgtcacccactcagaatgagccccccttggggaagaaaccacaccatttccagcaaagtccatggagcatccggtacttttaagaacacttgcccctttggatatgaatatgtgcacatgtgtgtgagcacatgtatgtgtgtgtgtgtgtctgccccaggtgtaggcggaaagctcaaaaggatttcttgtcctttgtaggaggatttttgaagtgttccccttctctttccccttgctcatccattcatcctgcagcttcaggacatttcaacacttacttgctttctatgctgagagctggtgggtggaaggagagggcgcttgtccataggaaatcagggtggtcgcctgccgaggcctggaccttggaacagggcatcatgtgacatcgcagaggacagatggtggaaaagacatgagcaacctaatgggaagaggaaaatgggaaacaatgcattggaagaggaagaaaaaaaataaataaccaaaggttttggcaagtgcagtaccaggtggagaagcttgacttttctatccttgatcattttattccctcccaagaagtcagtcacaggacctggaaggccagaaagggtacatgtgggagacggtctgaggaagtacctcggtcactacaatatttttgcacatataaagggttggggaggaaagagacacaaacgtatttaacacagatttgctggatggaagctgcgtgtgtgaacgtgtgtatgagtgagtgcattttgattttttttttttttttttgcacagttaagagaaaaaatcaaacaagcagaaaaaaaaaagaaaaaagacttatcacggttctgctgaagcttttattttttactggatgatgattattgttattgttactttggcggtacaggactttattttattccatgtttttgttataagaaaaatttcaaacacctcagagaaatagaaaggttaggaagaaagaggagacaaggacagacaaattttctggctgtccccatttctcctgggggaggggtttggggctggtttgactttaattggtgggtgggttgtttctgccgctctgtttgctgcagtccccgtggcctgcttggggactgagaaatttgagccaggtatccagagccacagcccatcttgcttataaaaattatcttctgctgtttgttttccatttcttccgtttggattcttggtgcacgtgtgatatggtatttaaaagcaaagacaagcaacattgtcaaaaagctgtccttgccccccatcccccacccaaatcttttttccaaactcccccagggatcttccttaccccactggcagagcaaacatccaggggctgtccatgtggcttgcgggctcccagagaaaggaattgggccaactttgtcctgtgggatggaggccccttcacggcctccctcgaggcaaagttaatttgtagggtcaccattatgttgagtcatgagcagacagaaggagagaaaaggccatcttccttaccttcccctccaacttatcccgtaccctcccagggaaaatggtaccagactgagccatcaaaatcactgacaaagtttaggtgggaattttttttgcatgttggagagagaagggcttaaggtagcagggaagaagggggctttgtggggtcctaaattttaaggaataagtagaggaagacaagaaacagagtggtaggctggtcatttctcctggccacaagtccccccagatgcagcttttacccattctttgtccttccccataaggagagaccctgacatttcttggtagctgcaaatagtgccactaagtgaaggtggccatcatgccagttacttcctcaggaaaatattttcttgccttcttctttcagtatggttttaaatttgggaacagtggataacccaagtgtcccacaggccaaggtacattccaatggcagcatgatccctgcacccaaagccagcccctaaagcctaccccttgtgcacccgcagcctggtaagtgagcttggctgcttgtgaggagctacaagtgaaagagaagttattttaaataaatcccaaagtttgaggcagactgtccaggactgttcccaggaagaagcaggagttacccacaggaaaagtctctgacctggtcccctcaggcccagctacctgcgcccaccagcagtgaaggttgatgtactggcccagcatctccacctcccccatgcaaccaggtccctggtaccgtgtctcccgttgcatgtctggcttctgcctgtgctcctcctgccacgagcatcctccctgtccctcctcattccaccgtgtctctcctgcacacatagcctctgtcccagggcgatttatccacttgagtacaggagctgctcagacctctcagcccagccctctgtgactgccccagccccatcctaccccacccaaagctgccttcctggctgtaggagctccctcgtctagccaaggccctatgggtccccatccgaggatccacaagcaatgacttcccaaatgacctccactgcaagaagaatccttaccactgtttccagagccgtgaacgatgctgtgatgggcccaggtctcagcaccaccctctgtgacctaaaaagaaaagctcaatttccatctgtcttctttcccaggaccaaggggacacagtaatgtgaagtcaaatacttaaccgagcaaagggccagtattgttatcagtcaaggacaaacctcccacctcacagacagccaagcagtgagggaaagacagacagacataggtaggaaggtgctctgcaggcacaaggcccagagaagcccctctccgggaacttcccctgctccttccaggaacagtgagcccagtgagcagccccagccagctcttcaaggccttcaaggggtctttccatgactgagtcacctccaggagctcacctgacccccagagaagacctaccccaggcagctccgtgccctggcttctccccatgccccaaatccccccccgccatccctcctggtcctcgtctacatcaagggcctcttcccctcttcctgccagctctcaggacaggtgactgggaggccttgaaccctcagcctcttcctttaaaaaaaacaaaacaaaacaaaactgtgggccatttatttgggattttggagttgtttggtttttgtttgtatatcttaatagttcgaaagtaagaagggagccctgctatggatgttaagtccaaattactcggttagtgggagcaaaacctatgacttccaaggggatgaggagaggttcagaggacaggaggagcctcccccattgaaaaaaaaaaatgggtcaggacattccctggatgaggacaatgctaggggtggcatctcacatggctgctgctattcctggtgcttccccacacttttgacagatggagtccttctcctaccgcctcctgccacctcaccctacaggcattctctatgtaggaaacaagagccttattttatagagtggggagctgagacacagcctcaggtaacactgacacagctcccgaatgaggctgggacactctgcaaacctctcctcatggtgctaagggtggcatgctcttgacaggaaacctaaatgaccactcctctcatttggaaagtaatccactgcagtaaaagtttcagacatgcaagagagagtttttttttttttactacaaatttttgctcccccataaaattattttattagagggagtatccaagttttaaaagtatatagaattttttggttgtaagagaaatacatactcattaggatcccgattaaattccttgagtagactggtgcctaccagaaagcaaagcaaagttaaacaaaacgaaacaaaatccttcatatacaaaaagaactttctgtttgtattggcagaggtagtgaggtgattcaggtaggctgaaaatcctgggttgcgggagcctcactttattccattcccacccgctttgatgtctatgcttggctctctgggctgcccctggtactgccgaatcctacacatctcttatcagctttcctcaaactttaaggaggctctgtgagggatgggtcatgggaagacccaagctttccctccgccaggattgcaaaagcaagtagacttggtctatgcagctcttcttccagcaatttctttatttggaattagaacttcctttgttagtatctttgatcttttgactcaagcacattttggaagggctcccttacaaaagtagaatttaaaacagaggatacagttaaagagcaacccaaaggacgcttaagaaaccgagaccacttcaccaaacaggactaaggaacactttcgtgcacagaagtcagccgcaatccaggcacaggacgaagatgggatacacgtgctcatctgtctgtcctcctttcctctccctccccgacgttctagttagcttgttgacttgttaaaccttctgttcttaaaatgaaaagctagcttacctcaaagaatcttgtttccattcggaaaccaacgattttgtgttttagaatggacagccctcccctcaccactccctaccttggcctggtgtccttgagacatacggtctttgcttagtcgtgtgttggctgctttgagcaggaacaaggcctccaggccctgaggtgggaaggaaggattggatgccactgccctcctccccactttagcatgtaggggccagcccatctcttccagcagggtcctgctgagttaccatagcaaccagcaactccagggtaccacaacagacaatggctcagcgagccgacgtgtggggatgatgcaggggttttggcccagccagaggacccagagttgagcttcaaatgctagagaaggggagaaacaggatggaagggtggtttaaggaaccggcaggggtctttgagtcacatagagaagccgttgaaggaggtagggcaggttatctctgttccagtcacccccttccagccccatcccacttctgtttcaaactaaagctcccacctcgaacattgaccctttgttagaacaaagcaaagcatatctttagacaacagtgttaaaatgagcctcaaatgtatgtggatgagatctctaagaagagggtcttctggttttgatttttaaagaagagtatcctagtaaaatattaaaaaaaaattaaaaagtttttaaaaaggaaacctgtgctatttaaattggagcccagttgtaacttggtaaaggcaagcttctgtacctttgttataattaattgtatacctgtgtatgtaaatataaggcattcctattttgcagttcagaacaaaaaaaacttatttgtaatatagaataaagtttattaaaaaataataaaaatgcagtttggga

SEQ ID NO: 16127 - DNA, 7143 bp, Homo sapiens
  source 1..7143: mol_type = unassigned DNA
agggccaggtgcgcaggggagaaacaaggcgccttggagttcaggtgactcccacacgggtcatgctgttgtctcctgatccagccggccctgccaggtgaccatgcctgctctgggcccagctcttctccaggctctctgggccgggtgggtcctcaccctccagccccttccaccaactgcattcactcccaatggcacgtatctgcagcacctggcaagggaccccacctcaggcaccctctacctgggggctaccaacttcctgttccagctgagccctgggctgcagctggaggccacagtgtccaccggccctgtgctagacagcagggactgcctgccacctgtgatgcctgatgagtgcccccaggcccagcctaccaacaacccgaatcagctgctcctggtgagcccaggggccctggtggtatgcgggagcgtgcaccagggggtctgtgaacagcggcgcctggggcagctcgagcagctgctgctgcggccagagcggcctggggacacacaatatgtggctgccaatgatcctgcggtcagcacggtggggctggtagcccagggcttggcaggggagcccctcctgtttgtggggcgaggatacaccagcaggggtgtggggggtggcattccacccatcacaacccgggccctgtggccgcccgacccccaagctgccttctcctatgaggagacagccaagctggcagtgggccgcctctccgagtacagccaccacttcgtgagtgcctttgcacgtggggccagcgcctacttcctgttcctgcggcgggacctgcaggctcagtctagagcttttcgtgcctatgtatctcgagtgtgtctccgggaccagcactactactcctatgtggagttgcctctggcctgcgaaggtggccgctacgggctgatccaggctgcagctgtggccacgtccagggaggtggcgcatggggaggtgctctttgcagctttctcctcggctgcaccccccactgtgggccggcccccatcggcggctgctggggcatctggagcctctgccctctgtgccttccccctggatgaggtggaccggcttgctaatcgcacgcgagatgcctgctacacccgggagggtcgtgctgaggatgggaccgaggtggcctacatcgagtatgatgtcaattctgactgtgcacagctgccagtggacaccctggatgcttatccctgtggctcagaccacacgcccagccccatggccagccgggtcccgctggaagccacaccaattctggagtggccagggattcagctaacagctgtggcagtcaccatggaagatggacacaccatcgctttcctgggtgatagtcaagggcagctgcacagggtctacttgggcccagggagcgatggccacccatactccacacagagcatccagcaggggtctgcagtgagcagagacctcacctttgatgggacctttgagcacctgtatgtcatgacccagagcacacttctgaaggttcctgtggcttcctgtgctcagcacctggactgtgcatcttgccttgctcacagggacccatactgtgggtggtgcgtgctccttggcaggtgcagtcgccgttctgagtgctcgaggggccagggcccagagcagtggctatggagcttccagcctgagctgggctgtctgcaagtggcagccatgagtcctgccaacatcagccgagaggagacgagggaggttttcctatcagtgccagacctgccacccctgtggccaggggagtcatattcctgccactttggggaacatcagagtcctgccctgctgactggttctggtgtgatgtgcccctccccagaccctagtgaggccccagtgctgccgagaggagccgactacgtatccgtgagcgtggagctcagatttggcgctgttgtgatcgccaaaacttccctctctttctatgactgtgtggcggtcactgaactccgcccatctgcgcagtgccaggcctgtgtgagcagccgctgggggtgtaactggtgtgtctggcagcacctgtgcacccacaaggcctcgtgtgatgctgggcccatggttgcaagccatcagagcccgcttgtctccccagaccctcctgcaagaggtggacccagcccctccccacccacagcccccaaagccctggccacccctgctcctgacacccttcccgtggagcctggggctccctccacagccacagcttcggacatctcacctggggctagtccttccctgctcagcccctgggggccatgggcaggttctggctccatatcttcccctggctccacagggtcgcctctccatgaggagccctcccctcccagcccccaaaatggacctggaaccgctgtccctgcccccactgacttcagaccctcagccacacctgaggacctcttggcctccccgctgtcaccctcagaggtagcagcagtgccccctgcagaccctggccccgaggctcttcatcccacagtgcccctggacctgccccctgccactgttcctgccaccactttcccaggggccatgggctccgtgaagcccgccctggactggctcacgagagaaggcggcgagctgcccgaggcggacgagtggacggggggtgacgcacccgccttctccacttccaccctcctctcaggtgatggagactcagcagagcttgagggccctcccgcccccctcatcctcccgtccagcctcgactaccagtatgacacccccgggctctgggagctggaagaggcgaccttgggggcaagctcctgcccctgtgtggagagcgttcagggctccacgttgatgccggtccatgtggagcgggaaatccggctgctaggcaggaacctgcaccttttccaggatggcccaggagacaatgagtgtgtgatggagctggagggcctcgaggtggtggttgaggcccgggtcgagtgtgagccacctccagatacccagtgccatgtcacctgccagcagcaccagctcagctatgaggctctgcagccggagctccgtgtggggctgtttctgcgtcgggccggccgtctgcgtgtggacagtgctgaggggctgcatgtggtactgtatgactgttccgtgggacatggagactgcagccgctgccaaactgccatgccccagtatggctgtgtgtggtgtgagggggagcgtccacgttgtgtgacccgggaggcctgtggtgaggctgaggctgtggccacccagtgcccagcgcccctcatccactcggtggagccactgactgggcctgtagacggaggcacccgtgtcaccatcaggggctccaacctgggccagcatgtgcaggatgtgctgggcatggtcacggtggctggagtgccctgtgctgtggatgcccaggagtacgaggtctccagcagcctcgtgtgcatcaccggggccagtggggaggaggtggccggcgccacagcggtggaggtgccgggaagaggacgtggtgtctcagaacacgactttgcctaccaggatccgaaggtccattccatcttcccggcccgcggccccagagctgggggcacccgtctcaccctgaatggctccaagctcctgactgggcggctggaggacatccgagtggtggttggagaccagccttgtcacttgctgccggagcagcagtcagaacaactgcggtgtgagaccagcccacgccccacgcctgccacgctccctgtggctgtgtggtttggggccacggagcggaggcttcaacgcggacagttcaagtataccttggaccccaacatcacctctgctggccccaccaagagcttcctcagtggaggacgtgagatatgcgtccgtggccagaatctggacgtggtacagacgccaagaatccgggtgaccgtggtctcgagaatgctgcagcccagccaggggcttggacggaggcgtcgcgtggtcccggagacggcatgttcccttggaccctcctgcagtagccagcaatttgaggagccgtgccatgtcaactcctcccagctcatcacgtgccgcacacctgccctcccaggcctgcctgaggacccctgggtccgggtggaatttatccttgacaacctggtctttgactttgcaacactgaaccccacacctttctcctatgaggccgaccccaccctgcagccactcaaccctgaggaccccaccatgccattccggcacaagcctgggagtgtgttctccgtggagggggagaacctggaccttgcaatgtccaaggaggaggtggtggctatgataggggatggcccctgtgtggtgaagacgctgacgcggcaccacctgtactgcgagccccccgtggagcagcccctgccacggcaccatgccctccgagaggcacctgactctttgcctgagttcacggtgcagatggggaacttgcgcttctccctgggtcacgtgcagtatgacggcgagagccctggggcttttcctgtggcagcccaggtgggcttgggggtgggcacctctcttctggctctgggtgtcatcatcattgtcctcatgtacaggaggaagagcaagcaggccctgagggactataagaaggttcagatccagctggagaatctggagagcagtgtgcgggaccgctgcaagaaggaattcacagacctcatgactgagatgaccgatctcaccagtgacctcctgggcagcggcatccccttcctcgactacaaggtgtatgcggagaggatcttcttccctgggcaccgcgagtcgcccttgcaccgggacctgggtgtgcctgagagcagacggcccactgtggagcaagggctggggcagctctctaacctgctcaacagcaagctcttcctcaccaagttcatccacacgctggagagccagcgcaccttttcagctcgggaccgtgcctacgtggcatctctgctcaccgtggcactgcatgggaagcttgagtatttcactgacatcctccgcactctgctcagtgacctggttgcccagtatgtggccaagaaccccaagctgatgctgcgcaggacagagactgtggtggagaagctgctcaccaactggatgtccatctgtctgtataccttcgtgagggactccgtaggggagcctctgtacatgctctttcgagggattaagcaccaagtggataaggggccagtggacagtgtgacaggcaaggccaaatacaccttgaacgacaaccgcctgctcagagaggatgtggagtaccgtcccctgaccttgaatgcactattggctgtggggcctggggcaggagaggcccagggcgtgcccgtgaaggtcctagactgtgacaccatctcccaggcaaaggagaagatgctggaccagctttataaaggagtgcctctcacccagcggccagaccctcgcacccttgatgttgagtggcggtctggggtggccgggcacctcattctttctgacgaggatgtcacttctgaggtccagggtctgtggaggcgcctgaacacactgcagcattacaaggtcccagatggagcaactgtggccctcgtcccctgcctcaccaagcatgtgctccgggaaaaccaggattatgtccctggagagcggaccccaatgctggaggatgtagatgaggggggcatccggccctggcacctggtgaagccaagtgatgagccggagccgcccaggcctcggaggggcagccttcggggcggggagcgtgagcgcgccaaggccatccctgagatctacctgacccgcctgctgtccatgaagggcaccctgcagaagttcgtggatgacctgttccaggtgattctcagcaccagccgccccgtgccgctcgctgtgaagtacttctttgacctgctggatgagcaggcccagcagcatggcatctccgaccaggacaccatccacatctggaagaccaacagcttgcctctgaggttctggatcaatataataaaaaacccgcagtttgtgttcgacgtgcaaacatctgataacatggatgcggtgctccttgtcattgcacagaccttcatggacgcctgcaccctggccgaccacaagctgggccgggactccccgatcaacaaacttctgtatgcacgggacattccccggtacaagcggatggtggaaaggtactatgcagacatcagacagactgtcccagccagcgaccaagagatgaactctgtcctggctgaactgtcctggaactactccggagacctcggggcgcgagtggccctgcatgaactctacaagtacatcaacaagtactatgaccagatcatcactgccctggaggaggatggcacggcccagaagatgcagctgggctatcggctccagcagattgcagctgctgtggaaaacaaggtcacagatctataggaacccaggagccacggcctgctgttgcttcagcctggcctgggcagccctggaagctcggaggagaggccaccttcttaggtgcctgtagtgactgacaagcagagttagtggaaggtgactcccagtctcctggtggctctggcctcggccctgctggatccacctcctagacccggggcctcaaggctcatggggtagtacccagcctgctccccgagtccagcgaccctgtgacaccggtctgcagggagttggggactaagggcttccagagagtggctggaagagactccaggcccctggggagactgtactgttcctgaacactggccttggccacactgggattcggagaggaaggaggagagccccatgcttcctgtctgcctcctccaccatccctgacctcagttgagctgcctctggccttgttgctgctgccacatcctaggtctaagagttgaacgcctctcctaggccactacaaactgacccctcagcagggctggctgccacagggctgccctgcctcataggtagccatggtgagggctatctgctgcaggggggtcttggggagagtggtgactccattgacccagcttttcattaaaggataacacactgca

SEQ ID NO: 16128 - DNA, 3264 bp, Homo sapiens
  source 1..3264: mol_type = unassigned DNA
tgtggtgaagacgctgacgcggcaccacctgtactgcgagccccccgtggagcagcccctgccacggcaccatgccctccgagaggcacctgactctttgcctgagttcacggtgcagatggggaacttgcgcttctccctgggtcacgtgcagtatgacggcgagagccctggggcttttcctgtggcagcccaggtgggcttgggggtgggcacctctcttctggctctgggtgtcatcatcattgtcctcatgtacaggtgggtgcagccagatgtggctgggctggggcaggtcgtgggatctggctggactgggaagggacagaccgggccaggagtcaggaaacattctctgtaaatggccagagagtaaatattttcgctttgcaggccaagtggtctctgttcaacaactcagctttgccactgtggcacaaaggcagccagggacgacatggaaacacatgaaagtggctgtgttctaacaaatctttataaaaataggttgtgggatggatttggcctggttgtggttggctgatctctaggctaaactgtgctgggctagacggggcatgggtgtgtgtgacttgcttgggacgggacaggctgaatcgtactgggctaggcttgagcttggctggcatggctgcattggactgtgctggatgaggccggggtgtgcctggggattgtcaggcaggcctgggcgagtaggactcatctggccatcctctcctgaccctggggctgagcaggaggaagagcaagcaggccctgagggactataagaaggttcagatccagctggagaatctggagagcagtgtgcgggaccgctgcaagaaggaattcacagacctcatgactgagatgaccgatctcaccagtgacctcctgggcagcggcatccccttcctcgactacaaggtgtatgcggagaggatcttcttccctgggcaccgcgagtcgcccttgcaccgggacctgggtgtgcctgagagcagacggcccactgtggagcaagggctggggcagctctctaacctgctcaacagcaagctcttcctcaccaagttcatccacacgctggagagccagcgcaccttttcagctcgggaccgtgcctacgtggcatctctgctcaccgtggcactgcatgggaagcttgagtatttcactgacatcctccgcactctgctcagtgacctggttgcccagtatgtggccaagaaccccaagctgatgctgcgcaggacagagactgtggtggagaagctgctcaccaactggatgtccatctgtctgtataccttcgtgagggactccgtaggggagcctctgtacatgctctttcgagggattaagcaccaagtggataaggggccagtggacagtgtgacaggcaaggccaaatacaccttgaacgacaaccgcctgctcagagaggatgtggagtaccgtcccctgaccttgaatgcactattggctgtggggcctggggcaggagaggcccagggcgtgcccgtgaaggtcctagactgtgacaccatctcccaggcaaaggagaagatgctggaccagctttataaaggagtgcctctcacccagcggccagaccctcgcacccttgatgttgagtggcggtctggggtggccgggcacctcattctttctgacgaggatgtcacttctgaggtccagggtctgtggaggcgcctgaacacactgcagcattacaaggtcccagatggagcaactgtggccctcgtcccctgcctcaccaagcatgtgctccgggaaaaccaggattatgtccctggagagcggaccccaatgctggaggatgtagatgaggggggcatccggccctggcacctggtgaagccaagtgatgagccggagccgcccaggcctcggaggggcagccttcggggcggggagcgtgagcgcgccaaggccatccctgagatctacctgacccgcctgctgtccatgaagggcaccctgcagaagttcgtggatgacctgttccaggtgattctcagcaccagccgccccgtgccgctcgctgtgaagtacttctttgacctgctggatgagcaggcccagcagcatggcatctccgaccaggacaccatccacatctggaagaccaacagcttgcctctgaggttctggatcaatataataaaaaacccgcagtttgtgttcgacgtgcaaacatctgataacatggatgcggtgctccttgtcattgcacagaccttcatggacgcctgcaccctggccgaccacaagctgggccgggactccccgatcaacaaacttctgtatgcacgggacattccccggtacaagcggatggtggaaaggtactatgcagacatcagacagactgtcccagccagcgaccaagagatgaactctgtcctggctgaactgtcctggaactactccggagacctcggggcgcgagtggccctgcatgaactctacaagtacatcaacaagtactatgaccagatcatcactgccctggaggaggatggcacggcccagaagatgcagctgggctatcggctccagcagattgcagctgctgtggaaaacaaggtcacagatctataggaacccaggagccacggcctgctgttgcttcagcctggcctgggcagccctggaagctcggaggagaggccaccttcttaggtgcctgtagtgactgacaagcagagttagtggaaggtgactcccagtctcctggtggctctggcctcggccctgctggatccacctcctagacccggggcctcaaggctcatggggtagtacccagcctgctccccgagtccagcgaccctgtgacaccggtctgcagggagttggggactaagggcttccagagagtggctggaagagactccaggcccctggggagactgtactgttcctgaacactggccttggccacactgggattcggagaggaaggaggagagccccatgcttcctgtctgcctcctccaccatccctgacctcagttgagctgcctctggccttgttgctgctgccacatcctaggtctaagagttgaacgcctctcctaggccactacaaactgacccctcagcagggctggctgccacagggctgccctgcctcataggtagccatggtgagggctatctgctgcaggggggtcttggggagagtggtgactccattgacccagcttttcattaaaggataacacactg

SEQ ID NO: 16129 - DNA, 7308 bp, Homo sapiens
  source 1..7308: mol_type = unassigned DNA
gcccggccgacgcggctttgtctcctttgttcccggcggtggcagcgccgcgcgggaggggcgggcagcgggcgcagttttccgcccctcggtctccgggtaacagctgcggctccgccagacccggggagaggccgctgcgcgcggagcccgagcccggagcggccgacgcccgcctcggcgcgcacatcccgcggggcccggccgggtggtgactcccacacgggtcatgctgttgtctcctgatccagccggccctgccaggtgaccatgcctgctctgggcccagctcttctccaggctctctgggccgggtgggtcctcaccctccagccccttccaccaactgcattcactcccaatggcacgtatctgcagcacctggcaagggaccccacctcaggcaccctctacctgggggctaccaacttcctgttccagctgagccctgggctgcagctggaggccacagtgtccaccggccctgtgctagacagcagggactgcctgccacctgtgatgcctgatgagtgcccccaggcccagcctaccaacaacccgaatcagctgctcctggtgagcccaggggccctggtggtatgcgggagcgtgcaccagggggtctgtgaacagcggcgcctggggcagctcgagcagctgctgctgcggccagagcggcctggggacacacaatatgtggctgccaatgatcctgcggtcagcacggtggggctggtagcccagggcttggcaggggagcccctcctgtttgtggggcgaggatacaccagcaggggtgtggggggtggcattccacccatcacaacccgggccctgtggccgcccgacccccaagctgccttctcctatgaggagacagccaagctggcagtgggccgcctctccgagtacagccaccacttcgtgagtgcctttgcacgtggggccagcgcctacttcctgttcctgcggcgggacctgcaggctcagtctagagcttttcgtgcctatgtatctcgagtgtgtctccgggaccagcactactactcctatgtggagttgcctctggcctgcgaaggtggccgctacgggctgatccaggctgcagctgtggccacgtccagggaggtggcgcatggggaggtgctctttgcagctttctcctcggctgcaccccccactgtgggccggcccccatcggcggctgctggggcatctggagcctctgccctctgtgccttccccctggatgaggtggaccggcttgctaatcgcacgcgagatgcctgctacacccgggagggtcgtgctgaggatgggaccgaggtggcctacatcgagtatgatgtcaattctgactgtgcacagctgccagtggacaccctggatgcttatccctgtggctcagaccacacgcccagccccatggccagccgggtcccgctggaagccacaccaattctggagtggccagggattcagctaacagctgtggcagtcaccatggaagatggacacaccatcgctttcctgggtgatagtcaagggcagctgcacagggtctacttgggcccagggagcgatggccacccatactccacacagagcatccagcaggggtctgcagtgagcagagacctcacctttgatgggacctttgagcacctgtatgtcatgacccagagcacacttctgaaggttcctgtggcttcctgtgctcagcacctggactgtgcatcttgccttgctcacagggacccatactgtgggtggtgcgtgctccttggcaggtgcagtcgccgttctgagtgctcgaggggccagggcccagagcagtggctatggagcttccagcctgagctgggctgtctgcaagtggcagccatgagtcctgccaacatcagccgagaggagacgagggaggttttcctatcagtgccagacctgccacccctgtggccaggggagtcatattcctgccactttggggaacatcagagtcctgccctgctgactggttctggtgtgatgtgcccctccccagaccctagtgaggccccagtgctgccgagaggagccgactacgtatccgtgagcgtggagctcagatttggcgctgttgtgatcgccaaaacttccctctctttctatgactgtgtggcggtcactgaactccgcccatctgcgcagtgccaggcctgtgtgagcagccgctgggggtgtaactggtgtgtctggcagcacctgtgcacccacaaggcctcgtgtgatgctgggcccatggttgcaagccatcagagcccgcttgtctccccagaccctcctgcaagaggtggacccagcccctccccacccacagcccccaaagccctggccacccctgctcctgacacccttcccgtggagcctggggctccctccacagccacagcttcggacatctcacctggggctagtccttccctgctcagcccctgggggccatgggcaggttctggctccatatcttcccctggctccacagggtcgcctctccatgaggagccctcccctcccagcccccaaaatggacctggaaccgctgtccctgcccccactgacttcagaccctcagccacacctgaggacctcttggcctccccgctgtcaccctcagaggtagcagcagtgccccctgcagaccctggccccgaggctcttcatcccacagtgcccctggacctgccccctgccactgttcctgccaccactttcccaggggccatgggctccgtgaagcccgccctggactggctcacgagagaaggcggcgagctgcccgaggcggacgagtggacggggggtgacgcacccgccttctccacttccaccctcctctcaggtgatggagactcagcagagcttgagggccctcccgcccccctcatcctcccgtccagcctcgactaccagtatgacacccccgggctctgggagctggaagaggcgaccttgggggcaagctcctgcccctgtgtggagagcgttcagggctccacgttgatgccggtccatgtggagcgggaaatccggctgctaggcaggaacctgcaccttttccaggatggcccaggagacaatgagtgtgtgatggagctggagggcctcgaggtggtggttgaggcccgggtcgagtgtgagccacctccagatacccagtgccatgtcacctgccagcagcaccagctcagctatgaggctctgcagccggagctccgtgtggggctgtttctgcgtcgggccggccgtctgcgtgtggacagtgctgaggggctgcatgtggtactgtatgactgttccgtgggacatggagactgcagccgctgccaaactgccatgccccagtatggctgtgtgtggtgtgagggggagcgtccacgttgtgtgacccgggaggcctgtggtgaggctgaggctgtggccacccagtgcccagcgcccctcatccactcggtggagccactgactgggcctgtagacggaggcacccgtgtcaccatcaggggctccaacctgggccagcatgtgcaggatgtgctgggcatggtcacggtggctggagtgccctgtgctgtggatgcccaggagtacgaggtctccagcagcctcgtgtgcatcaccggggccagtggggaggaggtggccggcgccacagcggtggaggtgccgggaagaggacgtggtgtctcagaacacgactttgcctaccaggatccgaaggtccattccatcttcccggcccgcggccccagagctgggggcacccgtctcaccctgaatggctccaagctcctgactgggcggctggaggacatccgagtggtggttggagaccagccttgtcacttgctgccggagcagcagtcagaacaactgcggtgtgagaccagcccacgccccacgcctgccacgctccctgtggctgtgtggtttggggccacggagcggaggcttcaacgcggacagttcaagtataccttggaccccaacatcacctctgctggccccaccaagagcttcctcagtggaggacgtgagatatgcgtccgtggccagaatctggacgtggtacagacgccaagaatccgggtgaccgtggtctcgagaatgctgcagcccagccaggggcttggacggaggcgtcgcgtggtcccggagacggcatgttcccttggaccctcctgcagtagccagcaatttgaggagccgtgccatgtcaactcctcccagctcatcacgtgccgcacacctgccctcccaggcctgcctgaggacccctgggtccgggtggaatttatccttgacaacctggtctttgactttgcaacactgaaccccacacctttctcctatgaggccgaccccaccctgcagccactcaaccctgaggaccccaccatgccattccggcacaagcctgggagtgtgttctccgtggagggggagaacctggaccttgcaatgtccaaggaggaggtggtggctatgataggggatggcccctgtgtggtgaagacgctgacgcggcaccacctgtactgcgagccccccgtggagcagcccctgccacggcaccatgccctccgagaggcacctgactctttgcctgagttcacggtgcagatggggaacttgcgcttctccctgggtcacgtgcagtatgacggcgagagccctggggcttttcctgtggcagcccaggtgggcttgggggtgggcacctctcttctggctctgggtgtcatcatcattgtcctcatgtacaggaggaagagcaagcaggccctgagggactataagaaggttcagatccagctggagaatctggagagcagtgtgcgggaccgctgcaagaaggaattcacagacctcatgactgagatgaccgatctcaccagtgacctcctgggcagcggcatccccttcctcgactacaaggtgtatgcggagaggatcttcttccctgggcaccgcgagtcgcccttgcaccgggacctgggtgtgcctgagagcagacggcccactgtggagcaagggctggggcagctctctaacctgctcaacagcaagctcttcctcaccaagttcatccacacgctggagagccagcgcaccttttcagctcgggaccgtgcctacgtggcatctctgctcaccgtggcactgcatgggaagcttgagtatttcactgacatcctccgcactctgctcagtgacctggttgcccagtatgtggccaagaaccccaagctgatgctgcgcaggacagagactgtggtggagaagctgctcaccaactggatgtccatctgtctgtataccttcgtgagggactccgtaggggagcctctgtacatgctctttcgagggattaagcaccaagtggataaggggccagtggacagtgtgacaggcaaggccaaatacaccttgaacgacaaccgcctgctcagagaggatgtggagtaccgtcccctgaccttgaatgcactattggctgtggggcctggggcaggagaggcccagggcgtgcccgtgaaggtcctagactgtgacaccatctcccaggcaaaggagaagatgctggaccagctttataaaggagtgcctctcacccagcggccagaccctcgcacccttgatgttgagtggcggtctggggtggccgggcacctcattctttctgacgaggatgtcacttctgaggtccagggtctgtggaggcgcctgaacacactgcagcattacaaggtcccagatggagcaactgtggccctcgtcccctgcctcaccaagcatgtgctccgggaaaaccaggattatgtccctggagagcggaccccaatgctggaggatgtagatgaggggggcatccggccctggcacctggtgaagccaagtgatgagccggagccgcccaggcctcggaggggcagccttcggggcggggagcgtgagcgcgccaaggccatccctgagatctacctgacccgcctgctgtccatgaagggcaccctgcagaagttcgtggatgacctgttccaggtgattctcagcaccagccgccccgtgccgctcgctgtgaagtacttctttgacctgctggatgagcaggcccagcagcatggcatctccgaccaggacaccatccacatctggaagaccaacagcttgcctctgaggttctggatcaatataataaaaaacccgcagtttgtgttcgacgtgcaaacatctgataacatggatgcggtgctccttgtcattgcacagaccttcatggacgcctgcaccctggccgaccacaagctgggccgggactccccgatcaacaaacttctgtatgcacgggacattccccggtacaagcggatggtggaaaggtactatgcagacatcagacagactgtcccagccagcgaccaagagatgaactctgtcctggctgaactgtcctggaactactccggagacctcggggcgcgagtggccctgcatgaactctacaagtacatcaacaagtactatgaccagatcatcactgccctggaggaggatggcacggcccagaagatgcagctgggctatcggctccagcagattgcagctgctgtggaaaacaaggtcacagatctataggaacccaggagccacggcctgctgttgcttcagcctggcctgggcagccctggaagctcggaggagaggccaccttcttaggtgcctgtagtgactgacaagcagagttagtggaaggtgactcccagtctcctggtggctctggcctcggccctgctggatccacctcctagacccggggcctcaaggctcatggggtagtacccagcctgctccccgagtccagcgaccctgtgacaccggtctgcagggagttggggactaagggcttccagagagtggctggaagagactccaggcccctggggagactgtactgttcctgaacactggccttggccacactgggattcggagaggaaggaggagagccccatgcttcctgtctgcctcctccaccatccctgacctcagttgagctgcctctggccttgttgctgctgccacatcctaggtctaagagttgaacgcctctcctaggccactacaaactgacccctcagcagggctggctgccacagggctgccctgcctcataggtagccatggtgagggctatctgctgcaggggggtcttggggagagtggtgactccattgacccagcttttcattaaaggataacacactg

SEQ ID NO: 16130 - DNA, 5859 bp, Homo sapiens
  source 1..5859: mol_type = unassigned DNA
atgcctgctctgggcccagctcttctccaggctctctgggccgggtgggtcctcaccctccagccccttccaccaactgcattcactcccaatggcacgtatctgcagcacctggcaagggaccccacctcaggcaccctctacctgggggctaccaacttcctgttccagctgagccctgggctgcagctggaggccacagtgtccaccggccctgtgctagacagcagggactgcctgccacctgtgatgcctgatgagtgcccccaggcccagcctaccaacaacccgaatcagctgctcctggtgagcccaggggccctggtggtatgcgggagcgtgcaccagggggtctgtgaacagcggcgcctggggcagctcgagcagctgctgctgcggccagagcggcctggggacacacaatatgtggctgccaatgatcctgcggtcagcacggtggggctggtagcccagggcttggcaggggagcccctcctgtttgtggggcgaggatacaccagcaggggtgtggggggtggcattccacccatcacaacccgggccctgtggccgcccgacccccaagctgccttctcctatgaggagacagccaagctggcagtgggccgcctctccgagtacagccaccacttcgtgagtgcctttgcacgtggggccagcgcctacttcctgttcctgcggcgggacctgcaggctcagtctagagcttttcgtgcctatgtatctcgagtgtgtctccgggaccagcactactactcctatgtggagttgcctctggcctgcgaaggtggccgctacgggctgatccaggctgcagctgtggccacgtccagggaggtggcgcatggggaggtgctctttgcagctttctcctcggctgcaccccccactgtgggccggcccccatcggcggctgctggggcatctggagcctctgccctctgtgccttccccctggatgaggtggaccggcttgctaatcgcacgcgagatgcctgctacacccgggagggtcgtgctgaggatgggaccgaggtggcctacatcgagtatgatgtcaattctgactgtgcacagctgccagtggacaccctggatgcttatccctgtggctcagaccacacgcccagccccatggccagccgggtcccgctggaagccacaccaattctggagtggccagggattcagctaacagctgtggcagtcaccatggaagatggacacaccatcgctttcctgggtgatagtcaagggcagctgcacagggtctacttgggcccagggagcgatggccacccatactccacacagagcatccagcaggggtctgcagtgagcagagacctcacctttgatgggacctttgagcacctgtatgtcatgacccagagcacacttctgaaggttcctgtggcttcctgtgctcagcacctggactgtgcatcttgccttgctcacagggacccatactgtgggtggtgcgtgctccttggcaggtgcagtcgccgttctgagtgctcgaggggccagggcccagagcagtggctatggagcttccagcctgagctgggctgtctgcaagtggcagccatgagtcctgccaacatcagccgagaggagacgagggaggttttcctatcagtgccagacctgccacccctgtggccaggggagtcatattcctgccactttggggaacatcagagtcctgccctgctgactggttctggtgtgatgtgcccctccccagaccctagtgaggccccagtgctgccgagaggagccgactacgtatccgtgagcgtggagctcagatttggcgctgttgtgatcgccaaaacttccctctctttctatgactgtgtggcggtcactgaactccgcccatctgcgcagtgccaggcctgtgtgagcagccgctgggggtgtaactggtgtgtctggcagcacctgtgcacccacaaggcctcgtgtgatgctgggcccatggttgcaagccatcagagcccgcttgtctccccagaccctcctgcaagaggtgatggagactcagcagagcttgagggccctcccgcccccctcatcctcccgtccagcctcgactaccagtatgacacccccgggctctgggagctggaagaggcgaccttgggggcaagctcctgcccctgtgtggagagcgttcagggctccacgttgatgccggtccatgtggagcgggaaatccggctgctaggcaggaacctgcaccttttccaggatggcccaggagacaatgagtgtgtgatggagctggagggcctcgaggtggtggttgaggcccgggtcgagtgtgagccacctccagatacccagtgccatgtcacctgccagcagcaccagctcagctatgaggctctgcagccggagctccgtgtggggctgtttctgcgtcgggccggccgtctgcgtgtggacagtgctgaggggctgcatgtggtactgtatgactgttccgtgggacatggagactgcagccgctgccaaactgccatgccccagtatggctgtgtgtggtgtgagggggagcgtccacgttgtgtgacccgggaggcctgtggtgaggctgaggctgtggccacccagtgcccagcgcccctcatccactcggtggagccactgactgggcctgtagacggaggcacccgtgtcaccatcaggggctccaacctgggccagcatgtgcaggatgtgctgggcatggtcacggtggctggagtgccctgtgctgtggatgcccaggagtacgaggtctccagcagcctcgtgtgcatcaccggggccagtggggaggaggtggccggcgccacagcggtggaggtgccgggaagaggacgtggtgtctcagaacacgactttgcctaccaggatccgaaggtccattccatcttcccggcccgcggccccagagctgggggcacccgtctcaccctgaatggctccaagctcctgactgggcggctggaggacatccgagtggtggttggagaccagccttgtcacttgctgccggagcagcagtcagaacaactgcggtgtgagaccagcccacgccccacgcctgccacgctccctgtggctgtgtggtttggggccacggagcggaggcttcaacgcggacagttcaagtataccttggaccccaacatcacctctgctggccccaccaagagcttcctcagtggaggacgtgagatatgcgtccgtggccagaatctggacgtggtacagacgccaagaatccgggtgaccgtggtctcgagaatgctgcagcccagccaggggcttggacggaggcgtcgcgtggtcccggagacggcatgttcccttggaccctcctgcagtagccagcaatttgaggagccgtgccatgtcaactcctcccagctcatcacgtgccgcacacctgccctcccaggcctgcctgaggacccctgggtccgggtggaatttatccttgacaacctggtctttgactttgcaacactgaaccccacacctttctcctatgaggccgaccccaccctgcagccactcaaccctgaggaccccaccatgccattccggcacaagcctgggagtgtgttctccgtggagggggagaacctggaccttgcaatgtccaaggaggaggtggtggctatgataggggatggcccctgtgtggtgaagacgctgacgcggcaccacctgtactgcgagccccccgtggagcagcccctgccacggcaccatgccctccgagaggcacctgactctttgcctgagttcacggtgcagatggggaacttgcgcttctccctgggtcacgtgcagtatgacggcgagagccctggggcttttcctgtggcagcccaggtgggcttgggggtgggcacctctcttctggctctgggtgtcatcatcattgtcctcatgtacaggaggaagagcaagcaggccctgagggactataagaaggttcagatccagctggagaatctggagagcagtgtgcgggaccgctgcaagaaggaattcacagacctcatgactgagatgaccgatctcaccagtgacctcctgggcagcggcatccccttcctcgactacaaggtgtatgcggagaggatcttcttccctgggcaccgcgagtcgcccttgcaccgggacctgggtgtgcctgagagcagacggcccactgtggagcaagggctggggcagctctctaacctgctcaacagcaagctcttcctcaccaagttcatccacacgctggagagccagcgcaccttttcagctcgggaccgtgcctacgtggcatctctgctcaccgtggcactgcatgggaagcttgagtatttcactgacatcctccgcactctgctcagtgacctggttgcccagtatgtggccaagaaccccaagctgatgctgcgcaggacagagactgtggtggagaagctgctcaccaactggatgtccatctgtctgtataccttcgtgagggactccgtaggggagcctctgtacatgctctttcgagggattaagcaccaagtggataaggggccagtggacagtgtgacaggcaaggccaaatacaccttgaacgacaaccgcctgctcagagaggatgtggagtaccgtcccctgaccttgaatgcactattggctgtggggcctggggcaggagaggcccagggcgtgcccgtgaaggtcctagactgtgacaccatctcccaggcaaaggagaagatgctggaccagctttataaaggagtgcctctcacccagcggccagaccctcgcacccttgatgttgagtggcggtctggggtggccgggcacctcattctttctgacgaggatgtcacttctgaggtccagggtctgtggaggcgcctgaacacactgcagcattacaaggtcccagatggagcaactgtggccctcgtcccctgcctcaccaagcatgtgctccgggaaaaccaggattatgtccctggagagcggaccccaatgctggaggatgtagatgaggggggcatccggccctggcacctggtgaagccaagtgatgagccggagccgcccaggcctcggaggggcagccttcggggcggggagcgtgagcgcgccaaggccatccctgagatctacctgacccgcctgctgtccatgaagggcaccctgcagaagttcgtggatgacctgttccaggtgattctcagcaccagccgccccgtgccgctcgctgtgaagtacttctttgacctgctggatgagcaggcccagcagcatggcatctccgaccaggacaccatccacatctggaagaccaacagcttgcctctgaggttctggatcaatataataaaaaacccgcagtttgtgttcgacgtgcaaacatctgataacatggatgcggtgctccttgtcattgcacagaccttcatggacgcctgcaccctggccgaccacaagctgggccgggactccccgatcaacaaacttctgtatgcacgggacattccccggtacaagcggatggtggaaaggtactatgcagacatcagacagactgtcccagccagcgaccaagagatgaactctgtcctggctgaactgtcctggaactactccggagacctcggggcgcgagtggccctgcatgaactctacaagtacatcaacaagtactatgaccagatcatcactgccctggaggaggatggcacggcccagaagatgcagctgggctatcggctccagcagattgcagctgctgtggaaaacaaggtcacagatctatag

SEQ ID NO: 16131 - DNA, 424 bp, Homo sapiens
  source 1..424: mol_type = unassigned DNA
aaccccagaccttgctgaagcaggtagacctgggctgtcttcctaccaaggaggcccccttgctctaccctgttctgtccccatctggcacacctggcctggggtccctgggccatggaggggactctgcttcccactgtagtgcccatcccattctctacctctcaggtccccttctcccccagcccttccctggggtcctgggctgcctcctgtggctctctgcacccctcgtctctctcacctttcatttggcctcttccctagaactactccggagacctcggggcgcgagtggccctgcatgaactctacaagtacatcaacaagtactatgaccagatcatcactgccctggaggaggatggcacggcccagaagatgcagctgggctatcggctccagcagattgcagctgctgtgg

SEQ ID NO: 16132 - DNA, 317 bp, Homo sapiens
  source 1..317: mol_type = unassigned DNA
catggatgcggtgctccttgtcattgcacagaccttcatggacgcctgcaccctggccgaccacaagctgggccgggactccccgatcaacaaacttctgtatgcacgggacattccccggtacaagcggatggtggaaaggtactatgcagacatcagacagactgtcccagccagcgaccaagagatgaactctgtcctggctgaactgtcctgggtaaggcctccctctgcttcttgggttgggcataggcctcctgccacaacggtccttcccccttcacactgcccctttgcagggaagcccttgggaacct

SEQ ID NO: 16133 - DNA, 367 bp, Homo sapiens
  source 1..367: mol_type = unassigned DNA
aagttcgtggatgacctgttccaggtgattctcagcaccagccgccccgtgccgctcgctgtgaagtacttctttgacctgctggatgagcaggcccagcagcatggcatctccgaccaggacaccatccacatctggaagaccaacagcttgcctctgaggttctggatcaatataataaaaaacccgcagtttgtgttcgacgtgcaaacatctgataacatggatgcggtgctccttgtcattgcacagaccttcatggacgcctgcaccctggccgaccacaagctgggccgggactccccgatcaacaaacttctgtatgcacgggacattccccggtacaagcggatggtggaaaggtact

SEQ ID NO: 16134 - DNA, 576 bp, Homo sapiens
  source 1..576: mol_type = unassigned DNA
actgtggccctcgtcccctgcctcaccaagcatgtgctccgggaaaaccaggattatgtccctggagagcggaccccaatgctggaggatgtagatgaggggggcatccggccctggcacctggtgaagccaagtgatgagccggagccgcccaggcctcggaggggcagccttcggggcggggagcgtgagcgcgccaaggccatccctgagatctacctgacccgcctgctgtccatgaagggcaccctgcagaagttcgtggatgacctgttccaggtgattctcagcaccagccgccccgtgccgctcgctgtgaagtacttctttgacctgctggatgagcaggcccagcagcatggcatctccgaccaggacaccatccacatctggaagaccaacaggtggggtggagctgggtgggctctaggtgtgtgtggggggtcttctcttctgcctccccagcacattcatcggccatgcctgccccacccgcagcttgcctctgaggttctggatcaatataataaaaaacccgcagtttgtgttcgacgtgcaaacatctgataacatgga

SEQ ID NO: 16135 - DNA, 835 bp, Homo sapiens
  source 1..835: mol_type = unassigned DNA
aagcaccaagtggataaggggccagtggacagtgtgacaggcaaggccaaatacaccttgaacgacaaccgcctgctcagagaggatgtggagtaccgtcccctgaccttgaatgcactattggctgtggggcctggggcaggagaggcccagggcgtgcccgtgaaggtcctagactgtgacaccatctcccaggcaaaggagaagatgctggaccagctttataaaggagtgcctctcacccagcggccagaccctcgcacccttgatgttggtgagggcgtggagagcccctggggacctgagccactgttgggcctgggctggccccggaccaactctgcagggacaactcatcactcagggtggggaggatgctgggaggcaggcagaagctggctttggaacatctttcttggacagcctctcatctggggagggggtccctgctcttggtctttggagaggttgagtaaggctgccccatgatggaggggctggtgtccctgtggaggaggagatgggctccactatgggaagggtatcttccagccctgcacccagttctgccttgcccttgcagagtggcggtctggggtggccgggcacctcattctttctgacgaggatgtcacttctgaggtccagggtctgtggaggcgcctgaacacactgcagcattacaaggtcccagatggagcaactgtggccctcgtcccctgcctcaccaagcatgtgctccgggaaaaccaggattatgtccctggagagcggaccccaatgctggaggatgtagatgaggggggcatccggccctggcacctggtgaagccaa

SEQ ID NO: 16136 - DNA, 851 bp, Homo sapiens
  source 1..851: mol_type = unassigned DNA
cgatctcaccagtgacctcctgggcagcggcatccccttcctcgactacaaggtgtatgcggagaggatcttcttccctgggcaccgcgagtcgcccttgcaccgggacctgggtgtgcctgagagcagacggcccactgtggagcaagggctggggcagctctctaacctgctcaacagcaagctcttcctcaccaagttcatccacacgctggagagccagcgcaccttttcagctcgggaccgtgcctacgtggcatctctgctcaccgtggcactgcatgggaagcttgagtatttcactgacatcctccgcactctgctcagtgacctggttgcccagtatgtggccaagaaccccaagctgatgctgcgcaggacagagactgtggtggagaagctgctcaccaactggatgtccatctgtctgtataccttcgtgagggtgagggggcagaggtggacagggctcctgtccagggagggtcaggccctccaaacttctaagccctcagccaccatgcagctcggacacttgtgccagagcagagactcctgctcagcctgtcctcagtccccttaagcccatgtcctgtccccttccccagtgtgcgtcatgtcccatacacctctgccacctgctggggggccctaactgcctgtgctctcctaggactccgtaggggagcctctgtacatgctctttcgagggattaagcaccaagtggataaggggccagtggacagtgtgacaggcaaggccaaatacaccttgaacgacaaccgcctgctcagagaggatgtggagtaccgtcccctgaccttgaatgcactattggctgtggggcctg

SEQ ID NO: 16137 - DNA, 1034 bp, Homo sapiens
  source 1..1034: mol_type = unassigned DNA
caggcctgcctgaggacccctgggtccgggtggaatttatccttgacaacctggtctttgactttgcaacactgaaccccacacctttctcctatgaggccgaccccaccctgcagccactcaaccctgaggaccccaccatgccattccggcacaagcctgggagtgtgttctccgtggagggggagaacctggaccttgcaatgtccaaggaggaggtggtggctatgataggggatggcccctgtgtggtgaagacgctgacgcggcaccacctgtactgcgagccccccgtggagcagcccctgccacggcaccatgccctccgagaggcacctgactctttgcctgagttcacggtcagtgggcaggtccctggccgggctgggcattgacctgggccaaacccttgctcacaggtggctcctgacacaggtgcagatggggaacttgcgcttctccctgggtcacgtgcagtatgacggcgagagccctggggcttttcctgtggcagcccaggtgggcttgggggtgggcacctctcttctggctctgggtgtcatcatcattgtcctcatgtacaggtgggtgcagccagatgtggctgggctggggcaggtcgtgggatctggctggactgggaagggacagaccgggccaggagtcaggaaacattctctgtaaatggccagagagtaaatattttcgctttgcaggccaagtggtctctgttcaacaactcagctttgccactgtggcacaaaggcagccagggacgacatggaaacacatgaaagtggctgtgttctaacaaatctttataaaaataggttgtgggatggatttggcctggttgtggttggctgatctctaggctaaactgtgctgggctagacggggcatgggtgtgtgtgacttgcttgggacgggacaggctgaatcgtactgggctaggcttgagcttggctggcatggctgcattggactgtgctggatgaggccggggtgtgcctggggattgtcaggcaggcctg

SEQ ID NO: 16138 - DNA, 3863 bp, Homo sapiens
  source 1..3863: mol_type = unassigned DNA
atgcctgctctgggcccagctcttctccaggctctctgggccgggtgggtcctcaccctccagccccttccaccaactgcattcactcccaatggcacgtatctgcagcacctggcaagggaccccacctcaggcaccctctacctgggggctaccaacttcctgttccagctgagccctgggctgcagctggaggccacagtgtccaccggccctgtgctagacagcagggactgcctgccacctgtgatgcctgatgagtgcccccaggcccagcctaccaacaacccgaatcagctgctcctggtgagcccaggggccctggtggtatgcgggagcgtgcaccagggggtctgtgaacagcggcgcctggggcagctcgagcagctgctgctgcggccagagcggcctggggacacacaatatgtggctgccaatgatcctgcggtcagcacggtggggctggtagcccagggcttggcaggggagcccctcctgtttgtggggcgaggatacaccagcaggggtgtggggggtggcattccacccatcacaacccgggccctgtggccgcccgacccccaagctgccttctcctatgaggagacagccaagctggcagtgggccgcctctccgagtacagccaccacttcgtgagtgcctttgcacgtggggccagcgcctacttcctgttcctgcggcgggacctgcaggctcagtctagagcttttcgtgcctatgtatctcgagtgtgtctccgggaccagcactactactcctatgtggagttgcctctggcctgcgaaggtggccgctacgggctgatccaggctgcagctgtggccacgtccagggaggtggcgcatggggaggtgctctttgcagctttctcctcggctgcaccccccactgtgggccggcccccatcggcggctgctggggcatctggagcctctgccctctgtgccttccccctggatgaggtggaccggcttgctaatcgcacgcgagatgcctgctacacccgggagggtcgtgctgaggatgggaccgaggtggcctacatcgagtatgatgtcaattctgactgtgcacagctgccagtggacaccctggatgcttatccctgtggctcagaccacacgcccagccccatggccagccgggtcccgctggaagccacaccaattctggagtggccagggattcagctaacagctgtggcagtcaccatggaagatggacacaccatcgctttcctgggtgatagtcaagggcagctgcacagggtctacttgggcccagggagcgatggccacccatactccacacagagcatccagcaggggtctgcagtgagcagagacctcacctttgatgggacctttgagcacctgtatgtcatgacccagagcacacttctgaaggttcctgtggcttcctgtgctcagcacctggactgtgcatcttgccttgctcacagggacccatactgtgggtggtgcgtgctccttggcaggtgcagtcgccgttctgagtgctcgaggggccagggcccagagcagtggctatggagcttccagcctgagctgggctgtctgcaagtggcagccatgagtcctgccaacatcagccgagaggagacgagggaggttttcctatcagtgccagacctgccacccctgtggccaggggagtcatattcctgccactttggggaacatcagagtcctgccctgctgactggttctggtgtgatgtgcccctccccagaccctagtgaggccccagtgctgccgagaggagccgactacgtatccgtgagcgtggagctcagatttggcgctgttgtgatcgccaaaacttccctctctttctatgactgtgtggcggtcactgaactccgcccatctgcgcagtgccaggcctgtgtgagcagccgctgggggtgtaactggtgtgtctggcagcacctgtgcacccacaaggcctcgtgtgatgctgggcccatggttgcaagccatcaggtgatggagactcagcagagcttgagggccctcccgcccccctcatcctcccgtccagcctcgactaccagtatgacacccccgggctctgggagctggaagaggcgaccttgggggcaagctcctgcccctgtgtggagagcgttcagggctccacgttgatgccggtccatgtggagcgggaaatccggctgctaggcaggaacctgcaccttttccaggatggcccaggagacaatgagtgtgtgatggagctggagggcctcgaggtggtggttgaggcccgggtcgagtgtgagccacctccagatacccagtgccatgtcacctgccagcagcaccagctcagctatgaggctctgcagccggagctccgtgtggggctgtttctgcgtcgggccggccgtctgcgtgtggacagtgctgaggggctgcatgtggtactgtatgactgttccgtgggacatggagactgcagccgctgccaaactgccatgccccagtatggctgtgtgtggtgtgagggggagcgtccacgttgtgtgacccgggaggcctgtggtgaggctgaggctgtggccacccagtgcccagcgcccctcatccactcggtggagccactgactgggcctgtagacggaggcacccgtgtcaccatcaggggctccaacctgggccagcatgtgcaggatgtgctgggcatggtcacggtggctggagtgccctgtgctgtggatgcccaggagtacgaggtctccagcagcctcgtgtgcatcaccggggccagtggggaggaggtggccggcgccacagcggtggaggtgccgggaagaggacgtggtgtctcagaacacgactttgcctaccaggatccgaaggtccattccatcttcccggcccgcggccccagagctgggggcacccgtctcaccctgaatggctccaagctcctgactgggcggctggaggacatccgagtggtggttggagaccagccttgtcacttgctgccggagcagcagtcagaacaactgcggtgtgagaccagcccacgccccacgcctgccacgctccctgtggctgtgtggtttggggccacggagcggaggcttcaacgcggacagttcaagtataccttggaccccaacatcacctctgctggccccaccaagagcttcctcagtggaggacgtgagatatgcgtccgtggccagaatctggacgtggtacagacgccaagaatccgggtgaccgtggtctcgagaatgctgcagcccagccaggggcttggacggaggcgtcgcgtggtcccggagacggcatgttcccttggaccctcctgcagtagccagcaatttgaggagccgtgccatgtcaactcctcccagctcatcacgtgccgcacacctgccctcccaggcctgcctgaggacccctgggtccgggtggaatttatccttgacaacctggtctttgactttgcaacactgaaccccacacctttctcctatgaggccgaccccaccctgcagccactcaaccctgaggaccccaccatgccattccggcacaagcctgggagtgtgttctccgtggagggggagaacctggaccttgcaatgtccaaggaggaggtggtggctatgataggggatggcccctgtgtggtgaagacgctgacgcggcaccacctgtactgcgagccccccgtggagcagcccctgccacggcaccatgccctccgagaggcacctgactctttgcctgagttcacggtgcagatggggaacttgcgcttctccctgggtcacgtgcagtatgacggcgagagccct

SEQ ID NO: 16139 - DNA, 627 bp, Homo sapiens
  source 1..627: mol_type = unassigned DNA
ggagcggaggcttcaacgcggacagttcaagtataccttggaccccaacatcacctctgctggccccaccaagagcttcctcagtggaggacgtgagatatgcgtccgtggccagaatctggacgtggtacagacgccaagaatccgggtgaccgtggtctcgagaatgctgcagcccagccaggggcttggacggaggcgtcgcgtggtcccggagacgtttgaggagccgtgccatgtcaactcctcccagctcatcacgtgccgcacacctgccctcccaggcctgcctgaggacccctgggtccgggtggaatttatccttgacaacctggtctttgactttgcaacactgaaccccacacctttctcctatgaggccgaccccaccctgcagccactcaaccctgaggaccccaccatgccattccggcacaagcctgggagtgtgttctccgtggagggggagaacctggaccttgcaatgtccaaggaggaggtggtggctatgataggggatggcccctgtgtggtgaagacgctgacgcggcaccacctgtactgcgagccccccgtggagcagcccctgccacggcaccatgccctccgagaggcacctgactcttt

SEQ ID NO: 16140 - DNA, 688 bp, Homo sapiens
  source 1..688: mol_type = unassigned DNA
tgcagctccactatgtgggggtttgtagggctttatgttgaggcactgagaatcccatgctgctagtaggggcaaggggtcgtgtggtttggggctggggctgagctgacctagccgggactgggctgtgctttaggtccaggtaacataagccatcttacgttacgtaagctcacggtctgtttcagtggaggacgtgagatatgcgtccgtggccagaatctggacgtggtacagacgccaagaatccgggtgaccgtggtctcgagaatgctgcagcccagccaggggcttggacggaggcgtcgcgtggtcccggagacggcatgttcccttggaccctcctgcagtagccagcaatttgaggagccgtgccatgtcaactcctcccagctcatcacgtgccgcacacctgccctcccaggcctgcctgaggacccctgggtccgggtggaatttatccttgacaacctggtctttgactttgcaacactgaaccccacacctttctcctatgaggccgaccccaccctgcagccactcaaccctgaggaccccaccatgccattccggcacaagcctgggagtgtgttctccgtggagggggagaacctggaccttgcaatgtccaaggaggaggtggtggctatgataggggatggcccctgtgtggtgaagacgctgacgc

SEQ ID NO: 16141 - DNA, 1025 bp, Homo sapiens
  source 1..1025: mol_type = unassigned DNA
atgctttgagtgggtactgtgcatgtgacgtggcggaggacatgggcggctagctgtgcccactcacttgctcagcagctcgccccacaaccaggctgacagggcccctttgtaaatttatgccacagataaattcttccttattgggggcccctggggttgaacttaaatgattgaagccacaaatattaattctcagataccaaggccttctgatgtgtcataaagaattccctccaaagtgagagagggtctctgtcaatcttatggagcatgggaaggggaagaccacctgacagtagggcagggagaggggctgccaggtaagcttgaggggcccttgatgcagcctggcaccccctagcctgccctgtgcctacagcctcgtgtgcatcaccggggccagtggggaggaggtggccggcgccacagcggtggaggtgccgggaagaggacgtggtgtctcagaacacgactttgcctaccaggatccgaaggtccattccatcttcccggcccgcggccccagagctgggggcacccgtctcaccctgaatggctccaagctcctgactgggcggctggaggacatccgagtggtggttggagaccagccttgtcacttgctgccggagcagcagtcagaacaactgcggtgtgagaccagcccacgccccacgcctgccacgctccctgtggctgtgtggtttggggccacggagcggaggcttcaacgcggacagttcaagtataccttggaccccaacatcacctctgctggccccaccaagagcttcctcagtggaggacgtgagatatgcgtccgtggccagaatctggacgtggtacagacgccaagaatccgggtgaccgtggtctcgagaatgctgcagcccagccaggggcttggacggaggcgtcgcgtggtcccggagacggcatgttcccttggaccctcctgcagtagccagcaatttgaggagccgtgccatgtcaactcctcccagctcatcacgtgccgcaca

SEQ ID NO: 16142 - DNA, 560 bp, Homo sapiens
  source 1..560: mol_type = unassigned DNA
gagctgcccgaggcggacgagtggacggggggtgacgcacccgccttctccacttccaccctcctctcaggtgatggagactcagcagagcttgagggccctcccgcccccctcatcctcccgtccagcctcgactaccagtatgacacccccgggctctgggagctggaagaggcgaccttgggggcaagctcctgcccctgtgtggagagcgttcagggctccacgttgatgccggtccatgtggagcgggaaatccggctgctaggcaggaacctgcaccttttccagctcagctatgaggctctgcagccggagctccgtgtggggctgtttctgcgtcgggccggccgtctgcgtgtggacagtgctgaggggctgcatgtggtactgtatgactgttccgtgggacatggagactgcagccgctgccaaactgccatgccccagtatggctgtgtgtggtgtgagggggagcgtccacgttgtgtgacccgggaggcctgtggtgaggctgaggctgtggccacccagtgcccagcgcccctcatccactcggt

SEQ ID NO: 16143 - DNA, 663 bp, Homo sapiens
  source 1..663: mol_type = unassigned DNA
gactaccagtatgacacccccgggctctgggagctggtgaggcccagcccaggaaggaggcctcaggggaggggatgtggggaagatgctacccctagcttgccttgtgattctgcactgggaggaggtgaggggcagggtggagtctgcagccccacaccggccttgcctctggaatctggcaaggcagagggctgagctgggcagggtgggctccatagactgccttgcccttggtgcctgcaggaagaggcgaccttgggggcaagctcctgcccctgtgtggagagcgttcagggctccacgttgatgccggtccatgtggagcgggaaatccggctgctaggcaggaacctgcaccttttccaggatggcccaggagacaatgagtgtgtgatggagctggagggcctcgaggtggtggttgaggcccgggtcgagtgtgagccacctccagatacccagtgccatgtcacctgccagcagcaccagctcagctatgaggctctgcagccggagctccgtgtggggctgtttctgcgtcgggccggccgtctgcgtgtggacagtgctgaggggctgcatgtggtactgtatgactgttccgtgggacatggagactgcagccgctgccaaactgccatgccccagtatggctgtgtg

SEQ ID NO: 16144 - DNA, 626 bp, Homo sapiens
  source 1..626: mol_type = unassigned DNA
gggaaggagcggagacgagcccggccgacgcggctttgtctcctttgttcccggcggtggcagcgccgcgcgggaggggcgggcagcgggcgcagttttccgcccctcggtctccgggtaacagctgcggctccgccagacccggggagaggccgctgcgcgcggagcccgagcccggagcggccgacgcccgcctcggcgcgcacatcccgcggggcccggccgggtgactacgtatccgtgagcgtggagctcagatttggcgctgttgtgatcgccaaaacttccctctctttctatgactgtgtggcggtcactgaactccgcccatctgcgcagtgccaggcctgtgtgagcagccgctgggggtgtaactggtgtgtctggcagcacctgtgcacccacaaggcctcgtgtgatgctgggcccatggttgcaagccatcagagcccgcttgtctccccagaccctcctgcaagaggtggacccagcccctccccacccacagcccccaaagccctggccacccctgctcctgacacccttcccgtggagcctggggctccctccacagccacagcttcggacatctcacctggggctagtccttccctgctcagcccctg

SEQ ID NO: 16145 - DNA, 284 bp, Homo sapiens
  source 1..284: mol_type = unassigned DNA
tgctgaggatgggaccgaggtggcctacatcgagtatgatgtcaattctgactgtgcacagctgccagtggacaccctggatgcttatccctgtggctcagaccacacgcccagccccatggccagccgggtcccgctggaagccacaccaattctggagtggccagggattcagctaacagctgtggcagtcaccatggaagatggacacaccatcgctttcctgggtgatagtcaagggcagctgcacaggggagcgatggccacccatactccacacagag

SEQ ID NO: 16146 - DNA, 6146 bp, Homo sapiens
  source 1..6146: mol_type = unassigned DNA
gctcctggcaccgccagctgctacttggccctcgccggtggcccaccaggacaatgcccccccgcagccatctcatgcccatcgccactgccctggggcagctgaactgagcgtatgtgccacgccgcccaggagacccctctgctgcaccacttcatggcccccgtgatggctcgctggcctcccttcggcctctgcctcctcctgctgctgctgtccccaccgccactgcccttgacaggggcccatcgcttctccgcacctaataccactctcaaccacttggcactggcacctggccgaggcacactctatgtcggcgcagtgaaccgcctcttccagctcagccccgagctgcagctcgaggccgtggctgtcactggccctgtaatcgacagccctgactgcgtgcccttccgtgacccagccgagtgcccacaggcccagctcactgacaatgccaaccagctgctgctggtgagcagccgcgcccaggagctggtggcctgcgggcaggtgcggcagggcgtgtgtgagacacggcgccttggggatgtggccgaggtgctgtaccaggctgaggaccctggtgacgggcagtttgtggctgccaataccccgggagtggcaacggtggggctggtggtgcccttgcccggccgggacctcctgcttgtggccagaggcctggcgggcaagctgtcggcaggggtgccacccctggccatccgccagctggccgggtctcagcccttctccagcgagggcctgggccgcctggtggtgggcgacttctccgactacaacaacagctacgtcggggcctttgccgacgcccgctccgcctacttcgtgttccgccgccgcggggcccgggcccaggctgagtaccgctcctacgtggcccgcgtctgcctgggggacaccaacctgtactcctacgtggaggtccccctcgcctgccagggccagggcctcatccaggccgccttccttgccccgggcaccttgctaggggtgtttgccgcgggcccaaggggcacccaggcggcgctctgtgccttccccatggtggagctgggtgccagcatggagcaggcccggagactctgctacacggcgggcggccggggccccagcggcgcagaggaagccaccgtggagtacggcgtcacgtcgcgctgcgtcaccctgccccttgattcccccgagtcgtacccctgtggcgacgagcacacccccagccccattgctggccgccagcccctggaggtccagcctctgctgaagctcgggcagccggtcagcgccgtggcagctctccaggcagatgggcacatgatagccttcctgggggacacccagggccagctgtacaaggtctttctccacggctcccagggccaggtttaccactcccagcaagtggggcctccaggctcagccatcagcccagacctgctgctggacagcagtggcagtcacctctatgtcctgactgcccaccaggtggaccggatacctgtggcagcctgcccccagttccctgactgtgccagctgcctccaggcccaggacccgctgtgtggctggtgtgtcctccagggcaggtgtacccggaagggccagtgcgggcgggcaggccagctgaaccagtggctgtggagttatgaggaggacagccactgcctgcacatccagagcctgctgccgggccaccacccccgccaggagcagggccaggtcactttgtctgtcccccggctgcccatcctggatgcagatgaatacttccattgtgcgttcggggactatgacagcttggctcatgtggaagggccccacgtggcctgtgtcacccctccccaagaccaggtgccacttaaccctccaggcacagaccacgtcactgtgcccctggccctgatgttcgaggacgtgactgtggctgccaccaacttctccttttatgactgcagtgccgtccaggccttggaggcggctgccccgtgtcgcgcttgcgtgggcagcatctggcggtgtcactggtgcccgcagagtagccactgcgtgtacggagagcactgcccagagggcgagaggaccatctacagcgcccaggaggtggacatccaggtgcgtggcccaggggcttgcccacaggtcgaaggcctggcaggtccccacctggtgcctgtgggctgggagagccatttggccctacgcgtgcggaaccttcaacatttccgaggcctgcctgcctccttccactgctggctggagctgcctggagaacttcggggactgccggccaccctggaggagacagcaggggattcaggcctcatccactgccaggcccaccagttttatccctccatgtcccagcgggagctcccagtgcccatctacgtcacccagggtgaagcccagaggctggacaacacccatgctctttatgtgatcctgtacgactgcgccatgggccacccggactgcagccactgccaagcggccaacaggagcctgggctgcctgtggtgtgctgacggccagcctgcctgtcgctatgggcccttgtgcccgccgggggctgtggagctgctgtgtcctgcgcccagcattgatgcagtcgagcccctgaccggtccccctgagggaggcttggccctcaccatcctgggctccaacctgggccgggccttcgccgatgtgcagtacgccgtgagcgtggccagccggccctgcaaccctgagccctctctctaccgcacgtcggcccggattgtgtgtgtgacatctcctgcccccaatggcaccactgggcccgtccgggtggccattaagagccagccaccaggcatctcaagccagcacttcacctaccaggaccctgtcctgctgagcctgagtcctcgctggggcccccaggcagggggcacccagctcaccatccgaggtcagcacctccagacaggtggcaacaccagtgccttcgtgggtggccaaccctgtcccatcctggagccagtgtgtccggaggccatcgtgtgccgtaccaggccccaggctgccccaggagaagcagcggtccttgtggtctttggccatgcccagcgcacactgctcgccagccccttccgctacaccgccaacccccagcttgtagcggcggagcccagtgccagcttccgggggggtgggcgactgatccgtgtcaggggcaccggcctagacgtggtgcagcggcccctactgtctgtgtggctggaggctgacgcagaggtgcaggcttccagggcccagccccaggacccacagccaaggaggagctgtggagcccctgctgcggacccccaggcttgtatccagctcggtggggggctgctgcagtgctccaccgtctgctccgtcaactcgtccagcctcctcctgtgccggagccctgctgtaccagacagagcccacccgcagcgggtcttcttcaccctagacaacgtgcaagtggacttcgccagtgccagtgggggccagggcttcctgtaccagcccaacccccgcctggcacccctcagccgcgaggggcctgcccgcccctaccgcctcaagccaggccatgtcctggatgtggagggcgagggcctcaacctgggcatcagcaaggaggaggtgcgcgtgcacatcggccgcggcgagtgcctggtgaagacgctcacgcgcacccacctgtactgcgagccgcctgcgcacgccccgcagcctgccaatggctccggcctgccacagttcgtggtgcagatgggcaatgtgcagctggccctgggccctgtgcagtacgaggctgaacccccgctgtctgcctttcccgtggaggcccaggcaggcgtgggcatgggtgctgcagtgctgattgccgccgtgctcctcctcaccctcatgtacaggcacaagagcaagcaggccctgcgggactaccagaaggtgctagtgcagctggagagcctggagaccggcgtgggagaccagtgccgcaaggagttcacagacctcatgacggagatgaccgacctcagcagcgacctggagggcagcgggatccccttcctggactaccgcacctacgccgagcgcgccttcttccctggccatggcggttgcccgctgcagcccaagcctgaggggccaggggaggacggccactgtgccactgtgcgccagggcctcacgcagctctccaacctgctcaacagcaagctcttcctcctcacgctcatccacaccctggaggagcagcccagcttttcccagagggatcgctgccatgtggcttcgctgctgtcgctagcgctacacggcaagctggagtacctgacggacatcatgaggaccctgctgggtgacctggcggcccattacgtgcacaggaaccccaagctcatgctacgcaggacagagaccatggtggagaaactgctcaccaactggctgtccatctgcctgtacgccttcctgagggaggtggctggtgaaccactgtacatgctcttccgggccatccagtaccaggtggacaaaggccccgtggacgccgtgacaggcaaggccaaacggaccctgaatgatagccgcttgctgcgggaggacgtggagttccagcccctgacgctgatggtgctggtggggcccggggctggcggggccgcaggcagcagcgagatgcagcgcgtgccagcccgggtgctcgacacggacaccatcacccaggtcaaggagaaggtgttggaccaagtctacaagggcacccccttctcccagaggccctcagtgcatgccctagaccttgagtggcgctcaggcctggctggtcacctgaccctatcggacgaagacttgacctccgtgacccaaaaccactggaagagactcaacaccttgcaacactacaaggtcccagatggagcaacagtggggctcgtccctcagctgcaccgtggcagcaccatctcccagagcctggcccagaggtgccccttgggagagaacatacccacgctggaggatggcgaggaggggggggtgtgcctctggcacctggtgaaagccaccgaggagccagaaggggccaaggtgcggtgcagcagcctgcgggagcgcgagccagcaagggccaaggccattccggaaatctacctcacccgtctgctgtccatgaagggcacgctgcagaagtttgtggacgacaccttccaggccattctcagcgtgaaccggcccatccccatcgccgtcaagtacctgtttgaccttctggatgagctagcagagaagcacggcatcgaggacccagggaccctgcacatctggaagaccaacagtctgctgctgcggttctgggtgaatgccttgaagaacccacagctcatctttgatgtacgggtgtcggacaatgtggacgccatccttgctgtcatcgcccagaccttcattgactcctgtaccacctcggagcataaagtgggccgggattccccagtgaacaaactgctctacgcccgggagatcccacgctacaagcagatggtggagaggtactatgcggacattcgccagagctctccggcgagctaccaggagatgaactctgctttggctgagctctccgggaactacacttctgctccccactgtctggaggctctgcaagaactctacaaccacatccacaggtactatgatcagattatcagtgccctggaggaggaccctgtgggccagaagctgcagctggcctgccgcctgcagcaggtcgccgccctggtggaaaacaaagtgactgacctgtgagctctggctcagacagcagcaagccggatccaccaacaccgcagcgccttatgaccccggaaccgagccagccactgaggggagctggcagagcctgggggcacagggtgcaaagccaggcactgtgcccagcagtgggctccctgcctgccacctcccctgccagcccacccaccttccccccacctgagattgtttctaatttataaggatccccctccttccccctctccccattgtatttatttgcctgctggaaaatcacatccggaaataaaatagaaatatgtctttttatttta

SEQ ID NO: 16147 - DNA, 774 bp, Homo sapiens
  source 1..774: mol_type = unassigned DNA
agagcctggagaccggcgtgggagaccagtgccgcaaggagttcacagacctcatgacggagatgaccgacctcagcagcgacctggagggcagcgggatccccttcctggactaccgcacctacgccgagcgcgccttcttccctggccatggcggttgcccgctgcagcccaagcctgaggggccaggggaggacggccactgtgccactgtgcgccagggcctcacgcagctctccaacctgctcaacagcaagctcttcctcctcacgctcatccacaccctggaggagcagcccagcttttcccagagggatcgctgccatgtggcttcgctgctgtcgctagcgctacacggcaagctggagtacctgacggacatcatgaggaccctgctgggtgacctggcggcccattacgtgcacaggaaccccaagctcatgctacgcaggacagagaccatggtggagaaactgctcaccaactggctgtccatctgcctgtacgccttcctgagggaggtggctggtgaaccactgtacatgctcttccgggccatccagtaccaggtggacaaaggccccgtggacgccgtgacagagtggcgctcaggcctggctggtcacctgaccctatcggacgaagacttgacctccgtgacccaaaaccactggaagagactcaacaccttgcaacactacaaggtcccagatggagcaacagtggggctcgtccctcagctgcaccgtggcagcaccatctcccagagcctgg

SEQ ID NO: 16148 - DNA, 717 bp, Homo sapiens
  source 1..717: mol_type = unassigned DNA
gatccccttcctggactaccgcacctacgccgagcgcgccttcttccctggccatggcggttgcccgctgcagcccaagcctgaggggccaggggaggacggccactgtgccactgtgcgccagggcctcacgcagctctccaacctgctcaacagcaagctcttcctcctcacgcgctacacggcaagctggagtacctgacggacatcatgaggaccctgctgggtgacctggcggcccattacgtgcacaggaaccccaagctcatgctacgcaggacagagaccatggtggagaaactgctcaccaactggctgtccatctgcctgtacgccttcctgagggaggtggctggtgaaccactgtacatgctcttccgggccatccagtaccaggtggacaaaggccccgtggacgccgtgacaggcaaggccaaacggaccctgaatgatagccgcttgctgcgggaggacgtggagttccagcccctgacgctgatggtgctggtggggcccggggctggcggggccgcaggcagcagcgagatgcagcgcgtgccagcccgggtgctcgacacggacaccatcacccaggtcaaggagaaggtgttggaccaagtctacaagggcacccccttctcccagaggccctcagtgcatgccctagaccttgagtggcgctcaggcctggctggtcacctgaccctatcggacgaa

SEQ ID NO: 16149 - DNA, 489 bp, Homo sapiens
  source 1..489: mol_type = unassigned DNA
caaacggaccctgaatgatagccgcttgctgcgggaggacgtggagttccagcccctgacgctgatggtgctggtggggcccggggctggcggggccgcaggcagcagcgagatgcagcgcgtgccagcccgggtgctcgacacggacaccatcacccaggtcaaggagaaggtgttggaccaagtctacaagggcacccccttctcccagaggccctcagtgcatgccctagaccttgagtggcgctcaggcctggctggtcacctgaccctatcggacgaagacttgacctccgtgacccaaaaccactggaagagactcaacaccttgcaacactacaaggtcccagatggagcaacagtggggctcgtccctcagctgcaccgtggcagcaccatctcccagagcctggcccagaggtgccccttgggagagagtgagtccctcggccctgacctggggccactggagtccaggctgggcaggca

SEQ ID NO: 16150 - DNA, 773 bp, Homo sapiens
  source 1..773: mol_type = unassigned DNA
ggtgtgcctctggcacctggtgaaagccaccgaggagccagaaggggccaaggtgcggtgcagcagcctgcgggagcgcgagccagcaagggccaaggccattccggaaatctacctcacccgtctgctgtccatgaagggcacgctgcagaagtttgtggacgacaccttccaggccattctcagcgtgaaccggcccatccccatcgccgtcaagtacctgtttgaccttctggatgagctagcagagaagcacggcatcgaggacccagggaccctgcacatctggaagaccaacaggtgcctttcctgctgccccacccctgctgtgcatatggtccactgagtcccagagagaccaggacattcccagggtggatgcgcccacctggggtttctggaacttacaggaagatctagggcccaggtcacctaggccaccaggccagcttccagcggcccctggctccgagtgtgttgccagtaggctggagtacatggggcggagatcacgatggcaggccagggcctcacgcccacgcctgccctgcgcccccagtctgctgctgcggttctgggtgaatgccttgaagaacccacagctcatctttgatgtacgggtgtcggacaatgtggacgccatccttgctgtcatcgcccagaccttcattgactcctgtaccacctcggagcataaagtgggccgggattccccagtgaacaaactgctctacgcccgggagatcccacgctacaagcagatggtggagagg

SEQ ID NO: 16151 - DNA, 526 bp, Homo sapiens
  source 1..526: mol_type = unassigned DNA
ctgcctcgcagggcacgctgcagaagtttgtggacgacaccttccaggccattctcagcgtgaaccggcccatccccatcgccgtcaagtacctgtttgaccttctggatgagctagcagagaagcacggcatcgaggacccagggaccctgcacatctggaagaccaacagtctgctgctgcggttctgggtgaatgccttgaagaacccacagctcatctttgatgtacgggtgtcggacaatgtggacgccatccttgctgtcatcgcccagaccttcattgactcctgtaccacctcggagcataaagtgggccgggtgagagcagtgccagcagcagcagctggcaggggcttgaggaggaaaggcttatgggggaagcctagagggctgtgcacagagctctgggtgggcagtggcagcatcatgggggcaccttcacctccgagctcatgcctagcgcctcccctccctccggagcaggattccccagtgaacaaactgctctacgcccgggagatccc

SEQ ID NO: 16152 - DNA, 626 bp, Homo sapiens
  source 1..626: mol_type = unassigned DNA
cagtggcagcatcatgggggcaccttcacctccgagctcatgcctagcgcctcccctccctccggagcaggattccccagtgaacaaactgctctacgcccgggagatcccacgctacaagcagatggtggagaggtactatgcggacattcgccagagctctccggcgagctaccaggagatgaactctgctttggctgagctctccgggaactacacttctgctccccactgtctggaggctctgcaagaactctacaaccacatccacaggtactatgatcaggtcgccgccctggtggaaaacaaagtgactgacctgtgagctctggctcagacagcagcaagccggatccaccaacaccgcagcgccttatgaccccggaaccgagccagccactgaggggagctggcagagcctgggggcacagggtgcaaagccaggcactgtgcccagcagtgggctccctgcctgccacctcccctgccagcccacccaccttccccccacctgagattgtttctaatttataaggatccccctccttccccctctccccattgtatttatttgcctgctggaaaatcacatccggaaataaaatagaaatatgtctttttatttt

SEQ ID NO: 16153 - DNA, 699 bp, Homo sapiens
  source 1..699: mol_type = unassigned DNA
gtctgctcctccaggtactatgcggacattcgccagagctctccggcgagctaccaggagatgaactctgctttggctgagctctccggggtgaggcatggcccggggggtgcgcctgtccacacgtgggtggaaagactagcagagcagaggggggagacttggggcttgaggaccaggctgggacctcactgcccccctccacgtggtgcccccagaactacacttctgctccccactgtctggaggctctgcaagaactctacaaccacatccacaggtactatgatcagattatcagtgccctggaggaggaccctgtgggccagaagctgcagctggcctgccgcctgcagcaggtcgccgccctggtggaaaacaaagtgactgacctgtgagctctggctcagacagcagcaagccggatccaccaacaccgcagcgccttatgaccccggaaccgagccagccactgaggggagctggcagagcctgggggcacagggtgcaaagccaggcactgtgcccagcagtgggctccctgcctgccacctcccctgccagcccacccaccttccccccacctgagattgtttctaatttataaggatccccctccttccccctctccccattgtatttatttgcctgctggaaaatcacatccggaaataaaatagaaatatgtctttttatttt

SEQ ID NO: 16154 - DNA, 6377 bp, Homo sapiens
  source 1..6377: mol_type = unassigned DNA
gatgagtcggactgggcacgattgcattgtggggagggaggctggggctctgtgagacgtgctcctggcaccgccagctgctacttggccctcgccggtggcccaccaggacaatgcccccccgcagccatctcatgcccatcgccactgccctggggcagctgaactgagcgtatgtgccacgccgcccaggagacccctctgctgcaccacttcatgcacccccgctgccttgccccagtgcttcctcgccctggagctgggcgccagcatggagctcacccctgcctcttcgctgacttgctccttgctcagcccgcggctgcctggctctttcccccagctgcggagggttcctccttgcagccggccctggctgcccaaggcccccgtgatggctcgctggcctcccttcggcctctgcctcctcctgctgctgctgtccccaccgccactgcccttgacaggggcccatcgcttctccgcacctaataccactctcaaccacttggcactggcacctggccgaggcacactctatgtcggcgcagtgaaccgcctcttccagctcagccccgagctgcagctcgaggccgtggctgtcactggccctgtaatcgacagccctgactgcgtgcccttccgtgacccagccgagtgcccacaggcccagctcactgacaatgccaaccagctgctgctggtgagcagccgcgcccaggagctggtggcctgcgggcaggtgcggcagggcgtgtgtgagacacggcgccttggggatgtggccgaggtgctgtaccaggctgaggaccctggtgacgggcagtttgtggctgccaataccccgggagtggcaacggtggggctggtggtgcccttgcccggccgggacctcctgcttgtggccagaggcctggcgggcaagctgtcggcaggggtgccacccctggccatccgccagctggccgggtctcagcccttctccagcgagggcctgggccgcctggtggtgggcgacttctccgactacaacaacagctacgtcggggcctttgccgacgcccgctccgcctacttcgtgttccgccgccgcggggcccgggcccaggctgagtaccgctcctacgtggcccgcgtctgcctgggggacaccaacctgtactcctacgtggaggtccccctcgcctgccagggccagggcctcatccaggccgccttccttgccccgggcaccttgctaggggtgtttgccgcgggcccaaggggcacccaggcggcgctctgtgccttccccatggtggagctgggtgccagcatggagcaggcccggagactctgctacacggcgggcggccggggccccagcggcgcagaggaagccaccgtggagtacggcgtcacgtcgcgctgcgtcaccctgccccttgattcccccgagtcgtacccctgtggcgacgagcacacccccagccccattgctggccgccagcccctggaggtccagcctctgctgaagctcgggcagccggtcagcgccgtggcagctctccaggcagatgggcacatgatagccttcctgggggacacccagggccagctgtacaaggtctttctccacggctcccagggccaggtttaccactcccagcaagtggggcctccaggctcagccatcagcccagacctgctgctggacagcagtggcagtcacctctatgtcctgactgcccaccaggtggaccggatacctgtggcagcctgcccccagttccctgactgtgccagctgcctccaggcccaggacccgctgtgtggctggtgtgtcctccagggcaggtgtacccggaagggccagtgcgggcgggcaggccagctgaaccagtggctgtggagttatgaggaggacagccactgcctgcacatccagagcctgctgccgggccaccacccccgccaggagcagggccaggtcactttgtctgtcccccggctgcccatcctggatgcagatgaatacttccattgtgcgttcggggactatgacagcttggctcatgtggaagggccccacgtggcctgtgtcacccctccccaagaccaggtgccacttaaccctccaggcacagaccacgtcactgtgcccctggccctgatgttcgaggacgtgactgtggctgccaccaacttctccttttatgactgcagtgccgtccaggccttggaggcggctgccccgtgtcgcgcttgcgtgggcagcatctggcggtgtcactggtgcccgcagagtagccactgcgtgtacggagagcactgcccagagggcgagaggaccatctacagcgcccaggaggtggacatccaggtgcgtggcccaggggcttgcccacaggtcgaaggcctggcaggtccccacctggtgcctgtgggctgggagagccatttggccctacgcgtgcggaaccttcaacatttccgaggcctgcctgcctccttccactgctggctggagctgcctggagaacttcggggactgccggccaccctggaggagacagcaggggattcaggcctcatccactgccaggcccaccagttttatccctccatgtcccagcgggagctcccagtgcccatctacgtcacccagggtgaagcccagaggctggacaacacccatgctctttatgtgatcctgtacgactgcgccatgggccacccggactgcagccactgccaagcggccaacaggagcctgggctgcctgtggtgtgctgacggccagcctgcctgtcgctatgggcccttgtgcccgccgggggctgtggagctgctgtgtcctgcgcccagcattgatgcagtcgagcccctgaccggtccccctgagggaggcttggccctcaccatcctgggctccaacctgggccgggccttcgccgatgtgcagtacgccgtgagcgtggccagccggccctgcaaccctgagccctctctctaccgcacgtcggcccggattgtgtgtgtgacatctcctgcccccaatggcaccactgggcccgtccgggtggccattaagagccagccaccaggcatctcaagccagcacttcacctaccaggaccctgtcctgctgagcctgagtcctcgctggggcccccaggcagggggcacccagctcaccatccgaggtcagcacctccagacaggtggcaacaccagtgccttcgtgggtggccaaccctgtcccatcctggagccagtgtgtccggaggccatcgtgtgccgtaccaggccccaggctgccccaggagaagcagcggtccttgtggtctttggccatgcccagcgcacactgctcgccagccccttccgctacaccgccaacccccagcttgtagcggcggagcccagtgccagcttccgggggggtgggcgactgatccgtgtcaggggcaccggcctagacgtggtgcagcggcccctactgtctgtgtggctggaggctgacgcagaggtgcaggcttccagggcccagccccaggacccacagccaaggaggagctgtggagcccctgctgcggacccccaggcttgtatccagctcggtggggggctgctgcagtgctccaccgtctgctccgtcaactcgtccagcctcctcctgtgccggagccctgctgtaccagacagagcccacccgcagcgggtcttcttcaccctagacaacgtgcaagtggacttcgccagtgccagtgggggccagggcttcctgtaccagcccaacccccgcctggcacccctcagccgcgaggggcctgcccgcccctaccgcctcaagccaggccatgtcctggatgtggagggcgagggcctcaacctgggcatcagcaaggaggaggtgcgcgtgcacatcggccgcggcgagtgcctggtgaagacgctcacgcgcacccacctgtactgcgagccgcctgcgcacgccccgcagcctgccaatggctccggcctgccacagttcgtggtgcagatgggcaatgtgcagctggccctgggccctgtgcagtacgaggctgaacccccgctgtctgcctttcccgtggaggcccaggcaggcgtgggcatgggtgctgcagtgctgattgccgccgtgctcctcctcaccctcatgtacaggcacaagagcaagcaggccctgcgggactaccagaaggtgctagtgcagctggagagcctggagaccggcgtgggagaccagtgccgcaaggagttcacagacctcatgacggagatgaccgacctcagcagcgacctggagggcagcgggatccccttcctggactaccgcacctacgccgagcgcgccttcttccctggccatggcggttgcccgctgcagcccaagcctgaggggccaggggaggacggccactgtgccactgtgcgccagggcctcacgcagctctccaacctgctcaacagcaagctcttcctcctcacgctcatccacaccctggaggagcagcccagcttttcccagagggatcgctgccatgtggcttcgctgctgtcgctagcgctacacggcaagctggagtacctgacggacatcatgaggaccctgctgggtgacctggcggcccattacgtgcacaggaaccccaagctcatgctacgcaggacagagaccatggtggagaaactgctcaccaactggctgtccatctgcctgtacgccttcctgagggaggtggctggtgaaccactgtacatgctcttccgggccatccagtaccaggtggacaaaggccccgtggacgccgtgacaggcaaggccaaacggaccctgaatgatagccgcttgctgcgggaggacgtggagttccagcccctgacgctgatggtgctggtggggcccggggctggcggggccgcaggcagcagcgagatgcagcgcgtgccagcccgggtgctcgacacggacaccatcacccaggtcaaggagaaggtgttggaccaagtctacaagggcacccccttctcccagaggccctcagtgcatgccctagaccttgagtggcgctcaggcctggctggtcacctgaccctatcggacgaagacttgacctccgtgacccaaaaccactggaagagactcaacaccttgcaacactacaaggtcccagatggagcaacagtggggctcgtccctcagctgcaccgtggcagcaccatctcccagagcctggcccagaggtgccccttgggagagaacatacccacgctggaggatggcgaggaggggggggtgtgcctctggcacctggtgaaagccaccgaggagccagaaggggccaaggtgcggtgcagcagcctgcgggagcgcgagccagcaagggccaaggccattccggaaatctacctcacccgtctgctgtccatgaagggcacgctgcagaagtttgtggacgacaccttccaggccattctcagcgtgaaccggcccatccccatcgccgtcaagtacctgtttgaccttctggatgagctagcagagaagcacggcatcgaggacccagggaccctgcacatctggaagaccaacagtctgctgctgcggttctgggtgaatgccttgaagaacccacagctcatctttgatgtacgggtgtcggacaatgtggacgccatccttgctgtcatcgcccagaccttcattgactcctgtaccacctcggagcataaagtgggccgggattccccagtgaacaaactgctctacgcccgggagatcccacgctacaagcagatggtggagaggtactatgcggacattcgccagagctctccggcgagctaccaggagatgaactctgctttggctgagctctccgggaactacacttctgctccccactgtctggaggctctgcaagaactctacaaccacatccacaggtactatgatcagattatcagtgccctggaggaggaccctgtgggccagaagctgcagctggcctgccgcctgcagcaggtcgccgccctggtggaaaacaaagtgactgacctgtgagctctggctcagacagcagcaagccggatccaccaacaccgcagcgccttatgaccccggaaccgagccagccactgaggggagctggcagagcctgggggcacagggtgcaaagccaggcactgtgcccagcagtgggctccctgcctgccacctcccctgccagcccacccaccttccccccacctgagattgtttctaatttataaggatccccctccttccccctctccccattgtatttatttgcctgctggaaaatcacatccggaaataaaatagaaatatgtctttttattttattttg

SEQ ID NO: 16155 - DNA, 7346 bp, Homo sapiens
  source 1..7346: mol_type = unassigned DNA
gcgaggaggaaacggtgccggagcgcgcagggcttgctgccgccaccgccgctgcacaggctgccggagcgagcctgccgcgcgccgccctccccgctctccttcctgggcgagctgcggggatggggcggccgcgggagcccgagcgcgcgcaggaaccgccgccgccgccgcccgcgtctccgttgccgcgcgcctgagccgccgtcgccgccgcgcgccctgcccgggggcggcccccccagccccatggaggtctcccggaggaaggcgccgccgcgccccccgcgccccgcagcgccactgcccctgctcgcctatctgctggcactggcggctcccggccggggcgcggacgagcccgtgtggcggtcggagcaagccatcggagccatcgcggcgagccaggaggacggcgtgtttgtggcgagcggcagctgcctggaccagctggactacagcctggagcacagcctctcgcgcctgtaccgggaccaagcgggcaactgcacagagccggtctcgctggcgccccccgcgcggccccggcccgggagcagcttcagcaagctgctgctgccctaccgcgagggggcggccggcctcggggggctgctgctcaccggctggaccttcgaccggggcgcctgcgaggtgcggcccctgggcaacctgagccgcaactccctgcgcaacggcaccgaggtggtgtcgtgccacccgcagggctcgacggccggcgtggtgtaccgcgcgggccggaacaaccgctggtacctggcggtggccgccacctacgtgctgcctgagccggagacggcgagccgctgcaaccccgcggcatccgaccacgacacggccatcgcgctcaaggacacggaggggcgcagcctggccacgcaggagctggggcgcctcaagctgtgcgagggcgcgggcagcctgcacttcgtggacgcctttctctggaacggcagcatctacttcccctactacccctacaactacacgagcggcgctgccaccggctggcccagcatggcgcgcatcgcgcagagcaccgaggtgctgttccagggccaggcatccctcgactgcggccacggccaccccgacggccgccgcctgctcctctcctccagcctagtggaggccctggacgtctgggcgggagtgttcagcgcggccgctggagagggccaggagcggcgctcccccaccaccacggcgctctgcctcttcagaatgagtgagatccaggcgcgcgccaagagggtcagctgggacttcaagacggccgagagccactgcaaagaaggggatcaacctgaaagagtccaaccaatcgcatcatctaccttgatccattccgacctgacatccgtttatggcaccgtggtaatgaacaggactgttttattcttggggactggagatggccagttacttaaggttattcttggtgagaatttgacttcaaattgtccagaggttatctatgaaattaaagaagagacacctgttttctacaaactcgttcctgatcctgtgaagaatatctacatttatctaacagctgggaaagaggtgaggagaattcgtgttgcaaactgcaataaacataaatcctgttcggagtgtttaacagccacagaccctcactgcggttggtgccattcgctacaaaggtgcacttttcaaggagattgtgtacattcagagaacttagaaaactggctggatatttcgtctggagcaaaaaagtgccctaaaattcagataattcgaagcagtaaagaaaagactacagtgactatggtgggaagcttctctccaagacactcaaagtgcatggtgaagaatgtggactctagcagggagctctgccagaataaaagtcagcccaaccggacctgcacctgtagcatcccaaccagagcaacctacaaagatgtttcagttgtcaacgtgatgttctccttcggttcttggaatttatcagacagattcaactttaccaactgctcatcattaaaagaatgcccagcatgcgtagaaactggctgcgcgtggtgtaaaagtgcaagaaggtgtatccaccccttcacagcttgcgacccttctgattatgagagaaaccaggaacagtgtccagtggctgtcgagaagacatcaggaggaggaagacccaaggagaacaaggggaacagaaccaaccaggctttacaggtcttctacattaagtccattgagccacagaaagtatcgacattagggaaaagcaacgtgatagtaacgggagcaaactttacccgggcatcgaacatcacaatgatcctgaaaggaaccagtacctgtgataaggatgtgatacaggttagccatgtgctaaatgacacccacatgaaattctctcttccatcaagccggaaagaaatgaaggatgtgtgtatccagtttgatggtgggaactgctcttctgtgggatccttatcctacattgctctgccacattgttcccttatatttcctgctaccacctggatcagtggtggtcaaaatataaccatgatgggcagaaattttgatgtaattgacaacttaatcatttcacatgaattaaaaggaaacataaatgtctctgaatattgtgtggcgacttactgcgggtttttagcccccagtttaaagagttcaaaagtgcgcacgaatgtcactgtgaagctgagagtacaagacacctacttggattgtggaaccctgcagtatcgggaggaccccagattcacggggtatcgggtggaatccgaggtggacacagaactggaagtgaaaattcaaaaagaaaatgacaacttcaacatttccaaaaaagacattgaaattactctcttccatggggaaaatgggcaattaaattgcagttttgaaaatattactagaaatcaagatcttaccaccatcctttgcaaaattaaaggcatcaagactgcaagcaccattgccaactcttctaagaaagttcgggtcaagctgggaaacctggagctctacgtcgagcaggagtcagttccttccacatggtattttctgattgtgctccctgtcttgctagtgattgtcatttttgcggccgtgggggtgaccaggcacaaatcgaaggagctgagtcgcaaacagagtcaacaactagaattgctggaaagcgagctccggaaagagatacgtgacggctttgctgagctgcagatggataaattggatgtggttgatagttttggaactgttcccttccttgactacaaacattttgctctgagaactttcttccctgagtcaggtggcttcacccacatcttcactgaagatatgcataacagagacgccaacgacaagaatgaaagtctcacagctttggatgccctaatctgtaataaaagctttcttgttactgtcatccacacccttgaaaagcagaagaacttttctgtgaaggacaggtgtctgtttgcctccttcctaaccattgcactgcaaaccaagctggtctacctgaccagcatcctagaggtgctgaccagggacttgatggaacagtgtagtaacatgcagccgaaactcatgctgagacgcacggagtccgtcgtcgaaaaactcctcacaaactggatgtccgtctgcctttctggatttctccgggagactgtcggagagcccttctatttgctggtgacgactctgaaccagaaaattaacaagggtcccgtggatgtaatcacttgcaaagccctgtacacacttaatgaagactggctgttgtggcaggttccggaattcagtactgtggcattaaacgtcgtctttgaaaaaatcccggaaaacgagagtgcagatgtctgtcggaatatttcagtcaatgttctcgactgtgacaccattggccaagccaaagaaaagattttccaagcattcttaagcaaaaatggctctccttatggacttcagcttaatgaaattggtcttgagcttcaaatgggcacacgacagaaagaacttctggacatcgacagttcctccgtgattcttgaagatggaatcaccaagctaaacaccattggccactatgagatatcaaatggatccactataaaagtctttaagaagatagcaaattttacttcagatgtggagtactcggatgaccactgccatttgattttaccagattcggaagcattccaagatgtgcaaggaaagagacatcgagggaagcacaagttcaaagtaaaagaaatgtatctgacaaagctgctgtcgaccaaggtggcaattcattctgtgcttgaaaaactttttagaagcatttggagtttacccaacagcagagctccatttgctataaaatacttttttgactttttggacgcccaggctgaaaacaaaaaaatcacagatcctgacgtcgtacatatttggaaaacaaacagccttcctcttcgcttctgggtaaacatcctgaagaaccctcagtttgtctttgacattaagaagacaccacatatagacggctgtttgtcagtgattgcccaggcattcatggatgcattttctctcacagagcagcaactagggaaggaagcaccaactaataagcttctctatgccaaggatatcccaacctacaaagaagaagtaaaatcttattacaaagcaatcagggatttgcctccattgtcatcctcagaaatggaagaatttttaactcaggaatctaagaaacatgaaaatgaatttaatgaagaagtggccttgacagaaatttacaaatacatcgtaaaatattttgatgagattctaaataaactagaaagagaacgagggctggaagaagctcagaaacaactcttgcatgtaaaagtcttatttgatgaaaagaagaaatgcaagtggatgtaagcactctggggcctggcttaatctggcaaagttcttcagacgacttgggagcaaaatggctgcttgagctactctgtgtcgttaatttgttgtttgcacataggttccactttgggcactgtctttttaagagaccaaggcacatgcacagcttttagaaagcataccaacccttgtgcctgtgtgtataccgtgggaacccttctgtaaatagagttgaagtggttgttgcaaacagcctccttgtttacagagaatacaaggccagtaagcgaatgtcagtattgtaactacagtctccacttaagcacaatgatataagtggttttgtttgaaaactacagctatgtagcacttgtgctacactgcacctctgcattgtaaagggatactgccagtgctcaaaacaaaatgtgaaatgagtcatttggaaacaaggtgggggtgttagggcaacctcgaggatttgcagcattgaaactttccccagtagttcttggaaaagctgaccgcagaatttggtagtgtacacttagcatttgtgagtgtgtgtgtgtgtttaaaccaaaaactaacagtgttgcaacattgttgaaagggctcgtgtttttcagtggtcatcaactgcactccatcaaactcacctccatttcaccaaggagctctaaagtaaggagagtgggctttatttaaatgaacagcattttaaccagatactttgtcctaatgtatgttccttttcttcatctgttttttcatactaaatgtatttgatagtggacatgttggatattatacaaaaaaatcattaattcatttctgttccaaaacctttgatcagaacgatctgtggaagagtaactccatttctatatgagtgagtgtctccttgctttagatttctggtgaaccctgtggttatgaatacttgtgtgtgatttaaaaaaaaaaagatacattttacattttatcgaattgctgttcacactggagtattatatataaatatatatatttgaggcccaaggcctgaaaaatattagtatacaacttggtatcttagtcttactatgtactttttgaaagtattcctcgcaggagaaagaatttaaaatacccattttattcatgcctttctttttaaagaattctctatccagttatactgtagtctttttagtgctgattttttaattcctgaatttttgctgctcatgaccagttttaataccactgtgttttccttctattaaaccagaagaagtaaacagcataattggcaactcttgagcttttcttgtggcaggcaccttttacccttggtgctccaaatcccccatctaggaaagaaaattttttcaagtcaaataacattgatcacatattccttgaaatcatttaccaacactgtatggagcattaggatttaaatatgaatttgtcttaaaggcaattcctttttgcttctgtattatctggaaaagcatgagagaggtgacacctcaacaaactgatcagagaaaataagcagttactaccctgataggcaccttcccaatcctgttgcttttgaccattgtctgtccaacggacacacctcaaacaaacaaaactaccaaatagatgacagatcagaataaaggtgagaggtctggtccccattgaaggctgctacagtcttcaaagaggtgaaggagttcataagagaacaacagtaggaaagttgagagccaagggtaggagagttgcccaaaagacttcccctactactttagggtactgaaaactcaaaggatcagctacagctttatctaagtatttactaaatgctacatgagggtgtccctgtccagctttctggcacatgagtcctgtgtggagagttacctcctcttccagggactgtgctgttgggaactttgggcaagtcacttacctctttgtgcctcaatttctgtataatatttctaagctacctcactgaggtggtatgaagattcactaatgtatgtagcgtgtttgtcaatcctccagtgaaaagcactatctagatcacattttggatcacattagccaaatgcagtaaatggccaaattagatgtgtgctgaagacaatcagtcactgggtctatattaaacagcaaccagagcaacaaatggcaaacaatttctattttcaagtttctttgcatatttttttggtgcaaaaccatttataaacttttttttctaacactagtgtctacagcagcattcaaaaaaattctgttaccttttctgtattaggatttaaagtctatttcttattgtatacctgattgaagctgttcttggagatgaatgttttaaatgtctatatccaaaaaataaacattttgatgtaactgtg

SEQ ID NO: 16156 - DNA, 705 bp, Homo sapiens
  source 1..705: mol_type = unassigned DNA
gcgggactcagagtcaccaccctggggctgaaccagaaagaaggggatcaacctgaaagagtccaaccaatcgcatcatctaccttgatccattccgacctgacatccgtttatggcaccgtggtaatgaacaggactgttttattcttggggactggagatggccagttacttaaggttattcttggtgagaatttgacttcaaattgtccagaggttatctatgaaattaaagaagagacacctgttttctacaaactcgttcctgatcctgtgaagaatatctacatttatctaacagctgggaaagaggtgaggagaattcgtgttgcaaactgcaataaacataaatcctgttcggagtgtttaacagccacagaccctcactgcggttggtgccattcgctacaaaggtatctcctgaattctttctcaccaactcgcatttttgaaaaagtgtcatgcggcagaacacttgttgccctactttaacgatccattccagtgacctgagggaactgatctcttcctcgactaaaatcttgttgtgcaatcctaatgaattctcgaaggtgtttccagcggcgtccgtgctatgcaatcactggacccgggagctccccagtctcggggcgggaggggcaggtgtgcagccttcaggagaacgggagagagcaggcaggtttggcttttactttctccaga

SEQ ID NO: 16157 - DNA, 527 bp, Homo sapiens
  source 1..527: mol_type = unassigned DNA
cccatacagtctgatgctcatggcaagagagacgtgaccaaaagctgccgtggaagtcccaaaaagaggcactactctcagcctgggaggatctgggaggcttcagagagaaagaaggggatcaacctgaaagagtccaaccaatcgcatcatctaccttgatccattccgacctgacatccgtttatggcaccgtggtaatgaacaggactgttttattcttggggactggagatggccagttacttaaggttattcttggtgagaatttgacttcaaattgtccagaggttatctatgaaattaaagaagagacacctgttttctacaaactcgttcctgatcctgtgaagaatatctacatttatctaacagctgggaaagaggtgaggagaattcgtgttgcaaactgcaataaacataaatcctgttcggagtgtttaacagccacagaccctcactgcggttggtgccattcgctacaaaggtgcacttttcaaggagattgtgtacattcagagaactta

SEQ ID NO: 16158 - DNA, 524 bp, Homo sapiens
  source 1..524: mol_type = unassigned DNA
tttttttttttttttgccttcttttaaatgcttgcatgccacatcacagagggaaattctaggatgtgaacattgtcctaaaacgcaggaattaagtcagttttctgtgttgctagatgcccagcatgcgtagaaactggctgcgcgtggtgtaaaagtgcaagaaggtgtatccaccccttcacagcttgcgacccttctgattatgagagaaaccaggaacagtgtccagtggctgtcgagaagacatcaggaggaggaagacccaaggagaacaaggggaacagaaccaaccaggctttacaggtcagaccctatttttgtgtggttgaggggaaaacctgtctttgaatgaccatgaccacaactcatactactttgggttccttaaaaaaattctctattttactttctaccaaaattcccttttgtgtctttggttttttaaccaagtttcacttaattagcgcaatacatcaatggctggacactcacataaaataaattaaaactctgtaattatg

SEQ ID NO: 16159 - DNA, 742 bp, Homo sapiens
  source 1..742: mol_type = unassigned DNA
aaaggcatcaagactgcaagcaccattgccaactcttctaagaaagttcgggtcaagctgggaaacctggagctctacgtcgagcaggagtcagttccttccacatggtattttctgattgtgctccctgtcttgctagtgattgtcatttttgcggccgtgggggtgaccaggcacaaatcgaaggagctgagtcgcaaacagagtcaacaactagaattgctggaaagcgagctccggaaagagatacgtgacggctttgctgagctgcagatggataaattggatgtggttgatagttttggaactgttcccttccttgactacaaacattttgctctgagaactttcttccctgagggctctgaggagtcgtctacttaaccttttgggttgctggtcttacctatgttctcacgcctccattttctcacccactcactcagccttctccatttaccctcccaagtctttggcgaggtacactcatcctgcgtatcatcactgccatgtcctgataccccagctctgccatattgcccttcttttttgcggtatgatgaccacatagaggcccaacctcttaaacacatcaataccaatgatcacatttcaatctagacttctaagcaacggctgaaatctctccaggccaaaggagagtttgtatcaccttaccagaagcttctccggaacaattggccagaagcctagagttcagaaacccagacacatgcagtaa

SEQ ID NO: 16160 - DNA, 1894 bp, Homo sapiens
  source 1..1894: mol_type = unassigned DNA
agccaactgggatctttggttacaagtgaaggttatttgatttagctttcacttgtaaaatgacggccgtgggggtgaccaggcacaaatcgaaggagctgagtcgcaaacagagtcaacaactagaattgctggaaagcgagctccggaaagagatacgtgacggctttgctgagctgcagatggataaattggatgtggttgatagttttggaactgttcccttccttgactacaaacattttgctctgagaactttcttccctgagtcaggtggcttcacccacatcttcactgaagatatgcataacagagacgccaacgacaagaatgaaagtctcacagctttggatgccctaatctgtaataaaagctttcttgttactgtcatccacacccttgaaaagcagaagaacttttctgtgaaggacaggtgtctgtttgcctccttcctaaccattgcactgcaaaccaagctggtctacctgaccagcatcctagaggtgctgaccagggacttgatggaacagtgtagtaacatgcagccgaaactcatgctgagacgcacggagtccgtcgtcgaaaaactcctcacaaactggatgtccgtctgcctttctggatttctccgggagactgtcggagagcccttctatttgctggtgacgactctgaaccagaaaattaacaagggtcccgtggatgtaatcacttgcaaagccctgtacacacttaatgaagactggctgttgtggcaggttccggaattcagtactgtggcattaaacgtcgtctttgaaaaaatcccggaaaacgagagtgcagatgtctgtcggaatatttcagtcaatgttctcgactgtgacaccattggccaagccaaagaaaagattttccaagcattcttaagcaaaaatggctctccttatggacttcagcttaatgaaattggtcttgagcttcaaatgggcacacgacagaaagaacttctggacatcgacagttcctccgtgattcttgaagatggaatcaccaagctaaacaccattggccactatgagatatcaaatggatccactataaaagtctttaagaagatagcaaattttacttcagatgtggagtactcggatgaccactgccatttgattttaccagattcggaagcattccaagatgtgcaaggaaagagacatcgagggaagcacaagttcaaagtaaaagaaatgtatctgacaaagctgctgtcgaccaagccttcctcttcgcttctgggtaaacatcctgaagaaccctcagtttgtctttgacattaagaagacaccacatatagacggctgtttgtcagtgattgcccaggcattcatggatgcattttctctcacagagcagcaactagggaaggaagcaccaactaataagcttctctatgccaaggatatcccaacctacaaagaagaagtaaaatcttattacaaagcaatcagggatttgcctccattgtcatcctcagaaatggaagaatttttaactcaggaatctaagaaacatgaaaatgaatttaatgaagaagtggccttgacagaaatttacaaatacatcgtaaaatattttgatgaggtaagattttaaataacattgtttttaacctttgaatcaggcacaaggatgtggttatagcattctgtcagtttcagaacagctctggcatcccaaaaggccagaaagggaagccaggaagcctgtctgagatgggggatcctggcactgagccagaccctgtacatggctgccccccttacagttttatcatgctgcccacatttggaccagcctgaatttacatttgagttcatggggcctacagccaccctgactcaagttaactttgatg

SEQ ID NO: 16161 - DNA, 557 bp, Homo sapiens
  source 1..557: mol_type = unassigned DNA
tttagctttcacttgtaaaatgagtaaggttttggtttttttctgctgcattttggcatcttcctcttcagagtgacccctcactgggaaattttcttataagatccagctttttaatgctattttctagtttcattctagctcctgctctctgtccctatctgttttgtttttgtttttgtttttaagaactgtaaagattgctatttgttttcatttttggtttttgagttaccatgtccctctgatgcagcatctctgtctcttagcggccgtgggggtgaccaggcacaaatcgaaggagctgagtcgcaaacagagtcaacaactagaattgctggaaagcgagctccggaaagagatacgtgacggctttgctgagctgcagatggataaattggatgtggttgatagttttggaactgttcccttccttgactacaaacattttgctctgagaactttcttccctgagaacagagacgccaacgacaagaatgaaagtctcacagctttggatgccctaatctgtaataaaagctttcttgttactgtca

SEQ ID NO: 16162 - DNA, 2455 bp, Homo sapiens
  source 1..2455: mol_type = unassigned DNA
acttgtaaaatgagtaaggttttggtttttttctgctgcattttggcatcttcctcttcagagtgacccctcactgggaaattttcttataagatccagctttttaatgctattttctagtttcattctagctcctgctctctgtccctatctgttttgtttttgtttttgtttttaagaactgtaaagattgctatttgttttcatttttggtttttgagttaccatgtccctctgatgcagcatctctgtctcttagcggccgtgggggtgaccaggcacaaatcgaaggagctgagtcgcaaacagagtcaacaactagaattgctggaaagcgagctccggaaagagatacgtgacggctttgctgagctgcagatggataaattggatgtggttgatagttttggaactgttcccttccttgactacaaacattttgctctgagaactttcttccctgagtcaggtggcttcacccacatcttcactgaagatatgcataacagagacgccaacgacaagaatgaaagtctcacagctttggatgccctaatctgtaataaaagctttcttgttactgtcatccacacccttgaaaagcagaagaacttttctgtgaaggacaggtgtctgtttgcctccttcctaaccattgcactgcaaaccaagctggtctacctgaccagcatcctagaggtgctgaccagggacttgatggaacagtgtagtaacatgcagccgaaactcatgctgagacgcacggagtccgtcgtcgaaaaactcctcacaaactggatgtccgtctgcctttctggatttctccgggagactgtcggagagcccttctatttgctggtgacgactctgaaccagaaaattaacaagggtcccgtggatgtaatcacttgcaaagccctgtacacacttaatgaagactggctgttgtggcaggttccggaattcagtactgtggcattaaacgtcgtctttgaaaaaatcccggaaaacgagagtgcagatgtctgtcggaatatttcagtcaatgttctcgactgtgacaccattggccaagccaaagaaaagattttccaagcattcttaagcaaaaatggctctccttatggacttcagcttaatgaaattggtcttgagcttcaaatgggcacacgacagaaagaacttctggacatcgacagttcctccgtgattcttgaagatggaatcaccaagctaaacaccattggccactatgagatatcaaatggatccactataaaagtctttaagaagatagcaaattttacttcagatgtggagtactcggatgaccactgccatttgattttaccagattcggaagcattccaagatgtgcaaggaaagagacatcgagggaagcacaagttcaaagtaaaagaaatgtatctgacaaagctgctgtcgaccaaggtggcaattcattctgtgcttgaaaaactttttagaagcatttggagtttacccaacagcagagctccatttgctataaaatacttttttgactttttggacgcccaggctgaaaacaaaaaaatcacagatcctgacgtcgtacatatttggaaaacaaacagccttcctcttcgcttctgggtaaacatcctgaagaaccctcagtttgtctttgacattaagaagacaccacatatagacggctgtttgtcagtgattgcccaggcattcatggatgcattttctctcacagagcagcaactagggaaggaagcaccaactaataagcttctctatgccaaggatatcccaacctacaaagaagaagtaaaatcttattacaaagcaatcagggatttgcctccattgtcatcctcagaaatggaagaatttttaactcaggaatctaagaaacatgaaaatgaatttaatgaagaagtggccttgacagaaatttacaaatacatcgtaaaatattttgatgagattctaaataaactagaaagagaacgagggctggaagaagctcagaaacaactcttgcatgtaaaagtcttatttgatgaaaagaagaaatgcaagtggatgtaagcactctggggcctggcttaatctggcaaagttcttcagacgacttgggagcaaaatggctgcttgagctactctgtgtcgttaatttgttgtttgcacataggttccactttgggcactgtctttttaagagaccaaggcacatgcacagcttttagaaagcataccaacccttgtgcctgtgtgtataccgtgggaacccttctgtaaatagagttgaagtggttgttgcaaacagcctccttgtttacagagaatacaaggccagtaagcgaatgtcagtattgtaactacagtctccacttaagcacaatgatataagtggttttgtttgaaaactacagctatgtagcacttgtgctacactgca

SEQ ID NO: 16163 - DNA, 564 bp, Homo sapiens
  source 1..564: mol_type = unassigned DNA
acgttttcatttttagcccagtgactgcctgatgttcatagtgttatcatcatcactatcatctctattattattactttgaatttttattgtgggttttttttggatcatgaattcaatattgaataattcattgtcttggaaaacccattgtgggtctactttctaactttaaacttatatatgattttgtattatactatatatttttttctttttatcagaacagagacgccaacgacaagaatgaaagtctcacagctttggatgccctaatctgtaataaaagctttcttgttactgtcatccacacccttgaaaagcagaagaacttttctgtgaaggacaggtgtctgtttgcctccttcctaaccattgcactgcaaaccaagctggtctacctgaccagcatcctagaggtgctgaccagggacttgatggaacagtgtagtaacatgcagccgaaactcatgctgagacgcacggagtccgtcgtcgaaaaactcctcacaaactggatgtccgtctgcctttctggatttctccgggagactgtcggagagc

SEQ ID NO: 16164 - DNA, 1813 bp, Homo sapiens
  source 1..1813: mol_type = unassigned DNA
acagtgctgattcaagagcgtctcgagcactctgagtggtgagggggcggctcggctcgccaggaggaagtggcatccagccagtcggcgatactttcactttcagtggaataattcccgctggtgcaggggtctgatgtccctccaccaggtgctcaagggggtctgggacaccgacagccctagtcctcctgtcctaccccacagacgtttagtgggtgacagtagctccgtgaccgccaggagactgtcggagagcccttctatttgctggtgacgactctgaaccagaaaattaacaagggtcccgtggatgtaatcacttgcaaagccctgtacacacttaatgaagactggctgttgtggcaggttccggaattcagtactgtggcattaaacgtcgtctttgaaaaaatcccggaaaacgagagtgcagatgtctgtcggaatatttcagtcaatgttctcgactgtgacaccattggccaagccaaagaaaagattttccaagcattcttaagcaaaaatggctctccttatggacttcagcttaatgaaattggtcttgagcttcaaatgggcacacgacagaaagaacttctggacatcgacagttcctccgtgattcttgaagatggaatcaccaagctaaacaccattggccactatgagatatcaaatggatccactataaaagtctttaagaagatagcaaattttacttcagatgtggagtactcggatgaccactgccatttgattttaccagattcggaagcattccaagatgtgcaaggaaagagacatcgagggaagcacaagttcaaagtaaaagaaatgtatctgacaaagctgctgtcgaccaaggtggcaattcattctgtgcttgaaaaactttttagaagcatttggagtttacccaacagcagagctccatttgctataaaatacttttttgactttttggacgcccaggctgaaaacaaaaaaatcacagatcctgacgtcgtacatatttggaaaacaaacagccttcctcttcgcttctgggtaaacatcctgaagaaccctcagtttgtctttgacattaagaagacaccacatatagacggctgtttgtcagtgattgcccaggcattcatggatgcattttctctcacagagcagcaactagggaaggaagcaccaactaataagcttctctatgccaaggatatcccaacctacaaagaagaagtaaaatcttattacaaagcaatcagggatttgcctccattgtcatcctcagaaatggaagaatttttaactcaggaatctaagaaacatgaaaatgaatttaatgaagaagtggccttgacagaaatttacaaatacatcgtaaaatattttgatgagattctaaataaactagaaagagaacgagggctggaagaagctcagaaacaactcttgcatgtaaaagtcttatttgatgaaaagaagaaatgcaagtggatgtaagcactctggggcctggcttaatctggcaaagttcttcagacgacttgggagcaaaatggctgcttgagctactctgtgtcgttaatttgttgtttgcacataggttccactttgggcactgtctttttaagagaccaaggcacatgcacagcttttagaaagcataccaacccttgtgcctgtgtgtataccgtgggaacccttctgtaaatagagttgaagtggttgttgcaaacagcctccttgtttacagagaatacaaggccagtaagcgaatgtcagtattgtaactacagtctccacttaagcacaa

SEQ ID NO: 16165 - DNA, 610 bp, Homo sapiens
  source 1..610: mol_type = unassigned DNA
ttaacaagggtcccgtggatgtaatcacttgcaaagccctgtacacacttaatgaagactggctgttgtggcaggttccggaattcagtactgtggcattaaacgtcgtctttgaaaaaatcccggaaaacgagagtgcagatgtctgtcggaatatttcagtcaatgttctcgactgtgacaccattggccaagccaaagaaaagattttccaagcattcttaagcaaaaatggctctccttatggacttcagcttaatgaaattggtcttggtaaggcggtgcgggagctatgtggtcccaggccctgatgagtgtccctccctgcctgccctccctccctgtcccccctccctgcccccaccagcttccattcagtgacacttacacagccaggttgttcctggagggcatgtctaggggccaagagactgctttggtctctcatgggcatcctgattcttcgaaggaagcacggtccttcaaagatggcgtttgttgttgttgtctttaaatattacgtctgtaaatcagattgatgagattgcaggccctgagactgcacggaatcaccttgcatcatgaaatacagaaaggtgtcaacacagtg

SEQ ID NO: 16166 - DNA, 2127 bp, Homo sapiens
  source 1..2127: mol_type = unassigned DNA
ggaagaacacaatggatctggtgctaaaaagatgccttcttcatttggctgtgataggtgctttgctggctgtgggggctacaaaagtacccagaaaccaggactggcttggtgtctcaaggcaactcagaaccaaagcctggaacaggcagctgtatccagagtggacagaagcccagagacttgactgctggagaggtggtcaagtgtccctcaaggtcagtaatgatgggcctacactgattggtgcaaatgcctccttctctattgccttgaacttccctggaagccaaaaggtattgccagatgggcaggttatctgggtcaacaataccatcatcaatgggagccaggtgtggggaggacagccagtgtatccccaggaaactgacgatgcctgcatcttccctgatggtggaccttgcccatctggctcttggtctcagaagagaagctttgtttatgtctggaagacctggggccaatactggcaagttctagggggcccagtgtctgggctgagcattgggacaggcagggcaatgctgggcacacacaccatggaagtgactgtctaccatcgccggggatcccggagctatgtgcctcttgctcattccagctcagccttcaccattactgaccaggtgcctttctccgtgagcgtgtcccagttgcgggccttggatggagggaacaagcacttcctgagaaatcagcctctgacctttgccctccagctccatgaccccagtggctatctggctgaagctgacctctcctacacctgggactttggagacagtagtggaaccctgatctctcgggcacttgtggtcactcatacttacctggagcctggcccagtcactgcccaggtggtcctgcaggctgccattcctctcacctcctgtggctcctccccagttccaggcaccacagatgggcacaggccaactgcagaggcccctaacaccacagctggccaagtgcctactacagaagttgtgggtactacacctggtcaggcgccaactgcagagccctctggaaccacatctgtgcaggtgccaaccactgaagtcataagcactgcacctgtgcagatgccaactgcagagagcacaggtatgacacctgagaaggtgccagtttcagaggtcatgggtaccacactggcagagatgtcaactccagaggctacaggtatgacacctgcagaggtatcaattgtggtgctttctggaaccacagctgcacaggtaacaactacagagtgggtggagaccacagctagagagctacctatccctgagcctgaaggtccagatgccagctcaatcatgtctacggaaagtattacaggttccctgggccccctgctggatggtacagccaccttaaggctggtgaagagacaagtccccctggattgtgttctgtatcgatatggttccttttccgtcaccctggacattgtccagggtattgaaagtgccgagatcctgcaggctgtgccgtccggtgagggggatgcatttgagctgactgtgtcctgccaaggcgggctgcccaaggaagcctgcatggagatctcatcgccagggtgccagccccctgcccagcggctgtgccagcctgtgctacccagcccagcctgccagctggttctgcaccagatactgaagggtggctcggggacatactgcctcaatgtgtctctggctgataccaacagcctggcagtggtcagcacccagcttatcatgcctgtgcctgggattcttctcacaggtcaagaagcaggccttgggcaggttccgctgatcgtgggcatcttgctggtgttgatggctgtggtccttgcatctctgatatataggcgcagacttatgaagcaagacttctccgtaccccagttgccacatagcagcagtcactggctgcgtctaccccgcatcttctgctcttgtcccattggtgagaacagccccctcctcagtgggcagcaggtctgagtactctcatatgatgctgtgattttcctggagttgacagaaacacctatatttcccccagtcttccctgggagactactattaactgaaataaatactcagagcctga

SEQ ID NO: 16167 - DNA, 2516 bp, Homo sapiens
  source 1..2516: mol_type = unassigned DNA
gggggctagacaagtttcttccccggtggggcggctgaacactcttcccaagtacctgctttgggtccaagtttcctacctatgtctctagtctgtagggatttcttgatttctaactcactattttcaccaatcctggggaaaatatgtatcgacctaaggttaaattccacctggcccaggagcctcctttggaaaccaggaagccgggaatctcgttgcaaaggaatcctgggcctcagaggagtcgttgcctctgcctcatagcataccccgacactgtctctgttttgggatgcagggttctgtttctgtctttttgagaagttcctggtttaattcactctcccatgataaactgttgtgtctggggcctatcccagtccccccagtgcctttggttgctggagggaagaacacaatggatctggtgctaaaaagatgccttcttcatttggctgtgataggtgctttgctggctgtgggggctacaaaagtacccagaaaccaggactggcttggtgtctcaaggcaactcagaaccaaagcctggaacaggcagctgtatccagagtggacagaagcccagagacttgactgctggagaggtggtcaagtgtccctcaaggtcagtaatgatgggcctacactgattggtgcaaatgcctccttctctattgccttgaacttccctggaagccaaaaggtattgccagatgggcaggttatctgggtcaacaataccatcatcaatgggagccaggtgtggggaggacagccagtgtatccccaggaaactgacgatgcctgcatcttccctgatggtggaccttgcccatctggctcttggtctcagaagagaagctttgtttatgtctggaagacctggggccaatactggcaagttctagggggcccagtgtctgggctgagcattgggacaggcagggcaatgctgggcacacacaccatggaagtgactgtctaccatcgccggggatcccggagctatgtgcctcttgctcattccagctcagccttcaccattactgaccaggtgcctttctccgtgagcgtgtcccagttgcgggccttggatggagggaacaagcacttcctgagaaatcagcctctgacctttgccctccagctccatgaccccagtggctatctggctgaagctgacctctcctacacctgggactttggagacagtagtggaaccctgatctctcgggcacttgtggtcactcatacttacctggagcctggcccagtcactgcccaggtggtcctgcaggctgccattcctctcacctcctgtggctcctccccagttccaggcaccacagatgggcacaggccaactgcagaggcccctaacaccacagctggccaagtgcctactacagaagttgtgggtactacacctggtcaggcgccaactgcagagccctctggaaccacatctgtgcaggtgccaaccactgaagtcataagcactgcacctgtgcagatgccaactgcagagagcacaggtatgacacctgagaaggtgccagtttcagaggtcatgggtaccacactggcagagatgtcaactccagaggctacaggtatgacacctgcagaggtatcaattgtggtgctttctggaaccacagctgcacaggtaacaactacagagtgggtggagaccacagctagagagctacctatccctgagcctgaaggtccagatgccagctcaatcatgtctacggaaagtattacaggttccctgggccccctgctggatggtacagccaccttaaggctggtgaagagacaagtccccctggattgtgttctgtatcgatatggttccttttccgtcaccctggacattgtccagggtattgaaagtgccgagatcctgcaggctgtgccgtccggtgagggggatgcatttgagctgactgtgtcctgccaaggcgggctgcccaaggaagcctgcatggagatctcatcgccagggtgccagccccctgcccagcggctgtgccagcctgtgctacccagcccagcctgccagctggttctgcaccagatactgaagggtggctcggggacatactgcctcaatgtgtctctggctgataccaacagcctggcagtggtcagcacccagcttatcatgcctggtcaagaagcaggccttgggcaggttccgctgatcgtgggcatcttgctggtgttgatggctgtggtccttgcatctctgatatataggcgcagacttatgaagcaagacttctccgtaccccagttgccacatagcagcagtcactggctgcgtctaccccgcatcttctgctcttgtcccattggtgagaacagccccctcctcagtgggcagcaggtctgagtactctcatatgatgctgtgattttcctggagttgacagaaacacctatatttcccccagtcttccctgggagactactattaactgaaataaatactcagagcctga

SEQ ID NO: 16168 - DNA, 1867 bp, Homo sapiens
  source 1..1867: mol_type = unassigned DNA
agtgcctttggttgctggagggaagaacacaatggatctggtgctaaaaagatgccttcttcatttggctgtgataggtgctttgctggctgtgggggctacaaaagggagccaggtgtggggaggacagccagtgtatccccaggaaactgacgatgcctgcatcttccctgatggtggaccttgcccatctggctcttggtctcagaagagaagctttgtttatgtctggaagacctggggccaatactggcaagttctagggggcccagtgtctgggctgagcattgggacaggcagggcaatgctgggcacacacaccatggaagtgactgtctaccatcgccggggatcccggagctatgtgcctcttgctcattccagctcagccttcaccattactgaccaggtgcctttctccgtgagcgtgtcccagttgcgggccttggatggagggaacaagcacttcctgagaaatcagcctctgacctttgccctccagctccatgaccccagtggctatctggctgaagctgacctctcctacacctgggactttggagacagtagtggaaccctgatctctcgggcacttgtggtcactcatacttacctggagcctggcccagtcactgcccaggtggtcctgcaggctgccattcctctcacctcctgtggctcctccccagttccaggcaccacagatgggcacaggccaactgcagaggcccctaacaccacagctggccaagtgcctactacagaagttgtgggtactacacctggtcaggcgccaactgcagagccctctggaaccacatctgtgcaggtgccaaccactgaagtcataagcactgcacctgtgcagatgccaactgcagagagcacaggtatgacacctgagaaggtgccagtttcagaggtcatgggtaccacactggcagagatgtcaactccagaggctacaggtatgacacctgcagaggtatcaattgtggtgctttctggaaccacagctgcacaggtaacaactacagagtgggtggagaccacagctagagagctacctatccctgagcctgaaggtccagatgccagctcaatcatgtctacggaaagtattacaggttccctgggccccctgctggatggtacagccaccttaaggctggtgaagagacaagtccccctggattgtgttctgtatcgatatggttccttttccgtcaccctggacattgtccagggtattgaaagtgccgagatcctgcaggctgtgccgtccggtgagggggatgcatttgagctgactgtgtcctgccaaggcgggctgcccaaggaagcctgcatggagatctcatcgccagggtgccagccccctgcccagcggctgtgccagcctgtgctacccagcccagcctgccagctggttctgcaccagatactgaagggtggctcggggacatactgcctcaatgtgtctctggctgataccaacagcctggcagtggtcagcacccagcttatcatgcctggtcaagaagcaggccttgggcaggttccgctgatcgtgggcatcttgctggtgttgatggctgtggtccttgcatctctgatatataggcgcagacttatgaagcaagacttctccgtaccccagttgccacatagcagcagtcactggctgcgtctaccccgcatcttctgctcttgtcccattggtgagaacagccccctcctcagtgggcagcaggtctgagtactctcatatgatgctgtgattttcctggagttgacagaaacacctatatttcccccagtcttccctgggagactactattaactgaaataaatactcagagcctg

SEQ ID NO: 16169 - DNA, 2757 bp, Homo sapiens
  source 1..2757: mol_type = unassigned DNA
agtttggttcttgggggctagacaagtttcttccccggtggggcggctgaacactcttcccaagtacctgctttgggtccaagtttcctacctatgtctctagtctgtagggatttcttgatttctaactcactattttcaccaatcctggggaaaatatgtatcgacctaaggttaaattccacctggcccaggagcctcctttggaaaccaggaagccgggaatctcgttgcaaaggaatcctgggcctcagaggagtcgttgcctctgcctcatagcataccccgacactgtctctgttttgggatgcagggttctgtttctgtctttttgagaagttcctggtttaattcactctcccatgataaactgttgtgtctggtatgtgttacgcagctgcctttcagttagctcttgcccgggagtgcatcaagatgagagtgacccagtgaaaccagaaactgtcattgagtagcaggatgggaaagcaatgtctagggaccaggatccctttgtcagtttttcctttttcctctcctccggcccctcccaggccttctctgagggagaagaggaagggctatgcaaatgagcacccttttcttatataggggcctatcccagtccccccagtgcctttggttgctggagggaagaacacaatggatctggtgctaaaaagatgccttcttcatttggctgtgataggtgctttgctggctgtgggggctacaaaagtacccagaaaccaggactggcttggtgtctcaaggcaactcagaaccaaagcctggaacaggcagctgtatccagagtggacagaagcccagagacttgactgctggagaggtggtcaagtgtccctcaaggtcagtaatgatgggcctacactgattggtgcaaatgcctccttctctattgccttgaacttccctggaagccaaaaggtattgccagatgggcaggttatctgggtcaacaataccatcatcaatgggagccaggtgtggggaggacagccagtgtatccccaggaaactgacgatgcctgcatcttccctgatggtggaccttgcccatctggctcttggtctcagaagagaagctttgtttatgtctggaagacctggggccaatactggcaagttctagggggcccagtgtctgggctgagcattgggacaggcagggcaatgctgggcacacacaccatggaagtgactgtctaccatcgccggggatcccggagctatgtgcctcttgctcattccagctcagccttcaccattactgaccaggtgcctttctccgtgagcgtgtcccagttgcgggccttggatggagggaacaagcacttcctgagaaatcagcctctgacctttgccctccagctccatgaccccagtggctatctggctgaagctgacctctcctacacctgggactttggagacagtagtggaaccctgatctctcgggcacttgtggtcactcatacttacctggagcctggcccagtcactgcccaggtggtcctgcaggctgccattcctctcacctcctgtggctcctccccagttccaggcaccacagatgggcacaggccaactgcagaggcccctaacaccacagctggccaagtgcctactacagaagttgtgggtactacacctggtcaggcgccaactgcagagccctctggaaccacatctgtgcaggtgccaaccactgaagtcataagcactgcacctgtgcagatgccaactgcagagagcacaggtatgacacctgagaaggtgccagtttcagaggtcatgggtaccacactggcagagatgtcaactccagaggctacaggtatgacacctgcagaggtatcaattgtggtgctttctggaaccacagctgcacaggtaacaactacagagtgggtggagaccacagctagagagctacctatccctgagcctgaaggtccagatgccagctcaatcatgtctacggaaagtattacaggttccctgggccccctgctggatggtacagccaccttaaggctggtgaagagacaagtccccctggattgtgttctgtatcgatatggttccttttccgtcaccctggacattgtccagggtattgaaagtgccgagatcctgcaggctgtgccgtccggtgagggggatgcatttgagctgactgtgtcctgccaaggcgggctgcccaaggaagcctgcatggagatctcatcgccagggtgccagccccctgcccagcggctgtgccagcctgtgctacccagcccagcctgccagctggttctgcaccagatactgaagggtggctcggggacatactgcctcaatgtgtctctggctgataccaacagcctggcagtggtcagcacccagcttatcatgcctggtcaagaagcaggccttgggcaggttccgctgatcgtgggcatcttgctggtgttgatggctgtggtccttgcatctctgatatataggcgcagacttatgaagcaagacttctccgtaccccagttgccacatagcagcagtcactggctgcgtctaccccgcatcttctgctcttgtcccattggtgagaacagccccctcctcagtgggcagcaggtctgagtactctcatatgatgctgtgattttcctggagttgacagaaacacctatatttcccccagtcttccctgggagactactattaactgaaataaatactcagagcctg

SEQ ID NO: 16170 - DNA, 2204 bp, Homo sapiens
  source 1..2204: mol_type = unassigned DNA
tcaacgtcagagccggggggcgagcccagcgctcctccccgcaaatgatcccgccccaggggcctatcccagtccccccagtgcctttggttgctggagggaagaacacaatggatctggtgctaaaaagatgccttcttcatttggctgtgataggtgctttgctggctgtgggggctacaaaagtacccagaaaccaggactggcttggtgtctcaaggcaactcagaaccaaagcctggaacaggcagctgtatccagagtggacagaagcccagagacttgactgctggagaggtggtcaagtgtccctcaaggtcagtaatgatgggcctacactgattggtgcaaatgcctccttctctattgccttgaacttccctggaagccaaaaggtattgccagatgggcaggttatctgggtcaacaataccatcatcaatgggagccaggtgtggggaggacagccagtgtatccccaggaaactgacgatgcctgcatcttccctgatggtggaccttgcccatctggctcttggtctcagaagagaagctttgtttatgtctggaagacctggggccaatactggcaagttctagggggcccagtgtctgggctgagcattgggacaggcagggcaatgctgggcacacacaccatggaagtgactgtctaccatcgccggggatcccggagctatgtgcctcttgctcattccagctcagccttcaccattactgaccaggtgcctttctccgtgagcgtgtcccagttgcgggccttggatggagggaacaagcacttcctgagaaatcagcctctgacctttgccctccagctccatgaccccagtggctatctggctgaagctgacctctcctacacctgggactttggagacagtagtggaaccctgatctctcgggcacttgtggtcactcatacttacctggagcctggcccagtcactgcccaggtggtcctgcaggctgccattcctctcacctcctgtggctcctccccagttccaggcaccacagatgggcacaggccaactgcagaggcccctaacaccacagctggccaagtgcctactacagaagttgtgggtactacacctggtcaggcgccaactgcagagccctctggaaccacatctgtgcaggtgccaaccactgaagtcataagcactgcacctgtgcagatgccaactgcagagagcacaggtatgacacctgagaaggtgccagtttcagaggtcatgggtaccacactggcagagatgtcaactccagaggctacaggtatgacacctgcagaggtatcaattgtggtgctttctggaaccacagctgcacaggtaacaactacagagtgggtggagaccacagctagagagctacctatccctgagcctgaaggtccagatgccagctcaatcatgtctacggaaagtattacaggttccctgggccccctgctggatggtacagccaccttaaggctggtgaagagacaagtccccctggattgtgttctgtatcgatatggttccttttccgtcaccctggacattgtccagggtattgaaagtgccgagatcctgcaggctgtgccgtccggtgagggggatgcatttgagctgactgtgtcctgccaaggcgggctgcccaaggaagcctgcatggagatctcatcgccagggtgccagccccctgcccagcggctgtgccagcctgtgctacccagcccagcctgccagctggttctgcaccagatactgaagggtggctcggggacatactgcctcaatgtgtctctggctgataccaacagcctggcagtggtcagcacccagcttatcatgcctggtcaagaagcaggccttgggcaggttccgctgatcgtgggcatcttgctggtgttgatggctgtggtccttgcatctctgatatataggcgcagacttatgaagcaagacttctccgtaccccagttgccacatagcagcagtcactggctgcgtctaccccgcatcttctgctcttgtcccattggtgagaacagccccctcctcagtgggcagcaggtctgagtactctcatatgatgctgtgattttcctggagttgacagaaacacctatatttcccccagtcttccctgggagactactattaactgaaataaatactcagagcctg

SEQ ID NO: 16171 - DNA, 901 bp, Homo sapiens
  source 1..901: mol_type = unassigned DNA
gagggaagaacacaatggatctggtgctaaaaagatgccttcttcatttggctgtgataggtgctttgctggctgtgggggctacaaaaggtggtcaagtgtccctcaaggtcagtaatgatgggcctacactgattggtgcaaatgcctccttctctattgccttgaacttccctggaagccaaaaggtattgccagatgggcaggttatctgggtcaacaataccatcatcaatgggagccaggtgtggggaggacagccagtgtatccccaggaaactgacgatgcctgcatcttccctgatggtggaccttgcccatctggctcttggtctcagaagagaagctttgtttatgtctggaagacctgggagggtattgaaagtgccgagatcctgcaggctgtgccgtccggtgagggggatgcatttgagctgactgtgtcctgccaaggcgggctgcccaaggaagcctgcatggagatctcatcgccagggtgccagccccctgcccagcggctgtgccagcctgtgctacccagcccagcctgccagctggttctgcaccagatactgaagggtggctcggggacatactgcctcaatgtgtctctggctgataccaacagcctggcagtggtcagcacccagcttatcatgcctggtcaagaagcaggccttgggcaggttccgctgatcgtgggcatcttgctggtgttgatggctgtggtccttgcatctctgatatataggcgcagacttatgaagcaagacttctccgtaccccagttgccacatagcagcagtcactggctgcgtctaccccgcatcttctgctcttgtcccattggtgagaacagccccctcctcagtgggcagcaggtctgagtactctcatatga

SEQ ID NO: 16172 - DNA, 503 bp, Homo sapiens
  source 1..503: mol_type = unassigned DNA
aacaccacagctggccaagtgcctactacagaagttgtgggtactacacctggtcaggcgccaactgcagagccctctggaaccacatctgtgcaggtgccaaccactgaagtcataagcactgcacctgtgcagatgccaactgcagagagcacaggtatgacacctgagaaggtgccagtttcagaggtcatgggtaccacactggcagagatgtcaactccagaggctacagggtggctcggggacatactgcctcaatgtgtctctggctgataccaacagcctggcagtggtcagcacccagcttatcatgcctgtgcctgggattcttctcacaggtcaagaagcaggccttgggcaggttccgctgatcgtgggcatcttgctggtgttgatggctgtggtccttgcatctctgatatataggcgcagacttatgaagcaagacttctccgtaccccagttgccacatagcagcagtcactggctgcgtctacccc

SEQ ID NO: 16173 - DNA, 1355 bp, Homo sapiens
  source 1..1355: mol_type = unassigned DNA
ccaggtgtggggaggacagccagtgtatccccaggaaactgacgatgcctgcatcttccctgatggtggaccttgcccatctggctcttggtctcagaagagaagctttgtttatgtctggaagacctggggccaatactggcaagttctagggggcccagtgtctgggctgagcattgggacaggcagggcaatgctgggcacacacaccatggaagtgactgtctaccatcgccggggatcccggagctatgtgcctcttgctcattccagctcagccttcaccattactgaccaggtgcctttctccgtgagcgtgtcccagttgcgggccttggatggagggaacaagcacttcctgagaaatcagcctctgacctttgccctccagctccatgaccccagtggctatctggctgaagctgacctctcctacacctgggactttggagacagtagtggaaccctgatctctcgggcacttgtggtcactcatacttacctggagcctggcccagtcactgcccaggtggtcctgcaggctgccattcctctcacctcctgtggctcctccccagttccaggcaccacagatgggcacaggccaactgcagaggcccctaacaccacagctggccaagtgcctactacagaagttgtgggtactacacctggtcaggcgccaactgcagagccctctggaaccacatctgtgcaggtgccaaccactgaagtcataagcactgcacctgtgcagatgccaactgcagagagcacagctgcacaggtaacaactacagagtgggtggagaccacagctagagagctacctatccctgagcctgaaggtccagatgccagctcaatcatgtctacggaaagtattacaggttccctgggccccctgctggatggtacagccaccttaaggctggtgaagagacaagtccccctggattgtgttctgtatcgatatggttccttttccgtcaccctggacattgtccagggtattgaaagtgccgagatcctgcaggctgtgccgtccggtgagggggatgcatttgagctgactgtgtcctgccaaggcgggctgcccaaggaagcctgcatggagatctcatcgccagggtgccagccccctgcccagcggctgtgccagcctgtgctacccagcccagcctgccagctggttctgcaccagatactgaagggtggctcggggacatactgcctcaatgtgtctctggctgataccaacagcctggcagtggtcagcacccagcttatcatgcctgtgcctgggattcttctcacaggtcaagaagcaggccttgggcaggttccgctgatcg

SEQ ID NO: 16174 - DNA, 505 bp, Homo sapiens
  source 1..505: mol_type = unassigned DNA
gaaacagtgatgcttaaatgagttaacacacgttgaatgtctagcctaggacctgacatagtgtggggtgtgataaacatttgaggattttttaaaactccaatgccacccctaactgtgactctggaggagtcattttcttcttctgggcctcagtttccttatctatagaataaggtttcccaggtcttatctgattccaagcctgtgactccagaatccagtaactctggttcaacctgaaaaaatgcctgcttggcctctgcctccagatgagtcatctgtctcttgatcttgcctccttgatcctctcctgccaggttccctgggccccctgctggatggtacagccaccttaaggctggtgaagagacaagtccccctggattgtgttctgtatcgatatggttccttttccgtcaccctggacattgtccagggtattgaaagtgccgagatcctgcaggctgtgccgtccggtgagggggatgcatttgagctgact

SEQ ID NO: 16175 - DNA, 895 bp, Homo sapiens
  source 1..895: mol_type = unassigned DNA
gaacacaatggatctggtgctaaaaagatgccttcttcatttggctgtgataggtgctttgctggctgtgggggctacaaaagtacccagaaaccaggactggcttggtgtctcaaggcaactcagaaccaaagcctggaacaggcagctgtatccagagtggacagaagcccagagacttgactgctggagaggtggtcaagtgtccctcaaggtcagtaatgatgggcctacactgattggtgcaaatgcctccttctctattgccttgaacttccctggaagccaaaaggtattgccagatgggcaggttatctgggtcaacaataccatcatcaatgggagccaggtgtggggaggacagccagtgtatccccaggaaactgacgatgcctgcatcttccctgatggtggaccttgcccatctggctcttggtctcagaagagaagctttgtttatgtctggaagacctgggttccaggcaccacagatgggcacaggccaactgcagaggcccctaacaccacagctggccaagtgcctactacagaagttgtgggtactacacctggtcaggcgccaactgcagagccctctggaaccacatctgtgcaggtgccaaccactgaagtcataagcactgcacctgtgcagatgccaactgcagagagcacagctgcacaggtaacaactacagagtgggtggagaccacagctagagagctacctatccctgagcctgaaggtccagatgccagctcaatcatgtctacggaaagtattacaggttccctgggccccctgctggatggtacagccaccttaaggctggtgaagagacaagtccccctggattgtgttctgtatcgatatggttccttttccgtcaccctg

SEQ ID NO: 16176 - DNA, 1047 bp, Homo sapiens
  source 1..1047: mol_type = unassigned DNA
ggagggaagaacacaatggatctggtgctaaaaagatgccttcttcatttggctgtgataggtgctttgctggctgtgggggctacaaaagtacccagaaaccaggactggcttggtgtctcaaggcaactcagaaccaaagcctggaacaggcagctgtatccagagtggacagaagcccagagacttgactgctggagaggtggtcaagtgtccctcaaggtcagtaatgatgggcctacactgattggtgcaaatgcctccttctctattgccttgaacttccctggaagccaaaaggtattgccagatgggcaggttatctgggtcaacaataccatcatcaatgggagccaggtgtggggaggacagccagtgtatccccaggaaactgacgatgcctgcatcttccctgatggtggaccttgcccatctggctcttggtctcagaagagaagctttgtttatgtctggaagacctgggaccaggtgcctttctccgtgagcgtgtcccagttgcgggccttggatggagggaacaagcacttcctgagaaatcagcctctgacctttgccctccagctccatgaccccagtggctatctggctgaagctgacctctcctacacctgggactttggagacagtagtggaaccctgatctctcgggcacttgtggtcactcatacttacctggagcctggcccagtcactgcccaggtggtcctgcaggctgccattcctctcacctcctgtggctcctccccagttccaggcaccacagatgggcacaggccaactgcagaggcccctaacaccacagctggccaagtgcctactacagaagttgtgggtactacacctggtcaggcgccaactgcagagccctctggaaccacatctgtgcaggtgccaaccactgaagtcataagcactgcacctgtgcagatgccaactgcagagagcacaggtatgacacctgagaaggtgccagtttcagaggtcatgggtaccacactggcagagatgtcaactccagaggctaca

SEQ ID NO: 16177 - DNA, 912 bp, Homo sapiens
  source 1..912: mol_type = unassigned DNA
ggagggaagaacacaatggatctggtgctaaaaagatgccttcttcatttggctgtgataggtgctttgctggctgtgggggctacaaaagtacccagaaaccaggactggcttggtgtctcaaggcaactcagaaccaaagcctggaacaggcagctgtatccagagtggacagaagcccagagacttgactgctggagagggagccaggtgtggggaggacagccagtgtatccccaggaaactgacgatgcctgcatcttccctgatggtggaccttgcccatctggctcttggtctcagaagagaagctttgtttatgtctggaagacctggggccaatactggcaagttctagggggcccagtgtctgggctgagcattgggacaggcagggcaatgctgggcacacacaccatggaagtgactgtctaccatcgccggggatcccggagctatgtgcctcttgctcattccagctcagccttcaccattactgaccaggtgcctttctccgtgagcgtgtcccagttgcgggccttggatggagggaacaagcacttcctgagaaatcagcctctgacctttgccctccagctccatgaccccagtggctatctggctgaagctgacctctcctacacctgggactttggagacagtagtggaaccctgatctctcgggcacttgtggtcactcatacttacctggagcctggcccagtcactgcccaggtggtcctgcaggctgccattcctctcacctcctgtggctcctccccagttccaggcaccacagatgggcacaggccaactgcagaggcccctaacaccacagctggccaagtgcctactacagaagttgtgggtactacacctggtcaggcgccaactgcagagccctctggaacc

SEQ ID NO: 16178 - DNA, 754 bp, Homo sapiens
  source 1..754: mol_type = unassigned DNA
caattttaggggttttgatatacaaaaaagaatgccagggtttgagagtgactctgtatttatctttcagggagccaggtgtggggaggacagccagtgtatccccaggaaactgacgatgcctgcatcttccctgatggtggaccttgcccatctggctcttggtctcagaagagaagctttgtttatgtctggaagacctggggccaatactggcaagttctagggggcccagtgtctgggctgagcattgggacaggcagggcaatgctgggcacacacaccatggaagtgactgtctaccatcgccggggatcccggagctatgtgcctcttgctcattccagctcagccttcaccattactgaccaggtgcctttctccgtgagcgtgtcccagttgcgggccttggatggagggaacaagcacttcctgagaaatcagcctctgacctttgccctccagctccatgaccccagtggctatctggctgaagctgacctctcctacacctgggactttggagacagtagtggaaccctgatctctcgggcacttgtggtcactcatacttacctggagcctggcccagtcactgcccaggtggtcctgcaggctgccattcctctcacctcctgtggctcctccccagttccaggcaccacagatgggcacaggccaactgcagaggcccctaacaccacagctggccaagtgcctactacagaagttgtgggtactacacctggtcagg

SEQ ID NO: 16179 - DNA, 576 bp, Homo sapiens
  source 1..576: mol_type = unassigned DNA
agcgctcctccccgcaaatgatcccgccccagtacccagaaaccaggactggcttggtgtctcaaggcaactcagaaccaaagcctggaacaggcagctgtatccagagtggacagaagcccagagacttgactgctggagaggtggtcaagtgtccctcaaggtcagtaatgatgggcctacactgattggtgcaaatgcctccttctctattgccttgaacttccctggaagccaaaaggtattgccagatgggcaggttatctgggtcaacaataccatcatcaatgggagccaggtgtggggaggacagccagtgtatccccaggaaactgacgatgcctgcatcttccctgatggtggaccttgcccatctggctcttggtctcagaagagaagctttgtttatgtctggaagacctggggccaatactggcaagttctagggggcccagtgtctgggctgagcattgggacaggcagggcaatgctgggcacacacaccatggaagtgactgtctaccatcgccggggatcccggagctatgtgcctcttgctcattccagctcagcctt

SEQ ID NO: 16180 - DNA, 801 bp, Homo sapiens
  source 1..801: mol_type = unassigned DNA
agtgcctttggttgctggagggaagaacacaatggatctggtgctaaaaagatgccttcttcatttggctgtgataggtgctttgctggctgtgggggctacaaaagtacccagaaaccaggactggcttggtgtctcaaggcaactcagaaccaaagcctggaacaggcagctgtatccagagtggacagaagcccagagacttgactgctggagaggtggtcaagtgtccctcaaggtcagtaatgatgggcctacactgattggtgcaaatgcctccttctctattgccttgaacttccctggaagccaaaaggtattgccagatgggcaggttatctgggtcaacaataccatcatcaatgggagccaggtgtggggaggacagccagtgtatccccaggaaactgacgatgcctgcatcttccctgatggtggaccttgcccatctggctcttggtctcagaagagaagctttgtttatgtctggaagacctggggtgagggactcccttctcagcctatcatccacacttgtgtttacttctttctacctgatcacctttcttttggccgccccttccaccttaacttctgtgattttctctaatcttcattttcctcttagatcttttctctttcttagcacctagcccccttcaactctatcataattctttctggcaactcttcctcaattgtagtcctaccccatggaatgcctcattaggaccccttccctgtccccccatatcacagccttccaaacaccctcagaagtaatcatacttcctgacctcc

SEQ ID NO: 16181 - DNA, 646 bp, Homo sapiens
  source 1..646: mol_type = unassigned DNA
agcgctcctccccgcaaatgatcccgccccagtacccagaaaccaggactggcttggtgtctcaaggcaactcagaaccaaagcctggaacaggcagctgtatccagagtggacagaagcccagagacttgactgctggagaggtggtcaagtgtccctcaaggtcagtaatgatgggcctacactgattggtgcaaatgcctccttctctattgccttgaacttccctggaagccaaaaggtattgccagatgggcaggttatctgggtcaacaataccatcatcaatgggagccaggtgtggggaggacagccagtgtatccccaggaaactgacgatgcctgcatcttccctgatggtggaccttgcccatctggctcttggtctcagaagagaagctttgtttatgtctggaagacctggggtgagggactcccttctcagcctatcatccacacttgtgtttacttctttctacctgatcacctttcttttggccgccccttccaccttaacttctgtgattttctctaatcttcattttcctcttagatcttttctctttcttagcacctagcccccttcaactctatcataattctttctggcaactcttcctcaattgtagtcctaccccatggaatg

SEQ ID NO: 16182 - DNA, 568 bp, Homo sapiens
  source 1..568: mol_type = unassigned DNA
aagtttggttcttgggggctagacaagtttcttccccggtggggcggctgaacactcttcccaagggcctatcccagtccccccagtgcctttggttgctggagggaagaacacaatggatctggtgctaaaaagatgccttcttcatttggctgtgataggtgctttgctggctgtgggggctacaaaagtacccagaaaccaggactggcttggtgtctcaaggcaactcagaaccaaagcctggaacaggcagctgtatccagagtggacagaagcccagagacttgactgctggagaggtggtcaagtgtccctcaaggtcagtaatgatgggcctacactgattggtgcaaatgcctccttctctattgccttgaacttccctggaagccaaaaggtattgccagatgggcaggttatctgggtcaacaataccatcatcaatgggagccaggtgtggggaggacagccagtgtatccccaggaaactgacgatgcctgcatcttccctgatggtggaccttgcccatctggctcttggtctcagaagagaagctttgtttat

SEQ ID NO: 16183 - DNA, 573 bp, Homo sapiens
  source 1..573: mol_type = unassigned DNA
ggaaaacttttctgtctgtgatatgaaacagaaaggaaaaacggcgggcttactgggaaatgcagtgtcgaaagagttggctggccaagactagaagagtccgaaagatccggaagagctggtcaatctcagaatctccagggaatagggcccggcgagtcacctgaaaatggggaaagaggaaataccaagacccacgttgacgtcagtcaaaactctcctctatacaaaggagttcccacagacagtaaaagtacccagaaaccaggactggcttggtgtctcaaggcaactcagaaccaaagcctggaacaggcagctgtatccagagtggacagaagcccagagacttgactgctggagaggtggtcaagtgtccctcaaggtcagtaatgatgggcctacactgattggtgcaaatgcctccttctctattgccttgaacttccctggaagccaaaaggtattgccagatgggcaggttatctgggtcaacaataccatcatcaatgggagccaggtgtggggaggacagccagtgtatccccaggaaactgacgatgcctgcatctt

SEQ ID NO: 16184 - DNA, 461 bp, Homo sapiens
  source 1..461: mol_type = unassigned DNA
gaagaacacaatggatctggtgctaaaaagatgccttcttcatttggctgtgataggtgctttgctggctgtgggggctacaaaagtacccagaaaccaggactggcttggtgtctcaaggcaactcagaaccaaagcctggaacaggcagctgtatccagagtggacagaagcccagagacttgactgctggagaggtggtcaagtgtccctcaaggtcagtaatgatgggcctacactgattggtgcaaatgcctccttctctattgccttgaacttccctggaagccaaaaggtattgccagatgggcaggttatctgggtcaacaataccatcatcaatggtgagtacttctctattctaggtccttattcctagggctcaggttccctggtatgcccagtgagctcagggaatgccccttccttctctacttttttttttttttcttttttgagac

SEQ ID NO: 16185 - DNA, 4845 bp, Homo sapiens
  source 1..4845: mol_type = unassigned DNA
ggaaagctagcggcagaggctcagccccggcggcagcgcgcgccccgctgccagcccattttccggacgccacccgcgggcactgccgacgcccccggggctgccgaggggaggccgggggggcgcagcggagcgcggtcccgcgcactgagccccgcggcgccccgggaacttggcggcgacccgagcccggcgagccggggcgcgcctcccccgccgcgcgcctcctgcatgcggggccccagctccgggcgccggccggagccccccccggccgcccccgagccccccgcgccccgcgccgcgccgccgcgccgtccatgcaccgcttgatgggggtcaacagcaccgccgccgccgccgccgggcagcccaatgtctcctgcacgtgcaactgcaaacgctctttgttccagagcatggagatcacggagctggagtttgttcagatcatcatcatcgtggtggtgatgatggtgatggtggtggtgatcacgtgcctgctgagccactacaagctgtctgcacggtccttcatcagccggcacagccaggggcggaggagagaagatgccctgtcctcagaaggatgcctgtggccctcggagagcacagtgtcaggcaacggaatcccagagccgcaggtctacgccccgcctcggcccaccgaccgcctggccgtgccgcccttcgcccagcgggagcgcttccaccgcttccagcccacctatccgtacctgcagcacgagatcgacctgccacccaccatctcgctgtcagacggggaggagcccccaccctaccagggcccctgcaccctccagcttcgggaccccgagcagcagctggaactgaaccgggagtcggtgcgcgcacccccaaacagaaccatcttcgacagtgacctgatggatagtgccaggctgggcggcccctgcccccccagcagtaactcgggcatcagcgccacgtgctacggcagcggcgggcgcatggaggggccgccgcccacctacagcgaggtcatcggccactacccggggtcctccttccagcaccagcagagcagtgggccgccctccttgctggaggggacccggctccaccacacacacatcgcgcccctagagagcgcagccatctggagcaaagagaaggataaacagaaaggacaccctctctagggtccccaggggggccgggctggggctgcgtaggtgaaaaggcagaacactccgcgcttcttagaagaggagtgagaggaaggcggggggcgcagcaacgcatcgtgtggccctcccctcccacctccctgtgtataaatatttacatgtgatgtctggtctgaatgcacaagctaagagagcttgcaaaaaaaaaaagaaaaaagaaaaaaaaaaaccacgtttctttgttgagctgtgtcttgaaggcaaaagaaaaaaaatttctacagtagtctttcttgtttctagttgagctgcgtgcgtgaatgcttattttcttttgtttatgataatttcacttaactttaaagacatatttgcacaaaacctttgtttaaagatctgcaatattatatatataaatatatataagataagagaaactgtatgtgcgagggcaggagtatttttgtattagaagaggcctattaaaaaaaaaagttgttttctgaactagaagaggaaaaaaatggcaatttttgagtgccaagtcagaaagtgtgtattaccttgtaaagaaaaaaattacaaagcaggggtttagagttatttatataaatgttgagattttgcactattttttaatataaatatgtcagtgcttgcttgatggaaacttctcttgtgtctgttgagactttaagggagaaatgtcggaatttcagagtcgcctgacggcagagggtgagcccccgtggagtctgcagagaggccttggccaggagcggcgggctttcccgaggggccactgtccctgcagagtggatgcttctgcctagtgacaggttatcaccacgttatatattccctaccgaaggagacaccttttcccccctgacccagaacagcctttaaatcacaagcaaaataggaaagttaaccacggaggcaccgagttccaggtagtggttttgcctttcccaaaaatgaaaataaactgttaccgaaggaattagtttttcctcttcttttttccaactgtgaaggtccccgtggggtggagcatggtgcccctcacaagccgcagcggctggtgcccgggctaccagggacatgccagagggctcgatgacttgtctctgcagggcgctttggtggttgttcagctggctaaaggttcaccggtgaaggcaggtgcggtaactgccgcactggaccctaggaagccccaggtattcgcaatctgacctcctcctgtctgtttcccttcacggatcaattctcacttaagaggccaataaacaacccaacatgaaaaggtgacaagcctgggtttctcccaggataggtgaaagggttaaaatgagtaaagcagttgagcaaacaccaacccgagcttcgggcgcagaattcttcaccttctcttcccctttccatctcctttccccgcggaaacaacgcttcccttctggtgtgtctgttgatctgtgttttcatttacatctctcttagactccgctcttgttctccaggttttcaccagatagatttggggttggcgggacctgctggtgacgtgcaggtgaaggacaggaaggggcatgtgagcgtaaatagaggtgaccagaggagagcatgaggggtggggctttgggacccaccggggccagtggctggagcttgacgtctttcctccccatgggggtgggagggcccccagctggaagagcagactcccagctgctaccccctcccttcccatgggagtggctttccattttgggcagaatgctgactagtagactaacataaaagatataaaaggcaataactattgtttgtgagcaacttttttataacttccaaaacaaaaacctgagcacagttttgaagttctagccactcgagctcatgcatgtgaaacgtgtgctttacgaaggtggcagctgacagacgtgggctctgcatgccgccagcctagtagaaagttctcgttcattggcaacagcagaacctgcctctccgtgaagtcgtcagcctaaaatttgtttctctcttgaagaggattctttgaaaaggtcctgcagagaaatcagtacaggttatcccgaaaggtacaaggacgcacttgtaaagatgattaaaacgtatctttcctttatgtgacgcgtctctagtgccttactgaagaagcagtgacactcccgtcgctcggtgaggacgttcccggacagtgcctcactcacctgggactggtatcccctcccagggtccaccaagggctcctgcttttcagacaccccatcatcctcgcgcgtcctcaccctgtctctaccagggaggtgcctagcttggtgaggttactcctgctcctccaacctttttttgccaaggtttgtacacgactcccatctaggctgaaaacctagaagtggaccttgtgtgtgtgcatggtgtcagcccaaagccaggctgagacagtcctcatatcctcttgagccaaactgtttgggtctcgttgcttcatggtatggtctggatttgtgggaatggctttgcgtgagaaaggggaggagagtggttgctgccctcagccggcttgaggacagagcctgtccctctcatgacaactcagtgttgaagcccagtgtcctcagcttcatgtccagtggatggcagaagttcatggggtagtggcctctcaaaggctgggcgcatcccaagacagccagcaggttgtctctggaaacgaccagagttaagctctcggcttctctgctgagggtgcaccctttcctctagatggtagttgtcacgttatctttgaaaactcttggactgctcctgaggaggccctcttttccagtaggaagttagatgggggttctcagaagtggctgattggaaggggacaagcttcgtttcaggggtctgccgttccatcctggttcagagaaggccgagcgtggctttctctagccttgtcactgtctccctgcctgtcaatcaccacctttcctccagaggaggaaaattatctcccctgcaaagcccggttctacacagatttcacaaattgtgctaagaaccgtccgtgttctcagaaagcccagtgtttttgcaaagaatgaaaagggaccccatatgtagcaaaaatcagggctgggggagagccgggttcattccctgtcctcattggtcgtccctatgaattgtacgtttcagagaaattttttttcctatgtgcaacacgaagcttccagaaccataaaatatcccgtcgataaggaaagaaaatgtcgttgttgttgtttttctggaaactgcttgaaatcttgctgtactatagagctcagaaggacacagcccgtcctcccctgcctgcctgattccatggctgttgtgctgattccaatgctttcacgttggttcctggcgtgggaactgctctcctttgcagccccatttcccaagctctgttcaagttaaacttatgtaagctttccgtggcatgcggggcgcgcacccacgtccccgctgcgtaagactctgtatttggatgccaatccacaggcctgaagaaactgcttgttgtgtatcagtaatcattagtggcaatgatgacattctgaaaagctgcaatacttatacaataaattttacaattctttggaatgag

SEQ ID NO: 16186 - DNA, 4519 bp, Homo sapiens
  source 1..4519: mol_type = unassigned DNA
tggtcgtcctccttgggttcgggtgaaagcgcttgggggttcagtgggccatgatccccgagctgctggagaactgaaggcggacagtctcctgcgaaaccagcggagctggagtttgttcagatcatcatcatcgtggtggtgatgatggtgatggtggtggtgatcacgtgcctgctgagccactacaagctgtctgcacggtccttcatcagccggcacagccaggggcggaggagagaagatgccctgtcctcagaaggatgcctgtggccctcggagagcacagtgtcaggcaacggaatcccagagccgcaggtctacgccccgcctcggcccaccgaccgcctggccgtgccgcccttcgcccagcgggagcgcttccaccgcttccagcccacctatccgtacctgcagcacgagatcgacctgccacccaccatctcgctgtcagacggggaggagcccccaccctaccagggcccctgcaccctccagcttcgggaccccgagcagcagctggaactgaaccgggagtcggtgcgcgcacccccaaacagaaccatcttcgacagtgacctgatggatagtgccaggctgggcggcccctgcccccccagcagtaactcgggcatcagcgccacgtgctacggcagcggcgggcgcatggaggggccgccgcccacctacagcgaggtcatcggccactacccggggtcctccttccagcaccagcagagcagtgggccgccctccttgctggaggggacccggctccaccacacacacatcgcgcccctagagagcgcagccatctggagcaaagagaaggataaacagaaaggacaccctctctagggtccccaggggggccgggctggggctgcgtaggtgaaaaggcagaacactccgcgcttcttagaagaggagtgagaggaaggcggggggcgcagcaacgcatcgtgtggccctcccctcccacctccctgtgtataaatatttacatgtgatgtctggtctgaatgcacaagctaagagagcttgcaaaaaaaaaaagaaaaaagaaaaaaaaaaaccacgtttctttgttgagctgtgtcttgaaggcaaaagaaaaaaaatttctacagtagtctttcttgtttctagttgagctgcgtgcgtgaatgcttattttcttttgtttatgataatttcacttaactttaaagacatatttgcacaaaacctttgtttaaagatctgcaatattatatatataaatatatataagataagagaaactgtatgtgcgagggcaggagtatttttgtattagaagaggcctattaaaaaaaaaagttgttttctgaactagaagaggaaaaaaatggcaatttttgagtgccaagtcagaaagtgtgtattaccttgtaaagaaaaaaattacaaagcaggggtttagagttatttatataaatgttgagattttgcactattttttaatataaatatgtcagtgcttgcttgatggaaacttctcttgtgtctgttgagactttaagggagaaatgtcggaatttcagagtcgcctgacggcagagggtgagcccccgtggagtctgcagagaggccttggccaggagcggcgggctttcccgaggggccactgtccctgcagagtggatgcttctgcctagtgacaggttatcaccacgttatatattccctaccgaaggagacaccttttcccccctgacccagaacagcctttaaatcacaagcaaaataggaaagttaaccacggaggcaccgagttccaggtagtggttttgcctttcccaaaaatgaaaataaactgttaccgaaggaattagtttttcctcttcttttttccaactgtgaaggtccccgtggggtggagcatggtgcccctcacaagccgcagcggctggtgcccgggctaccagggacatgccagagggctcgatgacttgtctctgcagggcgctttggtggttgttcagctggctaaaggttcaccggtgaaggcaggtgcggtaactgccgcactggaccctaggaagccccaggtattcgcaatctgacctcctcctgtctgtttcccttcacggatcaattctcacttaagaggccaataaacaacccaacatgaaaaggtgacaagcctgggtttctcccaggataggtgaaagggttaaaatgagtaaagcagttgagcaaacaccaacccgagcttcgggcgcagaattcttcaccttctcttcccctttccatctcctttccccgcggaaacaacgcttcccttctggtgtgtctgttgatctgtgttttcatttacatctctcttagactccgctcttgttctccaggttttcaccagatagatttggggttggcgggacctgctggtgacgtgcaggtgaaggacaggaaggggcatgtgagcgtaaatagaggtgaccagaggagagcatgaggggtggggctttgggacccaccggggccagtggctggagcttgacgtctttcctccccatgggggtgggagggcccccagctggaagagcagactcccagctgctaccccctcccttcccatgggagtggctttccattttgggcagaatgctgactagtagactaacataaaagatataaaaggcaataactattgtttgtgagcaacttttttataacttccaaaacaaaaacctgagcacagttttgaagttctagccactcgagctcatgcatgtgaaacgtgtgctttacgaaggtggcagctgacagacgtgggctctgcatgccgccagcctagtagaaagttctcgttcattggcaacagcagaacctgcctctccgtgaagtcgtcagcctaaaatttgtttctctcttgaagaggattctttgaaaaggtcctgcagagaaatcagtacaggttatcccgaaaggtacaaggacgcacttgtaaagatgattaaaacgtatctttcctttatgtgacgcgtctctagtgccttactgaagaagcagtgacactcccgtcgctcggtgaggacgttcccggacagtgcctcactcacctgggactggtatcccctcccagggtccaccaagggctcctgcttttcagacaccccatcatcctcgcgcgtcctcaccctgtctctaccagggaggtgcctagcttggtgaggttactcctgctcctccaacctttttttgccaaggtttgtacacgactcccatctaggctgaaaacctagaagtggaccttgtgtgtgtgcatggtgtcagcccaaagccaggctgagacagtcctcatatcctcttgagccaaactgtttgggtctcgttgcttcatggtatggtctggatttgtgggaatggctttgcgtgagaaaggggaggagagtggttgctgccctcagccggcttgaggacagagcctgtccctctcatgacaactcagtgttgaagcccagtgtcctcagcttcatgtccagtggatggcagaagttcatggggtagtggcctctcaaaggctgggcgcatcccaagacagccagcaggttgtctctggaaacgaccagagttaagctctcggcttctctgctgagggtgcaccctttcctctagatggtagttgtcacgttatctttgaaaactcttggactgctcctgaggaggccctcttttccagtaggaagttagatgggggttctcagaagtggctgattggaaggggacaagcttcgtttcaggggtctgccgttccatcctggttcagagaaggccgagcgtggctttctctagccttgtcactgtctccctgcctgtcaatcaccacctttcctccagaggaggaaaattatctcccctgcaaagcccggttctacacagatttcacaaattgtgctaagaaccgtccgtgttctcagaaagcccagtgtttttgcaaagaatgaaaagggaccccatatgtagcaaaaatcagggctgggggagagccgggttcattccctgtcctcattggtcgtccctatgaattgtacgtttcagagaaattttttttcctatgtgcaacacgaagcttccagaaccataaaatatcccgtcgataaggaaagaaaatgtcgttgttgttgtttttctggaaactgcttgaaatcttgctgtactatagagctcagaaggacacagcccgtcctcccctgcctgcctgattccatggctgttgtgctgattccaatgctttcacgttggttcctggcgtgggaactgctctcctttgcagccccatttcccaagctctgttcaagttaaacttatgtaagctttccgtggcatgcggggcgcgcacccacgtccccgctgcgtaagactctgtatttggatgccaatccacaggcctgaagaaactgcttgttgtgtatcagtaatcattagtggcaatgatgacattctgaaaagctgcaatacttatacaataaattttacaattctttggaatgag

SEQ ID NO: 16187 - DNA, 4546 bp, Homo sapiens
  source 1..4546: mol_type = unassigned DNA
acgcgagttcccgtctttcctggtcgtcctccttgggttcgggtgaaagcgcttgggggttcagtgggccatgatccccgagctgctggagaactgaaggcggacagtctcctgcgaaaccaggcaatggcggagctggagtttgttcagatcatcatcatcgtggtggtgatgatggtgatggtggtggtgatcacgtgcctgctgagccactacaagctgtctgcacggtccttcatcagccggcacagccaggggcggaggagagaagatgccctgtcctcagaaggatgcctgtggccctcggagagcacagtgtcaggcaacggaatcccagagccgcaggtctacgccccgcctcggcccaccgaccgcctggccgtgccgcccttcgcccagcgggagcgcttccaccgcttccagcccacctatccgtacctgcagcacgagatcgacctgccacccaccatctcgctgtcagacggggaggagcccccaccctaccagggcccctgcaccctccagcttcgggaccccgagcagcagctggaactgaaccgggagtcggtgcgcgcacccccaaacagaaccatcttcgacagtgacctgatggatagtgccaggctgggcggcccctgcccccccagcagtaactcgggcatcagcgccacgtgctacggcagcggcgggcgcatggaggggccgccgcccacctacagcgaggtcatcggccactacccggggtcctccttccagcaccagcagagcagtgggccgccctccttgctggaggggacccggctccaccacacacacatcgcgcccctagagagcgcagccatctggagcaaagagaaggataaacagaaaggacaccctctctagggtccccaggggggccgggctggggctgcgtaggtgaaaaggcagaacactccgcgcttcttagaagaggagtgagaggaaggcggggggcgcagcaacgcatcgtgtggccctcccctcccacctccctgtgtataaatatttacatgtgatgtctggtctgaatgcacaagctaagagagcttgcaaaaaaaaaaagaaaaaagaaaaaaaaaaaccacgtttctttgttgagctgtgtcttgaaggcaaaagaaaaaaaatttctacagtagtctttcttgtttctagttgagctgcgtgcgtgaatgcttattttcttttgtttatgataatttcacttaactttaaagacatatttgcacaaaacctttgtttaaagatctgcaatattatatatataaatatatataagataagagaaactgtatgtgcgagggcaggagtatttttgtattagaagaggcctattaaaaaaaaaagttgttttctgaactagaagaggaaaaaaatggcaatttttgagtgccaagtcagaaagtgtgtattaccttgtaaagaaaaaaattacaaagcaggggtttagagttatttatataaatgttgagattttgcactattttttaatataaatatgtcagtgcttgcttgatggaaacttctcttgtgtctgttgagactttaagggagaaatgtcggaatttcagagtcgcctgacggcagagggtgagcccccgtggagtctgcagagaggccttggccaggagcggcgggctttcccgaggggccactgtccctgcagagtggatgcttctgcctagtgacaggttatcaccacgttatatattccctaccgaaggagacaccttttcccccctgacccagaacagcctttaaatcacaagcaaaataggaaagttaaccacggaggcaccgagttccaggtagtggttttgcctttcccaaaaatgaaaataaactgttaccgaaggaattagtttttcctcttcttttttccaactgtgaaggtccccgtggggtggagcatggtgcccctcacaagccgcagcggctggtgcccgggctaccagggacatgccagagggctcgatgacttgtctctgcagggcgctttggtggttgttcagctggctaaaggttcaccggtgaaggcaggtgcggtaactgccgcactggaccctaggaagccccaggtattcgcaatctgacctcctcctgtctgtttcccttcacggatcaattctcacttaagaggccaataaacaacccaacatgaaaaggtgacaagcctgggtttctcccaggataggtgaaagggttaaaatgagtaaagcagttgagcaaacaccaacccgagcttcgggcgcagaattcttcaccttctcttcccctttccatctcctttccccgcggaaacaacgcttcccttctggtgtgtctgttgatctgtgttttcatttacatctctcttagactccgctcttgttctccaggttttcaccagatagatttggggttggcgggacctgctggtgacgtgcaggtgaaggacaggaaggggcatgtgagcgtaaatagaggtgaccagaggagagcatgaggggtggggctttgggacccaccggggccagtggctggagcttgacgtctttcctccccatgggggtgggagggcccccagctggaagagcagactcccagctgctaccccctcccttcccatgggagtggctttccattttgggcagaatgctgactagtagactaacataaaagatataaaaggcaataactattgtttgtgagcaacttttttataacttccaaaacaaaaacctgagcacagttttgaagttctagccactcgagctcatgcatgtgaaacgtgtgctttacgaaggtggcagctgacagacgtgggctctgcatgccgccagcctagtagaaagttctcgttcattggcaacagcagaacctgcctctccgtgaagtcgtcagcctaaaatttgtttctctcttgaagaggattctttgaaaaggtcctgcagagaaatcagtacaggttatcccgaaaggtacaaggacgcacttgtaaagatgattaaaacgtatctttcctttatgtgacgcgtctctagtgccttactgaagaagcagtgacactcccgtcgctcggtgaggacgttcccggacagtgcctcactcacctgggactggtatcccctcccagggtccaccaagggctcctgcttttcagacaccccatcatcctcgcgcgtcctcaccctgtctctaccagggaggtgcctagcttggtgaggttactcctgctcctccaacctttttttgccaaggtttgtacacgactcccatctaggctgaaaacctagaagtggaccttgtgtgtgtgcatggtgtcagcccaaagccaggctgagacagtcctcatatcctcttgagccaaactgtttgggtctcgttgcttcatggtatggtctggatttgtgggaatggctttgcgtgagaaaggggaggagagtggttgctgccctcagccggcttgaggacagagcctgtccctctcatgacaactcagtgttgaagcccagtgtcctcagcttcatgtccagtggatggcagaagttcatggggtagtggcctctcaaaggctgggcgcatcccaagacagccagcaggttgtctctggaaacgaccagagttaagctctcggcttctctgctgagggtgcaccctttcctctagatggtagttgtcacgttatctttgaaaactcttggactgctcctgaggaggccctcttttccagtaggaagttagatgggggttctcagaagtggctgattggaaggggacaagcttcgtttcaggggtctgccgttccatcctggttcagagaaggccgagcgtggctttctctagccttgtcactgtctccctgcctgtcaatcaccacctttcctccagaggaggaaaattatctcccctgcaaagcccggttctacacagatttcacaaattgtgctaagaaccgtccgtgttctcagaaagcccagtgtttttgcaaagaatgaaaagggaccccatatgtagcaaaaatcagggctgggggagagccgggttcattccctgtcctcattggtcgtccctatgaattgtacgtttcagagaaattttttttcctatgtgcaacacgaagcttccagaaccataaaatatcccgtcgataaggaaagaaaatgtcgttgttgttgtttttctggaaactgcttgaaatcttgctgtactatagagctcagaaggacacagcccgtcctcccctgcctgcctgattccatggctgttgtgctgattccaatgctttcacgttggttcctggcgtgggaactgctctcctttgcagccccatttcccaagctctgttcaagttaaacttatgtaagctttccgtggcatgcggggcgcgcacccacgtccccgctgcgtaagactctgtatttggatgccaatccacaggcctgaagaaactgcttgttgtgtatcagtaatcattagtggcaatgatgacattctgaaaagctgcaatacttatacaataaattttacaattctttggaatgag

SEQ ID NO: 16188 - DNA, 800 bp, Homo sapiens
  source 1..800: mol_type = unassigned DNA
ttggaacgagggctgcgggcaccagtgagcggagctggagtttgttcagatcatcatcatcgtggtggtgatgatggtgatggtggtggtgatcacgtgcctgctgagccactacaagctgtctgcacggtccttcatcagccggcacagccaggggcggaggagagaagatgccctgtcctcagaaggatgcctgtggccctcggagagcacagtgtcaggcaacggaatcccagagccgcaggtctacgccccgcctcggcccaccgaccgcctggccgtgccgcccttcgcccagcgggagcgcttccaccgcttccagcccacctatccgtacctgcagcacgagatcgacctgccacccaccatctcgctgtcagacggggaggagcccccaccctaccagggcccctgcaccctccagcttcgggaccccgagcagcagctggaactgaaccgggagtcggtgcgcgcacccccaaacagaaccatcttcgacagtgacctgatggatagtgccaggctgggcggcccctgcccccccagcagtaactcgggcatcagcgccacgtgctacggcagcggcgggcgcatggaggggccgccgcccacctacagcgaggtcatcggccactacccggggtcctccttccagcaccagcagagcagtgggccgccctccttgctggaggggacccggctccaccacacacacatcgcgcccctagagagcgcagccatctggagcaaagagaaggataaacagaaaggacaccctctctagggtccccaggggggcc

SEQ ID NO: 16189 - DNA, 831 bp, Homo sapiens
  source 1..831: mol_type = unassigned DNA
ctctccaggcccctgccacctgtttgcacatgaccctctacacccgccatagcaatggagaccccgcctcctgctacagttaattaatccttcttttttgcttcacaataaaaatagcatggctcttctgattgtaaaaagtgatatacactccttatttaacgaaaaattcaaagaatttgataaatgacaggcgaaaagtcaaaatgcctgcaattccagcacatggagcggagctggagtttgttcagatcatcatcatcgtggtggtgatgatggtgatggtggtggtgatcacgtgcctgctgagccactacaagctgtctgcacggtccttcatcagccggcacagccaggggcggaggagagaagatgccctgtcctcagaaggatgcctgtggccctcggagagcacagtgtcaggcaacggaatcccagagccgcaggtctacgccccgcctcggcccaccgaccgcctggccgtgccgcccttcgcccagcgggagcgcttccaccgcttccagcccacctatccgtacctgcagcacgagatcgacctgccacccaccatctcgctgtcagacggggaggagcccccaccctaccagggcccctgcaccctccagcttcgggaccccgagcagcagctggaactgaaccgggagtcggtgcgcgcacccccaaacagaaccatcttcgacagtgacctgatggatagtgccaggctgggcggcccctgcccccccagcagtaactcgggcatcagcgccacgtgctacggcagcggcgggcgcatggaggggccgccgcccacctacagcgaggtcatcg

SEQ ID NO: 16190 - DNA, 859 bp, Homo sapiens
  source 1..859: mol_type = unassigned DNA
gcgcactgagccccgcggcgccccgggaacttggcggcgacccgagcccggcgagccggggcgcgcctcccccgccgcgcgcctcctgcatgcggggccccagctccgggcgccggccggagccccccccggccgcccccgagccccccgcgccccgcgccgcgccgccgcgccgtccatgcaccgcttgatgggggtcaacagcaccgccgccgccgccgccgggcagcccaatgtctcctgcacgtgcaactgcaaacgctctttgttccagagcatggagatcagttgtcatggattcccagtatgcaagtcgcatcagcatcaggagtggaagagtctctgctggtccttaaggtctccaggaggggccagttccatcactggctttgggagcatgaaagtgacaaatccagccatgaatttgcctgagtgtcagtggttaagaatacaaaaagcggagctggagtttgttcagatcatcatcatcgtggtggtgatgatggtgatggtggtggtgatcacgtgcctgctgagccactacaagctgtctgcacggtccttcatcagccggcacagccaggggcggaggagagaagatgccctgtcctcagaaggatgcctgtggccctcggagagcacagtgtcaggcaacggaatcccagagccgcaggtctacgccccgcctcggcccaccgaccgcctggccgtgccgcccttcgcccagcgggagcgcttccaccgcttccagcccacctatccgtacctgcagcacgagatcgacctgccacccaccatctcgctgtcagacggggaggagcccccaccctaccagggcccctgcaccctccagcttcgg

SEQ ID NO: 16191 - DNA, 361 bp, Homo sapiens
  source 1..361: mol_type = unassigned DNA
ctgaacctccctctgggctgggcacgcttggactcctccaaagagcttggaccagcctgagccacatccctgggcttgacttctccagaacaagcctcctggtctttctgggagagctctggcagcatcactgtgcctgtgcagggagagcgggaacccacttcctgcaccggctttctctgagttcttcaggatgaattcgctctggtctagcggagctggagtttgttcagatcatcatcatcgtggtggtgatgatggtgatggtggtggtgatcacgtgcctgctgagccactacaagctgtctgcacggtccttcatcagccggcacagccaggggcggaggagagaagatgccct

SEQ ID NO: 16192 - DNA, 4627 bp, Homo sapiens
  source 1..4627: mol_type = unassigned DNA
ctgaacctccctctgggctgggcacgcttggactcctccaaagagcttggaccagcctgagccacatccctgggcttgacttctccagaacaagcctcctggtctttctgggagagctctggcagcatcactgtgcctgtgcagggagagcgggaacccacttcctgcaccggctttctctgagttcttcaggatgaattcgctctggtctagcggagctggagtttgttcagatcatcatcatcgtggtggtgatgatggtgatggtggtggtgatcacgtgcctgctgagccactacaagctgtctgcacggtccttcatcagccggcacagccaggggcggaggagagaagatgccctgtcctcagaaggatgcctgtggccctcggagagcacagtgtcaggcaacggaatcccagagccgcaggtctacgccccgcctcggcccaccgaccgcctggccgtgccgcccttcgcccagcgggagcgcttccaccgcttccagcccacctatccgtacctgcagcacgagatcgacctgccacccaccatctcgctgtcagacggggaggagcccccaccctaccagggcccctgcaccctccagcttcgggaccccgagcagcagctggaactgaaccgggagtcggtgcgcgcacccccaaacagaaccatcttcgacagtgacctgatggatagtgccaggctgggcggcccctgcccccccagcagtaactcgggcatcagcgccacgtgctacggcagcggcgggcgcatggaggggccgccgcccacctacagcgaggtcatcggccactacccggggtcctccttccagcaccagcagagcagtgggccgccctccttgctggaggggacccggctccaccacacacacatcgcgcccctagagagcgcagccatctggagcaaagagaaggataaacagaaaggacaccctctctagggtccccaggggggccgggctggggctgcgtaggtgaaaaggcagaacactccgcgcttcttagaagaggagtgagaggaaggcggggggcgcagcaacgcatcgtgtggccctcccctcccacctccctgtgtataaatatttacatgtgatgtctggtctgaatgcacaagctaagagagcttgcaaaaaaaaaaagaaaaaagaaaaaaaaaaaccacgtttctttgttgagctgtgtcttgaaggcaaaagaaaaaaaatttctacagtagtctttcttgtttctagttgagctgcgtgcgtgaatgcttattttcttttgtttatgataatttcacttaactttaaagacatatttgcacaaaacctttgtttaaagatctgcaatattatatatataaatatatataagataagagaaactgtatgtgcgagggcaggagtatttttgtattagaagaggcctattaaaaaaaaaagttgttttctgaactagaagaggaaaaaaatggcaatttttgagtgccaagtcagaaagtgtgtattaccttgtaaagaaaaaaattacaaagcaggggtttagagttatttatataaatgttgagattttgcactattttttaatataaatatgtcagtgcttgcttgatggaaacttctcttgtgtctgttgagactttaagggagaaatgtcggaatttcagagtcgcctgacggcagagggtgagcccccgtggagtctgcagagaggccttggccaggagcggcgggctttcccgaggggccactgtccctgcagagtggatgcttctgcctagtgacaggttatcaccacgttatatattccctaccgaaggagacaccttttcccccctgacccagaacagcctttaaatcacaagcaaaataggaaagttaaccacggaggcaccgagttccaggtagtggttttgcctttcccaaaaatgaaaataaactgttaccgaaggaattagtttttcctcttcttttttccaactgtgaaggtccccgtggggtggagcatggtgcccctcacaagccgcagcggctggtgcccgggctaccagggacatgccagagggctcgatgacttgtctctgcagggcgctttggtggttgttcagctggctaaaggttcaccggtgaaggcaggtgcggtaactgccgcactggaccctaggaagccccaggtattcgcaatctgacctcctcctgtctgtttcccttcacggatcaattctcacttaagaggccaataaacaacccaacatgaaaaggtgacaagcctgggtttctcccaggataggtgaaagggttaaaatgagtaaagcagttgagcaaacaccaacccgagcttcgggcgcagaattcttcaccttctcttcccctttccatctcctttccccgcggaaacaacgcttcccttctggtgtgtctgttgatctgtgttttcatttacatctctcttagactccgctcttgttctccaggttttcaccagatagatttggggttggcgggacctgctggtgacgtgcaggtgaaggacaggaaggggcatgtgagcgtaaatagaggtgaccagaggagagcatgaggggtggggctttgggacccaccggggccagtggctggagcttgacgtctttcctccccatgggggtgggagggcccccagctggaagagcagactcccagctgctaccccctcccttcccatgggagtggctttccattttgggcagaatgctgactagtagactaacataaaagatataaaaggcaataactattgtttgtgagcaacttttttataacttccaaaacaaaaacctgagcacagttttgaagttctagccactcgagctcatgcatgtgaaacgtgtgctttacgaaggtggcagctgacagacgtgggctctgcatgccgccagcctagtagaaagttctcgttcattggcaacagcagaacctgcctctccgtgaagtcgtcagcctaaaatttgtttctctcttgaagaggattctttgaaaaggtcctgcagagaaatcagtacaggttatcccgaaaggtacaaggacgcacttgtaaagatgattaaaacgtatctttcctttatgtgacgcgtctctagtgccttactgaagaagcagtgacactcccgtcgctcggtgaggacgttcccggacagtgcctcactcacctgggactggtatcccctcccagggtccaccaagggctcctgcttttcagacaccccatcatcctcgcgcgtcctcaccctgtctctaccagggaggtgcctagcttggtgaggttactcctgctcctccaacctttttttgccaaggtttgtacacgactcccatctaggctgaaaacctagaagtggaccttgtgtgtgtgcatggtgtcagcccaaagccaggctgagacagtcctcatatcctcttgagccaaactgtttgggtctcgttgcttcatggtatggtctggatttgtgggaatggctttgcgtgagaaaggggaggagagtggttgctgccctcagccggcttgaggacagagcctgtccctctcatgacaactcagtgttgaagcccagtgtcctcagcttcatgtccagtggatggcagaagttcatggggtagtggcctctcaaaggctgggcgcatcccaagacagccagcaggttgtctctggaaacgaccagagttaagctctcggcttctctgctgagggtgcaccctttcctctagatggtagttgtcacgttatctttgaaaactcttggactgctcctgaggaggccctcttttccagtaggaagttagatgggggttctcagaagtggctgattggaaggggacaagcttcgtttcaggggtctgccgttccatcctggttcagagaaggccgagcgtggctttctctagccttgtcactgtctccctgcctgtcaatcaccacctttcctccagaggaggaaaattatctcccctgcaaagcccggttctacacagatttcacaaattgtgctaagaaccgtccgtgttctcagaaagcccagtgtttttgcaaagaatgaaaagggaccccatatgtagcaaaaatcagggctgggggagagccgggttcattccctgtcctcattggtcgtccctatgaattgtacgtttcagagaaattttttttcctatgtgcaacacgaagcttccagaaccataaaatatcccgtcgataaggaaagaaaatgtcgttgttgttgtttttctggaaactgcttgaaatcttgctgtactatagagctcagaaggacacagcccgtcctcccctgcctgcctgattccatggctgttgtgctgattccaatgctttcacgttggttcctggcgtgggaactgctctcctttgcagccccatttcccaagctctgttcaagttaaacttatgtaagctttccgtggcatgcggggcgcgcacccacgtccccgctgcgtaagactctgtatttggatgccaatccacaggcctgaagaaactgcttgttgtgtatcagtaatcattagtggcaatgatgacattctgaaaagctgcaatacttatacaataaattttacaattctttggaatg

SEQ ID NO: 16193 - DNA, 3608 bp, Homo sapiens
  source 1..3608: mol_type = unassigned DNA
acactgcctttccccattgggtctctgtaagagtcacacgctttgggcatccttgaaaagaatcttctgaggcctcagcattttatctgagtcttctgaatcccacttagaactgtgttgagctctcacccatcacgatgagcaacaaattcctgggcacctggaaacttgtctctagtgagaactttgacgattacatgaaagctctgggtgtggggttagccaccagaaaactgggaaatttggccaaacccactgtgatcatcagcaagaaaggagatattataactatacgaactgaaagtacctttaaaaatacagaaatctccttcaagctaggccaggaatttgaagaaaccacagctgacaatagaaagaccaagagcatcgtaaccctgcagagaggatcactgaatcaagtgcagagatgggatggcaaagagacaaccataaagagaaagctagtgaatgggaaaatggtagcggaatgtaaaatgaagggcgtggtgtgcaccagaatctatgagaaggtctgaaaaatcatttcttcattgaagtggctttttatcatttaatgatggaaatcaattgcttccattgacaaaactgaatacactgcaaatatttgtttttgcttttgtcttaatatatcagatatgcaaaggcctaaactgagaattaatctaaaagtcagtgttatttaaacattttcaatgtgcatgcatgtcattattacatcaaagcatatatattggccagacacaaacagttgatgatgtcattcaattaactacaaaattctaatctatgttgaactttgtatacttgaaatgataataaaaaggatataatttcttagtaaaatgaaatcaaagtattgatcagggtagcaaactcaaatgctgacaggggccagaggagatatggggaaggagcatcagaaatgaggcaagctaggagaatgggctattataatgtaaagaattgtagtctcagttaaaaggggtagcctctactccagccaacattttaaaattaatggataatttatagacagttaaatttatagacagttaagtaaaaatggataatttatagacagataatttatagacaggtaaatgtgagttaaatataactcacatcccactcaagacacaaaacattttcttaatcctagtacatttttttctgtcccttcccaatcagtgtccttttctgttccacccctaccaaaagcaagtagtggtttggtttctatcatatagattaattttacctgctcatatgaagggaattgtacatcatgcattcttttctgtttgccttttttaaattcagcatcatgtttttgtgatacatccacattgttgcatgcagctgtagtttgtttctttttattaccaagtactatttcattgtatgaatatatcacagtttatccattctactattaagacaattgagctatttctaattttcggctgctatgaataaagctgctacaaatatttttgtacaagactttttgtaaacataggagtccctttattttaaataaataactagtcatatcattaggtccagtaattgttgacaggcaggaacgggggaccattgcattgtgcccaagtaataataaaactatttcagatgtattatatgattgagcaaatgagaaaacatgttgatgttgatgggagtcaggatgttcactatggaaaaacaaatatacaaatatgaaatgagggaaggcaagaaagaaccatgtggaaatggaatagaattggtataaattcataatttctaaaccatgtatatgtacgtttatatgtattataattgcatacacatgcctccatgcatatatgtgtgtgataatacacatgcatttatgtgcgtgtgtgtatacacatgcatatatttactaatcctatctgccaaaatggcttagacacaaaaacacctcagcagaaatgaatatacctagcactcagatcttcgtgtctaatatagtttgccactaaaaggaaccaaggctacttggaaaaatggatgattccaaagcaagggcaaggtaggaacaagatgagcttgaaatatcttgttatgccagaaagtaatgttaaaaaaaaaaatagaggtatattgccaaaacatagagccagcttgaaggggctcccactggccaaacttgagccaatctgagagcaaaataattgagaaaaataaataacaagataattgagaaaaaaataaaataaattcccaattccattgggaaaaaatagaaatccatgaatccatactgatataatgatagataatcgatagataggtagatgactgacagatgatagatagatatatagatagatagatagatagatagatagatagatagatagatagagaaatgagaaggtttctcttttgcaatagaacgtcatggaccagtgttaaatgtgagtggaaggagttctggaattggaaaaccatcatttttcaaccatcacagtaaatatggctcaggcaagaattatcaatcaatgctaaagctagggggaaatttcgcttaggagcaggatattagggtattagtctgggcttaaagtatctcctcacagattgttgttagtttctggggaaagaatagtaaccatgcaatggaaaaaaatggacaacctcttgactaggttatcaaaattaacctcaccaataaagggtggatgttcaacatgtgccttcaaatgtgacccactgagaaggaaacaacatcactgtaacaacaacaaccagaaacgacagggggttttgactgaattcttcaaaaatgtcaatgtcatagaagacaaagaaaggttgtggaaatgtttcagattaaatgatagtaaaaacacctgacaactaaacatagtaagtaatactagactggattctgtaccagaggtaacataagtgctccaaaggacaatgttaggtcaactggcaaattggaatatagacagtcaatcagataagaagtatactttgattaagtaaaaaaaatccctattcttggaaaatacacaataaagtattttgaggtaaagggccataatgtatgcaatctactctcaaaaaattcagaaacatatatttgtgtgcatttgcatgtgcaacagtacacacaaacatacataaagagagcaattgataaggcaaataaggtaacatttaacaataatctgatacacataaatagagaaagagcaattgataaagtaaatgaggtaaaatttaacaataatctgagcaaaaggtatatgtgttttctttgagacagtctgattcttgcaacttattctgtaagttggaacttatttccaaacatgattgaaaaaaaaccccgcacttggcaacttcttctctttttcagcctagaaatgtctgtgttaagtggttttttatttattgttgttgtttgttgttattgttgttttgttgccaggctccaactcacaaaatacgagtttaaaaactgcgttgttatttttagagatttgtgataatacaacttgttataaaatttattcctcaataaatataatttctctactatgcaaaaa

SEQ ID NO: 16194 - DNA, 1264 bp, Homo sapiens
  source 1..1264: mol_type = unassigned DNA
atctgagtcttctgaatcccacttagaactgtgttgagctctcacccatcacgatgagcaacaaattcctgggcacctggaaacttgtctctagtgagaactttgacgattacatgaaagctctggagcatcgtaaccctgcagagaggatcactgaatcaagtgcagagatgggatggcaaagagacaaccataaagagaaagctagtgaatgggaaaatggtagcggaatgtaaaatgaagggcgtggtgtgcaccagaatctatgagaaggtctgaaaaatcatttcttcattgaagtggctttttatcatttaatgatggaaatcaattgcttccattgacaaaactgaatacactgcaaatatttgtttttgcttttgtcttaatatatcagatatgcaaaggcctaaactgagaattaatctaaaagtcagtgttatttaaacattttcaatgtgcatgcatgtcattattacatcaaagcatatatattggccagacacaaacagttgatgatgtcattcaattaactacaaaattctaatctatgttgaactttgtatacttgaaatgataataaaaaggatataatttcttagtaaaatgaaatcaaagtattgatcagggtagcaaactcaaatgctgacaggggccagaggagatatggggaaggagcatcagaaatgaggcaagctaggagaatgggctattataatgtaaagaattgtagtctcagttaaaaggggtagcctctactccagccaacattttaaaattaatggataatttatagacagttaaatttatagacagttaagtaaaaatggataatttatagacagataatttatagacaggtaaatgtgagttaaatataactcacatcccactcaagacacaaaacattttcttaatcctagtacatttttttctgtcccttcccaatcagtgtccttttctgttccacccctaccaaaagcaagtagtggtttggtttctatcatatagattaattttacctgctcatatgaagggaattgtacatcatgcattcttttctgtttgccttttttaaattcagcatcatgtttttgtgatacatccacattgttgcatgcagctgtagtttgtttctttttattaccaagtactatttcattgtatgaatatatcacagtttatccattctactattaagacaattgagctatttctaattttcggctgctatgaataaagctgctacaaatatttttgtaca

SEQ ID NO: 16195 - DNA, 1817 bp, Homo sapiens
  source 1..1817: mol_type = unassigned DNA
tgttcccgttaaaggggaacgccaggagcctcccactgcccccttgcttcgcgcgcgcgcagccccgcagcgcagctttggcggcgccagcagcggagccaacgcacccgagtttgtgtttgaggccaccctgaggatcgggacagctgttcctttgggctgcagaaactccgctgagcagaacttgccgccagaatgctcctcctgttgctgagtatcatcgtcctccacgtcgcggtgctggtgctgctgttcgtctccacgatcgtcagccaatggatcgtgggcaatggacacgcaactgatctctggcagaactgtagcacctcttcctcaggaaatgtccaccactgtttctcatcatcaccaaacgaatggctgcagtctgtccaggccaccatgatcctgtcgatcatcttcagcattctgtctctgttcctgttcttctgccaactcttcaccctcaccaaggggggcaggttttacatcactggaatcttccaaattcttgctggtctgtgcgtgatgagtgctgcggccatctacacggtgaggcacccggagtggcatctcaactcggattactcctacggtttcgcctacatcctggcctgggtggccttccccctggcccttctcagcggtgtcatctatgtgatcttgcggaaacgcgaatgaggcgcccagacggtctgtctgaggctctgagcgtacatagggaagggaggaagggaaaacagaaagcagacaaagaaaaaagagctagcccaaaatcccaaactcaaaccaaaccaaacagaaagcagtggaggtgggggttgctgttgattgaagatgtatataatatctccggtttataaaacctatttataacactttttacatatatgtacatagtattgtttgctttttatgttgaccatcagcctcgtgttgagccttaaagaagtagctaaggaactttacatcctaacagtataatccagctcagtatttttgttttgttttttgtttgtttgttttgttttacccagaaataagataactccatctcgccccttccctttcatctgaaagaagatacctccctcccagtccacctcatttagaaaaccaaagtgtgggtagaaaccccaaatgtccaaaagcccttttctggtgggtgacccagtgcatccaacagaaacagccgctgcccgaacctctgtgtgaagctttacgcgcacacggacaaaatgcccaaactggagcccttgcaaaaacacggcttgtggcattggcatacttgcccttacaggtggagtatcttcgtcacacatctaaatgagaaatcagtgacaacaagtctttgaaatggtgctatggatttaccattccttattatcactaatcatctaaacaactcactggaaatccaattaacaattttacaacataagatagaatggagacctgaataattctgtgtaatataaatggtttataactgcttttgtacctagctaggctgctattattactataatgagtaaatcataaagccttcatcactcccacatttttcttacggtcggagcatcagaacaagcgtctagactccttgggaccgtgagttcctagagcttggctgggtctaggctgttctgtgcctccaaggactgtctggcaatgacttgtattggccaccaactgtagatgtatatatggtgcccttctgatgctaagactccagaccttttgtttttgctttgcattttctgattttataccaactgtgtggactaagatgcattaaaataaacatcagagtaactcac

SEQ ID NO: 16196 - DNA, 1810 bp, Homo sapiens
  source 1..1810: mol_type = unassigned DNA
agggaacatctcggggagcctggttggaagctgcaggcttagtctgtcggctgcgggtctctgactgccctgtggggagggtcttgccttaacatcccttgcatttggctgcaaagaaatctgcttggaagaaggggttacgctgtttggccgggcagaaactccgctgagcagaacttgccgccagaatgctcctcctgttgctgagtatcatcgtcctccacgtcgcggtgctggtgctgctgttcgtctccacgatcgtcagccaatggatcgtgggcaatggacacgcaactgatctctggcagaactgtagcacctcttcctcaggaaatgtccaccactgtttctcatcatcaccaaacgaatggctgcagtctgtccaggccaccatgatcctgtcgatcatcttcagcattctgtctctgttcctgttcttctgccaactcttcaccctcaccaaggggggcaggttttacatcactggaatcttccaaattcttgctggtctgtgcgtgatgagtgctgcggccatctacacggtgaggcacccggagtggcatctcaactcggattactcctacggtttcgcctacatcctggcctgggtggccttccccctggcccttctcagcggtgtcatctatgtgatcttgcggaaacgcgaatgaggcgcccagacggtctgtctgaggctctgagcgtacatagggaagggaggaagggaaaacagaaagcagacaaagaaaaaagagctagcccaaaatcccaaactcaaaccaaaccaaacagaaagcagtggaggtgggggttgctgttgattgaagatgtatataatatctccggtttataaaacctatttataacactttttacatatatgtacatagtattgtttgctttttatgttgaccatcagcctcgtgttgagccttaaagaagtagctaaggaactttacatcctaacagtataatccagctcagtatttttgttttgttttttgtttgtttgttttgttttacccagaaataagataactccatctcgccccttccctttcatctgaaagaagatacctccctcccagtccacctcatttagaaaaccaaagtgtgggtagaaaccccaaatgtccaaaagcccttttctggtgggtgacccagtgcatccaacagaaacagccgctgcccgaacctctgtgtgaagctttacgcgcacacggacaaaatgcccaaactggagcccttgcaaaaacacggcttgtggcattggcatacttgcccttacaggtggagtatcttcgtcacacatctaaatgagaaatcagtgacaacaagtctttgaaatggtgctatggatttaccattccttattatcactaatcatctaaacaactcactggaaatccaattaacaattttacaacataagatagaatggagacctgaataattctgtgtaatataaatggtttataactgcttttgtacctagctaggctgctattattactataatgagtaaatcataaagccttcatcactcccacatttttcttacggtcggagcatcagaacaagcgtctagactccttgggaccgtgagttcctagagcttggctgggtctaggctgttctgtgcctccaaggactgtctggcaatgacttgtattggccaccaactgtagatgtatatatggtgcccttctgatgctaagactccagaccttttgtttttgctttgcattttctgattttataccaactgtgtggactaagatgcattaaaataaacatcagagtaactcac

SEQ ID NO: 16197 - DNA, 872 bp, Homo sapiens
  source 1..872: mol_type = unassigned DNA
gggagcaccaccagggaacatctcggggagcctggttggaagctgcaggcttagtctgtcggctgcgggtctctgactgccctgtggggagggtcttgccttaacatcccttgcatttggctgcaaagaaatctgcttggaagaaggggttacgctgtttggccggaatggctgcagtctgtccaggccaccatgatcctgtcgatcatcttcagcattctgtctctgttcctgttcttctgccaactcttcaccctcaccaaggggggcaggttttacatcactggaatcttccaaattcttgctggtctgtgcgtgatgagtgctgcggccatctacacggtgaggcacccggagtggcatctcaactcggattactcctacggtttcgcctacatcctggcctgggtggccttccccctggcccttctcagcggtgtcatctatgtgatcttgcggaaacgcgaatgaggcgcccagacggtctgtctgaggctctgagcgtacatagggaagggaggaagggaaaacagaaagcagacaaagaaaaaagagctagcccaaaatcccaaactcaaaccaaaccaaacagaaagcagtggaggtgggggttgctgttgattgaagatgtatataatatctccggtttataaaacctatttataacactttttacatatatgtacatagtattgtttgctttttatgttgaccatcagcctcgtgttgagccttaaagaagtagctaaggaactttacatcctaacagtataatccagctcagtatttttgttttgttttttgtttgtttgttttgttttacccagaaataagataactccatctcgccccttccctttcatctgaaagaa

SEQ ID NO: 16198 - DNA, 816 bp, Homo sapiens
  source 1..816: mol_type = unassigned DNA
tcgcgcgcgcgcagccccgcagcgcagctttggcggcgccagcagcggagccaacgcacccgagtttgtgtttgaggccaccctgaggatcgggacagctgttcctttgggctgcagaaactccgctgagcagaacttgccgccagaatgctcctcctgttgctgagtatcatcgtcctccacgtcgcggtgctggtgctgctgttcgtctccacgatcgtcagccaatggatcgtgggcaatggacacgcaactgatctctggcagaactgtagcacctcttcctcaggaaatgtccaccactgtttctcatcatcaccaaacgaatggctgcagtctgtccaggccaccatgatcctgtcgatcatcttcagcattctgtctctgttcctgttcttctgccaactcttcaccctcaccaaggggggcaggttttacatcactggaatcttccaaattcttgctgaatcaaactcaagtcaaatgtgtggttaccgggattaagaacagaaagaatagaggggactcctgagtctgtgcgtgatgagtgctgcggccatctacacggtgaggcacccggagtggcatctcaactcggattactcctacggtttcgcctacatcctggcctgggtggccttccccctggcccttctcagcggtgtcatctatgtgatcttgcggaaacgcgaatgaggcgcccagacggtctgtctgaggctctgagcgtacatagggaagggaggaagggaaaacagaaagcagacaaagaaaaaagagctagcccaaaatcccaaactcaaaccaaaccaaaca

SEQ ID NO: 16199 - DNA, 428 bp, Homo sapiens
  source 1..428: mol_type = unassigned DNA
agttacagggagcaccaccagggaacatctcggggagcctggttggaagctgcaggcttagtctgtcggctgcgggtctctgactgccctgtggggagggtcttgccttaacatcccttgcatttggctgcaaagaaatctgcttggaagaaggggttacgctgtttggccggcaatggatcgtgggcaatggacacgcaactgatctctggcagaactgtagcacctcttcctcaggaaatgtccaccactgtttctcatcatcaccaaacgaatggctgcagtctgtccaggccaccatgatcctgtcgatcatcttcagcattctgtctctgttcctgttcttctgccaactcttcaccctcaccaaggggggcaggttttacatcactggaatcttccaaattcttgctggtctgtgcgtgatg

SEQ ID NO: 16200 - DNA, 571 bp, Homo sapiens
  source 1..571: mol_type = unassigned DNA
agctttggcggcgccagcagcggagccaacgcacccgagtttgtgtttgaggccaccctgaggatcgggacagctgttcctttgggctgcagaaactccgctgagcagaacttgccgccagaatgctcctcctgttgctgagtatcatcgtcctccacgtcgcggtgctggtgctgctgttcgtctccacgatcgtcagccaatggatcgtgggcaatggacacgcaactgatctctggcagaactgtagcacctcttcctcaggaaatgtccaccactgtttctcatcatcaccaaacgaatggctgcagtctgtccaggccaccatgatcctgtcgatcatcttcagcattctgtctctgttcctgttcttctgccaactcttcaccctcaccaaggggggcaggttttacatcactggaatcttccaaattcttgctggtaagttgtggatggtaaagtccatgtggaagcggggtgcatccaagtctgcggaatgattagtttagtagaaggatgtggcctcagaatgactgatgttcatgagtctccccactggatgctttccata

SEQ ID NO: 16201 - DNA, 576 bp, Homo sapiens
  source 1..576: mol_type = unassigned DNA
ctcgcaggcagaaactccgctgagcagaacttgccgccagaatgctcctcctgttgctgagtatcatcgtcctccacgtcgcggtgctggtgctgctgttcgtctccacgatcgtcagccaatggatcgtgggcaatggacacgcaactgatctctggcagaactgtagcacctcttcctcaggaaatgtccaccactgtttctcatcatcaccaaacggtgaggctggttttgtgctccatgagcttgtcctcagacgcctgtaacacgtttctcagcccagagctggaaacgcttattggaagacacaagccagaatgtcgttgctggggtggggtgggatgtgacagggagccatgagtccagggaaaatgggaggggtggtgatctcgctggggaagctgagatcctgggcatcattgtgattcactctacctagagacatgcccttagtgccctcctgatcacttaggataatgctttttgtgattgaaaaaaatatcgacctgggagctgtgaaggtggtatgatagctaagcctttggcagacccccttgggacattggatcaaacgtg

SEQ ID NO: 16202 - DNA, 637 bp, Homo sapiens
  source 1..637: mol_type = unassigned DNA
cagggaacatctcggggagcctggttggaagctgcaggcttagtctgtcggctgcgggtctctgactgccctgtggggagggtcttgccttaacatcccttgcatttggctgcaaagaaatctgcttggaagaaggggttacgctgtttggccgggcagaaactccgctgagcagaacttgccgccagaatgctcctcctgttgctgagtatcatcgtcctccacgtcgcggtgctggtgctgctgttcgtctccacgatcgtcagcgtgagtgcctggcggggaggctccctgcgcggcccgcccttccccatctgggttcccagcccgtgctcctgctggttcaggactgtgttatttgcagacagttggaagtctcagacgtcccagggaagtttctggcaatctgcccccttccagttgctttgagaaaacgagagcagattcagtgataggaaccaagcgagcgctgggctgggttagctgcgcaggtctctatttaagccaagtaacttcagagccgatctagggtccccgaccttcatttgacaagattgtttaacttttttttttcttgatgcagcctcgttgaagaagaggagtatttatgatttttttttctccaaaccatagtcag

SEQ ID NO: 16203 - DNA, 1822 bp, Homo sapiens
  source 1..1822: mol_type = unassigned DNA
tgttcccgttaaaggggaacgccaggagcctcccactgcccccttgcttcgcgcgcgcgcagccccgcagcgcagctttggcggcgccagcagcggagccaacgcacccgagtttgtgtttgaggccaccctgaggatcgggacagctgttcctttgggctgtaagcagaaactccgctgagcagaacttgccgccagaatgctcctcctgttgctgagtatcatcgtcctccacgtcgcggtgctggtgctgctgttcgtctccacgatcgtcagccaatggatcgtgggcaatggacacgcaactgatctctggcagaactgtagcacctcttcctcaggaaatgtccaccactgtttctcatcatcaccaaacgaatggctgcagtctgtccaggccaccatgatcctgtcgatcatcttcagcattctgtctctgttcctgttcttctgccaactcttcaccctcaccaaggggggcaggttttacatcactggaatcttccaaattcttgctggtctgtgcgtgatgagtgctgcggccatctacacggtgaggcacccggagtggcatctcaactcggattactcctacggtttcgcctacatcctggcctgggtggccttccccctggcccttctcagcggtgtcatctatgtgatcttgcggaaacgcgaatgaggcgcccagacggtctgtctgaggctctgagcgtacatagggaagggaggaagggaaaacagaaagcagacaaagaaaaaagagctagcccaaaatcccaaactcaaaccaaaccaaacagaaagcagtggaggtgggggttgctgttgattgaagatgtatataatatctccggtttataaaacctatttataacactttttacatatatgtacatagtattgtttgctttttatgttgaccatcagcctcgtgttgagccttaaagaagtagctaaggaactttacatcctaacagtataatccagctcagtatttttgttttgttttttgtttgtttgttttgttttacccagaaataagataactccatctcgccccttccctttcatctgaaagaagatacctccctcccagtccacctcatttagaaaaccaaagtgtgggtagaaaccccaaatgtccaaaagcccttttctggtgggtgacccagtgcatccaacagaaacagccgctgcccgaacctctgtgtgaagctttacgcgcacacggacaaaatgcccaaactggagcccttgcaaaaacacggcttgtggcattggcatacttgcccttacaggtggagtatcttcgtcacacatctaaatgagaaatcagtgacaacaagtctttgaaatggtgctatggatttaccattccttattatcactaatcatctaaacaactcactggaaatccaattaacaattttacaacataagatagaatggagacctgaataattctgtgtaatataaatggtttataactgcttttgtacctagctaggctgctattattactataatgagtaaatcataaagccttcatcactcccacatttttcttacggtcggagcatcagaacaagcgtctagactccttgggaccgtgagttcctagagcttggctgggtctaggctgttctgtgcctccaaggactgtctggcaatgacttgtattggccaccaactgtagatgtatatatggtgcccttctgatgctaagactccagaccttttgtttttgctttgcattttctgattttataccaactgtgtggactaagatgcattaaaataaacatcagagtaactcact

SEQ ID NO: 16204 - DNA, 1280 bp, Homo sapiens
  source 1..1280: mol_type = unassigned DNA
gaaggttctgggcggggctggactgttctaagtgagttcgggtgggggagcttcacgaggggaggctgctctgtgaaggaaccgcctttctctccgcgtgtctcacccttttctccccatatctgtttggacatgagctgagggcacggtcgcgggcggtcagccctgttcgcagctacggcgaggaggggcgcgattgttccttgttgccgctccgcttagtggccgcgtccattccgcgcggtgtcccgattttaggggtagggagaagtgtcagcttcaggcatcgcgaggcgtggcggccccatggccccgctgggaggcgccccgcggctggtactgctgttcagcggcaagaggaaatccgggaaggacttcgtgaccgaggcgctgcagagcagacttggagctgatgtctgtgctgtcctccggctctctggtccactcaaggaacagtatgctcaggagcatggcttgaacttccagagactcctggacaccagcacctacaaggaggcctttcggaaggacatgatccgctggggagaggagaaacgccaggctgacccaggcttcttttgcaggaagattgtggagggcatctcccagcccatctggctggtgagtgacacacggagagtgtctgacatccagtggtttcgggaggcctatggggccgtgacgcagacggtccgcgttgtagcgttggagcagagccgacagcagcggggctgggtgttcacgccaggggtggacgatgctgagtcagaatgtggcctggacaacttcggggactttgactgggtcatcgagaaccatggagttgaacagcgcctggaggagcagttggagaacctgatagaatttatccgctccagactttagtcactaggttctaggagtgagctggggcctgctgaggtgggggtggggctgactctgcaaaatgggggtgtcccccgatcctggccgaggtgaggaacagacagggggggtctagattctgagggggttggtggatattgggcaaggcaggaaacctctggagacctcattttctccatggggaagacagccatgctcttcaggaggagactccaagggcaaaggagggtgtcttggctgtgcttgaaggcgaaaccctgccatatccccagtgccagtcccctcagcctgtggtggccttgcatcctgactggatgttctcagccccttgttctgggcaagaacccagagctccccagtgtggatactaataaacctcttggagcacactctca

SEQ ID NO: 16205 - DNA, 1483 bp, Homo sapiens
  source 1..1483: mol_type = unassigned DNA
gcgtgtggaacctgacggaactgccacgatgctgccactttggactctttcactgctgctgggagcagtagcaggaaaagaagtttgctacgaaagactcggctgcttcagtgatgactccccatggtcaggaattacggaaagacccctccatatattgccttggtctccaaaagatgtcaacacccgcttcctcctatatactaatgagaacccaaacaactttcaagaagttgccgcagattcatcaagcatcagtggctccaatttcaaaacaaatagaaaaactcgctttattattcatggattcatagacaagggagaagaaaactggctggccaatgtgtgcaagaatctgttcaaggtggaaagtgtgaactgtatctgtgtggactggaaaggtggctcccgaactggatacacacaagcctcgcagaacatcaggatcgtgggagcagaagtggcatattttgttgaatttcttcagtcggcgttcggttactcaccttccaatgtgcatgtcattggccacagcctgggtgcccacgctgctggggaggctggaaggagaaccaatgggaccattggacgcatcacagggttggacccagcagaaccttgctttcagggcacacctgaattagtccgattggaccccagcgatgccaaatttgtggatgtaattcacacggatggtgcccccatagtccccaatttggggtttggaatgagccaagtcgtgggccacctagatttctttccaaatggaggagtggaaatgcctggatgtaaaaagaacattctctctcagattgtggacatagacggaatctgggaagggactcgagactttgcggcctgtaatcacttaagaagctacaaatattacactgatagcatcgtcaaccctgatggctttgctggattcccctgtgcctcttacaacgtcttcactgcaaacaagtgtttcccttgtccaagtggaggctgcccacagatgggtcactatgctgatagatatcctgggaaaacaaatgatgtgggccagaaattttatctagacactggtgatgccagtaattttgcacgttggaggtataaggtatctgtcacactgtctggaaaaaaggttacaggacacatactagtttctttgttcggaaataaaggaaactctaagcagtatgaaattttcaagggcactctcaaaccagatagtactcattccaatgaatttgactcagatgtggatgttggggacttgcagatggttaaatttatttggtataacaatgtgatcaacccaactttacctagagtgggagcatccaagattatagtggagacaaatgttggaaaacagttcaacttctgtagtccagaaaccgtcagggaggaagttctgctcaccctcacaccgtgttaggagactactgttatttgaccaatgaattgacttctaataaaatctagtggtgatgca

SEQ ID NO: 16206 - DNA, 515 bp, Homo sapiens
  source 1..515: mol_type = unassigned DNA
atgctgccactttggactctttcactgctgctgggagcagtagcaggaaaagaagtttgctacgaaagactcggctgcttcagtgatgactccccatggtcaggaattacggaaagacccctccatatattgccttggtctccaaaagatgtcaacacccgcttcctcctatatactaatgagaacccaaacaactttcaagaagttgccgcagattcatcaagcatcagtggctccaatttcaaaacaaatagaaaaactcgctttattattcatggattcatagacaagggagaagaaaactggctggccaatgtgtgcaagaatctgttcaaggtggaaagtgtgaactgtatctgtgtggactggaaaggtggctcccgaactggatacacacaagcctcgcagaacatcaggatcgtgggagcagaagtggcatattttgttgaatttcttcaggtaattactcccggattgcataaaagcctgtacacatggttttccagattatcttt

SEQ ID NO: 16207 - DNA, 4965 bp, Homo sapiens
  source 1..4965: mol_type = unassigned DNA
gctcggggaagcggcaaagttggatctgggagggcgtccgctgcggctgcgggagccgaaaggctgccagttcccggcagcgctgggaggagggaggcgcgggcggggcgcggcgccggggaggggagcggtgctcaggggagggctggaggggagggaaggagagagagaggggagggcggcaccgcccctagccccgcgctccggaagtgaagcggccagaccaccagctaatggatgcggagcggagggcccgctgaccgctctccgcgcctggagcagcttggcttggctggagctaagagccagacacaccactgtgtggaggtgggtgatgtcttcctgtgctaaaaggtgaataaataagctcctcacctctcgcggaacactcgggaacacatcaacaggggtccaagccgccctgctgggaggcttctcttcaagagttctgggtcccagagtggaaggcattttcccatcaactggagagagacgaaacatcagagaccaggaggctgtggagaaagcagctgtcccaggtgcctcaactatcagagaagggtcagcgtcacgtggctgccagcatctttgagaaaatcactggcaatcggacttcagagctgcgggcacaggtgtggttagaactgagatacgacctgcccacctgggtcaggcctaaagacaagaagtcctgagttcttgccactgagtaggccagggtcatttgtccagaaaactttgtgactgtctttgagtgacctagtctgggacccattcattggtgggttctaaggttagaagctcatccaggatattttcaatattaagtcagtgcatagctgcaccactaacaaattggtgcctgtagagtcagagtgggtcaattcttaggacaatggcgctggcactgttagaggactggtgcaggataatgagtgtggatgagcagaagtcactgatggttacggggataccggcggactttgaggaggctgagattcaggaggtccttcaggagactttaaagtctctgggcaggtatagactgcttggcaagatattccggaagcaggagaatgccaatgctgtcttactagagcttctggaagatactgatgtctcggccattcccagtgaggtccagggaaaggggggtgtctggaaggtgatctttaagacccctaatcaggacactgagtttcttgaaagattgaacctgtttctagaaaaagaggggcagacggtctcgggtatgtttcgagccctggggcaggagggcgtgtctccagccacagtgccctgcatctcaccagaattactggcccatttgttgggacaggcaatggcacatgcgcctcagcccctgctacccatgagataccggaaactgcgagtattctcagggagtgctgtcccagccccagaggaagagtcctttgaggtctggttggaacaggccacggagatagtcaaagagtggccagtaacagaggcagaaaagaaaaggtggctggcggaaagcctgcggggccctgccctggacctcatgcacatagtgcaggcagacaacccgtccatcagtgtagaagagtgtttggaggcctttaagcaagtgtttgggagcctagagagccgcaggacagcccaggtgaggtatctgaagacctatcaggaggaaggagagaaggtctcagcctatgtgttacggctagaaaccctgctccggagagcggtggagaaacgcgccatccctcggcgtattgcggaccaggtccgcctggagcaggtcatggctggggccactcttaaccagatgctgtggtgccggcttagggagctgaaggatcagggcccgccccccagcttccttgagctaatgaaggtaatacgggaagaagaggaggaagaggcctcctttgagaatgagagtatcgaagagccagaggaacgagatggctatggccgctggaatcatgagggagacgactgaaaaccacctgggggcaggacccacagccagtgggctaagacctttaaaaaatttttttctttaatgtatgggactgaaatcaaaccatgaaagccaattattgaccttccttccttccttccttccctcccttcctccttctctccttctctcctcctctctcctctcctctcctctctttccttccttccttccttttttctttttctctttcttctttatttcttgggtctcactctcatcacccaggctagagtgcagtggcacaaaaatctcggctcactgcagccttgacttcccaggctcaggctcaggtgatcctcacaccttagcctcccaagtacctgggactacaggcacgcaccaccatgcctagctattcttttgtatttttggtagagacagggttttgctgtgttgctcaggctggtctggaacccctaggctcaaatgatgtgcccaactcggcctcccaaagtgctgggattacaggcatgaaccgccatgcctggcccttgatttttctttttaagaaaaaaatatctaggagtttcttagaccctatgtagattattaatgaacaaaagattaaactccaaatattaaatagtaagcctgaaggaatctgaaacacttgtacttccaattttctttaaataatcccaaatagaccagaattggcccataccatagaagaaagaattggcagtcaaaaaaaaaaataccttttgtaatgtttgaaaaataaagctgtttgacttgtcaggtgttttcctttctcaaatcagcaaattctctctgagtgcctggctttgtgagacactgtacaaggagttacaagactacagctataacctgcagttgagcagttataaacctacaaaatgggccctgccctcagagaggttccagtctagatgaggagctgatctagacaggtaaaaggctaactaaccctttgtgtaaataagttcatcaccccagtaaaagtgtcatcacccagtgaataggaccacctctgcctgcagatttttgttgttgttgttgtcattgttgttgttgttttaacctgggaagtgttcttcctgcctttctgctaggtgtcagatagatggtcccagagctaggtgctgtgtcaggccctgaagacacagatgactcaacctaagctttactttccagaggtccacagcctgagaggtgtccccaaagaaagggggacatgaggggactgcatgcttgagagcagggttgtttagggcaggtttggatttagtgagcaggctggtttgcttagagaaggcttttagtggcaacaaaggatgaagaggagagaaaaggaactcacatttattgagggcctactgtgtgcaaagtgtttcatgtatatctcattgaatgtatacagccaccctgttgtggtataattttgctctttataaagagaaagaccgaagctcagatgagttaagtggtctcctcaacaccaaaatgccaagaagtgatggagcctagacagaagcccagaactttctgactcacactagtccatcctctaccatcacgatgactttcaaattgtgctctgcagttctgcagattttctagcagtgccatctccaaaatgtgttttaaactctttatttttttaattattattagtattattttgagactgagtcttgctctatcacccaggctggagtgcagtggtgcaatctcagctcactgcaacctccgcctcccaggttcaagcgatttcgtgcctcagcctcccgagtagctgggattacaggcacccaccaccacgcccagctaatttttgtatttttagtagaaatggggtttcaccatgttggccaggctggtctcgaactcctgacctcaagtgatccactcacctcggcctcccaaagtgctgggattacaggtgtgagccaccatgcctgggctaaactctttaagtctctagtaaatgcagctagattcaaatgggctgataaccaaattttaacacatcagcattcaccaccaggtttacttttattttcagattggctcattttgtgcagaccttagagcaaagtttcctttatggtatctgtgtacgtatccaaacttcttttaattgttcacagattttaaaagcggtagcaccacatggttgtgtagatcagacctgtgtatttagatcagacctgtgtatcacgtaagtgtgtgagtgcagtgcagatgagcaccatttagttatatgtgctaggcaaatctccaacacagttgatgtgtagtcttgtggtagatttgtgcatactgtaagcaaattgcttagcttctctagacatcagtttccacatctgaaaaataagaagatgagagtacacggttgttatgaacaaatgacttaatgctttttaagcacgttgcatgacatctggaacacagaaagccctcaatacattgaagctcttaggattttcacgatgttcctgtctgctcaatgcatgctttctttattgttctgacagttgtgtggtaacaagctaatatgcttccagttgacttccagtctaccctggtgttagaaaccgtttcatctcttattgtaaatttgagtgcttgttgttttttatatttgtgatgactcttccagcagttgttgacaattgttagaggtttgacttttaaataattacttattttttctgattgtggttcagtttaactgaagaatatcctgagattgtaagaaaagcattttttaaaaggtatcacttgtgatcatttatctttctaaattctatttttaatactgttccaccaaagtgatgcagtggttaccatgacaccctaatttcatgtgtttttgtatttatgaaaatagtttcattgtcatttattggcggtatacaaagtaaaatgttataaatgtgaagttataaaataaatatatgctaataaaatcctgagtttttctg

SEQ ID NO: 16208 - DNA, 576 bp, Homo sapiens
  source 1..576: mol_type = unassigned DNA
gtgaagcggccagaccaccagctaatggatgcggagcggagggcccgctgaccgctctccgcgcctggagcagcttggcttggctggagctaagagccagacacaccactgtgtggaggtgggtgatgtcttcctgtgctaaaaggggtccaagccgccctgctgggaggcttctcttcaagagttctgggtcccagagtggaaggcattttcccatcaactggagagagacgaaacatcagagaccaggaggctgtggagaaagcagctgtcccaggtgcctcaactatcagagaagggtcagcgtcacgtggctgccagcatctttgagaaaatcactggcaatcggacttcagagctgcgggcacaggtgtggttagaactgagatacgacctgcccacctgggtcaggcctaaagacaagaagtcctgagttcttgccactgagtaggccagggtcatttgtccagaaaactttgtgactgtctttgagtgacctagtctgggacccattcattggtgggttctaaggttagaagctcatccaggatattttcaatattaagtcagtgcata

SEQ ID NO: 16209 - DNA, 595 bp, Homo sapiens
  source 1..595: mol_type = unassigned DNA
agccccgcgctccggaagtgaagcggccagaccaccagctaatggatgcggagcggagggcccgctgaccgctctccgcgcctggcttggcttggctggagctaagagccagacacaccactgtgtggaggtgggtgatgtcttcctgtgctaaaaggtgaataaataagctcctcacctctcgcggaacactcgggaacacatcaacaggggtccaagccgccctgctgggaggcttctcttcaagagttctgggtcccagagtggaaggcattttcccatcaactggagagagacgaaacatcagagaccaggaggctgtggagaaagcagctgtcccaggtgcctcaactatcagagaagggtcagcgtcacgtggctgccagcatctttgagaaaatcactggcaatcggacttcagagctgcgggcacaggtgtggttagaactgagatacgacctgcccacctgggtcaggcctaaagacaagaagtcctgagttcttgccactgagtaggccagggtcatttgtccagaaaactttgtgactgtctttgagtgacctagtctgggacccattcattggtgggttctaa

SEQ ID NO: 16210 - DNA, 590 bp, Homo sapiens
  source 1..590: mol_type = unassigned DNA
acagtcgcagcgtttcccgggttaccagatgccacgtgtttggggagtaagtgcgggtgcgcatctggtgcggagtaggagagcagcttggcttggctggagctaagagccagacacaccactgtgtggaggtgggtgatgtcttcctgtgctaaaaggtgaataaataagctcctcacctctcgcggaacactcgggaacacatcaacaggggtccaagccgccctgctgggaggcttctcttcaagagttctgggtcccagagtggaaggcattttcccatcaactggagagagacgaaacatcagagaccaggaggctgtggagaaagcagctgtcccaggtgcctcaactatcagagaagggtcagcgtcacgtggctgccagcatctttgagaaaatcactggcaatcggacttcagagctgcgggcacaggtgtggttagaactgagatacgacctgcccacctgggtcaggcctaaagacaagaagtcctgagttcttgccactgagtaggccagggtcatttgtccagaaaactttgtgactgtctttgagtgacctagtctgggacccattcattggtggg

SEQ ID NO: 16211 - DNA, 625 bp, Homo sapiens
  source 1..625: mol_type = unassigned DNA
aagtgcgggtgcgcatctggtgcggagtaggaggtaggatgtgggctgtgagtgccatgaattgtgtggggccaagcaggggaaaggtgtgtaggaacttggtgtgtgtgtgcagtagctgagccacggccaccgggttgagcagcttggcttggctggagctaagagccagacacaccactgtgtggaggtgggtgatgtcttcctgtgctaaaaggtgaataaataagctcctcacctctcgcggaacactcgggaacacatcaacaggggtccaagccgccctgctgggaggcttctcttcaagagttctgggtcccagagtggaaggcattttcccatcaactggagagagacgaaacatcagagaccaggaggctgtggagaaagcagctgtcccaggtgcctcaactatcagagaagggtcagcgtcacgtggctgccagcatctttgagaaaatcactggcaatcggacttcagagctgcgggcacaggtgtggttagaactgagatacgacctgcccacctgggtcaggcctaaagacaagaagtcctgagttcttgccactgagtaggccagggtcatttgtccagaaaactttgtgactgtctttgagtgaccta

SEQ ID NO: 16212 - DNA, 587 bp, Homo sapiens
  source 1..587: mol_type = unassigned DNA
agaccaccagctaatggatgcggagcggagggcccgctgaccgctctccgcgcctggacagagtctcacactgtcacccaggctggaatgcaatggtgcaaacgcaactcactgtagccttgacccactcggctcaagcagtcctccctcctcagcctcccaagtagttgggactacagcttggcttggctggagctaagagccagacacaccactgtgtggaggtgggtgatgtcttcctgtgctaaaaggtgaataaataagctcctcacctctcgcggaacactcgggaacacatcaacaggggtccaagccgccctgctgggaggcttctcttcaagagttctgggtcccagagtggaaggcattttcccatcaactggagagagacgaaacatcagagaccaggaggctgtggagaaagcagctgtcccaggtgcctcaactatcagagaagggtcagcgtcacgtggctgccagcatctttgagaaaatcactggcaatcggacttcagagctgcgggcacaggtgtggttagaactgagatacgacctgcccacctgggtcaggcctaaagacaagaagt

SEQ ID NO: 16213 - DNA, 761 bp, Homo sapiens
  source 1..761: mol_type = unassigned DNA
gctcggggaagcggcaaagttggatctgggagggcgtccgctgcggctgcgggagccgaaaggctgccagttcccggcagcgctgggaggagggaggcgcgggcggggcgcggcgccggggaggggagcggtgctcaggggagggctggaggggagggaaggagagagagaggggagggcggcaccgcccctagccccgcgctccggaagtgaagcggccagaccaccagctaatggatgcggagcggagggcccgctgaccgctctccgcgcctggacagagtctcacactgtcacccaggctggaatgcaatggtgcaaacgcaactcactgtagccttgacccactcggctcaagcagtcctccctcctcagcctcccaagtagttgggactacagagcagcttggcttggctggagctaagagccagacacaccactgtgtggaggtgggtgatgtcttcctgtgctaaaaggtgaataaataagctcctcacctctcgcggaacactcgggaacacatcaacaggggtccaagccgccctgctgggaggcttctcttcaagagttctgggtcccagagtggaaggcattttcccatcaactggagagagacgaaacatcagagaccaggaggctgtggagaaagcagctgtcccaggtgcctcaactatcagagaagggtcagcgtcacgtggctgccagcatctttgagaaaatcactggcaatcggacttcagagctgcgggcacaggtgtggt

SEQ ID NO: 16214 - DNA, 563 bp, Homo sapiens
  source 1..563: mol_type = unassigned DNA
agaccaccagctaatggatgcggagcggagggcccgctgaccgctctccgcgcctggagcagcttggcttggctggagctaagagccagacacaccactgtgtggaggtgggtgatgtcttcctgtgctaaaaggtgaataaataagctcctcacctctcgcggaacactcgggaacacatcaacaggtatttagccacatctcctgatttcatctttcaatggcaaagaccttgaatcctgtccttaactggggctcagacattaatcaacaggtctgatgagcatatggtggggacaccagatttcattggagtccccaagagaaaaaaaagtcacagtgagcaaagaaggggtctgacagagtgggacaaatgcaagcgcagtgtaaagcagaaccgccatctgcccccagttccattccagattagagtatggatgcttccaaggaaagagagtgctgtgtagtaaaactgaacattgtttcaccaggggtccaagccgccctgctgggaggcttctcttcaagagttctgggtcccagagtggaaggcattttcccat

SEQ ID NO: 16215 - DNA, 557 bp, Homo sapiens
  source 1..557: mol_type = unassigned DNA
cgacccagcttcccttgtccagggagcaactcagacacagtctcgcttcatttttattctggggttgtacaatctaagggccggcccgcgtgctcgcttgccattggctggggactccagggcaagggatataagccagagcctagaccagtgagccaactgtgcgaaccagacccggcagccttgctcagttcagcatagcggagcggatccgatcggatcggagcggatcggagcacaccggagcaggctcatcgagaaggcgtctgcgagaccatggagaacggatacacctatgaagattataagaacactgcagaatggcttctgtctcacactaagcaccgacctcaagttgcaataatctgtggttctggattaggaggtctgactgataaattaactcaggcccagatctttgactacggtgaaatccccaactttccccgaagtacagtgccaggtcatgctggccgactggtgtttgggttcctgaatggcagggcctgtgtgatgatgcagggcaggttccacatgtatgaagggtacccactctg

SEQ ID NO: 16216 - DNA, 1509 bp, Homo sapiens
  source 1..1509: mol_type = unassigned DNA
ataagccagagcctagaccagtgagccaactgtgcgaaccagacccggcagccttgctcagttcagcatagcggagcggatccgatcggatcggagcggatcggagcacaccggagcaggctcatcgagaaggcgtctgcgagaccatggagaacggatacacctatgaagattataagaacactgcagaatggcttctgtctcacactaagcaccgacctcaagttgcaataatctgtggttctggattaggaggtctgactgataaattaactcaggcccagatctttgactacggtgaaatccccaactttccccgaagtacagtgccaggtcatgctggccgactggtgtttgggttcctgaatggcagggcctgtgtgatgatgcagggcaggttccacatgtatgaagggtacccactctggaaggtgacattcccagtgagggttttccaccttctgggtgtggacaccctggtagtcaccaatgcagcaggagggctgaaccccaagtttgaggttggagatatcatgctgatccgtgaccatatcaacctacctggtttcagtggtcagaaccctctcagagggcccaatgatgaaaggtttggagatcgtttccctgccatgtctgatgcctacgaccggactatgaggcagagggctctcagtacctggaaacaaatgggggagcaacgtgagctacaggaaggcacctatgtgatggtggcaggccccagctttgagactgtggcagaatgtcgtgtgctgcagaagctgggagcagacgctgttggcatgagtacagtaccagaagttatcgttgcacggcactgtggacttcgagtctttggcttctcactcatcactaacaaggtcatcatggattatgaaagcctggagaaggccaaccatgaagaagtcttagcagctggcaaacaagctgcacagaaattggaacagtttgtctccattcttatggccagcattccactccctgacaaagccagttgacctgccttggagtcgtctggcatctcccacacaagacccaagtagctgctaccttctttggccccttgctggagtcatgtgcctctgtccttaggttgtagcagaaaggaaaagattcctgtccttcacctttcccactttcttctaccagacccttctggtgccagatcctcttctcaaagctgggattacaggtgtgagcatagtgagaccttggcgctacaaaataaagctgttctcattcctgttctttcttacacaagagctggagcccgtgccctaccacacatctgtggagatgcccaggatttgactcgggccttagaactttgcatagcagctgctactagctctttgagataatacattccgaggggctcagttctgccttatctaaatcaccagagaccaaacaaggactaatccaatacctcttggattttatttaatgtcataatgttgtcagaataaagagaaagatgaaataatttca

SEQ ID NO: 16217 - DNA, 1023 bp, Homo sapiens
  source 1..1023: mol_type = unassigned DNA
aactgtgcgaaccagacccggcagccttgctcagttcagcatagcggagcggatccgatcggatcggagcggatcggagcacaccggagcaggctcatcgagaaggcgtctgcgagaccatggagaacggatacacctatgaagattataagaacactgcagaatggcttctgtctcacactaagcaccgacctcaagttgcaataatctgtggttctggattaggaggtctgactgataaattaactcaggcccagatctttgactacggtgaaatccccaactttccccgaagtacaggtactggcaagggaaagtggggaatgggactgagggatgttcttggaattctgtggaacacaaccaaggaggccaatgtttctactccttgacctagcatttcactgaagacaaatgttgtaagagaggagaaaagcccaccatgagtcagagtgactttaggagatgcctctagcagacatcccataagagacaggacatgtgtgtgtcagtggactgaggctaagactcagaagagggccaggtgacaggggccaagtaaagggcaagggttgtttatttggtttacgtaatttctcaaataactaacttctgttggtttatttattaatttttaagatttctatcttcttttccctggagagttaagaatttttttttaagacctgtcagcaggaaaagacctttaatagctatttttttaaactctttaacacaagactggaagagcagagggagaaggtgagggaaatattaacagagggtgtgtgaagggcatacttctctaagggagatagtagtgacgctggctccactggccactcctacccccagtgagaagggcactgcattaaatgataagtgggttagtttttttaagcttatcaacatgtttattttttatactccacttgggtttcctttgtcaactttattactgtttttgttttgtttttttgcataagctcctctatctttgagaatttctcagctcttcctctt

SEQ ID NO: 16218 - DNA, 992 bp, Homo sapiens
  source 1..992: mol_type = unassigned DNA
aactgtgcgaaccagacccggcagccttgctcagttcagcatagcggagcggatccgatcggatcggagcggatcggagcacaccggagcaggctcatcgagaaggcgtctgcgagaccatggagaacggatacacctatgaagattataagaacactgcagaatggcttctgtctcacactaagcaccgacctcaagttgcaataatctgtggttctggattaggaggtctgactgataaattaactcaggcccagatctttgactacggtgaaatccccaactttccccgaagtacagtgccaggtcatgctggccgactggtgtttgggttcctgaatggcagggcctgtgtgatgatgcagggcaggttccacatgtatgaagggtacccactctggaaggtaagtcagagggataggtccggttggatctggaagaggcaggagagaactatctagcctctttcactacctagctatctgggctaggtggatttttggtcctctccttccttttctttcacgatgtatgtcatgcatttcagtgtagctgaattaatgaaattttgtaaatttttttcggattgtttgcttcgaaggtgacattcccagtgagggttttccaccttctgggtgtggacaccctggtagtcaccaatgcagcaggagggctgaaccccaagtttgaggttggagatatcatgctgatccgtgaccatatcaacctacctggtttcagtggtcagaaccctctcagagggcccaatgatgaaaggtatgtatgttactccgttttttttaggtgggtaggatttaaagacttctctaggagctgtgggagaatttttaaaattccgtttatgtgagataattcaacctgtgtcctaggtttggagatcgtttccctgccatgtctgatgcctacgaccggactatgaggcagagggctctcagtacctggaaacaaatgggggagcaacgtgagctaca

SEQ ID NO: 16219 - DNA, 1635 bp, Homo sapiens
  source 1..1635: mol_type = unassigned DNA
gaaccagacccggcagccttgctcagttcagcatagcggagcggatccgatcggatcggagcggatcggagcacaccggagcaggctcatcgagaaggcgtctgcgagaccatggagaacggatacacctatgaagattataagaacactgcagaatggcttctgtctcacactaagcaccgacctcaagttgcaataatctgtggttctggattaggaggtctgactgataaattaactcaggcccagatctttgactacggtgaaatccccaactttccccgaagtacagtgccaggtcatgctggccgactggtgtttgggttcctgaatggcagggcctgtgtgatgatgcagggcaggttccacatgtatgaagggtacccactctggaaggtaagtcagagggataggtccggttggatctggaagaggcaggagagaactatctagcctctttcactacctagctatctgggctaggtggatttttggtcctctccttccttttctttcacgatgtatgtcatgcatttcagtgtagctgaattaatgaaattttgtaaatttttttcggattgtttgcttcgaaggtgacattcccagtgagggttttccaccttctgggtgtggacaccctggtagtcaccaatgcagcaggagggctgaaccccaagtttgaggttggagatatcatgctgatccgtgaccatatcaacctacctggtttcagtggtcagaaccctctcagagggcccaatgatgaaaggtttggagatcgtttccctgccatgtctgatgcctacgaccggactatgaggcagagggctctcagtacctggaaacaaatgggggagcaacgtgagctacaggaaggcacctatgtgatggtggcaggccccagctttgagactgtggcagaatgtcgtgtgctgcagaagctgggagcagacgctgttggcatgagtacagtaccagaagttatcgttgcacggcactgtggacttcgagtctttggcttctcactcatcactaacaaggtcatcatggattatgaaagcctggagaaggccaaccatgaagaagtcttagcagctggcaaacaagctgcacagaaattggaacagtttgtctccattcttatggccagcattccactccctgacaaagccagttgacctgccttggagtcgtctggcatctcccacacaagacccaagtagctgctaccttctttggccccttgctggagtcatgtgcctctgtccttaggttgtagcagaaaggaaaagattcctgtccttcacctttcccactttcttctaccagacccttctggtgccagatcctcttctcaaagctgggattacaggtgtgagcatagtgagaccttggcgctacaaaataaagctgttctcattcctgttctttcttacacaagagctggagcccgtgccctaccacacatctgtggagatgcccaggatttgactcgggccttagaactttgcatagcagctgctactagctctttgagataatacattccgaggggctcagttctgccttatctaaatcaccagagaccaaacaaggactaatccaatacctcttggattttatttaatgtcataa

SEQ ID NO: 16220 - DNA, 770 bp, Homo sapiens
  source 1..770: mol_type = unassigned DNA
gagggcaccaggcccgcaggacccttggggaggggcaggtgctgtgacccgggaacctggcacactgggcccagagggagctggcggagggagcgagcgcccaggggatgcagagaggcctggcactgagcctagtgtcgggagcaaggcggcagagtcatgcggcagccagcgcgggcagggacgcacgcgggaatcgagctggggtggcgccaccggagcaggaaggggacagatacacctatgaagattataagaacactgcagaatggcttctgtctcacactaagcaccgacctcaagttgcaataatctgtggttctggattaggaggtctgactgataaattaactcaggcccagatctttgactacggtgaaatccccaactttccccgaagtacagtgccaggtcatgctggccgactggtgtttgggttcctgaatggcagggcctgtgtgatgatgcagggcaggttccacatgtatgaagggtacccactctggaaggtgacattcccagtgagggttttccaccttctgggtgtggacaccctggtagtcaccaatgcagcaggagggctgaaccccaagtttgaggttggagatatcatgctgatccgtgaccatatcaacctacctggtttcagtggtcagaaccctctcagagggcccaatgatgaaaggtttggagatcgtttccctgccatgtctgatgcctacgaccggactatgaggcagagggctctcagtacctggaaacaaatgggg

SEQ ID NO: 16221 - DNA, 554 bp, Homo sapiens
  source 1..554: mol_type = unassigned DNA
ttggttagttgtgttcagctctgtcacacctcattgccacctctgaaagcaacgtttggtcttcccagatggatgtgagagaactggacttggaactgggagaaaagtaacacgggttgattcttgctagtgtaggggttctggatacacctatgaagattataagaacactgcagaatggcttctgtctcacactaagcaccgacctcaagttgcaataatctgtggttctggattaggaggtctgactgataaattaactcaggcccagatctttgactacggtgaaatccccaactttccccgaagtacagtgccaggtcatgctggccgactggtgtttgggttcctgaatggcagggcctgtgtgatgatgcagggcaggttccacatgtatgaagggtacccactctggaaggtgacattcccagtgagggttttccaccttctgggtgtggacaccctggtagtcaccaatgcagcaggagggctgaaccccaagtttgaggttggagatatcatgctgatccgtgaccatatcaacctacctggtt

SEQ ID NO: 16222 - DNA, 2573 bp, Homo sapiens
  source 1..2573: mol_type = unassigned DNA
cttgcatgcgttcaaattctttcccccttgttcagtagcctcttctttaagaagccagagtaagtatactatgagcttgcttgctggactgaggaggcaggtaattaagttagggcaatagataagaatacatgttttgagaactttgaaaaatttgaagaggtctataattactgcattcactgtactcactttattttgaaacagagtctcgctctgtcacccaggctcgagtgtagtgttgtgatctcggctcactgcaacctccacctcccaagttcaagagattctcccacctcagcctcccgagtagctgggattacaggcatgtgccaccacacctggctaatttttgtatttttagtagagatgaggtttcaccatgttggccagggtggtcttgaactcctggcctgttgatccgcctgtcttgggctcccgaagtgctgggactacaggtgtgagacaccgcacctggcctatttttaattttaatttttatagatttacaggggtacaatgcagttttgttatatggatatactgcgtggtggtgacgtctgtgctttagtgtaaccatcacctgagcagtgaacattgtacttattaggtaatttctcatccctcatccccatcccactttctcacctttccgagtccccagtgtctattatttcactctgtaggtccatatgtacacatttggttcccacttataagtgagaacatgtagtatttaatcttccatttctgagtatctactttttttgctcactttttactctctggcagtatggcttgtattatcttgaaatttctttaaaaagcccttccttctttgtgtgttcatgctgaacatgctgaacgcaccccatatctctaatcttgggttgtatttgtataattattagtaatgcctggctctctcaccagacttaaactttctgaaagcagagataataatgagtcttttacttaattacaacctaacattttgagcagagcgagtaactcacagtaggtgcttaatggatatgtgttgcatgaaaatataatcccattcatttctctttctgttttgtatacagtgccaggtcatgctggccgactggtgtttgggttcctgaatggcagggcctgtgtgatgatgcagggcaggttccacatgtatgaagggtacccactctggaaggtaagtcagagggataggtccggttggatctggaagaggcaggagagaactatctagcctctttcactacctagctatctgggctaggtggatttttggtcctctccttccttttctttcacgatgtatgtcatgcatttcagtgtagctgaattaatgaaattttgtaaatttttttcggattgtttgcttcgaaggtgacattcccagtgagggttttccaccttctgggtgtggacaccctggtagtcaccaatgcagcaggagggctgaaccccaagtttgaggttggagatatcatgctgatccgtgaccatatcaacctacctggtttcagtggtcagaaccctctcagagggcccaatgatgaaaggtatgtatgttactccgttttttttaggtgggtaggatttaaagacttctctaggagctgtgggagaatttttaaaattccgtttatgtgagataattcaacctgtgtcctaggtttggagatcgtttccctgccatgtctgatgcctacgaccggactatgaggcagagggctctcagtacctggaaacaaatgggggagcaacgtgagctacaggaaggcacctatgtgatggtggcaggccccagctttgagactgtggcagaatgtcgtgtgctgcagaagctgggagcagacgctgttggcatgagtacagtaccagaagttatcgttgcacggcactgtggacttcgagtctttggcttctcactcatcactaacaaggtcatcatggattatgaaagcctggagaaggccaaccatgaagaagtcttagcagctggcaaacaagctgcacagaaattggaacagtttgtctccattcttatggccagcattccactccctgacaaagccagttgacctgccttggagtcgtctggcatctcccacacaagacccaagtagctgctaccttctttggccccttgctggagtcatgtgcctctgtccttaggttgtagcagaaaggaaaagattcctgtccttcacctttcccactttcttctaccagacccttctggtgccagatcctcttctcaaagctgggattacaggtgtgagcatagtgagaccttggcgctacaaaataaagctgttctcattcctgttctttcttacacaagagctggagcccgtgccctaccacacatctgtggagatgcccaggatttgactcgggccttagaactttgcatagcagctgctactagctctttgagataatacattccgaggggctcagttctgccttatctaaatcaccagagaccaaacaaggactaatccaatacctcttggattttatttaatgtcataatgttgtcagaataaagagaaagatgaaat

SEQ ID NO: 16223 - DNA, 2805 bp, Homo sapiens
  source 1..2805: mol_type = unassigned DNA
atggtccgaggggggcggggctgacgtcgcgctgggaatgccctggccgagacactgaggcagggtagagagcgcttgcgggcgccgggcggagctgctgcggatcaggacccgagccgattcccgatcccgacccagatcctaacccgcgcccccgccccgccgccgccgccatgtacgacgcagagcgcggctggagcttgtccttcgcgggctgcggcttcctgggcttctaccacgtcggggcgacccgctgcctgagcgagcacgccccgcacctcctccgcgacgcgcgcatgttgttcggcgcttcggccggggcgttgcactgcgtcggcgtcctctccggtatcccgctggagcagactctgcaggtcctctcagatcttgtgcggaaggccaggagtcggaacattggcatcttccatccatccttcaacttaagcaagttcctccgacagggtctctgcaaatgcctcccggccaatgtccaccagctcatctccggcaaaataggcatctctcttaccagagtgtctgatggggaaaacgttctggtgtctgactttcggtccaaagacgaagtcgtggatgccttggtatgttcctgcttcatccccttctacagtggccttatccctccttccttcagaggcgtgcgatatgtggatggaggagtgagtgacaacgtacccttcattgatgccaaaacaaccatcaccgtgtcccccttctatggggagtacgacatctgccctaaagtcaagtccacgaactttcttcatgtggacatcaccaagctcagtctacgcctctgcacagggaacctctaccttctctcgagagcttttgtccccccggatctcaaggtgctgggagagatatgccttcgaggatatttggatgcattcaggttcttggaagagaagggcatctgcaacaggccccagccaggcctgaagtcatcctcagaagggatggatcctgaggtcgccatgcccagctgggcaaacatgagtctggattcttccccggagtcggctgccttggctgtgaggctggagggagatgagctgctagaccacctgcgtctcagcatcctgccctgggatgagagcatcctggacaccctctcgcccaggctcgctacagcactgagtgaagaaatgaaagacaaaggtggatacatgagcaagatttgcaacttgctacccattaggataatgtcttatgtaatgctgccctgtaccctgcctgtggaatctgccattgcgattgtccagagactggtgacatggcttccagatatgcccgacgatgtcctgtggttgcagtgggtgacctcacaggtgttcactcgagtgctgatgtgtctgctccccgcctccaggtcccaaatgccagtgagcagccaacaggcctccccatgcacacctgagcaggactggccctgctggactccctgctcccccaagggctgtccagcagagaccaaagcagaggccaccccgcggtccatcctcaggtccagcctgaacttcttcttgggcaataaagtacctgctggtgctgaggggctctccacctttcccagtttttcactagagaagagtctgtgagtcacttgaggaggcgagtctagcagattctttcagaggtgctaaagtttcccatctttgtgcagctacctccgcattgctgtgtagtgacccctgcctgtgacgtggaggatcccagcctctgagctgagttggttttatgaaaagctaggaagcaacctttcgcctgtgcagcggtccagcacttaactctaatacatcagcatgcgttaattcagctggttgggaaatgacaccaggaagcccagtgcagagggtcccttactgactgtttcgtggccctattaatggtcagactgttccagcatgaggttcttagaatgacaggtgtttggatgggtgggggccttgtgatggggggtaggctggcccatgtgtgatcttgtggggtggagggaagagaatagcatgatcccacttccccatgctgtgggaaggggtgcagttcgtccccaagaacgacactgcctgtcaggtggtctgcaaagatgataaccttgactactaaaaacgtctccatggcgggggtaacaagatgataatctacttaattttagaacacctttttcacctaactaaaataatgtttaaagagttttgtataaaaatgtaaggaagcgttgttacctgttgaattttgtattatgtgaatcagtgagatgttagtagaataagccttaaaaaaaaaaaaatcggttgggtgcagtggcacacggctgtaatcccagcactttgggaggccaaggttggcagatcacctgaggtcaggagttcaagaccagtctggccaacatagcaaaaccctgtctctactaaaaatacaaaaattatctgggcatggtggtgcatgcctgtaatcccagctattcggaaggctgaggcaggagaatcacttgaacccaggaggcggaggttgcggtgagctgagattgcaccatttcattccagcctgggcaacatgagtgaaagtctgactcaaaaaaaaaaaatttaaaaaacaaaataatctagtgtgcagggcattcacctcagccccccaggcaggagccaagcacagcaggagcttccgcctcctctccactggagcacacaacttgaacctggcttattttctgcagggaccagccccacatggtcagtgagtttctccccatgtgtggcgatgagagagtgtagaaataaagac

SEQ ID NO: 16224 - DNA, 1480 bp, Homo sapiens
  source 1..1480: mol_type = unassigned DNA
actgaggcagggtagagagcgcttgcgggcgccgggcggagctgctgcggatcaggacccgagccgattcccgatcccgacccagatcctaacccgcgcccccgccccgccgccgccgccatgtacgacgcagagcgcggctggagcttgtccttcgcgggctgcggcttcctgggcttctaccacgtcggggcgacccgctgcctgagcgagcacgccccgcacctcctccgcgacgcgcgcatgttgttcggcgcttcggccggggcgttgcactgcgtcggcgtcctctccggtatcccgctggactctgcaggtcctctcagatcttgtgcggaaggccaggagtcggaacattggcatcttccatccatccttcaacttaagcaagttcctccgacagggtctctgcaaatgcctcccggccaatgtccaccagctcatctccggcaaaataggcatctctcttaccagagtgtctgatggggaaaacgttctggtgtctgactttcggtccaaagacgaagtcgtggatgccttggtatgttcctgcttcatccccttctacagtggccttatccctccttccttcagaggcgtgcgatatgtggatggaggagtgagtgacaacgtacccttcattgatgccaaaacaaccatcaccgtgtcccccttctatggggagtacgacatctgccctaaagtcaagtccacgaactttcttcatgtggacatcaccaagctcagtctacgcctctgcacagggaacctctaccttctctcgagagcttttgtccccccggatctcaaggtgctgggagagatatgccttcgaggatatttggatgcattcaggttcttggaagagaagggcatctgcaacaggccccagccaggcctgaagtcatcctcagaagggatggatcctgaggtcgccatgcccagctgggcaaacatgagtctggattcttccccggagtcggctgccttggctgtgaggctggagggagatgagctgctagaccacctgcgtctcagcatcctgccctgggatgagagcatcctggacaccctctcgcccaggctcgctacagcactgagtgaagaaatgaaagacaaaggtggatacatgagcaagatttgcaacttgctacccattaggataatgtcttatgtaatgctgccctgtaccctgcctgtggaatctgccattgcgattgtccagagactggtgacatggcttccagatatgcccgacgatgtcctgtggttgcagtgggtgacctcacaggtgttcactcgagtgctgatgtgtctgctccccgcctccagagtttggagcctcttccatcaagtggacctgattttggaggattaggagaagaagctgaatttgttgaagttgagcctgaagctaaacaggaaattcttgaaaacaaagatgtggttgttcaacatgttcattttgatggacttggaa

SEQ ID NO: 16225 - DNA, 2222 bp, Homo sapiens
  source 1..2222: mol_type = unassigned DNA
gtagagagcgcttgcgggcgccgggcggagctgctgcggatcaggacccgagccgattcccgatcccgacccagatcctaacccgcgcccccgccccgccgccgccgccatgtacgacgcagagcgcggctggagcttgtccttcgcgggctgcggcttcctgggcttctaccacgtcggggcgacccgctgcctgagcgagcacgccccgcacctcctccgcgacgcgcgcatgttgttcggcgcttcggccggggcgttgcactgcgtcggcgtcctctccgagcagactctgcaggtcctctcagatcttgtgcggaaggccaggagtcggaacattggcatcttccatccatccttcaacttaagcaagttcctccgacagggtctctgcaaatgcctcccggccaatgtccaccagctcatctccggcaaaataggcatctctcttaccagagtgtctgatggggaaaacgttctggtgtctgactttcggtccaaagacgaagtcgtggatgccttggtatgttcctgcttcatccccttctacagtggccttatccctccttccttcagaggcgtgcgatatgtggatggaggagtgagtgacaacgtacccttcattgatgccaaaacaaccatcaccgtgtcccccttctatggggagtacgacatctgccctaaagtcaagtccacgaactttcttcatgtggacatcaccaagctcagtctacgcctctgcacagggaacctctaccttctctcgagagcttttgtccccccggatctcaaggtgctgggagagatatgccttcgaggatatttggatgcattcaggttcttggaagagaagggcatctgcaacaggccccagccaggcctgaagtcatcctcagaagggatggatcctgaggtcgccatgcccagctgggcaaacatgagtctggattcttccccggagtcggctgccttggctgtgaggctggagggagatgagctgctagaccacctgcgtctcagcatcctgccctgggatgagagcatcctggacaccctctcgcccaggctcgctacagcactgagtgaagaaatgaaagacaaaggtggatacatgagcaagatttgcaacttgctacccattaggataatgtcttatgtaatgctgccctgtaccctgcctgtggaatctgccattgcgattgtccagagactggtgacatggcttccagatatgcccgacgatgtcctgtggttgcagtgggtgacctcacaggtgttcactcgagtgctgatgtgtctgctccccgcctccaggtcccaaatgccagtgagcagccaacaggcctccccatgcacacctgagcaggactggccctgctggactccctgctcccccaagggctgtccagcagagaccaaagcagaggccaccccgcggtccatcctcaggtccagcctgaacttcttcttgggcaataaagtacctgctggtgctgaggggctctccacctttcccagtttttcactagagaagagtctgtgagtcacttgaggaggcgagtctagcagattctttcagaggtgctaaagtttcccatctttgtgcagctacctccgcattgctgtgtagtgacccctgcctgtgacgtggaggatcccagcctctgagctgagttggttttatgaaaagctaggaagcaacctttcgcctgtgcagcggtccagcacttaactctaatacatcagcatgcgttaattcagctggttgggaaatgacaccaggaagcccagtgcagagggtcccttactgactgtttcgtggccctattaatggtcagactgttccagcatgaggttcttagaatgacaggtgtttggatgggtgggggccttgtgatggggggtaggctggcccatgtgtgatcttgtggggtggagggaagagaatagcatgatcccacttccccatgctgtgggaaggggtgcagttcgtccccaagaacgacactgcctgtcaggtggtctgcaaagatgataaccttgactactaaaaacgtctccatggcgggggtaacaagatgataatctacttaattttagaacacctttttcacctaactaaaataatgtttaaagagttttgtataaaaatgtaaggaagcgttgttacctgttgaattttgtattatgtgaatcagtgagatgttagtagaataagcctt

SEQ ID NO: 16226 - DNA, 730 bp, Homo sapiens
  source 1..730: mol_type = unassigned DNA
ctgcccgggctccacgtgcggagtgggtgccccctaggccggggagcgggggatccccaggggtcgcggggccctggaggagcgggcatcggacgcggacacggcggggtgcatcccgagggccccctccgaggcagatgcttcctgcgggggcgctgttcctgggcccgggaagggggcgttggaaccccgagcggtccgggccgaagcctgggactctcagcagactctgcaggtcctctcagatcttgtgcggaaggccaggagtcggaacattggcatcttccatccatccttcaacttaagcaagttcctccgacagggtctctgcaaatgcctcccggccaatgtccaccagctcatctccggcaaaataggcatctctcttaccagagtgtctgatggggaaaacgttctggtgtctgactttcggtccaaagacgaagtcgtggatgccttggtatgttcctgcttcatccccttctacagtggccttatccctccttccttcagaggcgtgcgatatgtggatggaggagtgagtgacaacgtacccttcattgatgccaaaacaaccatcaccgtgtcccccttctatggggagtacgacatctgccctaaagtcaagtccacgaactttcttcatgtggacatcaccaagctcagtctacgcctctgcacagggaacctctaccttctctcgagagcttttgtccccccggatctcaag

SEQ ID NO: 16227 - DNA, 422 bp, Homo sapiens
  source 1..422: mol_type = unassigned DNA
gacatcaccaagctcagtctacgcctctgcacagggaacctctaccttctctcgagagcttttgtccccccggatctcaaggtgctgggagagatatgccttcgaggatatttggatgcattcaggttcttggaagagaagggcatctgcaacaggccccagccaggcctgaagtcatcctcagaagggatggatcctgaggtcgccatgcccagctgggcaaacatgagtctggattcttccccggagtcggctgccttggctgtgaggctggagggagatgagctgctagaccacctgcgtctcagcatcctgccctgggatgagagcatcctggacaccctctcgcccaggctcgctacagctatgatattggaaatggacatgtcttttcaaggaaaataaaagcaggctttctggaa

SEQ ID NO: 16228 - DNA, 4268 bp, Homo sapiens
  source 1..4268: mol_type = unassigned DNA
gcgagtcgccgctgcagccctagtgactgcggcctgcatcccggtaagaccatgaattatggcatttcttaaatgaagcgttcaagaagtgagagaatgtcatagaaaataaatgatttttaagttatgtctattaatctgactgtagatatatatatttacctccttagtaatgcaagaagtgtttgtgggaagcagagaagcaagcaactgtatttcttgttctcacctaagcattactggaggataagccacatcagtctacaaagaggttttcatacaaacataataagatgtaaatggaccaaaagtgaagcacattcttgcagtaagcactgttactctccaagcaaccatggtttacatattgggattttgaaacttagcacttctgctcccaagggacttacaaaagtgaacatttgtatgtcccgtattaaaagtactttgaactctgtttcaaaggctgtttttggcaatcaaaatgaaatgatttcacgtttagctcaatttaagccaagttcccaaattttaagaaaagtatcggatagtggctggttaaaacagaaaaacatcaaacaagccatcaaatctctgaaaaaatatagtgacaaatcagcagaaaagagtccttttccagaagagaaaagtcacattatagacaaagaagaagatataggtaaacgcagtctttttcattacacaagttctataaccacaaaatttggagactcattctactttttatcaaatcatattaattcatatttcaaacgtaaggaaaaaatgtctcaacaaaaggaaaatgaacatttccgggacaaatcagaacttgaagataaaaaggtagaagaggggaaattaagatctccagatcctggcatcctggcttataagccaggctcagaatctgtacatacggtggacaagcctacaagtccttctgcgatacctgatgttcttcaagtttcaactaaacaaagtattgctaactttctttctcgtcccacggaaggtgtacaagctttagtaggtggttatattggtggacttgtccccaaattaaagtatgattcaaagagtcagtcagaagaacaggaagagcctgctaaaactgatcaggctgtcagcaaagacagaaatgcagaggagaaaaagcgtttatctcttcagcgagaaaagattatcgcaagggtgagtattgataacaggacccgggcattagttcaggcattaagaagaacaactgacccaaagctctgcattactagggttgaagaactgacttttcatcttctagaatttcctgaaggaaaaggagtggctgtcaaggaaagaattattccatatttattacgactgagacaaattaaggatgaaactcttcaggctgcagttagagaaattttggccctaattggctatgtggatccagtgaaagggagaggaatccgaattctctcaattgatggtggaggaacaaggggcgtggttgctctccagaccctacgaaaattagttgaacttactcagaagccagttcatcagctctttgattacatttgtggtgtaagcacaggtgccatattagctttcatgttggggttgtttcatatgcccttggatgaatgtgaggaactttatcgaaaattaggatcagatgtattttcacaaaatgtcattgttggaacagtaaaaatgagttggagccatgcattttatgacagtcaaacatgggaaaacattcttaaggataggatgggatctgcactgatgattgaaacagcaagaaaccccacatgtcctaaggtagctgctgatggaggtttgcttctgaataacccttcggcattagctatgcatgagtgtaaatgtctttggccagatgtgccgttagagtgcatagtatccctgggcactggacgttatgagagtgatgtgagaaacacggtaacatacacaagcttgaaaactaaactttctaatgttatcaacagtgctacagatacagaagaagtccatataatgcttgatggcctgttacctcctgacacctattttagattcaatcctgtaatgtgtgaaaacatacctctagatgaaagtcgaaatgaaaagctggatcagctgcagttggaagggttgaaatacatagaaagaaatgaacaaaaaatgaaaaaagttgcaaaaatattaagtcaagaaaaaacaactctgcagaaaattaatgattggataaaattaaaaactgatatgtatgaaggacttccattcttttcaaaattgtgatgagtatatgcttatgttctcataaatgaaggtctgtttagaagatcaaccacattcaataaggaattgtggggttcgacatgagttaactttgaaatacgtatgaattctggagaatcctgaaaaagacggtgcttcaaccagcttgcatagcacagagaatattcttggttacagaattcatatgggaactaggcttttaagatgttaataattagctaagctttagtaacccttactgtgctagtagattttagtagatattggtgttatattgtttgatgtttgaaaatatattaatatatgtgccgaacaagaaaccgaaagctatattgtactgtgtatttttactttagtcctcataatcatgttgaatttatgtgatcattgattttatttcatatggaaaagctaatttcttcttaaatttacattacctaatattctcactagctatgttctccaatccacactgccttttattgtaatatcatctaaatagatgcagaaaaatggaattttctctattaaagtattttacatttgacataaaaaagaaccagatacagttttctattcagatatgtttattttaacattgtttggttaaaaaaggtgaagttccagtcaaccactttttacccctgaaatttcaagataatgctatattaacttttccagatctaacactagcttattcttccctgttataaaatggtttgaacttactgaggagatattcctatcattaacaaaaataaactatttaaataatctgttgttaaaaggctaatgtcattttaaaattaatttttgttcataatgtagctcccctttagcctttgaatacacctggcagcagtatgcttaaaaataagaagttagttgcctggcgcagtagctcacacctgtaatcccagcactttgggaggccgaggcaggcagatcacctgacgtcaggagtccaagaccagcctggccaacacggtgaaacctcgtctctaataaaaatacaaacattagcccggcatggtggtgcacacctatagtcccagctactcgggaggctaaggcaggagaatggcttgaacctgagagacggaggttgcagtgagccaaatagcgccagtgcactccagcctaggcgacacagcgagactccatctcaaaaaaaaaaaaaaaaaaaagaagaagttaggcttgttttaccttattaactcctttgaactgtctggatttcatggaagttggtaagatgcacttacatggaacattgttcatgccaaacaaactcatctttattgtatctatttgtcacataaatccttacatggaatgttttgatttcttaagaaaaatgaaacaaaggttagcgccccttgttttagacatacaaactaaagctagaccctgttgcccagatagtcatattgcttctttgcaatatcaattcacagaggctgtgagatgtggttcaaagagtggagtcgagagtctggatgctaatcctgcctttgctgcaagaacccttctgtttgttaccttgaggaaggcaaatgtctgtaggctttgcatatctcatttgtaaaatgaggaaaggtagctgtaaaattttctaacatccgaattatataaactttagacatagtataaaataggaaactaccaatgatttctaaagataatatagttctttcagaccacaaataatacataataacatgcaactaagaacaacttgtaaatgcaagaaaaaaacaaataattggaaatcagaatatttctgggaattcttcgtaataaagcaaatttcaagcacaataaagtaatatttatgcatatttacatatttgcacctcatcataaggtcactctagtcctaaactgatgtagttcatctgttttacagctgaagttaagtatgtcccttatttgtgcttggcttatttctttcttaaataatacattacacaagtgaa

SEQ ID NO: 16229 - DNA, 3490 bp, Homo sapiens
  source 1..3490: mol_type = unassigned DNA
acttccgctgggggcggagcggggcggggctgagtgggtggcgacctagctgctgcgccagtgtttgtgttggaagctcagctgatgcaggccggttggagtggacgtcattgccgggaacgagcgagtcgccgctgcagccctagtgactgcggcctgcatcccgattgtcttctcctccaaggtctacatgattacctgaagtttaataagtaagaccatgaattatggcatttcttaaatgaagcgttcaagaagtgagagaatgtcatagaaaataaatgatttttaagttatgtctattaatctgactgtagatatatatatttacctccttagtaatgcaagaagtgtttgtgggaagcagagaagcaagcaactgtatttcttgttctcacctaagcattactggaggataagccacatcagtctacaaagaggttttcatacaaacataataagatgtaaatggaccaaaagtgaagcacattcttgcagtaagcactgttactctccaagcaaccatggtttacatattgggattttgaaacttagcacttctgctcccaagggacttacaaaagtgaacatttgtatgtcccgtattaaaagtactttgaactctgtttcaaaggctgtttttggcaatcaaaatgaaatgatttcacgtttagctcaatttaagccaagttcccaaattttaagaaaagtatcggatagtggctggttaaaacagaaaaacatcaaacaagccatcaaatctctgaaaaaatatagtgacaaatcagcagaaaagagtccttttccagaagagaaaagtcacattatagacaaagaagaagatataggtaaacgcagtctttttcattacacaagttctataaccacaaaatttggagactcattctactttttatcaaatcatattaattcatatttcaaacgtaaggaaaaaatgtctcaacaaaaggaaaatgaacatttccgggacaaatcagaacttgaagataaaaaggtagaagaggggaaattaagatctccagatcctggcatcctggcttataagccaggctcagaatctgtacatacggtggacaagcctacaagtccttctgcgatacctgatgttcttcaagtttcaactaaacaaagtattgctaactttctttctcgtcccacggaaggtgtacaagctttagtaggtggttatattggtggacttgtccccaaattaaagtatgattcaaagagtcagtcagaagaacaggaagagcctgctaaaactgatcaggctgtcagcaaagacagaaatgcagaggagaaaaagcgtttatctcttcagcgagaaaagattatcgcaagggtgagtattgataacaggacccgggcattagttcaggcattaagaagaacaactgacccaaagctctgcattactagggttgaagaactgacttttcatcttctagaatttcctgaaggaaaaggagtggctgtcaaggaaagaattattccatatttattacgactgagacaaattaaggatgaaactcttcaggctgcagttagagaaattttggccctaattggctatgtggatccagtgaaagggagaggaatccgaattctctcaattgatggtggaggaacaaggggcgtggttgctctccagaccctacgaaaattagttgaacttactcagaagccagttcatcagctctttgattacatttgtggtgtaagcacaggtgccatattagctttcatgttggggttgtttcatatgcccttggatgaatgtgaggaactttatcgaaaattaggatcagatgtattttcacaaaatgtcattgttggaacagtaaaaatgagttggagccatgcattttatgacagtcaaacatgggaaaacattcttaaggataggatgggatctgcactgatgattgaaacagcaagaaaccccacatgtcctaaggtagctgctgtaagtaccatagtaaatagagggataacacccaaagcttttgtgttcagaaactatggtcattttcctggaatcaactctcattatttgggaggctgtcagtataaaatgtggcaggccattagagcctcatctgctgctccaggctactttgcagaatatgcattgggaaatgatcttcatcaagatggaggtttgcttctgaataacccttcggcattagctatgcatgagtgtaaatgtctttggccagatgtgccgttagagtgcatagtatccctgggcactggacgttatgagagtgatgtgagaaacacggtaacatacacaagcttgaaaactaaactttctaatgttatcaacagtgctacagatacagaagaagtccatataatgcttgatggcctgttacctcctgacacctattttagattcaatcctgtaatgtgtgaaaacatacctctagatgaaagtcgaaatgaaaagctggatcagctgcagttggaagggttgaaatacatagaaagaaatgaacaaaaaatgaaaaaagttgcaaaaatattaagtcaagaaaaaacaactctgcagaaaattaatgattggataaaattaaaaactgatatgtatgaaggacttccattcttttcaaaattgtgatgagtatatgcttatgttctcataaatgaaggtctgtttagaagatcaaccacattcaataaggaattgtggggttcgacatgagttaactttgaaatacgtatgaattctggagaatcctgaaaaagacggtgcttcaaccagcttgcatagcacagagaatattcttggttacagaattcatatgggaactaggcttttaagatgttaataattagctaagctttagtaacccttactgtgctagtagattttagtagatattggtgttatattgtttgatgtttgaaaatatattaatatatgtgccgaacaagaaaccgaaagctatattgtactgtgtatttttactttagtcctcataatcatgttgaatttatgtgatcattgattttatttcatatggaaaagctaatttcttcttaaatttacattacctaatattctcactagctatgttctccaatccacactgccttttattgtaatatcatctaaatagatgcagaaaaatggaattttctctattaaagtattttacatttgacataaaaaagaaccagatacagttttctattcagatatgtttattttaacattgtttggttaaaaaaggtgaagttccagtcaaccactttttacccctgaaatttcaagataatgctatattaacttttccagatctaacactagcttattcttccctgttataaaatggtttgaacttactgaggagatattcctatcattaacaaaaataaactatttaaataatctgttgttaaaaggctaatgtcattttaaaattaatttttgttcataatgtagctcccctttagcctttga

SEQ ID NO: 16230 - DNA, 3530 bp, Homo sapiens
  source 1..3530: mol_type = unassigned DNA
acttccgctgggggcggagcggggcggggctgagtgggtggcgacctagctgctgcgccagtgtttgtgttggaagctcagctgatgcaggccggttggagtggacgtcattgccgggaacgagcgagtcgccgctgcagccctagtgactgcggcctgcatcccgattgtcttctcctccaaggtctacatgattacctgaagtttaataattttgcctttctagagtgttatacagctggaatcatactgctatggtccgaatgtttgtgcctctcaaaattcatgtggaaatcataaccgctaaagtgatggtattaagaggtaagaccatgaattatggcatttcttaaatgaagcgttcaagaagtgagagaatgtcatagaaaataaatgatttttaagttatgtctattaatctgactgtagatatatatatttacctccttagtaatgcaagaagtgtttgtgggaagcagagaagcaagcaactgtatttcttgttctcacctaagcattactggaggataagccacatcagtctacaaagaggttttcatacaaacataataagatgtaaatggaccaaaagtgaagcacattcttgcagtaagcactgttactctccaagcaaccatggtttacatattgggattttgaaacttagcacttctgctcccaagggacttacaaaagtgaacatttgtatgtcccgtattaaaagtactttgaactctgtttcaaaggctgtttttggcaatcaaaatgaaatgatttcacgtttagctcaatttaagccaagttcccaaattttaagaaaagtatcggatagtggctggttaaaacagaaaaacatcaaacaagccatcaaatctctgaaaaaatatagtgacaaatcagcagaaaagagtccttttccagaagagaaaagtcacattatagacaaagaagaagatataggtaaacgcagtctttttcattacacaagttctataaccacaaaatttggagactcattctactttttatcaaatcatattaattcatatttcaaacgtaaggaaaaaatgtctcaacaaaaggaaaatgaacatttccgggacaaatcagaacttgaagataaaaaggtagaagaggggaaattaagatctccagatcctggcatcctggcttataagccaggctcagaatctgtacatacggtggacaagcctacaagtccttctgcgatacctgatgttcttcaagtttcaactaaacaaagtattgctaactttctttctcgtcccacggaaggtgtacaagctttagtaggtggttatattggtggacttgtccccaaattaaagtatgattcaaagagtcagtcagaagaacaggaagagcctgctaaaactgatcaggctgtcagcaaagacagaaatgcagaggagaaaaagcgtttatctcttcagcgagaaaagattatcgcaagggtgagtattgataacaggacccgggcattagttcaggcattaagaagaacaactgacccaaagctctgcattactagggttgaagaactgacttttcatcttctagaatttcctgaaggaaaaggagtggctgtcaaggaaagaattattccatatttattacgactgagacaaattaaggatgaaactcttcaggctgcagttagagaaattttggccctaattggctatgtggatccagtgaaagggagaggaatccgaattctctcaattgatggtggaggaacaaggggcgtggttgctctccagaccctacgaaaattagttgaacttactcagaagccagttcatcagctctttgattacatttgtggtgtaagcacaggtgccatattagctttcatgttggggttgtttcatatgcccttggatgaatgtgaggaactttatcgaaaattaggatcagatgtattttcacaaaatgtcattgttggaacagtaaaaatgagttggagccatgcattttatgacagtcaaacatgggaaaacattcttaaggataggatgggatctgcactgatgattgaaacagcaagaaaccccacatgtcctaaggtagctgctgtaagtaccatagtaaatagagggataacacccaaagcttttgtgttcagaaactatggtcattttcctggaatcaactctcattatttgggaggctgtcagtataaaatgtggcaggccattagagcctcatctgctgctccaggctactttgcagaatatgcattgggaaatgatcttcatcaagatggaggtttgcttctgaataacccttcggcattagctatgcatgagtgtaaatgtctttggccagatgtgccgttagagtgcatagtatccctgggcactggacgttatgagagtgatgtgagaaacacggtaacatacacaagcttgaaaactaaactttctaatgttatcaacagtgctacagatacagaagaagtccatataatgcttgatggcctgttacctcctgacacctattttagattcaatcctgtaatgtgtgaaaacatacctctagatgaaagtcgaaatgaaaagctggatcagctgcagttggaagggttgaaatacatagaaagaaatgaacaaaaaatgaaaaaagttgcaaaaatattaagtcaagaaaaaacaactctgcagaaaattaatgattggataaaattaaaaactgatatgtatgaaggacttccattcttttcaaaattgtgatgagtatatgcttatgttctcataaatgaaggtctgtttagaagatcaaccacattcaataaggaattgtggggttcgacatgagttaactttgaaatacgtatgaattctggagaatcctgaaaaagacggtgcttcaaccagcttgcatagcacagagaatattcttggttacagaattcatatgggaactaggcttttaagatgttaataattagctaagctttagtaacccttactgtgctagtagattttagtagatattggtgttatattgtttgatgtttgaaaatatattaatatatgtgccgaacaagaaaccgaaagctatattgtactgtgtatttttactttagtcctcataatcatgttgaatttatgtgatcattgattttatttcatatggaaaagctaatttcttcttaaatttacattacctaatattctcactagctatgttctccaatccacactgccttttattgtaatatcatctaaatagatgcagaaaaatggaattttctctattaaagtattttacatttgacataaaaaagaaccagatacagttttctattcagatatgtttattttaacattgtttggttaaaaaaggtgaagttccagtcaaccactttttacccctgaaatttcaagataatgctatattaacttttccagatctaacactagcttattcttccctgttataaaatggtttgaacttactgaggagatattcctatcattaacaaaaataaactatttaaataa

SEQ ID NO: 16231 - DNA, 3366 bp, Homo sapiens
  source 1..3366: mol_type = unassigned DNA
atgctctattgcgcatatctcggggcgggggaggaacggagattgacaaggaggcagaggcctgagcgaggcggaaaatcctcaccccggcccgcgggtagacccaaacttctagcgcgtcacttccgctgggggcggagcggggcggggctgagtgggtggcgacctagctgctgcgccagtgtttgtgttggaagctcagctgatgcaggccggttggagtggacgtcattgccgggaacgagcgagtcgccgctgcagccctagtgactgcggcctgcatcccgtaatgcaagaagtgtttgtgggaagcagagaagcaagcaactgtatttcttgttctcacctaagcattactggaggataagccacatcagtctacaaagaggttttcatacaaacataataagatgtaaatggaccaaaagtgaagcacattcttgcagtaagcactgttactctccaagcaaccatggtttacatattgggattttgaaacttagcacttctgctcccaagggacttacaaaagtgaacatttgtatgtcccgtattaaaagtactttgaactctgtttcaaaggctgtttttggcaatcaaaatgaaatgatttcacgtttagctcaatttaagccaagttcccaaattttaagaaaagtatcggatagtggctggttaaaacagaaaaacatcaaacaagccatcaaatctctgaaaaaatatagtgacaaatcagcagaaaagagtccttttccagaagagaaaagtcacattatagacaaagaagaagatataggtaaacgcagtctttttcattacacaagttctataaccacaaaatttggagactcattctactttttatcaaatcatattaattcatatttcaaacgtaaggaaaaaatgtctcaacaaaaggaaaatgaacatttccgggacaaatcagaacttgaagataaaaaggtagaagaggggaaattaagatctccagatcctggcatcctggcttataagccaggctcagaatctgtacatacggtggacaagcctacaagtccttctgcgatacctgatgttcttcaagtttcaactaaacaaagtattgctaactttctttctcgtcccacggaaggtgtacaagctttagtaggtggttatattggtggacttgtccccaaattaaagtatgattcaaagagtcagtcagaagaacaggaagagcctgctaaaactgatcaggctgtcagcaaagacagaaatgcagaggagaaaaagcgtttatctcttcagcgagaaaagattatcgcaagggtgagtattgataacaggacccgggcattagttcaggcattaagaagaacaactgacccaaagctctgcattactagggttgaagaactgacttttcatcttctagaatttcctgaaggaaaaggagtggctgtcaaggaaagaattattccatatttattacgactgagacaaattaaggatgaaactcttcaggctgcagttagagaaattttggccctaattggctatgtggatccagtgaaagggagaggaatccgaattctctcaattgatggtggaggaacaaggggcgtggttgctctccagaccctacgaaaattagttgaacttactcagaagccagttcatcagctctttgattacatttgtggtgtaagcacaggtgccatattagctttcatgttggggttgtttcatatgcccttggatgaatgtgaggaactttatcgaaaattaggatcagatgtattttcacaaaatgtcattgttggaacagtaaaaatgagttggagccatgcattttatgacagtcaaacatgggaaaacattcttaaggataggatgggatctgcactgatgattgaaacagcaagaaaccccacatgtcctaaggtagctgctgtaagtaccatagtaaatagagggataacacccaaagcttttgtgttcagaaactatggtcattttcctggaatcaactctcattatttgggaggctgtcagtataaaatgtggcaggccattagagcctcatctgctgctccaggctactttgcagaatatgcattgggaaatgatcttcatcaagatggaggtttgcttctgaataacccttcggcattagctatgcatgagtgtaaatgtctttggccagatgtgccgttagagtgcatagtatccctgggcactggacgttatgagagtgatgtgagaaacacggtaacatacacaagcttgaaaactaaactttctaatgttatcaacagtgctacagatacagaagaagtccatataatgcttgatggcctgttacctcctgacacctattttagattcaatcctgtaatgtgtgaaaacatacctctagatgaaagtcgaaatgaaaagctggatcagctgcagttggaagggttgaaatacatagaaagaaatgaacaaaaaatgaaaaaagttgcaaaaatattaagtcaagaaaaaacaactctgcagaaaattaatgattggataaaattaaaaactgatatgtatgaaggacttccattcttttcaaaattgtgatgagtatatgcttatgttctcataaatgaaggtctgtttagaagatcaaccacattcaataaggaattgtggggttcgacatgagttaactttgaaatacgtatgaattctggagaatcctgaaaaagacggtgcttcaaccagcttgcatagcacagagaatattcttggttacagaattcatatgggaactaggcttttaagatgttaataattagctaagctttagtaacccttactgtgctagtagattttagtagatattggtgttatattgtttgatgtttgaaaatatattaatatatgtgccgaacaagaaaccgaaagctatattgtactgtgtatttttactttagtcctcataatcatgttgaatttatgtgatcattgattttatttcatatggaaaagctaatttcttcttaaatttacattacctaatattctcactagctatgttctccaatccacactgccttttattgtaatatcatctaaatagatgcagaaaaatggaattttctctattaaagtattttacatttgacataaaaaagaaccagatacagttttctattcagatatgtttattttaacattgtttggttaaaaaaggtgaagttccagtcaaccactttttacccctgaaatttcaagataatgctatattaacttttccagatctaacactagcttattcttccctgttataaaatggtttgaacttactgaggagatattcctatcattaacaaaaataaactatttaaataa

SEQ ID NO: 16232 - DNA, 3462 bp, Homo sapiens
  source 1..3462: mol_type = unassigned DNA
gtcatgctctattgcgcatatctcggggcgggggaggaacggagattgacaaggaggcagaggcctgagcgaggcggaaaatcctcaccccggcccgcgggtagacccaaacttctagcgcgtcacttccgctgggggcggagcggggcggggctgagtgggtggcgacctagctgctgcgccagtgtttgtgttggaagctcagctgatgcaggccggttggagtggacgtcattgccgggaacgagcgagtcgccgctgcagccctagtgactgcggcctgcatcccggtaagaccatgaattatggcatttcttaaatgaagcgttcaagaagtgagagaatgtcatagaaaataaatgatttttaagttatgtctattaatctgactgtagatatatatatttacctccttagtaatgcaagaagtgtttgtgggaagcagagaagcaagcaactgtatttcttgttctcacctaagcattactggaggataagccacatcagtctacaaagaggttttcatacaaacataataagatgtaaatggaccaaaagtgaagcacattcttgcagtaagcactgttactctccaagcaaccatggtttacatattgggattttgaaacttagcacttctgctcccaagggacttacaaaagtgaacatttgtatgtcccgtattaaaagtactttgaactctgtttcaaaggctgtttttggcaatcaaaatgaaatgatttcacgtttagctcaatttaagccaagttcccaaattttaagaaaagtatcggatagtggctggttaaaacagaaaaacatcaaacaagccatcaaatctctgaaaaaatatagtgacaaatcagcagaaaagagtccttttccagaagagaaaagtcacattatagacaaagaagaagatataggtaaacgcagtctttttcattacacaagttctataaccacaaaatttggagactcattctactttttatcaaatcatattaattcatatttcaaacgtaaggaaaaaatgtctcaacaaaaggaaaatgaacatttccgggacaaatcagaacttgaagataaaaaggtagaagaggggaaattaagatctccagatcctggcatcctggcttataagccaggctcagaatctgtacatacggtggacaagcctacaagtccttctgcgatacctgatgttcttcaagtttcaactaaacaaagtattgctaactttctttctcgtcccacggaaggtgtacaagctttagtaggtggttatattggtggacttgtccccaaattaaagtatgattcaaagagtcagtcagaagaacaggaagagcctgctaaaactgatcaggctgtcagcaaagacagaaatgcagaggagaaaaagcgtttatctcttcagcgagaaaagattatcgcaagggtgagtattgataacaggacccgggcattagttcaggcattaagaagaacaactgacccaaagctctgcattactagggttgaagaactgacttttcatcttctagaatttcctgaaggaaaaggagtggctgtcaaggaaagaattattccatatttattacgactgagacaaattaaggatgaaactcttcaggctgcagttagagaaattttggccctaattggctatgtggatccagtgaaagggagaggaatccgaattctctcaattgatggtggaggaacaaggggcgtggttgctctccagaccctacgaaaattagttgaacttactcagaagccagttcatcagctctttgattacatttgtggtgtaagcacaggtgccatattagctttcatgttggggttgtttcatatgcccttggatgaatgtgaggaactttatcgaaaattaggatcagatgtattttcacaaaatgtcattgttggaacagtaaaaatgagttggagccatgcattttatgacagtcaaacatgggaaaacattcttaaggataggatgggatctgcactgatgattgaaacagcaagaaaccccacatgtcctaaggtagctgctgtaagtaccatagtaaatagagggataacacccaaagcttttgtgttcagaaactatggtcattttcctggaatcaactctcattatttgggaggctgtcagtataaaatgtggcaggccattagagcctcatctgctgctccaggctactttgcagaatatgcattgggaaatgatcttcatcaagatggaggtttgcttctgaataacccttcggcattagctatgcatgagtgtaaatgtctttggccagatgtgccgttagagtgcatagtatccctgggcactggacgttatgagagtgatgtgagaaacacggtaacatacacaagcttgaaaactaaactttctaatgttatcaacagtgctacagatacagaagaagtccatataatgcttgatggcctgttacctcctgacacctattttagattcaatcctgtaatgtgtgaaaacatacctctagatgaaagtcgaaatgaaaagctggatcagctgcagttggaagggttgaaatacatagaaagaaatgaacaaaaaatgaaaaaagttgcaaaaatattaagtcaagaaaaaacaactctgcagaaaattaatgattggataaaattaaaaactgatatgtatgaaggacttccattcttttcaaaattgtgatgagtatatgcttatgttctcataaatgaaggtctgtttagaagatcaaccacattcaataaggaattgtggggttcgacatgagttaactttgaaatacgtatgaattctggagaatcctgaaaaagacggtgcttcaaccagcttgcatagcacagagaatattcttggttacagaattcatatgggaactaggcttttaagatgttaataattagctaagctttagtaacccttactgtgctagtagattttagtagatattggtgttatattgtttgatgtttgaaaatatattaatatatgtgccgaacaagaaaccgaaagctatattgtactgtgtatttttactttagtcctcataatcatgttgaatttatgtgatcattgattttatttcatatggaaaagctaatttcttcttaaatttacattacctaatattctcactagctatgttctccaatccacactgccttttattgtaatatcatctaaatagatgcagaaaaatggaattttctctattaaagtattttacatttgacataaaaaagaaccagatacagttttctattcagatatgtttattttaacattgtttggttaaaaaaggtgaagttccagtcaaccactttttacccctgaaatttcaagataatgctatattaacttttccagatctaacactagcttattcttccctgttataaaatggtttgaacttactgaggagatat

SEQ ID NO: 16233 - DNA, 2326 bp, Homo sapiens
  source 1..2326: mol_type = unassigned DNA
aaggatgaaagcctgaactagagcagtggaaatgcgaatgtggagcagaggaacgattcaagaaattctgcggtaaaactcatcagacttcatgactgattaaagattgtcttctcctccaaggtctacatgattacctgaagtttaataataatgcaagaagtgtttgtgggaagcagagaagcaagcaactgtatttcttgttctcacctaagcattactggaggataagccacatcagtctacaaagaggttttcatacaaacataataagatgtaaatggaccaaaagtgaagcacattcttgcagtaagcactgttactctccaagcaaccatggtttacatattgggattttgaaacttagcacttctgctcccaagggacttacaaaagtgaacatttgtatgtcccgtattaaaagtactttgaactctgtttcaaaggctgtttttggcaatcaaaatgaaatgatttcacgtttagctcaatttaagccaagttcccaaattttaagaaaagtatcggatagtggctggttaaaacagaaaaacatcaaacaagccatcaaatctctgaaaaaatatagtgacaaatcagcagaaaagagtccttttccagaagagaaaagtcacattatagacaaagaagaagatataggtaaacgcagtctttttcattacacaagttctataaccacaaaatttggagactcattctactttttatcaaatcatattaattcatatttcaaacgtaaggaaaaaatgtctcaacaaaaggaaaatgaacatttccgggacaaatcagaacttgaagataaaaaggtagaagaggggaaattaagatctccagatcctggcatcctggcttataagccaggctcagaatctgtacatacggtggacaagcctacaagtccttctgcgatacctgatgttcttcaagtttcaactaaacaaagtattgctaactttctttctcgtcccacggaaggtgtacaagctttagtaggtggttatattggtggacttgtccccaaattaaagtatgattcaaagagtcagtcagaagaacaggaagagcctgctaaaactgatcaggctgtcagcaaagacagaaatgcagaggagaaaaagcgtttatctcttcagcgagaaaagattatcgcaagggtgagtattgataacaggacccgggcattagttcaggcattaagaagaacaactgacccaaagctctgcattactagggttgaagaactgacttttcatcttctagaatttcctgaaggaaaaggagtggctgtcaaggaaagaattattccatatttattacgactgagacaaattaaggatgaaactcttcaggctgcagttagagaaattttggccctaattggctatgtggatccagtgaaagggagaggaatccgaattctctcaattgatggtggaggaacaaggggcgtggttgctctccagaccctacgaaaattagttgaacttactcagaagccagttcatcagctctttgattacatttgtggtgtaagcacaggtgccatattagctttcatgttggggttgtttcatatgcccttggatgaatgtgaggaactttatcgaaaattaggatcagatgtattttcacaaaatgtcattgttggaacagtaaaaatgagttggagccatgcattttatgacagtcaaacatgggaaaacattcttaaggataggatgggatctgcactgatgattgaaacagcaagaaaccccacatgtcctaaggtagctgctgtaagtaccatagtaaatagagggataacacccaaagcttttgtgttcagaaactatggtcattttcctggaatcaactctcattatttgggaggctgtcagtataaaatgtggcaggccattagagcctcatctgctgctccaggctactttgcagaatatgcattgggaaatgatcttcatcaagatggaggtttgcttctgaataacccttcggcattagctatgcatgagtgtaaatgtctttggccagatgtgccgttagagtgcatagtatccctgggcactggacgttatgagagtgatgtgagaaacacggtaacatacacaagcttgaaaactaaactttctaatgttatcaacagtgctacagatacagaagaagtccatataatgcttgatggcctgttacctcctgacacctattttagattcaatcctgtaatgtgtgaaaacatacctctagatgaaagtcgaaatgaaaagctggatcagctgcagttggaagggttgaaatacatagaaag

SEQ ID NO: 16234 - DNA, 711 bp, Homo sapiens
  source 1..711: mol_type = unassigned DNA
gagtgggtggcgacctagctgctgcgccagtgtttgtgttggaagctcagctgatgcaggccggttggagtggacgtcattgccgggaacgagcgagtcgccgctgcagccctagtgactgcggcctgcatcccggaaagaattattccatatttattacgactgagacaaattaaggatgaaactcttcaggctgcagttagagaaattttggccctaattggctatgtggatccagtgaaagggagaggaatccgaattctctcaattgatggtggaggaacaaggggcgtggttgctctccagaccctacgaaaattagttgaacttactcagaagccagttcatcagctctttgattacatttgtggtgtaagcacaggtgccatattagctttcatgttggggttgtttcatatgcccttggatgaatgtgaggaactttatcgaaaattaggatcagatgtattttcacaaaatgtcattgttggaacagtaaaaatgagttggagccatgcattttatgacagtcaaacatgggaaaacattcttaagtaagttacaattactctttttaaatcttctgattatataggtagtatgtgcatattataatttgaaaaatgtcaatattaaattatattcttgcatattataatttgaaaaatatcaagaatattaaattatttgactaattagagataaccactg

SEQ ID NO: 16235 - DNA, 660 bp, Homo sapiens
  source 1..660: mol_type = unassigned DNA
agctcagctgatgcaggccggttggagtggacgtcattgccgggaacgagcgagtcgccgctgcagccctagtgactgcggcctgcatcccgattatcgcaagggtgagtattgataacaggacccgggcattagttcaggcattaagaagaacaactgacccaaagctctgcattactagggttgaagaactgacttttcatcttctagaatttcctgaaggaaaaggagtggctgtcaaggaaagaattattccatatttattacgactgagacaaattaaggatgaaactcttcaggctgcagttagagaaattttggccctaattggctatgtggatccagtgaaagggagaggaatccgaattctctcaattgatggtggaggaacaaggggcgtggttgctctccagaccctacgaaaattagttgaacttactcagaagccagttcatcagctctttgattacatttgtggtgtaagcacaggtgccatattagctttcatgttggggttgtttcatatgcccttggatgaatgtgaggaactttatcgaaaattaggatcagatgtattttcacaaaatgtcattgttggaacagtaaaaatgagttggagccatgcattttatgacagtcaaacatgggaaaacattctta

SEQ ID NO: 16236 - DNA, 557 bp, Homo sapiens
  source 1..557: mol_type = unassigned DNA
aatctgtcttataagattactgagaaagtaatgaacactgtcaccttggttgtcatgtggtgaactgcatgtattggttaataataatcatacattttcagtcttgatttgacaaaagcaacaaagtatcttttctctcaatataggaaagaattattccatatttattacgactgagacaaattaaggatgaaactcttcaggctgcagttagagaaattttggccctaattggctatgtggatccagtgaaagggagaggaatccgaattctctcaattgatggtggaggaacaaggggcgtggttgctctccagaccctacgaaaattagttgaacttactcagaagccagttcatcagctctttgattacatttgtggtgtaagcacaggtgccatattagctttcatgttggggttgtttcatatgcccttggatgaatgtgaggaactttatcgaaaattaggatcagatgtattttcacaaaatgtcattgttggaacagtaaaaatgagttggagccatgcattttatgacagtcaaacatgggaaaac

SEQ ID NO: 16237 - DNA, 426 bp, Homo sapiens
  source 1..426: mol_type = unassigned DNA
aggggctcgagaggcctggacctgtggcgcatcctcagtgaggagggccgccctgcatccgtcgccggccccggtctccaggggcctcacccgagtcatgccccgctattgcgcagcgatttgttgtaagaaccgccggggacgaaacaataaagaccggaagctgagtttttatccgaaagaattattccatatttattacgactgagacaaattaaggatgaaactcttcaggctgcagttagagaaattttggccctaattggctatgtggatccagtgaaagggagaggaatccgaattctctcaattgatggtggaggaacaaggggcgtggttgctctccagaccctacgaaaattagttgaacttactcagaagccagttcatcagctctttgattacatttgtggtgtaagcacaggt

SEQ ID NO: 16238 - DNA, 735 bp, Homo sapiens
  source 1..735: mol_type = unassigned DNA
ggaagctcagctgatgcaggccggttggagtggacgtcattgccgggaacgagcgagtcgccgctgcagccctagtaagaccatgaattatggcatttcttaaatgaagcgttcaagaagtgagagaatgtcatagaaaataaatgatttttaagttatgtctattaatctgactgtagatatatatatttacctccttagtaatgcaagaagtgtttgtgggaagcagagaagcaagcaactgtatttcttgttctcacctaagcattactggaggataagccacatcagtctacaaagaggttttcatacaaacataataagatgtaaatggaccaaaagtgaagcacattcttgcagtaagcactgttactctccaagcaaccatggtttacatattgggattttgaaacttagcacttctgctcccaagggacttacaaaagtgaacatttgtatgtcccgtattaaaagtactttgaactctgtttcaaaggctgtttttggcaatcaaaatgaaatgatttcacgtttagctcaatttaagccaagttcccaaattttaagaaaagtatcggatagtggctggttaaaacagaaaaacatcaaacaagccatcaaatctctgaaaaaatatagtgacaaatcagcagaaaagagtccttttccagaagagaaaagtcacattatagacaaagaagaagatataggtaaacgcagtctttttcattacac

SEQ ID NO: 16239 - DNA, 568 bp, Homo sapiens
  source 1..568: mol_type = unassigned DNA
aggggatgaaagagcataagcggagagggaatggtggtgctctctccttgaccatactttagttaggctcctctgagccctcttcccaactaggcctcatccttgggcccctgtcttaggcctgctgagtccagttttagcaagaatcttgcaaagtcagtttagagagtatctcctagccttgataattgatcatctccgcctgtcttcagcaagaatcttagtgttatacagctggaatcatactgctatggtccgaatgtttgtgcctctcaaaattcatgtggaaatcataaccgctaaagtgatggtattaagaggtaagaccatgaattatggcatttcttaaatgaagcgttcaagaagtgagagaatgtcatagaaaataaatgatttttaagttatgtctattaatctgactgtagatatatatatttacctccttagtaatgcaagaagtgtttgtgggaagcagagaagcaagcaactgtatttcttgttctcacctaagcattactggaggataagccacatcagtctacaaagaggttttcatacaaacataata

SEQ ID NO: 16240 - DNA, 6751 bp, Homo sapiens
  source 1..6751: mol_type = unassigned DNA
gctcagaagcgccgagagcgcggccgggacggttggagaagaaggcggctcccggaagggggagagacaaactgccgtaacctctgccgttcaggaacccggttacttatttattcgttaccctttttcttcttcctcccccaaaaaccttttccttttcccttctttttttttcctttttgggagctgaaaaatttccggtaagggaaagaagggctcctttcgctccttatttccccgcctccttccctcccccaccttcccctcctccggctttttcctcccaactcggggaggtccttcccggtggccgccctgacgaggtctgagcacctaggcggaggcggcgcaggctttttgtagtgaggtttgcgcctgcgcagcgcgcctgcctccgccatgcacgggggtggccccccctcgggggacagcgcatgcccgctgcgcaccatcaagagagtccagttcggagtcctgagtccggatgaactgaagcgaatgtctgtgacggagggtggcatcaaatacccagagacgactgagggaggccgccccaagcttggggggctgatggacccgaggcagggggtgattgagcggactggccgctgccaaacatgtgcaggaaacatgacagagtgtcctggccactttggccacattgaactggccaagcctgtgtttcacgtgggcttcctggtgaagacaatgaaagttttgcgctgtgtctgcttcttctgctccaaactgcttgtggactctaacaacccaaagatcaaggatatcctggctaagtccaagggacagcccaagaagcggctcacacatgtctacgacctttgcaagggcaaaaacatatgcgagggtggggaggagatggacaacaagttcggtgtggaacaacctgagggtgacgaggatctgaccaaagaaaagggccatggtggctgtgggcggtaccagcccaggatccggcgttctggcctagagctgtatgcggaatggaagcacgttaatgaggactctcaggagaagaagatcctgctgagtccagagcgagtgcatgagatcttcaaacgcatctcagatgaggagtgttttgtgctgggcatggagccccgctatgcacggccagagtggatgattgtcacagtgctgcctgtgcccccgctctccgtgcggcctgctgttgtgatgcagggctctgcccgtaaccaggatgacctgactcacaaactggctgacatcgtgaagatcaacaatcagctgcggcgcaatgagcagaacggcgcagcggcccatgtcattgcagaggatgtgaagctcctccagttccatgtggccaccatggtggacaatgagctgcctggcttgccccgtgccatgcagaagtctgggcgtcccctcaagtccctgaagcagcggttgaagggcaaggaaggccgggtgcgagggaacctgatgggcaaaagagtggacttctcggcccgtactgtcatcacccccgaccccaacctctccattgaccaggttggcgtgccccgctccattgctgccaacatgacctttgcggagattgtcacccccttcaacattgacagacttcaagaactagtgcgcagggggaacagccagtacccaggcgccaagtacatcatccgagacaatggtgatcgcattgacttgcgtttccaccccaagcccagtgaccttcacctgcagaccggctataaggtggaacggcacatgtgtgatggggacattgttatcttcaaccggcagccaactctgcacaaaatgtccatgatggggcatcgggtccgcattctcccatggtctacctttcgcttgaatcttagtgtgacaactccgtacaatgcagactttgacggggatgagatgaacttgcacctgccacagtctctggagacgcgagcagagatccaggagctggccatggttcctcgcatgattgtcaccccccagagcaatcggcctgtcatgggtattgtgcaggacacactcacagcagtgcgcaaattcaccaagagagacgtcttcctggagcggggtgaagtgatgaacctcctgatgttcctgtcgacgtgggatgggaaggtcccacagccggccatcctaaagccccggcccctgtggacaggcaagcaaatcttctccctcatcatacctggtcacatcaattgtatccgtacccacagcacccatcccgatgatgaagacagtggcccttacaagcacatctctcctggggacaccaaggtggtggtggagaatggggagctgatcatgggcatcctgtgtaagaagtctctgggcacgtcagctggctccctggtccacatctcctacctagagatgggtcatgacatcactcgcctcttctactccaacattcagactgtcattaacaactggctcctcatcgagggtcatactattggcattggggactccattgctgattctaagacttaccaggacattcagaacactattaagaaggccaagcaggacgtaatagaggtcatcgagaaggcacacaacaatgagctggagcccaccccagggaacactctgcggcagacgtttgagaatcaggtgaaccgcattcttaacgatgcccgagacaagactggctcctctgctcagaaatccctgtctgaatacaataacttcaagtctatggtcgtgtccggagctaaaggttccaagattaacatctcccaggtcattgctgtcgttggacagcagaacgtcgagggcaagcggattccatttggcttcaagcaccggactctgcctcacttcatcaaggatgactacgggcctgagagccgtggctttgtggagaactcctacctagccggcctcacacccactgagttctttttccacgccatggggggtcgtgaggggctcattgacacggctgtcaagactgctgagactggatacatccagcggcggctgatcaagtccatggagtcagtgatggtgaagtacgacgcgactgtgcggaactccatcaaccaggtggtgcagctgcgctacggcgaagacggcctggcaggcgagagcgttgagttccagaacctggctacgcttaagccttccaacaaggcttttgagaagaagttccgctttgattataccaatgagagggccctgcggcgcactctgcaggaggacctggtgaaggacgtgctgagcaacgcacacatccagaacgagttggagcgggaatttgagcggatgcgggaggatcgggaggtgctcagggtcatcttcccaactggagacagcaaggtcgtcctcccctgtaacctgctgcggatgatctggaatgctcagaaaatcttccacatcaacccacgccttccctccgacctgcaccccatcaaagtggtggagggagtcaaggaattgagcaagaagctggtgattgtgaatggggatgacccactaagtcgacaggcccaggaaaatgccacgctgctcttcaacatccacctgcggtccacgttgtgttcccgccgcatggcagaggagtttcggctcagtggggaggccttcgactggctgcttggggagattgagtccaagttcaaccaagccattgcgcatcccggggaaatggtgggggctctggctgcgcagtcccttggagaacctgccacccagatgaccttgaataccttccactatgctggtgtgtctgccaagaatgtgacgctgggtgtgccccgacttaaggagctcatcaacatttccaagaagccaaagactccttcgcttactgtcttcctgttgggccagtccgctcgagatgctgagagagccaaggatattctgtgccgtctggagcatacaacgttgaggaaggtgactgccaacacagccatctactatgaccccaacccccagagcacggtggtggcagaggatcaggaatgggtgaatgtctactatgaaatgcctgactttgatgtggcccgaatctccccctggctgttgcgggtggagctggatcggaagcacatgactgaccggaagctcaccatggagcagattgctgaaaagatcaatgctggttttggtgacgacttgaactgcatctttaatgatgacaatgcagagaagctggtgctccgtattcgcatcatgaacagcgatgagaacaagatgcaagaggaggaagaggtggtggacaagatggatgatgatgtcttcctgcgctgcatcgagtccaacatgctgacagatatgaccctgcagggcatcgagcagatcagcaaggtgtacatgcacttgccacagacagacaacaagaagaagatcatcatcacggaggatggggaattcaaggccctgcaggagtggatcctggagacggacggcgtgagcttgatgcgggtgctgagtgagaaggacgtggaccccgtacgcaccacgtccaatgacattgtggagatcttcacggtgctgggcattgaagccgtgcggaaggccctggagcgggagctgtaccacgtcatctcctttgatggctcctatgtcaattaccgacacttggctctcttgtgtgataccatgacctgtcgtggccacttgatggccatcacccgacacggagtcaaccgccaggacacaggaccactcatgaagtgttcctttgaggaaacggtggacgtgcttatggaagcagccgcacacggtgagagtgaccccatgaagggggtctctgagaatatcatgctgggccagctggctccggccggcactggctgctttgacctcctgcttgatgcagagaagtgcaagtatggcatggagatccccaccaatatccccggcctgggggctgctggacccaccggcatgttctttggttcagcacccagtcccatgggtggaatctctcctgccatgacaccttggaaccagggtgcaacccctgcctatggcgcctggtcccccagtgttgggagtggaatgaccccaggggcagccggcttctctcccagtgctgcgtcagatgccagcggcttcagcccaggttactcccctgcctggtctcccacaccgggctccccggggtccccaggtccctcaagcccctacatcccttcaccaggtggtgccatgtctcccagctactcgccaacgtcacctgcctacgagccccgctctcctgggggctacacaccccagagtccctcttattcccccacttcaccctcctactcccctacctctccatcctattctccaaccagtcccaactatagtcccacatcacccagctattcgccaacgtcacccagctactcaccgacctctcccagctactcacccacctctcccagctactcgcccacctctcccagctactcgcccacctctcccagctactcacccacttcccctagctactcgcccacttcccctagctactcgccaacgtctcccagctactcgccgacatctcccagctactcgccaacttcacccagctattctcccacttctcccagctactcacctacctctccaagctattcacccacctcccccagctactcacccacttccccaagttactcacccaccagcccgaactattctccaaccagtcccaattacaccccaacatcacccagctacagcccgacatcacccagctattcacctactagtcccaactacacacctaccagccctaactacagcccaacctctccaagctactctccaacatcacccagctattccccgacctcaccaagttactccccttccagcccacgatacacaccacagtctccaacctataccccaagctcacccagctacagccccagctcgcccagctacagcccaacctcacccacaagtacaccccaaccagtccttcttacagtcccagctccccagagtataccccaacctctcccaagtactcacctaccagtcccaaatattcacccacctctcccaagtactcgcctaccagtcccacctattcacccaccaccccaaaatactccccaacatctcctacttattccccaacctctccagtctacaccccaacctctcccaagtactcacctactagccccacttactcgcccacttcccccaagtactcgcccaccagccccacctactcgcccacctcccccaaaggctcaacctactctcccacttcccctggttactcgcccaccagccccacctacagtctcacaagcccggctatcagcccggatgacagtgacgaggagaactgagggcacgtggggtgcggcagcgggctagggcccagggcagcttgcccgtgctgctgtgcagttcttgcctccctcacggggcgtcacccccagcccagctccgttgtacataaatgccttgtggcagagctcccggtgaacttctggatcccgtttctgatgcagactcttgtcttgttctccacttgtgctgttagaactcactggcccagtggtgttctcactcctaccccacccaccccctgcctgtccccaaattgaagatccttccttgcctgtggcttgatgcggggcgggtaaagggtattttaacttaggggtagttcctgctgtgagtggttacagctgatcctcgggaagaacaaagctaaagctgccttttgtctgttattttatttttttgaagtttaaataaagtttactaattttgaccaaaa

SEQ ID NO: 16241 - DNA, 2083 bp, Homo sapiens
  source 1..2083: mol_type = unassigned DNA
ccaccttcccctcctccggctttttcctcccaactcggggaggtccttcccggtggccgccctgacgaggtctgagcacctaggcggaggcggcgcaggctttttgtagtgaggtttgcgcctgcgcagcgcgcctgcctccgccatgcacgggggtggccccccctcgggggacagcgcatgcccgctgcgcaccatcaagagagtccagttcggagtcctgagtccggatgaactgaagcgaatgtctgtgacggagggtggcatcaaatacccagagacgactgagggaggccgccccaagcttggggggctgatggacccgaggcagggggtgattgagcggactggccgctgccaaacatgtgcaggaaacatgacagagtgtcctggccactttggccacattgaactggccaagcctgtgtttcacgtgggcttcctggtgaagacaatgaaagttttgcgctgtgtctgcttcttctgctccaaactgcttgtggactctaacaacccaaagatcaaggatatcctggctaagtccaagggacagcccaagaagcggctcacacatgtctacgacctttgcaagggcaaaaacatatgcgagggtggggaggagatggacaacaagttcggtgtggaacaacctgagggtgacgaggatctgaccaaagaaaagggccatggtggctgtgggcggtaccagcccaggatccggcgttctggcctagagctgtatgcggaatggaagcacgttaatgaggactctcaggagaagaagatcctgctgagtccagagcgagtgcatgagatcttcaaacgcatctcagatgaggagtgttttgtgctgggcatggagccccgctatgcacggccagagtggatgattgtcacagtgctgcctgtgcccccgctctccgtgcggcctgctgttgtgatgcagggctctgcccgtaaccaggatgacctgactcacaaactggctgacatcgtgaagatcaacaatcagctgcggcgcaatgagcagaacggcgcagcggcccatgtcattgcagaggatgtgaagctcctccagttccatgtggccaccatggtggacaatgagctgcctggcttgccccgtgccatgcagaagtctgggcgtcccctcaagtccctgaagcagcggttgaagggcaaggaaggccgggtgcgagggaacctgatgggcaaaagagtggacttctcggcccgtactgtcatcacccccgaccccaacctctccattgaccaggttggcgtgccccgctccattgctgccaacatgacctttgcggagattgtcacccccttcaacattgacagacttcaagaactagtgcgcagggggaacagccagtacccaggcgccaagtacatcatccgagacaatggtgatcgcattgacttgcgtttccaccccaagcccagtgaccttcacctgcagaccggctataaggtggaacggcacatgtgtgatggggacattgttatcttcaaccggcagccaactctgcacaaaatgtccatgatggggcatcgggtccgcattctcccatggtctacctttcgcttgaatcttagtgtgacaactccgtacaatgcagactttgacggggatgagatgaacttgcacctgccacagtctctggagacgcgagcagagatccaggagctggccatggttcctcgcatgattgtcaccccccagagcaatcggcctgtcatgggtattgtgcaggacacactcacagcagtgcgcaaattcaccaagagagacgtcttcctggagcgggtgtgtggtccaaatggaaacctggcttaagtgggcagtggggctctggggtgcaaggtggaggctagagaggaagagctgtgttttttttcctgacttacccagcagtggtctgtgagattgtcttttctggtgggcgaacaaaaagggggttaggaaaactcaggccaaaaaggtgtaaggcgttaattccccatttaattccttaaaatttcatgtaataccaggtattgcctgtaaaggaaagataaagggaaaaataagtaa

SEQ ID NO: 16242 - DNA, 532 bp, Homo sapiens
  source 1..532: mol_type = unassigned DNA
caacctctccattgaccaggttggcgtgccccgctccattgctgccaacatgacctttgcggagattgtcacccccttcaacattgacagacttcaagaactagtgcgcagggggaacagccagtacccaggcgccaagtacatcatccgagacaatggtgatcgcattgacttgcgtttccaccccaagcccagtgaccttcacctgcagaccggctataaggcacgtagcaggccagggcctctctcagccacctgagcagaaagctttccaagatagggcaggctgggttaggccatctgagtctgtctcgttcattgggatccagacttgactgtcttgttaaaggctgttgctgcccaggtgtgcagggagctgttggtctctggcattcagggtgggggtggtataaacccggggcagcttgcatatggcagggaagagggatccgtggaggaacagtgcagaaggctttatgttcagaatctctcttgcttttcttctagactgagttccttgagattggtgaat

SEQ ID NO: 16243 - DNA, 702 bp, Homo sapiens
  source 1..702: mol_type = unassigned DNA
ttttgtattttcagtagagatggggtttcaccatgttgaccaggctggtctcaaactcctgagcttaagtgacgtgcccgcctcagcctcccaaagtgcttggattataggtgtgagccactgcactggacttgcaaaggactttaggtccattgtccttttattcttagatacctccttcactgagaccttttccttacctcacctctctaggtggaacggcacatgtgtgatggggacattgttatcttcaaccggcagccaactctgcacaaaatgtccatgatggggcatcgggtccgcattctcccatggtctacctttcgcttgaatcttagtgtgacaactccgtacaatgcagactttgacggggatgagatgaacttgcacctgccacagtctctggagacgcgagcagagatccaggagctggccatggttcctcgcatgattgtcaccccccagagcaatcggcctgtcatgggtattgtgcaggacacactcacagcagtgcgcaaattcaccaagagagacgtcttcctggagcggggtgaagtgatgaacctcctgatgttcctgtcgacgtgggatgggaaggtcccacagccggccatcctaaagccccggcccctgtggacaggcaagcaaatcttctccctcatcatacctggtcacatcaattgtatccgtacccacagcacc

SEQ ID NO: 16244 - DNA, 245 bp, Homo sapiens
  source 1..245: mol_type = unassigned DNA
ggggctcattgacacggctgtcaagactgctgagactggatacatccagcggcggctgatcaagtccatggagtcagtgatggtgaagtacgacgcgactgtgcggaactccatcaaccaggtggtgcagctgcgctacggcgaagacggcctggcaggcgagagcgttgagttccagaacctggctacgcttaagccttccaacaaggcttttgagaagaagtgaggaggcgggcaggcgggtg

SEQ ID NO: 16245 - DNA, 548 bp, Homo sapiens
  source 1..548: mol_type = unassigned DNA
tataaagcagatgcagaggggtgggcctgtactcaggtcccagtggcagtccttgggcctgaatttttctctgtccaggattcttgcctccaaaccactgtacttggtcggctgtgcacctttgggaaccttacagtgcgttttgtggggaccaaggtcccagagcccacctgtccactagctaccccttgcacttccaggttccgctttgattataccaatgagagggccctgcggcgcactctgcaggaggacctggtgaaggacgtgctgagcaacgcacacatccagaacgagttggagcgggaatttgagcggatgcgggaggatcgggaggtgctcagggtcatcttcccaactggagacagcaaggtcgtcctcccctgtaacctgctgcggatgatctggaatgctcagaaaatcttccacatcaacccacgccttccctccgacctgcaccccatcaaagtggtggagggagtcaaggaattgagcaagaagctggtgattgtgaatggggatgacccactaagtcgacaggcccagga

SEQ ID NO: 16246 - DNA, 461 bp, Homo sapiens
  source 1..461: mol_type = unassigned DNA
acctgctgcggatgatctggaatgctcagaaaatcttccacatcaacccacgccttccctccgacctgcaccccatcaaagtggtggagggagtcaaggaattgagcaagaagctggtgattgtgaatggggatgacccactaagtcgacaggcccaggaaaatgccacgctgctcttcaacatccacctgcggtccacgttgtgttcccgccgcatggcagaggagtttcggctcagtggggaggccttcgactggctgcttggggagattgagtccaagttcaaccaagccattgtgagtgttgtgctcttcacagcagtcttcttttcctccttttacctgttgacttctgtggtttccaagagcagcccacttctgtccacaacctacagaataggttctgtaggttctgtcccacctaataatagctctcattcatggagagactgcttgtacctt

SEQ ID NO: 16247 - DNA, 648 bp, Homo sapiens
  source 1..648: mol_type = unassigned DNA
ccaaggatattctgtgccgtctggagcatacaacgttgaggaaggtgactgccaacacagccatctactatgaccccaacccccagagcacggtggtggcagaggatcaggaatgggtgaatgtctactatgaaatgcctgactttgatgtggcccgaatctccccctggctgttgcgggtggagctggatcggaagcacatgactgaccggaagctcaccatggagcagattgctgaaaagatcaatgctggttttggtgacgacttgaactgcatctttaatgatgacaatgcagagaagctggtgctccgtattcgcatcatgaacagcgatgagaacaagatgcaagaggtaatgggggtcctagaagtcagcgtgtcacatgtataaaacgcatgaatcacgttagagaccaaagaaaagaagatgcaatcaacattgaggggcggccaggcgcggtggctcacgcctgtaatcccagcactttgggaggctgaggcgggtggatcacctgagctcaggagttcgagaccagcctgaccaacatggagtaaccccgtctctactaaaaataaaaattagccgggcatggtggtatgtgcctgtaatcctagctacttgggaggctgaggcaacaagagtgaaa

SEQ ID NO: 16248 - DNA, 602 bp, Homo sapiens
  source 1..602: mol_type = unassigned DNA
tgatgcgggtgctgagtgagaaggacgtggaccccgtacgcaccacgtccaatgacattgtggagatcttcacggtgctgggcattgaagccgtgcggaaggccctggagcgggagctgtaccacgtcatctcctttgatggctcctatgtcaattaccgacacttggctctcttgtgtgataccatgacctgtcgtggccacttgatggccatcacccgacacggagtcaaccgccaggacacaggaccactcatgaagtgttcctttgaggaaacggtggacgtgcttatggaagcagccgcacacggtgagagtgaccccatgaagggggtctctgagaatatcatgctgggccagctggctccggccggcactggctgctttgacctcctgcttgatgcagagaagtgcaagtatggcatggagatccccaccaatatccccggcctgggggctgctggacgtgagtatgaggccccagctgcggtacctgcttgcgtcggcgaggcgggggggcaggccatgggtgcaagggtgtcaccagtccatgattgctgttcttgctcctcacgatttcctgtgttcctctttgcagccacc

SEQ ID NO: 16249 - DNA, 2456 bp, Homo sapiens
  source 1..2456: mol_type = unassigned DNA
ggcggacacttggggtctggacgcaacggcggcgggagcatgaacgcccctccagccttcgagtcgttcttgctcttcgagggcgagaaacaactcctaaaagacccgcaagtgctatttgctggctacaaagtcccccaccccttggagcacaagatcatcatccgagtgcagaccacgccggactacagcccccaggaagcctttaccaacgccatcaccgacctcatcagtgagctgtccctgctggaggagcgcttccgggtgagggcggggcctggaggggcagacggggtgggctggacactggcccgtgtgcccaggcctgggacagccctggcctgtttcttcggaggtcctcagggagaggcggcggtgatggaagaacagggacttccaccacaggctccaggacatgtggactgaggggctgtggagtctgggcctgtggctcccgtctgccccatgggacttctgtagtgctgcagggtccctcgggtgctgtgggccagatccgggcggggacctactgtcctttgggggtgctcttctacgtcccttgtcggtgattggcaaggcctggtccttccaggcctctgggaggcagctcaccccagggtggcccacacctgttcctagcagggcgcctgggaatctagaacagtttagaggggaaagagccacagcaaagaaaagccgaggcagggtgatcacgaggtcaggagttcaagaccagcctggcaaacatggtgaagccctgtttctactaaaaatacaaaaattagctaggcatggtggcatgtgctgtagtcccagctactcgggaggctgaggcaggagaatcgcttgaacccgggaggcggaggttgcagtgagccgagattgtgccactgcactccagcctaggtaacagagcaggactccatctcagtcaatcaatcaatcaatcaatctcagcggttgaactacccttgacatggttcagctctgtatccacacccaaatgtcatgtcaaattgtaattcccagtgttgtgggagggacctggtgggaggtgattggctcatgggggccgacttcccccttgctgttctcgtgatattgagtgagcgcttgtgggatctggttgtttaaaagcgtgcagccctcccacttcactctctctgtctctcctgctccaacatggccagacgtgcctgcttccccttcgccttctgccgtgattgtcagtttcctgaggcctccccagccacgcttcctgtacagcctgcagaactctgccccagagcacatcagctatgtgccccagctctcaaacgacaccttggcggggaggctcaccctgtccaccttcacgctggagcagcctctaggccagttcagcagccacaacatctctgacttggataccatctggctggtggtggccctcagcaacgccacccagagcttcacggccccacggacaaaccaggacatccctgctcctgccaacttctcccagaggggctactatctcacactgagggccaaccgggtgctgtaccagaccagaggccagctccatgtcctccgcgtcggcaatgatacccactgccaaccaacaaaaattggctgcaaccatcccctaccaggacccggcccctacagggtgaagttcctggtgatgaatgacgaaggacccgtggctgaaacaaagtggtccagcgacactcgcctgcagcaagcccaggcacttcgggctgtccccggcccccagagcccgggcaccgtggtcatcatcgccatcctgtctatcctcctggccgtcctcctcacggtcctcctggctgtgctcatatacacctgcttcaacagctgcaggagcacttccctatcaggcccagaggaggcagggagtgtgagaagatacaccacgcacctcgcgttcagcactcctgccgagggggcttcctgaggggttccagaggggcccacgtgtccctccacctcctccctggcccaggctgcagagcctgagctgggacacgccctgaagcttctggaccctgagagagattgtttcttttctttactatttttttttttttttttgagacggagtctcactctgtcgccaggctggcgcgatcttggctcactgcaacctctgcctcacgggttcaagcgattttcctgcttcagcctcctgagtagctgggactacaggcacacgccaccatgcccagctcatttttgtatttttagtagagatggggtttcaccatgttggccaggatggcctccgtctcttgaccttgtgatccgcccgactcggcctcccaaaatgctgggattacaggcgtgagccatcaagtctggtgagagagattgtttctagatgagggtgggggcgggtgtccttagcccaaagcttgtgccagtctctatcagaaataaatgcccccaaaacctcc

SEQ ID NO: 16250 - DNA, 2553 bp, Homo sapiens
  source 1..2553: mol_type = unassigned DNA
cggcggtggcggacacttggggtctggacgcaacggcggcgggagcatgaacgcccctccagccttcgagtcgttcttgctcttcgagggcgagaagatcaccattaacaaggacaccaaggtacccaatgcctgtttattcaccatcaacaaagaagaccacacactgggaaacatcattaaatcacaactcctaaaagacccgcaagtgctatttgctggctacaaagtcccccaccccttggagcacaagatcatcatccgagtgcagaccacgccggactacagcccccaggaagcctttaccaacgccatcaccgacctcatcagtgagctgtccctgctggaggagcgcttccgggtgagggcggggcctggaggggcagacggggtgggctggacactggcccgtgtgcccaggcctgggacagccctggcctgtttcttcggaggtcctcagggagaggcggcggtgatggaagaacagggacttccaccacaggctccaggacatgtggactgaggggctgtggagtctgggcctgtggctcccgtctgccccatgggacttctgtagtgctgcagggtccctcgggtgctgtgggccagatccgggcggggacctactgtcctttgggggtgctcttctacgtcccttgtcggtgattggcaaggcctggtccttccaggcctctgggaggcagctcaccccagggtggcccacacctgttcctagcagggcgcctgggaatctagaacagtttagaggggaaagagccacagcaaagaaaagccgaggcagggtgatcacgaggtcaggagttcaagaccagcctggcaaacatggtgaagccctgtttctactaaaaatacaaaaattagctaggcatggtggcatgtgctgtagtcccagctactcgggaggctgaggcaggagaatcgcttgaacccgggaggcggaggttgcagtgagccgagattgtgccactgcactccagcctaggtaacagagcaggactccatctcagtcaatcaatcaatcaatcaatctcagcggttgaactacccttgacatggttcagctctgtatccacacccaaatgtcatgtcaaattgtaattcccagtgttgtgggagggacctggtgggaggtgattggctcatgggggccgacttcccccttgctgttctcgtgatattgagtgagcgcttgtgggatctggttgtttaaaagcgtgcagccctcccacttcactctctctgtctctcctgctccaacatggccagacgtgcctgcttccccttcgccttctgccgtgattgtcagtttcctgaggcctccccagccacgcttcctgtacagcctgcagaactctgccccagagcacatcagctatgtgccccagctctcaaacgacaccttggcggggaggctcaccctgtccaccttcacgctggagcagcctctaggccagttcagcagccacaacatctctgacttggataccatctggctggtggtggccctcagcaacgccacccagagcttcacggccccacggacaaaccaggacatccctgctcctgccaacttctcccagaggggctactatctcacactgagggccaaccgggtgctgtaccagaccagaggccagctccatgtcctccgcgtcggcaatgatacccactgccaaccaacaaaaattggctgcaaccatcccctaccaggacccggcccctacagggtgaagttcctggtgatgaatgacgaaggacccgtggctgaaacaaagtggtccagcgacactcgcctgcagcaagcccaggcacttcgggctgtccccggcccccagagcccgggcaccgtggtcatcatcgccatcctgtctatcctcctggccgtcctcctcacggtcctcctggctgtgctcatatacacctgcttcaacagctgcaggagcacttccctatcaggcccagaggaggcagggagtgtgagaagatacaccacgcacctcgcgttcagcactcctgccgagggggcttcctgaggggttccagaggggcccacgtgtccctccacctcctccctggcccaggctgcagagcctgagctgggacacgccctgaagcttctggaccctgagagagattgtttcttttctttactatttttttttttttttttgagacggagtctcactctgtcgccaggctggcgcgatcttggctcactgcaacctctgcctcacgggttcaagcgattttcctgcttcagcctcctgagtagctgggactacaggcacacgccaccatgcccagctcatttttgtatttttagtagagatggggtttcaccatgttggccaggatggcctccgtctcttgaccttgtgatccgcccgactcggcctcccaaaatgctgggattacaggcgtgagccatcaagtctggtgagagagattgtttctagatgagggtgggggcgggtgtccttagcccaaagcttgtgccagtctctatcagaaataaatgcccccaaaacctcc

SEQ ID NO: 16251 - DNA, 1598 bp, Homo sapiens
  source 1..1598: mol_type = unassigned DNA
cgcaacggcggcgggagcatgaacgcccctccagccttcgagtcgttcttgctcttcgagggcgagaagatcaccattaacaaggacaccaaggtacccaatgcctgtttattcaccatcaacaaagaagaccacacactgggaaacatcattaaatcacaactcctaaaagacccgcaagtgctatttgctggctacaaagtcccccaccccttggagcacaagatcatcatccgagtgcagaccacgccggactacagcccccaggaagcctttaccaacgccatcaccgacctcatcagtgagctgtccctgctggaggagcgcttccggacgtgcctgcttccccttcgccttctgccgtgattgtcagtttcctgaggcctccccagccacgcttcctgtacagcctgcagaactctgccccagagcacatcagctatgtgccccagctctcaaacgacaccttggcggggaggctcaccctgtccaccttcacgctggagcagcctctaggccagttcagcagccacaacatctctgacttggataccatctggctggtggtggccctcagcaacgccacccagagcttcacggccccacggacaaaccaggacatccctgctcctgccaacttctcccagaggggctactatctcacactgagggccaaccgggtgctgtaccagaccagaggccagctccatgtcctccgcgtcggcaatgatacccactgccaaccaacaaaaattggctgcaaccatcccctaccaggacccggcccctacagggtgaagttcctggtgatgaatgacgaaggacccgtggctgaaacaaagtggtccagcgacactcgcctgcagcaagcccaggcacttcgggctgtccccggcccccagagcccgggcaccgtggtcatcatcgccatcctgtctatcctcctggccgtcctcctcacggtcctcctggctgtgctcatatacacctgcttcaacagctgcaggagcacttccctatcaggcccagaggaggcagggagtgtgagaagatacaccacgcacctcgcgttcagcactcctgccgagggggcttcctgaggggttccagaggggcccacgtgtccctccacctcctccctggcccaggctgcagagcctgagctgggacacgccctgaagcttctggaccctgagagagattgtttcttttctttactatttttttttttttttttgagacggagtctcactctgtcgccaggctggcgcgatcttggctcactgcaacctctgcctcacgggttcaagcgattttcctgcttcagcctcctgagtagctgggactacaggcacacgccaccatgcccagctcatttttgtatttttagtagagatggggtttcaccatgttggccaggatggcctccgtctcttgaccttgtgatccgcccgactcggcctcccaaaatgctgggattacaggcgtgagccatcaagtctggtgagagagattgtttctagatgagggtgggggcgggtgtccttagcccaaagcttgtgccagtctctatcagaaataaatgcccccaaaacctc

SEQ ID NO: 16252 - DNA, 1532 bp, Homo sapiens
  source 1..1532: mol_type = unassigned DNA
acagggggcgatgagccgatccttgcgcgggtttgccccgccggagtaatccggaagaggcctcttattagggctctggtggcggcggtggcggacacttggggtctggacgcaacggcggcgggagcatgaacgcccctccagccttcgagtcgttcttgctcttcgagggcgagaagatcaccattaacaaggacaccaaggtacccaatgcctgtttattcaccatcaacaaagaagaccacacactgggaaacatcattaaatcacgtgcctgcttccccttcgccttctgccgtgattgtcagtttcctgaggcctccccagccacgcttcctgtacagcctgcagaactctgccccagagcacatcagctatgtgccccagctctcaaacgacaccttggcggggaggctcaccctgtccaccttcacgctggagcagcctctaggccagttcagcagccacaacatctctgacttggataccatctggctggtggtggccctcagcaacgccacccagagcttcacggccccacggacaaaccaggacatccctgctcctgccaacttctcccagaggggctactatctcacactgagggccaaccgggtgctgtaccagaccagaggccagctccatgtcctccgcgtcggcaatgatacccactgccaaccaacaaaaattggctgcaaccatcccctaccaggacccggcccctacagggtgaagttcctggtgatgaatgacgaaggacccgtggctgaaacaaagtggtccagcgacactcgcctgcagcaagcccaggcacttcgggctgtccccggcccccagagcccgggcaccgtggtcatcatcgccatcctgtctatcctcctggccgtcctcctcacggtcctcctggctgtgctcatatacacctgcttcaacagctgcaggagcacttccctatcaggcccagaggaggcagggagtgtgagaagatacaccacgcacctcgcgttcagcactcctgccgagggggcttcctgaggggttccagaggggcccacgtgtccctccacctcctccctggcccaggctgcagagcctgagctgggacacgccctgaagcttctggaccctgagagagattgtttcttttctttactatttttttttttttttttgagacggagtctcactctgtcgccaggctggcgcgatcttggctcactgcaacctctgcctcacgggttcaagcgattttcctgcttcagcctcctgagtagctgggactacaggcacacgccaccatgcccagctcatttttgtatttttagtagagatggggtttcaccatgttggccaggatggcctccgtctcttgaccttgtgatccgcccgactcggcctcccaaaatgctgggattacaggcgtgagccatcaagtctggtgagagagattgtttctagatgagggtgggggcgggtgtccttagcccaaagcttgtgccagtctctatcagaaataaatgcccccaaaacct

SEQ ID NO: 16253 - DNA, 875 bp, Homo sapiens
  source 1..875: mol_type = unassigned DNA
tcttccctggcaagattcttctgaattgtgctgccttggccaaaagaggaggaactaccctgccctgacagaggctggggatgaaggaggaagagacagccggtcccctggataaagagctgccccagagcacatcagctatgtgccccagctctcaaacgacaccttggcggggaggctcaccctgtccaccttcacgctggagcagcctctaggccagttcagcagccacaacatctctgacttggataccatctggctggtggtggccctcagcaacgccacccagagcttcacggccccacggacaaaccaggacatccctgctcctgccaacttctcccagaggggctactatctcacactgagggccaaccgggtgctgtaccagaccagaggccagctccatgtcctccgcgtcggcaatgatacccactgccaaccaacaaaaattggctgcaaccatcccctaccaggacccggcccctacagggtgaagttcctggtgatgaatgacgaaggacccgtggctgaaacaaagtggtccagcgacactcgcctgcagcaagcccaggcacttcgggctgtccccggcccccagagcccgggcaccgtggtcatcatcgccatcctgtctatcctcctggccgtcctcctcacggtcctcctggctgtgctcatatacacctgcttcaacagctgcaggagcacttccctatcaggcccagaggaggcagggagtgtgagaagatacaccacgcacctcgcgttcagcactcctgccgagggggcttcctgaggggttccagaggggcccacgtgtccctccacctcctccctggcccaggctgcagagcctgagctgggacacgccc

SEQ ID NO: 16254 - DNA, 783 bp, Homo sapiens
  source 1..783: mol_type = unassigned DNA
cccttcgccttctgccgtgattgtcagtttcctgaggcctccccagccacgcttcctgtacagcctgcagaactgaggaactaccctgccctgacagaggctggggatgaaggaggaagagacagccggtcccctggataaagagacactgcagacggacggacagacagatggacaacagctggaggcttggcccggccatagggctctctgcgggacagtcccagctgctagtgtcgctgttgctgctactgacccgtgtccagcctgggacagacgtggctgccccagagcacatcagctatgtgccccagctctcaaacgacaccttggcggggaggctcaccctgtccaccttcacgctggagcagcctctaggccagttcagcagccacaacatctctgacttggataccatctggctggtggtggccctcagcaacgccacccagagcttcacggccccacggacaaaccaggacatccctgctcctgccaacttctcccagaggggctactatctcacactgagggccaaccgggtgctgtaccagaccagaggccagctccatgtcctccgcgtcggcaatgatacccactgccaaccaacaaaaattggctgcaaccatcccctaccaggacccggcccctacagggtgaagttcctggtgatgaatgacgaaggacccgtggctgaaacaaagtggtccagcgacactcgcctgcagcaagcccaggcacttcgggctgtccccggcccccagagcccgggcaccgtggtca

SEQ ID NO: 16255 - DNA, 1030 bp, Homo sapiens
  source 1..1030: mol_type = unassigned DNA
acttggggtctggacgcaacggcggcgggagcatgaacgcccctccagccttcgagtcgttcttgctcttcgagggcgagaagatcaccattaacaaggacaccaaggtacccaatgcctgtttattcaccatcaacaaagaagaccacacactgggaaacatcattaaatcacaactcctaaaagacccgcaagtgctatttgctggctacaaagtcccccaccccttggagcacaagatcatcatccgagtgcagaccacgccggactacagcccccaggaagcctttaccaacgccatcaccgacctcatcagtgagctgtccctgctggaggagcgcttccggacgtgcctgcttccccttcgccttctgccgtgattgtcagtttcctgaggcctccccagccacgcttcctgtacagcctgcagaacttctggcatggaaaagcccctgtgcaactggtaaagatatcaataagcaccaggaggtatctaaatccaccaggagccataggcatcacgttgacatccatttaccagtcttccctggcaagattcttctgaattgtgctgccttggccaaaagagctgccccagagcacatcagctatgtgccccagctctcaaacgacaccttggcggggaggctcaccctgtccaccttcacgctggagcagcctctaggccagttcagcagccacaacatctctgacttggataccatctggctggtggtggccctcagcaacgccacccagagcttcacggccccacggacaaaccaggacatccctgctcctgccaacttctcccagaggggctactatctcacactgagggccaaccgggtgctgtaccagaccagaggccagctccatgtcctccgcgtcggcaatgatacccactgccaaccaacaaaaattggctgcaaccatcccctaccaggacccggcccctacagggtgaagttcctggtgatgaatgacgaaggacccgtggctgaaacaaagtggtccagcgacactcgcc

SEQ ID NO: 16256 - DNA, 958 bp, Homo sapiens
  source 1..958: mol_type = unassigned DNA
cagcccaacagggggcgatgagccgatccttgcgcgggtttgccccgccggagtaatccggaagaggcctcttattagggctctggtggcggcggtggcggacacttggggtctggacgcaacggcggcgggagcatgaacgcccctccagccttcgagtcgttcttgctcttcgagggcgagaagatcaccattaacaaggacaccaaggtacccaatgcctgtttattcaccatcaacaaagaagaccacacactgggaaacatcattaaatcacgtgcctgcttccccttcgccttctgccgtgattgtcagtttcctgaggcctccccagccacgcttcctgtacagcctgcagaacttctggcatggaaaagcccctgtgcaactggtaaagatatcaataagcaccaggaggtatctaaatccaccaggagccataggcatcacgttgacatccatttaccagtcttccctggcaagattcttctgaattgtgctgccttggccaaaagagctgccccagagcacatcagctatgtgccccagctctcaaacgacaccttggcggggaggctcaccctgtccaccttcacgctggagcagcctctaggccagttcagcagccacaacatctctgacttggataccatctggctggtggtggccctcagcaacgccacccagagcttcacggccccacggacaaaccaggacatccctgctcctgccaacttctcccagaggggctactatctcacactgagggccaaccgggtgctgtaccagaccagaggccagctccatgtcctccgcgtcggcaatgatacccactgccaaccaacaaaaattggctgcaaccatcccctaccaggacccggcccctacagggtgaagttcctggtgatgaatgacgaaggacccgtggctgaaacaaagtggtccagcgacactcgcc

SEQ ID NO: 16257 - DNA, 727 bp, Homo sapiens
  source 1..727: mol_type = unassigned DNA
taggcatcacgttgacatccatttaccagtcttccctggcaagattcttctgaattgtgctgccttggccaaaagaggaggaactaccctgccctgacagaggctggggatgaaggaggaagagacagccggtcccctggataaagagcacagactacagacaggggagcctctggggctgcagacactgcagacggacggacagacagatggacaacagctggaggcttggcccggccatagggctctctgcgggacagtcccagctgctagtgtcgctgttgctgctactgacccgtgtccagcctgggacagacgtggctgccccagagcacatcagctatgtgccccagctctcaaacgacaccttggcggggaggctcaccctgtccaccttcacgctggagcagcctctaggccagttcagcagccacaacatctctgacttggataccatctggctggtggtggccctcagcaacgccacccagagcttcacggccccacggacaaaccaggacatccctgctcctgccaacttctcccagaggggctactatctcacactgagggccaaccgggtgctgtaccagaccagaggccagctccatgtcctccgcgtcggcaatgatacccactgccaaccaacaaaaattggctgcaaccatcccctaccaggacccggcccctacagggtgaagttcctggtgatgaatgacgaaggacc

SEQ ID NO: 16258 - DNA, 793 bp, Homo sapiens
  source 1..793: mol_type = unassigned DNA
atgaacgcccctccagccttcgagtcgttcttgctcttcgagggcgagaagtaagtgacgccggctgcggagggccgaggatcaccattaacaaggacaccaaggtacccaatgcctgtttattcaccatcaacaaagaagaccacacactgggaaacatcattaaatcacaactcctaaaagacccgcaagtgctatttgctggctacaaagtcccccaccccttggagcacaagatcatcatccgagtgcagaccacgccggactacagcccccaggaagcctttaccaacgccatcaccgacctcatcagtgagctgtccctgctggaggagcgcttccggacgtgcctgcttccccttcgccttctgccgtgattgtcagtttcctgaggcctccccagccacgcttcctgtacagcctgcagaactctgccccagagcacatcagctatgtgccccagctctcaaacgacaccttggcggggaggctcaccctgtccaccttcacgctggagcagcctctaggccagttcagcagccacaacatctctgacttggataccatctggctggtggtggccctcagcaacgccacccagagcttcacggccccacggacaaaccaggacatccctgctcctgccaacttctcccagaggggctactatctcacactgagggccaaccgggtgctgtaccagaccagaggccagctccatgtcctccgcgtcggcaatgatacccactgccaaccaacaaaaattggctgcaaccatcccctaccaggaccc

SEQ ID NO: 16259 - DNA, 769 bp, Homo sapiens
  source 1..769: mol_type = unassigned DNA
taagtgacgccggctgcggagggccgaggatcaccattaacaaggacaccaaggtacccaatgcctgtttattcaccatcaacaaagaagaccacacactgggaaacatcattaaatcacgtgcctgcttccccttcgccttctgccgtgattgtcagtttcctgaggcctccccagccacgcttcctgtacagcctgcagaactgaggaactaccctgccctgacagaggctggggatgaaggaggaagagacagccggtcccctggataaagagcacagcacagactacagacaggggagcctctggggctgcagacactgcagacggacggacagacagatggacaacagctggaggcttggcccggccatagggctctctgcgggacagtcccagctgctagtgtcgctgttgctgctactgacccgtgtccagcctgggacagacgtggctgccccagagcacatcagctatgtgccccagctctcaaacgacaccttggcggggaggctcaccctgtccaccttcacgctggagcagcctctaggccagttcagcagccacaacatctctgacttggataccatctggctggtggtggccctcagcaacgccacccagagcttcacggccccacggacaaaccaggacatccctgctcctgccaacttctcccagaggggctactatctcacactgagggccaaccgggtgctgtaccagaccagaggccagctccatgtcctccgcgtcggcaatgataccc

SEQ ID NO: 16260 - DNA, 532 bp, Homo sapiens
  source 1..532: mol_type = unassigned DNA
attagggctctggtggcggcggtggcggacacttggggtctggacgcaacggcggcgggagcatgaacgcccctccagccttcgagtcgttcttgctcttcgagggcgagaagatcaccattaacaaggacaccaaggtacccaatgcctgtttattcaccatcaacaaagaagaccacacactgggaaacatcattaaatcacgtgcctgcttccccttcgccttctgccgtgattgtcagtttcctgaggcctccccagccacgcttcctgtacagcctgcagaactatgatccgcccaccttggccacccaaagtgctgggattacaggtgtgaaccactgcgcccggccagaagtttttcttgtgagttgaggtgaacatctgaatcccctcggggaactgagactacagacaggggagcctctggggctgcagacactgcagacggacggacagacagatggacaacagctggaggcttggcccggccatagggctctctgcgggacagtcccagctgctagtgtcg

SEQ ID NO: 16261 - DNA, 544 bp, Homo sapiens
  source 1..544: mol_type = unassigned DNA
attagggctctggtggcggcggtggcggacacttggggtctggacgcaacggcggcgggagcatgaacgcccctccagccttcgagtcgttcttgctcttcgagggcgagaagatcaccattaacaaggacaccaaggtacccaatgcctgtttattcaccatcaacaaagaagaccacacactgggaaacatcattaaatcacaactcctaaaagacccgcaagtgctatttgctggctacaaagtcccccaccccttggagcacaagatcatcatccgagtgcagaccacgccggactacagcccccaggaagcctttaccaacgccatcaccgacctcatcagtgagctgtccctgctggaggagcgcttccggacgtgcctgcttccccttcgccttctgccgtgattgtcagtttcctgaggcctccccagccacgcttcctgtacagcctgcagaactgaggacaacgtgatcactgtattcagctccatcaagaatggtccaggttcttctagatgatctgcacaaatggttcctct

SEQ ID NO: 16262 - DNA, 4630 bp, Homo sapiens
  source 1..4630: mol_type = unassigned DNA
attagggctctggtggcggcggtggcggacacttggggtctggacgcaacggcggcgggagcatgaacgcccctccagccttcgagtcgttcttgctcttcgagggcgagaagatcaccattaacaaggacaccaaggtacccaatgcctgtttattcaccatcaacaaagaagaccacacactgggaaacatcattaaatcacgtgcctgcttccccttcgccttctgccgtgattgtcagtttcctgaggcctccccagccacgcttcctgtacagcctgcagaactgtgagtcaattaaacctcttttcttcataaattacccagtttctcatagttctttatagcagtgtgaaaacagactaatggacccttctggttgaaggaatgcagccattctgcttgtttgactatgtcctttctattcatctctatttcctgggaggtgtttatccaagtgcaataggaggtattggtgaccgcacagtcccctcagtgttctgctagtaaatagttgaaggttgatcattgatcttctgcgttttcagtctggcatggaaaagcccctgtgcaactggtaaagatatcaataagcaccaggaggtatctaaatccaccaggagccataggcatcacgttgacatccatttaccagtcttccctggcaagattcttctgaattgtgctgccttggccaaaagaggtatgggaggggctgggcgcagtggcttgtgcctgtaatcccaacattttgggaaaccaattcaggtggatcgttagaggtcaggggttcaagaccatcctggccaacatggtgacatcccatctctactaaaaatacaataagttagctgggtttggtgttgggtgcctgtaatcccagctactcgagaggctgaggcaggataatcgcttgaacctgggaggaggaggtggcagtgagctgagatcgtgccattgcactccagcgtgggcaacaagagtgaaacgtcgtctcaaaaaataaaaaaaaggtccgggcttgatggctcacacctgtaatcccagcactttgggaggccaagacgggtggatcacgaggtcaggagttcaagaccagcctggcctagatggtgaaaccctgtctctactaaaactacaaatattagctgggcatggtggcatgcacctgtaatctcagctactcagaagtctgatgcaggagaattgctaaaacccaggagggagaggttgcagtgagccgagattgcaccactgcactctagcctgggcgacagagcaagactccgtctcgaaagaaagaaagaaagaaaggaaattccccagggaagtacctcggctgatttcataaacaggtaccgaaggaagcagaggcatgtggaggacttccccacctcatgcagctatttgggccatggcgtctgaaatttattatttcagagtcacccctttgatgaccttggcagtgaactgcagtcatctgtttaggcctttccatggcccacgtcaatgccgttatttctgtttgttgcacatttgatttccttgttgttggcatttagaaggccccctgcttcccagatcacaccacgggcatggaccacagagattgcatcttgtgagtctgtagaaatggtcaaggccttgtcctctcttaggtccagagctcaggtgaatgcagattttcccggccatctgtgctgaagtccctgtggggaggctcctggctggtttcctgtaggtagacagctacacgtcctgcccttcattggcttcttttcatgaagctcctgccatctacaaaacatgtctcccttcttgaatcacatctctgttattgaaactctagaagtcaaccgggcatggtggctatgcctataatcccagcattttgggatgccaaggcgggtggatcacctgaggtcaggagttcaagaccagcctgaccaacatggcgaaaccccgtctctaatacaaatacaaaaattagccaagcatggtggtcactgtactccagcctgggtgacagagcaagactccgtctcaaaaaaaaaaaagagaaagaaagtatcatgcttttctgcattctgtgaattgttttagtgagttatcgaacttgagggcatggtgggaacctccaaatttgcagccagttggtgagaagtacatgtggtctgaggacacccaagcctgcaggtgtgtctaaagcgagggcagcctagtggggactggtggccttaacctgtggcatttgaggtaacatcagggagttgacatcagaattgcatcacataggctgggcgcggtggctcacgcctgtaatcctagcactttgggaggccaaggcgggcagatcacgaggtcaggagatcgagaccatcctggctaagacagtgaaatcccgtctctactaaaaattcaaaaaattagccaggcatggtggcgggcgcctgtagtcccagctactcgggaggctgaggcaggagaatggcgtgaacccaggaggcagagcttgcattgagccaagatcacgccaccgcactccagcctgggtgacagagcgagactccatcccccccaaaaagaaaaaagacaaaaaaaaaattgtgtcacacaggccagatgcagtggctcatgcttataatcccagcaatttgaaaggcaaggtaagaggatcgcttgagcttgagtctgaggccgcagtgagctatgaccacaccactgcaccccagtctgggtgacagcgcaagaccccaactccaaaaaggaaaaagaaaaatcacaaggaattgcatgtcagagtgcctgtctttcacagctttaactgctgcaggaacgaactttttttttttttttttttttgagagggggtgaggagacacaatctctgctagtgattctcctgcctcagcctcccaaatagctgggattataggcgtgcaccaccacgcctgcctaatttttgtatttttagtagagacagggtttcaccatgttggccaggctggtctcaaactcctgctgggatcatgggcgtgagccaccacgcccggccacctttagagttttcttaccacctggttttcctctctcaatatctttctctcatttcctgccttaaaactctagcttggcatctgggcgcagtagctcatgcctgtaatcccagcactttgggaggccgaggtaggtggatcacttgaagtcaggagttcgagaccagcctggccaacatggtgaaaccttgtctctactatttttacaaaagttagtcggacgtacagacgggtgcctgtagtcccagctacttgggaggctgaggcaggagaatttgtttgaacccagaggtgaaagttgcagggagccgaggttgtgccactgcactccagcctgggagacagagcaagactctgtctccaaaacaaacaaacaaacaaaaaaaccctgtagcttgggatcagccttctcttctattgtttttctttaaaaaataaaaattaaaaatagatgtagatgctatgttgctgaggctggcctcaaactcctggcctcaggtgatcctcccgccatgacctccaaaaccacagggattgtaggtgtgagcactgcacccagccttatgtttttttctacataaaaaacagcacaggattatcttccagagctaataaatatgttcaaataaccacaaccccattaaggaaaaatatcactgggcagcaaataatcaatccagaccaatatgatcacaattgctgtgaaggtgagaaaagttcatttttattatgtttccccaagagacgcactctattgttctcttgaaaacacacagctcatgtcctcctttagaacacacatcctctttaaagtaacatacaaacatgccaaaacaaggtaaaaaattacatctgaattctcacatttcaaatatatatgaaatatcaaataaaaatttatttttacaagaatttaggggaactactacatagctataaatgtaatatatatgttaactaagtatcatagataaaaaccatgctcccttcagcagcacgtgtaataatagatacaaagattgaaaggtaaaagatttaggatgaaaagaatcctctcttaaaaaggaaaacaaaattatatgtatgtgtatataacagttataatatccatcacacagctttatagaaacagcatctattcaaaaataccagtatttccaaaatatttaaaataatatttaaagtaataataatatttaaataaataaatatatttaataaatatttaaataaataaaataatatttaaataattctatacccatgtttttcaaaataaaccaataaaatagatagtatatattagacgtgttagtatatatatctgaggcatgttaaaaatcacaactgaattctcacaattcagtcacaaacctaaacagcaaataaaaatttctatcaccagaattatgtttttttctggtggggaactaccaatagctataaatagaagagattattatggaagtatcatagataaaaagagtgctcgcttcaggagcacatgtaataatacagaaacaaatttaaagataataaaatatttaggataaaaagaattgtctcttaaaaa

SEQ ID NO: 16263 - DNA, 2211 bp, Homo sapiens
  source 1..2211: mol_type = unassigned DNA
ggcggacacttggggtctggacgcaacggcggcgggagcatgaacgcccctccagccttcgagtcgttcttgctcttcgagggcgagaagtaagtgacgccggctgcggagggccgaggtgcgcgggcctgcggctgtcgcattctggggtgtctcctgcccatctcttgccccgggagggaaacagcttttgcttgatcgtctgctcggcctgtgtcagccaaatttaaggccgttccgcgaggcagtcgcgagtgtgttcattttgcagatgaggacactgaggcttggaggcgagcaagttgccccggacacaggaagtggcggcgcttgtattcgaacccagagtgtctggttctccatagcccttttcctctgggatctggcagcttcctctttttgtctctcgcccgccacctccatccttcatcccctccgatctgtcagcggcctgcgtaaaagccgcagtggctcctcgctgcctgcgggttgaaggagtccaggggagagagcttgggctcactctgtatctgtgggcgagtggcttgatctgtcggaggccctgtttcctcatctggaaaatgagtttattactgtacttaaacgtgggattcaggccgggtgcggtggctgacacctgtaatcccagcactttgggagcccgaggcgggcggatcacctgaggtcgggagttcaagaccagcctgaccaacatggagaaaccctgtctctactaaaaatacaaaattagccgggcgtggtggcagatgcctgtaatcccagctactcagaaggctgaggcaggagaatcacttgaacctgggaagtggaggttgaggatcaccattaacaaggacaccaaggtacccaatgcctgtttattcaccatcaacaaagaagaccacacactgggaaacatcattaaatcacaactcctaaaagacccgcaagtgctatttgctggctacaaagtcccccaccccttggagcacaagatcatcatccgagtgcagaccacgccggactacagcccccaggaagcctttaccaacgccatcaccgacctcatcagtgagctgtccctgctggaggagcgcttccggacgtgcctgcttccccttcgccttctgccgtgattgtcagtttcctgaggcctccccagccacgcttcctgtacagcctgcagaactgtgagtcaattaaacctcttttcttcataaattacccagtttctcatagttctttatagcagtgtgaaaacagactaatggacccttctggttgaaggaatgcagccattctgcttgtttgactatgtcctttctattcatctctatttcctgggaggtgtttatccaagtgcaataggaggtattggtgaccgcacagtcccctcagtgttctgctagtaaatagttgaaggttgatcattgatcttctgcgttttcagtctggcatggaaaagcccctgtgcaactggtaaagatatcaataagcaccaggaggtatctaaatccaccaggagccataggcatcacgttgacatccatttaccagtcttccctggcaagattcttctgaattgtgctgccttggccaaaagaggtatgggaggggctgggcgcagtggcttgtgcctgtaatcccaacattttgggaaaccaattcaggtggatcgttagaggtcaggggttcaagaccatcctggccaacatggtgacatcccatctctactaaaaatacaataagttagctgggtttggtgttgggtgcctgtaatcccagctactcgagaggctgaggcaggataatcgcttgaacctgggaggaggaggtggcagtgagctgagatcgtgccattgcactccagcgtgggcaacaagagtgaaacgtcgtctcaaaaaataaaaaaaaggtccgggcttgatggctcacacctgtaatcccagcactttgggaggccaagacgggtggatcacgaggtcaggagttcaagaccagcctggcctagatggtgaaaccctgtctctactaaaactacaaatattagctgggcatggtggcatgcacctgtaatctcagctactcagaagtctgatgcaggagaattgctaaaacccaggagggagaggttgcagtgagccgagattgcaccactgcactctagcctgggcgacagagcaagactccgtctcgaaagaaagaaagaaa

SEQ ID NO: 16264 - DNA, 575 bp, Homo sapiens
  source 1..575: mol_type = unassigned DNA
acacttggggtctggacgcaacggcggcgggagcatgaacgcccctccagccttcgagtcgttcttgctcttcgagggcgagaagtaagtgacgccggctgcggagggccgaggatcaccattaacaaggacaccaaggtacccaatgcctgtttattcaccatcaacaaagaagaccacacactgggaaacatcattaaatcacaactcctaaaagacccgcaagtgctatttgctggctacaaagtcccccaccccttggagcacaagatcatcatccgagtgcagaccacgccggactacagcccccaggaagcctttaccaacgccatcaccgacctcatcagtgagctgtccctgctggaggagcgcttccggacgtgcctgcttccccttcgccttctgccgtgattgtcagtttcctgaggcctccccagccacgcttcctgtacagcctgcagaacttctggcatggaaaagcccctgtgcaactggtaaagatatcaataagcaccaggaggtatctaaatccaccaggagccataggcatcacgttgacatccatttaccagtct

SEQ ID NO: 16265 - DNA, 348 bp, Homo sapiens
  source 1..348: mol_type = unassigned DNA
atgaacgcccctccagccttcgagtcgttcttgctcttcgagggcgagaagatcaccattaacaaggacaccaaggtacccaatgcctgtttattcaccatcaacaaagaagaccacacactgggaaacatcattaaatcacaactcctaaaagacccgcaagtgctatttgctggctacaaagtcccccaccccttggagcacaagatcatcatccgagtgcagaccacgccggactacagcccccaggaagcctttaccaacgccatcaccgacctcatcagtgagctgtccctgctggaggagcgcttccggacgtgcctgcttccccttcgccttctgccgtga

SEQ ID NO: 16266 - DNA, 932 bp, Homo sapiens
  source 1..932: mol_type = unassigned DNA
attagggctctggtggcggcggtggcggacacttggggtctggacgcaacggcggcgggagcatgaacgcccctccagccttcgagtcgttcttgctcttcgagggcgagaagtaagtgacgccggctgcggagggccgaggatcaccattaacaaggacaccaaggtacccaatgcctgtttattcaccatcaacaaagaagaccacacactgggaaacatcattaaatcacaactcctaaaagacccgcaagtgctatttgctggctacaaagtcccccaccccttggagcacaagatcatcatccgagtgcagaccacgccggactacagcccccaggaagcctttaccaacgccatcaccgacctcatcagtgagctgtccctgctggaggagcgcttccgggtgagggcggggcctggaggggcagacggggtgggctggacactggcccgtgtgcccaggcctgggacagccctggcctgtttcttcggaggtcctcagggagaggcggcggtgatggaagaacagggacttccaccacaggctccaggacatgtggactgaggggctgtggagtctgggcctgtggctcccgtctgccccatgggacttctgtagtgctgcagggtccctcgggtgctgtgggccagatccgggcggggacctactgtcctttgggggtgctcttctacgtcccttgtcggtgattggcaaggcctggtccttccaggcctctgggaggcagctcaccccagggtggcccacacctgttcctagcagggcgcctgggaatctagaacagtttagaggggaaagagccacagcaaagaaaagccgaggcagggtgatcacgaggtcaggagttcaagaccagcctggcaaacatggtgaagccctgtttctactaaaaatacaaaaattagctagg

SEQ ID NO: 16267 - DNA, 546 bp, Homo sapiens
  source 1..546: mol_type = unassigned DNA
attagggctctggtggcggcggtggcggacacttggggtctggacgcaacggcggcgggagcatgaacgcccctccagccttcgagtcgttcttgctcttcgagggcgagaagatcaccattaacaaggacaccaaggtacccaatgcctgtttattcaccatcaacaaagaagaccacacactgggaaacatcattaaatcgctggagtgcaatggcacgatcttgctcactgcaacctccgcctcccgggttcaagtgattctcctgcttcagccttcctagtagctgggactacaggcccacgccacgatgcccggctaatttttgtgtttttagtagagacggggattcactgtgttggccaggctggtctcgaactcctgacctcaggtgatccacctgctggcttcccaaagtgctgggattagagacgtgagctactgcgcccggccttacattcaccattaagtgcacattctgtaaatgaacgagcagcagattccagcacagtaggcctgtttgttattcatgctgagggacattg

SEQ ID NO: 16268 - DNA, 729 bp, Homo sapiens
  source 1..729: mol_type = unassigned DNA
agggctctggtggcggcggtggcggacacttggggtctggacgcaacggcggcgggagcatgaacgcccctccagccttcgagtcgttcttgctcttcgagggcgagaagatcaccattaacaaggacaccaaggtacccaatgcctgtttattcaccatcaacaaagaagaccacacactgggaaacatcattaaatcgtaagtttcccgtcacaggctctcaggggctatgtttaatgggcccctctgggcaaagcacaagttccaagtcttcctcagtctctctgagctacaggaagtccttctgggggcttgctctgggcattttataatcttggtacctttttatcaaaatgacaccgacctccatgtcttcacataagccacacttctgtagtggcttattctgtagatgaacacgtgcatttacattcactgtttgtttgtttgtttgtttttgagatggaattttctctctttgttgcccaggctggagtgcaatggcacgatcttgctcactgcaacctccgcctcccgggttcaagtgattctcctgcttcagccttcctagtagctgggactacaggcccacgccacgatgcccggctaatttttgtgtttttagtagagacggggattcactgtgttggccaggctggtctcgaactcctgacctcaggtgatccacctgctggcttcccaaagtgctgggattagagacgtgagct

SEQ ID NO: 16269 - DNA, 2096 bp, Homo sapiens
  source 1..2096: mol_type = unassigned DNA
agggctctggtggcggcggtggcggacacttggggtctggacgcaacggcggcgggagcatgaacgcccctccagccttcgagtcgttcttgctcttcgagggcgagaagatcaccattaacaaggacaccaaggtacccaatgcctgtttattcaccatcaacaaagaagaccacacactgggaaacatcattaaatcacaactcctaaaagacccgcaagtgctatttgctggctacaaagtcccccaccccttggagcacaagatcatcatccgagtgcagaccacgccggactacagcccccaggaagcctttaccaacgccatcaccgacctcatcagtgagctgtccctgctggaggagcgcttccgggtgagggcggggcctggaggggcagacggggtgggctggacactggcccgtgtgcccaggcctgggacagccctggcctgtttcttcggaggtcctcagggagaggcggcggtgatggaagaacagggacttccaccacaggctccaggacatgtggactgaggggctgtggagtctgggcctgtggctcccgtctgccccatgggacttctgtagtgctgcagggtccctcgggtgctgtgggccagatccgggcggggacctactgtcctttgggggtgctcttctacgtcccttgtcggtgattggcaaggcctggtccttccaggcctctgggaggcagctcaccccagggtggcccacacctgttcctagcagggcgcctgggaatctagaacagtttagaggggaaagagccacagcaaagaaaagccgaggcagggtgatcacgaggtcaggagttcaagaccagcctggcaaacatggtgaagccctgtttctactaaaaatacaaaaattagctaggcatggtggcatgtgctgtagtcccagctactcgggaggctgaggcaggagaatcgcttgaacccgggaggcggaggttgcagtgagccgagattgtgccactgcactccagcctaggtaacagagcaggactccatctcagtcaatcaatcaatcaatcaatctcagcggttgaactacccttgacatggttcagctctgtatccacacccaaatgtcatgtcaaattgtaattcccagtgttgtgggagggacctggtgggaggtgattggctcatgggggccgacttcccccttgctgttctcgtgatattgagtgagcgcttgtgggatctggttgtttaaaagcgtgcagccctcccacttcactctctctgtctctcctgctccaacatggccagacgtgcctgcttccccttcgccttctgccgtgattgtcagtttcctgaggcctccccagccacgcttcctgtacagcctgcagaactgtgagtcaattaaacctcttttcttcataaattacccagtttctcatagttctttatagcagtgtgaaaacagactaatggacccttctggttgaaggaatgcagccattctgcttgtttgactatgtcctttctattcatctctatttcctgggaggtgtttatccaagtgcaataggaggtattggtgaccgcacagtcccctcagtgttctgctagtaaatagttgaaggttgatcattgatcttctgcgttttcagtctggcatggaaaagcccctgtgcaactggtaaagatatcaataagcaccaggaggtatctaaatccaccaggagccataggcatcacgttgacatccatttaccagtcttccctggcaagattcttctgaattgtgctgccttggccaaaagaggtatgggaggggctgggcgcagtggcttgtgcctgtaatcccaacattttgggaaaccaattcaggtggatcgttagaggtcaggggttcaagaccatcctggccaacatggtgacatcccatctctactaaaaatacaataagttagctgggtttggtgttgggtgcctgtaatcccagctactcgagaggctgaggcaggataatcgcttgaacctgggaggaggaggtggcagtgagctgagatcgtgccattgcactccagcgtgggcaacaagagtgaaacgtcgtctc

SEQ ID NO: 16270 - DNA, 1515 bp, Homo sapiens
  source 1..1515: mol_type = unassigned DNA
ggccaggccggagcgaggcagcgcgcccggctcccgcgccatggggcggctggtggctgtgggcttgctggggatcgcgctggcgctcctgggcgagaggcttctggcactcagaaatcgacttaaagcctccagagaagtagaatctgtagaccttccacactgccacctgattaaaggaattgaagctggctctgaagatattgacatacttcccaatggtctggctttttttagtgtgggtctaaaattcccaggactccacagctttgcaccagataagcctggaggaatactaatgatggatctaaaagaagaaaaaccaagggcacgggaattaagaatcagtcgtgggtttgatttggcctcattcaatccacatggcatcagcactttcatagacaacgatgacacagtttatctctttgttgtaaaccacccagaattcaagaatacagtggaaatttttaaatttgaagaagcagaaaattctctgttgcatctgaaaacagtcaaacatgagcttcttccaagtgtgaatgacatcacagctgttggaccggcacatttctatgccacaaatgaccactacttctctgatcctttcttaaagtatttagaaacatacttgaacttacactgggcaaatgttgtttactacagtccaaatgaagttaaagtggtatatctatgttgctgacatattggctcatgaaattcatgttttggaaaaacacactaatatgaatttaactcagttgaaggtacttgagctggatacactggtggataatttatctattgatccttcctcgggggacatctgggtaggctgtcatcctaatggccagaagctcttcgtgtatgacccgaacaatcctccctcgtcagaggttctccgcatccagaacattctatctgagaagcctacagtgactacagtttatgccaacaatgggtctgttctccaaggaagttctgtagcctcagtgtatgatgggaagctgctcataggcactttataccacagagccttgtattgtgaactctaaattgtacttttggcatgaaagtgcgataacttaacaattaattttctatgaattgctaattctgagggaatttaaccagcaacattgacccagaaatgtatggcatgtgtagttaattttattccagtaaggaacggcccttttagttcttagagcacttttaacaaaaaaggaaaatgaacaggttctttaaaatgccaagcaagggacagaaaagaaagctgctttcgaataaagtgaatacattttgcacaaagtaagcctcacctttgccttccaactgccagaacatggattccactgaaatagagtgaattatatttccttaaaatgtgagtgacctcacttctggcactgtgactactatggctgtttagaactactgataacgtattttgatgttttgtacttacatctttgtttaccattaaaaagttggagttatattaaagactaactaaaa

SEQ ID NO: 16271 - DNA, 1726 bp, Homo sapiens
  source 1..1726: mol_type = unassigned DNA
aagtttcacatcatgagcctaatgtaaggcgtgtccgggccgtcccgaaggtatctggggaaataggtttgtgaggacaaagaccagggccaggcccagggcggagcctccgcggccccgacgcagggactcggcctaggcggaggacggggcggagcgcggccggcaccatcgagccgggaagatggcaccgcccacggagctgctggccaggccggagcgaggcagcgcgcccggctcccgcgccatggggcggctggtggctgtgggcttgctggggatcgcgctggcgctcctgggcgagaggcttctggcactcagaaatcgacttaaagcctccagagaagtagaatctgtagaccttccacactgccacctgattaaaggaattgaagctggctctgaagatattgacatacttcccaatggtctggctttttttagtgtgggtctaaaattcccaggactccacagctttgcaccagataagcctggaggaatactaatgatggatctaaaagaagaaaaaccaagggcacgggaattaagaatcagtcgtgggtttgatttggcctcattcaatccacatggcatcagcactttcatagacaacgaattcaagaatacagtggaaatttttaaatttgaagaagcagaaaattctctgttgcatctgaaaacagtcaaacatgagcttcttccaagtgtgaatgacatcacagctgttggaccggcacatttctatgccacaaatgaccactacttctctgatcctttcttaaagtatttagaaacatacttgaacttacactgggcaaatgttgtttactacagtccaaatgaagttaaagtggtagcagaaggatttgattcagcaaatgggatcaatatttcacctgatgataagtatatctatgttgctgacatattggctcatgaaattcatgttttggaaaaacacactaatatgaatttaactcagttgaaggtacttgagctggatacactggtggataatttatctattgatccttcctcgggggacatctgggtaggctgtcatcctaatggccagaagctcttcgtgtatgacccgaacaatcctccctcgtcagaggttctccgcatccagaacattctatctgagaagcctacagtgactacagtttatgccaacaatgggtctgttctccaaggaagttctgtagcctcagtgtatgatgggaagctgctcataggcactttataccacagagccttgtattgtgaactctaaattgtacttttggcatgaaagtgcgataacttaacaattaattttctatgaattgctaattctgagggaatttaaccagcaacattgacccagaaatgtatggcatgtgtagttaattttattccagtaaggaacggcccttttagttcttagagcacttttaacaaaaaaggaaaatgaacaggttctttaaaatgccaagcaagggacagaaaagaaagctgctttcgaataaagtgaatacattttgcacaaagtaagcctcacctttgccttccaactgccagaacatggattccactgaaatagagtgaattatatttccttaaaatgtgagtgacctcacttctggcactgtgactactatggctgtttagaactactgataacgtattttgatgttttgtacttacatctttgtttaccattaaaaagttggagttatattaa

SEQ ID NO: 16272 - DNA, 1745 bp, Homo sapiens
  source 1..1745: mol_type = unassigned DNA
aagtttcacatcatgagcctaatgtaaggcgtgtccgggccgtcccgaaggtatctggggaaataggtttgtgaggacaaagaccagggccaggcccagggcggagcctccgcggccccgacgcagggactcggcctaggcggaggacggggcggagcgcggccggcaccatcgagccgggaagatggcaccgcccacggagctgctggccaggccggagcgaggcagcgcgcccggctcccgcgccatggggcggctggtggctgtgggcttgctggggatcgcgctggcgctcctgggcgagaggcttctggcactcagaaatcgacttaaagcctccagagaagtagaatctgtagaccttccacactgccacctgattaaaggaattgaagctggctctgaagatattgacatacttcccaatggtctggctttttttagtgtgggtctaaaattcccaggactccacagctttgcaccagataagcctggaggaatactaatgatggatctaaaagaagaaaaaccaagggcacgggaattaagaatcagtcgtgggtttgatttggcctcattcaatccacatggcatcagcactttcatagacaacgatgacacagtttatctctttgttgtaaaccacccagaattcaagaatacagtggaaatttttaaatttgaagaagcagaaaattctctgttgcatctgaaaacagtcaaacatgagcttcttccaagtgtgaatgacatcacagctgttggaccggcacatttctatgccacaaatgaccactacttctctgatcctttcttaaagtatttagaaacatacttgaacttacactgggcaaatgttgtttactacagtccaaatgaagttaaagtggtagcagaaggatttgattcagcaaatgggatcaatatttcacctgatgataagtatatctatgttgctgacatattggctcatgaaattcatgttttggaaaaacacactaatatgaatttaactcagttgaaggtacttgagctggatacactggtggataatttatctattgatccttcctcgggggacatctgggtaggctgtcatcctaatggccagaagctcttcgtgtatgacccgaacaatcctccctcgtcagaggttctccgcatccagaacattctatctgagaagcctacagtgactacagtttatgccaacaatgggtctgttctccaaggaagttctgtagcctcagtgtatgatgggaagctgctcataggcactttataccacagagccttgtattgtgaactctaaattgtacttttggcatgaaagtgcgataacttaacaattaattttctatgaattgctaattctgagggaatttaaccagcaacattgacccagaaatgtatggcatgtgtagttaattttattccagtaaggaacggcccttttagttcttagagcacttttaacaaaaaaggaaaatgaacaggttctttaaaatgccaagcaagggacagaaaagaaagctgctttcgaataaagtgaatacattttgcacaaagtaagcctcacctttgccttccaactgccagaacatggattccactgaaatagagtgaattatatttccttaaaatgtgagtgacctcacttctggcactgtgactactatggctgtttagaactactgataacgtattttgatgttttgtacttacatctttgtttaccattaaaa

SEQ ID NO: 16273 - DNA, 1876 bp, Homo sapiens
  source 1..1876: mol_type = unassigned DNA
tgctttctatgtaagtttctcactggaatagcgagtgagaaatgtgtttgaagactagggaaacgagaaaggtatgcgggctgctagagggtttcgggtgggttgtttgaaaaaggaagtgaaggaattcaaagtttcacatcatgagcctaatgtaaggcgtgtccgggccgtcccgaaggtatctggggaaataggtttgtgaggacaaagaccagggccaggcccagggcggagcctccgcggccccgacgcagggactcggcctaggcggaggacggggcggagcgcggccggcaccatcgagccgggaagatggcaccgcccacggagctgctggccaggccggagcgaggcagcgcgcccggctcccgcgccatggggcggctggtggctgtgggcttgctggggatcgcgctggcgctcctgggcgagaggcttctggcactcagaaatcgacttaaagcctccagagaagtagaatctgtagaccttccacactgccacctgattaaaggaattgaagctggctctgaagatattgacatacttcccaatggtctggctttttttagtgtgggtctaaaattcccaggactccacagctttgcaccagataagcctggaggaatactaatgatggatctaaaagaagaaaaaccaagggcacgggaattaagaatcagtcgtgggtttgatttggcctcattcaatccacatggcatcagcactttcatagacaacgatgacacagtttatctctttgttgtaaaccacccagaattcaagaatacagtggaaatttttaaatttgaagaagcagaaaattctctgttgcatctgaaaacagtcaaacatgagcttcttccaagtgtgaatgacatcacagctgttggaccggcacatttctatgccacaaatgaccactacttctctgatcctttcttaaagtatttagaaacatacttgaacttacactgggcaaatgttgtttactacagtccaaatgaagttaaagtggtagcagaaggatttgattcagcaaatgggatcaatatttcacctgatgataagtatatctatgttgctgacatattggctcatgaaattcatgttttggaaaaacacactaatatgaatttaactcagttgaaggtacttgagctggatacactggtggataatttatctattgatccttcctcgggggacatctgggtaggctgtcatcctaatggccagaagctcttcgtgtatgacccgaacaatcctccctcgtcagaggttctccgcatccagaacattctatctgagaagcctacagtgactacagtttatgccaacaatgggtctgttctccaaggaagttctgtagcctcagtgtatgatgggaagctgctcataggcactttataccacagagccttgtattgtgaactctaaattgtacttttggcatgaaagtgcgataacttaacaattaattttctatgaattgctaattctgagggaatttaaccagcaacattgacccagaaatgtatggcatgtgtagttaattttattccagtaaggaacggcccttttagttcttagagcacttttaacaaaaaaggaaaatgaacaggttctttaaaatgccaagcaagggacagaaaagaaagctgctttcgaataaagtgaatacattttgcacaaagtaagcctcacctttgccttccaactgccagaacatggattccactgaaatagagtgaattatatttccttaaaatgtgagtgacctcacttctggcactgtgactactatggctgtttagaactactgataacgtattttgatgttttgtacttacatctttgtttaccattaaaa

SEQ ID NO: 16274 - DNA, 699 bp, Homo sapiens
  source 1..699: mol_type = unassigned DNA
agaaaattctctgttgcatctgaaaacagtcaaacatgagcttcttccaagtgtgaatgacatcacagctgttggaccggcacatttctatgccacaaatgaccactacttctctgatcctttcttaaagtatttagaaacatacttgaacttacactgggcaaatgttgtttactacagtccaaatgaagttaaagtggtagcagaaggatttgattcagcaaatgggatcaatatttcacctgatgataagtatatctatgttgctgacatattggctcatgaaattcatgttttggaaaaacacactaatatgaatttaactcagttgaagattttgacaatttctcatttggaaggtacttgagctggatacactggtggataatttatctattgatccttcctcgggggacatctgggtaggctgtcatcctaatggccagaagctcttcgtgtatgacccgaacaatcctccctcgtcagaggttctccgcatccagaacattctatctgagaagcctacagtgactacagtttatgccaacaatgggtctgttctccaaggaagttctgtagcctcagtgtatgatgggaagctgctcataggcactttataccacagagccttgtattgtgaactctaaattgtacttttggcatgaaagtgcgataacttaacaattaattttctatgaa

SEQ ID NO: 16275 - DNA, 1099 bp, Homo sapiens
  source 1..1099: mol_type = unassigned DNA
aggcagcgcgcccggctcccgcgccatggggcggctggtggctgtgggcttgctggggatcgcgctggcgctcctgggcgagaggcttctggcactcagaaatcgacttaaagcctccagagaagtagaatctgtagaccttccacactgccacctgattaaaggaattgtgtggtgagtgtcttcttccttccccaaattcagcagaggagatacaagggtatttgatgagggctgcagaacaggtctaaaattcccaggactccacagctttgcaccagataagcctggaggaatactaatgatggatctaaaagaagaaaaaccaagggcacgggaattaagaatcagtcgtgggtttgatttggcctcattcaatccacatggcatcagcactttcatagacaacgatgacacagtttatctctttgttgtaaaccacccagaattcaagaatacagtggaaatttttaaatttgaagaagcagaaaattctctgttgcatctgaaaacagtcaaacatgagcttcttccaagtgtgaatgacatcacagctgttggaccggcacatttctatgccacaaatgaccactacttctctgatcctttcttaaagtatttagaaacatacttgaacttacactgggcaaatgttgtttactacagtccaaatgaagttaaagtggtagcagaaggatttgattcagcaaatgggatcaatatttcacctgatgataagtatatctatgttgctgacatattggctcatgaaattcatgttttggaaaaacacactaatatgaatttaactcagttgaaggtacttgagctggatacactggtggataatttatctattgatccttcctcgggggacatctgggtaggctgtcatcctaatggccagaagctcttcgtgtatgacccgaacaatcctccctcgtcagaggttctccgcatccagaacattctatctgagaagcctacagtgactacagtttatgccaacaatgggtctgttctccaaggaagttctgtagcctcagtgtatgatgggaagctgctcataggcactttataccacagagccttgtattgt

SEQ ID NO: 16276 - DNA, 627 bp, Homo sapiens
  source 1..627: mol_type = unassigned DNA
ctgaaaacagtcaaacatgagcttcttccaagtgtgaatgacatcacagctgttggaccggcacatttctatgccacaaatgaccactacttctctgatcctttcttaaagtatttagaaacatacttgaacttacactgggcaaatgttgtttactacagtccaaatgaagttaaagtggtagcagaaggatttgattcagcaaatgggatcaatatttcacctgatgataagtatggccccttatagaatatcttcatttttcttcagttgtggtgctggccaaattctttactttgctttctttgtcaatgtgaaaatagttttcttgacatttatggtatattatacatataatatatagatacactatatatataattatatatgttttgtatatatatttacatatacttagtcacatgtatttatatgcaaatacaataccatatttaagtaaactatataatacagtaatatatatgtatttatatataatatataaagtttggaatacatcattgtcaaatttaattttataaatataaattttaaagtgtgatcatactgatgcatacatattgaagtatcaggtatttccttttaaataaatgtattatttttatt

SEQ ID NO: 16277 - DNA, 645 bp, Homo sapiens
  source 1..645: mol_type = unassigned DNA
agctgctggccaggccggagcgaggcagcgcgcccggctcccgcgccatggggcggctggtggctgtgggcttgctggggatcgcgctggcgctcctgggcgagaggcttctggcactcagaagctggctctgaagatattgacatacttcccaatggtctggctttttttagtgtggtgagtgtcttcttccttccccaaattcagcagaggagatacaagggtatttgatgagggctgcagaacaggtctaaaattcccaggactccacagctttgcaccagataagcctggaggaatactaatgatggatctaaaagaagaaaaaccaagggcacgggaattaagaatcagtcgtgggtttgatttggcctcattcaatccacatggcatcagcactttcatagacaacgatgacacagtttatctctttgttgtaaaccacccagaattcaagaatacagtggaaatttttaaatttgaagaagcagaaaattctctgttgcatctgaaaacagtcaaacatgagcttcttccaagtgtgaatgacatcacagctgttggaccggcacatttctatgccacaaatgaccactacttctctgatcctttcttaaagtatttagaaacatacttgaacttaca

SEQ ID NO: 16278 - DNA, 566 bp, Homo sapiens
  source 1..566: mol_type = unassigned DNA
atggggcggctggtggctgtgggcttgctggggatcgcgctggcgctcctgggcgagaggcttctggcactcagaaatcgacttaaagcctccagagaagtagaatctgtagaccttccacactgccacctgattaaaggaattgaagctggctctgaagatattgacatacttcccaatggtctggctttttttagtgtggtgagtgtcttcttccttccccaaattcagcagaggagatacaagggtatttgatgagggctgcagaacaggtctaaaattcccaggactccacagctttgcaccagataagcctggaggaatactaatgatggatctaaaagaagaaaaaccaagggcacgggaattaagaatcagtcgtgggtttgatttggcctcattcaatccacatggcatcagcactttcatagacaacgatgacacagtttatctctttgttgtaaaccacccagaattcaagaatacagtggaaatttttaaatttgaagaagcagaaaattctctgttgcatctgaaaacagtcaaacatgagcttcttccaaggt

SEQ ID NO: 16279 - DNA, 694 bp, Homo sapiens
  source 1..694: mol_type = unassigned DNA
gaggacaaagaccagggccaggcccagggcggagcctccgcggccccgacgcagggactcggcctaggcggaggacggggcggagcgcggccggcaccatcgagccgggaagatggcaccgcccacggagctgctggccaggccggagcgaggcagcgcgcccggctcccgcgccatggggcggctggtggctgtgggcttgctggggatcgcgctggcgctcctgggcgagaggcttctggcactcagaaatcgacttaaagcctccagagaagtagaatctgtagaccttccacactgccacctgattaaaggaattgaagctggctctgaagatattgacatacttcccaatggtctggctttttttagtgtggtgagtgtcttcttccttccccaaattcagcagaggagatacaagggtatttgatgagggctgcagaacagactccacagctttgcaccagataagcctggaggaatactaatgatggatctaaaagaagaaaaaccaagggcacgggaattaagaatcagtcgtgggtttgatttggcctcattcaatccacatggcatcagcactttcatagacaacgatgacacagtttatctctttgttgtaaaccacccagaattcaagaatacagtggaaatttttaaatttgaagaagcagaaaattctctgttgcatctg

SEQ ID NO: 16280 - DNA, 570 bp, Homo sapiens
  source 1..570: mol_type = unassigned DNA
ccgcccacggagctgctggccaggccggagcgaggcagcgcgcccggctcccgcgccatggggcggctggtggctgtgggcttgctggggatcgcgctggcgctcctgggcgagaggcttctggcactcagaaatcgacttaaagcctccagagaagtagaatctgtagaccttccacactgccacctgattaaaggaattgaagctggctctgaagatattgacatacttcccaatggtctggctttttttagtgtggtgagtgtcttcttccttccccaaattcagcagaggagatacaagggtatttgatgagggctgcagaacaggtctaaaattcccaggactccacagctttgcaccagataagcctggaggaatactaatgatggatctaaaagaagaaaaaccaagggcacgggaattaagaatcagtcgtgggtttgatttggcctcattcaatccacatggcatcagcactttcatagacaacgatgacacagtttatctctttgttgtaaaccacccagaattcaagaatacagtggaaatttttaaatttgaagaagc

SEQ ID NO: 16281 - DNA, 550 bp, Homo sapiens
  source 1..550: mol_type = unassigned DNA
accgcccacggagctgctggccaggccggagcgaggcagcgcgcccggctcccgcgccatggggcggctggtggctgtgggcttgctggggatcgcgctggcgctcctgggcgagaggcttctggcactcagggaagcctgaagccagaatgccagacagcgcagacactattccatctcgcattttagttttaatgaaaatctctgaaatcgacttaaagcctccagagaagtagaatctgtagaccttccacactgccacctgattaaaggaattgaagctggctctgaagatattgacatacttcccaatggtctggctttttttagtgtgggtctaaaattcccaggactccacagctttgcaccagataagcctggaggaatactaatgatggatctaaaagaagaaaaaccaagggcacgggaattaagaatcagtcgtgggtttgatttggcctcattcaatccacatggcatcagcactttcatagacaacgatgacacagtttatctctttgttgtaaaccacccagaattcaagaataca

SEQ ID NO: 16282 - DNA, 555 bp, Homo sapiens
  source 1..555: mol_type = unassigned DNA
atggggcggctggtggctgtgggcttgctggggatcgcgctggcgctcctgggcgagaggcttctggcactcagggaagcctgaagccagaatgccagacagcgcagacactattccatctcgcattttagttttaatgaaaatctctgaaatcgacttaaagcctccagagaagtagaatctgtagaccttccacactgccacctgattaaaggaattgaagctggctctgaagatattgacatacttcccaatggtctggctttttttagtgtgataaggggacagatgaggaggttctgaccacctacctccctggcttgggcagacataggagttcttggcatcttcataggtccagtttttctggaggaagaagtaaccaactctgacacctgactggtctaaaattcccaggactccacagctttgcaccagataagcctggaggaatactaatgatggatctaaaagaagaaaaaccaagggcacgggaattaagaatcagtcgtgggtttgatttggcctcattcaatccacatggcatcagcactt

SEQ ID NO: 16283 - DNA, 569 bp, Homo sapiens
  source 1..569: mol_type = unassigned DNA
atggggcggctggtggctgtgggcttgctggggatcgcgctggcgctcctgggcgagaggcttctggcactcagaaatcgacttaaagcctccagagaagtagaatctgtagaccttccacactgccacctgattaaaggaattgaagctggctctgaagatattgacatacttcccaatggtctggctttttttagtgtgagacagagtcttgctatgttgcccaggctggtctcaaactgctggcctcaagcagtcctcccacgtcagcctcccaaagtgctggaattataggcatgagccaccaggcctgacctaaagctgtagtaatttaaaaagtgttatattggcacaggaatagacatgagacattaaaataacaaaacagagagtccctaaatagaccaatatgtaaatgtcagagatctagcacatgataaaggtgatattttgaatcagtgggagaaggatggactgtatgccaggcactgttccaggcactgggatctagcagtgaacaaatttccacagtcagtatgtagatgtcacttttctccaccctcagctct

SEQ ID NO: 16284 - DNA, 579 bp, Homo sapiens
  source 1..579: mol_type = unassigned DNA
ggctcccgcgccatggggcggctggtggctgtgggcttgctggggatcgcgctggcgctcctgggcgagaggcttctggcactcagaaatcgacttaaagcctccagagaagtagaatctgtagaccttccacactgccacctgattaaaggaattgaagctggctctgaagatattgacatacttcccaatggtctggctttttttagtgtggtgagtgtcttcttccttccccaaattcagcagaggagatacaagggtatttgatgagggctgcagaacagtaagttgcttttaaaattcattttccaaaatgcattctgaagaaaagagaggtcaaacaagatcttggaaaacttcctccagcttttctaaatgtagagatgaagactctttgcccattgagatagtgttctttatttccccattgcattgcactaaaatattccaatgcaatctgtgttttgttttgttttttcttttttaattttttttattttttgagacggagtcttgttctggttgccccggctggagtgcagtggcatgatctcagcttactgcaacctccgcctcccg

SEQ ID NO: 16285 - DNA, 451 bp, Homo sapiens
  source 1..451: mol_type = unassigned DNA
ccatcgagccgggaagatggcaccgcccacggagctgctggccaggccggagcgaggcagcgcgcccggctcccgcgccatggggcggctggtggctgtgggcttgctggggatcgcgctggcgctcctgggcgagaggcttctggcactcagaaatcgacttaaagcctccagagaagtagaatctgtagaccttccacactgccacctgattaaaggaattgtcagagcaaaggctttgagtcccagcttcccagtttgtgaccttgagcaattgcttaacttttccaaagcctccaatagtcttcactctaaaataaaagataatcatatgagatattgtatgcagggtatttacaaggagcctggtacttggtgtacctaatgtatgttagttattattattaaattagaggagcaaaaatttctctagcattgactgctcctgaca

SEQ ID NO: 16286 - DNA, 573 bp, Homo sapiens
  source 1..573: mol_type = unassigned DNA
atcgagccgggaagatggcaccgcccacggagctgctggccaggccggagcgaggcagcgcgcccggctcccgcgccatggggcggctggtggctgtgggcttgctggggatcgcgctggcgctcctgggcgagaggcttctggcactcagaaatcgacttaaagcctccagagaagtagaatctgtagaccttccacactgccacctgattaaaggaattggtatgtatatgaaaatgcttgttgggcacattgcattttttggccattaacattaaaacactcattaatggcattttagcatgaaattactgcttttcagtggataaatcacattagatcaacaaaaacctctttggtcaacctcttgatctgatgaaccctgtatttattcttctttcctaccctcactgtaaattattcttttttgtgtgtaattctatgtttagcatttgatttcttgcttgttttgtgacttctctgaactatttttgttgcgtctgtattgtttgtcaggtatggccgctgcagtctgtgttctgtgagccttgtggtcagctagtgaaggaagct

SEQ ID NO: 16287 - DNA, 1653 bp, Homo sapiens
  source 1..1653: mol_type = unassigned DNA
ggactcggcctaggcggaggacggggcggagcgcggccggcaccatcgagccgggaagatggcaccgcccacggagctgctggccaggccggagcgaggcagcgcgcccggctcccgcgccatggggcggctggtggctgtgggcttgctggggatcgcgctggcgctcctgggcgagaggcttctggcactcagaaatcgacttaaagcctccagagaagtagaatctgtagaccttccacactgccacctgattaaaggaattgaagctggctctgaagatattgacatacttcccaatggtctggctttttttagtgtgggtctaaaattcccaggactccacagctttgcaccagataagcctggaggaatactaatgatggatctaaaagaagaaaaaccaagggcacgggaattaagaatcagtcgtgggtttgatttggcctcattcaatccacatggcatcagcactttcatagacaacgatgacacagtttatctctttgttgtaaaccacccagaattcaagaatacagtggaaatttttaaatttgaagaagcagaaaattctctgttgcatctgaaaacagtcaaacatgagcttcttccaagtgtgaatgacatcacagctgttggaccggcacatttctatgccacaaatgaccactacttctctgatcctttcttaaagtatttagaaacatacttgaacttacactgggcaaatgttgtttactacagtccaaatgaagttaaagtggtagcagaaggatttgattcagcaaatgggatcaatatttcacctgatgataagtatatctatgttgctgacatattggctcatgaaattcatgttttggaaaaacacactaatatgaatttaactcagttgaaggtacttgagctggatacactggtggataatttatctattgatccttcctcgggggacatctgggtaggctgtcatcctaatggccagaagctcttcgtgtatgacccgaacaatcctccctcgtcagaggttctccgcatccagaacattctatctgagaagcctacagtgactacagtttatgccaacaatgggtctgttctccaaggaagttctgtagcctcagtgtatgatgggaagctgctcataggcactttataccacagagccttgtattgtgaactctaaattgtacttttggcatgaaagtgcgataacttaacaattaattttctatgaattgctaattctgagggaatttaaccagcaacattgacccagaaatgtatggcatgtgtagttaattttattccagtaaggaacggcccttttagttcttagagcacttttaacaaaaaaggaaaatgaacaggttctttaaaatgccaagcaagggacagaaaagaaagctgctttcgaataaagtgaatacattttgcacaaagtaagcctcacctttgccttccaactgccagaacatggattccactgaaatagagtgaattatatttccttaaaatgtgagtgacctcacttctggcactgtgactactatggctgtttagaactactgataacgtattttgatgttttgtacttacatctttgtttaccattaaaaagttggagttatattaaagactaactaaaatccc

SEQ ID NO: 16288 - DNA, 498 bp, Homo sapiens
  source 1..498: mol_type = unassigned DNA
agaccgccctcagcacaggacctgccctggctggtcagccctgcctggggcacccacagccccagctgtccagtttcatgatcaacatgggagactcccacgtggacaccagctccaccgtgtccgaggcggtggccgaagaagtatctcttttcagcatgacggacatgattctgttttcgctcatcgtgggtctcctaacctactggttcctcttcagaaagaaaaaagaagaagtccccgagttcaccaaaattcagacattgacctcctctgtcagagagagcagctttgtggaaaagatgaagaaaacggggaggaacatcatcgtgttctacggctcccagacggggactgcagaggagtttgccaaccgcctgtccaaggacgcccaccgctacgggatgcgaggcatgtcagcggaccctgaggagtatgacctggccgacctgagcagcctgccagagatcgacaacgccctggtggttttctgcatgg

SEQ ID NO: 16289 - DNA, 625 bp, Homo sapiens
  source 1..625: mol_type = unassigned DNA
agcaaggagaccggaagaaggtctggggaagttatttggacaatgaagagagccagtttcatgatcaacatgggagactcccacgtggacaccagctccaccgtgtccgaggcggtggccgaagaagtatctcttttcagcatgacggacatgattctgttttcgctcatcgtgggtctcctaacctactggttcctcttcagaaagaaaaaagaagaagtccccgagttcaccaaaattcagacattgacctcctctgtcagagagagcagctttgtggaaaagatgaagaaaacggggaggaacatcatcgtgttctacggctcccagacggggactgcagaggagtttgccaaccgcctgtccaaggacgcccaccgctacgggatgcgaggcatgtcagcggaccctgaggagtatgacctggccgacctgagcagcctgccagagatcgacaacgccctggtggttttctgcatggccacctacggtgagggagaccccaccgacaatgcccaggacttctacgactggctgcaggagacagacgtggatctctctggggtcaagttcgcggtgtttggtcttgggaacaagacctacgagcacttcaatgccatgggca

SEQ ID NO: 16290 - DNA, 2522 bp, Homo sapiens
  source 1..2522: mol_type = unassigned DNA
acgcccccacccccgcggccggcgaaggcggtggtagcgcctcagtggtgtgggcctgagccctgcccaggtgcccgcagagagcagccgggctgccagcgtttcatgatcaacatgggagactcccacgtggacaccagctccaccgtgtccgaggcggtggccgaagaagtatctcttttcagcatgacggacatgattctgttttcgctcatcgtgggtctcctaacctactggttcctcttcagaaagaaaaaagaagaagtccccgagttcaccaaaattcagacattgacctcctctgtcagagagagcagctttgtggaaaagatgaagaaaacggggaggaacatcatcgtgttctacggctcccagacggggactgcagaggagtttgccaaccgcctgtccaaggacgcccaccgctacgggatgcgaggcatgtcagcggaccctgaggagtatgacctggccgacctgagcagcctgccagagatcgacaacgccctggtggttttctgcatggccacctacggtgagggagaccccaccgacaatgcccaggacttctacgactggctgcaggagacagacgtggatctctctggggtcaagttcgcggtgtttggtcttgggaacaagacctacgagcacttcaatgccatgggcaagtacgtggacaagcggctggagcagctcggcgcccagcgcatctttgagctggggttgggcgacgacgatgggaacttggaggaggacttcatcacctggcgagagcagttctggccggccgtgtgtgaacactttggggtggaagccactggcgaggagtccagcattcgccagtacgagcttgtggtccacaccgacatagatgcggccaaggtgtacatgggggagatgggccggctgaagagctacgagaaccagaagcccccctttgatgccaagaatccgttcctggctgcagtcaccaccaaccggaagctgaaccagggaaccgagcgccacctcatgcacctggaattggacatctcggactccaaaatcaggtatgaatctggggaccacgtggctgtgtacccagccaacgactctgctctcgtcaaccagctgggcaaaatcctgggtgccgacctggacgtcgtcatgtccctgaacaacctggatgaggagtccaacaagaagcacccattcccgtgccctacgtcctaccgcacggccctcacctactacctggacatcaccaacccgccgcgtaccaacgtgctgtacgagctggcgcagtacgcctcggagccctcggagcaggagctgctgcgcaagatggcctcctcctccggcgagggcaaggagctgtacctgagctgggtggtggaggcccggaggcacatcctggccatcctgcaggactgcccgtccctgcggccccccatcgaccacctgtgtgagctgctgccgcgcctgcaggcccgctactactccatcgcctcatcctccaaggtccaccccaactctgtgcacatctgtgcggtggttgtggagtacgagaccaaggctggccgcatcaacaagggcgtggccaccaactggctgcgggccaaggagcctgccggggagaacggcggccgtgcgctggtgcccatgttcgtgcgcaagtcccagttccgcctgcccttcaaggccaccacgcctgtcatcatggtgggccccggcaccggggtggcacccttcataggcttcatccaggagcgggcctggctgcgacagcagggcaaggaggtgggggagacgctgctgtactacggctgccgccgctcggatgaggactacctgtaccgggaggagctggcgcagttccacagggacggtgcgctcacccagctcaacgtggccttctcccgggagcagtcccacaaggtctacgtccagcacctgctaaagcaagaccgagagcacctgtggaagttgatcgaaggcggtgcccacatctacgtctgtggggatgcacggaacatggccagggatgtgcagaacaccttctacgacatcgtggctgagctcggggccatggagcacgcgcaggcggtggactacatcaagaaactgatgaccaagggccgctactccctggacgtgtggagctaggggcctgcctgccccacccaccccacagactccggcctgtaatcagctctcctggctccctcccgtagtctcctgggtgtgtttggcttggccttggcatgggcgcaggcccagtgacaaagactcctctgggcctggggtgcatcctcctcagcccccaggccaggtgaggtccaccggcccctggcagcacagcccagggcctgcatgggggcaccgggctccatgcctctggaggcctctggccctcggtggctgcacagaagggctctttctctctgctgagctgggcccagcccctccacgtgatttccagtgagtgtaaataattttaaataacctctggcccttggaataaagttctgttttctgta

SEQ ID NO: 16291 - DNA, 1104 bp, Homo sapiens
  source 1..1104: mol_type = unassigned DNA
gtgcccgcagagagcagccgggctgccagcgtttcatgatcaacatgggagactcccacgtggacaccagctccaccgtgtccgaggcggtggccgaagaagtatctcttttcagcatgacggacatgattctgttttcgctcatcgtgggtctcctaacctactggttcctcttcagaaagaaaaaagaagaagtccccgagttcaccaaaattcagacattgacctcctctgtcagagagagcagctttgtggaaaagatgaagaaaacggtgagtttcctgcatgtctttactcttctcaggaagcctcggccccgatgggcatgtaatcaagtctagcagacggctggcgtcaccgcatagaggatgtcccggtggccaggagagggaacgcagcccggctcgcttgggagtcattcttgcctaaccaaagccctgaagcagctctgctgttgctgggacagtttgtttccttgaatctttactttttgaacaaaccaaagtctaagaacagaccctccctctaactcacgaagcttctcccgtctggccctggcctgtccaggagcagaggggaggaacatcatcgtgttctacggctcccagacggggactgcagaggagtttgccaaccgcctgtccaaggacgcccaccgctacgggatgcgaggcatgtcagcggaccctgaggagtatgacctggccgacctgagcagcctgccagagatcgacaacgccctggtggttttctgcatggccacctacggtgagggagaccccaccgacaatgcccaggacttctacgactggctgcaggagacagacgtggatctctctggggtcaagttcgcggtgagtcacccagagactgctatgggctcccggtggcctgcggtgcctccctggggactccagatccatgtatctgaaaggcagccctccagacccccaccctgtcctcagcagccagggcaggccacttgtgagaccctctcctctgccccagaccccagcactacgagaatgtcccctccctgtccccagccccagtcggctccagggggcattgggtgctggagactaaaggcaagaaaggtctggc

SEQ ID NO: 16292 - DNA, 631 bp, Homo sapiens
  source 1..631: mol_type = unassigned DNA
agagagcagccgggctgccagcggtgagtgctatctttcgcggcgacggcggggtgggtgaggtcgggccccaagactcggggtttgccgggcgcctcagttcaccgcggccgcctggctctctgcgtcggggtgggccctcgggcctgggcactgcgcgtctggcccgacgctcgggcggaaggcatggctcccaccccggccctcctccgcgtcgcccttcccctagagctgatctcccgcggcggcctgagggtcgacttttccacagcttgggccgagagagcccggcaggccctcggctgagggttagggctcggtatctcagggctcggggtccagtccccgcgccgccgccccccacgggctaagccactttaactctccgagcctcagtttccccatctgtacgatgaatgggcctcgggaggcagcgaattctgggggtacctaacgtgagaggcgctcgatgcatgctcatgggacccgaatctaaccctgcagcatcagtttcatgatcaacatgggagactcccacgtggacaccagctccaccgtgtccgaggcggtggccgaagaagtatctcttttcagcatgacggacatgattctgttttcgctcatcgtgggt

SEQ ID NO: 16293 - DNA, 600 bp, Homo sapiens
  source 1..600: mol_type = unassigned DNA
agagagcagccgggctgccagcgtttcatgatcaacatgggagactcccacgtggacaccagctccaccgtgtccgaggcggtggccgaagaagtatctcttttcagcatgacggacatgattctgttttcgctcatcgtgggtctcctaacctactggttcctcttcagaaagaaaaaagaagaagtccccgagttcaccaaaattcagacattgacctcctctgtcagagagagcagctttgtggaaaagatgaagaaaacggggaggaacatcatcgtgttctacggctcccagacggggactgcagaggagtttgccaaccgcctgtccaaggacgcccaccgctacgggatgcgaggcatgtcagcggaccctgaggagtatgacctggtaagctgccaccgcgtgctggccccagatggaggcagtgggtaggacagggagcaggtctgtagggcgcccctcagcagggggaggccggcagggagtggggtcctgggaagacgtcctcggaagttgccttcccgtgagggtcattgccatccctgcccgggctgactgacggaagggccattcctgcagttgcagccacgtgcc

SEQ ID NO: 16294 - DNA, 2532 bp, Homo sapiens
  source 1..2532: mol_type = unassigned DNA
agccgggctgccagcgtttcatgatcaacatgggagactcccacgtggacaccagctccaccgtgtccgaggcggtggccgaagaagtatctcttttcagcatgacggacatgattctgttttcgctcatcgtgggtctcctaacctactggttcctcttcagaaagaaaaaagaagaagtccccgagttcaccaaaattcagacattgacctcctctgtcagagagagcagctttgtggaaaagatgaagaaaacggggaggaacatcatcgtgttctacggctcccagacggggactgcagaggagtttgccaaccgcctgtccaaggacgcccaccgctacgggatgcgaggcatgtcagcggaccctgaggagtatgacctggccgacctgagcagcctgccagagatcgacaacgccctggtggttttctgcatggccacctacggtgagggagaccccaccgacaatgcccaggacttctacgactggctgcaggagacagacgtggatctctctggggtcaagttcgcggtgtttggtcttgggaacaagacctacgagcacttcaatgccatgggcaagtacgtggacaagcggctggagcagctcggcgcccagcgcatctttgagctggggttgggcgacgacgatgggaacttggaggaggacttcatcacctggcgagagcagttctggccggccgtgtgtgaacactttggggtggaagccactggcgaggagtccagcattcgccagtacgagcttgtggtccacaccgacatagatgcggccaaggtgtacatgggggagatgggccggctgaagagctacgagaaccagaagcccccctttgatgccaagaatccgttcctggctgcagtcaccaccaaccggaagctgaaccagggaaccgagcgccacctcatgcacctggaattggacatctcggactccaaaatcaggtatgaatctggggaccacgtggctgtgtacccagccaacgactctgctctcgtcaaccagctgggcaaaatcctgggtgccgacctggacgtcgtcatgtccctgaacaacctggatgaggagtccaacaagaagcacccattcccgtgccctacgtcctaccgcacggccctcacctactacctggacatcaccaacccgccgcgtaccaacgtgctgtacgagctggcgcagtacgcctcggagccctcggagcaggagctgctgcgcaagatggcctcctcctccggcgagggcaaggagctgtacctgagctgggtggtggaggcccggaggcacatcctggccatcctgcaggactgcccgtccctgcggccccccatcgaccacctgtgtgagctgctgccgcgcctgcaggcccgctactactccatcgcctcatcctccaaggtccaccccaactctgtgcacatctgtgcggtggttgtggagtacgagaccaaggctggccgcatcaacaagggcgtggccaccaactggctgcgggccaaggagcctgccggggagaacggcggccgtgcgctggtgcccatgttcgtgcgcaagtcccagttccgcctgcccttcaaggccaccacgcctgtcatcatggtgggccccggcaccggggtggcacccttcataggcttcatccaggagcgggcctggctgcgacagcagggcaaggaggtgggggagacgctgctgtactacggctgccgccgctcggatgaggactacctgtaccgggaggagctggcgcagttccacagggacggtgcgctcacccagctcaacgtggccttctcccgggagcagtcccacaaggtctacgtccagcacctgctaaagcaagaccgagagcacctgtggaagttgatcgaaggcggtgcccacatctacgtctgtgggtgagtgagtggggtcactggaatagggggcagggaggacaaggccctgcctgccacagttggcccagcccccagcaccccctcttcctgcccagggatgcacggaacatggccagggatgtgcagaacaccttctacgacatcgtggctgagctcggggccatggagcacgcgcaggcggtggactacatcaagaaactgatgaccaagggccgctactccctggacgtgtggagctaggggcctgcctgccccacccaccccacagactccggcctgtaatcagctctcctggctccctcccgtagtctcctgggtgtgtttggcttggccttggcatgggcgcaggcccagtgacaaagactcctctgggcctggggtgcatcctcctcagcccccaggccaggtgaggtccaccggcccctggcagcacagcccagggcctgcatgggggcaccgggctccatgcctctggaggcctctggccctcggtggctgcacagaagggctctttctctctgctgagctgggcccagcccctccacgtgatttccagtgagtgtaaataattttaaataacctctggcccttggaataaagttctgttttctgta

SEQ ID NO: 16295 - DNA, 586 bp, Homo sapiens
  source 1..586: mol_type = unassigned DNA
ccagcggtgagtgctatctttcgcggcgacggcgggcatcaggtgggctgagtcgatggatcacgggagccccccagcccggcctgcatccctgagggcagtgcccctcgcagtcaggtgtctcggcggcccccacaacacagtttcatgatcaacatgggagactcccacgtggacaccagctccaccgtgtccgaggcggtggccgaagaagtatctcttttcagcatgacggacatgattctgttttcgctcatcgtgggtctcctaacctactggttcctcttcagaaagaaaaaagaagaagtccccgagttcaccaaaattcagacattgacctcctctgtcagagagagcagctttgtggaaaagatgaagaaaacggggaggaacatcatcgtgttctacggctcccagacggggactgcagaggagtttgccaaccgcctgtccaaggacgcccaccgctacgggatgcgaggcatgtcagcggaccctgaggagtatgacctggccgacctgagcagcctgccagagatcgacaacgccctggtggttttctgcatggccacctacggtgagggag

SEQ ID NO: 16296 - DNA, 548 bp, Homo sapiens
  source 1..548: mol_type = unassigned DNA
gagtgctatctttcgcggcgacggcgggtttcatgatcaacatgggagactcccacgtggacaccagctccaccgtgtccgaggcggtggccgaagaagtatctcttttcagcatgacggacatgattctgttttcgctcatcgtgggtctcctaacctactggttcctcttcagaaagaaaaaagaagaagtccccgagttcaccaaaattcagacattgacctcctctgtcagagagagcagctttgtggaaaagatgaagaaaacggggaggaacatcatcgtgttctacggctcccagacggggactgcagaggagtttgccaaccgcctgtccaaggacgcccaccgctacgggatgcgaggcatgtcagcggaccctgaggagtatgacctggccgacctgagcagcctgccagagatcgacaacgccctggtggttttctgcatggccacctacggtgagggagaccccaccgacaatgcccaggacttctacgactggctgcaggagacagacgtggatctctctggggtcaagttcgcg

SEQ ID NO: 16297 - DNA, 561 bp, Homo sapiens
  source 1..561: mol_type = unassigned DNA
gcacttgagaactctcacagggagggaagcaagcatacaattcaacaagaatggcacgtttcatgatcaacatgggagactcccacgtggacaccagctccaccgtgtccgaggcggtggccgaagaagtatctcttttcagcatgacggacatgattctgttttcgctcatcgtgggtctcctaacctactggttcctcttcagaaagaaaaaagaagaagtccccgagttcaccaaaattcagacattgacctcctctgtcagagagagcagctttgtggaaaagatgaagaaaacggggaggaacatcatcgtgttctacggctcccagacggggactgcagaggagtttgccaaccgcctgtccaaggacgcccaccgctacgggatgcgaggcatgtcagcggaccctgaggagtatgacctggccgacctgagcagcctgccagagatcgacaacgccctggtggttttctgcatggccacctacggtgagggagaccccaccgacaatgcccaggacttctacgactggctgcaggagacagacgtggatctct

SEQ ID NO: 16298 - DNA, 283 bp, Homo sapiens
  source 1..283: mol_type = unassigned DNA
gacttcctgggccctgaagctccaaggacaaaagactcctgtcccttttcccttcctctccattctgggtctcccaccaccaccaagtccttttcatgatcaacatgggagactcccacgtggacaccagctccaccgtgtccgaggcggtggccgaagaagtatctcttttcagcatgacggacatgattctgttttcgctcatcgtgggtctcctaacctactggttcctcttcagaaagaaaaaagaagaagtccccgagttcaccaaaattcagacatt

SEQ ID NO: 16299 - DNA, 736 bp, Homo sapiens
  source 1..736: mol_type = unassigned DNA
aagaaaagttgctatattttgcaaaagacataaatctacagattcaagaaactgagtgaaccccacagaaggtataaagaagaaactcagagattaaagactctttcagggcagaaggctcacacaggcttccagaacctcctcggagcgattgtagggactgcctgacccggaagagagttgtcagtcaagaccgccagagttttcccatcagagtatttggcatagcagaggtggctcccaaactgtgccagggcactgcagcaaactcacaagtgatcattctcaatgcggcggacgctcaagtctgttgaactccatgcgaagtgctagcttgggacagttcacggttccaacgtgagatccttgctgcattccttcttaggattttacatctttgcgaagctgggtttgcagtggttgttcagacctaactatacgtggaactgttaggcatttttttttggcctacggataccattaaaaatttgctgagataccagggactccacaaacgaaggacatttgggatctgtccagacagtttcatgatcaacatgggagactcccacgtggacaccagctccaccgtgtccgaggcggtggccgaagaagtatctcttttcagcatgacggacatgattctgttttcgctcatcgtgggtctcctaacctactggttcctcttcagaaagaaaaaagaagaagtccccgagttcaccaaaattcagacatt

SEQ ID NO: 16300 - DNA, 1044 bp, Homo sapiens
  source 1..1044: mol_type = unassigned DNA
tttcatgatcaacatgggagactcccacgtggacaccagctccaccgtgtccgaggcggtggccgaagaagtatctcttttcagcatgacggacatgattctgttttcgctcatcgtgggtctcctaacctactggttcctcttcagaaagaaaaaagaagaagtccccgagttcaccaaaattcagacattgacctcctctgtcagagagagcagctttgtggaaaagatgaagaaaacggggaggaacatcatcgtgttctacggctcccagacggggactgcagaggagtttgccaaccgcctgtccaaggacgcccaccgctacgggatgcgaggcatgtcagcggaccctgaggagtatgacctggccgacctgagcagcctgccagagatcgacaacgccctggtggttttctgcatggccacctacggtgagggagaccccaccgacaatgcccaggacttctacgactggctgcaggagacagacgtggatctctctggggtcaagttcgcggtgtttggtcttgggaacaagacctacgagcacttcaatgccatgggcaaatgcggccaaggtgtacatgggggagatgggccggctgaagagctacgagaaccagaagcccccctttgatgccaagaatccgttcctggctgcagtcaccaccaaccggaagctgaaccagggaaccgagcgccacctcatgcacctggaattggacatctcggactccaaaatcagtcccacaaggtctacgtccagcacctgctaaagcaagaccgagagcacctgtggaagttgatcgaaggcggtgcccacatctacgtctgtggggatgcacggaacatggccagggatgtgcagaacaccttctacgacatcgtggctgagctcggggccatggagcacgcgcaggcggtggactacatcaagaaactgatgaccaagggccgctactccctggacgtgtggagctaggggcctgcctgccccacccaccccacagactccggcctgtaatcagctctcctggctcc

SEQ ID NO: 16301 - DNA, 2295 bp, Homo sapiens
  source 1..2295: mol_type = unassigned DNA
tttcatgatcaacatgggagactcccacgtggacaccagctccaccgtgtccgaggcggtggccgaagaagtatctcttttcagcatgacggacatgattctgttttcgctcatcgtgggtctcctaacctactggttcctcttcagaaagaaaaaagaagaagtccccgagttcaccaaaattcagacattgacctcctctgtcagagagagcagctttgtggaaaagatgaagaaaacggggaggaacatcatcgtgttctacggctcccagacggggactgcagaggagtttgccaaccgcctgtccaaggacgcccaccgctacgggatgcgaggcatgtcagcggaccctgaggagtatgacctggccgacctgagcagcctgccagagatcgacaacgccctggtggttttctgcatggccacctacggtgagggagaccccaccgacaatgcccaggacttctacgactggctgcaggagacagacgtggatctctctggggtcaagttcgcgcttggaggaggacttcatcacctggcgagagcagttctggccggccgtgtgtgaacactttggggtggaagccactggcgaggagtccagcattcgccagtacgagcttgtggtccacaccgacatagatgcggccaaggtgtacatgggggagatgggccggctgaagagctacgagaaccagaagcccccctttgatgccaagaatccgttcctggctgcagtcaccaccaaccggaagctgaaccagggaaccgagcgccacctcatgcacctggaattggacatctcggactccaaaatcaggtatgaatctggggaccacgtggctgtgtacccagccaacgactctgctctcgtcaaccagctgggcaaaatcctgggtgccgacctggacgtcgtcatgtccctgaacaacctggatgaggagtccaacaagaagcacccattcccgtgccctacgtcctaccgcacggccctcacctactacctggacatcaccaacccgccgcgtaccaacgtgctgtacgagctggcgcagtacgcctcggagccctcggagcaggagctgctgcgcaagatggcctcctcctccggcgagggcaaggagctgtacctgagctgggtggtggaggcccggaggcacatcctggccatcctgcaggactgcccgtccctgcggccccccatcgaccacctgtgtgagctgctgccgcgcctgcaggcccgctactactccatcgcctcatcctccaaggtccaccccaactctgtgcacatctgtgcggtggttgtggagtacgagaccaaggctggccgcatcaacaagggcgtggccaccaactggctgcgggccaaggagcctgccggggagaacggcggccgtgcgctggtgcccatgttcgtgcgcaagtcccagttccgcctgcccttcaaggccaccacgcctgtcatcatggtgggccccggcaccggggtggcacccttcataggcttcatccaggagcgggcctggctgcgacagcagggcaaggaggtgggggagacgctgctgtactacggctgccgccgctcggatgaggactacctgtaccgggaggagctggcgcagttccacagggacggtgcgctcacccagctcaacgtggccttctcccgggagcagtcccacaaggtctacgtccagcacctgctaaagcaagaccgagagcacctgtggaagttgatcgaaggcggtgcccacatctacgtctgtggggatgcacggaacatggccagggatgtgcagaacaccttctacgacatcgtggctgagctcggggccatggagcacgcgcaggcggtggactacatcaagaaactgatgaccaagggccgctactccctggacgtgtggagctaggggcctgcctgccccacccaccccacagactccggcctgtaatcagctctcctggctccctcccgtagtctcctgggtgtgtttggcttggccttggcatgggcgcaggcccagtgacaaagactcctctgggcctggggtgcatcctcctcagcccccaggccaggtgaggtccaccggcccctggcagcacagcccagggcctgcatgggggcaccgggctccatgcctctggaggcctctggccctcggtggctgcacagaagggctctttctctctgctgagctgggcccagcccctccacgtgatttccagtgagtgtaaataattttaaataacctctggcccttggaataaagttctgttttctgt

SEQ ID NO: 16302 - DNA, 2332 bp, Homo sapiens
  source 1..2332: mol_type = unassigned DNA
gacggacatgattctgttttcgctcatcgtgggtctcctaacctactggttcctcttcagaaagaaaaaagaagaagtccccgagttcaccaaaattcagacattgacctcctctgtcagagagagcagctttgtggaaaagatgaagaaaacggggaggaacatcatcgtgttctacggctcccagacggggactgcagaggagtttgccaaccgcctgtccaaggacgcccaccgctacgggatgcgaggcatgtcagcggaccctgaggagtatgacctggccgacctgagcagcctgccagagatcgacaacgccctggtggttttctgcatggccacctacggtgagggagaccccaccgacaatgcccaggacttctacgactggctgcaggagacagacgtggatctctctggggtcaagttcgcggtgagtcacccagagactgctatgggctcccggtggcctgcggtgcctccctggggactccagatccatgtatctgaaaggcagccctccagacccccaccctgtcctcagcagccagggcaggccacttgtgagaccctctcctctgccccagaccccagcactacgagaatgtcccctccctgtccccagccccagtcggctccagggggcattgggtgctggagactaaaggtgtttggtcttgggaacaagacctacgagcacttcaatgccatgggcaagtacgtggacaagcggctggagcagctcggcgcccagcgcatctttgagctggggttgggcgacgacgatgggaacttggaggaggacttcatcacctggcgagagcagttctggccggccgtgtgtgaacactttggggtggaagccactggcgaggagtccagcattcgccagtacgagcttgtggtccacaccgacatagatgcggccaaggtgtacatgggggagatgggccggctgaagagctacgagaaccagaagcccccctttgatgccaagaatccgttcctggctgcagtcaccaccaaccggaagctgaaccagggaaccgagcgccacctcatgcacctggaattggacatctcggactccaaaatcaggtatgaatctggggaccacgtggctgtgtacccagccaacgactctgctctcgtcaaccagctgggcaaaatcctgggtgccgacctggacgtcgtcatgtccctgaacaacctggatgaggagtccaacaagaagcacccattcccgtgccctacgtcctaccgcacggccctcacctactacctggacatcaccaacccgccgcgtaccaacgtgctgtacgagctggcgcagtacgcctcggagccctcggagcaggagctgctgcgcaagatggcctcctcctccggcgagggcaaggagctgtacctgagctgggtggtggaggcccggaggcacatcctggccatcctgcaggactgcccgtccctgcggccccccatcgaccacctgtgtgagctgctgccgcgcctgcaggcccgctactactccatcgcctcatcctccaaggtccaccccaactctgtgcacatctgtgcggtggttgtggagtacgagaccaaggctggccgcatcaacaagggcgtggccaccaactggctgcgggccaaggagcctgccggggagaacggcggccgtgcgctggtgcccatgttcgtgcgcaagtcccagttccgcctgcccttcaaggccaccacgcctgtcatcatggtgggccccggcaccggggtggcacccttcataggcttcatccaggagcgggcctggctgcgacagcagggcaaggaggtgggggagacgctgctgtactacggctgccgccgctcggatgaggactacctgtaccgggaggagctggcgcagttccacagggacggtgcgctcacccagctcaacgtggccttctcccgggagcagtcccacaaggtctacgtccagcacctgctaaagcaagaccgagagcacctgtggaagttgatcgaaggcggtgcccacatctacgtctgtggcaccccctcttcctgcccagggatgcacggaacatggccagggatgtgcagaacaccttctacgacatcgtggctgagctcggggccatggagcacgcgcaggcggtggactacatcaagaaactgatgaccaagggccgctactccctggacgtgtggagctaggggcctgcctgccccacccaccccacagactccggcctgtaatcagctctcctggctccctcccgtagtctcctgggtgtgtttggcttggccttggcatgggcgcaggcccagtgac

SEQ ID NO: 16303 - DNA, 565 bp, Homo sapiens
  source 1..565: mol_type = unassigned DNA
agatgttgcagagttcttgggctcatgggggcagacgcaggcaggagctcagggaaattccgagaggactttggggtgtccaggagcactttgaggccacgggcccaggcaacttcctcaccagtacggaacaggggatgcacagggccgaactttccatctgctggcccctgctggtgtccaggagagagctgtgaccctcctttttccttaagtcctggagctgagagtgagaagccatggggtgcacgtactcgtctccacctgaggagcccgctctgagaaggacctcctctgtcagagagagcagctttgtggaaaagatgaagaaaacggggaggaacatcatcgtgttctacggctcccagacggggactgcagaggagtttgccaaccgcctgtccaaggacgcccaccgctacgggatgcgaggcatgtcagcggaccctgaggagtatgacctggccgacctgagcagcctgccagagatcgacaacgccctggtggttttctgcatggccacctacggtgagggagaccccaccgacaatgcccaggacttcta

SEQ ID NO: 16304 - DNA, 569 bp, Homo sapiens
  source 1..569: mol_type = unassigned DNA
atgttgcagagttcttgggctcatgggggcagacgcaggcaggagctcagggaaattccgagaggactttggggtgtccaggagcactttgaggccacgggcccaggcaacttcctcaccagtacggaacaggggatgcacagggccgaactttccatctgctggcccctgctggtgtccaggagagagctgtgaccctcctttttccttaagtcctggagctgagagtgagaagccatggggtgcacgtactcgtctccacctgaggagcccgctctgagaaggtcagttcctgacactgtccctggcggcagactgccctcatgccccttggccaggggacgcctgcaccctcactcgagtgtgggagacttcctcctggcggggacctgctggaggcctgaagatgcggctgcctggagttaacagcaaggacctcctctgtcagagagagcagctttgtggaaaagatgaagaaaacggggaggaacatcatcgtgttctacggctcccagacggggactgcagaggagtttgccaaccgcctgtccaaggacgcccaccgctac

SEQ ID NO: 16305 - DNA, 590 bp, Homo sapiens
  source 1..590: mol_type = unassigned DNA
atgttgcagagttcttgggctcatgggggcagacgcaggcaggagctcagggaaattccgagaggactttggggtgtccaggagcactttgaggccacgggcccaggcaacttcctcaccagtacggaacaggggatgcacagggccgaactttccatctgctggcccctgctggtgtccaggagagagctgtgaccctcctttttccttaagtcctggagctgagagtgagaagccatggggtgcacgtactcgtctccacctgaggagcccgctctgagaagattctcactctgttgcccaggctggagtacagtggcgtgatctcggctcactgcaacctccgcctccctagttcaagtgattctcctgcctcagcctcccgagtaggacctcctctgtcagagagagcagctttgtggaaaagatgaagaaaacggggaggaacatcatcgtgttctacggctcccagacggggactgcagaggagtttgccaaccgcctgtccaaggacgcccaccgctacgggatgcgaggcatgtcagcggaccctgaggagtatgacctggccgacctgagcagcctgccag

SEQ ID NO: 16306 - DNA, 603 bp, Homo sapiens
  source 1..603: mol_type = unassigned DNA
tgcaggtgttgccagcagctcagccagtgctgtggggcctcccgccctgcccccatggcccctcccactggtcaggtcgagggccaggcctcagagcggcccctgtgtccacgcaggtgtttggtcttgggaacaagacctacgagcacttcaatgccatgggcaagtacgtggacaagcggctggagcagctcggcgcccagcgcatctttgagctggggttgggcgacgacgatgggaacttggaggaggacttcatcacctggcgagagcagttctggccggccgtgtgtgaacactttggggtggaagccactggcgaggagtccagcattcgccagtacgagcttgtggtccacaccgacatagatgcggccaaggtgtacatgggggagatgggccggctgaagagctacgagaaccagaagcccccctttgatgccaagaatccgttcctggctgcagtcaccaccaaccggaagctgaaccagggaaccgagcgccacctcatgcacctggaattggacatctcggactccaaaatcaggtatgaatctggggaccacgtggctgtgtacccagccaacgactctgctctcgtca

SEQ ID NO: 16307 - DNA, 1858 bp, Homo sapiens
  source 1..1858: mol_type = unassigned DNA
ataacgttcctctctgtgcccttgatggcccctgggtgctgcccgggcttccttaccttctcccagatggaagcctgcccagccctgccccggcttctgggcgtctggcccccggcagctccacgccgcctccctccttgctccctcgcctgccctccttgtgcatctgcagcaggggctcccctgcttcttgtccattcgccagtacgagcttgtggtccacaccgacatagatgcggccaaggtgtacatgggggagatgggccggctgaagagctacgagaaccagaagcccccctttgatgccaagaatccgttcctggctgcagtcaccaccaaccggaagctgaaccagggaaccgagcgccacctcatgcacctggaattggacatctcggactccaaaatcaggtatgaatctggggaccacgtggctgtgtacccagccaacgactctgctctcgtcaaccagctgggcaaaatcctgggtgccgacctggacgtcgtcatgtccctgaacaacctggatgaggagtccaacaagaagcacccattcccgtgccctacgtcctaccgcacggccctcacctactacctggacatcaccaacccgccgcgtaccaacgtgctgtacgagctggcgcagtacgcctcggagccctcggagcaggagctgctgcgcaagatggcctcctcctccggcgagggcaaggagctgtacctgagctgggtggtggaggcccggaggcacatcctggccatcctgcaggactgcccgtccctgcggccccccatcgaccacctgtgtgagctgctgccgcgcctgcaggcccgctactactccatcgcctcatcctccaaggtccaccccaactctgtgcacatctgtgcggtggttgtggagtacgagaccaaggctggccgcatcaacaagggcgtggccaccaactggctgcgggccaaggagcctgccggggagaacggcggccgtgcgctggtgcccatgttcgtgcgcaagtcccagttccgcctgcccttcaaggccaccacgcctgtcatcatggtgggccccggcaccggggtggcacccttcataggcttcatccaggagcgggcctggctgcgacagcagggcaaggaggtgggggagacgctgctgtactacggctgccgccgctcggatgaggactacctgtaccgggaggagctggcgcagttccacagggacggtgcgctcacccagctcaacgtggccttctcccgggagcagtcccacaaggtctacgtccagcacctgctaaagcaagaccgagagcacctgtggaagttgatcgaaggcggtgcccacatctacgtctgtggggatgcacggaacatggccagggatgtgcagaacaccttctacgacatcgtggctgagctcggggccatggagcacgcgcaggcggtggactacatcaagaaactgatgaccaagggccgctactccctggacgtgtggagctaggggcctgcctgccccacccaccccacagactccggcctgtaatcagctctcctggctccctcccgtagtctcctgggtgtgtttggcttggccttggcatgggcgcaggcccagtgacaaagactcctctgggcctggggtgcatcctcctcagcccccaggccaggtgaggtccaccggcccctggcagcacagcccagggcctgcatgggggcaccgggctccatgcctctggaggcctctggccctcggtggctgcacagaagggctctttctctctgctgagctgggcccagcccctccacgtgatttccagtgagtgtaaataattttaaataacctctggccctt

SEQ ID NO: 16308 - DNA, 939 bp, Homo sapiens
  source 1..939: mol_type = unassigned DNA
gggtggcagagcgaaactctgtctcaaaaaaaaaaaagagaactgcattggaccaggctgggagagcccttgatgtaaccggtgagatttcctcatggagatctctgagattccctgtgctttgtgcaaccagaagcgtccttggagacggagactcagatcaaagccccggccgctcactgtgcttctctcctccccacccagcccctttgatgccaagaatccgttcctggctgcagtcaccaccaaccggaagctgaaccagggaaccgagcgccacctcatgcacctggaattggacatctcggactccaaaatcaggtatgaatctggggaccacgtggctgtgtacccagccaacgactctgctctcgtcaaccagctgggcaaaatcctgggtgccgacctggacgtcgtcatgtccctgaacaacctggatgaggagtccaacaagaagcacccattcccgtgccctacgtcctaccgcacggccctcacctactacctggacatcaccaacccgccgcgtaccaacgtgctgtacgagctggcgcagtacgcctcggagccctcggagcaggagctgctgcgcaagatggcctcctcctccggcgagggcaaggagctgtacctgagctgggtggtggaggcccggaggcacatcctggccatcctgcaggactgcccgtccctgcggccccccatcgaccacctgtgtgagctgctgccgcgcctgcaggcccgctactactccatcgcctcatcctccaaggtccaccccaactctgtgcacatctgtgcggtggttgtggagtacgagaccaaggctggccgcatcaacaagggcgtggccaccaactggctgcgggccaaggagcctgccggggagaacggcggccgtgcgctggtgcccatgttcgtgcgcaagtcccagttccg

SEQ ID NO: 16309 - DNA, 853 bp, Homo sapiens
  source 1..853: mol_type = unassigned DNA
tttgtgcaaccagaagcgtccttggagacggagactcagatcaaagccccggccgctcactgtgcttctctcctccccacccagcccctttgatgccaagaatccgttcctggctgcagtcaccaccaaccggaagctgaaccagggaaccgagcgccacctcatgcacctggaattggacatctcggactccaaaatcaggtaccagctgccactgtcaccccctgaaccctcactctgggcctcctgacctggggcagggccagccttccgcccctcccgagcctcacatctccctccaggtatgaatctggggaccacgtggctgtgtacccagccaacgactctgctctcgtcaaccagctgggcaaaatcctgggtgccgacctggacgtcgtcatgtccctgaacaacctggatgaggagtccaacaagaagcacccattcccgtgccctacgtcctaccgcacggccctcacctactacctggacatcaccaacccgccgcgtaccaacgtgctgtacgagctggcgcagtacgcctcggagccctcggagcaggagctgctgcgcaagatggcctcctcctccggcgagggcaaggagctgtacctgagctgggtggtggaggcccggaggcacatcctggccatcctgcaggactgcccgtccctgcggccccccatcgaccacctgtgtgagctgctgccgcgcctgcaggcccgctactactccatcgcctcatcctccaaggtgagggccggcactgccctgccagccacacgctggaggcccagccctgctcacagcaggcagagtgcaaggcggcacaggagctccgagatctgagccc

SEQ ID NO: 16310 - DNA, 559 bp, Homo sapiens
  source 1..559: mol_type = unassigned DNA
cgtcaaccagctgggcaaaatcctgggtgccgacctggacgtcgtcatgtccctgaacaacctggatgaggagtccaacaagaagcacccattcccgtgccctacgtcctaccgcacggccctcacctactacctggacatcaccaacccgccgcgtaccaacgtgctgtacgagctggcgcagtacgcctcggagccctcggagcaggagctgctgcgcaagatggcctcctcctccggcgagggcaaggagctgtacctgagctgggtggtggaggcccggaggcacatcctggccatcctgcaggactgcccgtccctgcggccccccatcgaccacctgtgtgagctgctgccgcgcctgcaggcccgctactactccatcgcctcatcctccaaggtgagggccggcactgccctgccagccacacgctggaggcccagccctgctcacagcaggcagagtgcaaggcggcacaggagctccgagatctgagccctgagctccagttccagccccagcgcagctccaaatgcctccccaggctgtggactcagt

SEQ ID NO: 16311 - DNA, 1028 bp, Homo sapiens
  source 1..1028: mol_type = unassigned DNA
tccccacaggtccaccccaactctgtgcacatctgtgcggtggttgtggagtacgagaccaaggctggccgcatcaacaagggcgtggccaccaactggctgcgggccaaggagcctgccggggagaacggcggccgtgcgctggtgcccatgttcgtgcgcaagtcccagttccgcctgcccttcaaggccaccacgcctgtcatcatggtgggccccggcaccggggtggcacccttcataggcttcatccaggagcgggcctggctgcgacagcagggcaaggaggtgggggagacgctgctgtactacggctgccgccgctcggatgaggactacctgtaccgggaggagctggcgcagttccacagggacggtgcgctcacccagctcaacgtggccttctcccgggagcagtcccacaaggtctacgtccagcacctgctaaagcaagaccgagagcacctgtggaagttgatcgaaggcggtgcccacatctacgtctgtggggatgcacggaacatggccagggatgtgcagaacaccttctacgacatcgtggctgagctcggggccatggagcacgcgcaggcggtggactacatcaagaaactgatgaccaagggccgctactccctggacgtgtggagctaggggcctgcctgccccacccaccccacagactccggcctgtaatcagctctcctggctccctcccgtagtctcctgggtgtgtttggcttggccttggcatgggcgcaggcccagtgacaaagactcctctgggcctggggtgcatcctcctcagcccccaggccaggtgaggtccaccggcccctggcagcacagcccagggcctgcatgggggcaccgggctccatgcctctggaggcctctggccctcggtggctgcacagaagggctctttctctctgctgagctgggcccagcccctccacgtgatttccagtgagtgtaaataattttaaataacctctggcccttggaataaagttctgttttctgta

SEQ ID NO: 16312 - DNA, 4879 bp, Homo sapiens
  source 1..4879: mol_type = unassigned DNA
gggagaggggggagcgccgagctagtcagagagtgagcgagagcgagaaggagggagaggaggagaaagagagcgagggcgggcgggaggcggcggcggcggcagcagcagcagtaatagcaggagcagcaacagaaggcgtcggagcgggcgtcggagctgcccgctgtgggagagagaggagacagaaagagcgagcgaggagagggagcccgaggcgaaaaagtaactgtcaaatgcgcggctcctttaaccggagcgctcagtccggctccgagagtcatggcgaccgcagcgtctaaccactacagcctgctcacctccagcgcctccatcgtgcacgccgagccgcccggcggcatgcagcagggcgcggggggctaccgcgaagcgcagagcctggtgcagggcgactacggcgctctgcagagcaacggacacccgctcagccacgctcaccagtggatcaccgcgctgtcccacggcggcggcggcgggggcggtggcggcggcggggggggcgggggcggcggcgggggcggcggcgacggctccccgtggtccaccagccccctgggccagccggacatcaagccctcggtggtggtgcagcagggcggccgcggagacgagctgcacgggccaggcgccctgcagcagcagcatcagcagcagcaacagcaacagcagcagcaacagcagcaacagcagcagcagcagcagcaacagcggccgccgcatctggtgcaccacgccgctaaccaccacccgggacccggggcatggcggagcgcggcggctgcagcgcacctcccaccctccatgggagcgtccaacggcggcttgctctactcgcagcccagcttcacggtgaacggcatgctgggcgccggcgggcagccggccggtctgcaccaccacggcctgcgggacgcgcacgacgagccacaccatgccgaccaccacccgcacccgcactcgcacccacaccagcagccgccgcccccgccgcccccgcagggtccgcctggccacccaggcgcgcaccacgacccgcactcggacgaggacacgccgacctcggacgacctggagcagttcgccaagcagttcaagcagcggcggatcaaactgggatttacccaagcggacgtggggctggctctgggcaccctgtatggcaacgtgttctcgcagaccaccatctgcaggtttgaggccctgcagctgagcttcaagaacatgtgcaagctgaagcctttgttgaacaagtggttggaggaggcggactcgtcctcgggcagccccacgagcatagacaagatcgcagcgcaagggcgcaagcggaaaaagcggacctccatcgaggtgagcgtcaagggggctctggagagccatttcctcaaatgccccaagccctcggcccaggagatcacctccctcgcggacagcttacagctggagaaggaggtggtgagagtttggttttgtaacaggagacagaaagagaaaaggatgacccctcccggagggactctgccgggcgccgaggatgtgtacggggggagtagggacactccaccacaccacggggtgcagacgcccgtccagtgaactcgagctgggggaggggcagagcgcggggctccccctccccttcggtccttggccctttcccggccctcttgttccctctctaacttctgattgttcttttatttttaattattatttccccgtcccttaaaaagacaaaaaaaataaggcaaaaggaaagcaactaagacactggactatcctttaaaggtagcaggtgtaatgatgtgttttgacctttgcaggcgagtaaccaggcaatggagtggagtgtctcctggagagagtgaggagagtgtgtgatagctagaaagagagagagacagagagatggcaagcactgagataaatacctggcaaaactaaataaattaccaaaaaggaaaaaaaatccaccaaaccatgataaacacaaaatgcagcttcctgatgcttagagttggcacatgctgctgtgtttatttattgtggattcccatcaggaaagaggaaaaaatacacatgttctttcatataggcaaaatttaaccacataaatttgcactgcaagaaaattgaagtttacgtgaacaaattcatgagcatattttctctttctccccaccgttaatttgggagttgccgttttgggggattttgttttgctttgctttattcatcggagagagttgaagccagctcttggccactctccatttctaatgttcttgtgttgccccttcttcgtactgtttgtgaactttggttaccttcacattccccttacgagggtgtaacatctatttgttcctcttaccaaagcaaaaggattggcttcatacaaaatagacaattctctgatttcaggaaatgtgcatggtctacccgctttatcgaaggcaagaatccggtttggaatataaaaataagcattggttgttcttaccagccacaaagtaaacttcattttcaggcagtgtttctgggggaggttatggagggaagaaaaaagaaaaatcgatagtgagtgactgattgcttcattttatcaggcgggcccattgtgaaagagctcaggggaaatgtggaggttaaatatatttccagagttgtccagcagaaagaaagtggcactttgaagagaactagggaagtacatatcttcagatatccctatatagttctctaccttcagttttagtaacaattatgaagaattatttgtgctgacagcagcagttaaactttgtttctctaatagctttttttttacataaaaaaagacccaggaacttaatagtgtatgcataagactgtgttttttagcacacagatacccacagcatacactgacgatctccacgcagtagacaggttttgtcttcactagctcatttgtttatcaagtcatatttagggtcccacaccctcttttcctgtaatttattgcagaatacaccactttgacttggacagctttctgccccctctttcactaaggaaggcaaatgaagtgaaaaaaaaaaatgccattttcaatccttcctttctcccctttgttaatagttttaagtgaatttttgaccttatcttaatggaaaacggttaactccaaacacaaaagactctactggaaagtgtaggtgaaaaaacttgtaactgtattgaaaataaataccattaaactgtgatcagttaaaatttaaaagaaaaatcagcacaaaagggcgctaaaagggaaaacactttttattaatcttaaaagtttgggggtttttttccagttaggtattagataaatttttattttaaaaaatgaaagtctcactaccataaaattatggttcagcatcagattagcattgcactcagtagtctttaaggttttaggaaatatgctttatattgtcttttcaaacacctgtgattgtttcattttccatgtttttgcaagataaatggtgacttataatgggcatatttatttgcctgtatttcatttcccccaatgaatgtcacaaggagatgggcacggagctgcttcgggtgcatcacgctgctcgttcctgaggtatgggaactggcctttagtgaagctatccagagcagggcaaatagccactggtaaagggaggaaatgaatttccagatacttattaccaagtaggtaaggtcagaagctggagttcagagaatgtgtctacagcttctctgactcttataggtttactaagatgaaagttaccactgaaccttaccactatgtatatatgtttaatatctgtcttttgaaatgcagaaatagtttaaatgtttctttgtctatttttctttttttttaatgctacccagggaaatattttcatatcatttttaagtggcctgcctcaatgtatatttatttcttttgaaacaaaaaggttctggaaactgtttttctgtagctttaaatgaataggtgagcaaaatctatatgggatgtaatttttttgttcagtctcttaaaaaatactttgttttggtacatttggttgtgcttgtggggaaaataaaaacgcagagatccttatatatttatgttaaagtaatattttattatctacataaaacagaaatgcacaataccttcatagtttgttctaattattgaaatatctttattttatttttaaagatagtgccaagttttaaggggggaaaaccctagaccttaaattgactgagttgagttgtgtgtaaaacacttcccttcctttatacttcataaagttttggaataaattttatgcatatactgccagatttgatgttcataactttcagaggctttttttttttttaatggagactactggtctaattcactttactttgcaaaaactatcagtcccaaatctttcagtcactatgcctgtagcattaaattgaaatggtcattgggtttgagcttcaatttgcttgccatttcatggtcctacaaagagatgtttgtcccctttaaacatatgcagatatgcctgcatcttctttccaggttaactataccttattcgattgtgctgttttggagaacatcagtggaactaggtggactttgatctctacccataggtcctcaaataatttgggatctacagaaaagcaggatttagtagattattatttttaataatttacaaatatctcttaacaaagaataaccctgatagtatactattgtgagtttactaaatgattagaagtagatcctatacattattcctgtttggtttgcataaaaagatgaattttacaatggtttata

SEQ ID NO: 16313 - DNA, 2017 bp, Homo sapiens
  source 1..2017: mol_type = unassigned DNA
aacttacaaacgcaaggaactctgaaagtgtgcagcaccaccgatcagaagagaaaaccaagggacccgaaatatgctttaattaaattttcttttaaaatgtcactggaaagaacatcttgggaagacggcctggccgatcgccgtgtgaagggcaagccactctggccgagagggagccccacacctcggtctccccagaccggccctggccgggggcatccccctaaacttcggatccctcctcggaaatgggaccctctctgggccgcctcccagcggtggtggcgaggagcaaacgacaccagatttgaaagaagccaacactaaaccacaaatatacaacaaggccattttctcaaacgagagtcagcctttaacgaaatgaccatggttgacacagagatgccattctggcccaccaactttgggatcagctccgtggatctctccgtaatggaagaccactcccactcctttgatatcaagcccttcactactgttgacttctccagcatttctactccacattacgaagacattccattcacaagaacagatccagtggttgcagattacaagtatgacctgaaacttcaagagtaccaaagtgcaatcaaagtggagcctgcatctccaccttattattctgagaagactcagctctacaataagcctcatgaagagccttccaactccctcatggcaattgaatgtcgtgtctgtggagataaagcttctggatttcactatggagttcatgcttgtgaaggatgcaagggtttcttccggagaacaatcagattgaagcttatctatgacagatgtgatcttaactgtcggatccacaaaaaaagtagaaataaatgtcagtactgtcggtttcagaaatgccttgcagtggggatgtctcataatgccatcaggtttgggcggatgccacaggccgagaaggagaagctgttggcggagatctccagtgatatcgaccagctgaatccagagtccgctgacctccgggccctggcaaaacatttgtatgactcatacataaagtccttcccgctgaccaaagcaaaggcgagggcgatcttgacaggaaagacaacagacaaatcaccattcgttatctatgacatgaattccttaatgatgggagaagataaaatcaagttcaaacacatcacccccctgcaggagcagagcaaagaggtggccatccgcatctttcagggctgccagtttcgctccgtggaggctgtgcaggagatcacagagtatgccaaaagcattcctggttttgtaaatcttgacttgaacgaccaagtaactctcctcaaatatggagtccacgagatcatttacacaatgctggcctccttgatgaataaagatggggttctcatatccgagggccaaggcttcatgacaagggagtttctaaagagcctgcgaaagccttttggtgactttatggagcccaagtttgagtttgctgtgaagttcaatgcactggaattagatgacagcgacttggcaatatttattgctgtcattattctcagtggagaccgcccaggtttgctgaatgtgaagcccattgaagacattcaagacaacctgctacaagccctggagctccagctgaagctgaaccaccctgagtcctcacagctgtttgccaagctgctccagaaaatgacagacctcagacagattgtcacggaacacgtgcagctactgcaggtgatcaagaagacggagacagacatgagtcttcacccgctcctgcaggagatctacaaggacttgtactagcagagagtcctgagccactgccaacatttcccttcttccagttgcactattctgagggaaaatctgacacctaagaaatttactgtgaaaaagcattttaaaaagaaaaggttttagaatatgatctattttatgcatattgtttataaagacacatttacaatttacttttaatattaaaaattaccatattatgaaa

SEQ ID NO: 16314 - DNA, 686 bp, Homo sapiens
  source 1..686: mol_type = unassigned DNA
tctgaaagtgtgcagcaccaccgatcagaagagaaaaccaagggacccgaaatatgctttaattaaattttcttttaaaatgtcactggaaagaacatcttgggaagacggcctggccgatcgccgtgtgaagggcaagccactctggccgagagggagccccacacctcggtctccccagaccggccctggccgggggcatccccctaaacttcggatccctcctcggaaatgggaccctctctgggccgcctcccagcggtggtggcgaggagcaaacgacaccagaaatgaccatggttgacacagagatgccattctggcccaccaactttgggatcagctccgtggatctctccgtaatggaagaccactcccactcctttgatatcaagcccttcactactgttgacttctccagcatttctactccacattacgaagacattccattcacaagaacagatccagtggttgcagattacaagtatgacctgaaacttcaagagtaccaaagtgcaatcaaagtggagcctgcatctccaccttattattctgagaagactcagctctacaataagcctcatgaagagccttccaactccctcatggcaattgaatgtcgtgtctgtggagataaagcttctggatttcactatggagttcatgcttgtgaaggatgcaag

SEQ ID NO: 16315 - DNA, 1870 bp, Homo sapiens
  source 1..1870: mol_type = unassigned DNA
cccgcccccgcgccgggcccggctcggcccgacccggctccgccgcgggcaggcggggcccagcgcactcggagcccgagcccgagccgcagccgccgcctggggcgcttgggtcggcctcgaggacaccggagaggggcgccacgccgccgtggccgcagatttgaaagaagccaacactaaaccacaaatatacaacaaggccattttctcaaacgagagtcagcctttaacgaaatgaccatggttgacacagagatgccattctggcccaccaactttgggatcagctccgtggatctctccgtaatggaagaccactcccactcctttgatatcaagcccttcactactgttgacttctccagcatttctactccacattacgaagacattccattcacaagaacagatccagtggttgcagattacaagtatgacctgaaacttcaagagtaccaaagtgcaatcaaagtggagcctgcatctccaccttattattctgagaagactcagctctacaataagcctcatgaagagccttccaactccctcatggcaattgaatgtcgtgtctgtggagataaagcttctggatttcactatggagttcatgcttgtgaaggatgcaagggtttcttccggagaacaatcagattgaagcttatctatgacagatgtgatcttaactgtcggatccacaaaaaaagtagaaataaatgtcagtactgtcggtttcagaaatgccttgcagtggggatgtctcataatgccatcaggtttgggcggatgccacaggccgagaaggagaagctgttggcggagatctccagtgatatcgaccagctgaatccagagtccgctgacctccgggccctggcaaaacatttgtatgactcatacataaagtccttcccgctgaccaaagcaaaggcgagggcgatcttgacaggaaagacaacagacaaatcaccattcgttatctatgacatgaattccttaatgatgggagaagataaaatcaagttcaaacacatcacccccctgcaggagcagagcaaagaggtggccatccgcatctttcagggctgccagtttcgctccgtggaggctgtgcaggagatcacagagtatgccaaaagcattcctggttttgtaaatcttgacttgaacgaccaagtaactctcctcaaatatggagtccacgagatcatttacacaatgctggcctccttgatgaataaagatggggttctcatatccgagggccaaggcttcatgacaagggagtttctaaagagcctgcgaaagccttttggtgactttatggagcccaagtttgagtttgctgtgaagttcaatgcactggaattagatgacagcgacttggcaatatttattgctgtcattattctcagtggagaccgcccaggtttgctgaatgtgaagcccattgaagacattcaagacaacctgctacaagccctggagctccagctgaagctgaaccaccctgagtcctcacagctgtttgccaagctgctccagaaaatgacagacctcagacagattgtcacggaacacgtgcagctactgcaggtgatcaagaagacggagacagacatgagtcttcacccgctcctgcaggagatctacaaggacttgtactagcagagagtcctgagccactgccaacatttcccttcttccagttgcactattctgagggaaaatctgacacctaagaaatttactgtgaaaaagcattttaaaaagaaaaggttttagaatatgatctattttatgcatattgtttataaagacacatttacaatttacttttaatattaaaaattaccatattatgaaa

SEQ ID NO: 16316 - DNA, 1722 bp, Homo sapiens
  source 1..1722: mol_type = unassigned DNA
gccgcgggcaggcggggcccagcgcactcggagcccgagcccgagccgcagccgccgcctggggcgcttgggtcggcctcgaggacaccggagaggggcgccacgccgccgtggccgcagaaatgaccatggttgacacagagatgccattctggcccaccaactttgggatcagctccgtggatctctccgtaatggaagaccactcccactcctttgatatcaagcccttcactactgttgacttctccagcatttctactccacattacgaagacattccattcacaagaacagatccagtggttgcagattacaagtatgacctgaaacttcaagagtaccaaagtgcaatcaaagtggagcctgcatctccaccttattattctgagaagactcagctctacaataagcctcatgaagagccttccaactccctcatggcaattgaatgtcgtgtctgtggagataaagcttctggatttcactatggagttcatgcttgtgaaggatgcaagggtttcttccggagaacaatcagattgaagcttatctatgacagatgtgatcttaactgtcggatccacaaaaaaagtagaaataaatgtcagtactgtcggtttcagaaatgccttgcagtggggatgtctcataatgccatcaggtttgggcggatgccacaggccgagaaggagaagctgttggcggagatctccagtgatatcgaccagctgaatccagagtccgctgacctccgggccctggcaaaacatttgtatgactcatacataaagtccttcccgctgaccaaagcaaaggcgagggcgatcttgacaggaaagacaacagacaaatcaccattcgttatctatgacatgaattccttaatgatgggagaagataaaatcaagttcaaacacatcacccccctgcaggagcagagcaaagaggtggccatccgcatctttcagggctgccagtttcgctccgtggaggctgtgcaggagatcacagagtatgccaaaagcattcctggttttgtaaatcttgacttgaacgaccaagtaactctcctcaaatatggagtccacgagatcatttacacaatgctggcctccttgatgaataaagatggggttctcatatccgagggccaaggcttcatgacaagggagtttctaaagagcctgcgaaagccttttggtgactttatggagcccaagtttgagtttgctgtgaagttcaatgcactggaattagatgacagcgacttggcaatatttattgctgtcattattctcagtggagaccgcccaggtttgctgaatgtgaagcccattgaagacattcaagacaacctgctacaagccctggagctccagctgaagctgaaccaccctgagtcctcacagctgtttgccaagctgctccagaaaatgacagacctcagacagattgtcacggaacacgtgcagctactgcaggtgatcaagaagacggagacagacatgagtcttcacccgctcctgcaggagatctacaaggacttgtactagcagagagtcctgagccactgccaacatttcccttcttccagttgcactattctgagggaaaatctgacacctaagaaatttactgtgaaaaagcattttaaaaagaaaaggttttagaatatgatctattttatgcatattgtttataaagacacatttacaattt

SEQ ID NO: 16317 - DNA, 428 bp, Homo sapiens
  source 1..428: mol_type = unassigned DNA
ctttgtgggctcctgcaagtgccaggcgctgaccactcctcctgggagcctaactgaggggggtagaggcagcagaggttaacagaaatctcaggtcccttggtggaaggtgggtgtgtagtcgtggtactttacgcctcggtgtttagggaggagcctaaggtaaggagtcagaaacggggagtaaccgagctgcggcttttatataaggtcagtggtaggtaaggaaggggccttaacctctgctggtgaccagaagcctgcatttctgcattctgcttaattccctttccttagaaatgaccatggttgacacagagatgccattctggcccaccaactttgggatcagctccgtggatctctccgtaatggaagaccactcccactcctttgatatcaagcccttcactactgttgacttctcc

SEQ ID NO: 16318 - DNA, 2006 bp, Homo sapiens
  source 1..2006: mol_type = unassigned DNA
ctttgtgggctcctgcaagtgccaggcgctgaccactcctcctgggagcctaactgaggggggtagaggcagcagaggttaacagaaatctcaggtcccttggtggaaggtgggtgtgtagtcgtggtactttacgcctcggtgtttagggaggagcctaaggtaaggagtcagaaacggggagtaaccgagctgcggcttttatataaggtcagtggtaggtaaggaaggggccttaacctctgctggtgaccagaagcctgcatttctgcattctgcttaattccctttccttagatttgaaagaagccaacactaaaccacaaatatacaacaaggccattttctcaaacgagagtcagcctttaacgaaatgaccatggttgacacagagatgccattctggcccaccaactttgggatcagctccgtggatctctccgtaatggaagaccactcccactcctttgatatcaagcccttcactactgttgacttctccagcatttctactccacattacgaagacattccattcacaagaacagatccagtggttgcagattacaagtatgacctgaaacttcaagagtaccaaagtgcaatcaaagtggagcctgcatctccaccttattattctgagaagactcagctctacaataagcctcatgaagagccttccaactccctcatggcaattgaatgtcgtgtctgtggagataaagcttctggatttcactatggagttcatgcttgtgaaggatgcaagggtttcttccggagaacaatcagattgaagcttatctatgacagatgtgatcttaactgtcggatccacaaaaaaagtagaaataaatgtcagtactgtcggtttcagaaatgccttgcagtggggatgtctcataatgccatcaggtttgggcggatgccacaggccgagaaggagaagctgttggcggagatctccagtgatatcgaccagctgaatccagagtccgctgacctccgggccctggcaaaacatttgtatgactcatacataaagtccttcccgctgaccaaagcaaaggcgagggcgatcttgacaggaaagacaacagacaaatcaccattcgttatctatgacatgaattccttaatgatgggagaagataaaatcaagttcaaacacatcacccccctgcaggagcagagcaaagaggtggccatccgcatctttcagggctgccagtttcgctccgtggaggctgtgcaggagatcacagagtatgccaaaagcattcctggttttgtaaatcttgacttgaacgaccaagtaactctcctcaaatatggagtccacgagatcatttacacaatgctggcctccttgatgaataaagatggggttctcatatccgagggccaaggcttcatgacaagggagtttctaaagagcctgcgaaagccttttggtgactttatggagcccaagtttgagtttgctgtgaagttcaatgcactggaattagatgacagcgacttggcaatatttattgctgtcattattctcagtggagaccgcccaggtttgctgaatgtgaagcccattgaagacattcaagacaacctgctacaagccctggagctccagctgaagctgaaccaccctgagtcctcacagctgtttgccaagctgctccagaaaatgacagacctcagacagattgtcacggaacacgtgcagctactgcaggtgatcaagaagacggagacagacatgagtcttcacccgctcctgcaggagatctacaaggacttgtactagcagagagtcctgagccactgccaacatttcccttcttccagttgcactattctgagggaaaatctgacacctaagaaatttactgtgaaaaagcattttaaaaagaaaaggttttagaatatgatctattttatgcatattgtttataaagacacatttacaatttacttttaatattaaaaattaccatattatgaaa

SEQ ID NO: 16319 - DNA, 2029 bp, Homo sapiens
  source 1..2029: mol_type = unassigned DNA
ccttaacctctgctggtgaccagaagcctgcatttctgcattctgcttaattccctttccttagatttgaaagaagccaacactaaaccacaaatatacaacaaggccattttctcaaacgagagtcagcctttaacgtgtttcaggatgattcttgtctctggatgtcgctgtcatgatgggagaggaattagtaaattcccaggtcagtttacactgcagagtgatcttgatctgcatgaatcagtaaggatgggctggataaacaagttggaaccacagttatgagtaccatgacattaactgaaacaaatgagaagggattgaaaaatcggcggttaagtgtcttttaaggtcatttccaacaaaactacaaaggacctatgaaaggcttttcagaaatgaccatggttgacacagagatgccattctggcccaccaactttgggatcagctccgtggatctctccgtaatggaagaccactcccactcctttgatatcaagcccttcactactgttgacttctccagcatttctactccacattacgaagacattccattcacaagaacagatccagtggttgcagattacaagtatgacctgaaacttcaagagtaccaaagtgcaatcaaagtggagcctgcatctccaccttattattctgagaagactcagctctacaataagcctcatgaagagccttccaactccctcatggcaattgaatgtcgtgtctgtggagataaagcttctggatttcactatggagttcatgcttgtgaaggatgcaagggtttcttccggagaacaatcagattgaagcttatctatgacagatgtgatcttaactgtcggatccacaaaaaaagtagaaataaatgtcagtactgtcggtttcagaaatgccttgcagtggggatgtctcataatgccatcaggtttgggcggatgccacaggccgagaaggagaagctgttggcggagatctccagtgatatcgaccagctgaatccagagtccgctgacctccgggccctggcaaaacatttgtatgactcatacataaagtccttcccgctgaccaaagcaaaggcgagggcgatcttgacaggaaagacaacagacaaatcaccattcgttatctatgacatgaattccttaatgatgggagaagataaaatcaagttcaaacacatcacccccctgcaggagcagagcaaagaggtggccatccgcatctttcagggctgccagtttcgctccgtggaggctgtgcaggagatcacagagtatgccaaaagcattcctggttttgtaaatcttgacttgaacgaccaagtaactctcctcaaatatggagtccacgagatcatttacacaatgctggcctccttgatgaataaagatggggttctcatatccgagggccaaggcttcatgacaagggagtttctaaagagcctgcgaaagccttttggtgactttatggagcccaagtttgagtttgctgtgaagttcaatgcactggaattagatgacagcgacttggcaatatttattgctgtcattattctcagtggagaccgcccaggtttgctgaatgtgaagcccattgaagacattcaagacaacctgctacaagccctggagctccagctgaagctgaaccaccctgagtcctcacagctgtttgccaagctgctccagaaaatgacagacctcagacagattgtcacggaacacgtgcagctactgcaggtgatcaagaagacggagacagacatgagtcttcacccgctcctgcaggagatctacaaggacttgtactagcagagagtcctgagccactgccaacatttcccttcttccagttgcactattctgagggaaaatctgacacctaagaaatttactgtgaaaaagcattttaaaaagaaaaggttttagaatatgatctattttatgcatattgtttataaagacacatttacaatttacttttaatattaaaaattaccatatta

SEQ ID NO: 16320 - DNA, 1600 bp, Homo sapiens
  source 1..1600: mol_type = unassigned DNA
ttctgcttaattccctttccttagatttgaaagaagccaacactaaaccacaaatatacaacaaggccattttctcaaacgagagtcagcctttaacgaaatgaccatggttgacacagagatgccattctggcccaccaactttgggatcagctccgtggatctctccgtaatggaagaccactcccactcctttgatatcaagcccttcactactgttgacttctccagcatttctactccacattacgaagacattccattcacaagaacagatccagtggttgcagattacaagtatgacctgaaacttcaagagtaccaaagtgcaatcaaagtggagcctgcatctccaccttattattctgagaagactcagctctacaataagcctcatgaagagccttccaactccctcatggcaattgaatgtcgtgtctgtggagataaagcttctggatttcactatggagttcatgcttgtgaaggatgcaagggtttcttccggagaacaatcagattgaagcttatctatgacagatgtgatcttaactgtcggatccacaaaaaaagtagaaataaatgtcagtactgtcggtttcagaaatgccttgcagtggggatgtctcataatgccatcaggtttgggcggatgccacaggccgagaaggagaagctgttggcggagatctccagtgatatcgaccagctgaatccagagtccgctgacctccgggccctggcaaaacatttgtatgactcatacataaagtccttcccgctgaccaaagcaaaggcgagggcgatcttgacaggaaagacaacagacaaatcagttagttctcttctgctgtcttcattgggggaggcgggaagttgttttgggtttttgtttctttgagtaaatggtttactgcgctacaaatgcacacacagaatattgttcaactgttggctgttaacatattgcaggctgagtctgaaacgcaggaagtgttttcagatagcacaagtcaacattattttgaaaagggagaaaagtccataaagtttttgagaatagtgtaacaatgtattggtcatcctaactttaatgaatgaacttaagccccctgagcctatcaccctcttttaggatccatctcctttctcggcatcaaaataactggccacagcaatattcattcaagcagccttgctttcctctgggaagaacccgacctaggtttagaaaaggtattgaatcccactatttcacctttcaggagaactaccagagttacctctttttttttttttttttttttttttgagatgtcgtctcactttgtcgcccaggctggagtgcagtggcacaatctcggctcaccgcaacctccgcctcccaggttaaagcgattatcatgcctcagcatcccgagtagctgggattacaggtgtgcacgaccatgcctggctaatctttgtatttttagtagagacggggtttcaccttgttgatcaggctggtctagagttacctcttaagaagttcaacatgaggcataaaaatagattctagatattatgttacctttctttccttgtagcattcttgatt

SEQ ID NO: 16321 - DNA, 560 bp, Homo sapiens
  source 1..560: mol_type = unassigned DNA
ttagtatacaatgaatttataaatgtaaccatacaatttcatgcttagagaacgttttctctccattctctctacctttagaccattctgcagtttaaatcttgaaccaaaatgtcatttaaccatccttctgaacgataactccataattaactcaagcaccaaataagtcatctagctcttgatgatttgaaagaagccaacactaaaccacaaatatacaacaaggccattttctcaaacgagagtcagcctttaacgaaatgaccatggttgacacagagatgccattctggcccaccaactttgggatcagctccgtggatctctccgtaatggaagaccactcccactcctttgatatcaagcccttcactactgttgacttctccagcatttctactccacattacgaagacattccattcacaagaacagatccagtggttgcagattacaagtatgacctgaaacttcaagagtaccaaagtgcaatcaaagtggagcctgcatctccaccttattattctgagaagactcagctctacaataagcctcat

SEQ ID NO: 16322 - DNA, 1122 bp, Homo sapiens
  source 1..1122: mol_type = unassigned DNA
gaagccaacactaaaccacaaatatacaacaaggccattttctcaaacgagagtcagcctttaacgaaatgaccatggttgacacagagatgccattctggcccaccaactttgggatcagctccgtggatctctccgtaatggaagaccactcccactcctttgatatcaagcccttcactactgttgacttctccagcatttctactccacattacgaagacattccattcacaagaacagatccagtggttgcagattacaagtatgacctgaaacttcaagagtaccaaagtgcaatcaaagtggagcctgcatctccaccttattattctgagaagactcagctctacaataagcctcatgaagagccttccaactccctcatggcaattgaatgtcgtgtctgtggagataaagcttctggatttcactatggagttcatgcttgtgaaggatgcaagggtttcttccggagaacaatcagattgaagcttatctatgacagatgtgatcttaactgtcggatccacaaaaaaagtagaaataaatgtcagtactgtcggtttcagaaatgccttgcagtggggatgtctcataatgccatcaggtttgggcggatgccacaggccgagaaggagaagctgttggcggagatctccagtgatatcgaccagctgaatccagagtccgctgacctccgggccctggcaaaacatttgtatgactcatacataaagtccttcccgctgaccaaagcaaaggcgagggcgatcttgacaggaaagacaacagacaaatcaaccgcccaggtttgctgaatgtgaagcccattgaagacattcaagacaacctgctacaagccctggagctccagctgaagctgaaccaccctgagtcctcacagctgtttgccaagctgctccagaaaatgacagacctcagacagattgtcacggaacacgtgcagctactgcaggtgatcaagaagacggagacagacatgagtcttcacccgctcctgcaggagatctacaaggacttgtactagcagagagtcctgagccactgccaacatttcccttcttccagttgcactattctgagggaaaatctgacacc

SEQ ID NO: 16323 - DNA, 1705 bp, Homo sapiens
  source 1..1705: mol_type = unassigned DNA
actcatgggtgtattcacaaattctgttacttcaagtctttttcttttaacggattgatcttttgctagatagagacaaaatatcagtgtgaattacagcaaacccctattccatgctgttatgggtgaaactctgggagattctcctattgacccagaaagcgattccttcactgatacactgtctgcaaacatatcacaagaaatgaccatggttgacacagagatgccattctggcccaccaactttgggatcagctccgtggatctctccgtaatggaagaccactcccactcctttgatatcaagcccttcactactgttgacttctccagcatttctactccacattacgaagacattccattcacaagaacagatccagtggttgcagattacaagtatgacctgaaacttcaagagtaccaaagtgcaatcaaagtggagcctgcatctccaccttattattctgagaagactcagctctacaataagcctcatgaagagccttccaactccctcatggcaattgaatgtcgtgtctgtggagataaagcttctggatttcactatggagttcatgcttgtgaaggatgcaagggtttcttccggagaacaatcagattgaagcttatctatgacagatgtgatcttaactgtcggatccacaaaaaaagtagaaataaatgtcagtactgtcggtttcagaaatgccttgcagtggggatgtctcataatgccatcaggtttgggcggatgccacaggccgagaaggagaagctgttggcggagatctccagtgatatcgaccagctgaatccagagtccgctgacctccgggccctggcaaaacatttgtatgactcatacataaagtccttcccgctgaccaaagcaaaggcgagggcgatcttgacaggaaagacaacagacaaatcagttagttctcttctgctgtcttcattgggggaggcgggaagttgttttgggtttttgtttctttgagtaaatggtttactgcgctacaaatgcacacacagaatattgttcaactgttggctgttaacatattgcaggctgagtctgaaacgcaggaagtgttttcagatagcacaagtcaacattattttgaaaagggagaaaagtccataaagtttttgagaatagtgtaacaatgtattggtcatcctaactttaatgaatgaacttaagccccctgagcctatcaccctcttttaggatccatctcctttctcggcatcaaaataactggccacagcaatattcattcaagcagccttgctttcctctgggaagaacccgacctaggtttagaaaaggtattgaatcccactatttcacctttcaggagaactaccagagttacctctttttttttttttttttttttttttgagatgtcgtctcactttgtcgcccaggctggagtgcagtggcacaatctcggctcaccgcaacctccgcctcccaggttaaagcgattatcatgcctcagcatcccgagtagctgggattacaggtgtgcacgaccatgcctggctaatctttgtatttttagtagagacggggtttcaccttgttgatcaggctggtctagagttacctcttaagaagttcaacatgaggcataaaaatagattctagatattatgttacctttctttccttgtagcattcttgatt

SEQ ID NO: 16324 - DNA, 1850 bp, Homo sapiens
  source 1..1850: mol_type = unassigned DNA
actcatgggtgtattcacaaattctgttacttcaagtctttttcttttaacggattgatcttttgctagatagagacaaaatatcagtgtgaattacagcaaacccctattccatgctgttatgggtgaaactctgggagattctcctattgacccagaaagcgattccttcactgatacactgtctgcaaacatatcacaagaaatgaccatggttgacacagagatgccattctggcccaccaactttgggatcagctccgtggatctctccgtaatggaagaccactcccactcctttgatatcaagcccttcactactgttgacttctccagcatttctactccacattacgaagacattccattcacaagaacagatccagtggttgcagattacaagtatgacctgaaacttcaagagtaccaaagtgcaatcaaagtggagcctgcatctccaccttattattctgagaagactcagctctacaataagcctcatgaagagccttccaactccctcatggcaattgaatgtcgtgtctgtggagataaagcttctggatttcactatggagttcatgcttgtgaaggatgcaagggtttcttccggagaacaatcagattgaagcttatctatgacagatgtgatcttaactgtcggatccacaaaaaaagtagaaataaatgtcagtactgtcggtttcagaaatgccttgcagtggggatgtctcataatgccatcaggtttgggcggatgccacaggccgagaaggagaagctgttggcggagatctccagtgatatcgaccagctgaatccagagtccgctgacctccgggccctggcaaaacatttgtatgactcatacataaagtccttcccgctgaccaaagcaaaggcgagggcgatcttgacaggaaagacaacagacaaatcaccattcgttatctatgacatgaattccttaatgatgggagaagataaaatcaagttcaaacacatcacccccctgcaggagcagagcaaagaggtggccatccgcatctttcagggctgccagtttcgctccgtggaggctgtgcaggagatcacagagtatgccaaaagcattcctggttttgtaaatcttgacttgaacgaccaagtaactctcctcaaatatggagtccacgagatcatttacacaatgctggcctccttgatgaataaagatggggttctcatatccgagggccaaggcttcatgacaagggagtttctaaagagcctgcgaaagccttttggtgactttatggagcccaagtttgagtttgctgtgaagttcaatgcactggaattagatgacagcgacttggcaatatttattgctgtcattattctcagtggagaccgcccaggtttgctgaatgtgaagcccattgaagacattcaagacaacctgctacaagccctggagctccagctgaagctgaaccaccctgagtcctcacagctgtttgccaagctgctccagaaaatgacagacctcagacagattgtcacggaacacgtgcagctactgcaggtgatcaagaagacggagacagacatgagtcttcacccgctcctgcaggagatctacaaggacttgtactagcagagagtcctgagccactgccaacatttcccttcttccagttgcactattctgagggaaaatctgacacctaagaaatttactgtgaaaaagcattttaaaaagaaaaggttttagaatatgatctattttatgcatattgtttataaagacacatttacaatttacttttaatattaaaaattaccatattatgaaattgctgatagta

SEQ ID NO: 16325 - DNA, 2002 bp, Homo sapiens
  source 1..2002: mol_type = unassigned DNA
agcaaacccctattccatgctgttatgggtgaaactctgggagattctcctattgacccagaaagcgattccttcactgatacactgtctgcaaacatatcacaagtgtttcaggatgattcttgtctctggatgtcgctgtcatgatgggagaggaattagtaaattcccaggtcagtttacactgcagagtgatcttgatctgcatgaatcagtaaggatgggctggataaacaagttggaaccacagttatgagtaccatgacattaactgaaacaaatgagaagggattgaaaaatcggcggttaagtgtcttttaaggtcatttccaacaaaactacaaaggacctatgaaaggcttttcagaaatgaccatggttgacacagagatgccattctggcccaccaactttgggatcagctccgtggatctctccgtaatggaagaccactcccactcctttgatatcaagcccttcactactgttgacttctccagcatttctactccacattacgaagacattccattcacaagaacagatccagtggttgcagattacaagtatgacctgaaacttcaagagtaccaaagtgcaatcaaagtggagcctgcatctccaccttattattctgagaagactcagctctacaataagcctcatgaagagccttccaactccctcatggcaattgaatgtcgtgtctgtggagataaagcttctggatttcactatggagttcatgcttgtgaaggatgcaagggtttcttccggagaacaatcagattgaagcttatctatgacagatgtgatcttaactgtcggatccacaaaaaaagtagaaataaatgtcagtactgtcggtttcagaaatgccttgcagtggggatgtctcataatgccatcaggtttgggcggatgccacaggccgagaaggagaagctgttggcggagatctccagtgatatcgaccagctgaatccagagtccgctgacctccgggccctggcaaaacatttgtatgactcatacataaagtccttcccgctgaccaaagcaaaggcgagggcgatcttgacaggaaagacaacagacaaatcaccattcgttatctatgacatgaattccttaatgatgggagaagataaaatcaagttcaaacacatcacccccctgcaggagcagagcaaagaggtggccatccgcatctttcagggctgccagtttcgctccgtggaggctgtgcaggagatcacagagtatgccaaaagcattcctggttttgtaaatcttgacttgaacgaccaagtaactctcctcaaatatggagtccacgagatcatttacacaatgctggcctccttgatgaataaagatggggttctcatatccgagggccaaggcttcatgacaagggagtttctaaagagcctgcgaaagccttttggtgactttatggagcccaagtttgagtttgctgtgaagttcaatgcactggaattagatgacagcgacttggcaatatttattgctgtcattattctcagtggagaccgcccaggtttgctgaatgtgaagcccattgaagacattcaagacaacctgctacaagccctggagctccagctgaagctgaaccaccctgagtcctcacagctgtttgccaagctgctccagaaaatgacagacctcagacagattgtcacggaacacgtgcagctactgcaggtgatcaagaagacggagacagacatgagtcttcacccgctcctgcaggagatctacaaggacttgtactagcagagagtcctgagccactgccaacatttcccttcttccagttgcactattctgagggaaaatctgacacctaagaaatttactgtgaaaaagcattttaaaaagaaaaggttttagaatatgatctattttatgcatattgtttataaagacacatttacaatttacttttaatattaaaaattaccatattatgaaa

SEQ ID NO: 16326 - DNA, 1329 bp, Homo sapiens
  source 1..1329: mol_type = unassigned DNA
atgaccatggttgacacagagatgccattctggcccaccaactttgggatcagctccgtggatctctccgtaatggaagaccactcccactcctttgatatcaagcccttcactactgttgacttctccagcatttctactccacattacgaagacattccattcacaagaacagatccagtggttgcagattacaagtatgacctgaaacttcaagagtaccaaagtgcaatcaaagtggagcctgcatctccaccttattattctgagaagactcagctctacaataagcctcatgaagagccttccaactccctcatggcaattgaatgtcgtgtctgtggagataaagcttctggatttcactatggagttcatgcttgtgaaggatgcaagggtttcttccggagaacaatcagattgaagcttatctatgacagatgtgatcttaactgtcggatccacaaaaaaagtagaaataaatgtcagtactgtcggtttcagaaatgccttgcagtggggatgtctcataatgaggaactacaaaaggatagttattagattgccaaatcctgcagaacctccagcaggcacaagttggtttttctccctcaagaaagagaagtgagccaagcgtggtggtgcatgcctgtggtcccagctactcaggaggctgagccatcaggtttgggcggatgccacaggccgagaaggagaagctgttggcggagatctccagtgatatcgaccagctgaatccagagtccgctgacctccgggccctggcaaaacatttgtatgactcatacataaagtccttcccgctgaccaaagcaaaggcgagggcgatcttgacaggaaagacaacagacaaatcaccattcgttatctatgacatgaattccttaatgatgggagaagataaaatcaagttcaaacacatcacccccctgcaggagcagagcaaagaggtggccatccgcatctttcagggctgccagtttcgctccgtggaggctgtgcaggagatcacagagtatgccaaaagcattcctggttttgtaaatcttgacttgaacgaccaagtaactctcctcaaatatggagtccacgagatcatttacacaatgctggcctccttgatgaataaagatggggttctcatatccgagggccaaggcttcatgacaagggagtttctaaagagcctgcgaaagccttttggtgactttatggagcccaagtttgagtttgctgtgaagttcaatgcactggaattagatgacagcgacttggcaatatttattgctgtcattattctcagtggag

SEQ ID NO: 16327 - DNA, 6434 bp, Homo sapiens
  source 1..6434: mol_type = unassigned DNA
cgcgcttgggcggcggaggctgcagctacctcggcgccggctcggctctaggacgtgtcgggctgcacgggtcgggggcggctccctgctgcttccgagcctagccgcctggccttcggcatttgcagacacactgccctccagaaacgatgggtgtcgctagatccagctgggactctgccagcctccggcactcagtctaagagaagggccatcttccagccctgctgtccctgcctgtcatggccacattcggctgctgtctgcatgtctggggacacagggcacccagccccagccctgagaagttaagccaggccttctggctcagttccacaggggcactccagaccccaggcccctttcagagcaaaagcaactgatgctatgggagaagcccctgcccacctgtccactcgcctggcactgcccactctgagacccatgcactgggttcccctggaggtgccaaccctgtgagtccctccctgtcccctgacgctgagaaggccctgccaacccccaccatgtgtgaggtgatgcccacaatcaatgagggggaccgcctgggtccccctcatggcgccgatgctgacgccaacttcgagcagctgatggtgaacatgctggacgagcgggagaagttgctggagtctcttcgggagagtcaggagaccttggcggccacacagagccggctccaggatgccatacacgagcgggaccagctccagcgccaccttaactccgccctcccccaggaatttgccaccttaacccgggagctgagcatgtgtcgggagcagcttctagagcgggaggaagagatatcagaactgaaagcagaacggaataacacacggctgcttctggaacatctggagtgcctggtgtcccgccatgaacggtcactgcggatgactgtggtgaagcgccaggcccagtcaccttcgggggtctccagtgaggtggaggtgctgaaggccctcaagtcactgtttgagcaccacaaggccctggatgagaaggtgcgagagcggctccgggcagcgctggagcgagtcaccaccttggaggagcagctggcaggtgcccaccagcaggtgtctgccctgcagcagggggcaggggtgcgggatggagcggcagaagaggaggggactgtggagctggggccgaaacgcctgtggaaggaggatacgggccgggtagaggagctgcaggagctcctggagaagcagaactttgagttgagccaggcccgggagcgactggtcaccctaacaacaaccgtgactgaactcgaggaggacctgggcacggcccgccgggacctcatcaagtcggaggagctgagcagcaagcatcagcgggacctccgggaggctctggcccagaaggaggacatggaagagcggattactacactggagaagcgctacctggctgctcagcgtgaggcaacatccatccatgacctcaatgacaagctggagaatgagctggccaacaaggagtccctgcaccgccagtgtgaggagaaggcccgacacctgcaggagctgctggaggtggcagagcagaagctgcagcagacgatgcgcaaggcagagacgctgccagaggtggaggctgagctggcccagagaattgcagccctcaccaaggctgaagaacggcatggcaacattgaggagcacctgcggcagctggagggacagctggaggagaagaaccaggagctggcacgggtgcgccagcgggaaaagatgaatgaggaccacaacaagcggctgtcggacacagtggaccggctgctcagcgagtccaacgagcgtctgcagctccacctgaaggagcgcatggctgccctggaggagaagggccgcctgtctgaagagattgagaagctgcgccaagaggtggaccagctgaagggccgaggggggccgtttgtggatggcgtccactccaggtcgcacatgggcagtgcagcagacgtgcggttctccctgggcacaaccacacacgcacccccaggcgtgcatcgccgctactcggcattgagggaagagtctgccaaggactgggagacttctccactgcctgggatgctggccccggcagctggccctgcctttgacagtgaccctgagatctccgacgtggatgaggatgagccagggggtctggtgggctctgcggatgttgtctcccccagcggccactcagatgcccagaccctggccatgatgctgcaggagcagctggatgccatcaatgaggaaatcaggatgattcaggaagagaaggagtccacggagctccgcgcggaggagattgagacgcgtgtaaccagtggcagcatggaagccctaaacctgaagcagctgcgcaagcgtggttccatccccacctctctgacggccctgtccctggccagcgcgtccccaccactcagcggccgctccacacctaagctcacctcccgcagtgctgcccaggacctggaccgaatgggggtcatgaccctgcccagtgacttaagaaagcataggaggaagctgctgtcgccagtgtctcgggaagagaaccgagaggataaagccaccataaaatgtgagacttctcctccttcctcacccaggacgctgcggctagagaagcttggccacccagccctgagccaggaagaaggcaagagtgccttggaggatcagggcagcaaccccagcagcagcaacagcagccaggactccctgcacaagggcgccaagcgcaagggcatcaagtcgtccattggccgcctgtttgggaagaaggagaagggcaggctgatccagctgagtcgggatggagccacaggccatgttctgctaacagactccgaattcagtatgcaggagcctatggtgcctgccaagctggggacccaggcagagaaggaccggcggctaaagaagaaacaccagctgcttgaagatgcccgcaggaaaggaatgccctttgcccagtgggatggtcctactgtggtctcctggttggagctctgggtggggatgcctgcctggtatgtggcagcctgccgggccaacgtcaagagtggtgccatcatgtccgctctgtcggacacagagatccagcgggagatcggcatcagcaatgccctgcaccggctcaagctccgcctggccattcaggagatggtgtcattgaccagcccctctgccccacccacctccaggacttcttctgggaatgtctgggtcacccatgaagagatggaaactctggaaacatctactaaaacagacagtgaggagggcagctgggctcagaccctggcctatggggacatgaaccatgagtggattgggaatgaatggctacccagcctggggctcccgcagtaccgcagctacttcatggagtgcctggtggacgcccgcatgctggaccacctcaccaagaaggacctgcgggtccacctgaagatggtggacagcttccatcgaaccagtcttcagtatggcatcatgtgtctgaagaggctgaattatgaccggaaggagctggagaagaggcgagaggagagccagcatgagatcaaggatgtgttagtctggaccaacgaccaggtggttcattgggtccagtctattgggctccgggactacgcaggaaacctgcatgagagtggtgtgcatggagccttgctggccctggacgagaacttcgaccacaacacactggccctgatcctccagatccccacacagaacacccaggcacgccaagtgatggaaagagagttcaataacctgttggccttgggcacagaccggaagctggatgacggggatgacaaggtgtttcgccgcgcgccctcctggaggaagcgcttccggccgcgggagcaccacggtcgcggcggcatgctcagcgcttccgcggagaccctcccggcgggcttccgtgtgtccaccctggggaccctgcagcccccaccggccccgccaaagaagatcatgcctgaagctcactcccactatctctacggacacatgctctccgccttccgggactagccatggcccccagggctggcttcctccttctgggtttcacaggctcctctggccctgacccctcttgctcgttccccttccttccgcagctcctagtctcgtccgtgactttccggttgccctggatctcagaatatattcgtccaccccctcggcaccccattaccccgagtcccaccgtgtgtccgttgtaagtccggtggatgtggctggggtttcctggtattgtggaggcacccaggttgtccatgcttgggattctgggggaaggagagaagggcagctcagggtggatgtgaagccacccttcctcttctggacccagcctggtctgcactgcaacctccaccaggaccaggatcctgggccacaggctgggatggtccttccaagaaagggtcatttcagacgcagccctgcttgggctattcaatcttagggtgtctatccacgtctggctgtgccaaatggtctggcagctggttttggcatccccagcatcaccactctcccaacccatcaccgtgactgcagttcctgcccccattctcttggggtcagggaggggctgggaagggctactgaaggccccattctcccacaggatggtgaggctgggaggaggaagactgaggtagagattccaggccctggcataagctgaatcccaaatttgagtttgggaagaaccagagagaaatggatccctgagctctgagccaagggtgaggatggggaaactctaagctcccacctaataagaagcataggcagaccagccagagggagagccaatggcctctggtagccttaagcccaaagggcagtgggaatgtcccctgccccaaccatcgggtggagctcctgctgggctatggggaagggaggttgtgcggatcttgactctagggcagaacagatctaaccatgcattgctagctctgctcccagcatcccttccccttctctcctcctctgcctcacttctttagtaatcccaaccctataaaaatgaacctaatgggtggattgaatatacattgagcccaaagtcaagtttggggaaaaggcagactaaggcctcctttctctgacctcccaggaagaaaatagcttctcctacagtgattcatgtcccaggtccaggaaatccaatgttggtgaaggcagccactctcttgcttgtccccaaatcacctaaccctcatccagggctattttggtgggcagggactgcctcctcccggaattcctaagatccgcccagctgccaccattttcattgctttccccagcagcatgatgggaacccaagctgagggatacaggtcctgatttggtaggaatattattcccaagaaatacccgctcctcacctactccctcatcctaccaaggtgcctgaaaatgttcaagacttatgttcagggtgggatgatggaaccgagggcttcatcaaagtgagaggaaaggaaaagcatctggcatgtgtttcttggataggggccagtgcagtgccatcctacaggtggctggagcagctgctttgcaacctgatcaccttgagttctgagcagggactaggcttgcaggtgagataatgggccagggcacccagtccagaaggagcaatggcacctgggcagtgccagggcttaaagcccgctgctccttttcggtagaggagaggcccatcactggtgtggtggggtgggctctcccttaggcttgggcaaggcagccacctgcccttgctctcccttagtgttccctggcctccctgccatcaggttgctgggagtggagatggagggattattgagcagaaaatgagttggatggagataaacagctcccatccctgggtaatggatggtaagatgatggagattcctaagattggtggagttgggcaatgcatagccatctgactccttcagggtgctcttgatgggctggctgtaagggagactcagtcccagcctctcccctctacaactcctgccactgttggccatgtcgtaaggcagcagctgtgccaggatagctgggtccattcagagcaccttgagaagtgttgcagggaggtgttaagaagagaactctgtgcaaacagtgatggaaggctgttgtcttggtgtatcccttgcctcatagtcaatatattttttttttggcgagtcaccagtgacccgagccctccacaccagcctcctgtatctcatcaggtcccttctcagtactgtatttgctcagtgcatcaggaatgggtgtatgggtgtgtgtgggtgggtgtgagtgtgggtgtgtacgtaccaataaacaacctggttttaagacaatgta

SEQ ID NO: 16328 - DNA, 6349 bp, Homo sapiens
  source 1..6349: mol_type = unassigned DNA
atgtctgagagccccaaggacgagggctccgaagagtgtctgtttctgcagcgcctatgggagtggggggcagtggggggaactcagggaagctgcctacaacttgaggccttccccaggctggaggaggaggacagggaaggccgaggggagctgtcctccggctgccatcaccctgatgaggcggccctgccccgggctgtggtctccgcaggggctggcaaccttgcctttgtccagctctctccgtggccaggcctgccatctgcctgcccacactcctccccggcaaagccccttgcaaatgcttgctttggggactggcagctttcgcctctgaatcaggacctagcatcagtactctggggagggggtccaggtgccaaccctgtgagtccctccctgtcccctgacgctgagaaggccctgccaacccccaccatgtgtgaggtgatgcccacaatcaatgagggggaccgcctgggtccccctcatggcgccgatgctgacgccaacttcgagcagctgatggtgaacatgctggacgagcgggagaagttgctggagtctcttcgggagagtcaggagaccttggcggccacacagagccggctccaggatgccatacacgagcgggaccagctccagcgccaccttaactccgccctcccccaggaatttgccaccttaacccgggagctgagcatgtgtcgggagcagcttctagagcgggaggaagagatatcagaactgaaagcagaacggaataacacacggctgcttctggaacatctggagtgcctggtgtcccgccatgaacggtcactgcggatgactgtggtgaagcgccaggcccagtcaccttcgggggtctccagtgaggtggaggtgctgaaggccctcaagtcactgtttgagcaccacaaggccctggatgagaaggtgcgagagcggctccgggcagcgctggagcgagtcaccaccttggaggagcagctggcaggtgcccaccagcaggtgtctgccctgcagcagggggcaggggtgcgggatggagcggcagaagaggaggggactgtggagctggggccgaaacgcctgtggaaggaggatacgggccgggtagaggagctgcaggagctcctggagaagcagaactttgagttgagccaggcccgggagcgactggtcaccctaacaacaaccgtgactgaactcgaggaggacctgggcacggcccgccgggacctcatcaagtcggaggagctgagcagcaagcatcagcgggacctccgggaggctctggcccagaaggaggacatggaagagcggattactacactggagaagcgctacctggctgctcagcgtgaggcaacatccatccatgacctcaatgacaagctggagaatgagctggccaacaaggagtccctgcaccgccagtgtgaggagaaggcccgacacctgcaggagctgctggaggtggcagagcagaagctgcagcagacgatgcgcaaggcagagacgctgccagaggtggaggctgagctggcccagagaattgcagccctcaccaaggctgaagaacggcatggcaacattgaggagcacctgcggcagctggagggacagctggaggagaagaaccaggagctggcacggacggctgtgcaggtgcgccagcgggaaaagatgaatgaggaccacaacaagcggctgtcggacacagtggaccggctgctcagcgagtccaacgagcgtctgcagctccacctgaaggagcgcatggctgccctggaggagaagaacacgttgatccaggagttggagagctcccagcggcagattgaggagcagcaccaccacaagggccgcctgtctgaagagattgagaagctgcgccaagaggtggaccagctgaagggccgaggggggccgtttgtggatggcgtccactccaggtcgcacatgggcagtgcagcagacgtgcggttctccctgggcacaaccacacacgcacccccaggcgtgcatcgccgctactcggcattgagggaagagtctgccaagctggccctgcctttgacagtgaccctgagatctccgacgtggatgaggatgagccagggggtctgctgcaacttagagtaccacagttcagggaccctctgtgggtcatcaggcccgctgccagtgccggagatgattcaggaagagaaggagtccacggagctccgcgcggaggagattgagacgcgtgtaaccagtggcagcatggaagccctaaacctgaagcagctgcgcaagcgtggttccatccccacctctctgacggccctgtccctggccagcgcgtccccaccactcagcggccgctccacacctaagctcacctcccgcagtgctgcccaggacctggaccgaatgggggtcatgaccctgcccagtgacttaagaaagcataggaggaagctgctgtcgccagtgtctcgggaagagaaccgagaggataaagccaccataaaatgtgagacttctcctccttcctcacccaggacgctgcggctagagaagcttggccacccagccctgagccaggaagaaggcaagagtgccttggaggatcagggcagcaaccccagcagcagcaacagcagccaggactccctgcacaagggcgccaagcgcaagggcatcaagtcgtccattggccgcctgtttgggaagaaggagaagggcaggctgatccagctgagtcgggatggagccacaggccatgttctgctaacagactccgaattcagtatgcaggagcctatggtgcctgccaagctggggacccaggcagagaaggaccggcggctaaagaagaaacaccagctgcttgaagatgcccgcaggaaaggaatgccctttgcccagtgggatggtcctactgtggtctcctggttggagctctgggtggggatgcctgcctggtatgtggcagcctgccgggccaacgtcaagagtggtgccatcatgtccgctctgtcggacacagagatccagcgggagatcggcatcagcaatgccctgcaccggctcaagctccgcctggccattcaggagatggtgtcattgaccagcccctctgccccacccacctccaggacttcttctgggaatgtctgggtcacccatgaagagatggaaactctggaaacatctactaaaacagacagtgaggagggcagctgggctcagaccctggcctatggggacatgaaccatgagtggattgggaatgaatggctacccagcctggggctcccgcagtaccgcagctacttcatggagtgcctggtggacgcccgcatgctggaccacctcaccaagaaggacctgcgggtccacctgaagatggtggacagcttccatcgaaccagtcttcagtatggcatcatgtgtctgaagaggctgaattatgaccggaaggagctggagaagaggcgagaggagagccagcatgagatcaaggatgtgttagtctggaccaacgaccaggtggttcattgggtccagtctattgggctccgggactacgcaggaaacctgcatgagagtggtgtgcatggagccttgctggccctggacgagaacttcgaccacaacacactggccctgatcctccagatccccacacagaacacccaggcacgccaagtgatggaaagagagttcaataacctgttggccttgggcacagaccggaagctggatgacggggatgacaaggtgtttcgccgcgcgccctcctggaggaagcgcttccggccgcgggagcaccacggtcgcggcggcatgctcagcgcttccgcggagaccctcccggcgggcttccgtgtgtccaccctggggaccctgcagcccccaccggccccgccaaagaagatcatgcctgaagctcactcccactatctctacggacacatgctctccgccttccgggactagccatggcccccagggctggcttcctccttctgggtttcacaggctcctctggccctgacccctcttgctcgttccccttccttccgcagctcctagtctcgtccgtgactttccggttgccctggatctcagaatatattcgtccaccccctcggcaccccattaccccgagtcccaccgtgtgtccgttgtaagtccggtggatgtggctggggtttcctggtattgtggaggcacccaggttgtccatgcttgggattctgggggaaggagagaagggcagctcagggtggatgtgaagccacccttcctcttctggacccagcctggtctgcactgcaacctccaccaggaccaggatcctgggccacaggctgggatggtccttccaagaaagggtcatttcagacgcagccctgcttgggctattcaatcttagggtgtctatccacgtctggctgtgccaaatggtctggcagctggttttggcatccccagcatcaccactctcccaacccatcaccgtgactgcagttcctgcccccattctcttggggtcagggaggggctgggaagggctactgaaggccccattctcccacaggatggtgaggctgggaggaggaagactgaggtagagattccaggccctggcataagctgaatcccaaatttgagtttgggaagaaccagagagaaatggatccctgagctctgagccaagggtgaggatggggaaactctaagctcccacctaataagaagcataggcagaccagccagagggagagccaatggcctctggtagccttaagcccaaagggcagtgggaatgtcccctgccccaaccatcgggtggagctcctgctgggctatggggaagggaggttgtgcggatcttgactctagggcagaacagatctaaccatgcattgctagctctgctcccagcatcccttccccttctctcctcctctgcctcacttctttagtaatcccaaccctataaaaatgaacctaatgggtggattgaatatacattgagcccaaagtcaagtttggggaaaaggcagactaaggcctcctttctctgacctcccaggaagaaaatagcttctcctacagtgattcatgtcccaggtccaggaaatccaatgttggtgaaggcagccactctcttgcttgtccccaaatcacctaaccctcatccagggctattttggtgggcagggactgcctcctcccggaattcctaagatccgcccagctgccaccattttcattgctttccccagcagcatgatgggaacccaagctgagggatacaggtcctgatttggtaggaatattattcccaagaaatacccgctcctcacctactccctcatcctaccaaggtgcctgaaaatgttcaagacttatgttcagggtgggatgatggaaccgagggcttcatcaaagtgagaggaaaggaaaagcatctggcatgtgtttcttggataggggccagtgcagtgccatcctacaggtggctggagcagctgctttgcaacctgatcaccttgagttctgagcagggactaggcttgcaggtgagataatgggccagggcacccagtccagaaggagcaatggcacctgggcagtgccagggcttaaagcccgctgctccttttcggtagaggagaggcccatcactggtgtggtggggtgggctctcccttaggcttgggcaaggcagccacctgcccttgctctcccttagtgttccctggcctccctgccatcaggttgctgggagtggagatggagggattattgagcagaaaatgagttggatggagataaacagctcccatccctgggtaatggatggtaagatgatggagattcctaagattggtggagttgggcaatgcatagccatctgactccttcagggtgctcttgatgggctggctgtaagggagactcagtcccagcctctcccctctacaactcctgccactgttggccatgtcgtaaggcagcagctgtgccaggatagctgggtccattcagagcaccttgagaagtgttgcagggaggtgttaagaagagaactctgtgcaaacagtgatggaaggctgttgtcttggtgtatcccttgcctcatagtcaatatattttttttttggcgagtcaccagtgacccgagccctccacaccagcctcctgtatctcatcaggtcccttctcagtactgtatttgctcagtgcatcaggaatgggtgtatgggtgtgtgtgggtgggtgtgagtgtgggtgtgtacgtaccaataaacaacctggttttaagacaatgtacaaa

SEQ ID NO: 16329 - DNA, 558 bp, Homo sapiens
  source 1..558: mol_type = unassigned DNA
gaagcagaactttgagttgagccaggcccgggagcgactggtcaccctaacaacaaccgtgactgaactcgaggaggacctgggcacggcccgccgggacctcatcaagtcggaggagctgagcagcaagcatcagcgggacctccgggaggctctggcccagaaggaggacatggaagagcggattactacactggagaagcgctacctggctgctcagcgtgaggcaacatccatccatgacctcaatgacaagctggagaatgagctggccaacaaggagtccctgcaccgccagtgtgaggagaaggcccgacacctgcaggagctgctggaggtggcagagcagaagctgcagcagacgatgcgcaaggcagagacgctgccagaggtggaggctgagctggcccagagaattgcagccctcaccaaggcaagtgggccaggggcctgggatctgcctctgtcccccatgttctgagctctcagggagccaggcagggaagggagcgcgtgggaggcgcactgggccaggagccagaaaactgcttcccgccg

SEQ ID NO: 16330 - DNA, 2967 bp, Homo sapiens
  source 1..2967: mol_type = unassigned DNA
cgtgactgaactcgaggaggacctgggcacggcccgccgggacctcatcaagtcggaggagctgagcagcaagcatcagcgggacctccgggaggctctggcccagaaggaggacatggaagagcggattactacactggagaagcgctacctggctgctcagcgtgaggcaacatccatccatgacctcaatgacaagctggagaatgagctggccaacaaggagtccctgcaccgccagtgtgaggagaaggcccgacacctgcaggagctgctggaggtggcagagcagaagctgcagcagacgatgcgcaaggcagagacgctgccagaggtggaggctgagctggcccagagaattgcagccctcaccaaggctgaagaacggcatggcaacattgaggagcacctgcggcagctggagggacagctggaggagaagaaccaggagctggcacgggtgcgccagcgggaaaagatgaatgaggaccacaacaagcggctgtcggacacagtggaccggctgctcagcgagtccaacgagcgtctgcagctccacctgaaggagcgcatggctgccctggaggagaagaacacgttgatccaggagttggagagctcccagcggcagattgaggagcagcaccaccacaagggccgcctgtctgaagagattgagaagctgcgccaagaggtggaccagctgaagggccgaggggggccgtttgtggatggcgtccactccaggtcgcacatgggcagtgcagcagacgtgcggttctccctgggcacaaccacacacgcacccccaggcgtgcatcgccgctactcggcattgagggaagagtctgccaaggactgggagacttctccactgcctgggatgctggccccggcagctggccctgcctttgacagtgaccctgagatctccgacgtggatgaggatgagccagggggtctggtgggctctgcggatgttgtctcccccagcggccactcagatgcccagaccctggccatgatgctgcaggagcagctggatgccatcaatgaggaaatcaggatgattcaggaagagaaggagtccacggagctccgcgcggaggagattgagacgcgtgtaaccagtggcagcatggaagccctaaacctgaagcagctgcgcaagcgtggttccatccccacctctctgacggccctgtccctggccagcgcgtccccaccactcagcggccgctccacacctaagctcacctcccgcagtgctgcccaggacctggaccgaatgggggtcatgaccctgcccagtgacttaagaaagcataggaggaagctgctgtcgccagtgtctcgggaagagaaccgagaggataaagccaccataaaatgtgagacttctcctccttcctcacccaggacgctgcggctagagaagcttggccacccagccctgagccaggaagaaggcaagagtgccttggaggatcagggcagcaaccccagcagcagcaacagcagccaggactccctgcacaagggcgccaagcgcaagggcatcaagtcgtccattggccgcctgtttgggaagaaggagaagggcaggctgatccagctgagtcgggatggagccacaggccatgttctgctaacagactccgaattcagtatgcaggagcctatggtgcctgccaagctggggacccaggcagagaaggaccggcggctaaagaagaaacaccagctgcttgaagatgcccgcaggaaaggaatgccctttgcccagtgggatggtcctactgtggtctcctggttggagctctgggtggggatgcctgcctggtatgtggcagcctgccgggccaacgtcaagagtggtgccatcatgtccgctctgtcggacacagagatccagcgggagatcggcatcagcaatgccctgcaccggctcaagctccgcctggccattcaggagatggtgtcattgaccagcccctctgccccacccacctccaggacttcttctgggaatgtctgggtcacccatgaagagatggaaactctggaaacatctactaaaacagacagtgaggagggcagctgggctcagaccctggcctatggggacatgaaccatgagtggattgggaatgaatggctacccagcctggggctcccgcagtaccgcagctacttcatggagtgcctggtggacgcccgcatgctggaccacctcaccaagaaggacctgcgggtccacctgaagatggtggacagcttccatcgaaccagtcttcagtatggcatcatgtgtctgaagaggctgaattatgaccggaaggagctggagaagaggcgagaggagagccagcatgagatcaaggatgtgttagtctggaccaacgaccaggtggttcattgggtccagtctattgggctccgggactacgcaggaaacctgcatgagagtggtgtgcatggagccttgctggccctggacgagaacttcgaccacaacacactggccctgatcctccagatccccacacagaacacccaggcacgccaagtgatggaaagagagttcaataacctgttggccttgggcacagaccggaagctggatgacggggatgacaaggtgtttcgccgcgcgccctcctggaggaagcgcttccggccgcgggagcaccacggtcgcggcggcatgctcagcgcttccgcggagaccctcccggcgggcttccgtgtgtccaccctggggaccctgcagcccccaccggccccgccaaagaagatcatgcctgaagctcactcccactatctctacggacacatgctctccgccttccgggactagccatggcccccagggctggcttcctccttctgggtttcacaggctcctctggccctgacccctcttgctcgttccccttccttccgcagctcctagtctcgtccgtg

SEQ ID NO: 16331 - DNA, 5045 bp, Homo sapiens
  source 1..5045: mol_type = unassigned DNA
attttctctggcttgtgtttctgacagtgttagggcctcctaaagcttcctaggcataggggtatgcctggcttgaattttaaccagggactcagtccagattatggggagacccgaggaaaagtgctgggtagaagaccaaaaaacaaagaccctcagagtgaaaagggcctctagacatcatcccttccaacatctcccagtgcctggagccctcctgcgccacgtgtgtcagatggccggagagcctctgctcgaatacctctttgatggggagctcaactttttaaaagccaccagttgcatcgtaagccaactcttgccattagaagatccttcttatgccagacggaaaaccgctctctggaactttctcccctggctcattctgacccctggagcaccagggcatacgtctgctctcttgcttacacggcagcccttcagacatttgtgacagctctgtgtcctgctaagatgtctcttctctgagctgaagatcccttgactctttgggcccactgggtgtgagctgggggtctcagtcctcagggcctgtcttttctctcccccatcaccgctcaaggtcgcacatgggcagtgcagcagacgtgcggttctccctgggcacaaccacacacgcacccccaggcgtgcatcgccgctactcggcattgagggaagagtctgccaaggactgggagacttctccactgcctgggatgctggccccggcagctggccctgcctttgacagtgaccctgagatctccgacgtggatgaggatgagccagggggtctggtgggctctgcggatgttgtctcccccagcggccactcagatgcccagaccctggccatgatgctgcaggagcagctggatgccatcaatgaggaaatcaggatgattcaggaagagaaggagtccacggagctccgcgcggaggagattgagacgcgtgtaaccagtggcagcatggaagccctaaacctgaagcagctgcgcaagcgtggttccatccccacctctctgacggccctgtccctggccagcgcgtccccaccactcagcggccgctccacacctaagctcacctcccgcagtgctgcccaggacctggaccgaatgggggtcatgaccctgcccagtgacttaagaaagcataggaggaagctgctgtcgccagtgtctcgggaagagaaccgagaggataaagccaccataaaatgtgagacttctcctccttcctcacccaggacgctgcggctagagaagcttggccacccagccctgagccaggaagaaggcaagagtgccttggaggatcagggcagcaaccccagcagcagcaacagcagccaggactccctgcacaagggcgccaagcgcaagggcatcaagtcgtccattggccgcctgtttgggaagaaggagaagggcaggctgatccagctgagtcgggatggagccacaggccatgttctgctaacagactccgaattcagtatgcaggagcctatggtgcctgccaagctggggacccaggcagagaaggaccggcggctaaagaagaaacaccagctgcttgaagatgcccgcaggaaaggaatgccctttgcccagtgggatggtcctactgtggtctcctggttggagctctgggtggggatgcctgcctggtatgtggcagcctgccgggccaacgtcaagagtggtgccatcatgtccgctctgtcggacacagagatccagcgggagatcggcatcagcaatgccctgcaccggctcaagctccgcctggccattcaggagatggtgtcattgaccagcccctctgccccacccacctccaggacttcttctgggaatgtctgggtcacccatgaagagatggaaactctggaaacatctactaaaacagacagtgaggagggcagctgggctcagaccctggcctatggggacatgaaccatgagtggattgggaatgaatggctacccagcctggggctcccgcagtaccgcagctacttcatggagtgcctggtggacgcccgcatgctggaccacctcaccaagaaggacctgcgggtccacctgaagatggtggacagcttccatcgaaccagtcttcagtatggcatcatgtgtctgaagaggctgaattatgaccggaaggagctggagaagaggcgagaggagagccagcatgagatcaaggatgtgttagtctggaccaacgaccaggtggttcattgggtccagtctattgggctccgggactacgcaggaaacctgcatgagagtggtgtgcatggagccttgctggccctggacgagaacttcgaccacaacacactggccctgatcctccagatccccacacagaacacccaggcacgccaagtgatggaaagagagttcaataacctgttggccttgggcacagaccggaagctggatgacggggatgacaaggtgtttcgccgcgcgccctcctggaggaagcgcttccggccgcgggagcaccacggtcgcggcggcatgctcagcgcttccgcggagaccctcccggcgggcttccgtgtgtccaccctggggaccctgcagcccccaccggccccgccaaagaagatcatgcctgaagctcactcccactatctctacggacacatgctctccgccttccgggactagccatggcccccagggctggcttcctccttctgggtttcacaggctcctctggccctgacccctcttgctcgttccccttccttccgcagctcctagtctcgtccgtgactttccggttgccctggatctcagaatatattcgtccaccccctcggcaccccattaccccgagtcccaccgtgtgtccgttgtaagtccggtggatgtggctggggtttcctggtattgtggaggcacccaggttgtccatgcttgggattctgggggaaggagagaagggcagctcagggtggatgtgaagccacccttcctcttctggacccagcctggtctgcactgcaacctccaccaggaccaggatcctgggccacaggctgggatggtccttccaagaaagggtcatttcagacgcagccctgcttgggctattcaatcttagggtgtctatccacgtctggctgtgccaaatggtctggcagctggttttggcatccccagcatcaccactctcccaacccatcaccgtgactgcagttcctgcccccattctcttggggtcagggaggggctgggaagggctactgaaggccccattctcccacaggatggtgaggctgggaggaggaagactgaggtagagattccaggccctggcataagctgaatcccaaatttgagtttgggaagaaccagagagaaatggatccctgagctctgagccaagggtgaggatggggaaactctaagctcccacctaataagaagcataggcagaccagccagagggagagccaatggcctctggtagccttaagcccaaagggcagtgggaatgtcccctgccccaaccatcgggtggagctcctgctgggctatggggaagggaggttgtgcggatcttgactctagggcagaacagatctaaccatgcattgctagctctgctcccagcatcccttccccttctctcctcctctgcctcacttctttagtaatcccaaccctataaaaatgaacctaatgggtggattgaatatacattgagcccaaagtcaagtttggggaaaaggcagactaaggcctcctttctctgacctcccaggaagaaaatagcttctcctacagtgattcatgtcccaggtccaggaaatccaatgttggtgaaggcagccactctcttgcttgtccccaaatcacctaaccctcatccagggctattttggtgggcagggactgcctcctcccggaattcctaagatccgcccagctgccaccattttcattgctttccccagcagcatgatgggaacccaagctgagggatacaggtcctgatttggtaggaatattattcccaagaaatacccgctcctcacctactccctcatcctaccaaggtgcctgaaaatgttcaagacttatgttcagggtgggatgatggaaccgagggcttcatcaaagtgagaggaaaggaaaagcatctggcatgtgtttcttggataggggccagtgcagtgccatcctacaggtggctggagcagctgctttgcaacctgatcaccttgagttctgagcagggactaggcttgcaggtgagataatgggccagggcacccagtccagaaggagcaatggcacctgggcagtgccagggcttaaagcccgctgctccttttcggtagaggagaggcccatcactggtgtggtggggtgggctctcccttaggcttgggcaaggcagccacctgcccttgctctcccttagtgttccctggcctccctgccatcaggttgctgggagtggagatggagggattattgagcagaaaatgagttggatggagataaacagctcccatccctgggtaatggatggtaagatgatggagattcctaagattggtggagttgggcaatgcatagccatctgactccttcagggtgctcttgatgggctggctgtaagggagactcagtcccagcctctcccctctacaactcctgccactgttggccatgtcgtaaggcagcagctgtgccaggatagctgggtccattcagagcaccttgagaagtgttgcagggaggtgttaagaagagaactctgtgcaaacagtgatggaaggctgttgtcttggtgtatcccttgcctcatagtcaatatattttttttttggcgagtcaccagtgacccgagccctccacaccagcctcctgtatctcatcaggtcccttctcagtactgtatttgctcagtgcatcaggaatgggtgtatgggtgtgtgtgggtgggtgtgagtgtgggtgtgtacgtaccaataaacaacctggttttaagacaatgta

SEQ ID NO: 16332 - DNA, 3178 bp, Homo sapiens
  source 1..3178: mol_type = unassigned DNA
aggggtatgcctggcttgaattttaaccagggactcagtccagattatggggagacccgaggaaaagtgctgggtagaagaccaaaaaacaaagaccctcagagtgaaaagggcctctagacatcatcccttccaacatctcccagtgcctggagccctcctgcgccacgtgtgtcagatggccggagagcctctgctcgaatacctctttgatggggagctcaactttttaaaagccaccagttgcatcgtaagccaactcttgccattagaagatccttcttatgccagacggaaaaccgctctctggaactttctcccctggctcattctgacccctggagcaccagggcatacgtctgctctcttgcttacacggcagcccttcagacatttgtgacagctctgtgtcctgctaagatgtctcttctctgagctgaagatcccttgactctttgggcccactgggtgtgagctgggggtctcagtcctcagggcctgtcttttctctcccccatcaccgctcaaggtcgcacatgggcagtgcagcagacgtgcggttctccctgggcacaaccacacacgcacccccaggcgtgcatcgccgctactcggcattgagggaagagtctgccaaggactgggagacttctccactgcctgggatgctggccccggcagctggccctgcctttgacagtgaccctgagatctccgacgtggatgaggatgagccagggggtctggtgggctctgcggatgttgtctcccccagcggccactcagatgcccagaccctggccatgatgctgcaggagcagctggatgccatcaatgaggaaatcaggatgattcaggaagagaaggagtccacggagctccgcgcggaggagattgagacgcgtgtaaccagtggcagcatggaagccctaaacctgaagcagctgcgcaagcgtggttccatccccacctctctgacggccctgtccctggccagcgcgtccccaccactcagcggccgctccacacctaagctcacctcccgcagtgctgcccaggacctggaccgaatgggggtcatgaccctgcccagtgacttaagaaagcataggaggaagctgctgtcgccagtgtctcgggaagagaaccgagaggataaagccaccataaaatgtgagacttctcctccttcctcacccaggacgctgcggctagagaagcttggccacccagccctgagccaggaagaaggcaagagtgccttggaggatcagggcagcaaccccagcagcagcaacagcagccaggactccctgcacaagggcgccaagcgcaagggcatcaagtcgtccattggccgcctgtttgggaagaaggagaagggcaggctgatccagctgagtcgggatggagccacaggccatgttctgctaacagactccgaattcagtatgcaggagcctatggtgcctgccaagctggggacccaggcagagaaggaccggcggctaaagaagaaacaccagctgcttgaagatgcccgcaggaaaggaatgccctttgcccagtgggatggtcctactgtggtctcctggttggagctctgggtggggatgcctgcctggtatgtggcagcctgccgggccaacgtcaagagtggtgccatcatgtccgctctgtcggacacagagatccagcgggagatcggcatcagcaatgccctgcaccggctcaagctccgcctggccattcaggagatggtgtcattgaccagcccctctgccccacccacctccaggacttcttctgggaatgtctgggtcacccatgaagagatggaaactctggaaacatctactaaaacaaccctggcctatggggacatgaaccatgagtggattgggaatgaatggctacccagcctggggctcccgcagtaccgcagctacttcatggagtgcctggtggacgcccgcatgctggaccacctcaccaagaaggacctgcgggtccacctgaagatggtggacagcttccatcgaaccagtcttcagtatggcatcatgtgtctgaagaggctgaattatgaccggaaggagctggagaagaggcgagaggagagccagcatgagatcaaggatgtgttagtctggaccaacgaccaggtggttcattgggtccagtctattgggctccgggactacgcaggaaacctgcatgagagtggtgtgcatggagccttgctggccctggacgagaacttcgaccacaacacactggccctgatcctccagatccccacacagaacacccaggcacgccaagtgatggaaagagagttcaataacctgttggccttgggcacagaccggaagctggatgacggggatgacaaggtgtttcgccgcgcgccctcctggaggaagcgcttccggccgcgggagcaccacggtcgcggcggcatgctcagcgcttccgcggagaccctcccggcgggcttccgtgtgtccaccctggggaccctgcagcccccaccggccccgccaaagaagatcatgcctgaagctcactcccactatctctacggacacatgctctccgccttccgggactagccatggcccccagggctggcttcctccttctgggtttcacaggctcctctggccctgacccctcttgctcgttccccttccttccgcagctcctagtctcgtccgtgactttccggttgccctggatctcagaatatattcgtccaccccctcggcaccccattaccccgagtcccaccgtgtgtccgttgtaagtccggtggatgtggctggggtttcctggtattgtggaggcacccaggttgtccatgcttgggattctgggggaaggagagaagggcagctcagggtggatgtgaagccacccttcctcttctggacccagcctggtctgcactgcaacctccaccaggaccaggatcctgggccacaggctgggatggtccttccaagaaagggtcatttcagacgcagccctgcttgggctattcaatcttagggtgtctatccacgtctggctgtgccaaatggtctggcagctggttttggcatccccagcatcaccactctcccaacccatcaccgtgactgcagttcctgcccccattctcttggggtcaggg

SEQ ID NO: 16333 - DNA, 385 bp, Homo sapiens
  source 1..385: mol_type = unassigned DNA
agttatctgggtgtcttattacgactcctttaccctcctcctttgctaaggactgggagacttctccactgcctgggatgctggccccggcagctggccctgcctttgacagtgaccctgagatctccgacgtggatgaggatgagccagggggtctggtgggctctgcggatgttgtctcccccagcggccactcagatgcccagaccctggccatgatgctgcaggagcagctggatgccatcaatgaggaaatcaggatgattcaggaagagaaggagtccacggagctccgcgcggaggagattgagacgcgtgtaaccagtggcagcatggaagccctaaacctgaagcagctgcgcaagcgtggttccatccccacctc

SEQ ID NO: 16334 - DNA, 573 bp, Homo sapiens
  source 1..573: mol_type = unassigned DNA
tgctaaggactgggagacttctccactgcctgggatgctggccccggcagctggccctgcctttgacagtgaccctgagatctccgacgtggatgaggatgagccagggggtctggtgggctctgcggatgttgtctcccccagcggccactcagatgcccagaccctggccatgatgctgcaggagcagctggatgccatcaatgaggaaatcaggatgattcaggaagagaaggagtccacggagctccgcgcggaggagattgagacgcgtgtaaccagtggcagcatggaagccctaaacctgaagcagctgcgcaagcgtggttccatccccacctctctgacggccctgtccctggccagcgcgtccccaccactcagcggccgctccacacctaagctcacctcccgcagtgctgcccaggacctggaccgaatgggggtcatgaccctgcccagtgacttaagaaagcataggaggaagctgctggacgctgcggctagagaagcttggccacccagccctgagccaggaagaaggcaagagtgccttggaggatcagggcagca

SEQ ID NO: 16335 - DNA, 560 bp, Homo sapiens
  source 1..560: mol_type = unassigned DNA
tggtggaggaatggggagtgttgggagagctgggcatcttgcctggctcccagtcaagcctgggaggtgtgtgtttttgccacacacacatttgccccacctcaacgcaaacatgggtgcacacaccaaccttgtgttctctcttaaccatcctgacgagctttccccagtcacccagccagatactgggatgtctttttcctctccttgatggggcctagggtagagctgatgggtttcttgactttgcctgtttcccctaacacgctgcactcgttcctgctaggacagtgaggagggcagctgggctcagaccctggcctatggggacatgaaccatgagtggattgggaatgaatggctacccagcctggggctcccgcagtaccgcagctacttcatggagtgcctggtggacgcccgcatgctggaccacctcaccaagaaggacctgcgggtccacctgaagatggtggacagcttccatcgaaccagtcttcagtatggcatcatgtgtctgaagaggctgaattatgaccggaaggagctggagaagaggc

SEQ ID NO: 16336 - DNA, 4547 bp, Homo sapiens
  source 1..4547: mol_type = unassigned DNA
tggttggtgtccactgttgctaacttcatttatatgcttcataatgggcacattacatatagtcttatatgtatcagctattacattgtaaaagagaacaaaatagactttttctatctgaaaacatcaagtaagggtaaggaaagagtgaggtagggtcgctatgaaaactaaagctttctcaagttgggtggtcacggagcaccctgcccaggtcaggaggccacgtccacatggcacaggccctgcaggaccacacggcagggtgtgcgtgggaaagcaacagaggacctggagtgttcttggagcagaggctcaggccttagagaatgagtgctgctggctattcaggcacaggccaccaccctttatttttttcagtcttctgccaacatttaacttccttgcttcctccatgaagccagccttgtcccggagtgagacaggcttcctttgccacgctgcaggtcctctgtaacacagcctctcccctgggctcagcgggcttgaggctcactgagagtcaggaaggcacgtctgctgcacaataccgcaaatgcaacccagagtcaacaggaaggatttcatattagctgctgccgggatagctacttctgttcattagtgtagataattgatatgtgagtggaaccgtatcatttcgagatcttaaaaagttccatttaaaatcctcacctcccaccactaccagcccccttattgaagataaactgaaattgtattggactgcccttcctccctcatgggtggaggatggattcatgtgtctcccgaccagctataccagcctcagcctgctggctctaccttcctcccccataatagcctcctgcatctcatttccctagaccctggcctatggggacatgaaccatgagtggattgggaatgaatggctacccagcctggggctcccgcagtaccgcagctacttcatggagtgcctggtggacgcccgcatgctggaccacctcaccaagaaggacctgcgggtccacctgaagatggtggacagcttccatcgaaccagtcttcagtatggcatcatgtgtctgaagaggctgaattatgaccggaaggagctggagaagaggcgagaggagagccagcatgagatcaaggatgtgttagtctggaccaacgaccaggtggttcattgggtccagtctattgggctccgggactacgcaggaaacctgcatgagagtggtgtgcatggagccttgctggccctggacgagaacttcgaccacaacacactggccctgatcctccagatccccacacagaacacccaggcacgccaagtgatggaaagagagttcaataacctgttggccttgggcacagaccggaagctggatgacggggatgacaaggtgtttcgccgcgcgccctcctggaggaagcgcttccggccgcgggagcaccacggtcgcggcggcatgctcagcgcttccgcggagaccctcccggcgggcttccgtgtgtccaccctggggaccctgcagcccccaccggccccgccaaagaagatcatgcctgaaggtgagtaacaggcgggctgggcatggccgaggcccagccgagcgcgggcttcttcctggcaccccagggccgggccgggtggagaggggcgaggccgaggctggtgccccgcgctcctgcgctgcagctgcactaacgctccgcggggagcgtgtgtgcgcactaacccgccgctctgtgtgttctcccgcggctgccgacttctcccagctgggacggcggggtcgcagagactggagacctccacggttcggacctactcctgctgaccccccatcctcccgccccgggtctgacgggggagtgcccgtggctcggggtaagtgggccaggcccggggacgcgggcaccttgctgctggccctcggccccacgcacctgcccttggctgccggcctggccctgccgctccagtcccgcttaccagcactgcctggcttgccccttcctgcttcgtctggcctggggcgctttgcgcttggagcacgctgcgttgccgctgtcgcacacatcctacaacctctctcgcagatgccctgcaacctgcctcacagtgcgatgcctgtctctctctctccctcagctcactcccactatctctacggacacatgctctccgccttccgggactagccatggcccccagggctggcttcctccttctgggtttcacaggctcctctggccctgacccctcttgctcgttccccttccttccgcagctcctagtctcgtccgtgactttccggttgccctggatctcagaatatattcgtccaccccctcggcaccccattaccccgagtcccaccgtgtgtccgttgtaagtccggtggatgtggctggggtttcctggtattgtggaggcacccaggttgtccatgcttgggattctgggggaaggagagaagggcagctcagggtggatgtgaagccacccttcctcttctggacccagcctggtctgcactgcaacctccaccaggaccaggatcctgggccacaggctgggatggtccttccaagaaagggtcatttcagacgcagccctgcttgggctattcaatcttagggtgtctatccacgtctggctgtgccaaatggtctggcagctggttttggcatccccagcatcaccactctcccaacccatcaccgtgactgcagttcctgcccccattctcttggggtcagggaggggctgggaagggctactgaaggccccattctcccacaggatggtgaggctgggaggaggaagactgaggtagagattccaggccctggcataagctgaatcccaaatttgagtttgggaagaaccagagagaaatggatccctgagctctgagccaagggtgaggatggggaaactctaagctcccacctaataagaagcataggcagaccagccagagggagagccaatggcctctggtagccttaagcccaaagggcagtgggaatgtcccctgccccaaccatcgggtggagctcctgctgggctatggggaagggaggttgtgcggatcttgactctagggcagaacagatctaaccatgcattgctagctctgctcccagcatcccttccccttctctcctcctctgcctcacttctttagtaatcccaaccctataaaaatgaacctaatgggtggattgaatatacattgagcccaaagtcaagtttggggaaaaggcagactaaggcctcctttctctgacctcccaggaagaaaatagcttctcctacagtgattcatgtcccaggtccaggaaatccaatgttggtgaaggcagccactctcttgcttgtccccaaatcacctaaccctcatccagggctattttggtgggcagggactgcctcctcccggaattcctaagatccgcccagctgccaccattttcattgctttccccagcagcatgatgggaacccaagctgagggatacaggtcctgatttggtaggaatattattcccaagaaatacccgctcctcacctactccctcatcctaccaaggtgcctgaaaatgttcaagacttatgttcagggtgggatgatggaaccgagggcttcatcaaagtgagaggaaaggaaaagcatctggcatgtgtttcttggataggggccagtgcagtgccatcctacaggtggctggagcagctgctttgcaacctgatcaccttgagttctgagcagggactaggcttgcaggtgagataatgggccagggcacccagtccagaaggagcaatggcacctgggcagtgccagggcttaaagcccgctgctccttttcggtagaggagaggcccatcactggtgtggtggggtgggctctcccttaggcttgggcaaggcagccacctgcccttgctctcccttagtgttccctggcctccctgccatcaggttgctgggagtggagatggagggattattgagcagaaaatgagttggatggagataaacagctcccatccctgggtaatggatggtaagatgatggagattcctaagattggtggagttgggcaatgcatagccatctgactccttcagggtgctcttgatgggctggctgtaagggagactcagtcccagcctctcccctctacaactcctgccactgttggccatgtcgtaaggcagcagctgtgccaggatagctgggtccattcagagcaccttgagaagtgttgcagggaggtgttaagaagagaactctgtgcaaacagtgatggaaggctgttgtcttggtgtatcccttgcctcatagtcaatatattttttttttggcgagtcaccagtgacccgagccctccacaccagcctcctgtatctcatcaggtcccttctcagtactgtatttgctcagtgcatcaggaatgggtgtatgggtgtgtgtgggtgggtgtgagtgtgggtgtgtacgtaccaataaacaacctggttttaagacaatgt

SEQ ID NO: 16337 - DNA, 496 bp, Homo sapiens
  source 1..496: mol_type = unassigned DNA
tttcccatcaatccatccccaggcccgctccctgactgagagggaggatatgggttagacagagaaagggagtaacctcgggatgggtcgcaggcaaggccctggggaaggaggagcatgaggaggctggggtgctctttgtgctggaggcagtaggtctggacatgctgtggctgatgctggatgtgagacaggtggtgtgggaatgtggccccactgaggctctggcttgggggctgtgtgcctgcagaaccagtcttcagtatggcatcatgtgtctgaagaggctgaattatgaccggaaggagctggagaagaggcgagaggagagccagcatgagatcaaggatgtgttagtctggaccaacgaccaggtggttcattgggtccagtctattgggctccgggactacgcaggaaacctgcatgagagtggtgtgcatggagccttgctggccctggacgagaacttcgaccacaacacactggccctgat

SEQ ID NO: 16338 - DNA, 576 bp, Homo sapiens
  source 1..576: mol_type = unassigned DNA
acggttcggacctactcctgctgaccccccatcctcccgccccgggtctgacgggggagtgcccgtggctcgggctcctagtctcgtccgtgactttccggttgccctggatctcagaatatattcgtccaccccctcggcaccccattaccccgagtcccaccgtgtgtccgttgtaagtccggtggatgtggctggggtttcctggtattgtggaggcacccaggttgtccatgcttgggattctgggggaaggagagaagggcagctcagggtggatgtgaagccacccttcctcttctggacccagcctggtctgcactgcaacctccaccaggaccaggatcctgggccacaggctgggatggtccttccaagaaagggtcatttcagacgcagccctgcttgggctattcaatcttagggtgtctatccacgtctggctgtgccaaatggtctggcagctggttttggcatccccagcatcaccactctcccaacccatcaccgtgactgcagttcctgcccccattctcttggggtcagggaggggctgggaagggctactgaaggccc

SEQ ID NO: 16339 - DNA, 6395 bp, Homo sapiens
  source 1..6395: mol_type = unassigned DNA
atgtctgagagccccaaggacgagggctccgaagagtgtctgtttctgcagcgcctatgggagtggggggcagtggggggaactcagggaagctgcctacaacttgaggccttccccaggctggaggaggaggacagggaaggccgaggggagctgtcctccggctgccatcaccctgatgaggcggccctgccccgggctgtggtctccgcaggggctggcaaccttgcctttgtccagctctctccgtggccaggcctgccatctgcctgcccacactcctccccggcaaagccccttgcaaatgcttgctttggggactggcagctttcgcctctgaatcaggacctagcatcagtactctggggagggggtccaggtgccaaccctgtgagtccctccctgtcccctgacgctgagaaggccctgccaacccccaccatgtgtgaggtgatgcccacaatcaatgagggggaccgcctgggtccccctcatggcgccgatgctgacgccaacttcgagcagctgatggtgaacatgctggacgagcgggagaagttgctggagtctcttcgggagagtcaggagaccttggcggccacacagagccggctccaggatgccatacacgagcgggaccagctccagcgccaccttaactccgccctcccccaggaatttgccaccttaacccgggagctgagcatgtgtcgggagcagcttctagagcgggaggaagagatatcagaactgaaagcagaacggaataacacacggctgcttctggaacatctggagtgcctggtgtcccgccatgaacggtcactgcggatgactgtggtgaagcgccaggcccagtcaccttcgggggtctccagtgaggtggaggtgctgaaggccctcaagtcactgtttgagcaccacaaggccctggatgagaaggtgcgagagcggctccgggcagcgctggagcgagtcaccaccttggaggagcagctggcaggtgcccaccagcaggtgtctgccctgcagcagggggcaggggtgcgggatggagcggcagaagaggaggggactgtggagctggggccgaaacgcctgtggaaggaggatacgggccgggtagaggagctgcaggagctcctggagaagcagaactttgagttgagccaggcccgggagcgactggtcaccctaacaacaaccgtgactgaactcgaggaggacctgggcacggcccgccgggacctcatcaagtcggaggagctgagcagcaagcatcagcgggacctccgggaggctctggcccagaaggaggacatggaagagcggattactacactggagaagcgctacctggctgctcagcgtgaggcaacatccatccatgacctcaatgacaagctggagaatgagctggccaacaaggagtccctgcaccgccagtgtgaggagaaggcccgacacctgcaggagctgctggaggtggcagagcagaagctgcagcagacgatgcgcaaggcagagacgctgccagaggtggaggctgagctggcccagagaattgcagccctcaccaaggctgaagaacggcatggcaacattgaggagcacctgcggcagctggagggacagctggaggagaagaaccaggagctggcacggacggctgtgcaggtgcgccagcgggaaaagatgaatgaggaccacaacaagcggctgtcggacacagtggaccggctgctcagcgagtccaacgagcgtctgcagctccacctgaaggagcgcatggctgccctggaggagaagaacacgttgatccaggagttggagagctcccagcggcagattgaggagcagcaccaccacaagggccgcctgtctgaagagattgagaagctgcgccaagaggtggaccagctgaagggccgaggggggccgtttgtggatggcgtccactccaggtcgcacatgggcagtgcagcagacgtgcggttctccctgggcacaaccacacacgcacccccaggcgtgcatcgccgctactcggcattgagggaagagtctgccaaggactgggagacttctccactgcctgggatgctggccccggcagctggccctgcctttgacagtgaccctgagatctccgacgtggatgaggatgagccagggggtctggtgggctctgcggatgttgtctcccccagcggccactcagatgcccagaccctggccatgatgctgcaggagcagctggatgccatcaatgaggaaatcaggatgattcaggaagagaaggagtccacggagctccgcgcggaggagattgagacgcgtgtaaccagtggcagcatggaagccctaaacctgaagcagctgcgcaagcgtggttccatccccacctctctgacggccctgtccctggccagcgcgtccccaccactcagcggccgctccacacctaagctcacctcccgcagtgctgcccaggacctggaccgaatgggggtcatgaccctgcccagtgacttaagaaagcataggaggaagctgctgtcgccagtgtctcgggaagagaaccgagaggataaagccaccataaaatgtgagacttctcctccttcctcacccaggacgctgcggctagagaagcttggccacccagccctgagccaggaagaaggcaagagtgccttggaggatcagggcagcaaccccagcagcagcaacagcagccaggactccctgcacaagggcgccaagcgcaagggcatcaagtcgtccattggccgcctgtttgggaagaaggagaagggcaggctgatccagctgagtcgggatggagccacaggccatgttctgctaacagactccgaattcagtatgcaggagcctatggtgcctgccaagctggggacccaggcagagaaggaccggcggctaaagaagaaacaccagctgcttgaagatgcccgcaggaaaggaatgccctttgcccagtgggatggtcctactgtggtctcctggttggagctctgggtggggatgcctgcctggtatgtggcagcctgccgggccaacgtcaagagtggtgccatcatgtccgctctgtcggacacagagatccagcgggagatcggcatcagcaatgccctgcaccggctcaagctccgcctggccattcaggagatggtgtcattgaccagcccctctgccccacccacctccaggacttcttctgggaatgtctgggtcacccatgaagagatggaaactctggaaacatctactaaaacaaccctggcctatggggacatgaaccatgagtggattgggaatgaatggctacccagcctggggctcccgcagtaccgcagctacttcatggagtgcctggtggacgcccgcatgctggaccacctcaccaagaaggacctgcgggtccacctgaagatggtggacagcttccatcgaaccagtcttcagtatggcatcatgtgtctgaagaggctgaattatgaccggaaggagctggagaagaggcgagaggagagccagcatgagatcaaggatgtgttagtctggaccaacgaccaggtggttcattgggtccagtctattgggctccgggactacgcaggaaacctgcatgagagtggtgtgcatggagccttgctggccctggacgagaacttcgaccacaacacactggccctgatcctccagatccccacacagaacacccaggcacgccaagtgatggaaagagagttcaataacctgttggccttgggcacagaccggaagctggatgacggggatgacaaggtgtttcgccgcgcgccctcctggaggaagcgcttccggccgcgggagcaccacggtcgcggcggcatgctcagcgcttccgcggagaccctcccggcgggcttccgtgtgtccaccctggggaccctgcagcccccaccggccccgccaaagaagatcatgcctgaagctcactcccactatctctacggacacatgctctccgccttccgggactagccatggcccccagggctggcttcctccttctgggtttcacaggctcctctggccctgacccctcttgctcgttccccttccttccgcagctcctagtctcgtccgtgactttccggttgccctggatctcagaatatattcgtccaccccctcggcaccccattaccccgagtcccaccgtgtgtccgttgtaagtccggtggatgtggctggggtttcctggtattgtggaggcacccaggttgtccatgcttgggattctgggggaaggagagaagggcagctcagggtggatgtgaagccacccttcctcttctggacccagcctggtctgcactgcaacctccaccaggaccaggatcctgggccacaggctgggatggtccttccaagaaagggtcatttcagacgcagccctgcttgggctattcaatcttagggtgtctatccacgtctggctgtgccaaatggtctggcagctggttttggcatccccagcatcaccactctcccaacccatcaccgtgactgcagttcctgcccccattctcttggggtcagggaggggctgggaagggctactgaaggccccattctcccacaggatggtgaggctgggaggaggaagactgaggtagagattccaggccctggcataagctgaatcccaaatttgagtttgggaagaaccagagagaaatggatccctgagctctgagccaagggtgaggatggggaaactctaagctcccacctaataagaagcataggcagaccagccagagggagagccaatggcctctggtagccttaagcccaaagggcagtgggaatgtcccctgccccaaccatcgggtggagctcctgctgggctatggggaagggaggttgtgcggatcttgactctagggcagaacagatctaaccatgcattgctagctctgctcccagcatcccttccccttctctcctcctctgcctcacttctttagtaatcccaaccctataaaaatgaacctaatgggtggattgaatatacattgagcccaaagtcaagtttggggaaaaggcagactaaggcctcctttctctgacctcccaggaagaaaatagcttctcctacagtgattcatgtcccaggtccaggaaatccaatgttggtgaaggcagccactctcttgcttgtccccaaatcacctaaccctcatccagggctattttggtgggcagggactgcctcctcccggaattcctaagatccgcccagctgccaccattttcattgctttccccagcagcatgatgggaacccaagctgagggatacaggtcctgatttggtaggaatattattcccaagaaatacccgctcctcacctactccctcatcctaccaaggtgcctgaaaatgttcaagacttatgttcagggtgggatgatggaaccgagggcttcatcaaagtgagaggaaaggaaaagcatctggcatgtgtttcttggataggggccagtgcagtgccatcctacaggtggctggagcagctgctttgcaacctgatcaccttgagttctgagcagggactaggcttgcaggtgagataatgggccagggcacccagtccagaaggagcaatggcacctgggcagtgccagggcttaaagcccgctgctccttttcggtagaggagaggcccatcactggtgtggtggggtgggctctcccttaggcttgggcaaggcagccacctgcccttgctctcccttagtgttccctggcctccctgccatcaggttgctgggagtggagatggagggattattgagcagaaaatgagttggatggagataaacagctcccatccctgggtaatggatggtaagatgatggagattcctaagattggtggagttgggcaatgcatagccatctgactccttcagggtgctcttgatgggctggctgtaagggagactcagtcccagcctctcccctctacaactcctgccactgttggccatgtcgtaaggcagcagctgtgccaggatagctgggtccattcagagcaccttgagaagtgttgcagggaggtgttaagaagagaactctgtgcaaacagtgatggaaggctgttgtcttggtgtatcccttgcctcatagtcaatatattttttttttggcgagtcaccagtgacccgagccctccacaccagcctcctgtatctcatcaggtcccttctcagtactgtatttgctcagtgcatcaggaatgggtgtatgggtgtgtgtgggtgggtgtgagtgtgggtgtgtacgtaccaataaacaacctggttttaagacaatgt

SEQ ID NO: 16340 - DNA, 609 bp, Homo sapiens
  source 1..609: mol_type = unassigned DNA
tgtgtgcattgaaacagcagccttaaggtctttaaacggggaaatacatttttcttgcttcagagattcaattttacttgcccgagaagcttgtgtggtgtgattttcatcgctaaaagcaacagcagccacatggctgacaacaccaccacttaacaattcaaagctcggtcaccgttttcaggagtctcttccaaatctttctgaagtgcttttgaagttctacattccccgtctaagggaacacccagcagtcccaggataaaagggcagaaggtataaaagaacgtgtggatcactttgctgagtacatccaagatttgaagaactgaaataaatcagctttaaacctgctttttaaaaatacaaatggacacctaccagggaacggagatgtgtatcaagaaaggctggcacgtttagaaaatgataaagaatccctcgttcttcaggtaagtgtgttaacagaccaggtggaggctcagggagagaagattcgagatttggagttttgtcttgaagagcacagagagaaggtgaatgccacagaagaaatgctgcagcaggagcttctaagtaggacatccttagaaactcagaagttggatc

SEQ ID NO: 16341 - DNA, 1191 bp, Homo sapiens
  source 1..1191: mol_type = unassigned DNA
ggcagtgggagggggaggtacctggaactgggagtgatgtcagctcccagctcggtgcctgcccggattcctgacatggtgtagtgcaggcagggtggggaaaggacggggaaggactcgtgtgctgcgagctggcggccgggccggagtgctggggctttgaactccgagaggaggtggaccagaacttttggaactagtgccggcggctctccaccccccagtataaaagaacgtgtggatcactttgctgagtacatccaagatttgaagaactgaaataaatcagctttaaacctgctttttaaaaatatctgggttggaatttgcccctgacaaataataaaatgatgagtgatgcaagtgacatgttggctgcagcgttggagcagatggatggtatcatagcaggttctaaggctctggaatattccaatgggatttttgattgccaatctcccacctctccattcatgggaagtttgcgagctctgcaccttgtggaagacctgcgtggattgttagagatgatggaaacagatgagaaagaaggcttgagatgccagatcccagattcaacagcagaaacgcttgttgaatggcttcagagtcaaatgacaaatggacacctaccagggaacggagatgtgtatcaagaaaggctggcacgtttagaaaatgataaagaatccctcgttcttcaggtaagtgtgttaacagaccaggtggaggctcagggagagaagattcgagatttggagttttgtcttgaagagcacagagagaaggtgaatgccacagaagaaatgctgcagcaggagcttctaagtaggacatccttagaaactcagaagttggatctgatggctgaaatatctaacttgaagttgaaactgacagctgtagagaaggacagattggattatgaagataagttcagagacacagaggggctgattcaggagatcaatgatttgaggttaaaagttagtgaaatggacagtgagagacttcagtatgaaaaaaagcttaaatcaaccaaagatgaactggcatctttaaaagaacaactagaagaaaaggaatctgaagtaaaaaggctacaagaaaaattggtttgcaagatgaaaggagaaggggttgaaattgttgatagagatgaaaattttaaaaagaagctcaaagaaaaaa

SEQ ID NO: 16342 - DNA, 2805 bp, Homo sapiens
  source 1..2805: mol_type = unassigned DNA
ggtacctggaactgggagtgatgtcagctcccagctcggtgcctgcccggattcctgacatggtgtagtgcaggcagggtggggaaaggacggggaaggactcgtgtgctgcgagctggcggccgggccggagtgctggggctttgaactccgagaggaggtggaccagaacttttggaactagtgccggcggctctccaccccccagtataaaagaacgtgtggatcactttgctgagtacatccaagatttgaagaactgaaataaatcagctttaaacctgctttttaaaaatatctgggttggaatttgcccctgacaaataataaaatgatgagtgatgcaagtgacatgttggctgcagcgttggagcagatggatggtatcatagcaggttctaaggctctggaatattccaatgggatttttgattgccaatctcccacctctccattcatgggaagtttgcgagctctgcaccttgtggaagacctgcgtggattgttagagatgatggaaacagatgagaaagaaggcttgagatgccagatcccagattcaacagcagaaacgcttgttgaatggcttcagagtcaaatggtagggtctgcctgttccaaattctgttataaatcctttgttgcttattccaaaatttagaacatagaatagctgattagaacaagaaaagtttagggcaacacatgtgctccgattttattacttaagatatcttaattttcttttgactctaaggataactttttaaaaagtgctattagtgtacattttgtaaataccaacaacaggtcacctgattctgcccataaaaacagactggcttttagattgtgcctgaatgacctactgtggcttaaatcaaatagtcctgtaagggaaagaatcttgcacatgatagatgatttctcagtcatattgggttattcaccataaaggatccaatagcaattctaaatggaaagcatgatgaaagactttcaaaaagcaacaggatttacagcagtatttgaccggaagtgccatctagtggtttatggcaatcatttcagttccagttcccgaattaaattgtggagttgggcctttaacccatttatgcgcagtgttccattattggaacgctaagcttgtgggagttatttatatcctgctcaaagtcatcgccaaggtctcatttaaaaaaaaaaaatcacaacctccagcataaatgggttaatggtgttactcactgaacaatgaggccgctttctaggcatccttctcaaaaattgaagatgtggcagagctaccctttgtctgggcacggttggaaatactgtggttttaatctgtgatgaatacataaaatctaaagaatgtcacaaaaacagattcagtggaggacagaggaaaggagatattttgtgcttaaaggatattcaattttcagtaagatgcactcatatgcttatgagttaactgtgttgatataaaagctaataagaattgtatgaaagaatcgtgatctactttatgatctgtggtagacatgaaaaccgcttgctttgggaaccttaagagtacatcctacagctaaaacattttcatatgatgtgacacaaatattagagctcccagccagtcctgtgctgaatactctgtgttcccacctggtttacctctgcgtttctgagagcgaatagtacaatctatcctttagtgggggtgcagctacacaaactggagttattttacttgttaaaacacataatgccttactattatactttctatttgctctacagatttctcctccagagacttaagggtccaggtttgctgatttctttggggattgcttcatgctctgtacttggtgtttcctgacatattccttagtctatttcaatgtcctatctcaccccttctttactccatgttcttctgaccatttagcatgcagtgaaaaaggaatttactattgttagaagaacgtatttctatcccacacccagaggccaccaatggcaatagtagccgaagcgtacctgtagttcagcttttgacatgtgtctaaaacatgtccattaacatgtgcttaatctgttctgtgaaagtattttcagaaatgataaaaagtaatgatggttacatctgaatataagttagatcatgacactcactccttttttcagaaactaccagtggcatcacatcttactcagagtaaaaaccacagtgcttactgtgggctgcaaggcctcgtaggatttgccccccatgactttctgacttcatctcttgtcacacatctccttattcgctccacgccaagcacagtggctttttcactgattcttaaacatgccaggtacactggcctcagagcctttgcactggcttttccaggcactggcttttcactctgcctggaaagctctttcgccagatatttgcatggctagctccctcacattctcctggtgtttactcaaaagtcatgctctcagtgaggccttgtatcaccaccctaactaaaattatacccatttattccttgtcttacatctccctgcttattttgttcttagcattcaccattttcttatgtgcaatgtgtttgtgatgtttatatcatttattttctgtctttccaattggaatgtaagcatcaggaatcagatttttgcccttattttaaaaaaattactgtatccctggtgcttagaagaatgcctggctcagtagttatatttgtaatgaatgatgctccatgaatgataaagtggattgcatgtttgaat

SEQ ID NO: 16343 - DNA, 2645 bp, Homo sapiens
  source 1..2645: mol_type = unassigned DNA
gagtgatgtcagctcccagctcggtgcctgcccggattcctgacatggtgtagtgcaggcagggtggggaaaggacggggaaggactcgtgtgctgcgagctggcggccgggccggagtgctggggctttgaactccgagaggaggtggaccagaacttttggaactagtgccggcggctctccaccccccagtataaaagaacgtgtggatcactttgctgagtacatccaagatttgaagaactgaaataaatcagctttaaacctgctttttaaaaatacaaatggacacctaccagggaacggagatgtgtatcaagaaaggctggcacgtttagaaaatgataaagaatccctcgttcttcaggagcttctaagtaggacatccttagaaactcagaagttggatctgatggctgaaatatctaacttgaagttgaaactgacagctgtagagaaggacagattggattatgaagataagttcagagacacagaggggctgattcaggagatcaatgatttgaggttaaaagttagtgaaatggacagtgagagacttcagtatgaaaaaaagcttaaatcaaccaaatctttaatggccaaactttctagcatgaaaatcaaggtgggtcagatgcagtatgaaaagcagcggatggaacaaaaatgggagtcactgaaggatgaactggcatctttaaaagaacaactagaagaaaaggaatctgaagtaaaaaggctacaagaaaaattggtttgcaagatgaaaggagaaggggttgaaattgttgatagagacatcgaagtacaaaaaatgaaaaaagctgtggagtccttgatggcagcaaatgaagaaaaggatcggaaaatagaagatcttcgacagtgcctgaacaggtacaagaaaatgcaagacacggtggtactggcccaaggtaaaaaaggcaaagatggagaatatgaagagctgctcaattccagttccatctcctctttgctggatgcacagggtttcagtgatctggagaaaagtccatcacccactccagtaatgggatctcccagttgtgacccatttaacacaagtgttcccgaagagttccatactaccatcttgcaagtttccatcccttcattattgccagcaactgtaagcatggaaacttctgaaaaatcaaagttgactcctaagccagagacttcatttgaagaaaatgatggaaacataatccttggtgccactgttgatacccaactgtgtgataaacttttaacttcaagtctgcagaagtccagcagcctgggcaatctgaagaaagagacatctgatggggaaaaggaaactattcagaagacttcagaggacagagctccggcagaaagcaggccatttgggacccttcctcccaggcccccagggcaggacacctccatggatgacaaccccttcggcactcgaaaagtcagatcttcctttggccggggcttttttaaaatcaaaagtaacaagagaacagcaagtgcaccaaacttagctgaaacagaaaaagagacagcagagcacctagatctggctggtgcttcttctcggccaaaagattcacagaggaacagtcccttccagataccgcctccatctccagattccaaaaagaaatccagaggtatcatgaaactctttggaaaacttaggagaagtcaatcaactacattcaacccagatgacatgtctgagcctgaattcaaaagaggagggacaagggcaaccgcggggccccgattaggttggtctcgagacttgggacagtctaacagtgacttggatatgccatttgccaagtggaccaaggagcaggtttgcaattggctgatggaacagggcttgggctcgtacctgaattctggcaagcactggattgcatctggccaaacgcttttgcaggcttctcaacaagatctagagaaggaacttggaatcaagcattcacttcatcgaaagaaactccagctagcactccaagccctgggatctgaagaagaaaccaatcatgggaagctggatttcaactgggtcactagatggttggatgacattggcctccctcaatataagacccagtttgatgaaggacgggttgatggtcgaatgctacattacatgactgttgatgacttactgtctctgaaggttgtaagtgtgctacaccatctcagtatcaaaagggccatccaggtcctgaggatcaataactttgaaccaaactgtctacggaggcggccatctgatgagaataccatcgccccatcagaagttcagaagtggactaaccatcgagtgatggagtggctgcgctccgtggacttggcagaatatgcgcccaatctcagaggcagtggtgtccatggtgggctcatggttctagagcctcgttttaacgtagaaacaatggctcagttattgaacatcccacccaataagactttgctgcgaagacatttggccactcatttcaaccttctgattggggctgaggcacagcaccagaagcgagatgccatggagctgccggattatgtacttctaacagctactgccaaagtgaagccaaagaaacttgcctttagcaattttgggaatttg

SEQ ID NO: 16344 - DNA, 574 bp, Homo sapiens
  source 1..574: mol_type = unassigned DNA
agtgatgtcagctcccagctcggtgcctgcccggattcctgacatggtgtagtgcaggcagggtggggaaaggacggggaaggactcgtgtgctgcgagctggcggccgggccggagtgctggggctttgaactccgagaggaggtggaccagaacttttggaactagtgccggcggctctccaccccccagtataaaagaacgtgtggatcactttgctgagtacatccaagatttgaagaactgaaataaatcagctttaaacctgctttttaaaaatataccactttcacatatgttgttgaatcattaacactgacacacacccaacagctttgtaactcaggcctgaaggaagctgacctcacacactggtttcgtccttgaggcacggcctcattacctcaggaacaccaggcagcgcttccacactgtgcttggagccattttaaacagcacaagggttgatcgacaagtacaaacgtgtgaaaaatgtggcacagaatagaccatgaaaaggacactttatggcaggagggctgaactgatgcaggaaagtggagcatcgtcttgt

SEQ ID NO: 16345 - DNA, 5719 bp, Homo sapiens
  source 1..5719: mol_type = unassigned DNA
cagctcccagctcggtgcctgcccggattcctgacatggtgtagtgcaggcagggtggggaaaggacggggaaggactcgtgtgctgcgagctggcggccgggccggagtgctggggctttgaactccgagaggaggtggaccagaacttttggaactagtgccggcggctctccaccccccagtataaaagaacgtgtggatcactttgctgagtacatccaagatttgaagaactgaaataaatcagctttaaacctgctttttaaaaatacaaatggacacctaccagggaacggagatgtgtatcaagaaaggctggcacgtttagaaaatgataaagaatccctcgttcttcaggtaagtgtgttaacagaccaggtggaggctcagggagagaagattcgagatttggagttttgtcttgaagagcacagagagaaggtgaatgccacagaagaaatgctgcagcaggagcttctaagtaggacatccttagaaactcagaagttggatctgatggctgaaatatctaacttgaagttgaaactgacagctgtagagaaggacagattggattatgaagataagttcagagacacagaggggctgattcaggagatcaatgatttgaggttaaaagttagtgaaatggacagtgagagacttcagtatgaaaaaaagcttaaatcaaccaaatctttaatggccaaactttctagcatgaaaatcaaggtgggtcagatgcagtatgaaaagcagcggatggaacaaaaatgggagtcactgaaggatgaactggcatctttaaaagaacaactagaagaaaaggaatctgaagtaaaaaggctacaagaaaaattggtttgcaagatgaaaggagaaggggttgaaattgttgatagagacatcgaagtacaaaaaatgaaaaaagctgtggagtccttgatggcagcaaatgaagaaaaggatcggaaaatagaagatcttcgacagtgcctgaacaggtacaagaaaatgcaagacacggtggtactggcccaaggcaaagatggagaatatgaagagctgctcaattccagttccatctcctctttgctggatgcacagggtttcagtgatctggagaaaagtccatcacccactccagtaatgggatctcccagttgtgacccatttaacacaagtgttcccgaagagttccatactaccatcttgcaagtttccatcccttcattattgccagcaactgtaagcatggaaacttctgaaaaatcaaagttgactcctaagccagagacttcatttgaagaaaatgatggaaacataatccttggtgccactgttgatacccaactgtgtgataaacttttaacttcaagtctgcagaagtccagcagcctgggcaatctgaagaaagagacatctgatggggaaaaggaaactattcagaagacttcagaggacagagctccggcagaaagcaggccatttgggacccttcctcccaggcccccagggcaggacacctccatggatgacaaccccttcggcactcgaaaagtcagatcttcctttggccggggcttttttaaaatcaaaagtaacaagagaacagcaagtgcaccaaacttagctgaaacagaaaaagagacagcagagcacctagatctggctggtgcttcttctcggccaaaagattcacagaggaacagtcccttccagataccgcctccatctccagattccaaaaagaaatccagaggtatcatgaaactctttggaaaacttaggagaagtcaatcaactacattcaacccagatgacatgtctgagcctgaattcaaaagaggagggacaagggcaaccgcggggccccgattaggttggtctcgagacttgggacagtctaacagtgacttggatatgccatttgccaagtggaccaaggagcaggtttgcaattggctgatggaacagggcttgggctcgtacctgaattctggcaagcactggattgcatctggccaaacgcttttgcaggcttctcaacaagatctagagaaggaacttggaatcaagcattcacttcatcgaaagaaactccagctagcactccaagccctgggatctgaagaagaaaccaatcatgggaagctggatttcaactgggtcactagatggttggatgacattggcctccctcaatataagacccagtttgatgaaggacgggttgatggtcgaatgctacattacatgactgttgatgacttactgtctctgaaggttgtaagtgtgctacaccatctcagtatcaaaagggccatccaggtcctgaggatcaataactttgaaccaaactgtctacggaggcggccatctgatgagaataccatcgccccatcagaagttcagaagtggactaaccatcgagtgatggagtggctgcgctccgtggacttggcagaatatgcgcccaatctcagaggcagtggtgtccatggtgggctcatggttctagagcctcgttttaacgtagaaacaatggctcagttattgaacatcccacccaataagactttgctgcgaagacatttggccactcatttcaaccttctgattggggctgaggcacagcaccagaagcgagatgccatggagctgccggattatgtacttctaacagctactgccaaagtgaagccaaagaaacttgcctttagcaattttgggaatttgagaaagaagaaacaggaagatggtgaagaatatgtttgtccaatggaattgggacaggcatcaggaagtgcatctaagaaaggatttaaacctggtttggatatgcgcctgtatgaggaagatgatttggaccggttagagcagatggaagattcagaagggacagtgagacagataggtgcattctctgaaggcatcaacaatctgacgcacatgttaaaagaagatgacatgtttaaagattttgctgcccgttcccccagtgccagcattacagatgaagactcaaacgtttgaccgtagcacctggatgaacattaggagtgcttagtcttttttctacttgcttttccaaacactcacagtatatacaacaggcagcggattgtctattgtttgttgttccaacttctgctgtcgagaagtttaaacagaaagcaggagtaatgtgccgattctgaagttgccacaaaaaataagacactggtgaatgagagtataattgtttttcttctatttaatgtaaaaatctgtgatatattatatttaaagtgttgcatttaagatgagtattttaccagagtgtttccattcatatccgcggtatggaggatttgaggaacagtaaccaggatgtgaatgattttgttacatcagtgttcactgtagccacctaagtaggacattatatgatttcagaatcaatatgtggaacttctttaagcattcagtgtgcccactaaatgccagccacacctccacttgcctcttattgtcttatttttatatatttttctaaatatatgtatatatacagtacatagaaaatagaacttttattttgtgacctaaggacgatggtgaaaagatcacgttttcaaaacaatctggtgatcagaatgttcatataccagctggtttctgaagaggtcagaatgatctttctccatactgacttttaacaatgttgatcattgaggctaaattaatatatatgaaatattcctttttgatgacaccacaaaattgttgaacagtttaagaatttcaaccttaatcttggatccctttacctcatatggaagaacttgagggacattagtatacttttttttaagatggagtcttgctctgtcacccaggttggagtgccatggcatgatcttggctcactgcaacctccacctcctgggtcaagccattctgcttcagccccaagtaggtgggactccaggcatgcaccaccatgcctggctaatttttgcatttttagtagagacagggtttcaccatattggccaggctgggactcgaactcctgaccttgtgatctgcccgcctcagcctcccaaagtactgggattataggcatgagccaccacgcccagcctgttatttttttattattattgtttttttttagtgacagagtctcattctgttgcccatgctggagtgcagtggcgtgatcatagctcactgcagccttgaattcctaggctccagtgatcctctcacctcagcttccctaatagctaggattacaggtgtgtggcctcccaccccaccccacccttcacacctggctgatttttcaaaaagtttttttgtagaaacagggtctcaccatgttgtccagcctggtctcaaactcctgtcctcaagtgatcctcccacctcagcctttcaaagtgctggaattacaggtgtgagccactctgcctggcctaccactaacttgaatacattcagaatcacctcctctccccaaaatttgtagaaatagtttttgaggaagccaaaagcaaagcagaaacctttacagtattgtttcttttctctttgttaactgtgtcattacagcaaaatactagcagtctgcctaaacatgttcattgtacatttctcaggctatcaatgaatggaggtttttaaaaagttgaatatttgtctgaacattttatttcaaagttcaaaaaaacagaggctgcaaaattcattttataatggctattttgtgacgataagatgtagttcatgtttttctgtagcactgggcccaaatattctttgtaaagaaaatcgctgcagcaaaaactgttactgtgtttattatatttgtagaagtattagaaaaatattctattttttattcagtgctgcgtaattacccatggtagccaaccctacaaaagacaggttttcacaaattgaggtggaggtgggcggttcagtatctgccactggacttgattataaactgtatttgaatatcagtggtattatcttttaagttgtcagcaagttaccaaggtattcattaaagaacttgtaatatcaaattactatttattcataacaattgatttgatgctaataataattttctttaaactctaccattcattatgtggtaactgtattgaacttactttatttggattttattttaatgtgactagatgtcaccacttcaaaaaatcaatttgttcttagaacctggttgaaaataccaggaaactgttacagacgccattttttttttttttgagacggagtcttgctctgttgcccaggctggagtgcagtggcacaatctcagctcactgcaagctccgcctcctgggttcacgccattctcccacctcagcttcccaagcagctgggactacaggtacctgccaccacgcctggctaattttgtttttgtatttttagtagagacggggtttcaccgtgttagccaggaaggtctcaatctcctgacctcgtgaatcgcccccctcggtctcccaaagtgctgggattacaggcgtgagccaccatgcccggcccaaatattttttattcaggatggtataacctaactgataataggtaataaggttaaatttttttatgacgtattttatttacaaatatcatacactgctggtgttaccatatgaaaggaaataaagtcaattgataattgcctc

SEQ ID NO: 16346 - DNA, 6001 bp, Homo sapiens
  source 1..6001: mol_type = unassigned DNA
ggattcctgacatggtgtagtgcaggcagggtggggaaaggacggggaaggactcgtgtgctgcgagctggcggccgggccggagtgctggggctttgaactccgagaggaggtggaccagaacttttggaactagtgccggcggctctccaccccccagtataaaagaacgtgtggatcactttgctgagtacatccaagatttgaagaactgaaataaatcagctttaaacctgctttttaaaaatatctgggttggaatttgcccctgacaaataataaaatgatgagtgatgcaagtgacatgttggctgcagcgttggagcagatggatggtatcatagcaggttctaaggctctggaatattccaatgggatttttgattgccaatctcccacctctccattcatgggaagtttgcgagctctgcaccttgtggaagacctgcgtggattgttagagatgatggaaacagatgagaaagaaggcttgagatgccagatcccagattcaacagcagaaacgcttgttgaatggcttcagagtcaaatgacaaatggacacctaccagggaacggagatgtgtatcaagaaaggctggcacgtttagaaaatgataaagaatccctcgttcttcaggtaagtgtgttaacagaccaggtggaggctcagggagagaagattcgagatttggagttttgtcttgaagagcacagagagaaggtgaatgccacagaagaaatgctgcagcaggagcttctaagtaggacatccttagaaactcagaagttggatctgatggctgaaatatctaacttgaagttgaaactgacagctgtagagaaggacagattggattatgaagataagttcagagacacagaggggctgattcaggagatcaatgatttgaggttaaaagttagtgaaatggacagtgagagacttcagtatgaaaaaaagcttaaatcaaccaaatctttaatggccaaactttctagcatgaaaatcaaggtgggtcagatgcagtatgaaaagcagcggatggaacaaaaatgggagtcactgaaggatgaactggcatctttaaaagaacaactagaagaaaaggaatctgaagtaaaaaggctacaagaaaaattggtttgcaagatgaaaggagaaggggttgaaattgttgatagagacatcgaagtacaaaaaatgaaaaaagctgtggagtccttgatggcagcaaatgaagaaaaggatcggaaaatagaagatcttcgacagtgcctgaacaggtacaagaaaatgcaagacacggtggtactggcccaaggcaaagatggagaatatgaagagctgctcaattccagttccatctcctctttgctggatgcacagggtttcagtgatctggagaaaagtccatcacccactccagtaatgggatctcccagttgtgacccatttaacacaagtgttcccgaagagttccatactaccatcttgcaagtttccatcccttcattattgccagcaactgtaagcatggaaacttctgaaaaatcaaagttgactcctaagccagagacttcatttgaagaaaatgatggaaacataatccttggtgccactgttgatacccaactgtgtgataaacttttaacttcaagtctgcagaagtccagcagcctgggcaatctgaagaaagagacatctgatggggaaaaggaaactattcagaagacttcagaggacagagctccggcagaaagcaggccatttgggacccttcctcccaggcccccagggcaggacacctccatggatgacaaccccttcggcactcgaaaagtcagatcttcctttggccggggcttttttaaaatcaaaagtaacaagagaacagcaagtgcaccaaacttagctgaaacagaaaaagagacagcagagcacctagatctggctggtgcttcttctcggccaaaagattcacagaggaacagtcccttccagataccgcctccatctccagattccaaaaagaaatccagaggtatcatgaaactctttggaaaacttaggagaagtcaatcaactacattcaacccagatgacatgtctgagcctgaattcaaaagaggagggacaagggcaaccgcggggccccgattaggttggtctcgagacttgggacagtctaacagtgacttggatatgccatttgccaagtggaccaaggagcaggtttgcaattggctgatggaacagggcttgggctcgtacctgaattctggcaagcactggattgcatctggccaaacgcttttgcaggcttctcaacaagatctagagaaggaacttggaatcaagcattcacttcatcgaaagaaactccagctagcactccaagccctgggatctgaagaagaaaccaatcatgggaagctggatttcaactgggtcactagatggttggatgacattggcctccctcaatataagacccagtttgatgaaggacgggttgatggtcgaatgctacattacatgactgttgatgacttactgtctctgaaggttgtaagtgtgctacaccatctcagtatcaaaagggccatccaggtcctgaggatcaataactttgaaccaaactgtctacggaggcggccatctgatgagaataccatcgccccatcagaagttcagaagtggactaaccatcgagtgatggagtggctgcgctccgtggacttggcagaatatgcgcccaatctcagaggcagtggtgtccatggtgggctcatggttctagagcctcgttttaacgtagaaacaatggctcagttattgaacatcccacccaataagactttgctgcgaagacatttggccactcatttcaaccttctgattggggctgaggcacagcaccagaagcgagatgccatggagctgccggattatgtacttctaacagctactgccaaagtgaagccaaagaaacttgcctttagcaattttgggaatttgagaaagaagaaacaggaagatggtgaagaatatgtttgtccaatggaattgggacaggcatcaggaagtgcatctaagaaaggatttaaacctggtttggatatgcgcctgtatgaggaagatgatttggaccggttagagcagatggaagattcagaagggacagtgagacagataggtgcattctctgaaggcatcaacaatctgacgcacatgttaaaagaagatgacatgtttaaagattttgctgcccgttcccccagtgccagcattacagatgaagactcaaacgtttgaccgtagcacctggatgaacattaggagtgcttagtcttttttctacttgcttttccaaacactcacagtatatacaacaggcagcggattgtctattgtttgttgttccaacttctgctgtcgagaagtttaaacagaaagcaggagtaatgtgccgattctgaagttgccacaaaaaataagacactggtgaatgagagtataattgtttttcttctatttaatgtaaaaatctgtgatatattatatttaaagtgttgcatttaagatgagtattttaccagagtgtttccattcatatccgcggtatggaggatttgaggaacagtaaccaggatgtgaatgattttgttacatcagtgttcactgtagccacctaagtaggacattatatgatttcagaatcaatatgtggaacttctttaagcattcagtgtgcccactaaatgccagccacacctccacttgcctcttattgtcttatttttatatatttttctaaatatatgtatatatacagtacatagaaaatagaacttttattttgtgacctaaggacgatggtgaaaagatcacgttttcaaaacaatctggtgatcagaatgttcatataccagctggtttctgaagaggtcagaatgatctttctccatactgacttttaacaatgttgatcattgaggctaaattaatatatatgaaatattcctttttgatgacaccacaaaattgttgaacagtttaagaatttcaaccttaatcttggatccctttacctcatatggaagaacttgagggacattagtatacttttttttaagatggagtcttgctctgtcacccaggttggagtgccatggcatgatcttggctcactgcaacctccacctcctgggtcaagccattctgcttcagccccaagtaggtgggactccaggcatgcaccaccatgcctggctaatttttgcatttttagtagagacagggtttcaccatattggccaggctgggactcgaactcctgaccttgtgatctgcccgcctcagcctcccaaagtactgggattataggcatgagccaccacgcccagcctgttatttttttattattattgtttttttttagtgacagagtctcattctgttgcccatgctggagtgcagtggcgtgatcatagctcactgcagccttgaattcctaggctccagtgatcctctcacctcagcttccctaatagctaggattacaggtgtgtggcctcccaccccaccccacccttcacacctggctgatttttcaaaaagtttttttgtagaaacagggtctcaccatgttgtccagcctggtctcaaactcctgtcctcaagtgatcctcccacctcagcctttcaaagtgctggaattacaggtgtgagccactctgcctggcctaccactaacttgaatacattcagaatcacctcctctccccaaaatttgtagaaatagtttttgaggaagccaaaagcaaagcagaaacctttacagtattgtttcttttctctttgttaactgtgtcattacagcaaaatactagcagtctgcctaaacatgttcattgtacatttctcaggctatcaatgaatggaggtttttaaaaagttgaatatttgtctgaacattttatttcaaagttcaaaaaaacagaggctgcaaaattcattttataatggctattttgtgacgataagatgtagttcatgtttttctgtagcactgggcccaaatattctttgtaaagaaaatcgctgcagcaaaaactgttactgtgtttattatatttgtagaagtattagaaaaatattctattttttattcagtgctgcgtaattacccatggtagccaaccctacaaaagacaggttttcacaaattgaggtggaggtgggcggttcagtatctgccactggacttgattataaactgtatttgaatatcagtggtattatcttttaagttgtcagcaagttaccaaggtattcattaaagaacttgtaatatcaaattactatttattcataacaattgatttgatgctaataataattttctttaaactctaccattcattatgtggtaactgtattgaacttactttatttggattttattttaatgtgactagatgtcaccacttcaaaaaatcaatttgttcttagaacctggttgaaaataccaggaaactgttacagacgccattttttttttttttgagacggagtcttgctctgttgcccaggctggagtgcagtggcacaatctcagctcactgcaagctccgcctcctgggttcacgccattctcccacctcagcttcccaagcagctgggactacaggtacctgccaccacgcctggctaattttgtttttgtatttttagtagagacggggtttcaccgtgttagccaggaaggtctcaatctcctgacctcgtgaatcgcccccctcggtctcccaaagtgctgggattacaggcgtgagccaccatgcccggcccaaatattttttattcaggatggtataacctaactgataataggtaataaggttaaatttttttatgacgtattttatttacaaatatcatacactgctggtgttaccatatgaaaggaaataaagtcaattgataattgcctca

SEQ ID NO: 16347 - DNA, 875 bp, Homo sapiens
  source 1..875: mol_type = unassigned DNA
gtgtagtgcaggcagggtggggaaaggacggggaaggactcgtgtgctgcgagctggcggccgggccggagtgctggggctttgaactccgagaggaggtggaccagaacttttggaactagtgccggcggctctccaccccccagtataaaagaacgtgtggatcactttgctgagtacatccaagatttgaagaactgaaataaatcagctttaaacctgctttttaaaaatatctgggttggaatttgcccctgacaaataataaaatgatgagtgatgcaagtgacatgttggctgcagcgttggagcagatggatggtatcatagcaggttctaaggctctggaatattccaatgggatttttgattgccaatctcccacctctccattcatgggaagtttgcgagctctgcaccttgtggaagacctgcgtggattgttagagatgatggaaacagatgagaaagaaggcttgagatgccagatcccagattcaacagcagaaacgcttgttgaatggcttcagagtcaaatgacaaatggacacctaccagggaacggagatgtgtatcaagaaaggctggcacgtttagaaaatgataaagaatccctcgttcttcaggtaagtgtgttaacagaccaggtggaggctcagggagagaagattcgagatttggagttttgtcttgaagagcacagagagaaggtgaatgccacagaagaaatgctgcagcaggtatgtgcagaggccagaaccaagatgggatttccctgctgaactatgtgagatgctgcatttctatgttgtgtttgctctgatgcagcagtaagtttcttgattcatttagaccagcacattaaaaaaaaaaaa

SEQ ID NO: 16348 - DNA, 3208 bp, Homo sapiens
  source 1..3208: mol_type = unassigned DNA
agtgcaggcagggtggggaaaggacggggaaggactcgtgtgctgcgagctggcggccgggccggagtgctggggctttgaactccgagaggaggtggaccagaacttttggaactagtgccggcggctctccaccccccagtataaaagaacgtgtggatcactttgctgagtacatccaagatttgaagaactgaaataaatcagctttaaacctgctttttaaaaatatctgggttggaatttgcccctgacaaataataaaatgatgagtgatgcaagtgacatgttggctgcagcgttggagcagatggatggtatcatagcaggttctaaggctctggaatattccaatgggatttttgattgccaatctcccacctctccattcatgggaagtttgcgagctctgcaccttgtggaagacctgcgtggattgttagagatgatggaaacagatgagaaagaaggcttgagatgccagatcccagattcaacagcagaaacgcttgttgaatggcttcagagtcaaatgacaaatggacacctaccagggaacggagatgtgtatcaagaaaggctggcacgtttagaaaatgataaagaatccctcgttcttcaggtaagtgtgttaacagaccaggtggaggctcagggagagaagattcgagatttggagttttgtcttgaagagcacagagagaaggtgaatgccacagaagaaatgctgcagcaggagcttctaagtaggacatccttagaaactcagaagttggatctgatggctgaaatatctaacttgaagttgaaactgacagctgtagagaaggacagattggattatgaagataagttcagagacacagaggggctgattcaggagatcaatgatttgaggttaaaagttagtgaaatggacagtgagagacttcagtatgaaaaaaagcttaaatcaaccaaagatgaactggcatctttaaaagaacaactagaagaaaaggaatctgaagtaaaaaggctacaagaaaaattggtttgcaagatgaaaggagaaggggttgaaattgttgatagagacatcgaagtacaaaaaatgaaaaaagctgtggagtccttgatggcagcaaatgaagaaaaggatcggaaaatagaagatcttcgacagtgcctgaacaggtacaagaaaatgcaagacacggtggtactggcccaaggcaaagatggagaatatgaagagctgctcaattccagttccatctcctctttgctggatgcacagggtttcagtgatctggagaaaagtccatcacccactccagtaatgggatctcccagttgtgacccatttaacacaagtgttcccgaagagttccatactaccatcttgcaagtttccatcccttcattattgccagcaactgtaagcatggaaacttctgaaaaatcaaagttgactcctaagccagagacttcatttgaagaaaatgatggaaacataatccttggtgccactgttgatacccaactgtgtgataaacttttaacttcaagtctgcagaagtccagcagcctgggcaatctgaagaaagagacatctgatggggaaaaggaaactattcagaagacttcagaggacagagctccggcagaaagcaggccatttgggacccttcctcccaggcccccagggcaggacacctccatggatgacaaccccttcggcactcgaaaagtcagatcttcctttggccggggcttttttaaaatcaaaagtaacaagagaacagcaagtgcaccaaacttagctgaaacagaaaaagagacagcagagcacctagatctggctggtgcttcttctcggccaaaagattcacagaggaacagtcccttccagataccgcctccatctccagattccaaaaagaaatccagaggtatcatgaaactctttggaaaacttaggagaagtcaatcaactacattcaacccagatgacatgtctgagcctgaattcaaaagaggagggacaagggcaaccgcggggccccgattaggttggtctcgagacttgggacagtctaacagtgacttggatatgccatttgccaagtggaccaaggagcaggtttgcaattggctgatggaacagggcttgggctcgtacctgaattctggcaagcactggattgcatctggccaaacgcttttgcaggcttctcaacaagatctagagaaggaacttggaatcaagcattcacttcatcgaaagaaactccagctagcactccaagccctgggatctgaagaagaaaccaatcatgggaagctggatttcaactgggtcactagatggttggatgacattggcctccctcaatataagacccagtttgatgaaggacgggttgatggtcgaatgctacattacatgactgttgatgacttactgtctctgaaggttgtaagtgtgctacaccatctcagtatcaaaagggccatccaggtcctgaggatcaataactttgaaccaaactgtctacggaggcggccatctgatgagaataccatcgccccatcagaagttcagaagtggactaaccatcgagtgatggagtggctgcgctccgtggacttggcagaatatgcgcccaatctcagaggcagtggtgtccatggtgggctcatggttctagagcctcgttttaacgtagaaacaatggctcagttattgaacatcccacccaataagactttgctgcgaagacatttggccactcatttcaaccttctgattggggctgaggcacagcaccagaagcgagatgccatggagctgccggattatgtacttctaacagctactgccaaagtgaagccaaagaaacttgcctttagcaattttgggaatttgagaaagaagaaacaggaagatggtgaagaatatgtttgtccaatggaattgggacaggcatcaggaagtgcatctaagaaaggatttaaacctggtttggatatgcgcctgtatgaggaagatgatttggaccggttagagcagatggaagattcagaagggacagtgagacagataggtgcattctctgaaggcatcaacaatctgacgcacatgttaaaagaagatgacatgtttaaagattttgctgcccgttcccccagtgccagcattacagatgaagactcaaacgtttga

SEQ ID NO: 16349 - DNA, 5933 bp, Homo sapiens
  source 1..5933: mol_type = unassigned DNA
gactcgtgtgctgcgagctggcggccgggccggagtgctggggctttgaactccgagaggaggtggaccagaacttttggaactagtgccggcggctctccaccccccagtataaaagaacgtgtggatcactttgctgagtacatccaagatttgaagaactgaaataaatcagctttaaacctgctttttaaaaatatctgggttggaatttgcccctgacaaataataaaatgatgagtgatgcaagtgacatgttggctgcagcgttggagcagatggatggtatcatagcaggttctaaggctctggaatattccaatgggatttttgattgccaatctcccacctctccattcatgggaagtttgcgagctctgcaccttgtggaagacctgcgtggattgttagagatgatggaaacagatgagaaagaaggcttgagatgccagatcccagattcaacagcagaaacgcttgttgaatggcttcagagtcaaatgacaaatggacacctaccagggaacggagatgtgtatcaagaaaggctggcacgtttagaaaatgataaagaatccctcgttcttcaggtaagtgtgttaacagaccaggtggaggctcagggagagaagattcgagatttggagttttgtcttgaagagcacagagagaaggtgaatgccacagaagaaatgctgcagcaggagcttctaagtaggacatccttagaaactcagaagttggatctgatggctgaaatatctaacttgaagttgaaactgacagctgtagagaaggacagattggattatgaagataagttcagagacacagaggggctgattcaggagatcaatgatttgaggttaaaagttagtgaaatggacagtgagagacttcagtatgaaaaaaagcttaaatcaaccaaagatgaactggcatctttaaaagaacaactagaagaaaaggaatctgaagtaaaaaggctacaagaaaaattggtttgcaagatgaaaggagaaggggttgaaattgttgatagagatgaaaattttaaaaagaagctcaaagaaaaaaacatcgaagtacaaaaaatgaaaaaagctgtggagtccttgatggcagcaaatgaagaaaaggatcggaaaatagaagatcttcgacagtgcctgaacaggtacaagaaaatgcaagacacggtggtactggcccaaggtaaaaaaggcaaagatggagaatatgaagagctgctcaattccagttccatctcctctttgctggatgcacagggtttcagtgatctggagaaaagtccatcacccactccagtaatgggatctcccagttgtgacccatttaacacaagtgttcccgaagagttccatactaccatcttgcaagtttccatcccttcattattgccagcaactgtaagcatggaaacttctgaaaaatcaaagttgactcctaagccagagacttcatttgaagaaaatgatggaaacataatccttggtgccactgttgatacccaactgtgtgataaacttttaacttcaagtctgcagaagtccagcagcctgggcaatctgaagaaagagacatctgatggggaaaaggaaactattcagaagacttcagaggacagagctccggcagaaagcaggccatttgggacccttcctcccaggcccccagggcaggacacctccatggatgacaaccccttcggcactcgaaaagtcagatcttcctttggccggggcttttttaaaatcaaaagtaacaagagaacagcaagtgcaccaaacttagatcgtaaacgaagtgccagtgcacccaccctagctgaaacagaaaaagagacagcagagcacctagatctggctggtgcttcttctcggccaaaagattcacagaggaacagtcccttccagataccgcctccatctccagattccaaaaagaaatccagaggtatcatgaaactctttggaaaacttaggagaagtcaatcaactacattcaacccagatgacatgtctgagcctgaattcaaaagaggagggacaagggcaaccgcggggccccgattaggttggtctcgagacttgggacagtctaacagtgacttggatatgccatttgccaagtggaccaaggagcaggtttgcaattggctgatggaacagggcttgggctcgtacctgaattctggcaagcactggattgcatctggccaaacgcttttgcaggcttctcaacaagatctagagaaggaacttggaatcaagcattcacttcatcgaaagaaactccagctagcactccaagccctgggatctgaagaagaaaccaatcatgggaagctggatttcaactgggtcactagatggttggatgacattggcctccctcaatataagacccagtttgatgaaggacgggttgatggtcgaatgctacattacatgactgttgatgacttactgtctctgaaggttgtaagtgtgctacaccatctcagtatcaaaagggccatccaggtcctgaggatcaataactttgaaccaaactgtctacggaggcggccatctgatgagaataccatcgccccatcagaagttcagaagtggactaaccatcgagtgatggagtggctgcgctccgtggacttggcagaatatgcgcccaatctcagaggcagtggtgtccatggtgggctcatggttctagagcctcgttttaacgtagaaacaatggctcagttattgaacatcccacccaataagactttgctgcgaagacatttggccactcatttcaaccttctgattggggctgaggcacagcaccagaagcgagatgccatggagctgccggattatgtacttctaacagctactgccaaagtgaagccaaagaaacttgcctttagcaattttgggaatttgagaaagaagaaacaggaagatggtgaagaatatgtttgtccaatggaattgggacaggcatcaggaagtgcatctaagaaaggatttaaacctggtttggatatgcgcctgtatgaggaagatgatttggaccggttagagcagatggaagattcagaagggacagtgagacagataggtgcattctctgaaggcatcaacaatctgacgcacatgttaaaagaagatgacatgtttaaagattttgctgcccgttcccccagtgccagcattacagatgaagactcaaacgtttgaccgtagcacctggatgaacattaggagtgcttagtcttttttctacttgcttttccaaacactcacagtatatacaacaggcagcggattgtctattgtttgttgttccaacttctgctgtcgagaagtttaaacagaaagcaggagtaatgtgccgattctgaagttgccacaaaaaataagacactggtgaatgagagtataattgtttttcttctatttaatgtaaaaatctgtgatatattatatttaaagtgttgcatttaagatgagtattttaccagagtgtttccattcatatccgcggtatggaggatttgaggaacagtaaccaggatgtgaatgattttgttacatcagtgttcactgtagccacctaagtaggacattatatgatttcagaatcaatatgtggaacttctttaagcattcagtgtgcccactaaatgccagccacacctccacttgcctcttattgtcttatttttatatatttttctaaatatatgtatatatacagtacatagaaaatagaacttttattttgtgacctaaggacgatggtgaaaagatcacgttttcaaaacaatctggtgatcagaatgttcatataccagctggtttctgaagaggtcagaatgatctttctccatactgacttttaacaatgttgatcattgaggctaaattaatatatatgaaatattcctttttgatgacaccacaaaattgttgaacagtttaagaatttcaaccttaatcttggatccctttacctcatatggaagaacttgagggacattagtatacttttttttaagatggagtcttgctctgtcacccaggttggagtgccatggcatgatcttggctcactgcaacctccacctcctgggtcaagccattctgcttcagccccaagtaggtgggactccaggcatgcaccaccatgcctggctaatttttgcatttttagtagagacagggtttcaccatattggccaggctgggactcgaactcctgaccttgtgatctgcccgcctcagcctcccaaagtactgggattataggcatgagccaccacgcccagcctgttatttttttattattattgtttttttttagtgacagagtctcattctgttgcccatgctggagtgcagtggcgtgatcatagctcactgcagccttgaattcctaggctccagtgatcctctcacctcagcttccctaatagctaggattacaggtgtgtggcctcccaccccaccccacccttcacacctggctgatttttcaaaaagtttttttgtagaaacagggtctcaccatgttgtccagcctggtctcaaactcctgtcctcaagtgatcctcccacctcagcctttcaaagtgctggaattacaggtgtgagccactctgcctggcctaccactaacttgaatacattcagaatcacctcctctccccaaaatttgtagaaatagtttttgaggaagccaaaagcaaagcagaaacctttacagtattgtttcttttctctttgttaactgtgtcattacagcaaaatactagcagtctgcctaaacatgttcattgtacatttctcaggctatcaatgaatggaggtttttaaaaagttgaatatttgtctgaacattttatttcaaagttcaaaaaaacagaggctgcaaaattcattttataatggctattttgtgacgataagatgtagttcatgtttttctgtagcactgggcccaaatattctttgtaaagaaaatcgctgcagcaaaaactgttactgtgtttattatatttgtagaagtattagaaaaatattctattttttattcagtgctgcgtaattacccatggtagccaaccctacaaaagacaggttttcacaaattgaggtggaggtgggcggttcagtatctgccactggacttgattataaactgtatttgaatatcagtggtattatcttttaagttgtcagcaagttaccaaggtattcattaaagaacttgtaatatcaaattactatttattcataacaattgatttgatgctaataataattttctttaaactctaccattcattatgtggtaactgtattgaacttactttatttggattttattttaatgtgactagatgtcaccacttcaaaaaatcaatttgttcttagaacctggttgaaaataccaggaaactgttacagacgccattttttttttttttgagacggagtcttgctctgttgcccaggctggagtgcagtggcacaatctcagctcactgcaagctccgcctcctgggttcacgccattctcccacctcagcttcccaagcagctgggactacaggtacctgccaccacgcctggctaattttgtttttgtatttttagtagagacggggtttcaccgtgttagccaggaaggtctcaatctcctgacctcgtgaatcgcccccctcggtctcccaaagtgctgggattacaggcgtgagccaccatgcccggcccaaatattttttattcaggatggtataacctaactgataataggtaataaggttaaatttttttatgacgtattttatttacaaatatcatacactgctggtgttaccatatgaaaggaaataaagtcaattgataattgcctca

SEQ ID NO: 16350 - DNA, 559 bp, Homo sapiens
  source 1..559: mol_type = unassigned DNA
ccggctccaatccctggatggctttaagtccagcaaacctttctgtttttcctatcgctcttctctttgcttaacctctcctctttcctccagacccacttaaaagcagttcatcaggaaaacttagctgacagtctcagtcagaactcactcgtgcaggaactttgcaggaagcagtataaaagaacgtgtggatcactttgctgagtacatccaagatttgaagaactgaaataaatcagctttaaacctgctttttaaaaatatctgggttggaatttgcccctgacaaataataaaatgatgagtgatgcaagtgacatgttggctgcagcgttggagcagatggatggtatcatagcaggttctaaggctctggaatattccaatgggatttttgattgccaatctcccacctctccattcatgggaagtttgcgagctctgcaccttgtggaagacctgcgtggattgttagagatgatggaaacagatgagaaagaaggcttgagatgccagatcccagattcaacagcagaaacgcttgttgaatggcttc

SEQ ID NO: 16351 - DNA, 585 bp, Homo sapiens
  source 1..585: mol_type = unassigned DNA
agactggcacttacactatcagccctcctgcttatcaagccttcagactcagactggagctatacccttgggttttctgggtctccagcttgcagttagcagatcttgggacttctcagcctacataaatgcatctgggttggaatttgcccctgacaaataataaaatgatgagtgatgcaagtgacatgttggctgcagcgttggagcagatggatggtatcatagcaggttctaaggctctggaatattccaatgggatttttgattgccaatctcccacctctccattcatgggaagtttgcgagctctgcaccttgtggaagacctgcgtggattgttagagatgatggaaacagatgagaaagaaggcttgagatgccagatcccagattcaacagcagaaacgcttgttgaatggcttcagagtcaaatgacaaatggacacctaccagggaacggagatgtgtatcaagaaaggctggcacgtttagaaaatgataaagaatccctcgttcttcaggtaagtgtgttaacagaccaggtggaggctcagggagagaagattcgagatttggagtttt

SEQ ID NO: 16352 - DNA, 937 bp, Homo sapiens
  source 1..937: mol_type = unassigned DNA
gcactctgtgaaatagcatagagtcatttttaggatagaaatatctgacaaataatagatattacactacctttcttaatcaaaattatactcaccttttattttcataagcccatcactttagggcagacgcattggggatttaaaggaatgttttaaatggaaagatgccttcgttcttaaggaggtacatttatttccatttgtctcatctgattcatacaactttaaccctaggagctggtgacttcttaagatttccaagctgctattttataggtataggtaactgtgttaccactttcctaatgtactttcttgtttcttcttggacaggggctgattcaggagatcaatgatttgaggttaaaagttagtgaaatggacagtgagagacttcagtatgaaaaaaagcttaaatcaaccaaagatgaactggcatctttaaaagaacaactagaagaaaaggaatctgaagtaaaaaggctacaagaaaaattggtttgcaagatgaaaggagaaggggttgaaattgttgatagaggtaagaagatatatttcacatttatcatctcattttgttaaagtcctccaaaatctgtaaaggaaaccaatgaaaatcaatgtgtagttttagcatcaaagaaagagcagcagaatccagccaggaccagaaccacaggggattctccaagactctttactgtgactgggaatccattaatttcctcttcagcagctggaaaaggggaattctgtactttatttggtgtttaagattgctagactgtaaattctcatcacaaggatggacttgtctcaattgcgatgcaagggaatttgtgccaaaggagttaaaaagaaccatccctgtgtcccgggatcgttgccctcagaactgaaattagataaagtaagggacttagaaactgttctg

SEQ ID NO: 16353 - DNA, 616 bp, Homo sapiens
  source 1..616: mol_type = unassigned DNA
aatgaagaaaaggatcggaaaatagaagatcttcgacagtgcctgaacaggtacaagaaaatgcaagacacggtggtactggcccaaggtaaaaaaggcaaagatggagaatatgaagagctgctcaattccagttccatctcctctttgctggatgcacagggtttcagtgatctggagaaaagtccatcacccactccagtaatgggatctcccagttgtgacccatttaacacaagtgttcccgaagagttccatactaccatcttgcaagtttccatcccttcattattgccagcaactgtaagcatggaaacttctgaaaaatcaaagttgactcctaagccagagacttcatttgaagaaaatgatggaaacataatccttggtgccactgttgatacccaactgtgtgataaacttttaacttcaagtctgcagaagtccagcagcctgggcaatctgaagaaagagacatctgatggggacagagctccggcagaaagcaggccatttgggacccttcctcccaggcccccagggcaggacacctccatggatgacaaccccttcggcactcgaaaagtcagatcttcctttggccggggctttttta

SEQ ID NO: 16354 - DNA, 1565 bp, Homo sapiens
  source 1..1565: mol_type = unassigned DNA
gacagagctccggcagaaagcaggccatttgggacccttcctcccaggcccccagggcaggacacctccatggatgacaaccccttcggcactcgaaaagtcagatcttcctttggccggggcttttttaaaatcaaaagtaacaagagaacagcaagtgcaccaaacttaggtacgtatgaccaaaatgcctttgccctaattcttccacaaggaggaaaagagcagtgtcttcccttcccttactctttcattcattgattcatttctctttctcagaaacgaaggtgaatgacttaggggaatttagcaaaaaatgcctccgtggatttaatttagtgttgtgaagatatatagactctcaccctgctctctcctgtggtataaacttagcggaaagacctaaaatcatgattccctttgacttcatcatggagtttcccatctgttgtgatagtggataaattaacattgacgttgagcctgtgtgtaacatcagaagcactgtgtgccgcatgcctctcctccacggtgtgtatttggcgaggaggagtctgatctgcatttcattttgtcatctctgtgttctctccattgggctgcgtgtgattgtgtgcgttgttgggatatctgaagatcgtaaacgaagtgccagtgcacccaccctaggtattgtacccctgcatgccagccttcaccagcactgtgctccaaaccaatctaatccctgctcttggcatctgtgatctctagaaagcgatctgacagcaatcagaaaatgtagttctctattccggagtgttctttccaccttctgctaaaaaggactctgtagaggctttgcttccaagcctaaatgctgttttaaccaatactagtaacactcactgtgtgaatagctttgagaggacctagacgtgtgcagcatccctcagagtgcagggcaggaatgtcctggcattgtacattgcagctctttcagccttgaagtgcatattaccacacactaactcccaggtccttgcagtccgttctccatgcttacatttcccccagcctccaaaaagaaatttttttggccatatagggaggtttatagaagacattgaatattatagttttaggcttacttctcttaggggaacattcttctgacgttttattactttgaagatggagataatatttagtgatgacagaagcaactttacttgatatctgaggcgttaccccccaaagtgattttagaagaggggcagctcagttttcctctttgtaaggcaggggacaaatggggaaaaaagttctcaaaataaaaaagagaaatatggtagttttaagatgaggataagctaggcagcattttcaggggcacctgtagccatcgtggttgaaggatttgaattgggaaagttcctttgggtttttccaaaaggtgctgttaccttgtatagatatccacctatctattcacatggaccagcaaacgggacttctctctctatcgatataaatgtctagaatgaacactggatgcataaaataaactgatctgttcagacaac

SEQ ID NO: 16355 - DNA, 566 bp, Homo sapiens
  source 1..566: mol_type = unassigned DNA
tttaaatttaaatgtctatgttaacaacacaaagaggattagttccagtaggtgcactagttaaaaatgttctgattaacaagtctaaggcctcctcaggtctaatactggccatgtgtgttgtcttctttagacttaggagaagtcaatcaactacattcaacccagatgacatgtctgagcctgaattcaaaagaggagggacaagggcaaccgcggggccccgattaggttggtctcgagacttgggacagtctaacagtgacttggatatgccatttgccaagtggaccaaggagcaggtttgcaattggctgatggaacagggcttgggctcgtacctgaattctggcaagcactggattgcatctggccaaacgcttttgcaggcttctcaacaagatctagagaaggaacttggaatcaagcattcacttcatcgaaagaaactccagctagcactccaagccctgggatctgaagaagaaaccaatcatgggaagctggatttcaactgggtcactagatggttggatgacattggcctccctcaatataagacccag

SEQ ID NO: 16356 - DNA, 973 bp, Homo sapiens
  source 1..973: mol_type = unassigned DNA
atgacattggcctccctcaatataagacccagtttgatgaaggacgggttgatggtcgaatgctacattacatgactgttaataccatcgccccatcagaagttcagaagtggactaaccatcgagtgatggagtggctgcgctccgtggacttggcagaatatgcgcccaatctcagaggcagtggtgtccatggtgggctcatggttctagagcctcgttttaacgtagaaacaatggctcagttattgaacatcccacccaataagactttgctgcgaagacatttggccactcatttcaaccttctgattggggctgaggcacagcaccagaagcgagatgccatggagctgccggattatgtacttctaacagctactgccaaagtgaagccaaagaaacttgcctttagcaattttgggaatttgagaaagaagaaacaggaagatggtgaagaatatgtttgtccaatggaattgggacaggcatcaggaagtgcatctaagaaaggatttaaacctggtttggatatgcgcctgtatgaggaagatgatttggaccggttagagcagatggaagattcagaagggacagtgagacagataggtgcattctctgaaggcatcaacaatctgacgcacatgttaaaagaagatgacatgtttaaagattttgctgcccgttcccccagtgccagcattacagatgaagactcaaacgtttgaccgtagcacctggatgaacattaggagtgcttagtcttttttctacttgcttttccaaacactcacagtatatacaacaggcagcggattgtctattgtttgttgttccaacttctgctgtcgagaagtttaaacagaaagcaggagtaatgtgccgattctgaagttgccacaaaaaataagacactggtgaatgagagtataattgtttttcttctatttaatgtaaaaatctgtgatatatt

SEQ ID NO: 16357 - DNA, 424 bp, Homo sapiens
  source 1..424: mol_type = unassigned DNA
ctttctttttgcatttagtgggttgttgagtaactgtactccatggagcagactttttagacagaaaatgcaatttaatatttaggatcctggttgtgtgttcccatagaataccatcgccccatcagaagttcagaagtggactaaccatcgagtgatggagtggctgcgctccgtggacttggcagaatatgcgcccaatctcagaggcagtggtgtccatggtgggctcatggttctagagcctcgttttaacgtagaaacaatggctcagttattgaacatcccacccaataagactttgctgcgaagacatttggccactcatttcaaccttctgattggggctgaggcacagcaccagaagcgagatgccatggagctgccggattatgtacttctaacagctactgccaaagtgaag

SEQ ID NO: 16358 - DNA, 484 bp, Homo sapiens
  source 1..484: mol_type = unassigned DNA
actagagggacctccaccccaggttgcgagtgcagcgcggcgggacctgggatgattcgggggctttccgacctgcttagggagggcggctcagagacaacctcaattttgcctggattgcacgcgggccgaggaagtcgggatgctccgaagggtttctgctctgggagtgcctctaattaagaagaggaggaggccaggcaggcaaaaggagtcatggcttctgatgctagtcatgcgctggaagctgccctggagcaaatggacgggatcattgcaggcactaaaacaggtgcagatcttagtgatggtacttgtgagcctggactggcttccccggcctcctacatgaaccccttcccggtgctccatctcatcgaggacttgaggctggccttggagatgctggagcttcctcaggagagagcagccctcctgagccagatccctggcccaacagctgcctacataaaggaatggtttg

SEQ ID NO: 16359 - DNA, 814 bp, Homo sapiens
  source 1..814: mol_type = unassigned DNA
gggctgaccaggccggtcccccgggaacaggaaccctggtggacgggtcccagcaggcttcttcggtgcccgagagggagcgggtgcccaagggggtggtccctgtggcaggtcccggggtgggggcgcggcgctccgggaagagccttccgcaggtccccgccccgtcacgtgggcgccggccccggccgctgcggtcggtccgctggttggtcgggcgcttggtccggcagttggtcggtgggccagtggcccgtcgctcgcttctgggctctcatgtttgaaggtgggagggacacgggagcggcccgcacacctgagccgcccggagaggagcctcggccccgtacccaggaaaaactggcggagagcctcagaaccacctgtttcctctgctgcaccatgcttgagtgtggaagccgtgcccctgttctccacagcgtgtatggccattcggcacatgtgtagatttgctgaatgagcaaacagcaactcctccagtttacagactaagaagaggaggaggccaggcaggcaaaaggagtcatggcttctgatgctagtcatgcgctggaagctgccctggagcaaatggacgggatcattgcaggcactaaaacaggtgcagatcttagtgatggtacttgtgagcctggactggcttccccggcctcctacatgaaccccttcccggtgctccatctcatcgaggacttgaggctggccttggagatgctggagcttcctcaggagagagcagccctcctgagccagatccctggcccaacagctgcctacataaaggaatggtttg

SEQ ID NO: 16360 - DNA, 3557 bp, Homo sapiens
  source 1..3557: mol_type = unassigned DNA
gctgaccaggccggtcccccgggaacaggaaccctggtggacgggtcccagcaggcttcttcggtgcccgagagggagcgggtgcccaagggggtggtccctgtggcaggtcccggggtgggggcgcggcgctccgggaagagccttccgcaggtccccgccccgtcacgtgggcgccggccccggccgctgcggtcggtccgctggttggtcgggcgcttggtccggcagttggtcggtgggccagtggcccgtcgctcgcttctgggctctcatgtttgaaggtgggagggacacgggagcggcccgcacacctgagccgcccggagaggagcctcggccccgtacccagtaagaagaggaggaggccaggcaggcaaaaggagtcatggcttctgatgctagtcatgcgctggaagctgccctggagcaaatggacgggatcattgcaggcactaaaacaggtgcagatcttagtgatggtacttgtgagcctggactggcttccccggcctcctacatgaaccccttcccggtgctccatctcatcgaggacttgaggctggccttggagatgctggagcttcctcaggagagagcagccctcctgagccagatccctggcccaacagctgcctacataaaggaatggtttgaagagagcttgtcccaggtaaaccaccacagtgctgctagtaatgaaacctaccaggaacgcttggcacgtctagaaggggataaggagtccctcatattgcaggtgagtgtcctcacagaccaagtagaagcccagggagaaaagattcgagacctggaagtgtgtctggaaggacaccaggtgaaactcaatgctgctgaagagatgcttcaacaggagctgctaagccgcacatctcttgagacccagaagctcgatctgatgactgaagtgtctgagctgaagctcaagctggttggcatggagaaggagcagagagagcaggaggagaagcagagaaaagcagaggagttactgcaagagctcaggcacctcaaaatcaaagtggaagagttggaaaatgaaaggaatcagtatgaatggaagctaaaggccactaaggctgaagtcgcccagctgcaagaacaggtggccctgaaagatgcagaaattgagcgtctgcacagccagctctcccggacagcagctctccacagtgagagtcacacagagagagaccaagaaattcaacgtctgaaaatggggatggaaactttgctgcttgccaatgaagataaggaccgtcggatagaggagcttacggggctgttaaaccagtaccggaaggtaaaggagattgtgatggtcactcaagggccttcggagagaactctctcaatcaatgaagaagaaccggagggaggtttcagcaagtggaacgctacaaataaggaccctgaagaattatttaaacaagagatgcctccaagatgtagctctcctacagtggggccacctccattgccacagaaatcactggaaaccagggctcagaaaaagctctcttgtagtctagaagacttgagaagtgaatctgtggataagtgtatggatgggaaccagcccttcccggtgttagaacccaaggacagccctttcttggcggagcacaaatatcccactttacctgggaagctttcaggagccacgcccaatggagaggctgccaaatctcctcccaccatctgccagcctgacgccacggggagcagcctgctgaggctgagagacacagaaagtggctgggacgacactgctgtggtcaatgacctctcatccacatcatcgggcactgaatcaggtcctcagtctcctctgacaccagatggtaaacggaatcccaaaggcattaagaagttctggggaaaaatccgaagaactcagtcaggaaatttctacactgacacgctggggatggcagagtttcgacgaggtgggctccgggcaaccgcagggccaagactctctaggaccagggactccaagggacagaaaagtgacgccaatgccccctttgcccagtggagcacagagcgtgtgtgtgcatggctggaggactttggcctggctcagtatgtgatctttgccaggcagtgggtatcttctggccacaccttattgacagccacccctcaggacatggaaaaggagctaggaattaagcacccactccacaggaagaagcttgttttagcagtgaaagccatcaacaccaaacaggaggagaagtctgcactgctagaccacatttgggtgacaaggtggcttgatgatattggcttaccccagtacaaagaccagtttcatgaatctagagttgacagacgaatgctgcaatacctaactgtgaacgatttactcttcttaaaagtcaccagccaactacatcatctcagcatcaaatgtgccattcacgtgctgcatgtcaacaagttcaacccccactgcctgcaccggcggccagctgatgagagtaacctttctccttcagaagttgtacagtggtccaaccacagggtgatggagtggttacgatctgtggacctggcagagtatgcacccaatcttcgagggagtggagtccatggaggcctcattatcctggagccacgcttcactggggacaccctggctatgcttctcaacatccccccacaaaagacgctcctcaggcgccacctgaccaccaagttcaatgccttgattggtccggaggctgaacaggagaagcgagagaaaatggcctcaccagcttacacaccactgaccaccacagccaaagtccggccaaggaaactaggattttcacacttcggaaacataagaaaaaagaagttcgatgaatcgacggactacatttgcccaatggagcccagtgacggtgtcagtgatagtcacagggtctacagtggctaccggggcctcagcccccttgatgcccctgaactggatgggctggaccaggtgggacagattagctgatgcccttgtcacctgccctctgtgcaccctgagagctcacagtaacactgtgtgtgtcaccatataactgcacctcacccccgcacgtgtgcatgactcgcagagaatattccagcaattgtgtacccctgggccagtctctttgaaccctgagggtggccaggatctggagctgcatctctaaggggccaggctttggggaccattgccaaaggtggactcaggaggaaagacacttaaagacacttttacatgtctagtaattcttgatgttcatcttcagcaccagtggaaacacatgaacttcgatgcaggtccagagaccatggacactcccacgaggctcagctctcaggcaccccctacacttcagttgagggaaaagctcaagtgccttaggcccgtggaccacagtcttggctgagatcaaagggatgagcaacagggacttctgccacagtgacaatggaattgtgttgtgccttacttcagaggtggtctcttctttcttgtaataaaagcaatatttatgcggaaa

SEQ ID NO: 16361 - DNA, 625 bp, Homo sapiens
  source 1..625: mol_type = unassigned DNA
cagtaggaggaggatgtcgctgctgagactgtgggacagctaggctcagagggagtctgacttcggggcacccggagtaagaagaggaggaggccaggcaggcaaaaggagtcatggcttctgatgctagtcatgcgctggaagctgccctggagcaaatggacgggatcattgcaggcactaaaacaggtgcagatcttagtgatggtacttgtgagcctggactggcttccccggcctcctacatgaaccccttcccggtgctccatctcatcgaggacttgaggctggccttggagatgctggagcttcctcaggagagagcagccctcctgagccagatccctggcccaacagctgcctacataaaggaatggtttgaagagagcttgtcccaggtaaaccaccacagtgctgctagtaatgaaacctaccaggaacgcttggcacgtctagaaggggataaggagtccctcatattgcaggtgagtgtcctcacagaccaagtagaagcccagggagaaaagattcgagacctggaagtgtgtctggaaggacaccaggtgaaactcaatgctgctgaagagatgcttcaacaggagctgctaagccgcacatctcttga

SEQ ID NO: 16362 - DNA, 534 bp, Homo sapiens
  source 1..534: mol_type = unassigned DNA
attcagcaactctgatagcaacgttctcagcagcctggcccctctgtcctgctatggctcctctttgtcctgacaggatatctcgctgtgttgggctcctctgtcctgagggaaatttagcacaatggccttgtccctcattgtgatataaagccagtgtctgtgggctctgccattgctctgaggagctgtcttcgcaggccaggtgtgcggcttctcctctccactgtcagatctgatcctgtgggggtcgtgacctctggatgttataggacctgtggaggacagtaagaagaggaggaggccaggcaggcaaaaggagtcatggcttctgatgctagtcatgcgctggaagctgccctggagcaaatggacgggatcattgcaggcactaaaacaggtgcagatcttagtgatggtacttgtgagcctggactggcttccccggcctcctacatgaaccccttcccggtgctccatctcatcgaggacttgaggctggccttggagatgctggagcttcctcaggagaga

SEQ ID NO: 16363 - DNA, 407 bp, Homo sapiens
  source 1..407: mol_type = unassigned DNA
accccttcccggtgctccatctcatcgaggacttgaggctggccttggagatgctggagcttcctcaggagagagcagccctcctgagccagatccctggcccaacagctgcctacataaaggaatggtttgaagagagcttgtcccaggtaaaccaccacagtgctgctagtaatgaaacctaccaggaacgcttggcacgtctagaaggggataaggagtccctcatattgcaggtgagtgtcctcacagaccaagtagaagcccagggagaaaagattcgagacctggaagtgtgtctggaaggacaccaggtgaaactcaatgctgctgaagagatgcttcaacagatatgcaatttagtcctcagattttgtatgcttaatattatatttttcccatttaaa

SEQ ID NO: 16364 - DNA, 780 bp, Homo sapiens
  source 1..780: mol_type = unassigned DNA
agtttacagttctgcctgataagatgctgctgatttctggtaggcagcaggagtaacacctcagggggcctcagctcctttttcagccattccctcaagtacttggaattccagccagtcccaggtaaaccaccacagtgctgctagtaatgaaacctaccaggaacgcttggcacgtctagaaggggataaggagtccctcatattgcaggtgagtgtcctcacagaccaagtagaagcccagggagaaaagattcgagacctggaagtgtgtctggaaggacaccaggtgaaactcaatgctgctgaagagatgcttcaacaggagctgctaagccgcacatctcttgagacccagaagctcgatctgatgactgaagtgtctgagctgaagctcaagctggttggcatggagaaggagcagagagagcaggaggagaagcagagaaaagcagaggagttactgcaagagctcaggcacctcaaaatcaaagtggaagagttggaaaatgaaaggaatcagtatgaatggaagctaaaggccactaaggctgaagtcgcccagctgcaagaacaggtggccctgaaagatgcagaaattgagcgtctgcacagccagctctcccggacagcagctctccacagtgagagtcacacagagagagaccaagaaattcaacgtctgaaaatggggatggaaactttgctgcttgccaatgaagataaggaccgtcggatagaggagcttacggggctgttaaaccagtaccggaaggtaaa

SEQ ID NO: 16365 - DNA, 3003 bp, Homo sapiens
  source 1..3003: mol_type = unassigned DNA
gatgggaataggaggaggtggggggtggcatctagggagtgctggaggggccacctggagagcctgcatgtgacctgccctgaaaggaggaaaacagctgcagctccagtcccaggtaaaccaccacagtgctgctagtaatgaaacctaccaggaacgcttggcacgtctagaaggggataaggagtccctcatattgcaggtgagtgtcctcacagaccaagtagaagcccagggagaaaagattcgagacctggaagtgtgtctggaaggacaccaggtgaaactcaatgctgctgaagagatgcttcaacaggagctgctaagccgcacatctcttgagacccagaagctcgatctgatgactgaagtgtctgagctgaagctcaagctggttggcatggagaaggagcagagagagcaggaggagaagcagagaaaagcagaggagttactgcaagagctcaggcacctcaaaatcaaagtggaagagttggaaaatgaaaggaatcagtatgaatggaagctaaaggccactaaggctgaagtcgcccagctgcaagaacaggtggccctgaaagatgcagaaattgagcgtctgcacagccagctctcccggacagcagctctccacagtgagagtcacacagagagagaccaagaaattcaacgtctgaaaatggggatggaaactttgctgcttgccaatgaagataaggaccgtcggatagaggagcttacggggctgttaaaccagtaccggaaggtaaaggagattgtgatggtcactcaagggccttcggagagaactctctcaatcaatgaagaagaaccggagggaggtttcagcaagtggaacgctacaaataaggaccctgaagaattatttaaacaagagatgcctccaagatgtagctctcctacagtggggccacctccattgccacagaaatcactggaaaccagggctcagaaaaagctctcttgtagtctagaagacttgagaagtgaatctgtggataagtgtatggatgggaaccagcccttcccggtgttagaacccaaggacagccctttcttggcggagcacaaatatcccactttacctgggaagctttcaggagccacgcccaatggagaggctgccaaatctcctcccaccatctgccagcctgacgccacggggagcagcctgctgaggctgagagacacagaaagtggctgggacgacactgctgtggtcaatgacctctcatccacatcatcgggcactgaatcaggtcctcagtctcctctgacaccagatggtaaacggaatcccaaaggcattaagaagttctggggaaaaatccgaagaactcagtcaggaaatttctacactgacacgctggggatggcagagtttcgacgaggtgggctccgggcaaccgcagggccaagactctctaggaccagggactccaagggacagaaaagtgacgccaatgccccctttgcccagtggagcacagagcgtgtgtgtgcatggctggaggactttggcctggctcagtatgtgatctttgccaggcagtgggtatcttctggccacaccttattgacagccacccctcaggacatggaaaaggagctaggaattaagcacccactccacaggaagaagcttgttttagcagtgaaagccatcaacaccaaacaggaggagaagtctgcactgctagaccacatttgggtgacaaggtggcttgatgatattggcttaccccagtacaaagaccagtttcatgaatctagagttgacagacgaatgctgcaatacctaactgtgaacgatttactcttcttaaaagtcaccagccaactacatcatctcagcatcaaatgtgccattcacgtgctgcatgtcaacaagttcaacccccactgcctgcaccggcggccagctgatgagagtaacctttctccttcagaagttgtacagtggtccaaccacagggtgatggagtggttacgatctgtggacctggcagagtatgcacccaatcttcgagggagtggagtccatggaggcctcattatcctggagccacgcttcactggggacaccctggctatgcttctcaacatccccccacaaaagacgctcctcaggcgccacctgaccaccaagttcaatgccttgattggtccggaggctgaacaggagaagcgagagaaaatggcctcaccagcttacacaccactgaccaccacagccaaagtccggccaaggaaactaggattttcacacttcggaaacataagaaaaaagaagttcgatgaatcgacggactacatttgcccaatggagcccagtgacggtgtcagtgatagtcacagggtctacagtggctaccggggcctcagcccccttgatgcccctgaactggatgggctggaccaggtgggacagattagctgatgcccttgtcacctgccctctgtgcaccctgagagctcacagtaacactgtgtgtgtcaccatataactgcacctcacccccgcacgtgtgcatgactcgcagagaatattccagcaattgtgtacccctgggccagtctctttgaaccctgagggtggccaggatctggagctgcatctctaaggggccaggctttggggaccattgccaaaggtggactcaggaggaaagacacttaaagacacttttacatgtctagtaattcttgatgttcatcttcagcaccagtggaaacacatgaacttcgatgcaggtccagagaccatggacactcccacgaggctcagctctcaggcaccccctacacttcagttgagggaaaagctcaagtgccttaggcccgtggaccacagtcttggctgagatcaaagggatgagcaacagggacttctgccacagtgacaatggaattgtgttgtgccttacttcagaggtggtctcttctttcttgtaataaaagcaatatttatgcggaaagcaa

SEQ ID NO: 16366 - DNA, 1597 bp, Homo sapiens
  source 1..1597: mol_type = unassigned DNA
aatggatggtaccaccagtgccaaggacagcaaacgctctgtgctgggcccgtcgcacagcaggaccaagaacccagactggagctgcttttttttggaaacaacaggctttcctcagggcacagcccgtcactcgcctggaaaatgggtgggcgtgggcttcagggcgggggtcaggctgtgtgtgggaaccagtgagctcctccaagagcagcacttatttttagtcttctccccagtcccaaataaactgagagcagctgggagccctgggtaaatgcagagtgaagcagagacaggaaatcggggctctcagtaatgagttccagccactccagaagggggaagccagacaaggaattttcttcaggactgtttccctctggcaggctccggtattatcactgagaatggtcccgtgtgtgtgtgcgtgtgtgtcatgtttacaacttctgtccaagtcttctttcttttttctctacctttgtgtgacatttgatttctccgcagggctctgaatcccagtcctggtgcgtgtgcgtgcatgtatgtgcgtgtgtgtgtgtgtgtgtgtgtgtgtgtgtgtttgttggggtggtcggggaggacactgaagcagcacggtctgctctgtgtcgctgtgtgtctgaaactgtctagggagaggctgaaggacgcaggccagggaagtggggaaatttgaacacagcttggagttcttgaggggggagggggcagaggcaaggaagaggagagaactggtctccagccaggaaaagggctttttccaccaaggcatctaactgctgacatgggtgcccagcatggatggggacattgatgtttacaagcatttctcgtggctgaagaggtcccaggtaaaccaccacagtgctgctagtaatgaaacctaccaggaacgcttggcacgtctagaaggggataaggagtccctcatattgcaggagctgctaagccgcacatctcttgagacccagaagctcgatctgatgactgaagtgtctgagctgaagctcaagctggttggcatggagaaggagcagagagagcaggaggagaagcagagaaaagcagagctcacagtaacactgtgtgtgtcaccatataactgcacctcacccccgcacgtgtgcatgactcgcagagaatattccagcaattgtgtacccctgggccagtctctttgaaccctgagggtggccaggatctggagctgcatctctaaggggccaggctttggggaccattgccaaaggtggactcaggaggaaagacacttaaagacacttttacatgtctagtaattcttgatgttcatcttcagcaccagtggaaacacatgaacttcgatgcaggtccagagaccatggacactcccacgaggctcagctctcaggcaccccctacacttcagttgagggaaaagctcaagtgccttaggcccgtggaccacagtcttggctgagatcaaagggatgagcaacagggacttctgccacagtgacaatggaattgtgttgtgccttacttcagaggtggtctcttctttcttgtaataaaagcaatatttatgcgg

SEQ ID NO: 16367 - DNA, 577 bp, Homo sapiens
  source 1..577: mol_type = unassigned DNA
gtaaatgcagagtgaagcagagacaggaaatcggggctctcagtaatgagttccagccactccagaagggggaagccagacaaggaattttcttcaggactgtttccctctggcaggctccgtcccaggtaaaccaccacagtgctgctagtaatgaaacctaccaggaacgcttggcacgtctagaaggggataaggagtccctcatattgcaggtgagtgtcctcacagaccaagtagaagcccagggagaaaagattcgagacctggaagtgtgtctggaaggacaccaggtgaaactcaatgctgctgaagagatgcttcaacaggagctgctaagccgcacatctcttgagacccagaagctcgatctgatgactgaagtgtctgagctgaagctcaagctggttggcatggagaaggagcagagagagcaggaggagaagcagagaaaagcagaggagttactgcaagagctcaggcacctcaaaatcaaagtggaagagttggaaaatgaaaggaatcagtatgaatggaagctaaaggccactaaggctgaagtcgcccagctgcaaga

SEQ ID NO: 16368 - DNA, 602 bp, Homo sapiens
  source 1..602: mol_type = unassigned DNA
agacaaggaattttcttcaggactgtttccctctggcaggctccggtattatcactgagaatggtcccgtgtgtgtgtgcgtgtgtgtcatgtttacaacttctgtccaagtcttctttcttttttctctacctttgtgtgacatttgatttctccgcagggctctgaatcccagtcctggtgcgtgtgcgtgcatgtatgtgcgtgtgtgtgtgtgtgtgtgtgtgtgtgtgtgtttgttggggtggtcggggaggacactgaagcagcacggtctgctctgtgtcgctgtgtgtctgaaactgtctagggagaggctgctgcccattttacagatggcaccttcggaagacaatgctgagccaggaccagctgctgaatgactctcgcctgcctgcccccaactctgatgactggagatgactttcttcgtggctgagagcgtagggaggcatgtgtgggggccccggagcctttgcttctgtggggagcgggcacacagccccctctgcaagcccagtccgggctggcagggtgtctcagacaggctgctgacaggcatgaagcagagctgtgggacaggtgtccaggggtggccccag

SEQ ID NO: 16369 - DNA, 2580 bp, Homo sapiens
  source 1..2580: mol_type = unassigned DNA
gttgcagaagtgctggcaagccagctgagatgtgccttgaggtcggggctgttctggaagaggaataaggagcaggagtccagcccagaggcagctcctgtggctgttgggtgttttactcttgagtctatcaagagcagtaaacgtgacccatgtcatcagagcagtggccgagactccctggtaaggtgagtgtcctcacagaccaagtagaagcccagggagaaaagattcgagacctggaagtgtgtctggaaggacaccaggtgaaactcaatgctgctgaagagatgcttcaacaggagctgctaagccgcacatctcttgagacccagaagctcgatctgatgactgaagtgtctgagctgaagctcaagctggttggcatggagaaggagcagagagagcaggaggagaagcagagaaaagcagaggagttactgcaagagctcaggcacctcaaaatcaaagtggaagagttggaaaatgaaaggaatcagtatgaatggaagctaaaggccactaaggctgaagtcgcccagctgcaagaacaggtggccctgaaagatgcagaaattgagcgtctgcacagccagctctcccggacagcagctctccacagtgagagtcacacagagagagaccaagaaattcaacgtctgaaaatggggatggaaactttgctgcttgccaatgaagataaggaccgtcggatagaggagcttacggggctgttaaaccagtaccggaaggtaaaggagattgtgatggtcactcaagggccttcggagagaactctctcaatcaatgaagaagaaccggagggaggtttcagcaagtggaacgctacaaataaggaccctgaagaattatttaaacaagagatgcctccaagatgtagctctcctacagtggggccacctccattgccacagaaatcactggaaaccagggctcagaaaaagctctcttgtagtctagaagacttgagaagtgaatctgtggataagtgtatggatgggaaccagcccttcccggtgttagaacccaaggacagccctttcttggcggagcacaaatatcccactttacctgggaagctttcaggagccacgcccaatggagaggctgccaaatctcctcccaccatctgccagcctgacgccacggggagcagcctgctgaggctgagagacacagaaagtggctgggacgacactgctgtggtcaatgacctctcatccacatcatcgggcactgaatcaggtcctcagtctcctctgacaccagatggtaaacggaatcccaaaggcattaagaagttctggggaaaaatccgaagaactcagtcaggaaatttctacactgacacgctggggatggcagagtttcgacgaggtgggctccgggcaaccgcagggccaagactctctaggaccagggactccaagggacagaaaagtgacgccaatgccccctttgcccagtggagcacagagcgtgtgtgtgcatggctggaggactttggcctggctcagtatgtgatctttgccaggcagtgggtatcttctggccacaccttattgacagccacccctcaggacatggaaaaggagctaggaattaagcacccactccacaggaagaagcttgttttagcagtgaaagccatcaacaccaaacaggaggagaagtctgcactgctagaccacatttgggtgacaaggtggcttgatgatattggcttaccccagtacaaagaccagtttcatgaatctagagttgacagacgaatgctgcaatacctaactgtgaacgatttactcttcttaaaagtcaccagccaactacatcatctcagcatcaaatgtgccattcacgtgctgcatgtcaacaagttcaacccccactgcctgcaccggcggccagctgatgagagtaacctttctccttcagaagttgtacagtggtccaaccacagggtgatggagtggttacgatctgtggacctggcagagtatgcacccaatcttcgagggagtggagtccatggaggcctcattatcctggagccacgcttcactggggacaccctggctatgcttctcaacatccccccacaaaagacgctcctcaggcgccacctgaccaccaagttcaatgccttgattggtccggaggctgaacaggagaagcgagagaaaatggcctcaccagcttacacaccactgaccaccacagccaaagtccggccaaggaaactaggattttcacacttcggaaacataagaaaaaagaagttcgatgaatcgacggactacatttgcccaatggagcccagtgacggtgtcagtgatagtcacagggtctacagtggctaccggggcctcagcccccttgatgcccctgaactggatgggctggaccaggtgggacagattagctgatgcccttgtcacctgccctctgtgcaccctgagagctcacagtaacactgtgtgtgtcaccatataactgcacctcacccccgcacgtgtgcatgactcgcagagaatattccagcaattgtgtacccctggg

SEQ ID NO: 16370 - DNA, 1059 bp, Homo sapiens
  source 1..1059: mol_type = unassigned DNA
ttctggaagaggaataaggagcaggagtccagcccagaggcagctcctgtggctgttgggtgttttactcttgagtctatcaagagcagtaaacgtgacccatgtcatcagagcagtggccgagactccctggtaaggtgagtgtcctcacagaccaagtagaagcccagggagaaaagattcgagacctggaagtgtgtctggaaggacaccaggtgaaactcaatgctgctgaagagatgcttcaacaggtaagggcgggtgcactgaaggcccttgggtgccgaagcagctcatgtgctgaagcccctttgtgtgcccaggctacagccctcgctgtctgctttcccatcctgcctgggggcgggattggctgctcagttgtacggtgtttatacagcaggtgaaaccaacctgaacgttgagagtggcagagggggtagggaagggaagggctgccctgagatgaataacctgctgagctggttagacagattcccagacagcactttctccagacctggtgcagtgagggagcgctcggctgggggcctcaccctcatcctgtgggtgccatctggagttttagaaagtcaattctcagctgattctatgcccctttcccatctcgctctgcctcttcctactgtatatagtttttaaaataaaaatattatataaataaccttttagtataatttaatagatatcaaaatggaaaaagatatttaactgttccctaccattcaaataatgtcttctccttgttttctttttgtccttgttatgtgtacatgtactttccaaatctgtaatcacaagagatatgcaatttagtcctcagattttgtatgcttaatattatatttttcccatttaaaatttttgctgtattgtcatctttactatcacctataatagattttcttagtaaaagtatcagaattgacttaactttttttcaattcctaaatatttttactgtattataaataatgagctacaattttttaggaaggggtgttgaatttttattgtatcaaaacttcagaatttgtt

SEQ ID NO: 16371 - DNA, 320 bp, Homo sapiens
  source 1..320: mol_type = unassigned DNA
gcccagggagaaaagattcgagacctggaagtgtgtctggaaggacaccaggtgaaactcaatgctgctgaagagatgcttcaacaggagctgctaagccgcacatctcttgagacccagaagctcgatctgatgactgaagtgtctgagctgaagctcaagctggttggcatggagaaggagcagagagagcaggaggagaagcagagaaaagcagaggtaagggtgagtgtgtactgtcctaagctcagacctgggaaggctgtcataatgtgaatttaggccatctggtcaactcccagcctggaagctattgggtg

SEQ ID NO: 16372 - DNA, 2965 bp, Homo sapiens
  source 1..2965: mol_type = unassigned DNA
aagaaattagaggttgagtgagcaagtgggacagatgaaaggtcagaagattgtggccagaggagagaatttcagagctgaagattttagaagcaaagcaaacacattctggatacacgtgagatccaagtggtgactgtgctactgagaagctgaacgaaatggaaagcaaagcctgttggagctgaggtcaaagaatgtgaagccagagtggatactgaatgggaaagttaataacaaggatgtggaagctattgaggagacggagtgcgcctaaagagctgctaagccgcacatctcttgagacccagaagctcgatctgatgactgaagtgtctgagctgaagctcaagctggttggcatggagaaggagcagagagagcaggaggagaagcagagaaaagcagaggagttactgcaagagctcaggcacctcaaaatcaaagtggaagagttggaaaatgaaaggaatcagtatgaatggaagctaaaggccactaaggctgaagtcgcccagctgcaagaacaggtggccctgaaagatgcagaaattgagcgtctgcacagccagctctcccggacagcagctctccacagtgagagtcacacagagagagaccaagaaattcaacgtctgaaaatggggatggaaactttgctgcttgccaatgaagataaggaccgtcggatagaggagcttacggggctgttaaaccagtaccggaaggtaaaggagattgtgatggtcactcaagggccttcggagagaactctctcaatcaatgaagaagaaccggagggaggtttcagcaagtggaacgctacaaataaggaccctgaagaattatttaaacaagagatgcctccaagatgtagctctcctacagtggggccacctccattgccacagaaatcactggaaaccagggctcagaaaaagctctcttgtagtctagaagacttgagaagtgaatctgtggataagtgtatggatgggaaccagcccttcccggtgttagaacccaaggacagccctttcttggcggagcacaaatatcccactttacctgggaagctttcaggagccacgcccaatggagaggctgccaaatctcctcccaccatctgccagcctgacgccacggggagcagcctgctgaggctgagagacacagaaagtggctgggacgacactgctgtggtcaatgacctctcatccacatcatcgggcactgaatcaggtcctcagtctcctctgacaccagatggtaaacggaatcccaaaggcattaagaagttctggggaaaaatccgaagaactcagtcaggaaatttctacactgacacgctggggatggcagagtttcgacgaggtgggctccgggcaaccgcagggccaagactctctaggaccagggactccaagggacagaaaagtgacgccaatgccccctttgcccagtggagcacagagcgtgtgtgtgcatggctggaggactttggcctggctcagtatgtgatctttgccaggcagtgggtatcttctggccacaccttattgacagccacccctcaggacatggaaaaggagctaggaattaagcacccactccacaggaagaagcttgttttagcagtgaaagccatcaacaccaaacaggaggagaagtctgcactgctagaccacatttgggtgacaaggtggcttgatgatattggcttaccccagtacaaagaccagtttcatgaatctagagttgacagacgaatgctgcaatacctaactgtgaacgatttactcttcttaaaagtcaccagccaactacatcatctcagcatcaaatgtgccattcacgtgctgcatgtcaacaagttcaacccccactgcctgcaccggcggccagctgatgagagtaacctttctccttcagaagttgtacagtggtccaaccacagggtgatggagtggttacgatctgtggacctggcagagtatgcacccaatcttcgagggagtggagtccatggaggcctcattatcctggagccacgcttcactggggacaccctggctatgcttctcaacatccccccacaaaagacgctcctcaggcgccacctgaccaccaagttcaatgccttgattggtccggaggctgaacaggagaagcgagagaaaatggcctcaccagcttacacaccactgaccaccacagccaaagtccggccaaggaaactaggattttcacacttcggaaacataagaaaaaagaagttcgatgaatcgacggactacatttgcccaatggagcccagtgacggtgtcagtgatagtcacagggtctacagtggctaccggggcctcagcccccttgatgcccctgaactggatgggctggaccaggtgggacagattagctgatgcccttgtcacctgccctctgtgcaccctgagagctcacagtaacactgtgtgtgtcaccatataactgcacctcacccccgcacgtgtgcatgactcgcagagaatattccagcaattgtgtacccctgggccagtctctttgaaccctgagggtggccaggatctggagctgcatctctaaggggccaggctttggggaccattgccaaaggtggactcaggaggaaagacacttaaagacacttttacatgtctagtaattcttgatgttcatcttcagcaccagtggaaacacatgaacttcgatgcaggtccagagaccatggacactcccacgaggctcagctctcaggcaccccctacacttcagttgagggaaaagctcaagtgccttaggcccgtggaccacagtcttggctgagatcaaagggatgagcaacagggacttctgccacagtgacaatggaattgtgttgtgccttacttcagaggtggtctcttctttcttgtaataaaagcaatatttatgcggaaagcaa

SEQ ID NO: 16373 - DNA, 538 bp, Homo sapiens
  source 1..538: mol_type = unassigned DNA
tgaaagatgcagaaattgagcgtctgcacagccagctctcccggacagcagctctccacagtgagagtcacacagagagagaccaagaaattcaacgtctgaaaatggggatggaaactttgctgcttgccaatgaagataaggaccgtcggatagaggagcttacggggctgttaaaccagtaccggaaggtaaaggagattgtgatggtcactcaagggccttcggagagaactctctcaatcaatgaagaagaaccggagggaggtttcagcaagtggaacgctacaaataaggaccctgaagaattatttaaacaagaggtactgtgtttccatccatgacgtagggtttcagcaggtcctccgagcttgccctgagcttgagggaggatctagtcagacacgtgtcaggtgcacatcttggcaggtgaatacttaaattaatatagtgcccctcaggctgtgatggggatgggcgagcaagaggctgaggctctggcctgtgctctggttggaggcagcatggtggatactgg

SEQ ID NO: 16374 - DNA, 673 bp, Homo sapiens
  source 1..673: mol_type = unassigned DNA
agggccttcggagagaactctctcaatcaatgaagaagaaccggagggaggtttcagcaagtggaacgctacaaataaggaccctgaagaattatttaaacaagagatgcctccaagatgtagctctcctacagtggggccacctccattgccacagaaatcactggaaaccagggctcagaaaaagctctcttgtagtctagaagacttgagaagtgaatctgtggataagtgtatggatgggaaccagcccttcccggtgttagaacccaaggacagccctttcttggcggagcacaaatatcccactttacctgggaagctttcaggagccacgcccaatggagaggctgccaaatctcctcccaccatctgccagcctgacgccacggggagcagcctgctgaggctgaatcgtggccggagtgtcagtgcccccgtattaggagacacagaaagtggctgggacgacactgctgtggtcaatgacctctcatccacatcatcgggcactgaatcaggtcctcagtctcctctgacaccagatggtaaacggaatcccaaaggcattaagaagttctggggaaaaatccgaagaactcagtcaggaaatttctacactgacacgctggggatggcagagtttcgacgaggtgggctccgggcaaccgca

SEQ ID NO: 16375 - DNA, 2042 bp, Homo sapiens
  source 1..2042: mol_type = unassigned DNA
aaggaccctgaagaattatttaaacaagagatgcctccaagatgtagctctcctacagtggggccacctccattgccacagaaatcactggaaaccagggctcagaaaaagctctcttgtagtctagaagacttgagaagtgaatctgtggataagtgtatggatgggaaccagcccttcccggtgttagaacccaaggacagccctttcttggcggagcacaaatatcccactttacctgggaagctttcaggagccacgcccaatggagaggctgccaaatctcctcccaccatctgccagcctgacgccacggggagcagcctgctgaggctgagagacacagaaagtggctgggacgacactgctgtggtcaatgacctctcatccacatcatcgggcactgaatcaggtcctcagtctcctctgacaccagatggtaaacggaatcccaaaggcattaagaagttctggggaaaaatccgaagaactcagtcaggaaatttctacactgacacgctggggatggcagagtttcgacgaggtgggctccgggcaaccgcagggccaagactctctaggaccagggactccaagggacagaaaagtgacgccaatgccccctttgcccagtggagcacagagcgtgtgtgtgcatggctggaggactttggcctggctcagtatgtgatctttgccaggcagtgggtatcttctggccacaccttattgacagccacccctcaggacatggaaaaggagctaggaattaagcacccactccacaggaagaagcttgttttagcagtgaaagccatcaacaccaaacaggaggagaagtctgcactgctagaccacatttgggtgacaaggtggcttgatgatattggcttaccccagtacaaagaccagtttcatgaatctagagttgacagacgaatgctgcaatacctaactgtgaacgatttactcttcttaaaagtcaccagccaactacatcatctcagcatcaaatgtgccattcacgtgctgcatgtcaacaagttcaacccccactgcctgcaccggcggccagctgatgagagtaacctttctccttcagaagttgtacagtggtccaaccacagggtgatggagtggttacgatctgtggacctggcagagtatgcacccaatcttcgagggagtggagtccatggaggcctcattatcctggagccacgcttcactggggacaccctggctatgcttctcaacatccccccacaaaagacgctcctcaggcgccacctgaccaccaagttcaatgccttgattggtccggaggctgaacaggagaagcgagagaaaatggcctcaccagcttacacaccactgaccaccacagccaaagtccggccaaggaaactaggattttcacacttcggaaacataagaaaaaagaagttcgatgaatcgacggactacatttgcccaatggagcccagtgacggtgtcagtgatagtcacagggtctacagtggctaccggggcctcagcccccttgatgcccctgaactggatgggctggaccagatggcaccttcggaaggtaccgtgacgcagatagggctcctctcccaagacattcaccgccttacgacaatgctgagccaggaccagctgctgaatgactctcgcctgcctgcccccaactctgatgactggagatgactttcttcgtggctgagagcgtagggaggcatgtgtgggggccccggagcctttgcttctgtggggagcgggcacacagccccctctgcaagcccagtccgggctggcagggtgtctcagacaggctgctgacaggcatgaagcagagctgtgggacaggtgtccaggggtggccccagggtccatgtgtgtcttcaaccatgctgcgctcttcaccgcaggcttcataccttttgtacttttatacgtggactgcagaccactttgtgggagggcagtgacatatcagcacacagactcgatggctcgtgatattcctggtgacagcc

SEQ ID NO: 16376 - DNA, 769 bp, Homo sapiens
  source 1..769: mol_type = unassigned DNA
cttgtctgtctcccagatgtggggagtgcttgctccagacctggcacagggcctggcagggagtagatgttgctgatgtttgtcgggtgaccatatcaaatgggattttctcattgaaagcaacaaaatttggctctggctaacctaagccaaaaagaatgtttttaaaagagtctgcagtggctcgctgaatgaaaggaaaagctgaagaaccaagatcagaaagggaaggagcagaaaaagcccaagaacccaggtctcaggactgtactactgggatatgaacatgatctaagctctagggtccaggaaggagaggcaagctggcccagatggactgataagcctaccacacccccttgcatcttgaaagagcaaggcatctataatgatgtatccaccatggctgcacccagggaggaaatgtctccctaaaaggaatcatgtgaagcagggggaaagatggtgggtggtccccaaacagactgtcctctaccgtgactcttctgtctctggtgcagatgcctccaagatgtagctctcctacagtggggccacctccattgccacagaaatcactggaaaccagggctcagaaaaagctctcttgtagtctagaagacttgagaagtgaatctgtggataagtgtatggatgggaaccagcccttcccggtgttagaacccaaggacagccctttcttggcggagcacaaatatcccactttacctgggaagctttcaggagccacgcccaatggagaggctgc

SEQ ID NO: 16377 - DNA, 545 bp, Homo sapiens
  source 1..545: mol_type = unassigned DNA
atgcctccaagatgtagctctcctacagtggggccacctccattgccacagaaatcactggaaaccagggctcagaaaaagctctcttgtagtctagaagacttgagaagtgaatctgtggataagtgtatggatgggaaccagcccttcccggtgttagaacccaaggacagccctttcttggcggagcacaaatatcccactttacctgggaagctttcaggagccacgcccaatggagaggctgccaaatctcctcccaccatctgccagcctgacgccacggggagcagcctgctgaggctgaatcgtggccggagtgtcagtgcccccgtattaggtactgtacccattccaggagacacagaaagtggctgggacgacactgctgtggtcaatgacctctcatccacatcatcgggcactgaatcaggtcctcagtctcctctgacaccagatggtaaacggaatcccaaaggcattaagaagttctggggaaaaatccgaagaactcagtcaggaaatttctacactgacacgctggg

SEQ ID NO: 16378 - DNA, 817 bp, Homo sapiens
  source 1..817: mol_type = unassigned DNA
gacagccctttcttggcggagcacaaatatcccactttacctgggaagctttcaggagccacgcccaatggagaggctgccaaatctcctcccaccatctgccagcctgacgccacggggagcagcctgctgaggctgagagacacagaaagtggctgggacgacactgctgtggtcaatgacctctcatccacatcatcgggcactgaatcaggtcctcagtctcctctgacaccagatggtaaacggaatcccaaaggcattaagaagttctggggaaagtaagttggtgccgttgatcctaattatattgcttagaatttttctttttgattgggcaaagagtctatgtaagcccctggtccaatagacactgaaacagcagtcaaaacagagtgttcatgttcaaagagaagaatctgagatattttccagggccaagagaaggagaagtatgaaagacacccattgaatatatccagttgcctttcatgtcatgcatcctaagcacccacccattccacacaccctgaacataatctctgcagcttatattacattggatctggcacagacacagatgagactgtattctcccttcttaggagtcagtctgttttaagaaatctttgaaaaacctttgaaagccaagtacttgctggcccaactgatccactttgtgacatgaggcagaaactggggcctcctacaaggcatcaaactttgctttgacttctatggcaagtgaccaaatcccagaggcaggatccgaattgaggcttgagtctggccaaggagctgcgacaggttgtgatcc

SEQ ID NO: 16379 - DNA, 561 bp, Homo sapiens
  source 1..561: mol_type = unassigned DNA
cgcagggccaagactctctaggaccagggactccaagggacagaaaagtgacgccaatgccccctttgcccagtggagcacagagcgtgtgtgtgcatggctggaggactttggcctggctcagtatgtgatctttgccaggcagtgggtatcttctggccacaccttattgacagccacccctcaggacatggaaaaggagctaggaattaagcacccactccacaggaagaagcttgttttagcagtgaaagccatcaacaccaaacaggaggagaagtctgcactgctagaccacatttgggtgacaaggtggcttgatgatattggcttaccccagtacaaagaccagtttcatgaatctagagttgacagacgaatgctgcaatacctaactgtgaacgatttactcttcttaaaagtcaccagccaactacatcatctcagcatcaaatgtgccattcacgtgctgcatgtcaacaagttcaacccccactgcctgcaccggcggccagctgatgagaagttgtacagtggtccaaccacagggtgatggagtgg

SEQ ID NO: 16380 - DNA, 568 bp, Homo sapiens
  source 1..568: mol_type = unassigned DNA
acatgatctcaggagggccatacaggctgccccattctctaagtagcctgagatttgaaattcagatcttgtgttattaagaaaactctagggtctacctcctatgagtgtgttgtagtggaattttgttcagcagaatcccatgatggaggttgtttgttaaaaaacaggttttttgttttgttttttcttttcttttcttttgtttgtgagacatgattagattcagaacctcaggctctcccactaacaggaatatgctgttttcctgcttcccagtgacgccaatgccccctttgcccagtggagcacagagcgtgtgtgtgcatggctggaggactttggcctggctcagtatgtgatctttgccaggcagtgggtatcttctggccacaccttattgacagccacccctcaggacatggaaaaggagctaggaattaagcacccactccacaggaagaagcttgttttagcagtgaaagccatcaacaccaaacaggaggagaagtctgcactgctagaccacatttgggtgacaaggtggcttgatgatattggcttaccc

SEQ ID NO: 16381 - DNA, 308 bp, Homo sapiens
  source 1..308: mol_type = unassigned DNA
gacgaatgctgcaatacctaactgtgaacgatttactcttcttaaaagtcaccagccaactacatcatctcagcatcaaatgtgccattcacgtgctgcatgtcaacaagttcaacccccactgcctgcaccggcggccagctgatgagagtaacctttctccttcagaagttgtacagtggtccaaccacagggtgatggagtggttacgatctgtggacctggcagagtatgcacccaatcttcgagggagtggagtccatggaggcctcattgtgagtggctctctggcctagcccacctgcctt

SEQ ID NO: 16382 - DNA, 1841 bp, Homo sapiens
  source 1..1841: mol_type = unassigned DNA
gggcagggttacttaccggggctgactccacagaggaccatggtgggacctattaagcctaacttcctcactctccttctccctctgacagagtaacctttctccttcagaagttgtacagtggtccaaccacagggtgatggagtggttacgatctgtggacctggcagagtatgcacccaatcttcgagggagtggagtccatggaggcctcattgtgagtggctctctggcctagcccacctgccttggtgcaaatgggatattcagaaacttatttattaaggacaaggcacaaaagctaacgaaaaaaaataggtacttcatctggaggtcttgcataatttgatgtctcaaagtattttgataacttgtccttgagaattaatatacctcatggaagcaagatgccttctggcagcacctccttggcatgagacttgaggattctaggtcgatgggttgcatggagaccaacgcttacaaggcgagggaacagcagggctgaggaagggacggggaagccgtaaaaatgcagcttcccacttgctgcaataggatccctatcactactcagatctgtcagtggcaaagccagaggggaaatgaggaagtgtggtggcttggatgtcatccagagaagatcctgagagacagcctcaccaaagaggtcccagttctctgctggtctgtgaaaacaaggtggtcagtcagcacatgtgctagtatgtgctcagagccaggccctgtgccagccagtgagtggagtgggactcagaacaagtgactgagctcctgtccctcctctggaggcacccccagccccaacaggccagtctctcagcatcctccccctcgagccatttgtatttgctcctggccaggcttgtctctggttccttcttagatcctggagccacgcttcactggggacaccctggctatgcttctcaacatccccccacaaaagacgctcctcaggcgccacctgaccaccaagttcaatgccttgattggtccggaggctgaacaggagaagcgagagaaaatggcctcaccagcttacacaccactgaccaccacagccaaagtccggccaaggaaactaggattttcacacttcggaaacataagaaaaaagaagttcgatgaatcgacggactacatttgcccaatggagcccagtgacggtgtcagtgatagtcacagggtctacagtggctaccggggcctcagcccccttgatgcccctgaactggatgggctggaccaggtgggacagattagctgatgcccttgtcacctgccctctgtgcaccctgagagctcacagtaacactgtgtgtgtcaccatataactgcacctcacccccgcacgtgtgcatgactcgcagagaatattccagcaattgtgtacccctgggccagtctctttgaaccctgagggtggccaggatctggagctgcatctctaaggggccaggctttggggaccattgccaaaggtggactcaggaggaaagacacttaaagacacttttacatgtctagtaattcttgatgttcatcttcagcaccagtggaaacacatgaacttcgatgcaggtccagagaccatggacactcccacgaggctcagctctcaggcaccccctacacttcagttgagggaaaagctcaagtgccttaggcccgtggaccacagtcttggctgagatcaaagggatgagcaacagggacttctgccacagtgacaatggaattgtgttgtgccttacttcagaggtggtctcttctttcttgtaataaaagcaatatttatgcggaaagcaagcagctca

SEQ ID NO: 16383 - DNA, 562 bp, Homo sapiens
  source 1..562: mol_type = unassigned DNA
aaagacgctcctcaggcgccacctgaccaccaagttcaatgccttgattggtccggaggctgaacaggagaagcgagagaaaatggcctcaccagcttacacaccactgaccaccacagccaaagtccggccaaggaaactaggattttcacacttcggaaacataagaaaaaagaagttcgatgaatcgacggactacatttgcccaatggagcccagtgacggtgtcagtgatagtcacagggtctacagtggctaccggggcctcagcccccttgatgcccctgaactggatgggctggaccagcaccagtggaaacacatgaacttcgatgcaggtccagagaccatggacactcccacgaggctcagctctcaggcaccccctacacttcagttgagggaaaagctcaagtgccttaggcccgtggaccacagtcttggctgagatcaaagggatgagcaacagggacttctgccacagtgacaatggaattgtgttgtgccttacttcagaggtggtctcttctttcttgtaataaaagcaatatttatgcggaaa

SEQ ID NO: 16384 - DNA, 6542 bp, Homo sapiens
  source 1..6542: mol_type = unassigned DNA
agtgctgatcgctcgtgccggtgcggccgttaaccgcccttgccggagccctaggctcaaaagcagccccttacccttcctgggcttcccccaacccctttcccggtctgccctggggcatgagcagcgatggccggctgcatccctgaggagaaaacttaccggcgcttcctggagctattcctgggcgagtttcgcggaccgtgcggcggcggcgagccggagccggaacccgaacccgaacccgaacccgaacccgagtccgagcccgagcccgaacctgaactggtagaagctgaggcggccgaggcttcggtagaggaacccggggaggaggcggccacggtagccgcgacggaggagggggaccaggagcaagacccggagcccgaggaggaggcggcggttgagggtgaggaggaggaggagggcgcggcgacggcggcggcagccccggggcactcggccgtgccgccgccgccgccccagctgccgcctttgcccccgctcccgcgaccgctgtcagagcgcatcacccgcgaggaggtggagggcgaaagcctggacctgtgcctgcagcagctctacaaatataattgcccttcctttttggctgctgctttagccagagccacatcagatgaagtccttcagagtgatctttctgcacattatatcccaaaggaaacggatggcacagaagggactgtggagattgagacagtgaaattggcccgttctgtcttcagcaaactacacgagatttgctgcagctgggtgaaagacttccccctccgcaggagaccccagctttattatgagacatcaatccatgccatcaaaaacatgcgcaggaaaatggaggacaaacatgtctgcattcctgactttaatatgctcttcaacctagaggaccaggaagaacaagcttactttgcagtgtttgatggccatgggggagtagatgctgctatttatgcctccattcacctccacgttaacttagtccgccaggagatgttcccccatgatcctgctgaggccctgtgcagggccttccgggtcactgatgagcggtttgtgcagaaagcagccagggagagcttaagatgtgggaccacaggagtggtgactttcatcagaggcaacatgctacatgtggcctgggtgggtgattcccaggttatgcttgtgagaaagggccaagctgttgaactaatgaagccacacaaaccagacagagaggatgaaaagcagagaattgaggcccttggaggttgcgtagtctggtttggtgcctggagggtgaatggaagtctgtcggtttccagagctattggagatgctgaacataagccatatatctgtggggatgcagattctgcctccactgttctggatgggaccgaagactacctcattctggcctgtgatggcttctatgacaccgtgaaccctgatgaggcagtgaaagttgtgtccgaccacctgaaagagaataatggagacagcagcatggttgcccacaaattagtggcatcagctcgtgatgctgggtcaagtgataacatcacggttattgtggtattcctgagggacatgaacaaagctgtaaatgttagtgaggaatcagattggacagagaactcttttcaaggagggcaagaagatggtggggatgataaggagaatcatggagagtgcaaacgcccttggcctcagcaccagtgctcagcaccagccgacctaggctatgatgggcgtgtggattcattcactgatagaactagcctgagcccagggtcccaaatcaacgtgctggaagacccaggctacctagatctcacacaaatagaagcaagcaaacctcacagtgcccagtttttgctaccagttgagatgtttggtcctggtgcaccaaagaaagcaaatcttattaatgagttaatgatggagaaaaaatcagttcagtcatcattgcctgaatggagtggtgctggagagtttcccactgctttcaatttgggttcaacaggggagcagatatacagaatgcagagcttgtctcctgtctgttcagggttggaaaatgaacagttcaaatccccgggaaacagagtttctagattgtctcatttacgccaccactactcaaagaagtggcacagattcaggtttaatccaaagttttattcatttctctctgctcaagagccttcccacaaaataggcactagcctgtcctcacttactggaagtgggaagagaaataggataagaagttctctgccatggaggcaaaatagttggaaagggtacagtgaaaacatgaggaagctcagaaagactcatgatattccatgcccagatcttccttggagctataaaatagaataatttttctttcaagtaggttagctagctctcccccaataaaaataccactatcagagtagaaacaaggtagacatttctaaaacatatgtgcttcattatgaatccatggatggctcaattcttaaatgtaaatagatctctaggaaactcaaagtacagtgttttcaatctaaaaagaagtattggcagtttcacttgcaaaattacacagctggtccctgtgatgtgtctcgacaccaatacacaacccccttcccaccatccttcatgtcactagatacacaacccccttcccaccatcccttcagtcactagtggaagctttcaagttagttatttcagtcaggatatacagtgttgaaatctcaatgcagttgaaatctggtctgatgtgcctaatttatctgtggaaaatttaatgctgaattacatttggttgggaaatgtccctcaaaatcctgggcactatgaaggaaccccctgccccctcacctttttgggtaggtaaaagactaaaagccatatggattttaactgataacaatgaaagtggtaaatcagtgtaaaagtgtcatattctcagacttgtgaggcggtttatagtcagaaagatttacggatttttttcctgtaacataaaagattgtgaactttttttaattaaaaaatatttcctagggctgtagttatttgggagtttcataacctgttatggtgcttttggtggaaatttttattatttagcattttaggagaccgctgtcaactggttttaatctatgatgctaatgtgttttccactgtaccctcatctcaggaataaaactgctttaacggagatgatgtcaggtacaaatacactatagagtcaaaataccatttacaaagaaaatcaaaagcatttctatattttgtctttttttagttcagacagcaaaggcatgtactactataaaatacaaagtgattttagagaatgaaaaatgctacttttatcttctctaaaattatttcccccaaggtagtgaagtaattggaatgaaggaggctgaaagtattgtctaaagtgagcccagaggccactgagaatgcagattactgacagccaggtctgtttagttgtaattggaagacacatgagtgtcctgcttacatgtagcttcagactgcagagacaggacgtgtgcttttcatttcaatatttagttatatttgatattttgaaactgtctgctttttgctatttctgcagtttcaagttagttagaagcatgttgtcaactaaagacaacaaactatcagattcattcattcagtgaagcagcctctgattctctaagagtcacgaatgtcttagtgttaccctcccctagtcaacagcagaccagcctggccaatgcctatgggtggcccctctggagtgctcactaacaagggtgagtgctctcgctaagaagtgtcccccgcctaatcatgtgtttataggatagtacacgttccccaggcccataacagaggactaaaatctctgaattttaaagacacagatgactggcatattttggataccagtatagctatatcaaatagacaaaaacagcttcactttagcaatgatcagattgttaatctacagattttattttttaaaatttggatgtaagtagagactttcagtatttgttttctcttgattttgaagtcatttcttcttctcacgtctgtgacaaatggttgaaaaggagtcaacatggccccaactatagtgccggaaccttttcatcattctgaggctttgccccacacatggtcctcactcatatctgtcaccttctgaagcctagatcttgttaacccatcaggtgcagtgtcagtttcaaatcaaattatctaagaaaacaagaaaacaaaggcagcagactattggtacacattatagtccaaagtgcttagcgaagtaaaaaaaaaagctttttaaaatttctattgttgtctattggtaatgtttttgatcagaataaagagggtaaagggaaaaagttactacacatgctaggctttctcagtggggaaaaaaatggctggatagaactgggacaaacacagacccatctttaggggtctggattttgtaggtccgactacacagcagtgttaactcatttctcatgccattagctctctacaaaataaagcaaagtagttctagtgtggtcgttataaaccaatattgtgaaaaatagcaactattcatttgttcacaacatgcgtatttatagagtagttaggtaccatttgtaaggtaaatcctttaaaattctataatacatactaaaatagtggttattggtctgatatatgctgctcttggttctataaactagataaaagcagtgctttgtgaaatgcagtgttctctcttaacgccactggtgataggaagtagttcccttcagttcaaatcctgtgcccttatttgctgcttgctgacgtaagcaataagtaaccctctaactaatggtatctacatatttctgtaacttgtatttaatgatggtgtacctggtgattgtaaaaatattagacagatataaaagtatctatataatatctataaactgttaatgctgaggtatagtctgtgaattatgtgttttgtatttttattcattgtgtaatttagtggtggtgaaagttctacactcaatccttaaagagtggcagtatccctttttcaatttaacatggtctgcatcaatctgtttgcctgctaaacaagttagaataggaaatagtaaaataaatccaaacaagagtgtaatattggttagggaaacaaacttcaggtcaccaactgaagtcattacaaactccttgtacattcactgtgagtttcaaagggagtcagtccctaatttacaggtttcctttgttcactttctagatgtgtacttttgagggacatgaggttaggcaacattacagcaacacacactggggctattaatcccatttaggtctgtactaaagaggatgggtagaaacacatatgtatataccttttctttacctagaagtgccatccattgtccttgaattattatgattaaagttactgttgcatttaggaggctccttgaaagtaacaccttttccaaggacaatggcaacaatgtcaatgtcaacactgagtctaattttgaccacatttatagtggtatagtgtcaatactgcattttcatgacaaccacactccactgttgaaacactgtgccagtgagaagtgcaacatccagtgggcagatgaaaatgatgcatggccaagttcagtgtttacagataaaactgctgtggttcaagtgcttccttccccatcaaatccttgataaggctttgtgggaaaatgatctaaattattgttttaatttttaaacctaatttattcactcagtgaacattcttacctaagcaaggctataaaagggaatactacagttttgtccacactttaatttgagaccatttttctttgaatcgtaagttagcaaaagaaatttttttcacctttgaaaatcacgtgatgttaaaggacaaatgcccactcttctattctgatctgcaaatagcttaaatgtctcttgcaaaacaaagtaagataccaccagtattacaacacaatgattttccagacaaatggtatggtgttgaaaaataactgttacttcttaaagcagcattttatcttctattttgaagactatttattgtaataattagaaaacatgaaatagggaactccagactgacacagcagttgtttttgaaaaggaaataaactttgatgaattagataatccagatacatcattgtaaactcttactctaggtgctctttggtgagagacaggctttgttctcttgttcataacatttctctgcaaagaattctctatggagtgaagcgaatgaagtgaataatttcttaccaaataaatttatcaatttacaaatctgctctacatctcacttttgagttcagttgtagtcatgagtgatccttcatattttattaaaagtgttcattcaggtaaggtgtatgttgaaattttgccaattatcttaataaaacctggcaatttaaaaa

SEQ ID NO: 16385 - DNA, 6353 bp, Homo sapiens
  source 1..6353: mol_type = unassigned DNA
gctgcagctgcagccgcctgggcgctcctggagcgcgcggtgactcccccggtcggcccgctccatgcagctccgttgcggaagtgtagcggggggaggcggcggccaccgcggcactaagcacgagaggccggggctcggccccctgcagcactaggctctgggagccgcgcgcggcgcgtcccagtggcccgactcgccgtgcgcccggcgcccaccgcagcctgcatgccccgcgctgcgccttgcccggcccccgccgcctcctgctcgcaccgctgcagccgggcgccggagtaatatgctcactcgagtgaaatctgccgtggccaatttcatgggcggcatcatggctggcagctcaggctccgagcacggcggcggcagctgcggaggctcggacctgcccctgcgtttcccctacgggcggccagagttcctggggctgtctcaggacgaggtggagtgcagcgccgaccacatcgcccgccccatcctcatcctcaaggagactcggcggctgccctgggccactggctacgcagaggttatcaatgccgggaagagcacacacaatgaagaccaagccagctgtgaggtgctcactgtgaagaagaaggcaggggccgtgacctcaaccccaaacaggaactcatccaagagacggtcctcccttcccaatggggaagggctgcagctgaaggagaactcggaatccgagggtgtttcctgccactattggtcgctgtttgacgggcacgcggggtccggggccgcggtggtggcgtcacgcctgctgcagcaccacatcacggagcagctgcaggacatcgtggacatcctgaagaactccgccgtcctgccccctacctgcctgggggaggagcctgagaacacgcccgccaacagccggactctgacccgggcagcctccctgcgcggaggggtgggggccccgggctcccccagcacgccccccacacgcttctttaccgagaagaagattccccatgagtgcctggtcatcggagcgcttgaaagtgcattcaaggaaatggacctacagatagaacgagagaggagttcatataatatatctggtggctgcacggccctcattgtgatttgccttttggggaagctgtatgttgcaaatgctggggatagcagggccataatcatcagaaatggagaaattatccccatgtcttcagaatttacccccgagacggagcgccagcgacttcagtacctggcattcatgcagcctcacttgctgggaaatgagttcacacatttggagtttccaaggagagtacagagaaaggagcttggaaagaagatgctctacagggactttaatatgacaggctgggcatacaaaaccattgaggatgaggacttgaagttcccccttatatatggagaaggcaagaaggcccgggtaatggcaactattggagtgaccaggggacttggggaccatgacctgaaggtgcatgactccaacatctacattaaaccattcctgtcttcagctccagaggtaagaatctacgatctttcaaaatatgatcatggatcagatgatgtgctgatcttggccactgatggactctgggacgttttatcaaatgaagaagtagcagaagcaatcactcagtttcttcctaactgtgatccagatgatcctcacaggtacacactggcagctcaggacctggtgatgcgtgcccggggtgtgctgaaggacagaggatggcggatatctaatgaccgactgggctcaggagacgacatttctgtatatgtcattcctttaatacatggaaacaagctgtcatgaaaatggcccaggggattgggaggacagaggggaagaaagctgggatgcctcttggcaggacggaactgggaagtgccccagctgagttccaagtgatgcagtctcttcccagcccaagcggggagttcatggccaaaagactatgcttcaagatgaccctttggtttccatttcttctttagtaacaggtcaactcaacaagagcaaaacacaaaggctgctaccaagtgttgttgtatttcagttcctttcataggcctccgaggtggccattgactatttggggtatatatgtcatatttattttatctagagtagctggggcagccattttcaggtgtaaatggcagaggactcttcagcctgtcaagctgccagcttatctacgggttaaaaagtgctgcattggaaagtagggggtcatgcctcaaaatgtaagtaagtgcccaccttctaggaagcctgaggtttatttcagggattgccgtctgccccccgccccccttctctttttttcttctctgtttctattcttttatggcagtggtggagtgaggcagggatttttttttttttttttcgtgtttttgacattccttgaatctgttttttattccccttccacagaacaggcctgggactttccaacaccctgctaaggaagttctgtgtccaagtcccacccaggctgggttgtccccacctcctccagcccacacagcccaggcagcatccgggccagtgccctgcatgacagagggtctttgttgtgtaatgtttgttcccaagttgcattttctaaccgaatcagtgtgttttcatgaaactgagtgtttctgtggaccagtagttcctctgttgtcttcagtggtcttcctgtgtggctcaagggttctctgtgagagtctggattttcatttctggaatggctggccccatcccacttttctgtatcatggggacacatataaagcagtgtttaatagagcagtttaagaagttgcttgcatctgttggttcaccatggctcatctggggaccattttggattcatgtttcatggcttgtgactgtccccaagcccactccaaacaaagtgtaaggatcagagttctgtcaaggagcagcagttctgctctccccatcatctttgtgcaaggcccctcggggggcactttaataaaagaatttgaaatgggttgactggccattctcatgctgtgctccctgtctcttctcttctctaaagaatcatgtcccagctcctcaaggtccctctatggttccacatctgagtgttcgccacaagagcagcagcagcaggcacagtgcatgccatatctacctgctgcttctctgctgggaggaatggccaagtagattataaaactcacttctgtctcttaggcagacttgtacggccacaaaattacctagtcttcttcctgctgagctactgaggtattgccaccattttgacaactttgagtaattaaaacactcttctgacccaaaaaggaaaaaaggtcactgacgtgacccccccagcatgctagagagctaattccagttctcatatttgtttgaatttcttcccagaggagaggataggaacctctcctccagggcagtaaatcacctgcatttctggagttgtcggtattgtattcgaaaaggcctggagcccctcctgctcaggaaagaactcattccagggtgtggagacagtgccgtctggcaggtgaaatactgtgggaattcacgccaccaggtgtttgtgcaagtgttggcctgggaagaatgggacttcggccttgtcaggagttgtcttcatctgcagcacgtttcttcctcctgcagtagatcttagctaccccagatatctctatggagagaagtttgtggaaaatgctttgcttcgtggcagagtctgatgctgtaggaaaaccttcgggcatgtgacagcagtgtggtccactccctgttctgccctggcactcagagtcatgtgtaagtaggaaacctgagcaagtcttccgtggaggaccctgagctgccgtctttgggatccttcctgtgtccccaccgtctttcatttatttgctttcctgggcctctatctgggccctaccttgagcttctccagttttattcaagccaccagagtaagaatttgggtgtagatgtcacaactaccttctactcaattcaccaattcatttactgctatggcacgtctcaggaataactctagaaacctctaaatcgaaatattataaaatcttgagcacttagtcctgctggttttagttagaaaggcatccaggaattgttttcctacgcccccttgagtggaaagatcttagttagaagataaagtcaagtttgtgttcaggggatgggaggaagactataaataagatgaagaaatcaaaagtaggaaacatgatgtaaacgaagcatggcagatctgtccagcactgatattgctctataaattgagcttactcagttttggccttatttttttacccaggccccatgtcacccagtcctaaaacagtaaccgtgtctacataacgggttggcccctggtgcatccctggaaaagtcaaaggacgcacacttcgaaattctgcagaacgtatttatacatggttcagaaatcttgcgtatctgacttatagccaaatctgcttgctcgaatagcctcagaggaagtcttgtttaataaaaaccttttgatttcctagtcaagtctttatggttgtctcgaggggtgtgtggctactttaatgaaaggctttcctgctctaaatctctttgctgggctgggcctcttcagactatctggtgaaactcctttccttagaacaaactcagtccgtccatgctctgtggcattttgctagatgataaccaaagccttattcctgtagccagtgtcagcagtcagagaggtggagggtgtgttctgctgtggttatgcatacctatctgctgttcttgaggtgtaaaaggaaaggtgaaaatcgggccaggccaagtactcagctgtcttaataggatgaagccttaagcagtggaaatttcagttattttccacagtattccattttggaggatttggggtgtttactttttaaattcttgaacaacttaacctccatgaggctttgtgaagtcagctgtgaccaccctcctcttactgtgttctcagtattcattcacttccagggaagaatgacagccacagggagatggtggtgggcaagaatgagagtcccaggatccagatttagcctcagatcttccccattcaggaagggttttccatttaacaagagcactagtatgaaaacattagggacaaatctcccatgtctttgaaattcggattctcctcttgagatccccttcctcacctgccaatcaactttataaggccacaagtggtcactggttttccttccacaggtttgaggttctcagctttccttaagcgacccagcagctccgctgttttcagagtgaatatgttaagctttgatgagattctattttcagtaagttagtgcttctgggacacttggagaaagctgtgagagtcattgtctacgcaaagaacaacgaagctgatcctaaaagtgatccaatctaagaaaatggtaaaacgagctctggccacagcacagaattttatgtgaggaactcagatttttgaagacttaacaattgcagagaaaggttgcagcctgcacaccatagcccacctctctgagcagactttggttttgtgtggtgacgtggcacatgtttgtacactgggatttttcaaaggacgctacgcgagcagactgacttgcctcttctgtgagcactgtggcttttgtcagatggagtgccggtctgcagaggactgctctttcgaatccacagtgttatctgtgtaaatagctttaatttttcttctgtgtcttaggtgaagttttgttcatgtagcaaccaggtagacagtgaccaaataaggctgtaaatgtgctgtagttttctactgtgatgtacttgaaggagaacctgtgtcctctacttttctgatctcccacaagtattttgtgtttgtttcctgagtcctgaggttattattttactcctgttttgcccccagttttctttgttttttttctggagacccagggaggcccatggtggagatcatttgtaaggaatggatcatggtctgggtttccaaaactaccctagtacagtgaatgagagaaatctgcctggaaattgtttcagaaccatgtacctttatgctttgtgattgtgaaacattgacttttttgtaaccccaaaatgaaaactgtttagtaaaggggatctattttgtgtgttttgaaacttaggtgcaatgtcccctggaaaaagctaaagaaatgtatatgttcaatgacattttaaaataaaatattatatatatgtatatacgacatattcagcaaaa

SEQ ID NO: 16386 - DNA, 862 bp, Homo sapiens
  source 1..862: mol_type = unassigned DNA
cctgcttgcagcatgtggcctctgagtagagaagttagtacgtgagcattgcgtctctcggattgctagatttgaattttgaatgtgacaatgagactgttgtttcaaagcaattccctaagtggctgtttgctcaagacttttgtagtgtgaacagagatttgggggagggggagaagccatctgctccagaatagtcttcgaatgacacgatcaaatgactgcagagcaaactggagggagtccaacagaaagttcctgtctgctgcatccagccccaaccagcactcaagccattgtgtttacatggaagctcacacacaggtttcaaaggcaaggccgtgataaccaaggatgcattcatgcagcctcacttgctgggaaatgagttcacacatttggagtttccaaggagagtacagagaaaggagcttggaaagaagatgctctacagggactttaatatgacaggctgggcatacaaaaccattgaggatgaggacttgaagttcccccttatatatggagaaggcaagaaggcccgggtaatggcaactattggagtgaccaggggacttggggaccatgacctgaaggtgcatgactccaacatctacattaaaccattcctgtcttcagctccagaggtaagaatctacgatctttcaaaatatgatcatggatcagatgatgtgctgatcttggccactgatggactctgggacgttttatcaaatgaagaagtagcagaagcaatcactcagtttcttcctaactgtgatccagatgatcctcacaggtacacactggcagctcaggacctggtgatgcgtgcccggggtgtgctgaaggacagaggatg

SEQ ID NO: 16387 - DNA, 584 bp, Homo sapiens
  source 1..584: mol_type = unassigned DNA
aggtggtaggaaagcaagcactaaagatttttctagtcccttcttgaagcacattcagagtctggggactgtcaagagaatgaaagtgagaaagcttttgctacacatcctgcacaatccaacactaactctgttttattctccaggacctacagatagaacgagagaggagttcatataatatatctggtggctgcacggccctcattgtgatttgccttttggggaagctgtatgttgcaaatgctggggatagcagggccataatcatcagaaatggagaaattatccccatgtcttcagaatttacccccgagacggagcgccagcgacttcagtacctggcattcatgcagcctcacttgctgggaaatgagttcacacatttggagtttccaaggagagtacagagaaaggagcttggaaagaagatgctctacagggactttaatatgacaggctgggcatacaaaaccattgaggatgaggacttgaagttcccccttatatatggagaaggcaagaaggcccgggtaatggcaactattggagtgaccaggggacttggggaccatgacctgaag

SEQ ID NO: 16388 - DNA, 522 bp, Homo sapiens
  source 1..522: mol_type = unassigned DNA
actgcgcctgggagcttgtgtccgattccgggaggtggccgtgtccgagtgcgtggttgtacatttccgaaggtctcagtttctctcactttcagcccgcgagttcctccgcttctcctttagcagggttatcaatgccgggaagagcacacacaatgaagaccaagccagctgtgaggtgctcactgtgaagaagaaggcaggggccgtgacctcaaccccaaacaggaactcatccaagagacggtcctcccttcccaatggggaagggctgcagctgaaggagaactcggaatccgagggtgtttcctgccactattggtcgctgtttgacgggcacgcggggtccggggccgcggtggtggcgtcacgcctgctgcagcaccacatcacggagcagctgcaggacatcgtggacatcctgaagaactccgccgtcctgccccctacctgcctgggggaggagcctgagaacacgcccgccaacagccggactctgacccgggcagcctccctgcgcgg

SEQ ID NO: 16389 - DNA, 468 bp, Homo sapiens
  source 1..468: mol_type = unassigned DNA
atctatgaaccagaaagggggccctcactggacacaaaaacttgctgatatcttgaacttggatttctcagccttcaaaactggttatcaatgccgggaagagcacacacaatgaagaccaagccagctgtgaggtgctcactgtgaagaagaaggcaggggccgtgacctcaaccccaaacaggaactcatccaagagacggtcctcccttcccaatggggaagggctgcagctgaaggagaactcggaatccgagggtgtttcctgccactattggtcgctgtttgacgggcacgcggggtccggggccgcggtggtggcgtcacgcctgctgcagcaccacatcacggagcagctgcaggacatcgtggacatcctgaagaactccgccgtcctgccccctacctgcctgggggaggagcctgagaacacgcccgccaacagccggactctgacccgggcagcct

SEQ ID NO: 16390 - DNA, 1496 bp, Homo sapiens
  source 1..1496: mol_type = unassigned DNA
ggggcgctccgcctccgcgccccaaatccccggacctgcccaacgccgcctcggcgccgcccgccgccgctccagaagcgcccaggagccctcccgcgaaggctgggagcgggagcgcgacgcccgcgaaggctgttgaggctcgagcgagcttctccagaccgacctttctgcagctgagccccggggggctgcgacgcgccgatgaccacgcgggccgggctgtgcaaagccccccggacacgggccgccgcctgccctggagcacaggctacgccgaggtcatcaatgctggcaagagtcggcacaatgaggaccaggcttgctgtgaagtggtgtatgtggaaggtcggaggagtgttacaggagtacctagggagcctagccgaggccagggactctgcttctactactggggcctatttgatgggcatgcagggggcggagctgctgaaatggcctcacggctcctgcatcgccatatccgagagcagctaaaggacctggtagagatacttcaggacccttcgccaccacccctctgcctcccaaccactccggggaccccagattcctccgatccctctcacttgcttggccctcagtcctgctggtcttcacagaaggaagtgagccacgagagcctggtagtgggggccgttgagaatgccttccagctcatgcaggatgagcagatggcccgggagcggcgtggccaccaagtggaggggggctgctgtgcactggttgtgatctacctgctaggcaaggtgtacgtggccaatgcaggcgatagcagggccatcattgtccggaatggtgaaatcattccaatgtcccgggagtttaccccggagactgagcgccagcgtcttcagctgcttggtctgctgtagtcaacgtcatctgtgtgccaccgtgtgctgtgagcataatgccccctggctctctgttctgatcatccccaactccagggcttcctgaaaccagagctgctaggcagtgaattcacccaccttgagttcccccgcagagttctgcccaaggagctggggcagaggatgttgtaccgggaccagaacatgaccggctgggcctacaaaaagatcgagctggaggatctcaggtttcctctggtctgtggggagggcaaaaaggctcgggtgatggccaccattggggtgacccgaggcttgggagaccacagccttaaggtctgcagttccaccctgcccatcaagccctttctctcctgcttccctgaggtacgagtgtatgacctgacacaatatgagcactgcccagatgatgtgctagtcctgggaacagatggcctgtgggatgtcactactgactgtgaggtagctgccactgtggacagggtgctgtcggcctatgagcctaatgaccacagcagtggcaacttaactgaagaagggatgtccgctatatccaaaattacagctattggcaaataaacgagatggataaaggtg

SEQ ID NO: 16391 - DNA, 1863 bp, Homo sapiens
  source 1..1863: mol_type = unassigned DNA
gggccggttcctggggtggcccagagcaagggcaagtttcgcccgggacccgcccagctggccgggagccagtagcagggaagggccggctggcgcgagcaccgcccacgcggagccatgggggcggggcctgggcgggggcggggccgcggccgagggcggggcagggaggcagcatgctaaaccgggtgcgctcggccgtggcgcacctggtgagctccgggggcgctccgcctccgcgccccaaatccccggacctgcccaacgccgcctcggcgccgcccgccgccgctccagaagcgcccaggagccctcccgcgaaggctgggagcgggagcgcgacgcccgcgaaggctgttgaggctcgagcgagcttctccagaccgacctttctgcagctgagccccggggggctgcgacgcgccgatgaccacgcgggccgggctgtgcaaagccccccggacacgggccgccgcctgccctggagcacaggctacgccgaggtcatcaatgctggcaagagtcggcacaatgaggaccaggcttgctgtgaagtggtgtatgtggaaggtcggaggagtgttacaggagtacctagggagcctagccgaggccagggactctgcttctactactggggcctatttgatgggcatgcagggggcggagctgctgaaatggcctcacggctcctgcatcgccatatccgagagcagctaaaggacctggtagagatacttcaggacccttcgccaccacccctctgcctcccaaccactccggggaccccagattcctccgatccctctcacttgcttggccctcagtcctgctggtcttcacagaaggaagtgagccacgagagcctggtagtgggggccgttgagaatgccttccagctcatggatgagcagatggcccgggagcggcgtggccaccaagtggaggggggctgctgtgcactggttgtgatctacctgctaggcaaggtgtacgtggccaatgcaggcgatagcagggccatcattgtccggaatggtgaaatcattccaatgtcccgggagtttaccccggagactgagcgccagcgtcttcagctgcttggcttcctgaaaccagagctgctaggcagtgaattcacccaccttgagttcccccgcagagttctgcccaaggagctggggcagaggatgttgtaccgggaccagaacatgaccggctgggcctacaaaaagatcgagctggaggatctcaggtttcctctggtctgtggggagggcaaaaaggctcgggtgatggccaccattggggtgacccgaggcttgggagaccacagccttaaggtctgcagttccaccctgcccatcaagccctttctctcctgcttccctgaggtacgagtgtatgacctgacacaatatgagcactgcccagatgatgtgctagtcctgggaacagatggcctgtgggatgtcactactgactgtgaggtagctgccactgtggacagggtgctgtcggcctatgagcctaatgaccacagcaggtatacagctctggcccaagctctggtcctgggggcccggggtaccccccgagaccgtggctggcgtctccccaacaacaagctgggttccggggatgacatctctgtcttcgtcatccccctgggagggccaggcagttactcctgaggggctgaacaccatccctcccactagcctctccatacttactcctctcacagcccaaattctgaagttgtctccctgacccttctttagtggcaacttaactgaagaagggatgtccgctatatccaaaattacagctattggcaaataaacgagatggataaaggtg

SEQ ID NO: 16392 - DNA, 2474 bp, Homo sapiens
  source 1..2474: mol_type = unassigned DNA
gggtgcgctcggccgtggcgcacctggtgagctccgggggcgctccgcctccgcgccccaaatccccggacctgcccaacgccgcctcggcgccgcccgccgccgctccagaagcgcccaggagccctcccgcgaaggctgggagcgggagcgcgacgcccgcgaaggctgttgaggctcgagcgagcttctccagaccgacctttctgcagctgagccccggggggctgcgacgcgccgatgaccacgcgggccgggctgtgcaaagccccccggacacgggccgccgcctgccctggagcacaggctacgccgagtgagcgccccctggggcacccaaaccaggatggggctcccacccctctccccagctccgcatccccggcgctaggacgcgttccccacgccgcgtccgggccaggagctcccttttccgtggacctttgctatcctctggtcttcgggccgcaccccctcccaacccattttccagtggggggcagcctgtgtcaccttcttcacgtccttcccgctcattgactgccctcgcccacgccgcctcaggaccctgttctgccccagagcccggagggcggagagcccggcgaaggatgagttggccagttccccgtcgcggcccggcagcttaaaggctaagggaaaaggggtttcacgaaggagcggggttctttttaataggggacatagcggttgggaagactcgctcacccgcttcccggctccagcgccccagttccctgtccctcttaccgtagttcccctccccctccacacccagaaatagcccgcgacaccaggaggccgccagcttccccaggagcggggagggggacgcccggggtagaggagggtcccatttagatgcccttcagcctgccaactcgtgctggcctggcaaagaagcggaccccctgcccggagcggccggctggcccccgggctgtgtgtattttaaatgcatctgccgggaacgcagagcaccgagggagatgggggcgctcagttcgctgaggaaggtggctggtggcccatggacccaccaccacctcccttagcctcctgtgtgggaggagtttatgggtatgtggctcctgcccagtccaggtgggctttcacttctactctatttcagttcctctttcccgatctgggctggagagcttcctcattgttaaggcagcagaaactttcgctggatggttttaggataaggggtcatcaatgctggcaagagtcggcacaatgaggaccaggcttgctgtgaagtggtgtatgtggaaggtcggaggagtgttacaggagtacctagggagcctagccgaggccagggactctgcttctactactggggcctatttgatgggcatgcagggggcggagctgctgaaatggcctcacggctcctgcatcgccatatccgagagcagctaaaggacctgaaggaagtgagccacgagagcctggtagtgggggccgttgagaatgccttccagctcatggatgagcagatggcccgggagcggcgtggccaccaagtggaggggggctgctgtgcactggttgtgatctacctgctaggcaaggtgtacgtggccaatgcaggcgatagcagggccatcattgtccggaatggtgaaatcattccaatgtcccgggagtttaccccggagactgagcgccagcgtcttcagctgcttggcttcctgaaaccagagctgctaggcagtgaattcacccaccttgagttcccccgcagagttctgcccaaggagctggggcagaggatgttgtaccgggaccagaacatgaccggctgggcctacaaaaagatcgagctggaggatctcaggtttcctctggtctgtggggagggcaaaaaggctcgggtgatggccaccattggggtgacccgaggcttgggagaccacagccttaaggtctgcagttccaccctgcccatcaagccctttctctcctgcttccctgaggtacgagtgtatgacctgacacaatatgagcactgcccagatgatgtgctagtcctgggaacagatggcctgtgggatgtcactactgactgtgaggtagctgccactgtggacagggtgctgtcggcctatgagcctaatgaccacagcaggtatacagctctggcccaagctctggtcctgggggcccggggtaccccccgagaccgtggctggcgtctccccaacaacaagctgggttccggggatgacatctctgtcttcgtcatccccctgggagggccaggcagttactcctgaggggctgaacaccatccctcccactagcctctccatacttactcctctcacagcccaaattctgaagttgtctccctgacccttctttagtggcaacttaactgaagaagggatgtccgctatatccaaaattacagctattggcaaataaacgagatggataaa

SEQ ID NO: 16393 - DNA, 1001 bp, Homo sapiens
  source 1..1001: mol_type = unassigned DNA
gcatgctaaaccgggtgcgctcggccgtggcgcacctggtgagctccgggggcgctccgcctccgcgccccaaatccccggacctgcccaacgccgcctcggcgccgcccgccgccgctccagaagcgcccaggagccctcccgcgaaggctgggagcgggagcgcgacgcccgcgaaggctgttgaggctcgagcgagcttctccagaccgacctttctgcagctgagccccggggggctgcgacgcgccgatgaccacgcgggccgggctgtgcaaagccccccggacacgggccgccgcctgccctggagcacaggctacgccgagaccctgttctgccccagagcccggagggcggagagcccggcgaaggatgagttggccagttccccgtcgcggcccggcagcttaaaggctaagggtcatcaatgctggcaagagtcggcacaatgaggaccaggcttgctgtgaagtggtgtatgtggaaggtcggaggagtgttacaggagtacctagggagcctagccgaggccagggactctgcttctactactggggcctatttgatgggcatgcagggggcggagctgctgaaatggcctcacggctcctgcatcgccatatccgagagcagctaaaggacctggtagagatacttcaggacccttcgccaccacccctctgcctcccaaccactccggggaccccagattcctccgatccctctcacttgcttggccctcagtcctgctggtcttcacagaaggaagtgagccacgagagcctggtagtgggggccgttgagaatgccttccagctcatggatgagcagatggcccgggagcggcgtggccaccaagtggaggggggctgctgtgcactggttgtgatctacctgctaggcaaggtgtacgtggccaatgcaggcgatagcagggccatcattgtccggaatggtgaaatcattccaatgtcccgggagtttaccccggagactga

SEQ ID NO: 16394 - DNA, 847 bp, Homo sapiens
  source 1..847: mol_type = unassigned DNA
cggccgagggcggggcagggaggcagcatgctaaaccgggtgcgctcggccgtggcgcacctggtgagctccgggggcgctccgcctccgcgccccaaatccccggacctgcccaacgccgcctcggcgccgcccgccgccgctccagaagcgcccaggagccctcccgcgaaggctgggagcgggagcgcgacgcccgcgaaggctgttgaggctcgagcgagcttctccagaccgacctttctgcagctgagccccggggggctgcgacgcgccgatgaccacgcgggccgggctgtgcaaagccccccggacacgggccgccgcctgccctggagcacaggctacgccgagaccctgttctgccccagagcccggagggcggagagcccggcgaaggatgagttggccagttccccgtcgcggcccggcagcttaaaggctaagggaaaaggggtttcacgaaggagcggggttctttttaataggggacatagcggttgggaagactcgctcacccgcttcccggctccagcgccccagttccctgtccctcttaccgtagttcccctccccctccacacccagaaatagcccgcgacaccaggaggccgccagcttccccaggagcggggagggggacgcccggggtagaggagggtcccatttagatgcccttcagcctgccaactcgtgctggcctggcaaagaagcggaccccctgcccggagcggccggctggcccccgggctgtgtgtattttaaatgcatctgccgggaacgcagagcaccgagggagatgggggcgctcagttcgctgaggaaggtggctggtggcccatggacc

SEQ ID NO: 16395 - DNA, 1640 bp, Homo sapiens
  source 1..1640: mol_type = unassigned DNA
ctacaggcacagggcgaggggtagaaccacatcgcttgactcttaagtgtgtttccaactgctcccacttcccgttttctttagagaaacccagaccaaacaaggaaagggaaataggccacggtagggtcattactattgctccttaagcttcctcgccggtccacctacccagacaaggcaaacggaaatctgcagcaggactcagcttggtgcacacaactccgccctcgccacacccactctgcagcgtctggcccggcaatacccatctgggcgcccctcctgcttcctctaggctgagaaccggagccttaccatcaaacttcggaaacggaagccagagaaaaaggtagaatggacaagtgacactgtggacaatgaacacatgggccgccgctcatccaaatgctgctgtatttatgagaaacctcgggcctttggcgagagctccacggaaagtgatgaggaggaagaagagggctgtggtcatacacactgtgtacgtggccaccgcaaaggacggcgtcgtgcaaccctaggaccgacccccaccacccctccccagcctcctgacccttcccagccccctccagggccaatgcagcactaaatccctctctcctccagcattcctgtgtctgtctggccctaaatgtatccatgtggctacttctccagccccctccttccctctcttctgcctgatagagggaagaggaagaggaggacgaacagagatcctgaaattctgacttgctgctattccagaacccagcctcctgggtttccccagtcctcatttttcctcccaatacccacccttctctctcgagggatctaggcaccttggtcccagtgtcttccttttgttctcactgccaaactgcctgtcctgggatctagttatcttggccctgcactctcaacatgagtagcgaacacttaaattgggttttcaacagtcccagctttcactgccagggtcccagtcagattccaggaatttgcgccctaactttgcttgctaatcctggtttagagctatcccactaaaatatttaatcctaattcttagtccttgcctgtgagatatgaggtcttacaggagacctcagagctcccagcccttctcctcctgctaacccttctcacaccctcaagaggagttagaaaagaggtccttgtcattctcacctcttatggaaaatggaataagaaataatcatatcctttcttcccacccttctcctgttatttaggatttctgacaaagctggcttgagattggtcacttagagccgactgtctcctctgccttttgtttttcagcttcagagacagatccaatatagtcccagggacctgggtctctgggagaggaaggaagagggagggagcaaagagattggggtatgtcccctgtagtacactcttacctcttacttcctagactttgatttctccggcagcccagatgttcagttctcttggcccctctctaccccttactgggatctggttttcattttccggtccttttgccatacacagttacagagatcagtcaaatccataccaccactgagatctcatttattgccacagatgcacaaaataaataacccaaaatcacaaaa

SEQ ID NO: 16396 - DNA, 1731 bp, Homo sapiens
  source 1..1731: mol_type = unassigned DNA
ctttctttcagcgcctgcgcgctgtcacgttacggcggaactaatccagcgacgcctgcgctttgacgcatttggtgccgtggaagggaaaaagggggactgcagtatgcgtcacacccggaagcggcgagccggaagtggggttagccaggttatccccaggggtggagaagcggaggcccaggaggagggggaataaagaaggtggaggatcctggctaccactctgaatccgataccgcttctcttagacctcagcgacagaaaaagggaagggtgtctcatcccccttcctcctctcctccctgtcctgagccttagccatggccgaggcaggggctgggctgagcgagaccgtcactgagacaacggttaccgtgacaaccgagcccgagaaccggagccttaccatcaaacttcggaaacggaagccagagaaaaaggtagaatggacaagtgacactgtggacaatgaacacatgggccgccgctcatccaaatgctgctgtatttatgagaaacctcgggcctttggcgagagctccacggaaagtgatgaggaggaagaagagggctgtggtcatacacactgtgtacgtggccaccgcaaaggacggcgtcgtgcaaccctaggaccgacccccaccacccctccccagcctcctgacccttcccagccccctccagggccaatgcagcactaaatccctctctcctccagcattcctgtgtctgtctggccctaaatgtatccatgtggctacttctccagccccctccttccctctcttctgcctgatagagggaagaggaagaggaggacgaacagagatcctgaaattctgacttgctgctattccagaacccagcctcctgggtttccccagtcctcatttttcctcccaatacccacccttctctctcgagggatctaggcaccttggtcccagtgtcttccttttgttctcactgccaaactgcctgtcctgggatctagttatcttggccctgcactctcaacatgagtagcgaacacttaaattgggttttcaacagtcccagctttcactgccagggtcccagtcagattccaggaatttgcgccctaactttgcttgctaatcctggtttagagctatcccactaaaatatttaatcctaattcttagtccttgcctgtgagatatgaggtcttacaggagacctcagagctcccagcccttctcctcctgctaacccttctcacaccctcaagaggagttagaaaagaggtccttgtcattctcacctcttatggaaaatggaataagaaataatcatatcctttcttcccacccttctcctgttatttaggatttctgacaaagctggcttgagattggtcacttagagccgactgtctcctctgccttttgtttttcagcttcagagacagatccaatatagtcccagggacctgggtctctgggagaggaaggaagagggagggagcaaagagattggggtatgtcccctgtagtacactcttacctcttacttcctagactttgatttctccggcagcccagatgttcagttctcttggcccctctctaccccttactgggatctggttttcattttccggtccttttgccatacacagttacagagatcagtcaaatccataccaccactgagatctcatttattgccacagatgcacaaaataaataacccaaaatcacaaaa

SEQ ID NO: 16397 - DNA, 1689 bp, Homo sapiens
  source 1..1689: mol_type = unassigned DNA
ccggaagcggcgagccggaagtggggttagccaggttatccccaggggtggagaagcggaggcccaggaggagggggaataaagaaggtggaggatcctggctaccactctgaatccgataccgcttctcttagacctcagcgacagaaaaagggaagggtgtctcatcccccttcctcctctcctccctgtcctgagccttagccatggccgaggcaggggctgggctgagcgagaccgtcactgagacaacggttaccgtgacaaccgagcccgatgatttggggaggaagacggagaaacagcaaggattatattttcctttgaagagttgctgggacctttcctaggagaaccggagccttaccatcaaacttcggaaacggaagccagagaaaaaggtagaatggacaagtgacactgtggacaatgaacacatgggccgccgctcatccaaatgctgctgtatttatgagaaacctcgggcctttggcgagagctccacggaaagtgatgaggaggaagaagagggctgtggtcatacacactgtgtacgtggccaccgcaaaggacggcgtcgtgcaaccctaggaccgacccccaccacccctccccagcctcctgacccttcccagccccctccagggccaatgcagcactaaatccctctctcctccagcattcctgtgtctgtctggccctaaatgtatccatgtggctacttctccagccccctccttccctctcttctgcctgatagagggaagaggaagaggaggacgaacagagatcctgaaattctgacttgctgctattccagaacccagcctcctgggtttccccagtcctcatttttcctcccaatacccacccttctctctcgagggatctaggcaccttggtcccagtgtcttccttttgttctcactgccaaactgcctgtcctgggatctagttatcttggccctgcactctcaacatgagtagcgaacacttaaattgggttttcaacagtcccagctttcactgccagggtcccagtcagattccaggaatttgcgccctaactttgcttgctaatcctggtttagagctatcccactaaaatatttaatcctaattcttagtccttgcctgtgagatatgaggtcttacaggagacctcagagctcccagcccttctcctcctgctaacccttctcacaccctcaagaggagttagaaaagaggtccttgtcattctcacctcttatggaaaatggaataagaaataatcatatcctttcttcccacccttctcctgttatttaggatttctgacaaagctggcttgagattggtcacttagagccgactgtctcctctgccttttgtttttcagcttcagagacagatccaatatagtcccagggacctgggtctctgggagaggaaggaagagggagggagcaaagagattggggtatgtcccctgtagtacactcttacctcttacttcctagactttgatttctccggcagcccagatgttcagttctcttggcccctctctaccccttactgggatctggttttcattttccggtccttttgccatacacagttacagagatcagtcaaatccataccaccactgagatctcatttattgccacagatgcacaaaataaataacccaaaatcacaaaa

SEQ ID NO: 16398 - DNA, 1536 bp, Homo sapiens
  source 1..1536: mol_type = unassigned DNA
ggattagaagagttgttggaggagctaggcctagggatatgggaggtgtggggttgaatatctagggctgggagaatcggaaggtattggagctatttggagtggcagagatggtgcaggaggatgatttggggaggaagacggagaaacagcaaggattatattttcctttgaagagttgctgggacctttcctaggagaaccggagccttaccatcaaacttcggaaacggaagccagagaaaaaggtagaatggacaagtgacactgtggacaatgaacacatgggccgccgctcatccaaatgctgctgtatttatgagaaacctcgggcctttggcgagagctccacggaaagtgatgaggaggaagaagagggctgtggtcatacacactgtgtacgtggccaccgcaaaggacggcgtcgtgcaaccctaggaccgacccccaccacccctccccagcctcctgacccttcccagccccctccagggccaatgcagcactaaatccctctctcctccagcattcctgtgtctgtctggccctaaatgtatccatgtggctacttctccagccccctccttccctctcttctgcctgatagagggaagaggaagaggaggacgaacagagatcctgaaattctgacttgctgctattccagaacccagcctcctgggtttccccagtcctcatttttcctcccaatacccacccttctctctcgagggatctaggcaccttggtcccagtgtcttccttttgttctcactgccaaactgcctgtcctgggatctagttatcttggccctgcactctcaacatgagtagcgaacacttaaattgggttttcaacagtcccagctttcactgccagggtcccagtcagattccaggaatttgcgccctaactttgcttgctaatcctggtttagagctatcccactaaaatatttaatcctaattcttagtccttgcctgtgagatatgaggtcttacaggagacctcagagctcccagcccttctcctcctgctaacccttctcacaccctcaagaggagttagaaaagaggtccttgtcattctcacctcttatggaaaatggaataagaaataatcatatcctttcttcccacccttctcctgttatttaggatttctgacaaagctggcttgagattggtcacttagagccgactgtctcctctgccttttgtttttcagcttcagagacagatccaatatagtcccagggacctgggtctctgggagaggaaggaagagggagggagcaaagagattggggtatgtcccctgtagtacactcttacctcttacttcctagactttgatttctccggcagcccagatgttcagttctcttggcccctctctaccccttactgggatctggttttcattttccggtccttttgccatacacagttacagagatcagtcaaatccataccaccactgagatctcatttattgccacagatgcacaaaataaataacccaaaatcacaaaa

SEQ ID NO: 16399 - DNA, 1464 bp, Homo sapiens
  source 1..1464: mol_type = unassigned DNA
gggatatgggaggtgtggggttgaatatctagggctgggagaatcggaaggatgatttggggaggaagacggagaaacagcaaggattatattttcctttgaagagttgctgggacctttcctaggagaaccggagccttaccatcaaacttcggaaacggaagccagagaaaaaggtagaatggacaagtgacactgtggacaatgaacacatgggccgccgctcatccaaatgctgctgtatttatgagaaacctcgggcctttggcgagagctccacggaaagtgatgaggaggaagaagagggctgtggtcatacacactgtgtacgtggccaccgcaaaggacggcgtcgtgcaaccctaggaccgacccccaccacccctccccagcctcctgacccttcccagccccctccagggccaatgcagcactaaatccctctctcctccagcattcctgtgtctgtctggccctaaatgtatccatgtggctacttctccagccccctccttccctctcttctgcctgatagagggaagaggaagaggaggacgaacagagatcctgaaattctgacttgctgctattccagaacccagcctcctgggtttccccagtcctcatttttcctcccaatacccacccttctctctcgagggatctaggcaccttggtcccagtgtcttccttttgttctcactgccaaactgcctgtcctgggatctagttatcttggccctgcactctcaacatgagtagcgaacacttaaattgggttttcaacagtcccagctttcactgccagggtcccagtcagattccaggaatttgcgccctaactttgcttgctaatcctggtttagagctatcccactaaaatatttaatcctaattcttagtccttgcctgtgagatatgaggtcttacaggagacctcagagctcccagcccttctcctcctgctaacccttctcacaccctcaagaggagttagaaaagaggtccttgtcattctcacctcttatggaaaatggaataagaaataatcatatcctttcttcccacccttctcctgttatttaggatttctgacaaagctggcttgagattggtcacttagagccgactgtctcctctgccttttgtttttcagcttcagagacagatccaatatagtcccagggacctgggtctctgggagaggaaggaagagggagggagcaaagagattggggtatgtcccctgtagtacactcttacctcttacttcctagactttgatttctccggcagcccagatgttcagttctcttggcccctctctaccccttactgggatctggttttcattttccggtccttttgccatacacagttacagagatcagtcaaatccataccaccactgagatctcatttattgccacagatgcacaaaataaataacccaaaatcacaaaa

SEQ ID NO: 16400 - DNA, 1723 bp, Homo sapiens
  source 1..1723: mol_type = unassigned DNA
ggaaaaaggaagggagatcaaagattaggtgctggggactgaaaaataattttcatgtattaatactaccaaggatgatttggggaggaagacggagaaacagcaaggattatattttcctttgaagagttgctgggacctttcctaggttaggaattgtgtcttctcttatactggtggtataagaacaggaaataatacttattcctcaagggactatctgaggtaaaagacctgttctgttttatcttctgtcagctcctctggtgctatgcctatggtactgattgagctaaagaagaaaagagaggaggttccctgggagggagtgggaaaggttagtaagaggggactagataggtatgctcatccttaaccttctaggagaaccggagccttaccatcaaacttcggaaacggaagccagagaaaaaggtagaatggacaagtgacactgtggacaatgaacacatgggccgccgctcatccaaatgctgctgtatttatgagaaacctcgggcctttggcgagagctccacggaaagtgatgaggaggaagaagagggctgtggtcatacacactgtgtacgtggccaccgcaaaggacggcgtcgtgcaaccctaggaccgacccccaccacccctccccagcctcctgacccttcccagccccctccagggccaatgcagcactaaatccctctctcctccagcattcctgtgtctgtctggccctaaatgtatccatgtggctacttctccagccccctccttccctctcttctgcctgatagagggaagaggaagaggaggacgaacagagatcctgaaattctgacttgctgctattccagaacccagcctcctgggtttccccagtcctcatttttcctcccaatacccacccttctctctcgagggatctaggcaccttggtcccagtgtcttccttttgttctcactgccaaactgcctgtcctgggatctagttatcttggccctgcactctcaacatgagtagcgaacacttaaattgggttttcaacagtcccagctttcactgccagggtcccagtcagattccaggaatttgcgccctaactttgcttgctaatcctggtttagagctatcccactaaaatatttaatcctaattcttagtccttgcctgtgagatatgaggtcttacaggagacctcagagctcccagcccttctcctcctgctaacccttctcacaccctcaagaggagttagaaaagaggtccttgtcattctcacctcttatggaaaatggaataagaaataatcatatcctttcttcccacccttctcctgttatttaggatttctgacaaagctggcttgagattggtcacttagagccgactgtctcctctgccttttgtttttcagcttcagagacagatccaatatagtcccagggacctgggtctctgggagaggaaggaagagggagggagcaaagagattggggtatgtcccctgtagtacactcttacctcttacttcctagactttgatttctccggcagcccagatgttcagttctcttggcccctctctaccccttactgggatctggttttcattttccggtccttttgccatacacagttacagagatcagtcaaatccataccaccactgagatctcatttattgccacagatgcacaaaataaataacccaaaatcacaaaa

SEQ ID NO: 16401 - DNA, 1640 bp, Homo sapiens; identical to SEQ ID NO: 16395
  source 1..1640: mol_type = unassigned DNA

SEQ ID NO: 16402 - DNA, 1731 bp, Homo sapiens; identical to SEQ ID NO: 16396
  source 1..1731: mol_type = unassigned DNA

SEQ ID NO: 16403 - DNA, 1689 bp, Homo sapiens; identical to SEQ ID NO: 16397
  source 1..1689: mol_type = unassigned DNA

SEQ ID NO: 16404 - DNA, 1536 bp, Homo sapiens; identical to SEQ ID NO: 16398
  source 1..1536: mol_type = unassigned DNA

SEQ ID NO: 16405 - DNA, 1464 bp, Homo sapiens; identical to SEQ ID NO: 16399
  source 1..1464: mol_type = unassigned DNA

SEQ ID NO: 16406 - DNA, 1723 bp, Homo sapiens; identical to SEQ ID NO: 16400
  source 1..1723: mol_type = unassigned DNA

SEQ ID NO: 16407 - DNA, 1640 bp, Homo sapiens; identical to SEQ ID NO: 16395
  source 1..1640: mol_type = unassigned DNA

SEQ ID NO: 16408 - DNA, 1614 bp, Homo sapiens
  source 1..1614: mol_type = unassigned DNA
ccggaagcggcgagccggaagtggggttagccaggttatccccaggggtggagaagcggaggcccaggaggagggggaataaagaaggtggaggatcctggctaccaatctgaatccgataccgcttctcttagacctcagcgacagaaaaagggaagggtgtctcatcccccttcctcctctcctccctgtcctgagccttagccatggccgaggcaggggctgggctgagcgagaccgtcactgagacaacggttaccgtgacaaccgagcccgagaaccggagccttaccatcaaacttcggaaacggaagccagagaaaaaggtagaatggacaagtgacactgtggacaatgaacacatgggccgccgctcatccaaatgctgctgtatttatgagaaacctcgggcctttggcgagagctccacggaaagtgatgaggaggaagaagagggctgtggtcatacacactgtgtacgtggccaccgcaaaggacggcgtcgtgcaaccctaggaccgacccccaccacccctccccagcctcctgacccttcccagccccctccagggccaatgcagcactaaatccctctctcctccagcattcctgtgtctgtctggccctaaatgtatccatgtggctacttctccagccccctccttccctctcttctgcctgatagagggaagaggaagaggaggacgaacagagatcctgaaattctgacttgctgctattccagaacccagcctcctgggtttccccagtcctcatttttcctcccaatacccacccttctctctcgagggatctaggcaccttggtcccagtgtcttccttttgttctcactgccaaactgcctgtcctgggatctagttatcttggccctgcactctcaacatgagtagcgaacacttaaattgggttttcaacagtcccagctttcactgccagggtcccagtcagattccaggaatttgcgccctaactttgcttgctaatcctggtttagagctatcccactaaaatatttaatcctaattcttagtccttgcctgtgagatatgaggtcttacaggagacctcagagctcccagcccttctcctcctgctaacccttctcacaccctcaagaggagttagaaaagaggtccttgtcattctcacctcttatggaaaatggaataagaaataatcatatcctttcttcccacccttctcctgttatttaggatttctgacaaagctggcttgagattggtcacttagagccgactgtctcctctgccttttgtttttcagcttcagagacagatccaatatagtcccagggacctgggtctctgggagaggaaggaagagggagggagcaaagagattggggtatgtcccctgtagtacactcttacctcttacttcctagactttgatttctccggcagcccagatgttcagttctcttggcccctctctaccccttactgggatctggttttcattttccggtccttttgccatacacagttacagagatcagtcaaatccataccaccactgagatctcatttattgccacagatgcacaaaataaataacccaaaatcacaaaa

SEQ ID NO: 16409 - DNA, 1689 bp, Homo sapiens
  source 1..1689: mol_type = unassigned DNA
ccggaagcggcgagccggaagtggggttagccaggttatccccaggggtggagaagcggaggcccaggaggagggggaataaagaaggtggaggatcctggctaccaatctgaatccgataccgcttctcttagacctcagcgacagaaaaagggaagggtgtctcatcccccttcctcctctcctccctgtcctgagccttagccatggccgaggcaggggctgggctgagcgagaccgtcactgagacaacggttaccgtgacaaccgagcccgatgatttggggaggaagacggagaaacagcaaggattatattttcctttgaagagttgctgggacctttcctaggagaaccggagccttaccatcaaacttcggaaacggaagccagagaaaaaggtagaatggacaagtgacactgtggacaatgaacacatgggccgccgctcatccaaatgctgctgtatttatgagaaacctcgggcctttggcgagagctccacggaaagtgatgaggaggaagaagagggctgtggtcatacacactgtgtacgtggccaccgcaaaggacggcgtcgtgcaaccctaggaccgacccccaccacccctccccagcctcctgacccttcccagccccctccagggccaatgcagcactaaatccctctctcctccagcattcctgtgtctgtctggccctaaatgtatccatgtggctacttctccagccccctccttccctctcttctgcctgatagagggaagaggaagaggaggacgaacagagatcctgaaattctgacttgctgctattccagaacccagcctcctgggtttccccagtcctcatttttcctcccaatacccacccttctctctcgagggatctaggcaccttggtcccagtgtcttccttttgttctcactgccaaactgcctgtcctgggatctagttatcttggccctgcactctcaacatgagtagcgaacacttaaattgggttttcaacagtcccagctttcactgccagggtcccagtcagattccaggaatttgcgccctaactttgcttgctaatcctggtttagagctatcccactaaaatatttaatcctaattcttagtccttgcctgtgagatatgaggtcttacaggagacctcagagctcccagcccttctcctcctgctaacccttctcacaccctcaagaggagttagaaaagaggtccttgtcattctcacctcttatggaaaatggaataagaaataatcatatcctttcttcccacccttctcctgttatttaggatttctgacaaagctggcttgagattggtcacttagagccgactgtctcctctgccttttgtttttcagcttcagagacagatccaatatagtcccagggacctgggtctctgggagaggaaggaagagggagggagcaaagagattggggtatgtcccctgtagtacactcttacctcttacttcctagactttgatttctccggcagcccagatgttcagttctcttggcccctctctaccccttactgggatctggttttcattttccggtccttttgccatacacagttacagagatcagtcaaatccataccaccactgagatctcatttattgccacagatgcacaaaataaataacccaaaatcacaaaa

SEQ ID NO: 16410 - DNA, 1536 bp, Homo sapiens; identical to SEQ ID NO: 16398
  source 1..1536: mol_type = unassigned DNA

SEQ ID NO: 16411 - DNA, 1464 bp, Homo sapiens; identical to SEQ ID NO: 16399
  source 1..1464: mol_type = unassigned DNA

SEQ ID NO: 16412 - DNA, 1723 bp, Homo sapiens; identical to SEQ ID NO: 16400
  source 1..1723: mol_type = unassigned DNA

SEQ ID NO: 16413 - DNA, 1731 bp, Homo sapiens; identical to SEQ ID NO: 16396
  source 1..1731: mol_type = unassigned DNA

SEQ ID NO: 16414 - DNA, 1689 bp, Homo sapiens; identical to SEQ ID NO: 16397
  source 1..1689: mol_type = unassigned DNA

SEQ ID NO: 16415 - DNA, 1723 bp, Homo sapiens; identical to SEQ ID NO: 16400
  source 1..1723: mol_type = unassigned DNA

SEQ ID NO: 16416 - DNA, 1640 bp, Homo sapiens; identical to SEQ ID NO: 16395
  source 1..1640: mol_type = unassigned DNA

SEQ ID NO: 16417 - DNA, 1464 bp, Homo sapiens; identical to SEQ ID NO: 16399
  source 1..1464: mol_type = unassigned DNA

SEQ ID NO: 16418 - DNA, 1536 bp, Homo sapiens; identical to SEQ ID NO: 16398
  source 1..1536: mol_type = unassigned DNA

SEQ ID NO: 16419 - DNA, 1640 bp, Homo sapiens
  source 1..1640: mol_type = unassigned DNA
ctacaggcacagggcgaggggtagaaccacatcgcttgactcttaagtgtgtttccaactgctcccacttcccgttttctttagagaaacccagaccaaacaaggaaagggaaataggccacggtagggtcattactattgctccttaagcttcctcgccggtccacctacccagacaaggcaaacggaaatctgcagcaggactcagcttggtgcacacaactccgccctcgccacacccactctgcagcgtctggcccggcaatacccatctgggcgcccctcctgcttcctctaggctgagaaccggagccttaccatcaaacttcggaaacggaagccagagaaaaaggtagaatggacaagtgacactgtggacaatgaacacatgggccgccgctcatccaaatgctgctgtatttatgagaaacctcgggcctttggcgagagctccacggaaagtgatgaggaggaagaagagggctgtggtcatacacactgtgtacgtggccaccgcaaaggacggcgtcgtgcaaccctaggaccgacccccaccacccctccccagcctcctgacccttcccagccccctccagggccaatgcagcactaaatccctctctcctccagcattcctgtgtctgtctggccctaaatgtatccatgtggctacttctccagccccctccttccctctcttctgcctgatagagggaagaggaagaggaggacgaacagagatcctgaaattctgacttgctgctattccagaacccagcctcctgggtttccccagtcctcatttttcctcccaatacccacccttctctctcgagggatctaggcaccttggtcccagtgtcttccttttgttctcactgccaaactgcctgtcctgggatctagttatcttggccctgcactctcaacatgagtagcgaacacttaaattgggttttcaacagtcccagctttcactgccagggtcccagtcagattccaggaatttgcgccctaactttgcttgctaatcctggtttagagctatcccactaaaatatttaatcctaattcttagtccttgcctgtgagatatgaggtcttacaggagacctcagagctcccagcccttctcctcctgctaacccttctcacaccctcaagaggagttagaaaagaggtccttgtcattctcacctcttatggaaaatggaataagaaataatcatatcctttcttcccacccttctcctgttatttaggatttctgacaaagctggcttgagattggtcacttagagccgactgtctcctctgccttttgtttttcagcttcagagacagatccaatatagtcccagggacctgggtctctgggagaggaaggaagagggagggagcaaagagattggggtatgtcccctgtagtacactcttacctcttacttcctagactttgatttctccggcagcccagatgttcagttctcttggcccctctctaccccttactgggatccggttttcattttccggtccttttgccatacacagttacagagatcagtcaaatccataccaccactgagatctcatttattgccacagatgcacaaaataaataacccaaaatcacaaaa

SEQ ID NO: 16420 - DNA, 1731 bp, Homo sapiens
  source 1..1731: mol_type = unassigned DNA
ctttctttcagcgcctgcgcgctgtcacgttacggcggaactaatccagcgacgcctgcgctttgacgcatttggtgccgtggaagggaaaaagggggactgcagtatgcgtcacacccggaagcggcgagccggaagtggggttagccaggttatccccaggggtggagaagcggaggcccaggaggagggggaataaagaaggtggaggatcctggctaccactctgaatccgataccgcttctcttagacctcagcgacagaaaaagggaagggtgtctcatcccccttcctcctctcctccctgtcctgagccttagccatggccgaggcaggggctgggctgagcgagaccgtcactgagacaacggttaccgtgacaaccgagcccgagaaccggagccttaccatcaaacttcggaaacggaagccagagaaaaaggtagaatggacaagtgacactgtggacaatgaacacatgggccgccgctcatccaaatgctgctgtatttatgagaaacctcgggcctttggcgagagctccacggaaagtgatgaggaggaagaagagggctgtggtcatacacactgtgtacgtggccaccgcaaaggacggcgtcgtgcaaccctaggaccgacccccaccacccctccccagcctcctgacccttcccagccccctccagggccaatgcagcactaaatccctctctcctccagcattcctgtgtctgtctggccctaaatgtatccatgtggctacttctccagccccctccttccctctcttctgcctgatagagggaagaggaagaggaggacgaacagagatcctgaaattctgacttgctgctattccagaacccagcctcctgggtttccccagtcctcatttttcctcccaatacccacccttctctctcgagggatctaggcaccttggtcccagtgtcttccttttgttctcactgccaaactgcctgtcctgggatctagttatcttggccctgcactctcaacatgagtagcgaacacttaaattgggttttcaacagtcccagctttcactgccagggtcccagtcagattccaggaatttgcgccctaactttgcttgctaatcctggtttagagctatcccactaaaatatttaatcctaattcttagtccttgcctgtgagatatgaggtcttacaggagacctcagagctcccagcccttctcctcctgctaacccttctcacaccctcaagaggagttagaaaagaggtccttgtcattctcacctcttatggaaaatggaataagaaataatcatatcctttcttcccacccttctcctgttatttaggatttctgacaaagctggcttgagattggtcacttagagccgactgtctcctctgccttttgtttttcagcttcagagacagatccaatatagtcccagggacctgggtctctgggagaggaaggaagagggagggagcaaagagattggggtatgtcccctgtagtacactcttacctcttacttcctagactttgatttctccggcagcccagatgttcagttctcttggcccctctctaccccttactgggatccggttttcattttccggtccttttgccatacacagttacagagatcagtcaaatccataccaccactgagatctcatttattgccacagatgcacaaaataaataacccaaaatcacaaaa

SEQ ID NO: 16421 - DNA, 1689 bp, Homo sapiens
  source 1..1689: mol_type = unassigned DNA
ccggaagcggcgagccggaagtggggttagccaggttatccccaggggtggagaagcggaggcccaggaggagggggaataaagaaggtggaggatcctggctaccactctgaatccgataccgcttctcttagacctcagcgacagaaaaagggaagggtgtctcatcccccttcctcctctcctccctgtcctgagccttagccatggccgaggcaggggctgggctgagcgagaccgtcactgagacaacggttaccgtgacaaccgagcccgatgatttggggaggaagacggagaaacagcaaggattatattttcctttgaagagttgctgggacctttcctaggagaaccggagccttaccatcaaacttcggaaacggaagccagagaaaaaggtagaatggacaagtgacactgtggacaatgaacacatgggccgccgctcatccaaatgctgctgtatttatgagaaacctcgggcctttggcgagagctccacggaaagtgatgaggaggaagaagagggctgtggtcatacacactgtgtacgtggccaccgcaaaggacggcgtcgtgcaaccctaggaccgacccccaccacccctccccagcctcctgacccttcccagccccctccagggccaatgcagcactaaatccctctctcctccagcattcctgtgtctgtctggccctaaatgtatccatgtggctacttctccagccccctccttccctctcttctgcctgatagagggaagaggaagaggaggacgaacagagatcctgaaattctgacttgctgctattccagaacccagcctcctgggtttccccagtcctcatttttcctcccaatacccacccttctctctcgagggatctaggcaccttggtcccagtgtcttccttttgttctcactgccaaactgcctgtcctgggatctagttatcttggccctgcactctcaacatgagtagcgaacacttaaattgggttttcaacagtcccagctttcactgccagggtcccagtcagattccaggaatttgcgccctaactttgcttgctaatcctggtttagagctatcccactaaaatatttaatcctaattcttagtccttgcctgtgagatatgaggtcttacaggagacctcagagctcccagcccttctcctcctgctaacccttctcacaccctcaagaggagttagaaaagaggtccttgtcattctcacctcttatggaaaatggaataagaaataatcatatcctttcttcccacccttctcctgttatttaggatttctgacaaagctggcttgagattggtcacttagagccgactgtctcctctgccttttgtttttcagcttcagagacagatccaatatagtcccagggacctgggtctctgggagaggaaggaagagggagggagcaaagagattggggtatgtcccctgtagtacactcttacctcttacttcctagactttgatttctccggcagcccagatgttcagttctcttggcccctctctaccccttactgggatccggttttcattttccggtccttttgccatacacagttacagagatcagtcaaatccataccaccactgagatctcatttattgccacagatgcacaaaataaataacccaaaatcacaaaa

SEQ ID NO: 16422 - DNA, 1536 bp, Homo sapiens
  source 1..1536: mol_type = unassigned DNA
ggattagaagagttgttggaggagctaggcctagggatatgggaggtgtggggttgaatatctagggctgggagaatcggaaggtattggagctatttggagtggcagagatggtgcaggaggatgatttggggaggaagacggagaaacagcaaggattatattttcctttgaagagttgctgggacctttcctaggagaaccggagccttaccatcaaacttcggaaacggaagccagagaaaaaggtagaatggacaagtgacactgtggacaatgaacacatgggccgccgctcatccaaatgctgctgtatttatgagaaacctcgggcctttggcgagagctccacggaaagtgatgaggaggaagaagagggctgtggtcatacacactgtgtacgtggccaccgcaaaggacggcgtcgtgcaaccctaggaccgacccccaccacccctccccagcctcctgacccttcccagccccctccagggccaatgcagcactaaatccctctctcctccagcattcctgtgtctgtctggccctaaatgtatccatgtggctacttctccagccccctccttccctctcttctgcctgatagagggaagaggaagaggaggacgaacagagatcctgaaattctgacttgctgctattccagaacccagcctcctgggtttccccagtcctcatttttcctcccaatacccacccttctctctcgagggatctaggcaccttggtcccagtgtcttccttttgttctcactgccaaactgcctgtcctgggatctagttatcttggccctgcactctcaacatgagtagcgaacacttaaattgggttttcaacagtcccagctttcactgccagggtcccagtcagattccaggaatttgcgccctaactttgcttgctaatcctggtttagagctatcccactaaaatatttaatcctaattcttagtccttgcctgtgagatatgaggtcttacaggagacctcagagctcccagcccttctcctcctgctaacccttctcacaccctcaagaggagttagaaaagaggtccttgtcattctcacctcttatggaaaatggaataagaaataatcatatcctttcttcccacccttctcctgttatttaggatttctgacaaagctggcttgagattggtcacttagagccgactgtctcctctgccttttgtttttcagcttcagagacagatccaatatagtcccagggacctgggtctctgggagaggaaggaagagggagggagcaaagagattggggtatgtcccctgtagtacactcttacctcttacttcctagactttgatttctccggcagcccagatgttcagttctcttggcccctctctaccccttactgggatccggttttcattttccggtccttttgccatacacagttacagagatcagtcaaatccataccaccactgagatctcatttattgccacagatgcacaaaataaataacccaaaatcacaaaa

SEQ ID NO: 16423 - DNA, 1464 bp, Homo sapiens
  source 1..1464: mol_type = unassigned DNA
gggatatgggaggtgtggggttgaatatctagggctgggagaatcggaaggatgatttggggaggaagacggagaaacagcaaggattatattttcctttgaagagttgctgggacctttcctaggagaaccggagccttaccatcaaacttcggaaacggaagccagagaaaaaggtagaatggacaagtgacactgtggacaatgaacacatgggccgccgctcatccaaatgctgctgtatttatgagaaacctcgggcctttggcgagagctccacggaaagtgatgaggaggaagaagagggctgtggtcatacacactgtgtacgtggccaccgcaaaggacggcgtcgtgcaaccctaggaccgacccccaccacccctccccagcctcctgacccttcccagccccctccagggccaatgcagcactaaatccctctctcctccagcattcctgtgtctgtctggccctaaatgtatccatgtggctacttctccagccccctccttccctctcttctgcctgatagagggaagaggaagaggaggacgaacagagatcctgaaattctgacttgctgctattccagaacccagcctcctgggtttccccagtcctcatttttcctcccaatacccacccttctctctcgagggatctaggcaccttggtcccagtgtcttccttttgttctcactgccaaactgcctgtcctgggatctagttatcttggccctgcactctcaacatgagtagcgaacacttaaattgggttttcaacagtcccagctttcactgccagggtcccagtcagattccaggaatttgcgccctaactttgcttgctaatcctggtttagagctatcccactaaaatatttaatcctaattcttagtccttgcctgtgagatatgaggtcttacaggagacctcagagctcccagcccttctcctcctgctaacccttctcacaccctcaagaggagttagaaaagaggtccttgtcattctcacctcttatggaaaatggaataagaaataatcatatcctttcttcccacccttctcctgttatttaggatttctgacaaagctggcttgagattggtcacttagagccgactgtctcctctgccttttgtttttcagcttcagagacagatccaatatagtcccagggacctgggtctctgggagaggaaggaagagggagggagcaaagagattggggtatgtcccctgtagtacactcttacctcttacttcctagactttgatttctccggcagcccagatgttcagttctcttggcccctctctaccccttactgggatccggttttcattttccggtccttttgccatacacagttacagagatcagtcaaatccataccaccactgagatctcatttattgccacagatgcacaaaataaataacccaaaatcacaaaa

SEQ ID NO: 16424 - DNA, 1723 bp, Homo sapiens
  source 1..1723: mol_type = unassigned DNA
ggaaaaaggaagggagatcaaagattaggtgctggggactgaaaaataattttcatgtattaatactaccaaggatgatttggggaggaagacggagaaacagcaaggattatattttcctttgaagagttgctgggacctttcctaggttaggaattgtgtcttctcttatactggtggtataagaacaggaaataatacttattcctcaagggactatctgaggtaaaagacctgttctgttttatcttctgtcagctcctctggtgctatgcctatggtactgattgagctaaagaagaaaagagaggaggttccctgggagggagtgggaaaggttagtaagaggggactagataggtatgctcatccttaaccttctaggagaaccggagccttaccatcaaacttcggaaacggaagccagagaaaaaggtagaatggacaagtgacactgtggacaatgaacacatgggccgccgctcatccaaatgctgctgtatttatgagaaacctcgggcctttggcgagagctccacggaaagtgatgaggaggaagaagagggctgtggtcatacacactgtgtacgtggccaccgcaaaggacggcgtcgtgcaaccctaggaccgacccccaccacccctccccagcctcctgacccttcccagccccctccagggccaatgcagcactaaatccctctctcctccagcattcctgtgtctgtctggccctaaatgtatccatgtggctacttctccagccccctccttccctctcttctgcctgatagagggaagaggaagaggaggacgaacagagatcctgaaattctgacttgctgctattccagaacccagcctcctgggtttccccagtcctcatttttcctcccaatacccacccttctctctcgagggatctaggcaccttggtcccagtgtcttccttttgttctcactgccaaactgcctgtcctgggatctagttatcttggccctgcactctcaacatgagtagcgaacacttaaattgggttttcaacagtcccagctttcactgccagggtcccagtcagattccaggaatttgcgccctaactttgcttgctaatcctggtttagagctatcccactaaaatatttaatcctaattcttagtccttgcctgtgagatatgaggtcttacaggagacctcagagctcccagcccttctcctcctgctaacccttctcacaccctcaagaggagttagaaaagaggtccttgtcattctcacctcttatggaaaatggaataagaaataatcatatcctttcttcccacccttctcctgttatttaggatttctgacaaagctggcttgagattggtcacttagagccgactgtctcctctgccttttgtttttcagcttcagagacagatccaatatagtcccagggacctgggtctctgggagaggaaggaagagggagggagcaaagagattggggtatgtcccctgtagtacactcttacctcttacttcctagactttgatttctccggcagcccagatgttcagttctcttggcccctctctaccccttactgggatccggttttcattttccggtccttttgccatacacagttacagagatcagtcaaatccataccaccactgagatctcatttattgccacagatgcacaaaataaataacccaaaatcacaaaa

SEQ ID NO: 16425 - DNA, 1640 bp, Homo sapiens; identical to SEQ ID NO: 16395
  source 1..1640: mol_type = unassigned DNA

SEQ ID NO: 16426 - DNA, 1731 bp, Homo sapiens; identical to SEQ ID NO: 16396
  source 1..1731: mol_type = unassigned DNA

SEQ ID NO: 16427 - DNA, 1689 bp, Homo sapiens; identical to SEQ ID NO: 16397
  source 1..1689: mol_type = unassigned DNA

SEQ ID NO: 16428 - DNA, 1536 bp, Homo sapiens; identical to SEQ ID NO: 16398
  source 1..1536: mol_type = unassigned DNA

SEQ ID NO: 16429 - DNA, 1464 bp, Homo sapiens; identical to SEQ ID NO: 16399
  source 1..1464: mol_type = unassigned DNA

SEQ ID NO: 16430 - DNA, 1723 bp, Homo sapiens; identical to SEQ ID NO: 16400
  source 1..1723: mol_type = unassigned DNA

SEQ ID NO: 16431 - DNA, 1640 bp, Homo sapiens
  source 1..1640: mol_type = unassigned DNA
ctacaggcacagggcgaggggtagaaccacatcgcttgactcttaagtgtgtttccaactgctcccacttcccgttttctttagagaaacccagaccaaacaaggaaagggaaataggccacggtagggtcattactattgctccttaagcttcctcgccggtccacctacccagacaaggcaaacggaaatctgcagcaggactcagcttggtgcacacaactccgccctcgccacacccactctgcagcgtctggcccggcaatacccatctgggcgcccctcctgcttcctctaggctgagaaccggagccttaccatcaaacttcggaaacggaagccagagaaaaaggtagaatggacaagtgacactgtggacaatgaacacatgggccgccgctcatcaaaatgctgctgtatttatgagaaacctcgggcctttggcgagagctccacggaaagtgatgaggaggaagaagagggctgtggtcatacacactgtgtacgtggccaccgcaaaggacggcgtcgtgcaaccctaggaccgacccccaccacccctccccagcctcctgacccttcccagccccctccagggccaatgcagcactaaatccctctctcctccagcattcctgtgtctgtctggccctaaatgtatccatgtggctacttctccagccccctccttccctctcttctgcctgatagagggaagaggaagaggaggacgaacagagatcctgaaattctgacttgctgctattccagaacccagcctcctgggtttccccagtcctcatttttcctcccaatacccacccttctctctcgagggatctaggcaccttggtcccagtgtcttccttttgttctcactgccaaactgcctgtcctgggatctagttatcttggccctgcactctcaacatgagtagcgaacacttaaattgggttttcaacagtcccagctttcactgccagggtcccagtcagattccaggaatttgcgccctaactttgcttgctaatcctggtttagagctatcccactaaaatatttaatcctaattcttagtccttgcctgtgagatatgaggtcttacaggagacctcagagctcccagcccttctcctcctgctaacccttctcacaccctcaagaggagttagaaaagaggtccttgttattctcacctcttatggaaaatggaacaagaaataatcatatcctttcttcccacccttctcctgttatttaggatttctgacaaagctggcttgagattggtcacttagagccgactgtctcctctgccttttgtttttcagcttcagagacagatccaatatagtcccagggacctgggtctctgggagaggaaggaagagggagggagcaaagagattggggtatgtcccctgtagtacactctttcctcttacttcctagactttgatttctccggcagcccagatgttcagttctcttggcccctctctaccccttactgggatctggttttcattttccggtccttttgccatacacagttacagagatcagtcaaatccataccaccactgagatctcatttattgccacagatgcacaaaataaataacccaaaatcacaaaa

SEQ ID NO: 16432 - DNA, 1731 bp, Homo sapiens
  source 1..1731: mol_type = unassigned DNA
ctttctttcagcgcctgcgcgctgtcacgttacggcggaactaatccagcgacgcctgcgctttgacgcatttggtgccgtggaagggaaaaagggggactgcagtatgcgtcacacccggaagcggcgagccggaagtggggttagccaggttatccccaggggtggagaagcggaggcccaggaggagggggaataaagaaggtggaggatcctggctaccactctgaatccgataccgcttctcttagacctcagcgacagaaaaagggaagggtgtctcatcccccttcctcctctcctccctgtcctgagccttagccatggccgaggcaggggctgggctgagcgagaccgtcactgagacaacggttaccgtgacaaccgagcccgagaaccggagccttaccatcaaacttcggaaacggaagccagagaaaaaggtagaatggacaagtgacactgtggacaatgaacacatgggccgccgctcatcaaaatgctgctgtatttatgagaaacctcgggcctttggcgagagctccacggaaagtgatgaggaggaagaagagggctgtggtcatacacactgtgtacgtggccaccgcaaaggacggcgtcgtgcaaccctaggaccgacccccaccacccctccccagcctcctgacccttcccagccccctccagggccaatgcagcactaaatccctctctcctccagcattcctgtgtctgtctggccctaaatgtatccatgtggctacttctccagccccctccttccctctcttctgcctgatagagggaagaggaagaggaggacgaacagagatcctgaaattctgacttgctgctattccagaacccagcctcctgggtttccccagtcctcatttttcctcccaatacccacccttctctctcgagggatctaggcaccttggtcccagtgtcttccttttgttctcactgccaaactgcctgtcctgggatctagttatcttggccctgcactctcaacatgagtagcgaacacttaaattgggttttcaacagtcccagctttcactgccagggtcccagtcagattccaggaatttgcgccctaactttgcttgctaatcctggtttagagctatcccactaaaatatttaatcctaattcttagtccttgcctgtgagatatgaggtcttacaggagacctcagagctcccagcccttctcctcctgctaacccttctcacaccctcaagaggagttagaaaagaggtccttgttattctcacctcttatggaaaatggaacaagaaataatcatatcctttcttcccacccttctcctgttatttaggatttctgacaaagctggcttgagattggtcacttagagccgactgtctcctctgccttttgtttttcagcttcagagacagatccaatatagtcccagggacctgggtctctgggagaggaaggaagagggagggagcaaagagattggggtatgtcccctgtagtacactctttcctcttacttcctagactttgatttctccggcagcccagatgttcagttctcttggcccctctctaccccttactgggatctggttttcattttccggtccttttgccatacacagttacagagatcagtcaaatccataccaccactgagatctcatttattgccacagatgcacaaaataaataacccaaaatcacaaaa

SEQ ID NO: 16433 - DNA, 1689 bp, Homo sapiens
  source 1..1689: mol_type = unassigned DNA
ccggaagcggcgagccggaagtggggttagccaggttatccccaggggtggagaagcggaggcccaggaggagggggaataaagaaggtggaggatcctggctaccactctgaatccgataccgcttctcttagacctcagcgacagaaaaagggaagggtgtctcatcccccttcctcctctcctccctgtcctgagccttagccatggccgaggcaggggctgggctgagcgagaccgtcactgagacaacggttaccgtgacaaccgagcccgatgatttggggaggaagacggagaaaaagcaaggattatattttcctttgaagagttgctgggacctttcctaggagaaccggagccttaccatcaaacttcggaaacggaagccagagaaaaaggtagaatggacaagtgacactgtggacaatgaacacatgggccgccgctcatcaaaatgctgctgtatttatgagaaacctcgggcctttggcgagagctccacggaaagtgatgaggaggaagaagagggctgtggtcatacacactgtgtacgtggccaccgcaaaggacggcgtcgtgcaaccctaggaccgacccccaccacccctccccagcctcctgacccttcccagccccctccagggccaatgcagcactaaatccctctctcctccagcattcctgtgtctgtctggccctaaatgtatccatgtggctacttctccagccccctccttccctctcttctgcctgatagagggaagaggaagaggaggacgaacagagatcctgaaattctgacttgctgctattccagaacccagcctcctgggtttccccagtcctcatttttcctcccaatacccacccttctctctcgagggatctaggcaccttggtcccagtgtcttccttttgttctcactgccaaactgcctgtcctgggatctagttatcttggccctgcactctcaacatgagtagcgaacacttaaattgggttttcaacagtcccagctttcactgccagggtcccagtcagattccaggaatttgcgccctaactttgcttgctaatcctggtttagagctatcccactaaaatatttaatcctaattcttagtccttgcctgtgagatatgaggtcttacaggagacctcagagctcccagcccttctcctcctgctaacccttctcacaccctcaagaggagttagaaaagaggtccttgttattctcacctcttatggaaaatggaacaagaaataatcatatcctttcttcccacccttctcctgttatttaggatttctgacaaagctggcttgagattggtcacttagagccgactgtctcctctgccttttgtttttcagcttcagagacagatccaatatagtcccagggacctgggtctctgggagaggaaggaagagggagggagcaaagagattggggtatgtcccctgtagtacactctttcctcttacttcctagactttgatttctccggcagcccagatgttcagttctcttggcccctctctaccccttactgggatctggttttcattttccggtccttttgccatacacagttacagagatcagtcaaatccataccaccactgagatctcatttattgccacagatgcacaaaataaataacccaaaatcacaaaa

SEQ ID NO: 16434 - DNA, 1539 bp, Homo sapiens
  source 1..1539: mol_type = unassigned DNA
cagggattagaagagttgttggaggagctaggcctagggatatgggaggtgtggggttgaatatctagggctgggagaatcggaaggtattggagctatttggagtggcagagatggtgcaggaggatgatttggggaggaagacggagaaaaagcaaggattatattttcctttgaagagttgctgggacctttcctaggagaaccggagccttaccatcaaacttcggaaacggaagccagagaaaaaggtagaatggacaagtgacactgtggacaatgaacacatgggccgccgctcatcaaaatgctgctgtatttatgagaaacctcgggcctttggcgagagctccacggaaagtgatgaggaggaagaagagggctgtggtcatacacactgtgtacgtggccaccgcaaaggacggcgtcgtgcaaccctaggaccgacccccaccacccctccccagcctcctgacccttcccagccccctccagggccaatgcagcactaaatccctctctcctccagcattcctgtgtctgtctggccctaaatgtatccatgtggctacttctccagccccctccttccctctcttctgcctgatagagggaagaggaagaggaggacgaacagagatcctgaaattctgacttgctgctattccagaacccagcctcctgggtttccccagtcctcatttttcctcccaatacccacccttctctctcgagggatctaggcaccttggtcccagtgtcttccttttgttctcactgccaaactgcctgtcctgggatctagttatcttggccctgcactctcaacatgagtagcgaacacttaaattgggttttcaacagtcccagctttcactgccagggtcccagtcagattccaggaatttgcgccctaactttgcttgctaatcctggtttagagctatcccactaaaatatttaatcctaattcttagtccttgcctgtgagatatgaggtcttacaggagacctcagagctcccagcccttctcctcctgctaacccttctcacaccctcaagaggagttagaaaagaggtccttgttattctcacctcttatggaaaatggaacaagaaataatcatatcctttcttcccacccttctcctgttatttaggatttctgacaaagctggcttgagattggtcacttagagccgactgtctcctctgccttttgtttttcagcttcagagacagatccaatatagtcccagggacctgggtctctgggagaggaaggaagagggagggagcaaagagattggggtatgtcccctgtagtacactctttcctcttacttcctagactttgatttctccggcagcccagatgttcagttctcttggcccctctctaccccttactgggatctggttttcattttccggtccttttgccatacacagttacagagatcagtcaaatccataccaccactgagatctcatttattgccacagatgcacaaaataaataacccaaaatcacaaaa

SEQ ID NO: 16435 - DNA, 1464 bp, Homo sapiens
  source 1..1464: mol_type = unassigned DNA
gggatatgggaggtgtggggttgaatatctagggctgggagaatcggaaggatgatttggggaggaagacggagaaaaagcaaggattatattttcctttgaagagttgctgggacctttcctaggagaaccggagccttaccatcaaacttcggaaacggaagccagagaaaaaggtagaatggacaagtgacactgtggacaatgaacacatgggccgccgctcatcaaaatgctgctgtatttatgagaaacctcgggcctttggcgagagctccacggaaagtgatgaggaggaagaagagggctgtggtcatacacactgtgtacgtggccaccgcaaaggacggcgtcgtgcaaccctaggaccgacccccaccacccctccccagcctcctgacccttcccagccccctccagggccaatgcagcactaaatccctctctcctccagcattcctgtgtctgtctggccctaaatgtatccatgtggctacttctccagccccctccttccctctcttctgcctgatagagggaagaggaagaggaggacgaacagagatcctgaaattctgacttgctgctattccagaacccagcctcctgggtttccccagtcctcatttttcctcccaatacccacccttctctctcgagggatctaggcaccttggtcccagtgtcttccttttgttctcactgccaaactgcctgtcctgggatctagttatcttggccctgcactctcaacatgagtagcgaacacttaaattgggttttcaacagtcccagctttcactgccagggtcccagtcagattccaggaatttgcgccctaactttgcttgctaatcctggtttagagctatcccactaaaatatttaatcctaattcttagtccttgcctgtgagatatgaggtcttacaggagacctcagagctcccagcccttctcctcctgctaacccttctcacaccctcaagaggagttagaaaagaggtccttgttattctcacctcttatggaaaatggaacaagaaataatcatatcctttcttcccacccttctcctgttatttaggatttctgacaaagctggcttgagattggtcacttagagccgactgtctcctctgccttttgtttttcagcttcagagacagatccaatatagtcccagggacctgggtctctgggagaggaaggaagagggagggagcaaagagattggggtatgtcccctgtagtacactctttcctcttacttcctagactttgatttctccggcagcccagatgttcagttctcttggcccctctctaccccttactgggatctggttttcattttccggtccttttgccatacacagttacagagatcagtcaaatccataccaccactgagatctcatttattgccacagatgcacaaaataaataacccaaaatcacaaaa

SEQ ID NO: 16436 - DNA, 1723 bp, Homo sapiens
  source 1..1723: mol_type = unassigned DNA
ggaaaaaggaagggagatcaaagattaggtgctggggactgaaaaataattttcatgtattaatactaccaaggatgatttggggaggaagacggagaaaaagcaaggattatattttcctttgaagagttgctgggacctttcctaggttaggaattgtgtcttctcttatactggtggtataagaacaggaaataatacttattcctcaagggactatctgaggtaaaagacctgttctgttttatcttctgtcagctcctctggtgctatgcctatggtactggttgagctaaagaagaaaagagaggaggttccctgggagggagtgggaaaggttagtaagaggggactagataggtatgctcatccttaaccttctaggagaaccggagccttaccatcaaacttcggaaacggaagccagagaaaaaggtagaatggacaagtgacactgtggacaatgaacacatgggccgccgctcatcaaaatgctgctgtatttatgagaaacctcgggcctttggcgagagctccacggaaagtgatgaggaggaagaagagggctgtggtcatacacactgtgtacgtggccaccgcaaaggacggcgtcgtgcaaccctaggaccgacccccaccacccctccccagcctcctgacccttcccagccccctccagggccaatgcagcactaaatccctctctcctccagcattcctgtgtctgtctggccctaaatgtatccatgtggctacttctccagccccctccttccctctcttctgcctgatagagggaagaggaagaggaggacgaacagagatcctgaaattctgacttgctgctattccagaacccagcctcctgggtttccccagtcctcatttttcctcccaatacccacccttctctctcgagggatctaggcaccttggtcccagtgtcttccttttgttctcactgccaaactgcctgtcctgggatctagttatcttggccctgcactctcaacatgagtagcgaacacttaaattgggttttcaacagtcccagctttcactgccagggtcccagtcagattccaggaatttgcgccctaactttgcttgctaatcctggtttagagctatcccactaaaatatttaatcctaattcttagtccttgcctgtgagatatgaggtcttacaggagacctcagagctcccagcccttctcctcctgctaacccttctcacaccctcaagaggagttagaaaagaggtccttgttattctcacctcttatggaaaatggaacaagaaataatcatatcctttcttcccacccttctcctgttatttaggatttctgacaaagctggcttgagattggtcacttagagccgactgtctcctctgccttttgtttttcagcttcagagacagatccaatatagtcccagggacctgggtctctgggagaggaaggaagagggagggagcaaagagattggggtatgtcccctgtagtacactctttcctcttacttcctagactttgatttctccggcagcccagatgttcagttctcttggcccctctctaccccttactgggatctggttttcattttccggtccttttgccatacacagttacagagatcagtcaaatccataccaccactgagatctcatttattgccacagatgcacaaaataaataacccaaaatcacaaaa

SEQ ID NO: 16437 - DNA, 1640 bp, Homo sapiens
  source 1..1640: mol_type = unassigned DNA
ctacaggcacagggcgaggggtagaaccacatcgcttgactcttaagtgtgtttccaactgctcccacttcccgttttctttagagaaacccagaccaaacaaggaaagggaaataggccacggtagggtcattactattgctccttaagcttcctcgccggtccacctacccagacaaggcaaacggaaatctgcagcaggactcagcttggtgcacacaactccgccctcgccacacccactctgcagcgtctggcccggcaatacccatctgggcgcccctcctgcttcctctaggctgagaaccggagccttaccatcaaacttcggaaacggaagccagagaaaaaggtagaatggacaagtgacactgtggacaatgaacacatgggccgccgctcatccaaatgctgctgtatttatgagaaacctcgggcctttggcgagagctccacggaaagtgatgaggaggaagaagagggctgtggtcatacacactgtgtacgtggccaccgcaaaggacggcgtcgtgcaaccctaggaccgacccccaccacccctccccagcctcctgacccttcccagccccctccagggccaatgcagcactaaatccctctctcctccagcattcctgtgtctgtctggccctaaatgtatccatgtggctacttctccagccccctccttccctctcttctgcctgatagagggaagaggaagaggaggacgaacagagatcctgaaattctgacttgctgctattccagaacccagcctcctgggtttccccagtcctcatttttcctcccaatacccacccttctctctcgagggatctaggcaccttggtcccagtgtcttccttttgttctcactgctaaactgcctgtcctgggatctagttatcttggccctgcactctcaacatgagtagcgaacacttaaattgggttttcaacagtcccagctttcactgccagggtcccagtcagattccaggaatttgcgccctaactttgcttgctaatcctggtttagagctatcccactaaaatatttaatcctaattcttagtccttgcctgtgagatatgaggtcttacaggagacctcagagctcccagcccttctcctcctgctaaaccttctcacaccctcaagaggagttagaaaagaggtccttgtcattctcacctcttatggaaaatggaataagaaataatcatatcctttcttcccacccttctcctgttatttaggatttctgacaaagctggcttgagattggtcacttagagccgactgtctcctctgccttttgtttttcagcttcagagacagatccaatatagtcccagggacctgggtctctgggagaggaaggaagagggagggagcaaagagattggggtatgtcccctgtagtacactcttacctcttacttcctagactttgatttctccggcagcccagatgttcagttctcttggcccctctctaccccttactgggatctggttttcattttccggtccttttgccatacacagttacagagatcagtcaaatccataccaccactgagatctcatttattgccacagatgcacaaaataaataacccaaaatcacaaaa

SEQ ID NO: 16438 - DNA, 1689 bp, Homo sapiens
  source 1..1689: mol_type = unassigned DNA
ccggaagcggcgagccggaagtggggttagccaggttatccccaggggtggagaagcggaggcccaggaggagggggaataaagaaggtggaggatcctggctaccactctgaatccgataccgcttctcttagacctcagcgacagaaaaagggaagggtgtctcatcccccttcctcctctcctccctgtcctgagccttagccatggccgaggcaggggctgggctgagcgagaccgtcactgagacaacggttaccgtgacaaccgagcccgatgatttggggaggaagacggagaaacagcaaggattatattttcctttgaagagttgctgggacctttcctaggagaaccggagccttaccatcaaacttcggaaacggaagccagagaaaaaggtagaatggacaagtgacactgtggacaatgaacacatgggccgccgctcatccaaatgctgctgtatttatgagaaacctcgggcctttggcgagagctccacggaaagtgatgaggaggaagaagagggctgtggtcatacacactgtgtacgtggccaccgcaaaggacggcgtcgtgcaaccctaggaccgacccccaccacccctccccagcctcctgacccttcccagccccctccagggccaatgcagcactaaatccctctctcctccagcattcctgtgtctgtctggccctaaatgtatccatgtggctacttctccagccccctccttccctctcttctgcctgatagagggaagaggaagaggaggacgaacagagatcctgaaattctgacttgctgctattccagaacccagcctcctgggtttccccagtcctcatttttcctcccaatacccacccttctctctcgagggatctaggcaccttggtcccagtgtcttccttttgttctcactgctaaactgcctgtcctgggatctagttatcttggccctgcactctcaacatgagtagcgaacacttaaattgggttttcaacagtcccagctttcactgccagggtcccagtcagattccaggaatttgcgccctaactttgcttgctaatcctggtttagagctatcccactaaaatatttaatcctaattcttagtccttgcctgtgagatatgaggtcttacaggagacctcagagctcccagcccttctcctcctgctaaaccttctcacaccctcaagaggagttagaaaagaggtccttgtcattctcacctcttatggaaaatggaataagaaataatcatatcctttcttcccacccttctcctgttatttaggatttctgacaaagctggcttgagattggtcacttagagccgactgtctcctctgccttttgtttttcagcttcagagacagatccaatatagtcccagggacctgggtctctgggagaggaaggaagagggagggagcaaagagattggggtatgtcccctgtagtacactcttacctcttacttcctagactttgatttctccggcagcccagatgttcagttctcttggcccctctctaccccttactgggatctggttttcattttccggtccttttgccatacacagttacagagatcagtcaaatccataccaccactgagatctcatttattgccacagatgcacaaaataaataacccaaaatcacaaaa

SEQ ID NO: 16439 - DNA, 1607 bp, Homo sapiens
  source 1..1607: mol_type = unassigned DNA
cggcgagccggaagtggggttagccaggttatccccaggggtggagaagcggaggcccaggaggagggggaataaagaaggtggaggatcctggctaccactctgaatccgataccgcttctcttagacctcagcgacagaaaaagggaagggtgtctcatcccccttcctcctctcctccctgtcctgagccttagccatggccgaggcaggggctgggctgagcgagaccgtcactgagacaacggttaccgtgacaaccgagcccgagaaccggagccttaccatcaaacttcggaaacggaagccagagaaaaaggtagaatggacaagtgacactgtggacaatgaacacatgggccgccgctcatccaaatgctgctgtatttatgagaaacctcgggcctttggcgagagctccacggaaagtgatgaggaggaagaagagggctgtggtcatacacactgtgtacgtggccaccgcaaaggacggcgtcgtgcaaccctaggaccgacccccaccacccctccccagcctcctgacccttcccagccccctccagggccaatgcagcactaaatccctctctcctccagcattcctgtgtctgtctggccctaaatgtatccatgtggctacttctccagccccctccttccctctcttctgcctgatagagggaagaggaagaggaggacgaacagagatcctgaaattctgacttgctgctattccagaacccagcctcctgggtttccccagtcctcatttttcctcccaatacccacccttctctctcgagggatctaggcaccttggtcccagtgtcttccttttgttctcactgctaaactgcctgtcctgggatctagttatcttggccctgcactctcaacatgagtagcgaacacttaaattgggttttcaacagtcccagctttcactgccagggtcccagtcagattccaggaatttgcgccctaactttgcttgctaatcctggtttagagctatcccactaaaatatttaatcctaattcttagtccttgcctgtgagatatgaggtcttacaggagacctcagagctcccagcccttctcctcctgctaaaccttctcacaccctcaagaggagttagaaaagaggtccttgtcattctcacctcttatggaaaatggaataagaaataatcatatcctttcttcccacccttctcctgttatttaggatttctgacaaagctggcttgagattggtcacttagagccgactgtctcctctgccttttgtttttcagcttcagagacagatccaatatagtcccagggacctgggtctctgggagaggaaggaagagggagggagcaaagagattggggtatgtcccctgtagtacactcttacctcttacttcctagactttgatttctccggcagcccagatgttcagttctcttggcccctctctaccccttactgggatctggttttcattttccggtccttttgccatacacagttacagagatcagtcaaatccataccaccactgagatctcatttattgccacagatgcacaaaataaataacccaaaatcacaaaa

SEQ ID NO: 16440 - DNA, 1536 bp, Homo sapiens
  source 1..1536: mol_type = unassigned DNA
ggattagaagagttgttggagaagctaggcctagggatatgggaggtgtggggttgaatatctagggctgggagaatcggaaggtattggagctatttggagtggcagagatggtgcaggaggatgatttggggaggaagacggagaaacagcaaggattatattttcctttgaagagttgctgggacctttcctaggagaaccggagccttaccatcaaacttcggaaacggaagccagagaaaaaggtagaatggacaagtgacactgtggacaatgaacacatgggccgccgctcatccaaatgctgctgtatttatgagaaacctcgggcctttggcgagagctccacggaaagtgatgaggaggaagaagagggctgtggtcatacacactgtgtacgtggccaccgcaaaggacggcgtcgtgcaaccctaggaccgacccccaccacccctccccagcctcctgacccttcccagccccctccagggccaatgcagcactaaatccctctctcctccagcattcctgtgtctgtctggccctaaatgtatccatgtggctacttctccagccccctccttccctctcttctgcctgatagagggaagaggaagaggaggacgaacagagatcctgaaattctgacttgctgctattccagaacccagcctcctgggtttccccagtcctcatttttcctcccaatacccacccttctctctcgagggatctaggcaccttggtcccagtgtcttccttttgttctcactgctaaactgcctgtcctgggatctagttatcttggccctgcactctcaacatgagtagcgaacacttaaattgggttttcaacagtcccagctttcactgccagggtcccagtcagattccaggaatttgcgccctaactttgcttgctaatcctggtttagagctatcccactaaaatatttaatcctaattcttagtccttgcctgtgagatatgaggtcttacaggagacctcagagctcccagcccttctcctcctgctaaaccttctcacaccctcaagaggagttagaaaagaggtccttgtcattctcacctcttatggaaaatggaataagaaataatcatatcctttcttcccacccttctcctgttatttaggatttctgacaaagctggcttgagattggtcacttagagccgactgtctcctctgccttttgtttttcagcttcagagacagatccaatatagtcccagggacctgggtctctgggagaggaaggaagagggagggagcaaagagattggggtatgtcccctgtagtacactcttacctcttacttcctagactttgatttctccggcagcccagatgttcagttctcttggcccctctctaccccttactgggatctggttttcattttccggtccttttgccatacacagttacagagatcagtcaaatccataccaccactgagatctcatttattgccacagatgcacaaaataaataacccaaaatcacaaaa

SEQ ID NO: 16441 - DNA, 1464 bp, Homo sapiens
  source 1..1464: mol_type = unassigned DNA
gggatatgggaggtgtggggttgaatatctagggctgggagaatcggaaggatgatttggggaggaagacggagaaacagcaaggattatattttcctttgaagagttgctgggacctttcctaggagaaccggagccttaccatcaaacttcggaaacggaagccagagaaaaaggtagaatggacaagtgacactgtggacaatgaacacatgggccgccgctcatccaaatgctgctgtatttatgagaaacctcgggcctttggcgagagctccacggaaagtgatgaggaggaagaagagggctgtggtcatacacactgtgtacgtggccaccgcaaaggacggcgtcgtgcaaccctaggaccgacccccaccacccctccccagcctcctgacccttcccagccccctccagggccaatgcagcactaaatccctctctcctccagcattcctgtgtctgtctggccctaaatgtatccatgtggctacttctccagccccctccttccctctcttctgcctgatagagggaagaggaagaggaggacgaacagagatcctgaaattctgacttgctgctattccagaacccagcctcctgggtttccccagtcctcatttttcctcccaatacccacccttctctctcgagggatctaggcaccttggtcccagtgtcttccttttgttctcactgctaaactgcctgtcctgggatctagttatcttggccctgcactctcaacatgagtagcgaacacttaaattgggttttcaacagtcccagctttcactgccagggtcccagtcagattccaggaatttgcgccctaactttgcttgctaatcctggtttagagctatcccactaaaatatttaatcctaattcttagtccttgcctgtgagatatgaggtcttacaggagacctcagagctcccagcccttctcctcctgctaaaccttctcacaccctcaagaggagttagaaaagaggtccttgtcattctcacctcttatggaaaatggaataagaaataatcatatcctttcttcccacccttctcctgttatttaggatttctgacaaagctggcttgagattggtcacttagagccgactgtctcctctgccttttgtttttcagcttcagagacagatccaatatagtcccagggacctgggtctctgggagaggaaggaagagggagggagcaaagagattggggtatgtcccctgtagtacactcttacctcttacttcctagactttgatttctccggcagcccagatgttcagttctcttggcccctctctaccccttactgggatctggttttcattttccggtccttttgccatacacagttacagagatcagtcaaatccataccaccactgagatctcatttattgccacagatgcacaaaataaataacccaaaatcacaaaa

SEQ ID NO: 16442 - DNA, 1723 bp, Homo sapiens
  source 1..1723: mol_type = unassigned DNA
ggaaaaaggaagggagatcaaagattaggtgctggggactgaaaaataattttcatgtattaatactaccaaggatgatttggggaggaagacggagaaacagcaaggattatattttcctttgaagagttgctgggacctttcctaggttaggaattgtgtcttctcttatactggtggtataagaacaggaaataatacttattcctcaagggactatctgaggtaaaagacctgttctgttttatcttctgtcagctcctctggtgctatgcctatggtactgattgagctaaagaagaaaagagaggaggttccctgggagggagtgggaaaggttagtaagaggggactagataggtatgctcatccttaaccttctaggagaaccggagccttaccatcaaacttcggaaacggaagccagagaaaaaggtagaatggacaagtgacactgtggacaatgaacacatgggccgccgctcatccaaatgctgctgtatttatgagaaacctcgggcctttggcgagagctccacggaaagtgatgaggaggaagaagagggctgtggtcatacacactgtgtacgtggccaccgcaaaggacggcgtcgtgcaaccctaggaccgacccccaccacccctccccagcctcctgacccttcccagccccctccagggccaatgcagcactaaatccctctctcctccagcattcctgtgtctgtctggccctaaatgtatccatgtggctacttctccagccccctccttccctctcttctgcctgatagagggaagaggaagaggaggacgaacagagatcctgaaattctgacttgctgctattccagaacccagcctcctgggtttccccagtcctcatttttcctcccaatacccacccttctctctcgagggatctaggcaccttggtcccagtgtcttccttttgttctcactgctaaactgcctgtcctgggatctagttatcttggccctgcactctcaacatgagtagcgaacacttaaattgggttttcaacagtcccagctttcactgccagggtcccagtcagattccaggaatttgcgccctaactttgcttgctaatcctggtttagagctatcccactaaaatatttaatcctaattcttagtccttgcctgtgagatatgaggtcttacaggagacctcagagctcccagcccttctcctcctgctaaaccttctcacaccctcaagaggagttagaaaagaggtccttgtcattctcacctcttatggaaaatggaataagaaataatcatatcctttcttcccacccttctcctgttatttaggatttctgacaaagctggcttgagattggtcacttagagccgactgtctcctctgccttttgtttttcagcttcagagacagatccaatatagtcccagggacctgggtctctgggagaggaaggaagagggagggagcaaagagattggggtatgtcccctgtagtacactcttacctcttacttcctagactttgatttctccggcagcccagatgttcagttctcttggcccctctctaccccttactgggatctggttttcattttccggtccttttgccatacacagttacagagatcagtcaaatccataccaccactgagatctcatttattgccacagatgcacaaaataaataacccaaaatcacaaaa

SEQ ID NO: 16443 - DNA, 607 bp, Homo sapiens
  source 1..607: mol_type = unassigned DNA
ctagagccaaggcgagagacccgtgccagccccgaggctcccggggcccatgggcccaggcatcgggctggtacagggccccggggctctctcagcccatctgtcacccctcccccccaacacccagatgtcccgtcttggcagtgctgtcccggactgccacattaatgctccagaacccgccagctgggccctggggccggtggggctcctgcagagccctggacaaaggcgagggagggagggaaggggatcctaagcacccctccctccctggccctaggaggcagacatgcccgatgagatcaacattgatgaattgttggagttagagagtgaagaggagagaagccggaaaatccagggactcctgaagtcatgtgggaaacctgtcgaggacttcatccaggagctgctggcaaagcttcaaggcctccacaggcagcccggcctccgccagccaagcccctcccacgacggcagcctcagccccctccaggaccgggcccggactgctcacccctgaccctcttgcactctccctgccccccggacgccgcccagcttgcttgtgtataagttgtatttaatggttctgtaacaataa

SEQ ID NO: 16444 - DNA, 433 bp, Homo sapiens
  source 1..433: mol_type = unassigned DNA
acagcgcggggccaggctgggtccagcagcgcgatggcagctcagcggctgggcaagcgcgtgctgagcaagctgcagtctccatcgcgggcccgcgggccagggggcagtcccggggggctgcagaagcggcacgcgcgcgtcaccgtcaagtatgaccggcgggagctgcagcggcggctggacgtggagaagtggatcgacgggcgcctggaggagctgtaccgcggcatggaggcagacatgcccgatgagatcaacattgatgaattgttggagttagagagtgaagaggagagaagccggaaaatccagccccctccaggaccgggcccggactgctcacccctgaccctcttgcactctccctgccccccggacgccgcccagcttgcttgtgtataagttgtatttaatggttctgtaacaataa

SEQ ID NO: 16445 - DNA, 637 bp, Homo sapiens
  source 1..637: mol_type = unassigned DNA
gcctcaagccgacgcagcggcctactctcgcactgcagacggggaaactgaggcctgaggcggccggggtggggcagacctcccggcgagcccgagcccccgcccccggctagccccgccctggcccgtaagaagcacccggggcgcgaggcgaaggcgcacagcgcggggccaggctgggtccagcagcgcgatggcagctcagcggctgggcaagcgcgtgctgagcaagctgcagtctccatcgcgggcccgcgggccagggggcagtcccggggggctgcagaagcggcacgcgcgcgtcaccgtcaagtatgaccggcgggagctgcagcggcggctggacgtggagaagtggatcgacgggcgcctggaggagctgtaccgcggcatgggactcctgaagtcatgtgggaaacctgtcgaggacttcatccaggagctgctggcaaagcttcaaggcctccacaggcagcccggcctccgccagccaagcccctcccacgacggcagcctcagccccctccaggaccgggcccggactgctcacccctgaccctcttgcactctccctgccccccggacgccgcccagcttgcttgtgtataagttgtatttaatggttctgtaacaataa

SEQ ID NO: 16446 - DNA, 777 bp, Homo sapiens
  source 1..777: mol_type = unassigned DNA
gcagggacccgcccgggactctgggtccccgcccatacctcaacttcgcacgactgcgtgcctcaagccgacgcagcggcctactctcgcactgcagacggggaaactgaggcctgaggcggccggggtggggcagacctcccggcgagcccgagcccccgcccccggctagccccgccctggcccgtaagaagcacccggggcgcgaggcgaaggcgcacagcgcggggccaggctgggtccagcagcgcgatggcagctcagcggctgggcaagcgcgtgctgagcaagctgcagtctccatcgcgggcccgcgggccagggggcagtcccggggggctgcagaagcggcacgcgcgcgtcaccgtcaagtatgaccggcgggagctgcagcggcggctggacgtggagaagtggatcgacgggcgcctggaggagctgtaccgcggcatggaggcagacatgcccgatgagatcaacattgatgaattgttggagttagagagtgaagaggagagaagccggaaaatccagggactcctgaagtcatgtgggaaacctgtcgaggacttcatccaggagctgctggcaaagcttcaaggcctccacaggcagcccggcctccgccagccaagcccctcccacgacggcagcctcagccccctccaggaccgggcccggactgctcacccctgaccctcttgcactctccctgccccccggacgccgcccagcttgcttgtgtataagttgtatttaatggttctgtaacaataa

SEQ ID NO: 16447 - DNA, 949 bp, Homo sapiens
  source 1..949: mol_type = unassigned DNA
gcctcaagccgacgcagcggcctactctcgcactgcagacggggaaactgaggcctgaggcggccggggtggggcagacctcccggcgagcccgagcccccgcccccggctagccccgccctggcccgtaagaagcacccggggcgcgaggcgaaggcgcacagcgcggggccaggctgggtccagcagcgcgatggcagctcagcggctgggcaagcgcgtgctgagcaagctgcagtctccatcgcgggcccgcgggccagggggcagtcccggggggctgcagaagcggcacgcgcgcgtcaccgtcaagtatgaccggcgggagctgcagcggcggctggacgtggagaagtggatcgacgggcgcctggaggagctgtaccgcggcatggaggcagacatgcccgatgagatcaacattgatgaattgttggagttagagagtgaagaggagagaagccggaaaatccagggactcctgaagtcatgtgggaaacctgtcgaggtgagttttctctccctcattctctccctgttctggccccaagtactctgatgggggagggggaagaagctggcagaagggtctctggggaacaccacccggccccaccacccccggccccaacctgccctccgcagctctttctggtctccaggggtgtcttttgtcctcctacttgtctctctccctctctcccccatctgctgagggggctccattctgtcctcccccatctgccctgtttttgcctctcctgtgcctgtcctttggccaccagccttcgggctcagtctccctctgtcctcccctgtcactgcctccgccaccccgggctcccttccccacctctgggggccctccatcctcccaggccctgaagctgagcggcccaacccctcccacttccttccctgctttaaaagggaaaactattcatgtttc

SEQ ID NO: 16448 - DNA, 2378 bp, Homo sapiens
  source 1..2378: mol_type = unassigned DNA
ataaaagcctagtggccattgtgttcgttgctcttatcggttcccatcccagttgttgatcttatgcaagacgctgcacgaccccgcgcccgcttgtcgccacggcacttgaggcagccggagatactctgagttactcggagcccgacgcctgagggtgagatgaacgcgctggcctccctaaccgtccggacctgtgatcgcttctggcagaccgaaccggcgctcctgcccccggggtgacgcgcagctcccagccgcccagacacatggccccaggccaagcaccccatcaggctaccccgtggagggatgcccaccctttcttcctcctgtccccagtgatgggcctcctcagccgcgcctggagccgcctgaggggcctgggacctctagagccctggctggtggaagcagtaaaaggagcagctctggtagaagctggcctggagggagaagctaggactcctctggcaatcccccataccccttggggcagacgccctgaagaggaggctgaagacagtggaggccctggagaggacagagaaacactggggctgaaaaccagcagttcccttcctgaagcctggggacttttggatgatgatgatggcatgtatggtgagcgagaggcaaccagtgtccctagagggcagggaagtcaatttgcagatggccagcgtgctcccctgtctcccagccttctgataaggacactgcaaggttctgataagaacccaggggaggagaaagccgaggaagagggagttgctgaagaggagggagttaacaagttctcttatccaccatcacaccgggagtgttgtccagccgtggaggaggaggacgatgaagaagctgtaaagaaagaagctcacagaacctctacttctgccttgtctccaggatccaagcccagcacttgggtgtcttgcccaggggaggaagagaatcaagccacggaggataaaagaacagaaagaagtaaaggagccaggaagacctccgtgtccccccgatcttcaggctccgaccccaggtcctgggagtatcgttcaggagaggcgtccgaggagaaggaggaaaaggcacacaaagaaactgggaaaggagaagctgccccagggccgcaatcctcagccccagcccagaggccccagctcaagtcctggtggtgccaacccagtgatgaagaggagggtgaggtcaaggctttgggggcagctgagaaggatggagaagctgagtgtcctccctgcatccccccaccaagtgccttcctgaaggcctgggtgtattggccaggagaggacacagaggaagaggaagatgaggaagaagatgaggacagtgactctggatcagatgaggaagagggagaagctgaggcttcctcttccactcctgctacaggtgtcttcttgaagtcctgggtctatcagccaggagaggacacagaggaggaggaagatgaggacagtgatacaggatcagccgaggatgaaagagaagctgagacttctgcttccacaccccctgcaagtgctttcttgaaggcctgggtgtatcggccaggagaggacacggaggaggaggaagatgaggatgtggatagtgaggataaggaagatgattcagaagcagccttgggagaagctgagtcagacccacatccctcccacccggaccagagggcccacttcaggggctggggatatcgacctggaaaagagacagaggaagaggaagctgctgaggactggggagaagctgagccctgccccttccgagtggccatctatgtacctggagagaagccaccgcctccctgggctcctcctaggctgcccctccgactgcaaaggcggctcaagcgcccagaaacccctactcatgatccggaccctgagactcccctaaaggccagaaaggtgcgcttctccgagaaggtcactgtccatttcctggctgtctgggcagggccggcccaggccgcccgccagggcccctgggagcagcttgctcgggatcgcagccgcttcgcacgccgcatcacccaggcccaggaggagctgagcccctgcctcacccctgctgcccgggccagagcctgggcacgcctcaggaacccacctttagcccccatccctgccctcacccagaccttgccttcctcctctgtcccttcgtccccagtccagaccacgcccttgagccaagctgtggccacaccttcccgctcgtctgctgctgcagcggctgccctggacctcagtgggaggcgtggctgagaccaactggtttgcctataatttattaactatttattttttctaagtgtgggtttatataaggaataaagccttttgatttgt

SEQ ID NO: 16449 - DNA, 1725 bp, Homo sapiens
  source 1..1725: mol_type = unassigned DNA
gtgactctggatcagatgaggaagagggagaagctgaggcttcctcttccactcctgctacaggtgtcttcttgaagtcctgggtctatcagccaggagaggacacagaggaggaggaagatgaggacagtgatacaggatcagccgaggatgaaagagaagctgagacttctgcttccacaccccctgcaagtgctttcttgaaggcctgggtgtatcggccaggagaggacacggaggaggaggaagatgaggatgtggatagtgaggataaggaagatgattcagaagcagccttgggagaagctgagtcagacccacatccctcccacccggaccagagggcccacttcaggggctggggatatcgacctggaaaagagacagaggaagaggaagctgctgaggactggggagaagctgagccctgccccttccgagtggccatctatgtacctggagagaagccaccgcctccctgggctcctcctaggctgcccctccgactgcaaaggcggctcaagcgcccagaaacccctactcatgatccggaccctgagactcccctaaaggccagaaaggtaggtgctgagagcccagattctattttttttttttttttaattgagttggagtcttgggctgtcacccaggctggagtgcagcggcatgatcttggctcactgccaacctctgccgcccaagttcaggcgattctcgtgcctcagcctccagagtatctgggattacaggcgcatgacaccacacccagctaattttttttgtatttttagtagagacgggggttttgccatgttggccaggctggtctcaaactcctgacatcacgtgatccacccatctcagcctcccaaagtgctgggattacaggcgtgagctaccacatctggctgagagcccagattcttgagtcttagaaagaaagggggctgggggccgagacttctgggtccctgtatgttgcagagggttgcatgtcatctccatggagaaggctgtgtacgctgtcacgcaatcccttgtaagaggccaggcccctgggggaggagggagcagctgtggctcacagcagccccaggaaaccacctcttccttcagtgagtcagatagatagagaatcccgtgacagtgacaggcaagtgactagccagatagaaagcatttttgtgtaataactaatttttgtttgcttctctctctctcttccccgccctccccatccggattcccgtggctgtgtgcatctcctgcctgtgtccccatgtctgcccgcaggtgcgcttctccgagaaggtcactgtccatttcctggctgtctgggcagggccggcccaggccgcccgccagggcccctgggagcagcttgctcgggatcgcagccgcttcgcacgccgcatcacccaggcccaggaggagctgagcccctgcctcacccctgctgcccgggccagagcctgggcacgcctcaggaacccacctttagcccccatccctgccctcacccagaccttgccttcctcctctgtcccttcgtccccagtccagaccacgcccttgagccaagctgtggccacaccttcccgctcgtctgctgctgcagcggctgccctggacctcagtgggaggcgtggctgagaccaactggtttgcctataatttattaactatttattttttctaagtgtgggtttatataaggaataa

SEQ ID NO: 16450 - DNA, 6251 bp, Homo sapiens
  source 1..6251: mol_type = unassigned DNA
ctctgtcgccgctggagcagctgcggctcggggacccacagacacagccggggtcgggagccgcccggggcagggctcgggagagcgggccacaccatgaggccccagccccaccagaggccccgcgctgccctggcccccggtgcaccgtgctagcccccagccagggcgttggggagggcggtggccatggccagtcacgtggacctgctgacggagctgcagctgctggagaaggtgcccacgctggagcggctgcgggctgcccagaagcgccgggcccagcagctgaagaaatgggcacagtacgagcaggacttgcagcaccgcaagcgaaagcatgagcggaagcgcagcacgggcggccgccgcaagaaagtgtccttcgaggccagcgtggccctgctggaggcctcgctgaggaacgacgccgaggaagtacgctacttcctgaagaataaggtcagccctgatttgtgcaatgaggacggactcacagccctacaccagtgctgcatcgacaactttgaggaaattgtgaagctgctcctctcccatggtgccaatgtgaacgccaaggacaacgagctgtggacacctctccatgctgcagccacctgcggccacatcaacctggtgaagatcctcgttcagtatggggccgacttgcttgctgtcaactcggatgggaacatgccatatgacctctgcgaggatgaacccaccctggatgtcatcgagacctgcatggcataccagggcatcacccaagagaaaatcaacgagatgcgggtggctcctgagcagcagatgattgcggacatccactgcatgatcgcagcgggccaggacctggactggatagatgcccagggtgccacactgctgcacatagctggagccaatggatacctgcgggcagctgagctcctcctggaccatggagtgcgtgtggatgtgaaggactgggatggctgggagcccctgcatgcagctgccttctggggacagatgcagatggcagagctattggtgtcccatggagctagtctcagtgcaaggacatccatggatgagatgccaatagacctgtgcgaggaggaagagttcaaggtcctgctgctggagctaaaacacaagcatgatgtgatcatgaagtcacagctgaggcacaagtcatccttgagccggaggacctccagcgcaggcagccgtgggaaggtggtgcggcgagccagcctgtcggacaggaccaacctgtataggaaggagtatgagggagaggccatcctgtggcagcggagtgcagctgaggatcagcggacctccacctacaacggggacatcagggagaccaggacagaccaagagaataaggaccctaaccccaggctggagaagcccgtgctactctccgaatttcctaccaagatcccacgaggtgaactggacatgcctgttgagaatggcctccgggctccggtcagtgcctaccagtatgcgctggccaacggggatgtctggaaggtgcatgaggtgcctgactacagcatggcctatggcaaccctggcgtggccgacgccaccccgccctggagcagctacaaggaacagagccctcagacgcttctggagctgaagcggcagcgggctgcagccaagctgctcagccaccccttccttagcacacacctgggcagcagcatggccaggacgggcgagagtagcagtgaaggcaaggcccccttgatcggaggcagaacttcaccgtacagcagcaatgggacctcggtatattacacggtcaccagcggagatcccccactcttaaagttcaaggcccccatagaggagatggaggagaaggtgcatggctgttgccgtatctcctagtctccgtgtgatggaggagggagatgcctggggaggggctcctggaatccaggccagcccaacagccctggctggggaggtgtcagggcagctggggagaggtgggctctgcttttcagaggaactcagaccccagccctcagctggctgcccatagcatcccatgtcccacgtcccgtggttctgcttcctgctgcatcgtctgccatctgacacaaggcctgtcgtggcctcctggttcactctgctgtctgatcttgggagggtgggcttgagatcccagctctattcttggtataaaggcttctccggatcagtacatgcatgtcacattaacacacacacacacacacatatacacacacacacaagctcgatcagtgtgtgtaggaatgacatacctgggctcaggggaagcaagggggcttagaatttgtggggtattcccaaaaggatggaagttaagactcagagtctcattaccactgccaatgtggttttagcaggggaggggacctgctaagctgagacccatagtcctgctcagagttatcccaaagtctgagccaccagccacacctgacaggggtgagaagtcctcgctgtgttcagagggagccaggaatctacatgggtagatgagatagacacagacctgctccccgcagccttgttgagagccacacttctgcccatgccaggagccagctgtgtgaccatccaggggtggagggggaaaaccaggcaatttcgttcctggaatcaaccaaatcatgttttcctcttggatggaagtgtcaaaggcagaagggtgtgggagggggacaaggtcagtatttaccaaagtgtatctgattttaaaaattcctttagtctgtaaaactcctagagggagggaggtaactgaattcacttctttttgtggatcgtatcaaggtcactgggttttactggctggtgctgggaaaatgaagctaagtgaggagcttccattggaatgcttttccagggagagaggccagttaatttaaaaaaaacagtcgctagttaacagcgacagagcccagcaccctggggtctttgtgaatatccagactgtttcagcccagcccatctcagccaaccctccttagactgagctgtcagagcaagcaattaggggccagcctgcctccacctcccacccccttccacctccatcagtcatgtgtgcagagtcagtgctcgggatcccgggcccagcttttgcctttttggggatgcttggtgagacagatttgccagtcagcccttttgagttcccgcctcacccaggggctcccagcctgcacttgcaggagtggtgatgccccaagtctgcgaatccagggtgcacgtggtcaatatcccctcctgcattcaggagagccatggtagggctagagttgggtcttgcccagccctgcagtttcatagtcccagccttcctggtgctggggagggaggactgtgaatggctgttctcccctcactgctgagtctcccaggaccccctttggagatgcccatggcatgggcactgcccacaggctcagccagaacctcttggtgtacccgataagctgcaggttatcccttgctctgtgcgccttttatttgtccttaaactacctccttagagctctgaaggggtctcctagttccagattttaatttggggaacagatctgggttctttttaaccctcttctttctcagtctatgagaaacttgccctgaggggcacctgggctaggggcttgggactggaagaccatccccgccttgtgccacaactttggtcatgggatctgctctttgtcattcttagccccctactgtggcccccatagccccataacccagagagggagctggacttcagggagcctgagtgatgctttcccaggagcagggcagctggctggaccagaaagtagagggcccatgggagtgactgcacccttggtggctgctggaaggggagaggttctcagcatcaggccacctccaccccaatgccaggatagatgtattctagagtaggggtggaggcggcccaggaggctgaagacaggtgcacagatgcttcccacgaccttgccatttggggtgggctcttcaacatctcaggctgtggctggaacaggacaggatgatctaaaacacacgtaccattggctgtaaaacagtatgagcccagactgacgctgaaatccctcatgagccaaccttagctacaaggtagggagttctgagggaagccgcgtgctcctcaggagagagctgtttaggttttccgatctttttgctcaggggccaaacactgaaggcacgtactgcccaacccactgagcgcctgaggccattccctccttttccgcatgcctcctgcctcctgggctattcctctccacccagaaggctgggaatcccagctgattccctgacaggagccgacttcacacacaggtgactctcaggcattggctcatgttttcagccagggataaaccatcccttcttggggctttaagtccctggggagctttccctgtaggtctcctgggtgttgagagacaagttggagaccaacctccaatgaatgagccgcggtcattcattaattcactcacgtaatttactgagtagctgcaacatgccagcctctacgttaggttctgcggataaaggaggaataagacagagtcaggagaactgttccttgtggtttccgtcccttggggaccacaggcatcagcagtcccattcaagtcacctgaggcaaagtgtctgcatcttcgtccagcgaccctttgcttttcggctcctagaatccttagagtctgaattcctttagctgggaacagctgtcatggtcacccctggataacatttgccaccaagtatagatgctggatcttgggttccaggcagacatcatccaggtccatctggaactttcagtgatagctgccttcagccagcatctttgggggactctataatagcagcttgagatcagtgtctagaagactgttctgcaatttgctgccaaatgcatctcaggtttttaaagtcattgtttcttgctcatggtggctcatttattacatagtcccctcaccccactaatggataatgggaggaaaagttgctgcttccttcagcatcaaagcctttccttgggaatctgcctccctccatggcaggggtggattcgggagctgggagtaaccaggcaaagtcaaccagatgcctagctcctgctgagacccaggtcctatggcagctcctcattagattaaaggagaccacttccaaagcaggtgctgcatggctcaccatcatatgccccaaacaactgaaagttggcggttatcaccagactgtgagtttctggcaagtagcttggggaagctgaataaactctaggcccagggctactaaagacttcaggatagaattctccatcaaatatacagcataagtaaaactgctctgcactgtttaatccatttccaaggggcttagaaaagctaacaagggtgtgtcccctgtcctgccccaccggtttgctggctttgtaataacataagaccattgtggttgttggtgtcagataccttcccatcctgagctctctcacctacctgctctctctcctagagcaggatactggggtacttttaagaagggtgctccttttaagatgcccagaaaagctgtatttaactcttgctatttgtaacttggggatggtctcccctgccccagggcacataagagcaaaggctccaatggtcagtggatgactctgcaaaagtgaccccctgtgccagaagctatagccctctccccaacaggtctctcttgttggccagagggcctgcttcccatgggcattgcaagtgccaccgtgcggggcctggctctgcacacccaggaaaagtctgcagacccccagccctccgcaataattcaccagaccagaagccactggtgtacagagaacacttaaaaaaatgtattttatgtgaaaaaaaattaaaactctgtatactgtatcagcagctttgtgtaaaaatggcaatcaagagagtctaatatatttaaaacttttttaaaaaaaatcttcgcagatctttgatatcgtactgaggtaacttccacgtagccccttgccacgcggcaccggtgggccttgggtccaaaactgtggctcagccacatcccaaagggggcacatgtccctggagttgcttccagctgccaaggcctgtgacagaattcgctgttaagagtttttaattaaaattattaaattccttttaataaca

SEQ ID NO: 16451 - DNA, 6106 bp, Homo sapiens
  source 1..6106: mol_type = unassigned DNA
gctgcggctcggggacccacagacacagccggggtcgggagccgcccggggcagggctcgggagagcgggccacaccatgaggccccagccccaccagaggccccgcgctgccctggcccccggtgcaccgtgctagcccccagccagggcgttggggagggcggtggccatggccagtcacgtggacctgctgacggagctgcagctgctggagaaggtgcccacgctggagcggctgcgggctgcccagaagcgccgggcccagcagctgaagaaatgggcacagtacgagcaggacttgcagcaccgcaagcgaaagcatgagcggaagcgcagcacgggcggccgccgcaagaaagtgtccttcgaggccagcgtggccctgctggaggcctcgctgaggaacgacgccgaggaagtacgctacttcctgaagaataaggtcagccctgatttgtgcaatgaggacggactcacagccctacaccagtgctgcatcgacaactttgaggaaattgtgaagctgctcctctcccatggtgccaatgtgaacgccaaggacaacgagctgtggacacctctccatgctgcagccacctgcggccacatcaacctggtgaagatcctcgttcagtatggggccgacttgcttgctgtcaactcggatgggaacatgccatatgacctctgcgaggatgaacccaccctggatgtcatcgagacctgcatggcataccagggcatcacccaagagaaaatcaacgagatgcgggtggctcctgagcagcagatgattgcggacatccactgcatgatcgcagcgggccaggacctggactggatagatgcccagggtgccacactgatgcagatggcagagctattggtgtcccatggagctagtctcagtgcaaggacatccatggatgagatgccaatagacctgtgcgaggaggaagagttcaaggtcctgctgctggagctaaaacacaagcatgatgtgatcatgaagtcacagctgaggcacaagtcatccttgagccggaggacctccagcgcaggcagccgtgggaaggtggtgcggcgagccagcctgtcggacaggaccaacctgtataggaaggagtatgagggagaggccatcctgtggcagcggagtgcagctgaggatcagcggacctccacctacaacggggacatcagggagaccaggacagaccaagagaataaggaccctaaccccaggctggagaagcccgtgctactctccgaatttcctaccaagatcccacgaggtgaactggacatgcctgttgagaatggcctccgggctccggtcagtgcctaccagtatgcgctggccaacggggatgtctggaaggtgcatgaggtgcctgactacagcatggcctatggcaaccctggcgtggccgacgccaccccgccctggagcagctacaaggaacagagccctcagacgcttctggagctgaagcggcagcgggctgcagccaagctgctcagccaccccttccttagcacacacctgggcagcagcatggccaggacgggcgagagtagcagtgaaggcaaggcccccttgatcggaggcagaacttcaccgtacagcagcaatgggacctcggtatattacacggtcaccagcggagatcccccactcttaaagttcaaggcccccatagaggagatggaggagaaggtgcatggctgttgccgtatctcctagtctccgtgtgatggaggagggagatgcctggggaggggctcctggaatccaggccagcccaacagccctggctggggaggtgtcagggcagctggggagaggtgggctctgcttttcagaggaactcagaccccagccctcagctggctgcccatagcatcccatgtcccacgtcccgtggttctgcttcctgctgcatcgtctgccatctgacacaaggcctgtcgtggcctcctggttcactctgctgtctgatcttgggagggtgggcttgagatcccagctctattcttggtataaaggcttctccggatcagtacatgcatgtcacattaacacacacacacacacacatatacacacacacacaagctcgatcagtgtgtgtaggaatgacatacctgggctcaggggaagcaagggggcttagaatttgtggggtattcccaaaaggatggaagttaagactcagagtctcattaccactgccaatgtggttttagcaggggaggggacctgctaagctgagacccatagtcctgctcagagttatcccaaagtctgagccaccagccacacctgacaggggtgagaagtcctcgctgtgttcagagggagccaggaatctacatgggtagatgagatagacacagacctgctccccgcagccttgttgagagccacacttctgcccatgccaggagccagctgtgtgaccatccaggggtggagggggaaaaccaggcaatttcgttcctggaatcaaccaaatcatgttttcctcttggatggaagtgtcaaaggcagaagggtgtgggagggggacaaggtcagtatttaccaaagtgtatctgattttaaaaattcctttagtctgtaaaactcctagagggagggaggtaactgaattcacttctttttgtggatcgtatcaaggtcactgggttttactggctggtgctgggaaaatgaagctaagtgaggagcttccattggaatgcttttccagggagagaggccagttaatttaaaaaaaacagtcgctagttaacagcgacagagcccagcaccctggggtctttgtgaatatccagactgtttcagcccagcccatctcagccaaccctccttagactgagctgtcagagcaagcaattaggggccagcctgcctccacctcccacccccttccacctccatcagtcatgtgtgcagagtcagtgctcgggatcccgggcccagcttttgcctttttggggatgcttggtgagacagatttgccagtcagcccttttgagttcccgcctcacccaggggctcccagcctgcacttgcaggagtggtgatgccccaagtctgcgaatccagggtgcacgtggtcaatatcccctcctgcattcaggagagccatggtagggctagagttgggtcttgcccagccctgcagtttcatagtcccagccttcctggtgctggggagggaggactgtgaatggctgttctcccctcactgctgagtctcccaggaccccctttggagatgcccatggcatgggcactgcccacaggctcagccagaacctcttggtgtacccgataagctgcaggttatcccttgctctgtgcgccttttatttgtccttaaactacctccttagagctctgaaggggtctcctagttccagattttaatttggggaacagatctgggttctttttaaccctcttctttctcagtctatgagaaacttgccctgaggggcacctgggctaggggcttgggactggaagaccatccccgccttgtgccacaactttggtcatgggatctgctctttgtcattcttagccccctactgtggcccccatagccccataacccagagagggagctggacttcagggagcctgagtgatgctttcccaggagcagggcagctggctggaccagaaagtagagggcccatgggagtgactgcacccttggtggctgctggaaggggagaggttctcagcatcaggccacctccaccccaatgccaggatagatgtattctagagtaggggtggaggcggcccaggaggctgaagacaggtgcacagatgcttcccacgaccttgccatttggggtgggctcttcaacatctcaggctgtggctggaacaggacaggatgatctaaaacacacgtaccattggctgtaaaacagtatgagcccagactgacgctgaaatccctcatgagccaaccttagctacaaggtagggagttctgagggaagccgcgtgctcctcaggagagagctgtttaggttttccgatctttttgctcaggggccaaacactgaaggcacgtactgcccaacccactgagcgcctgaggccattccctccttttccgcatgcctcctgcctcctgggctattcctctccacccagaaggctgggaatcccagctgattccctgacaggagccgacttcacacacaggtgactctcaggcattggctcatgttttcagccagggataaaccatcccttcttggggctttaagtccctggggagctttccctgtaggtctcctgggtgttgagagacaagttggagaccaacctccaatgaatgagccgcggtcattcattaattcactcacgtaatttactgagtagctgcaacatgccagcctctacgttaggttctgcggataaaggaggaataagacagagtcaggagaactgttccttgtggtttccgtcccttggggaccacaggcatcagcagtcccattcaagtcacctgaggcaaagtgtctgcatcttcgtccagcgaccctttgcttttcggctcctagaatccttagagtctgaattcctttagctgggaacagctgtcatggtcacccctggataacatttgccaccaagtatagatgctggatcttgggttccaggcagacatcatccaggtccatctggaactttcagtgatagctgccttcagccagcatctttgggggactctataatagcagcttgagatcagtgtctagaagactgttctgcaatttgctgccaaatgcatctcaggtttttaaagtcattgtttcttgctcatggtggctcatttattacatagtcccctcaccccactaatggataatgggaggaaaagttgctgcttccttcagcatcaaagcctttccttgggaatctgcctccctccatggcaggggtggattcgggagctgggagtaaccaggcaaagtcaaccagatgcctagctcctgctgagacccaggtcctatggcagctcctcattagattaaaggagaccacttccaaagcaggtgctgcatggctcaccatcatatgccccaaacaactgaaagttggcggttatcaccagactgtgagtttctggcaagtagcttggggaagctgaataaactctaggcccagggctactaaagacttcaggatagaattctccatcaaatatacagcataagtaaaactgctctgcactgtttaatccatttccaaggggcttagaaaagctaacaagggtgtgtcccctgtcctgccccaccggtttgctggctttgtaataacataagaccattgtggttgttggtgtcagataccttcccatcctgagctctctcacctacctgctctctctcctagagcaggatactggggtacttttaagaagggtgctccttttaagatgcccagaaaagctgtatttaactcttgctatttgtaacttggggatggtctcccctgccccagggcacataagagcaaaggctccaatggtcagtggatgactctgcaaaagtgaccccctgtgccagaagctatagccctctccccaacaggtctctcttgttggccagagggcctgcttcccatgggcattgcaagtgccaccgtgcggggcctggctctgcacacccaggaaaagtctgcagacccccagccctccgcaataattcaccagaccagaagccactggtgtacagagaacacttaaaaaaatgtattttatgtgaaaaaaaattaaaactctgtatactgtatcagcagctttgtgtaaaaatggcaatcaagagagtctaatatatttaaaacttttttaaaaaaaatcttcgcagatctttgatatcgtactgaggtaacttccacgtagccccttgccacgcggcaccggtgggccttgggtccaaaactgtggctcagccacatcccaaagggggcacatgtccctggagttgcttccagctgccaaggcctgtgacagaattcgctgttaagagtttttaattaaaattattaaattccttttaataaca

SEQ ID NO: 16452 - DNA, 299 bp, Homo sapiens
  source 1..299: mol_type = unassigned DNA
tgtccttcgaggccagcgtggccctgctggaggcctcgctgaggaacgacgccgaggaaggaatgaatggagaatccatgatgtaaccacagcccccttccctgggcttgttcagaggcggtctcgcctgctcattgtgagccaagtacgctacttcctgaagaataaggtcagccctgatttgtgcaatgaggacggactcacagccctacaccagtgctgcatcgacaactttgaggaaattgtgaagctgctcctctcccatggtgccaatgtgaacgccaaggacaacgagctgt

SEQ ID NO: 16453 - DNA, 268 bp, Homo sapiens
  source 1..268: mol_type = unassigned DNA
gaaacgagccaagaggcatccctggaaccactctgctgggagctgctccgctgaaagcctgggtacgctacttcctgaagaataaggtcagccctgatttgtgcaatgaggacggactcacagccctacaccagtgctgcatcgacaactttgaggaaattgtgaagctgctcctctcccatggtgccaatgtgaacgccaaggacaacgagctgtggacacctctccatgctgcagccacctgcggccacatcaacctggtgaagat

SEQ ID NO: 16454 - DNA, 2268 bp, Homo sapiens
  source 1..2268: mol_type = unassigned DNA
gtaagtagatatgtgtgaagtctctagaagagtgtctggcattttggtagccttacataaatgttagcagtagctacccttctcttcctcctcatgatagtactttgagaagcagcaatagtgattgaaagtactctggatttaaacttaaatagctttgagagtcgaaattagctgtggcctctcttgggcatatcacttaacttcttgtgcctcagtttccatatttacaaaatcaggccaaaaaaaatctatcgcatgggaattcaatgatgtagctggtttgtctgaatttctctggtgtgcacaccggaaactcaaagcacgactctatactgtacttttgtaatgtacaatgattgccgtggagagcagcgatggagatgttagtcctctttccttctccatcccccttgccctggtgcctgtgaaacagagcatccccatggcaacagcagcagctggtccctagataagaggagctggagccggccagcagcagccactgccgcagaggagccaggcccagcctcggtgagcacacacgccctccctgtctctcgccttcgcttccctgcatctgcgctgattgtgctggagaagaaatacatccacccaccctcctttgatgatgtccactgagcaaatgcagccactggaactctcagaagacagactggacaagctagaccctcgttgcagccacttagatgatctttcagaccagttcattaaggactgtgatctcaaaaagaagcctagaaagggaaaaaatgtacaggccaccctgaatgttgagtcagaccaaaaaaaaccaaggaggaaagatacaccggcgctgcacatcccacctttcataccaggtgtgttttcagaacatttaattaaaagatacgatgttcaagagagacatccaaagggcaaaatgatccctgttcttcataacactgacctggaacagaaaaagccaaggagaaaagacacacctgccctgcacatgtccccctttgcagcaggtgtgacattgctcagggacgagagacccaaagcaatcgtggaagatgacgaaaaggatggtgacaagatagctatttaaagatagttcccctgagaccacttgtaaataggttagattggttccctgtggtgacctagagaaaaaatagacttgtttctgctctcatttttgtcatcgtctgacttgaagattcagacaccttctccccaggagatgtatgccatcaaattgccagtcacctctttgtctctctcttctttctgagtatggtttctattctgtgttttgaatttttattttctaatgcagtggaaaagaaacagatcatcctaaatgaggaggtaacagggaaagcactggggttcggtttctgcatcttctggatcaattcacggaacagagatcgtggattacatgggctccttcttggtttttgctgctgggcaggacttgacttagcattatccaagcaccagtccaagtggggttccctgttgccagttagagaggtgagaatgtttggactctaactcaccgattgctttgcagacaaaggtcttttatttctcctgtcctatcttaagagtccaaatgtctctggtgatgttcctaagacccttgtcccagatactctaaatgtgaatgtatgagctgggggagtcaacccagcccaccatgccttggctgatgataccagaggcagagagtgctggtctgtctgggaagcttagcaatgtatcttcaaatttatttttgtttttaaaaatatttcttaaacatgctgtcccaacatttgtgagttgtgtcacaagtgagtcattatcaatggtagataaaatatcaatgtttgtgatgaatttactgtaaaaaaattaaggtcaatgaaagccattctgttatttttagcattctcacttatttagactctattacactttcttggatgagaggggagagtgtggtgttagctagtgagcagaggtctgtatattgtccttgccccagcctgcaatctgtggatgcccaggggaaggcatacaggcctcatccaccaggcaatagacaggagagaggtgagaactatttttagaaggaggaaaagtagatacgcaaattgtcacaactaagagtgataatttggtagctctgtatgtatgctggttccaactgtttaatcccttctgtctttctgttctcacaaagatggaaaagatacaagagcttgccggaaataaagctacatctatcca

SEQ ID NO: 16455 - DNA, 569 bp, Homo sapiens
  source 1..569: mol_type = unassigned DNA
agccactgccgcagaggagccaggcccagcctcggtgagcacacacgccctccctgtctctcgccttcgcttccctgcatctgcgctgattgtgctggagaagaaatacatccacccaccctcctttgatgatgtccactgagcaaatgcagccactggaactctcagaagacagactggacaagctagaccctcgttgcagccacttaggtgtgttttcagaacatttaattaaaagatacgatgttcaagagagacatccaaagggcaaaatgatccctgttcttcataacactgacctggaacagaaaaagccaaggagaaaagacacacctgccctgcacatgtccccctttgcagcaggtgtgacattgctcagggacgagagacccaaagcaatcgtggaagatgacgaaaaggatggtgacaagatagctatttaaagatagttcccctgagaccacttgtaaataggttagattggttccctgtggtgacctagagaaaaaatagacttgtttctgctctcatttttgtcatcgtctgacttgaagattcagacaccttct

SEQ ID NO: 16456 - DNA, 568 bp, Homo sapiens
  source 1..568: mol_type = unassigned DNA
agtcacgatgagtaccaaggtccagcaggcatgggaggtagacagagtggaggactgacagggagatttacgtgaaccaggccttcttcagtcacgaggcctcaccagacaatgaggtgtgttttcagaacatttaattaaaagatacgatgttcaagagagacatccaaagggcaaaatgatccctgttcttcataacactgacctggaacagaaaaagccaaggagaaaagacacacctgccctgcacatgtccccctttgcagcaggtgtgacattgctcagggacgagagacccaaagcaatcgtggaagatgacgaaaaggatggtgacaagatagctatttaaagatagttcccctgagaccacttgtaaataggttagattggttccctgtggtgacctagagaaaaaatagacttgtttctgctctcatttttgtcatcgtctgacttgaagattcagacaccttctccccaggagattggaaaagaaacagatcatcctaaatgaggaggtaacagggaaagcactggggttcggtttctgcatcttctggatcaattc

SEQ ID NO: 16457 - DNA, 851 bp, Homo sapiens
  source 1..851: mol_type = unassigned DNA
actacccgctaaccgcctcccgccacacacacacacacacacacacacacacacaccccgcgcgcgcgcacacacacacaccccaccccaccaccccgacctccacatacattcccccgaccccctccagcagtgaagtctaagagcaccgcgaagtaatttaaattttcgagggaaagcacagcgccatctgtcggacatcatgccaattactcttgttaagttcctacctgacggttactttatactttgaactgctaggtactccttttggcctaaggacacagtgaaaaatgtaccgagaccttggagagccacgaaccaagaaacttcagaaacctctgatatctgatcaagagttaagagacgtcagaatcatcacaactgacaaaagaatgttttctctcttcaagattctcttttgaaagacatctaaaaagaaatagatgacaagagggggcccaacacacaaggggaattacagaatgcatcccctaagcaaaggaagcagagtgtgtacacaccacccaccataaaaggggttaagcatctgaaaggccagaatgaatcagcattccctgaagaagaagaaggcaccaatgaaagagaggagcagcgggaccattaattactggtctgcagcaagaaggcttcttggaaataactgaactattaacttttctgagtataccatggaattccactgcttgacttccagaagcatcctccatctctgcaccccacactcatacagtagctatgcacatcctggaagtctccttgactgaactttagaactaagtacacattgttccacatcacttataattaaagaataagcatttatttta

SEQ ID NO: 16458 - DNA, 722 bp, Homo sapiens
  source 1..722: mol_type = unassigned DNA
gaactgctaggtactccttttggcctaaggacacagtgaaaaatgtaccgagaccttggagagccacgaaccaagaaacttcagaaacctctgatatctgatcaagagttaagagacgtcagaatcatcacaactgacaaaaggtgctcccggattttgctctccagcttccggttcttggtctccaggctcctcactctgtccagaatgttttctctcttcaagattctcttttgaaagacatctaaaaagatcaggaaaagaagacctacaccagcatcacttgtgattctcaatgagcataaccccccagaaatagatgacaagagggggcccaacacacaaggggaattacagaatgcatcccctaagcaaaggaagcagagtgtgtacacaccacccaccataaaaggggttaagcatctgaaaggccagaatgaatcagcattccctgaagaagaagaaggcaccaatgaaagagaggagcagcgggaccattaattactggtctgcagcaagaaggcttcttggaaataactgaactattaacttttctgagtataccatggaattccactgcttgacttccagaagcatcctccatctctgcaccccacactcatacagtagctatgcacatcctggaagtctccttgactgaactttagaactaagtacacattgttccacatcacttataattaaagaataagcatttattt

SEQ ID NO: 16459 - DNA, 1477 bp, Homo sapiens
  source 1..1477: mol_type = unassigned DNA
tgctaggtactccttttggcctaaggacacagtgaaaaatgtaccgagaccttggagagccacgaaccaagaaacttcagaaacctctgatatctgatcaagagttaagagacgtcagaatcatcacaactgacaaaagaatgttttctctcttcaagattctcttttgaaagacatctaaaaagaaatagatgacaagagggggcccaacacacaaggggaattacagaatgcatcccctaagcaaaggaagcagagtgtgtacacaccacccaccataaaaggtgcaaaatgagttgataacaaccagaagttgacttgttagtgctgtgcttctactcgagcttggaaaaatcccaacacaaaacaaacaccacctccgattccatcatgatgccacgttgctttctactggattacctcctgaagcactttagatattttatacataagtattgacatgtttttcagaagctgtttcttcacttattgcttttttctaataatttttattacaccatttgccaagtccttccctttggttttagtttattcctctctacaactaaaaaagggatcttgagtttaggtacattttaagtgattcatttttagtttttctaattctggaatctgagccttctcttacaacagggagtctttcaaaaacatttttttgtttctttttcaaattccactgtgtttatttattgccttgtttctttttcaaattccattggtcttgatttaatttagttccacagattttactgatagtctactacctgccaactactgaattatgcagcagacttataaaaataaaaaggctattttattgttattgccatcctgctagtaaagatttattcaattatttataattaattaagtggcttcacctatatttctgttaataatcacattaattatgtatgacaggtaggatttatgttatagataagaaaactagagtccaaagaaaataagtgtccccaaatgaaccaataatccaacaaacgcttccactaactagcttctgacctgtttgagttgtgatagattttagaataaaaaagcctatcctccttaggagccatagacttttattctttcttatactgtcttatatattgacttagagctaaacttcctccaattcagacataaagcataggcagatacttttgctaatgaggctaagctgggaagaaaaccctgagttctactttaattcttgggcattgacttcaaactaagatgacttataagaaataaaagaagtaaatttgaaactttaataaaaaaagtacatggttcatttaaaaatgtttcctatgtctaaatctatattttaaaaataacctttatcatgtaaaatgagagaattgctgagtttatgacaatcttaggtataaccttttcttaaagaacaaggcatcaatctttaatttgtttccctttcttgatttctcat

SEQ ID NO: 16460 - DNA, 411 bp, Homo sapiens
  source 1..411: mol_type = unassigned DNA
acagtgaaaaatgtaccgagaccttggagagccacgaaccaagaaacttcagaaacctctgatatctgatcaagagttaagagacgtcagaatcatcacaactgacaaaagaatgttttctctcttcaagattctcttttgaaagacatctaaaaagatcaggaaaagaagacctacaccagcatcacttgtgattctcaatgagcataaccccccagaaatagatgacaagagggggcccaacacacaaggggaattacagaatgcatcccctaagcaaaggaagcagagtgtgtacacaccacccaccataaaaggtgcaaaatgagttgataacaaccagaagttgacttgttagtgctgtgcttctactcgagcttggaaaaatcccaacacaaaacaaacaccacc

SEQ ID NO: 16461 - DNA, 791 bp, Homo sapiens
  source 1..791: mol_type = unassigned DNA
aaaatgtaccgagaccttggagagccacgaaccaagaaacttcagaaacctctgatatctgatcaagagttaagagacgtcagaatcatcacaactgacaaaaggtgctcccggattttgctctccagcttccggttcttggtctccaggctcctcactctgtccagaatgttttctctcttcaagattctcttttgaaagacatctaaaaagaaatagatgacaagagggggcccaacacacaaggggaattacagaatgcatcccctaagcaaaggaagcagagtgtgtacacaccacccaccataaaaggggttaagcatctgaaaggccagaatgaatcagcattccctgaagaagaagaaggcaccaatgaaagagaggagcagcgggaccattaattactggtctgcagcaagaaggcttcttggaaataactgaactattaacttttctgagtataccatggaattccactgcttgacttccagaagcatcctccatctctgcaccccacactcatacagtagctatgcacatcctggaagtctccttgactgaactttagaactaagtacacattgttccacatcacttataattaaagaataagcatttattttacagtgattcttctttttaactatgtaaaaatttgcatacatgtgactgttctaactttaatactgccagagcttaatccttgatgtcctactgataaggtttgcattctaacaacacatgtaaataacatcactttaagagtaaaaaataaatagtaaacacattta

SEQ ID NO: 16462 - DNA, 551 bp, Homo sapiens
  source 1..551: mol_type = unassigned DNA
gaaccaagaaacttcagaaacctctgatatctgatcaagagttaagagacgtcagaatcatcacaactgacaaaagaatgttttctctcttcaagattctcttttgaaagacatctaaaaagaaaccaggtctcactgttttgccaggctggtcttgaactcctgtgctcaagcaatcctcccaccttggcctctcagagtgctggggttacagaaatagatgacaagagggggcccaacacacaaggggaattacagaatgcatcccctaagcaaaggaagcagagtgtgtacacaccacccaccataaaaggggttaagcatctgaaaggccagaatgaatcagcattccctgaagaagaagaaggcaccaatgaaagagaggagcagcgggaccattaattactggtctgcagcaagaaggcttcttggaaataactgaactattaacttttctgagtataccatggaattccactgcttgacttccagaagcatcctccatctctgcaccccacactcatacagtagctatgcacatcctggaagtc

SEQ ID NO: 16463 - DNA, 3004 bp, Homo sapiens
  source 1..3004: mol_type = unassigned DNA
attgtgctgagaggatccaagggattggtgggggaacaggcaagccaggcatcaccgtggatgttgaagaagggggttactcaaacctcggcatcttcacttgctcgatctggaattacagctatttattacgaagcactctgtgtggcttagtggagtgtgtctgaggaaacacatcccggacaccacttagggttagtctttctgagctcttcacatctctgactaattatcatcattaccatggagcccaacagtcccaaaaagatacagtttgccgtgcctgtattccagagtcagattgcacctgaagcagcagagcagatcaggaaaagaagacctacaccagcatcacttgtgattctcaatgagcataaccccccagaaatagatgacaagagggggcccaacacacaaggggaattacagaatgcatcccctaagcaaaggaagcagagtgtgtacacaccacccaccataaaaggggttaagcatctgaaaggccagaatgaatcagcattccctgaagaagaagaaggcaccaatgaaagagaggagcagcgggaccattaattactggtgcaaaatgagttgataacaaccagaagttgacttgttagtgctgtgcttctactcgagcttggaaaaatcccaacacaaaacaaacaccacctccgattccatcatgatgccacgttgctttctactggattacctcctgaagcactttagatattttatacataagtattgacatgtttttcagaagctgtttcttcacttattgcttttttctaataatttttattacaccatttgccaagtccttccctttggttttagtttattcctctctacaactaaaaaagggatcttgagtttaggtacattttaagtgattcatttttagtttttctaattctggaatctgagccttctcttacaacagggagtctttcaaaaacatttttttgtttctttttcaaattccactgtgtttatttattgccttgtttctttttcaaattccattggtcttgatttaatttagttccacagattttactgatagtctactacctgccaactactgaattatgcagcagacttataaaaataaaaaggctattttattgttattgccatcctgctagtaaagatttattcaattatttataattaattaagtggcttcacctatatttctgttaataatcacattaattatgtatgacaggtaggatttatgttatagataagaaaactagagtccaaagaaaataagtgtccccaaatgaaccaataatccaacaaacgcttccactaactagcttctgacctgtttgagttgtgatagattttagaataaaaaagcctatcctccttaggagccatagacttttattctttcttatactgtcttatatattgacttagagctaaacttcctccaattcagacataaagcataggcagatacttttgctaatgaggctaagctgggaagaaaaccctgagttctactttaattcttgggcattgacttcaaactaagatgacttataagaaataaaagaagtaaatttgaaactttaataaaaaaagtacatggttcatttaaaaatgtttcctatgtctaaatctatattttaaaaataacctttatcatgtaaaatgagagaattgctgagtttatgacaatcttaggtataaccttttcttaaagaacaaggcatcaatctttaatttgtttccctttcttgatttctcataagttgcaaaataaaaataaaaataatttcacaaattgttcattattattatcctccctacttgccccaggatttaagtactaacttttacttcctactcttagactttgtattgccaaagaaataaaatatgaaaaagcataatcacccagacctacctgcggaattgtggattatgctgtagatattagatcattgaaaggaacaatatactacttaatgaggagccaaagacaacattctacctgctgctcccttcaagctgaggaatgagtttaattgacttcaaagtcccattattctcaaaagtagcaaaggtacaacatggctttgcatgaatcaaaggaagggaacaacaagaacttaaaaaaatagtttgcagatggttgaacatctctttaataattagagaagaatatcttttctttctttattgtttacagataccaacatttttcaaagccttgcagtagatgagtgagtctcctgttacatttctcctgcagcatatattctgtggatgtgttttcctaagcagactaattatatgttgctctcttcttttaccctaatgaaacatagatttttctgttttgaatttgtcacttgtttgttacatttgtcaagtgttttaaatattacattggtcctttatttgcttttgagaacacccaatagtttaaaaattaaaatgacatgaaggtcaattctaagacaggaatgatactactaaatcctggacttgcctatgataacaagctcgagctacacacttttattgtcagaataaatggaatatataggaaggagttaattggaactggttagtacctaaataagatttttcaaagtaagttttttgtcgtattggcagaacagtgttaaaaaatagacattgtcatcataaacacccacaactatatctgtagaagataatttaatgcaatattctggggaaaatacagttgccaaaattaatctccttgttttctttcattgtgcaatgtggagttaaattttttttctattgagcagtgtgtgtgtgtgtttgtgtctataatttatatatgtgcttgtatacatttctatatacacatgtatgtgtatgcaaaatatgtatatatacacatatatataaaatgtacactaaatatgtatatatgtatattcataaaatgttttgctgtatggaaataaaaaagaaggtttctaaaggaaagatagagaagaaa

SEQ ID NO: 16464 - DNA, 1636 bp, Homo sapiens
  source 1..1636: mol_type = unassigned DNA
agaggatccaagggattggtgggggaacaggcaagccaggcatcaccgtggatgttgaagaagggggttactcaaacctcggcatcttcacttgctcgatctggaattacagctatttattacgaagcactctgtgtggcttagtggagtgtgtctgaggaaacacatcccggacaccacttagggttagtctttctgagctcttcacatctctgactaattatcatcattaccatggagcccaacagtcccaaaaagatacagtttgccgtgcctgtattccagagtcagattgcacctgaagcagcagagcagctgggcttttgtcgttcacagatcaggaaaagaagacctacaccagcatcacttgtgattctcaatgagcataaccccccagaaatagatgacaagagggggcccaacacacaaggggaattacagaatgcatcccctaagcaaaggaagcagagtgtgtacacaccacccaccataaaaggggttaagcatctgaaaggccagaatgaatcagcattccctgaagaagaagaaggcaccaatgaaagagaggagcagcgggaccattaattactggtgcaaaatgagttgataacaaccagaagttgacttgttagtgctgtgcttctactcgagcttggaaaaatcccaacacaaaacaaacaccacctccgattccatcatgatgccacgttgctttctactggattacctcctgaagcactttagatattttatacataagtattgacatgtttttcagaagctgtttcttcacttattgcttttttctaataatttttattacaccatttgccaagtccttccctttggttttagtttattcctctctacaactaaaaaagggatcttgagtttaggtacattttaagtgattcatttttagtttttctaattctggaatctgagccttctcttacaacagggagtctttcaaaaacatttttttgtttctttttcaaattccactgtgtttatttattgccttgtttctttttcaaattccattggtcttgatttaatttagttccacagattttactgatagtctactacctgccaactactgaattatgcagcagacttataaaaataaaaaggctattttattgttattgccatcctgctagtaaagatttattcaattatttataattaattaagtggcttcacctatatttctgttaataatcacattaattatgtatgacaggtaggatttatgttatagataagaaaactagagtccaaagaaaataagtgtccccaaatgaaccaataatccaacaaacgcttccactaactagcttctgacctgtttgagttgtgatagattttagaataaaaaagcctatcctccttaggagccatagacttttattctttcttatactgtcttatatattgacttagagctaaacttcctccaattcagacataaagcataggcagatacttttgctaatgaggctaagctgggaagaaaaccctgagttctactttaattcttgggcattgacttcaaactaagatgacttataagaaataaaagaagtaaatttgaaactttaataaaaaaagtacatggttcatttaaaaa

SEQ ID NO: 16465 - DNA, 1157 bp, Homo sapiens
  source 1..1157: mol_type = unassigned DNA
ggagtgtgtctgaggaaacacatcccggacaccacttagggttagtctttctgagctcttcacatctctgactaattatcatcattaccatggagcccaacagtcccaaaaagatacagtttgccgtgcctgtattccagagtcagattgcacctgaagcagcagagcagatcaggaaaagaagacctacaccagcatcacttgtgattctcaatgagcataaccccccagaaatagatgacaagagggggcccaacacacaaggggaattacagaatgcatcccctaagcaaaggaagcagagtgtgtacacaccacccaccataaaaggggttaagcatctgaaaggccagaatgaatcagcattccctgaagaagaagaaggcaccaatgaaagagaggagcagcgggaccattaattactggtctgcagcaagaaggcttcttggaaataactgaactattaacttttctgagtataccatggaattccactgcttgacttccagaagcatcctccatctctgcaccccacactcatacagtagctatgcacatcctggaagtctccttgactgaactttagaactaagtgcaaaatgagttgataacaaccagaagttgacttgttagtgctgtgcttctactcgagcttggaaaaatcccaacacaaaacaaacaccacctccgattccatcatgatgccacgttgctttctactggattacctcctgaagcactttagatattttatacataagtattgacatgtttttcagaagctgtttcttcacttattgcttttttctaataatttttattacaccatttgccaagtccttccctttggttttagtttattcctctctacaactaaaaaagggatcttgagtttaggtacattttaagtgattcatttttagtttttctaattctggaatctgagccttctcttacaacagggagtctttcaaaaacatttttttgtttctttttcaaattccactgtgtttatttattgccttgtttctttttcaaattccattggtcttgatttaatttagttccacagattttactgatagtctactacctgccaactactgaattatgcagcagacttataaaaataaaaaggctattttattgttattgcc

SEQ ID NO: 16466 - DNA, 501 bp, Homo sapiens
  source 1..501: mol_type = unassigned DNA
cctctgagccaggtgccggatataatctcgtggtgcgccgttttttaagccggtccgaaaagcacaatattcgggtgggagtgacccgatttcccagaaatagatgacaagagggggcccaacacacaaggggaattacagaatgcatcccctaagcaaaggaagcagagtgtgtacacaccacccaccataaaaggggttaagcatctgaaaggccagaatgaatcagcattccctgaagaagaagaaggcaccaatgaaagagaggagcagcgggaccattaattactggtctgcagcaagaaggcttcttggaaataactgaactattaacttttctgagtataccatggaattccactgcttgacttccagaagcatcctccatctctgcaccccacactcatacagtagctatgcacatcctggaagtctccttgactgaactttagaactaagtacacattgttccacatcacttataattaaagaataagcatt

SEQ ID NO: 16467 - DNA, 410 bp, Homo sapiens
  source 1..410: mol_type = unassigned DNA
ccaacacacaaggggaattacagaatgcatcccctaagcaaaggaagcagagtgtgtacacaccacccaccataaaaggtactgttcaggtactgtttcgggttgtcatgagtggtgaatcatggctggtcggccgtctgttctctaggaccacatatctgatgataagctagatctagtctcagctctacaacttaacagtgttatgttcagtaagatatcttatctacttaaaacttagtttcatcaagagtaaaatatggggttgaaaaagaaatagctagtgatctcagaatttcagtctagaaattcagtttccaaaataatgacaaagatttttttttaccgttattcgcatacttccttaaagagattttcccagaagccctaattactcttgccagtgttgg

SEQ ID NO: 16468 - DNA, 933 bp, Homo sapiens
  source 1..933: mol_type = unassigned DNA
agagagtaaaactgcctgtgaacaagaatgcttaagtgaacaatggtaaatctgatagaaaagcagggtcagagcaaaacagttgcaaagctcagagtgtaaactgcatgtcctcaggtcaagcagaggatgaaaagcagaacaatctcctcattcaagaaacttcctggcggccagcaagctgagtaatgagaaacaaactgagtggaggccttccacagagggttaagcatctgaaaggccagaatgaatcagcattccctgaagaagaagaaggcaccaatgaaagagaggagcagcgggaccattaattactggtctgcagcaagaaggcttcttggaaataactgaactattaacttttctgagtataccatggaattccactgcttgacttccagaagcatcctccatctctgcaccccacactcatacagtagctatgcacatcctggaagtctccttgactgaactttagaactaagtacacattgttccacatcacttataattaaagaataagcatttattttacagtgattcttctttttaactatgtaaaaatttgcatacatgtgactgttctaactttaatactgccagagcttaatccttgatgtcctactgataaggtttgcattctaacaacacatgtaaataacatcactttaagagtaaaaaataaatagtaaacacatttagacatgagtgtgtgtgtgtgtgtgtgtgggtttagcttaaagagaaatatctaataaagcttttagcttgagatttgcattgatcatatttctgtattcagaacagaacacaatgttcatttttaaatgatgaagaaatgccagttttcttgattcaatacaccacaatattagatactaaacatctttttcccaccaacaacacattaatggttgattatacaactacaga

SEQ ID NO: 16469 - DNA, 1405 bp, Homo sapiens
  source 1..1405: mol_type = unassigned DNA
agcgacgccccgccccgctccgcgccccgggcagccgtgtgcaggcgcctgcgggcggtatcctcggcgacgccgtatggcttccagggcgaggccatgtaccgggtgcccgagttttatgcgaggaggaagcggttaggtgggcagaccccttacttgatggatcagttgggattacgattagggatgtggtactggaaagatgaaaccagaactcttgaattcagaaggtttgccgcagaagattctgtccagtggctcctgaaacatcaccctcattttacacctgcagcagaagtcaaggaaaaaggaaagaaaggcaaagcagttcactttgcagaaactgatggtccagcttcagacaggttgacagataaaagacttgctgcaaaagatgataagtcagctaaagctgtagagaaacgaggtcaacagggcaccattacactggatgatgttaaatttgttactttgcttttgctacaagatactgagatgcagcggatctgttcttttacaacatttatgaggaataagaatcttgataatttcctcatggcattattgtactacttatcccattacttggaaaaaaactcactggaaaagaaacccaaaagctatatggtaggccttgtagagaaaaaagaaatggaattggttttaagtgaattagaagcagcacagaggtacttggcgcagaagtactgtatccttgtgctgggcttggccgtgccggataagcatcacatgtgctgtggaaaggagaaaatatcagatacacagaaagactggaagttctttgagtccttttatactttctgtacatatgtggcttggattgtcttccgacgtcaacacttgacagagattgaagaagaagtagggagactctttcgtaccaatatgttcaacattcctcgcaggaggcgtgaagatgaggaatcaggaggggaaaagaaacgcatgacttttgttcagttcaggagaatgatggcaaaacgcccagcaattaaaaaagctatcaacatgcgttctccagtcatgtctactctgctgccatctctcagagaaaaagctcaaaacgtctttgagaaaaagtatcatcaagtagacgtcagattcccagccgagatgcaaaagcatgtgggaactctggactctgtgcccatgccggtagttggcatcttgggggagcctcgatgtctattcaacccacatacgcttcacccccttgatccagaagaaaacacaaaatcatttgggagatatccttccttgatggaaaacaataacatgaggattcaggatacactggacttggtcatgaaaacactgtcctctcatacatcatgccctaagtaacctggtacattccatatctcaagtaaactactttgacttt

SEQ ID NO: 16470 - DNA, 576 bp, Homo sapiens
  source 1..576: mol_type = unassigned DNA
tccgcgccccgggcagccgtgtgcaggcgcctgcgggcggtatcctcggcgacgccgtatggcttccagggcgaggccatgtaccgggtgcccgagttttatgcgaggaggaagcggttaggtgggcagaccccttacttgatggatcagttgggattacgattagggatgtggtactggaaagatgaaaccagaactcttgaattcagaaggtttgccgcagaagattctgtccagtggctcctgaaacatcaccctcatgcccctattccaaagctggcagagaaccagcagtctgcctgaatgtttgccaaggtcatggactcccctgaggacataaaaccaaggaaaccctactctttcgtcatggcctgagagaagactctctgagaaccatcaaagaggtctaacttgtgtggaagccaagagtggtccagccctctgcatttacgtgatggattctagagagaaaatatgaatttctttcctgtttacttcaagttttacacctgcagcagaagtcaaggaaaaaggaaagaaaggcaaagcagttcactttgcagaaactgatggtcc

SEQ ID NO: 16471 - DNA, 1400 bp, Homo sapiens
  source 1..1400: mol_type = unassigned DNA
gtgcaggcgcctgcgggcggtatcctcggcgacgccgtatggcttccagggcgaggccatgtaccgggtgcccgagttttatgcgaggaggaagcggttaggtgggcagaccccttacttgatggatcagttgggattacgattagggatgtggtactggaaagatgaaaccagaactcttgaattcagaagatgaagaaacaaggctcagggagattaagcaactgaaccaaagtcatacagccagtttgccgcagaagattctgtccagtggctcctgaaacatcaccctcattttacacctgcagcagaagtcaaggaaaaaggaaagaaaggcaaagcagttcactttgcagaaactgatggtccagcttcagacaggttgacagataaaagacttgctgcaaaagatgataagtcagctaaagctgtagagaaacgaggtcaacagggcaccattacactggatgatgttaaatttgttactttgcttttgctacaagatactgagatgcagcggatctgttcttttacaacatttatgaggaataagaatcttgataatttcctcatggcattattgtactacttatcccattacttggaaaaaaactcactggaaaagaaacccaaaagctatatggtaggccttgtagagaaaaaagaaatggaattggttttaagtgaattagaagcagcacagaggtacttggcgcagaagtactgtatccttgtgctgggcttggccgtgccggataagcatcacatgtgctgtggaaaggagaaaatatcagatacacagaaagactggaagttctttgagtccttttatactttctgtacatatgtggcttggattgtcttccgacgtcaacacttgacagagattgaagaagaagtagggagactctttcgtaccaatatgttcaacattcctcgcaggaggcgtgaagatgaggaatcaggaggggaaaagaaacgcatgacttttgttcagttcaggagaatgatggcaaaacgcccagcaattaaaaaagctatcaacatgcgttctccagtcatgtctactctgctgccatctctcagagaaaaagctcaaaacgtctttgagaaaaagtatcatcaagtagacgtcagattcccagccgagatgcaaaagcatgtgggaactctggactctgtgcccatgccggtagttggcatcttgggggagcctcgatgtctattcaacccacatacgcttcacccccttgatccagaagaaaacacaaaatcatttgggagatatccttccttgatggaaaacaataacatgaggattcaggatacactggacttggtcatgaaaacactgtcctctcatacatcatgccctaagtaacctggtacattccatatct

SEQ ID NO: 16472 - DNA, 596 bp, Homo sapiens
  source 1..596: mol_type = unassigned DNA
gccatatttgcctagaaaaaaaaaaaactctggtgtatttgacagatggtcagaattgaattctggctccctgcgcagcagttgggattacgattagggatgtggtactggaaagatgaaaccagaactcttgaattcagaagatgaagaaacaaggctcagggagattaagcaactgaaccaaagtcatacagccagtttgccgcagaagattctgtccagtggctcctgaaacatcaccctcattttacacctgcagcagaagtcaaggaaaaaggaaagaaaggcaaagcagttcactttgcagaaactgatggtccagcttcagacaggttgacagataaaagacttgctgcaaaagatgataagtcagctaaagctgtagagaaacgaggtcaacagggcaccattacactggatgatgttaaatttgttactttgcttttgctacaagatactgagatgcagcggatctgttcttttacaacatttatgaggaataagaatcttgataatttcctcatggcattattgtactacttatcccattacttggaaaaaaactcactggaaaagaaacccaaaagctatatggt

SEQ ID NO: 16473 - DNA, 1686 bp, Homo sapiens
  source 1..1686: mol_type = unassigned DNA
ttttgtacttttagtagagctaatttttgtacttttagtacttttagtactttaacagcgtcaccatgttggccaggctggtctgaaactcctggcctcaagtgatccacgcacctcggcctcccaaagtgctaattacaggcgtaagccactgcatcttgccaagtatagtattcttaacattgaatttgtgttgcaaggactcctgggaagagagaagactcaggtttgtccatgcccatcagaaggaggagcacactgccgttctcagtctattggttgttttggcatagatctttgtggattttgtttctgtttctttttgtacccaatagccataactattgtttgctaattcttttccttttctttattgcagacttaccctctagttctctgcttcctctttaccacctttccactctccttacctccccaacactcaaattaccagaagcctttggaagaatacatttcctcactggtttgtttaccccaaatttatattgattaactttttaccattctaggagttttgatctgggtaacgtaggaggttgaataagaaagtattgagactctttatcaatgccttttgatagcatttgtgtagctgaaaataatcttggggccaagataatgaccctaactttagagaaagataaggactagtaccctgaaagattgaacttccctctcaacctatagttgtgacttgttatattacagggagaaaatatcagatacacagaaagactggaagttctttgaggtgagtcacttatgttttggtgctttttgatatgaaacaatatataccaacaaccaatggccatttgtcaggcacttatttttagtgaatatcctttctaaaagacggtgctaacaagctatatgctataccttaaattgttggtctgattttcctcatgcaaaagtgagtatgtgtataatttttcattgtttcaggaatattgggaaattgggtcatctgggtttgtgtctgcttagctgtgttatacagacaggtaagagttttccatttcacagctaaggatcgtgattcttgtctattttttgttgtagtccttttatactttctgtacatatgtggcttggattgtcttccgacgtcaacacttgacagagattgaagaagaagtagggagactctttcgtaccaatatgttcaacattcctcgcaggaggcgtgaagatgaggaatcaggaggggaaaagaaacgcatgacttttgttcagttcaggagaatgatggcaaaacgcccagcaattaaaaaagctatcaacatgcgttctccagtcatgtctactctgctgccatctctcagagaaaaagctcaaaacgtctttgagaaaaagtatcatcaagtagacgtcagattcccagccgagatgcaaaagcatgtgggaactctggactctgtgcccatgccggtagttggcatcttgggggagcctcgatgtctattcaacccacatacgcttcacccccttgatccagaagaaaacacaaaatcatttgggagatatccttccttgatggaaaacaataacatgaggattcaggatacactggacttggtcatgaaaacactgtcctctcatacatcatgccctaagtaacctggtacattccatatctcaagtaaactactttgactttat

SEQ ID NO: 16474 - DNA, 696 bp, Homo sapiens
  source 1..696: mol_type = unassigned DNA
gttatattacagggagaaaatatcagatacacagaaagactggaagttctttgagtccttttatactttctgtacatatgtggcttggattgtcttccgacgtcaacacttgacagagattgaagaagaagtagggagactctttcgtaccaatatgttcaacattcctcgcaggaggcgtgaagatgaggaatcaggaggggaaaagaaacgcatgacttttgttcagttcaggagaatgatggcaaaacgcccagcaattaaaaaagctatcaacatgcgttctccagtcatgtctactctgctgccatctctcagagaaaaagctcaaaacgtctttgagaaaaagtatcatcaagtagacgtcagattcccagccgagatgcaaaagcatgtgggaactctggactctgtgcccatgccggtgtaagtggcttggcaagagaagcatgagtgccttgaggtggcatcccaggtggggctggaaggggcaggggcccaggcaccatgcctctgccagggaatcgagccatgatgacagcccccattttcttacttctgccctgctcccctcctagtttcctttctagagaatcttgaggtacacccatctagaccagaaaaacaattgctagaaagtggtgctagactccaaatagttctagtttggaggagtgagtaactgatttttttttt

SEQ ID NO: 16475 - DNA, 4649 bp, Homo sapiens
  source 1..4649: mol_type = unassigned DNA
cttttcccctccgctccccgccgcctcctgacgccgggcgtgacgtcaccacgcccggcggccgccattacagagagccgagctctggagcctcagcgagcggaggaggaggcgcagcggccgacggccgagtactgcggtgagagccagcgggccagcgccagcctcaacagccgccagaagtacacgaggaaccggcggcggcgtgtgcgtgtaggcccgtgtgcgggcggcggcgcgggagcagcgcggagcggcagccggctggggcgggtggcatcatggacgagaaggtgttcaccaaggagctggaccagtggatcgagcagctgaacgagtgcaagcagctgtccgagtcccaggtcaagagcctctgcgagaaggctaaagaaatcctgacaaaagaatccaacgtgcaagaggttcgatgtccagttactgtctgtggagatgtgcatgggcaatttcatgatctcatggaactgtttagaattggtggcaaatcaccagatacaaattacttgtttatgggagattatgttgacagaggatattattcagttgaaacagttacactgcttgtagctcttaaggttcgttaccgtgaacgcatcaccattcttcgagggaatcatgagagcagacagatcacacaagtttatggtttctatgatgaatgtttaagaaaatatggaaatgcaaatgtttggaaatattttacagatctttttgactatcttcctctcactgccttggtggatgggcagatcttctgtctacatggtggtctctcgccatctatagatacactggatcatatcagagcacttgatcgcctacaagaagttccccatgagggtccaatgtgtgacttgctgtggtcagatccagatgaccgtggtggttggggtatatctcctcgaggagctggttacacctttgggcaagatatttctgagacatttaatcatgccaatggcctcacgttggtgtctagagctcaccagctagtgatggagggatataactggtgccatgaccggaatgtagtaacgattttcagtgctccaaactattgttatcgttgtggtaaccaagctgcaatcatggaacttgacgatactctaaaatactctttcttgcagtttgacccagcacctcgtagaggcgagccacatgttactcgtcgtaccccagactacttcctgtaatgaaattttaaacttgtacagtattgccatgaaccatatatcgacctaatggaaatgggaagagcaacagtaactccaaagtgtcagaaaatagttaacattcaaaaaacttgttttcacatggaccaaaagatgtgccatataaaaatacaaagcctcttgtcatcaacagccgtgaccactttagaatgaaccagttcattgcatgctgaagcgacattgttggtcaagaaaccagtttctggcatagcgctatttgtagttacttttgctttctctgagagactgcagataataagatgtaaacattaacacctcgtgaatacaatttaacttccatttagctatagctttactcagcatgactgtagataaggatagcagcaaacaatcattggagcttaatgaacatttttaaaaataattaccaaggcctcccttctacttgtgagttttgaaattgttctttttattttcagggataccgtttaatttaattatatgatttgtctgcactcagtttattccctactcaaatctcagccccatgttgttctttgttattgtcagaacctggtgagttgttttgaacagaactgttttttccccttcctgtaagacgatgtgactgcacaagagcactgcagtgtttttcataataaacttgtgaactaagaactgagaaggtcaaattttaattgtatcaatgggcaagactggtgctgtttattaaaaaagttaaatcaattgagtaaattttagaatttgtagacttgtaggtaaaataaaaatcaagggcactacataacctctctggtaactccttgacattcttcagattaacttcaggatttatttgtatttcacatattacaatttgtcacattgttggtgtgcactttgtgggttcttcctgcatattaacttgtttgtaagaaaggaaatctgtgctgcttcagtaagacttaattgtaaaaccatataacttgagatttaagtctttgggttttgttttaataaaacagcatgttttcaggtagagcttaaactaaatgatgtgtttacttagtgcagtttctggttatgaatattatattgctatgtgtatattatatggactctttaaaatgattgacagattggcaaattcttaaatctttgtacattgttgagtcatatgttcttagagttaaatttgtctcagataagaaagtgttaaagcattagcctgtgtcaagttctttgagtgatactagtgaaaccaaatagaaaactattgttggatcatgatttagtcttatgtacattcacccgaagacaaaaatggtacttaaagtggcagtgttcaacatttaatgagtttttccccttttatccttcgaataggattagatgtttaaaaaaaagttcttctgtgggaactaatatttgatattttaacctaccagagtaaacaggaacacttaatcatacttgtgagtgtagtaaataaaagttttcttgctttgtgctgtgttgaatctggaaccaacagggaagttatagcatatcccctttctaaaatgcttgaggaacacatacataccgaatgtcttttctgatctaattgatagtatttttagtggcttgtggagttaattttccaaagcaaaaggccattagggtttctacatttcatttcatttcattcttttctttcacaagaaatacattctctgtgtgtctttttgttgctctgtcactctatgccctttctctccgactgaacaaatagcttatccatgtgcagtggttttaatacccaaacaatctagacaccaagcagctattttttccggtcctgtgatatcagaattgaccaaggaatacgtatattgtaattgacacgtggtggtatcttccaggtacaaattctctaaattttgtggttagcagaatgggacttgtgataagaatagcttggttttagcataactagggtttaaaataattgtttaattatagagactgaccgggctttggccatctaaactggaaagtgttagtaccctaccttcttttgaaaatggctatggtaaggaaaatgtgttagtaaattatgtattttcttgaaaaatacataattatggttggatgggaatcactaagttgggtgttaactgatgtctcaattagtaacattaggattttcattaataaacctaaaaagctttccctaagaacaggcctggcacagtggctcatgcctgtaatcccagcactttgggagaccagggtgggtggatcccttgaggtcaggagttgaagagcagcctggccaacatggcaaaaccccatctctacaaaaaatatgaaaatcagccgggcttggtggcataccatagtcccagctacttgggaggctgaggtgagaggatcgcctgagcccaggagatggaggttgcagtgggctgagattgtgccactgtactccagtctgggtgacagagccagaccctgtctcaaaaataaagaggattctgagtttgtatagtgagggcttgcagaaattttgaaacttattttgtaagtttacaatgaatttgtacatgatgtgctcatgtcttgggttgagtatcctagacatgattttttcatttgctgcatattaaacatttgttggttgtagtcggtatttcttaaatagaagtttgtcaatattagattagtttcaagaaggacttagctcaggaaaaggatagttatttctgtggttctcagctttgatgcctacagagattctgatttaaattgctggaggagggcccaggcatacattttttaagtttcccaagtgattctaatttacatctagggttaaaaacagccaggcgcggtggctcatgcctgtaatcccagcacttggggaggccggggtgggtggatcacctgatgtcaggagatcgagaccagcctggccagcgtggtgaaaccccatctctattaaaaatacaaaactgaccggtgtggtggcaggagcctgtaatcccagctacttgggaggctgaggcaggagaatcacttgaactcaggaggaggaggttacagtgagcccagatcgtgccattgcactccagcctgggcaaaaagagcaaaactccatctcaaaaaacaaaaacacctcactgctgtttcctaagtacatacttaagaaaattgggatacatggtggtggttcatggatgttgataaggaattaaaatgtaccgtgcgactctctgtttcagtggtgacttttacctgtttagtataaatattcctttgcttccaaccataaatgtgttcttagaaatgggcctatagtttagtaacctatagtttggtaataggcttgtttgttttcagatggattttggttctgtgagctaaagctattttgcattaaagccttcgtcctca

SEQ ID NO: 16476 - DNA, 574 bp, Homo sapiens
  source 1..574: mol_type = unassigned DNA
tttttttttttaaagtactaaaaaaaaaacaagttttgtaattagggggaaaataaatacatgtgtaccttacaggttgtataaagtacaggagattattaagtcatccagaaaaaaagcattaacatttcttaagcccctttggcaggggtgggaatgagtagagatttttttctctcttgagtgaagtaacatttagttgaattgagggagtaaagtaagatttttgtctccttttccttgcagggatataactggtgccatgaccggaatgtagtaacgattttcagtgctccaaactattgttatcgttgtggtaaccaagctgcaatcatggaacttgacgatactctaaaatactctttcttgcagtttgacccagcacctcgtagaggcgagccacatgttactcgtcgtaccccagactacttcctgtaatgaaattttaaacttgtacagtattgccatgaaccatatatcgacctaatggaaatgggaagagcaacagtaactccaaagtgtcagaaaatagttaacattcaaaaaacttgttttcacatggaccaaaagatgt

SEQ ID NO: 16477 - DNA, 739 bp, Homo sapiens
  source 1..739: mol_type = unassigned DNA
ttttgtattccatttatatgacatttctagaaaagacaaactcaagacagtaaatcagtggttgccaggagctggagtgggagtggagagtgactgcaggagggatctttttgggataatggaaaggttctaaaactggattgtggtgattgttgcataactataaatttgtgaaaaattactgaaccgtaaagtaatttatggggttttaatagcccattgatttatgtttggtataaagttggtggtagagggagtttgattttagttgagatgaggtgggcaaacaccccatgggcatttaaaaattctgtagagctgtggttttggttcactatgatatgaggatgtgtgctgttttttcaacaaaattgtaactgcatttttttctatagaaagtttcttgaattttcattggtttttgaaagagctagttgtttatgttttgcattttattgttttaggttcgttaccgtgaacgcatcaccattcttcgagggaatcatgagagcagacagatcacacaagtttatggtttctatgatgaatgtttaagaaaatatggaaatgcaaatgtttggaaatattttacagatctttttgactatcttcctctcactgccttggtggatgggcagatcttctgtctacatggtggtctctcgccatctatagatacactggatcatatcagagcacttgatcgcctacaagaagttccccatgaggtatgactttt

SEQ ID NO: 16478 - DNA, 585 bp, Homo sapiens
  source 1..585: mol_type = unassigned DNA
aaaatggcgccgttcactcgactcctgggcttttgagtcagccggccttggcgccagacgaggtggcagggggagcggagaccctgtgggtcatcgtcagggacggttttgagggctaaagaaatcctgacaaaagaatccaacgtgcaagaggttcgatgtccagttactgtctgtggagatgtgcatgggcaatttcatgatctcatggaactgtttagaattggtggcaaatcaccagatacaaattacttgtttatgggagattatgttgacagaggatattattcagttgaaacagttacactgcttgtagctcttaaggttcgttaccgtgaacgcatcaccattcttcgagggaatcatgagagcagacagatcacacaagtttatggtttctatgatgaatgtttaagaaaatatggaaatgcaaatgtttggaaatattttacagatctttttgactatcttcctctcactgccttggtggatgggcagatcttctgtctacatggtggtctctcgccatctatagatacactggatcatatcagagcacttgatcgcctacaagaagttccccat

SEQ ID NO: 16479 - DNA, 510 bp, Homo sapiens
  source 1..510: mol_type = unassigned DNA
agatttagatttgtttctcccaagcctgaacaaaactactactagtggatgaggtggcacatcatctgttggagatgccttttaatggtagcgatgtattgaatctcctgtttctttaccctctcacgtcaaatgaggctaaagaaatcctgacaaaagaatccaacgtgcaagaggttcgatgtccagttactgtctgtggagatgtgcatgggcaatttcatgatctcatggaactgtttagaattggtggcaaatcaccagatacaaattacttgtttatgggagattatgttgacagaggatattattcagttgaaacagttacactgcttgtagctcttaaggttcgttaccgtgaacgcatcaccattcttcgagggaatcatgagagcagacagatcacacaagtttatggtttctatgatgaatgtttaagaaaatatggaaatgcaaatgtttggaaatattttacagatctttttgactatcttcctctcactgccttgg

SEQ ID NO: 16480 - DNA, 564 bp, Homo sapiens
  source 1..564: mol_type = unassigned DNA
acagagagccgagctctggagcctcagcgagcggaggaggaggcgcagcggccgacggccgagtactgcggtgagagccagcgggccagcgccagcctcaacagccgccagaagtacacgaggaaccggcggcggcgtgtgcgtgtaggcccgtgtgcgggcggcggcgcgggagcagcgcggagcggcagccggctggggcgggtggcatcatggacgagaaggtgttcaccaaggagctggaccagtggatcgagcagctgaacgagtgcaagcagctgtccgagtcccaggtcaagagcctctgcgagaaggctaaagaaatcctgacaaaagaatccaacgtgcaagaggttcgatgtccagttactgtctgtggagatgtgcatgggcaatttcatgatctcatggaactgtttagaattggtggcaaatcaccagatacaaattacttgtttatgggagattatgttgacagaggatattattcagttgaaacagttacactgcttgtagctcttaagagattaggacacagatggggagaagataagacagatggag

SEQ ID NO: 16481 - DNA, 4092 bp, Homo sapiens
  source 1..4092: mol_type = unassigned DNA
acatgcaaaaagtggggcctggagatggggctgtcttttttctccaaacacttgcccatccaggaaggccagccctgggcattgaagactccagctgacatcatctctaccgttgagttcaaccacacgggagagctgctggccacaggtgacaagggcggccgggtcgtcatcttccagcgggaaccagagagtaaaaatgcgccccacagccagggcgaatacgacgtgtacagcactttccagagccacgagccggagtttgactatctcaagagcctggagatagaggagaagatcaacaagatcaagtggctcccacagcagaacgccgcccactcactcctgtccaccaacgataaaactatcaaattatggaagattaccgaacgagataaaaggcccgaaggatacaacctgaaggatgaagaggggaaacttaaggacctgtccacggtgacgtcactgcaggtgccagtgctgaagcccatggatctgatggtggaggtgagccctcggaggatctttgccaatggccacacctaccacatcaactccatctccgtcaacagtgactgcgagacctacatgtcggcggatgacctgcgcatcaacctctggcacctggccatcaccgacaggagcttcaacatcgtggacatcaagccggccaacatggaggaccttacggaggtgatcacagcatctgagttccatccgcaccactgcaacctcttcgtctacagcagcagcaagggctccctgcggctctgcgacatgcgggcagctgccctgtgtgacaagcattccaagctctttgaagagcctgaggaccccagtaaccgctcattcttctcggaaatcatctcctccgtgtccgacgtgaagttcagccacagcggccgctacatgctcacccgggactaccttacagtcaaggtctgggacctgaacatggaggcaagacccatagagacctaccaggtccatgactaccttcggagcaagctctgttccctgtacgagaacgactgcattttcgacaagtttgaatgtgcctggaacgggagcgacagcgtcatcatgaccggggcctacaacaacttcttccgcatgttcgatcggaacaccaagcgggacgtgaccctggaggcctcgagggaaagcagcaagccccgggctgtgctcaagccacggcgcgtgtgcgtggggggcaagcgccggcgtgatgacatcagtgtggacagcttggacttcaccaagaagatcctgcacacggcctggcacccggctgagaacatcattgccatcgccgccaccaacaacctgtacatcttccaggacaaggtaaactctgacatgcactaggtatgtgcagttcccggcccctgccacccagcctcatgcaagtcatccccgacatgaccttcacgaccgcaatgcaaggaggggaagaaagtcacagcactgatgaggacagctgcagaggtggcagtgtgtggacacaggaagtttgggccccctccctgccccagctttcctaggccagaattgtgtttggcagtaattgtctgtttaaaaaaataaaaaggaaaggaagcgttcaccgccacaaatcataaaatggacatgactgtggagtcttacagttcagggttctttcattcacgtcccttcctgtctcggtctgcggtctttaccacatcaataggactttttatgcgtccgggttaatttttcactccagtgcgtcctgttgcagggaccggagctgatgggagctgcttctcccccatgcctcactggtcccagatcagggctccagggacagatgatgagtctcaaacgagccagccaggggttcttttggttataaatggggcaattcgccctgtctcagagctgatgacctcaccgttgttttttggatggtgaattcatgctgagaatttgcagatgcaagctcctctcctaggtcttctgaatgtcttgaaacatcccaggtcccaggtctggtgcggtttcccgagaggagcggagtggggtttgtcttctgtgtgcctgtgtcctcatctgattcacctgccatttgctgagcctctgctgtgtaccaggcgtggtgctcagccctagaggcagttgacttaccctctgcagccctccctgccgcctcacccttcagcattcactgggcaccttcccggagcggacactgactcccatgcacgattttttggaatcttcctcctgactgtgaggtgggtgttcattcatttcctccataaacaccaacttctcgaagcgtgccaggctctgggctggatgctggggataagcgggaacccttaggatcccctctgtccacgagaagaagctgaggctctgagcggatgcacaggtcacccatggcaggtgccgtgcagtggtgtcaggaacccgtccgggtcttcacacaaggttctctccagtccatctcgtgggcggctcatgttagagcgacattcaaatggaaggtttggaaaggaatgcctctgtcttgtgaagtaggacatggcagacttggcgacgacaagggtccaggagaactgagacgcaggatggaagacagagaagaccccccggagctcctcgctctgcttggtggcttcaggagtgtggccctccccaggactccacttcatcctgggcttgcaccctccttgagccaatgcactgaactgcctttgaaaggaaattgcatgttctgaccattttaggatacctttactttaaggaccacacagtcccagaggacacatccctcgggaactctgcccctctgacaatgagggccacagagaaggtggtgtttccatggtagatgctcctgttctggtgataccaaacctgcccacccctctgagtcgtctttgctcatggacttgcagcagagccacgtagtttggcattttgattcagaaagtggggagcagagacccagccaaatccaaactttttttttggttttgttttgttttgttttttacaagatataacataacccaggaaacagacccagctgaggttattctcagtggattacagtatacttttgtgtgtgtaaaagcacaaagtgcatgtgtactcacttctggccatataacatttacacagggaaatggatcattgatttttttttaatcaacgtgaatgaagaatgtttgtttatatatcactataaaatccagttgacctggacagtattatatgtacatatctattctaattaaatttaacaatcaaaggattggattacttttttcccccttgtaaagaggttcgagaatgtggtcaattgtatagatagcgtgttaaagccaaaacccagctctgagggccttacccattacttggatatttgctacgatccatctccctttgtgagtcaaatgttaagagaagaaacttgtatttgcagctagaggttactgtcacatcatagatttaacatttaccatcttcaaagtacaaatcttacatgtccttcaaaaggaggtcttaatacagttcctagttccttacttctgttttaaactttgggtaccaaaccaaaaagaagaaaaaagaaaggaaaagatcttctttgaagaaaagtatgtctctggatccctggaaaataatgatgtccaaagcaaattgtgaagatcaaatgtgtgttaagaaaaggtgtcgaggggagggacaaaaccagaaacggtggaaggaccagtgtaatagtcacagacttgcatcctggctctgcttacatttcctggtactctcgaatgtacgggcgttcacatagtcattgtgaagttgttggggtttttttggttttgtttttaatttagctcttctctgaggacgaagctgttggtggtggtggtggtgggggtggtggtgtgggatacatggtggtcaagttgtcagccctgatcagtttggactctgtaactcataggtgcattctttttttctttggtgtctcacaaattacccaattgttgaataaaactataaatatgttaataccagctttttccaataaaataacaaatgttacatcaaaaacga

SEQ ID NO: 16482 - DNA, 1780 bp, Homo sapiens
  source 1..1780: mol_type = unassigned DNA
gtgccagctcaatggggccgccgacctcgaagtttccgaagaagtaaaatagaaagaagaccttttttgaaatgacctgtgttagtcacctctctcaggatgcgtgaggcggacacgttgaggccacctcagctgatggaagtttccgctgacatcatctctaccgttgagttcaaccacacgggagagctgctggccacaggtgacaagggcggccgggtcgtcatcttccagcgggaaccagagagtaaaaatgcgccccacagccagggcgaatacgacgtgtacagcactttccagagccacgagccggagtttgactatctcaagagcctggagatagaggagaagatcaacaagatcaagtggctcccacagcagaacgccgcccactcactcctgtccaccaacgataaaactatcaaattatggaagattaccgaacgagataaaaggcccgaaggatacaacctgaaggatgaagaggggaaacttaaggacctgtccacggtgacgtcactgcaggtgccagtgctgaagcccatggatctgatggtggaggtgagccctcggaggatctttgccaatggccacacctaccacatcaactccatctccgtcaacagtgactgcgagacctacatgtcggcggatgacctgcgcatcaacctctggcacctggccatcaccgacaggagcttcaacatcgtggacatcaagccggccaacatggaggaccttacggaggtgatcacagcatctgagttccatccgcaccactgcaacctcttcgtctacagcagcagcaagggctccctgcggctctgcgacatgcgggcagctgccctgtgtgacaagcattccaagctctttgaagagcctgaggaccccagtaaccgctcattcttctcggaaatcatctcctccgtgtccgacgtgaagttcagccacagcggccgctacatgctcacccgggactaccttacagtcaaggtctgggacctgaacatggaggcaagacccatagagacctaccaggtccatgactaccttcggagcaagctctgttccctgtacgagaacgactgcattttcgacaagtttgaatgtgcctggaacgggagcgacagcgtcatcatgaccggggcctacaacaacttcttccgcatgttcgatcggaacaccaagcgggacgtgaccctggaggcctcgagggaaagcagcaagccccgggctgtgctcaagccacggcgcgtgtgcgtggggggcaagcgccggcgtgatgacatcagtgtggacagcttggacttcaccaagaagatcctgcacacggcctggcacccggctgagaacatcattgccatcgccgccaccaacaacctgtacatcttccaggacaaggtaaactctgacatgcactaggtatgtgcagttcccggcccctgccacccagcctcatgcaagtcatccccgacatgaccttcacgaccgcaatgcaaggaggggaagaaagtcacagcactgatgaggacagctgcagaggtggcagtgtgtggacacaggaagtttgggccccctccctgccccagctttcctaggccagaattgtgtttggcagtaattgtctgtttaaaaaaataaaaaggaaaggaagcgttcaccgccacaaatcataaaatggacatgactgtggagtcttacagttcagggttctttcattcacgtcccttcctgtctcggtctgcggtctttaccacatcaataggactttttatgcgtc

SEQ ID NO: 16483 - DNA, 1832 bp, Homo sapiens
  source 1..1832: mol_type = unassigned DNA
atgtgttttgggggaaacagagagaaaggtgtggcctctccacttctgtggacaccccaaataggaagaagggtgcacacaaagcaccgcttcctccacgaagccctcctcaggcacatcgaggagaaccagctgcccaagctcttggctgctgcccttctgaggcctgcctgatttgggccacatagatctggttttggccattgactggcaacatggcagtagccaactgcagagccaccagggagcagcctcattctgattgagtataacgaagacgctgatgggaaagagagacacggctgacatcatctctaccgttgagttcaaccacacgggagagctgctggccacaggtgacaagggcggccgggtcgtcatcttccagcgggaaccagagagtaaaaatgcgccccacagccagggcgaatacgacgtgtacagcactttccagagccacgagccggagtttgactatctcaagagcctggagatagaggagaagatcaacaagatcaagtggctcccacagcagaacgccgcccactcactcctgtccaccaacgataaaactatcaaattatggaagattaccgaacgagataaaaggcccgaaggatacaacctgaaggatgaagaggggaaacttaaggacctgtccacggtgacgtcactgcaggtgccagtgctgaagcccatggatctgatggtggaggtgagccctcggaggatctttgccaatggccacacctaccacatcaactccatctccgtcaacagtgactgcgagacctacatgtcggcggatgacctgcgcatcaacctctggcacctggccatcaccgacaggagcttcaacatcgtggacatcaagccggccaacatggaggaccttacggaggtgatcacagcatctgagttccatccgcaccactgcaacctcttcgtctacagcagcagcaagggctccctgcggctctgcgacatgcgggcagctgccctgtgtgacaagcattccaagctctttgaagagcctgaggaccccagtaaccgctcattcttctcggaaatcatctcctccgtgtccgacgtgaagttcagccacagcggccgctacatgctcacccgggactaccttacagtcaaggtctgggacctgaacatggaggcaagacccatagagacctaccaggtccatgactaccttcggagcaagctctgttccctgtacgagaacgactgcattttcgacaagtttgaatgtgcctggaacgggagcgacagcgtcatcatgaccggggcctacaacaacttcttccgcatgttcgatcggaacaccaagcgggacgtgaccctggaggcctcgagggaaagcagcaagccccgggctgtgctcaagccacggcgcgtgtgcgtggggggcaagcgccggcgtgatgacatcagtgtggacagcttggacttcaccaagaagatcctgcacacggcctggcacccggctgagaacatcattgccatcgccgccaccaacaacctgtacatcttccaggacaaggtaaactctgacatgcactaggtatgtgcagttcccggcccctgccacccagcctcatgcaagtcatccccgacatgaccttcacgaccgcaatgcaaggaggggaagaaagtcacagcactgatgaggacagctgcagaggtggcagtgtgtggacacaggaagtttgggccccctccctgccccagctttcctaggccagaattgtgtttggcagtaattgtctgtttaaaaaaataaaaaggaaaggaagcgttcaccgccacaaatcataaaa

SEQ ID NO: 16484 - DNA, 1807 bp, Homo sapiens
  source 1..1807: mol_type = unassigned DNA
gcggccgccgcccgcccaccgcgcgctcgcttgaccgcggcgcccgcccccggccgcccccgcccgtccccctgccgcgatgccctcccttcggggccccggcggcccgcgcccctgctaggctgcggcggcatggcccgcgcgcccggcgcgacctctgcggattgcatcggtgtgtggcggcggggcatgcccagagcaccgggcacggccttcaatgggcgaggacacggacacgcggaaaattaaccacagcttcctgcgggaccacagctatgtgactgaagctgacatcatctctaccgttgagttcaaccacacgggagagctgctggccacaggtgacaagggcggccgggtcgtcatcttccagcgggaaccagagagtaaaaatgcgccccacagccagggcgaatacgacgtgtacagcactttccagagccacgagccggagtttgactatctcaagagcctggagatagaggagaagatcaacaagatcaagtggctcccacagcagaacgccgcccactcactcctgtccaccaacgataaaactatcaaattatggaagattaccgaacgagataaaaggcccgaaggatacaacctgaaggatgaagaggggaaacttaaggacctgtccacggtgacgtcactgcaggtgccagtgctgaagcccatggatctgatggtggaggtgagccctcggaggatctttgccaatggccacacctaccacatcaactccatctccgtcaacagtgactgcgagacctacatgtcggcggatgacctgcgcatcaacctctggcacctggccatcaccgacaggagcttcaacatcgtggacatcaagccggccaacatggaggaccttacggaggtgatcacagcatctgagttccatccgcaccactgcaacctcttcgtctacagcagcagcaagggctccctgcggctctgcgacatgcgggcagctgccctgtgtgacaagcattccaagctctttgaagagcctgaggaccccagtaaccgctcattcttctcggaaatcatctcctccgtgtccgacgtgaagttcagccacagcggccgctacatgctcacccgggactaccttacagtcaaggtctgggacctgaacatggaggcaagacccatagagacctaccaggtccatgactaccttcggagcaagctctgttccctgtacgagaacgactgcattttcgacaagtttgaatgtgcctggaacgggagcgacagcgtcatcatgaccggggcctacaacaacttcttccgcatgttcgatcggaacaccaagcgggacgtgaccctggaggcctcgagggaaagcagcaagccccgggctgtgctcaagccacggcgcgtgtgcgtggggggcaagcgccggcgtgatgacatcagtgtggacagcttggacttcaccaagaagatcctgcacacggcctggcacccggctgagaacatcattgccatcgccgccaccaacaacctgtacatcttccaggacaaggtaaactctgacatgcactaggtatgtgcagttcccggcccctgccacccagcctcatgcaagtcatccccgacatgaccttcacgaccgcaatgcaaggaggggaagaaagtcacagcactgatgaggacagctgcagaggtggcagtgtgtggacacaggaagtttgggccccctccctgccccagctttcctaggccagaattgtgtttggcagtaattgtctgtttaaaaaaataaaaaggaaaggaagcgttcaccgccaca

SEQ ID NO: 16485 - DNA, 1667 bp, Homo sapiens
  source 1..1667: mol_type = unassigned DNA
atcattcaaaggattcctgcggtggtgcagagctgcggcaaagggccctcgcccgtggggttcactctcatcacccagaagcagggagaagggcctgcggctgcaggcctggctgccacaccggcctccagacaacacacagcagaagtaaaatagaaagaagaccttttttgaaatgacctgtgttagtcacctctctcaggatgcgtgaggcggacacgttgaggccacctcagctgatggaagtttccgctgacatcatctctaccgttgagttcaaccacacgggagagctgctggccacaggtgacaagggcggccgggtcgtcatcttccagcgggaaccagagagtaaaaatgcgccccacagccagggcgaatacgacgtgtacagcactttccagagccacgagccggagtttgactatctcaagagcctggagatagaggagaagatcaacaagatcaagtggctcccacagcagaacgccgcccactcactcctgtccaccaacgataaaactatcaaattatggaagattaccgaacgagataaaaggcccgaaggatacaacctgaaggatgaagaggggaaacttaaggacctgtccacggtgacgtcactgcaggtgccagtgctgaagcccatggatctgatggtggaggtgagccctcggaggatctttgccaatggccacacctaccacatcaactccatctccgtcaacagtgactgcgagacctacatgtcggcggatgacctgcgcatcaacctctggcacctggccatcaccgacaggagcttcaacatcgtggacatcaagccggccaacatggaggaccttacggaggtgatcacagcatctgagttccatccgcaccactgcaacctcttcgtctacagcagcagcaagggctccctgcggctctgcgacatgcgggcagctgccctgtgtgacaagcattccaagctctttgaagagcctgaggaccccagtaaccgctcattcttctcggaaatcatctcctccgtgtccgacgtgaagttcagccacagcggccgctacatgctcacccgggactaccttacagtcaaggtctgggacctgaacatggaggcaagacccatagagacctaccaggtccatgactaccttcggagcaagctctgttccctgtacgagaacgactgcattttcgacaagtttgaatgtgcctggaacgggagcgacagcgtcatcatgaccggggcctacaacaacttcttccgcatgttcgatcggaacaccaagcgggacgtgaccctggaggcctcgagggaaagcagcaagccccgggctgtgctcaagccacggcgcgtgtgcgtggggggcaagcgccggcgtgatgacatcagtgtggacagcttggacttcaccaagaagatcctgcacacggcctggcacccggctgagaacatcattgccatcgccgccaccaacaacctgtacatcttccaggacaaggtaaactctgacatgcactaggtatgtgcagttcccggcccctgccacccagcctcatgcaagtcatccccgacatgaccttcacgaccgcaatgcaaggaggggaagaaagtcacagcactgatgaggacagctgcagaggtggcagtgtgtggacacagg

SEQ ID NO: 16486 - DNA, 4538 bp, Homo sapiens
  source 1..4538: mol_type = unassigned DNA
gagggagcctccatctcctctgctgccaaatggaaatcacagtagtgtctcccgcaggggctggcgtgaggttaaaggaggtagcagatatgaaaatgacatataaattgtaaattgcccacagacattagtgtgtgttgcctggtaaccacccagcatttgtggactgcatttacttgggatagcaatagttatattggcattttaatttaatagcattgttatgttcccatcataaaaataatatacactgtgtgtatgcccaccctcatcaaattatatacattaagtatgtgcagcgttttatatattgattgtacctcaatacagctattaaaaaatgatgtaacttcattatagaaaatctagaaaatatggacaagttgaaagaggaggaaatattattttgttccagctaccctaaagctacctccgttcacattttggagaattctcttccagcttttttccccactgcccagtttctttgcttatttcacatggctataatcactgatgtagatcattacaagcattttatacccaattttatatcccgttccttcaccctcagggggttttaatatgaaatagcaagaaccagcgccccatcggggaccctagcacagctgggctgggtggttctggcttctgcccagatgtgtctgggtgtccctgggccagggcaggctgccccacggagggacaatgtcaggacagctgggacctgaccctgttctgactccatgcccggtgggcgtttccgtgttcccacagagctgcttttcttatcttgtctttttaagttcagtgacatgtgcatctgtcttgatggatggatggatacgtccagcccgtcatcccacttctaaccaccctctctcaatcttttctgttgcctcaaagctggcattgactcatggctcagaaggccagggcaggccaggagctgtcctaaaaggcccagactggaaaaagaaaaggcatttcttggatagatatctctggcctggctactgcatacaggcaccatttgaagccgtgaattaagcctgaggctcctgccctcatgaagtttacgttctggccaggaagagagcctacagatgataaaagcctttacagaaagaaaaacatcagattaggttggggcagggatggtcagggtgtcctgtatgagggtgctggggtgcagacagcagtttcagcaaggtgatccaagctgtgctcacgggaaggcagcagtggggcagaattggaagaataggaaggagccatgctggtacccagggaaagccactgcaggccgagagagcaggtcttgggacagcaggtggccaggacttttgggaaagggcaaggagcctggtgtttggaggggaataagcaggtggagagcagtagatgaggctggggaaggggaggaggtaccttttgctgagttaaaaacacgagaccccgtgcatacaacagtaaatgttttcatcatcttgcatctgcgattctgtggtctgggcttggctgggcttgccctgctctgtgggtcagtggggccctgctggaggctgggcttggccgggggttgggggggttcttctgcacccactcttcctcctccccctcaggggccagtgggccagcctgcgcaggtcctgctcctggtaccgccagaggcgttgatggcaacccccagtacctaagcccctttgcatctctgtttgcggcttgtcgaattgccgttctgcaggccaaagcaaaacacagggacaagcccagaatcaaggtggggggcagagaacaggtcacctggcccaccatgggaggggtgaaggtttggctccagatgcggcccacctgggcctcggcaggtgggggctgcctttagaacactctgtgcttttctctgagtacacaatgggagccgctggagggttttgagcaggggagtgccaggatcagtcctgggtgttaccagcctctctgctgccagtctgttgaggctacgtcatagccagggagaaagagctgtggcagtcatccagtgagaggtgggagagtggctggcatcccgatatgctgtgaaggctgagcaggcaggattggatgtggggtgtgtgtgtgtgtgtgtgtgtgtgtgtgtgtgtgtgtgtgagagagagagagagagagagagagagagagagagagagagagagagagagagaacgagaaactccaaggcttgggcctgagcaagtgaacaatagagctgtcatcacctgagactggggaagctgcagaggatgaggctgaggagggatcagaattcagttatggtgaccaatgaagggttttgaatagagggacacagggatgcactggctcaggagtttggtcatcacgttggccgccagagggagaacagaggctgggacagggaaccctgtggagtgtcctctctgtggctacagggagcaacggtcagatctgtggctggtttgaaagtagatccattttgctaaaggtggtatcacagattttggagactacagaatccaggccaggagagcaaagaacgacagaggtcccattcacagcagcgggccatcccgggctcctactagcttttgctgcttgggcctatggggatggtattctagaactttccatcttccaagacatactggaaatgtggatttttataggaaatcttctacttttcaaatattaagaatgacttcaaattaaaagtaataatcattttggggctgcagtaaaacttgttggtggagcaggcctcaggcttcaggttggtgagctgtcctccagtgggggtttctcttccaggctagggccttgtcctcccctgctctcccccactcccagggctggccacccagaatgtgcaggccactcatctctgtgactcgtagaacctgagaatgttggtgatggaaggggtgttcccctagttcccacatgcaaaaagtggggcctggagatggggctgtcttttttctccaaacacttgcccatccaggaaggccagccctgggcattgaagactccaggtatgggggtgactccataaggagaggttcctgagtgacctgaagaaacatggttgggatgaagtgcagggagggtcagggcaggcagggctgagcttcgcttctgcgagcagagattagagagcgatcccagaggcctgcctggaggtggggccacagagcaggagtctgaaggagagggggtaattcacctctgtcctactgtgtgggaagccctgagtgggcccctagcagagggttgccttgcgcttatctatggagatattgggaagggcttccctgacccaggttgctggagcatgggggcctgggtggcaggggtaggtgtgggagattcaagacaggaggatgaggccacatccaggtggcttcagataccaccgtgagtcccatagagtgtccagttactataaagtctgccagccactgtggtcgccccaggcctgtgccaagtcccgagatctctgccctgcagccagtgcagagggaagaggagggcaggaggggacaggttggtggcccctcgccgatgctcctgacccctcaggctccctgctgcctcctgcccagggctgtggggcctcggggagcggggagctcgccattgctgtggcactgttgagcacccgggagaggcgggttctgacagccaccccttcccgtcttgctgttcccctcccagctgacatcatctctaccgttgagttcaaccacacgggagagctgctggccacaggtgacaagggcggccgggtcgtcatcttccagcgggaaccagagagtaaaaatgcgccccacagccagggcgaatacgacgtgtacagcactttccagagccacgagccggagtttgactatctcaagagcctggagatagaggagaagatcaacaagatcaagtggctcccacagcagaacgccgcccactcactcctgtccaccaacgataaaactatcaaattatggaagattaccgaacgagataaaaggcccgaaggatacaacctgaaggatgaagaggggaaacttaaggacctgtccacggtgacgtcactgcaggtgccagtgctgaagcccatggatctgatggtggaggtgagccctcggaggatctttgccaatggccacacctaccacatcaactccatctccgtcaacagtgactgcgagacctacatgtcggcggatgacctgcgcatcaacctctggcacctggccatcaccgacaggagcttcaacatcgtggacatcaagccggccaacatggaggaccttacggaggtgatcacagcatctgagttccatccgcaccactgcaacctcttcgtctacagcagcagcaagggctccctgcggctctgcgacatgcgggcagctgccctgtgtgacaagcattccaagctctttgaagagcctgaggaccccagtaaccgctcattcttctcggaaatcatctcctccgtgtccgacgtgaagttcagccacagc

SEQ ID NO: 16487 - DNA, 579 bp, Homo sapiens
  source 1..579: mol_type = unassigned DNA
atcctcgtgggtgtgcgttgtctcattgtgactttgatttggatttccctaatgactcatcacgttgagcaacctttcctgtgcatgctgaccattcggtgaaatctgacatcatctctaccgttgagttcaaccacacgggagagctgctggccacaggtgacaagggcggccgggtcgtcatcttccagcgggaaccagagataaaactatcaaattatggaagattaccgaacgagataaaaggcccgaaggatacaacctgaaggatgaagaggggaaacttaaggacctgtccacggtgacgtcactgcaggtgccagtgctgaagcccatggatctgatggtggaggtgagccctcggaggatctttgccaatggccacacctaccacatcaactccatctccgtcaacagtgactgcgagacctacatgtcggcggatgacctgcgcatcaacctctggcacctggccatcaccgacaggagcttcaacatcgtggacatcaagccggccaacatggaggaccttacggaggtgatcacagcatctgagttccatccgcaccactgcaacct

SEQ ID NO: 16488 - DNA, 533 bp, Homo sapiens
  source 1..533: mol_type = unassigned DNA
tgcaaaaagtggggcctggagatggggctgtcttttttctccaaacacttgcccatccaggaaggccagccctgggcattgaagactccagctgacatcatctctaccgttgagttcaaccacacgggagagctgctggccacagagtaaaaatgcgccccacagccagggcgaatacgacgtgtacagcactttccagagccacgagccggagtttgactatctcaagagcctggagatagaggagaagatcaacaagatcaagtggctcccacagcagaacgccgcccactcactcctgtccaccaacgataaaactatcaaattatggaagattaccgaacgagataaaaggcccgaaggatacaacctgaaggatgaagaggggaaacttaaggacctgtccacggtgacgtcactgcaggtgccagtgctgaagcccatggatctgatggtggaggtgagccctcggaggatctttgccaatggccacacctaccacatcaactccatctccgtcaacagtgactgcg

SEQ ID NO: 16489 - DNA, 579 bp, Homo sapiens
  source 1..579: mol_type = unassigned DNA
ataatccattgccagatcctcctgggaggcccgcctgcccgggcccctccctgtcctccagaggcagggtccctgagtgggagggagaaggcggctggtttggggctggcctttttattcctgctgacatcatctctaccgttgagttcaaccacacgggagagctgctggccacaggtgacaagggcggccgggtcgtcatcttccagcgggaaccagagaactctgggtaagacagcagtggcctggacaacctgcccaggaccacgtttctggaacactgaaagagcctcgggacaaaagcccatttactgagaacacttgctaagtattctggagttgcttctggtttactctgcactgctcacctccgagggccagatccacacccctgtgacagatgcggaaactcagagaagccacccagctagtgaacagcagacctggctgcccgacgccaggacagtggccagcaacgtcacacaccacccggcctcagagagggcgtctccccccgcaaacacggactgtgcctggaattagatgcagaagacatccaggaaaccaaggaggagggag

SEQ ID NO: 16490 - DNA, 3868 bp, Homo sapiens
  source 1..3868: mol_type = unassigned DNA
gggccgtgctcttgctcccgccgcctggcagcctcacgctcggctccagcggccaagagccggagaaagtcctgctggtgggcggccgcggggctgagggcgtccggcatcccggggccgctccggcccgggcggcgagagtgcccggcggtccatgcatccgccgccgcccgccgccgcgatggatttcagtcagaacagcctgttcggttacatggaggacctgcaggagctcaccatcatcgagaggccggtccgccggagcctcaagacaccggaagaaatagaaagattgacagtcgatgaagacctcagtgatattgaaagggctgtttatctgctcagtgctggtcaagatgtccaaggaacaagtgtgattgcaaatctcccatttttgatgcgacagaatcccactgagacgcttcggagagtgttgccaaaagtcagagaagccctgcatgttgcaggagtggaaatgcagttaacggctgcgatgtcatttctgaccattctgcaggacgaatcagtgtcaattcatgcatatacccactcattcctccaagtcattctcctgcatctggagcacagggacacaggtgtcagcaatgcatggctggaaactcttctgtctgttatagaagtattgccaaaagaaaccctacggcatgagattttgaatccacttgtttccaaggcacaactttcccaaacagtccagtctcgtttagttagttgtaaaattttaggaaaattgaccaacaaatttgatgcccacaccattaagcgagaaatacttcctctggtaaaatcactctgtcaagatgtagaatatgaagttcgatcttgtatgtgtcggcaattagaaaatatagcccagggcattgggacagaacttacaaaaagtgtggtgctccctgaattaatagaactttctagggatgaaggcagcagtgtacgacttgcagcttttgaaactttggttaatctgcttgatatatttgatacagatgacagaagtcaaactatacttcccttagtgaaatcattttgtgaaaaatctttcaaagcagatgaatcaattcttatttctttatctttccatttaggaaaactatgtcatggactatatggaattttcactccagatcagcacttgagatttttggaattttataagaaactttgtacattgggtttgcaacaagaaaatggacacaatgaaaaccagattccaccccaaatcctagagcaggagaagaaatatatttcagtacggaagaactgtgcttataactttccggccatgattgtttttgttgatcctaaaaacttccacatggaactctattctacattcttctgcctttgccatgaccctgaagtaccagtcagatacactattgctatttgcttttatgaagtatctaagcttctgaattctggagtatatttaatacataaagaactaataacattattacaagatgaatcactggaggtactagatgctcttatagatcatcttccagaaatcttggaacttatgtctactggtggagaaagcagtgttcaagaaaataagttatcttctctgcctgacttgattccagcactcacagctgctgaacagcgagctgcagcctctttaaaatggagaactcatgagaagctacttcagaaatatgcctgcctgccacatgtcatatcaagcgatcagatttattaccgtttcttacaaagaatgttcacaatcatgatgacaaataatgttttacctgtccaaaaggcggcttcacgaactctatgcatttttctgcgttataatcgtaaacaagaacagagacatgaggtcattcaaaaattaattgaacaattgggccaaggaaaaagttactggaatagacttcgatttttggatacctgtgaatttattatagagatattttcaaaatcatttttctgtaaatatttctttctacctgctattgaactgacacatgatccagtagcaaatgtgagaatgaaactttgctacctgttgcccaaagtgaaatctactctgaagattcctgctgataagcatctacttcagcagttagaaatgtgtgtgaggaaactcctgtgtcaagaaaaagataaagatgttctggctattgtaaaaagaactgtattagagttggacagaatggaaatgtctatggatgcttttcagaaaaagttttatgagaaagatttgttggatcaagagaaagaaagagaagaactacttcttttggaaatggaacaattagagaaagaaaagcaacagaatgatggaaggcccatgagtgataaaatgtttgaaaagaaacgtagagacactaagacaccaacgcaaagtctgcccaagaacatccccatttctgttcctggaccctcttctgtcaccccatcgacaagtaaagaaatcaagaaatccaaactgattcgaagccagtcttttaataatcaagcttttcatgcaaaatatggcaacttagagaaatgtgctagtaaaagttctacaacaggatatacaacttctgtctcagggttaggaaagacttctgtgctttcactagctgatgattcattccggactcgtaatgccagtagcgttccatcttccttttctcctaatactcccttaccgagtacttcccgtgggacaggtaactcagttgaccccaagagcagtggaagtaaagatacacaaccacggaaggctaccttaaaatccagaaaatccaatccttaaatcaactgcttgatgaaggaggcaaaacaaaggcagcaggagataatgtgattggtacacaaaagctaaagcagtggctggggctttgtttttaaattttgggtttttttttttgttgttgttaatgagcagaaagagagacataatgacagctgatgttaaacttttcatatttcaaattagattccctaggaggtataatatatatttcttgagtaataatgtggttacggaattccaatgttatagtgaagtgtaatgaaaaacatctctaggaatgtgctttaaccactgctgcaaaagagacaagtctgcatttatttgtgcaggaaaccagccatttaattgttctagagttttagcatttaaaaatcgtatgaaagtctacatcagctgaattgtcctagcttgataagcacttggagggggacttggaaggtgagaaagatactgcattttctcatgagtctccaagcccacttgaaaagtcacactgaaaggatgcaaatagccgtctgcgattttggcggccctccggattgtggtgacaatatgttgtacccggacattcccaaatttaaatttggcagtgaaaattccacaaagatttctggtaactttgagctataaataccttaaaaataatagattgatgattttctttatttcctagagaatttattttataaatactttgtttacattttagattgtacttgtctttatttaaaatgatgaatctagtctgaatcagctgttattccaagctatcatgcttaagctatgtcaacagcatttatttgtactaatgctaatatttccatcaaaatttgcctgtggaatatatacagttcttaattttaaactgtcagttcttgagatataccgtgtgaagctattgtcagcttctctatttcaaaatgcaatcagcatataactatattgatattagaagatatttgttttttaaaatatattgatgtatgataaagatgatctaatttgtgaatgcatatgtatgtgtggttactttttataatgtgaaataatgaataatgaatttactcaaaataaaacataggttaatgagat

SEQ ID NO: 16491 - DNA, 876 bp, Homo sapiens
  source 1..876: mol_type = unassigned DNA
ggcagcctcacgctcggctccagcggccaagagccggagaaagtcctgctggtgggcggccgcggggctgagggcgtccggcatcccggggccgctccggcccgggcggcgagagtgcccggcggtccatgcatccgccgccgcccgccgccgcgatggatttcagtcagaacagcctgttcggttacatggaggacctgcaggagctcaccatcatcgagaggccggtccgccggagcctcaagacaccggaagaaatagaaagattgacagtcgatgaagacctcagtgatattgaaagggctgtttatctgctcagtgctggtcaagatgtccaaggaacaagtgtgattgcaaatctcccatttttgatgcgacagaatcccactgagacgcttcggagagtgttgccaaaagtcagagtccatgaggatgcacacttatttatccagagagtatggatctcacatatgtttgtccagagggtgtgactctgtggaggagaacacttactgtggacagtcccagatgttgaagtcagcacaacaagagaaaaacccaaatcctgataagacttgaggatttttcgaaaattaaatgcaaaatagttggggcaaatgttgctgcgggagtcaagactaagtaatacagtaagaagatatgaagttggagagcttctcatgttcttcctttgtataaagtttgcatacgtacaaaacccaggactttaatgactttaagagggggcagaattgcatctcttggaagttaacagactcatgtgaactggaatgtacgttgtggccctcacaattgattttaatatttatttgcaaagtcctttctgtttctaaataaaagctgtgccttctgaaa

SEQ ID NO: 16492 - DNA, 564 bp, Homo sapiens
  source 1..564: mol_type = unassigned DNA
agcgccagcaaacctagtttacggaccggacccctttcccctggccattgcttaattagctgccttagcgcctctcactcccacctgccgcaatatctcaaatctctggtttttttccagccccggagtttatttccttccctcccccactccagatcttgtccttttcatgcctactcggctgcagtcttcatccatctcccttttagcatttcttggggtggaaaatgctggagaaatagccttgaagtattagagataaaaagtacaccggaagaaatagaaagattgacagtcgatgaagacctcagtgatattgaaagggctgtttatctgctcagtgctggtcaagatgtccaaggaacaagtgtgattgcaaatctcccatttttgatgcgacagaatcccactgagacgcttcggagagtgttgccaaaagtcagagaagccctgcatgttgcaggagtggaaatgcagttaacggctgcgatgtcatttctgaccattctgcaggacgaatcagtgtcaattcatgcatatacccactcattcctccaagtcatt

SEQ ID NO: 16493 - DNA, 564 bp, Homo sapiens
  source 1..564: mol_type = unassigned DNA
agtgccattctgcaactgctgcagccagctgtctgtctgtaattatgaccttacggaagtccggcccagcagaaggaggacttactgctcattaacatcaagggtggccatcactattaagctccctgggtgccactgcatttatgcccattacctctaataatcaccggaattttgcaaggttcacgttggctatgttggggacaactttagaagaggaaaggcagaagcagaggcacccttgatccagacaccggaagaaatagaaagattgacagtcgatgaagacctcagtgatattgaaagggctgtttatctgctcagtgctggtcaagatgtccaaggaacaagtgtgattgcaaatctcccatttttgatgcgacagaatcccactgagacgcttcggagagtgttgccaaaagtcagatgtcttccaaggtccatgaggatgcacacttatttatccagagagtatggatctcacatatgtttgtccagagggtgtgactctgtggaggagaacacttactggaagccctgcatgttgcaggagtggaaatgcag

SEQ ID NO: 16494 - DNA, 680 bp, Homo sapiens
  source 1..680: mol_type = unassigned DNA
gggccgtgctcttgctcccgccgcctggcagcctcacgctcggctccagcggccaagagccggagaaagtcctgctggtgggcggccgcggggctgagggcgtccggcatcccggggccgctccggcccgggcggcgagagtgcccggcggtccatgcatccgccgccgcccgccgccgcgatggatttcagtcagaacagcctgttcggttacatggaggacctgcaggagctcaccatcatcgagaggccggtccgccggagcctcaagacaccggaagaaatagaaagattgacagtcgatgaagacctcagtgatattgaaagggctgtttatctgctcagtgctggtcaagatgtccaaggaacaagtgtgattgcaaatctcccatttttgatgcgacagaatcccactgagacgcttcggagagtgttgccaaaagtcagatgtcttccaaggtccatgaggatgcacacttatttatccagagagtatggatctcacatatgtttgtccagagggtgtgactctgtggaggagaacacttactggaagccctgcatgttgcaggagtggaaatgcagttaacggctgcgatgtcatttctgaccattctgcaggacgaatcagtgtcaattcatgcatatacccactcattcctccaagtcattctcctgca

SEQ ID NO: 16495 - DNA, 589 bp, Homo sapiens
  source 1..589: mol_type = unassigned DNA
gaagccacgatgtgattttcaagctgcagtccaggagctagaaggataaaaacagaaaaatacagccccctccccaaactccccaaaccacccaattagagacctccgtgattgatgtcgcctgacaccggaagaaatagaaagattgacagtcgatgaagacctcagtgatattgaaagggctgtttatctgctcagtgctggtcaagatgtccaaggaacaagtgtgattgcaaatctcccatttttgatgcgacagaatcccactgagacgcttcggagagtgttgccaaaagtcagagaagccctgcatgttgcaggagtggaaatgcagttaacggctgcgatgtcatttctgaccattctgcaggacgaatcagtgtcaattcatgcatatacccactcattcctccaagtcattctcctgcatctggagcacagggacacaggtgtcagcaatgcatggctggaaactcttctgtctgttatagaagtattgccaaaagaaaccctacggcatgagattttgaatccacttgtttccaaggcacaactttcccaaacagtccagtctcgtttagttagttgt

SEQ ID NO: 16496 - DNA, 564 bp, Homo sapiens; identical to SEQ ID NO: 16493
  source 1..564: mol_type = unassigned DNA

SEQ ID NO: 16497 - DNA, 3868 bp, Homo sapiens; identical to SEQ ID NO: 16490
  source 1..3868: mol_type = unassigned DNA

SEQ ID NO: 16498 - DNA, 876 bp, Homo sapiens; identical to SEQ ID NO: 16491
  source 1..876: mol_type = unassigned DNA

SEQ ID NO: 16499 - DNA, 564 bp, Homo sapiens; identical to SEQ ID NO: 16492
  source 1..564: mol_type = unassigned DNA

SEQ ID NO: 16500 - DNA, 589 bp, Homo sapiens; identical to SEQ ID NO: 16495
  source 1..589: mol_type = unassigned DNA

SEQ ID NO: 16501 - DNA, 4035 bp, Homo sapiens
  source 1..4035: mol_type = unassigned DNA
ggagcgcgtgcccgtgcgccgccgccgccattttggagcgatcggagtgccgcccgcggccccgagtcggtctcgagccgccggccggccgtgccggtgtccgtaggcgctgcgccctcggccgggcccatgtgtgtgcggcccgcccgaggccgcccgggctttgcctccaccagcgccctggcctccgctcgggcctccacacgggcctccgaagagctgccgcgacgcccggcccgcagggcaggtaaagagattataaatcttccactgaatgaaaaaaattttcttaaagctgcatatactccaagaaaaaaaccacaaatgtttttctgttttgcctgaatacatgatttaaacaagagatttccacagaagctctgcggccgtcacgatgttctggaagtttgacttgaacaccacgtcccatgttgacaagctgctggacaaggagcatgtgacgctgcaggagttaatggatgaagatgacatcttgcaggagtgtaaggctcagaaccagaagctgctggacttcctgtgcaggcagcagtgcatggaggagctggtgagcctcatcacacaggatccgcccctggacatggaggagaaggtccgcttcaaatatccaaacacagcctgtgagcttctgacttgtgatgtgccgcagatcagcgaccgcctcggtggggacgagagcctgctgagcctcctgtacgacttcttggaccatgagccgcctctcaatcctctgctcgccagttttttcagcaagaccattggcaatctcattgcaagaaaaaccgaacaggtgattacgtttttgaagaagaaggacaagttcatcagcctggtgttgaagcacatcggcacctcagcgcttatggacctgctgctgcgcctggtcagctgtgtggagccagccgggctccggcaggacgtcctgcactggctgaatgaagagaaggtcatccagaggcttgtggagttgatccacccgagccaggatgaagataggcagtcaaatgcttctcagactctctgtgacatagttaggctgggcagagaccagggcagtcagctgcaagaggctctggagccagacccgctcctcacagcgctggagtcgcaggactgtgtggagcagcttctgaagaacatgtttgatggagaccggacggagagctgcctcgtcagtgggactcaggtgttactcaccttgctggaaaccaggcgggttgggacagagggcttggtggactccttttctcagggactggaaaggtcatacgctgtcagcagcagcgtactacacggcatcgagcctcggctgaaggacttccaccagctcctgctcaacccgcccaagaagaaagcgatcctgaccaccattggtgtgctggaggagcccctggggaatgcccgtctgcatggcgcccgcctcatggcagcactgctgcacacaaacacacccagcatcaaccaggagctctgccggctcaacacgatggacttactgctggacttgttctttaagtacacctggaataactttttgcacttccaagtggaactatgcatagccgctattctctcccacgctgcccgtgaggagaggacagaagccagcggatccgagagcagggtggagcctccgcatgagaacgggaaccggagcctggagactccccagccggccgccagcctccctgacaacacaatggtgacccacctgttccagaagtgctgcctggtgcagaggatcctggaggcctgggaagccaacgaccacacgcaggcagcgggtggcatgagacgtgggaacatgggccacctcacacggatcgccaacgcggtggtgcagaacctggagcggggccctgtgcagacgcacatcagcgaggtcatccgagggctccctgcggactgccgtggccgctgggagagcttcgtggaggagacgctgacggagacgaaccgcaggaacactgtggacctggccttctctgactaccagatccagcagatgacagccaacttcgtggatcagtttggcttcaatgatgaggagtttgccgaccaggacgacaacatcaatgccccgtttgacaggatcgcagagatcaacttcaacatcgacgctgacgaggacagtcccagcgcagctctgtttgaggcctgctgcagtgaccgcatccagccctttgatgatgatgaggacgaggacatctgggaggacagtgacactcgctgtgctgcccgggtgatggccagacccaggtttggagccccccatgcttcagagagttgctcaaagaatggcccagagcgtggaggccaggatgggaaggcgagcttggaagcacacagagatgcacctggggcaggtgccccaccggcccccgggaagaaggaagcgccccctgtggagggtgactcagaagcaggcgccatgtggacggcagtgtttgatgagccagcgaactcaacgcccacagccccaggagtggtgagggacgtgggttccagtgtgtgggcagctggcacctcagctccagaggagaaaggctgggccaagttcactgacttccaacctttctgctgctccgagtcagggcccaggtgcagctctccggtggacacagaatgcagccatgctgagggcagccggagccaaggccctgagaaagccttcagcccggcttctccatgtgcctggaacgtgtgtgtcaccaggaaggcccccctgctggcctctgacagtagctcctctgggggctcccacagcgaggatggcgaccagaaggcagcgagtgccatggatgcggtgagcaggggtcccggccgggaggcccccccgctgcccacagtggccaggacagaggaggctgtcggcagggtcgggtgtgctgacagccggctgttaagccctgcctgccccgcgccaaaggaagtgactgctgccccagccgtggctgtgccccccgaggctactgtggccatcaccacagcactgagcaaggctggccccgccatacccaccccagcagtctcttctgcactggccgtggcggtccccctagggcccatcatggcagtcacagcagccccagccatggtggccaccctggggacagtgacaaaggacggacagatgccccgccagaaggagctgccttaaatggcccagtgtgatgctgctgccgcccggccacggcccaccctggtcaggctgcctccttaatcgagaaaactacctggtgatgcaatcttttttttttttaatttaatttaattttaaaataaatgctgcattggtaaagctggcagttgaaaccagttggacggcccagcttgcgtctcttctgcctgagtgggcctctcaggtcactcgtgccctgctggaggacagaggggcacctcagccgcccccaagcccagagcacagcaataaggtcggcctgcaggagccggggtgggggtgggggtggggggggcaggaccctgagatgccaccaggacctgatgggccaggaagggcgtggacatggaggctgtttttacagttttttttttgttgttgttttgtttttaaagaatacagaaggagccaagcttttttgcactttgtatccagctgcaagctcagggcagagtcaagggcctgggttggaaaaacctgactcacaggaatgcataattgacccttgcagctacccaatagcccttggagctggcactgaaccaggctgcaagatttgactgccttaaaaacacaaggccctctaggcctggcagggatgtccctgtgcccagcacagggtgcctggcagggggagaccacaggtatgcaggtggggggacatggtgtggcactaggggctcgaagactggtttctagcactaccggtcacggccatgtcgtcctagaagggtccagaagattattttacgttgagtccatttttaatgttctgatcacctgacagggcaccccaaacccccaactcccaataaaagccgtgacgttcggacaaa

SEQ ID NO: 16502 - DNA, 3304 bp, Homo sapiens
  source 1..3304: mol_type = unassigned DNA
cgccgccgccattttggagcgatcggagtgccgcccgcggccccgagtcggtctcgagccgccggccggccgtgccggtgtccgtaggcgctgcgccctcggccgggcccatgtgtgtgcggcccgcccgaggccgcccgggctttgcctccaccagcgccctggcctccgctcgggcctccacacgggcctccgaagagctgccgcgacgcccggcccgcagggcaggtaaagagattataaatcttccactgaatgaaaaaaattttcttaaagctgcatatactccaagaaaaaaaccacaaatgtttttctgttttgcctgaatacatgatttaaacaagagatttccacagaagctctgcggccgtcacgatgttctggaagtttgacttgaacaccacgtcccatgttgacaagctgctggacaaggagcatgtgacgctgcaggagttaatggatgaagatgacatcttgcaggagtgtaaggctcagaaccagaagctgctggacttcctgtgcaggcagcagtgcatggaggagctggtgagcctcatcacacaggatccgcccctggacatggaggagaaggtccgcttcaaatatccaaacacagcctgtgagcttctgacttgtgatgtgccgcagatcagcgaccgcctcggtggggacgagagcctgctgagcctcctgtacgacttcttggaccatgagccgcctctcaatcctctgctcgccagttttttcagcaagaccattggcaatctcattgcaagaaaaaccgaacaggtgattacgtttttgaagaagaaggacaagttcatcagcctggtgttgaagcacatcggcacctcagcgcttatggacctgctgctgcgcctggtcagctgtgtggagccagccgggctccggcaggacgtcctgcactggctgaatgaagagaaggtcatccagaggcttgtggagttgatccacccgagccaggatgaagataggcagtcaaatgcttctcagactctctgtgacatagttaggctgggcagagaccagggcagtcagctgcaagaggctctggagccagacccgctcctcacagcgctggagtccaggcaggactgtgtggagcagcttctgaagaacatgtttgatggagaccggacggagagctgcctcgtcagtgggactcaggtgttactcaccttgctggaaaccaggcgggttgggacagagggcttggtggactccttttctcagggactggaaaggtcatacgctgtcagcagcagcgtactacacggcatcgagcctcggctgaaggacttccaccagctcctgctcaacccgcccaagaagaaagcgatcctgaccaccattggtgtgctggaggagcccctggggaatgcccgtctgcatggcgcccgcctcatggcagcactgctgcacacaaacacacccagcatcaaccaggagctctgccggctcaacacgatggacttactgctggacttgttctttaagtacacctggaataactttttgcacttccaagtggaactatgcatagccgctattctctcccacgctgcccgtgaggagaggacagaagccagcggatccgagagcagggtggagcctccgcatgagaacgggaaccggagcctggagactccccagccggccgccagcctccctgacaacacaatggtgacccacctgttccagaagtgctgcctggtgcagaggatcctggaggcctgggaagccaacgaccacacgcaggcagcgggtggcatgagacgtgggaacatgggccacctcacacggatcgccaacgcggtggtgcagaacctggagcggggccctgtgcagacgcacatcagcgaggtcatccgagggctccctgcggactgccgtggccgctgggagagcttcgtggaggagacgctgacggagacgaaccgcaggaacactgtggacctggccttctctgactaccagatccagcagatgacagccaacttcgtggatcagtttggcttcaatgatgaggagtttgccgaccaggacgacaacatcaatgccccgtttgacaggatcgcagagatcaacttcaacatcgacgctgacgaggacagtcccagcgcagctctgtttgaggcctgctgcagtgaccgcatccagccctttgatgatgatgaggacgaggacatctgggaggacagtgacactcgctgtgctgcccgggtgatggccagacccaggtttggagccccccatgcttcagagagttgctcaaagaatggcccagagcgtggaggccaggatgggaaggcgagcttggaagcacacagagatgcacctggggcaggtgccccaccggcccccgggaagaaggaagcgccccctgtggagggtgactcagaaggcgccatgtggacggcagtgtttgatgagccagcgaactcaacgcccacagccccaggagtggtgagggacgtgggttccagtgtgtgggcagctggcacctcagctccagaggagaaaggctgggccaagttcactgacttccaacctttctgctgctccgagtcagggcccaggtgcagctctccggtggacacagaatgcagccatgctgagggcagccggagccaaggccctgagaaagccttcagcccggcttctccatgtgcctggaacgtgtgtgtcaccaggaaggcccccctgctggcctctgacagtagctcctctgggggctcccacagcgaggatggcgaccagaaggcagcgagtgccatggatgcggtgagcaggggtcccggccgggaggcccccccgctgcccacagtggccaggacagaggaggctgtcggcagggtcgggtgtgctgacagccggctgttaagccctgcctgccccgcgccaaaggaagtgactgctgccccagccgtggctgtgccccccgaggctactgtggccatcaccacagcactgagcaaggctggccccgccatacccaccccagcagtctcttctgcactggccgtggcggtccccctagggcccatcatggcagtcacagcagccccagccatggtggccaccctggggacagtgacaaaggacgggaagacagatgccccgccagaaggagctgccttaaatggcccagtgtgatgctgctgccgcccggccacggcccaccctggtcaggctgcctccttaatcgagaaaactacctggtgatgcaatcttttttttttttaatttaatttaattttaaaataaatgctgcattggtaaa

SEQ ID NO: 16503 - DNA, 3293 bp, Homo sapiens
  source 1..3293: mol_type = unassigned DNA
ccattttggagcgatcggagtgccgcccgcggccccgagtcggtctcgagccgccggccggccgtgccggtgtccgtaggcgctgcgccctcggccgggcccatgtgtgtgcggcccgcccgaggccgcccgggctttgcctccaccagcgccctggcctccgctcgggcctccacacgggcctccgaagagctgccgcgacgcccggcccgcagggcaggtaaagagattataaatcttccactgaatgaaaaaaattttcttaaagctgcatatactccaagaaaaaaaccacaaatgtttttctgttttgcctgaatacatgatttaaacaagagatttccacagaagctctgcggccgtcacgatgttctggaagtttgacttgaacaccacgtcccatgttgacaagctgctggacaaggagcatgtgacgctgcaggagttaatggatgaagatgacatcttgcaggagtgtaaggctcagaaccagaagctgctggacttcctgtgcaggcagcagtgcatggaggagctggtgagcctcatcacacaggatccgcccctggacatggaggagaaggtccgcttcaaatatccaaacacagcctgtgagcttctgacttgtgatgtgccgcagatcagcgaccgcctcggtggggacgagagcctgctgagcctcctgtacgacttcttggaccatgagccgcctctcaatcctctgctcgccagttttttcagcaagaccattggcaatctcattgcaagaaaaaccgaacaggtgattacgtttttgaagaagaaggacaagttcatcagcctggtgttgaagcacatcggcacctcagcgcttatggacctgctgctgcgcctggtcagctgtgtggagccagccgggctccggcaggacgtcctgcactggctgaatgaagagaaggtcatccagaggcttgtggagttgatccacccgagccaggatgaagataggcagtcaaatgcttctcagactctctgtgacatagttaggctgggcagagaccagggcagtcagctgcaagaggctctggagccagacccgctcctcacagcgctggagtcgcaggactgtgtggagcagcttctgaagaacatgtttgatggagaccggacggagagctgcctcgtcagtgggactcaggtgttactcaccttgctggaaaccaggcgggttgggacagagggcttggtggactccttttctcagggactggaaaggtcatacgctgtcagcagcagcgtactacacggcatcgagcctcggctgaaggacttccaccagctcctgctcaacccgcccaagaagaaagcgatcctgaccaccattggtgtgctggaggagcccctggggaatgcccgtctgcatggcgcccgcctcatggcagcactgctgcacacaaacacacccagcatcaaccaggagctctgccggctcaacacgatggacttactgctggacttgttctttaagtacacctggaataactttttgcacttccaagtggaactatgcatagccgctattctctcccacgctgcccgtgaggagaggacagaagccagcggatccgagagcagggtggagcctccgcatgagaacgggaaccggagcctggagactccccagccggccgccagcctccctgacaacacaatggtgacccacctgttccagaagtgctgcctggtgcagaggatcctggaggcctgggaagccaacgaccacacgcaggcagcgggtggcatgagacgtgggaacatgggccacctcacacggatcgccaacgcggtggtgcagaacctggagcggggccctgtgcagacgcacatcagcgaggtcatccgagggctccctgcggactgccgtggccgctgggagagcttcgtggaggagacgctgacggagacgaaccgcaggaacactgtggacctggccttctctgactaccagatccagcagatgacagccaacttcgtggatcagtttggcttcaatgatgaggagtttgccgaccaggacgacaacatcaatgccccgtttgacaggatcgcagagatcaacttcaacatcgacgctgacgaggacagtcccagcgcagctctgtttgaggcctgctgcagtgaccgcatccagccctttgatgatgatgaggacgaggacatctgggaggacagtgacactcgctgtgctgcccgggtgatggccagacccaggtttggagccccccatgcttcagagagttgctcaaagaatggcccagagcgtggaggccaggatgggaaggcgagcttggaagcacacagagatgcacctggggcaggtgccccaccggcccccgggaagaaggaagcgccccctgtggagggtgactcagaaggcgccatgtggacggcagtgtttgatgagccagcgaactcaacgcccacagccccaggagtggtgagggacgtgggttccagtgtgtgggcagctggcacctcagctccagaggagaaaggctgggccaagttcactgacttccaacctttctgctgctccgagtcagggcccaggtgcagctctccggtggacacagaatgcagccatgctgagggcagccggagccaaggccctgagaaagccttcagcccggcttctccatgtgcctggaacgtgtgtgtcaccaggaaggcccccctgctggcctctgacagtagctcctctgggggctcccacagcgaggatggcgaccagaaggcagcgagtgccatggatgcggtgagcaggggtcccggccgggaggcccccccgctgcccacagtggccaggacagaggaggctgtcggcagggtcgggtgtgctgacagccggctgttaagccctgcctgccccgcgccaaaggaagtgactgctgccccagccgtggctgtgccccccgaggctactgtggccatcaccacagcactgagcaaggctggccccgccatacccaccccagcagtctcttctgcactggccgtggcggtccccctagggcccatcatggcagtcacagcagccccagccatggtggccaccctggggacagtgacaaaggacgggaagacagatgccccgccagaaggagctgccttaaatggcccagtgtgatgctgctgccgcccggccacggcccaccctggtcaggctgcctccttaatcgagaaaactacctggtgatgcaatcttttttttttttaatttaatttaattttaaaataaatgctgcattggtaaa

SEQ ID NO: 16504 - DNA, 3415 bp, Homo sapiens
  source 1..3415: mol_type = unassigned DNA
atatactccaagaaaaaaaccacaaatgtttttctgttttgcctgaatacatgatttaaacaagagatttccacagaagggcgctttcatggaactatatgatcatatgggcaacattctgttgcagtctaccttctgtctgacggatatgccatcctgaaaaaggaaagaagctgaacttcaagttcctttcatttagccttgggcttccaccttctctgtggctagaaacaggaccgtccagaagtcacctgtaactgccctatcttgcaagttctgattttggcaaaaaaaaaaaaaaaaagccttgacaaggttggattcacttctttccctggattgtgtgtcatccaactctgcggccgtcacgatgttctggaagtttgacttgaacaccacgtcccatgttgacaagctgctggacaaggagcatgtgacgctgcaggagttaatggatgaagatgacatcttgcaggagtgtaaggctcagaaccagaagctgctggacttcctgtgcaggcagcagtgcatggaggagctggtgagcctcatcacacaggatccgcccctggacatggaggagaaggtccgcttcaaatatccaaacacagcctgtgagcttctgacttgtgatgtgccgcagatcagcgaccgcctcggtggggacgagagcctgctgagcctcctgtacgacttcttggaccatgagccgcctctcaatcctctgctcgccagttttttcagcaagaccattggcaatctcattgcaagaaaaaccgaacaggtgattacgtttttgaagaagaaggacaagttcatcagcctggtgttgaagcacatcggcacctcagcgcttatggacctgctgctgcgcctggtcagctgtgtggagccagccgggctccggcaggacgtcctgcactggctgaatgaagagaaggtcatccagaggcttgtggagttgatccacccgagccaggatgaagataggcagtcaaatgcttctcagactctctgtgacatagttaggctgggcagagaccagggcagtcagctgcaagaggctctggagccagacccgctcctcacagcgctggagtcgcaggactgtgtggagcagcttctgaagaacatgtttgatggagaccggacggagagctgcctcgtcagtgggactcaggtgttactcaccttgctggaaaccaggcgggttgggacagagggcttggtggactccttttctcagggactggaaaggtcatacgctgtcagcagcagcgtactacacggcatcgagcctcggctgaaggacttccaccagctcctgctcaacccgcccaagaagaaagcgatcctgaccaccattggtgtgctggaggagcccctggggaatgcccgtctgcatggcgcccgcctcatggcagcactgctgcacacaaacacacccagcatcaaccaggagctctgccggctcaacacgatggacttactgctggacttgttctttaagtacacctggaataactttttgcacttccaagtggaactatgcatagccgctattctctcccacgctgcccgtgaggagaggacagaagccagcggatccgagagcagggtggagcctccgcatgagaacgggaaccggagcctggagactccccagccggccgccagcctccctgacaacacaatggtgacccacctgttccagaagtgctgcctggtgcagaggatcctggaggcctgggaagccaacgaccacacgcaggcagcgggtggcatgagacgtgggaacatgggccacctcacacggatcgccaacgcggtggtgcagaacctggagcggggccctgtgcagacgcacatcagcgaggtcatccgagggctccctgcggactgccgtggccgctgggagagcttcgtggaggagacgctgacggagacgaaccgcaggaacactgtggacctggtgagcactcaccaccttcactcctcaagtgaggacgaggacattgagggtgctttccctaacgagctgtcccttcagcaggccttctctgactaccagatccagcagatgacagccaacttcgtggatcagtttggcttcaatgatgaggagtttgccgaccaggacgacaacatcaatgccccgtttgacaggatcgcagagatcaacttcaacatcgacgctgacgaggacagtcccagcgcagctctgtttgaggcctgctgcagtgaccgcatccagccctttgatgatgatgaggacgaggacatctgggaggacagtgacactcgctgtgctgcccgggtgatggccagacccaggtttggagccccccatgcttcagagagttgctcaaagaatggcccagagcgtggaggccaggatgggaaggcgagcttggaagcacacagagatgcacctggggcaggtgccccaccggcccccgggaagaaggaagcgccccctgtggagggtgactcagaaggcgccatgtggacggcagtgtttgatgagccagcgaactcaacgcccacagccccaggagtggtgagggacgtgggttccagtgtgtgggcagctggcacctcagctccagaggagaaaggctgggccaagttcactgacttccaacctttctgctgctccgagtcagggcccaggtgcagctctccggtggacacagaatgcagccatgctgagggcagccggagccaaggccctgagaaagcctcacaggcctcctactttgcagtcagcccggcttctccatgtgcctggaacgtgtgtgtcaccaggaaggcccccctgctggcctctgacagtagctcctctgggggctcccacagcgaggatggcgaccagaaggcagcgagtgccatggatgcggtgagcaggggtcccggccgggaggcccccccgctgcccacagtggccaggacagaggaggctgtcggcagggtcgggtgtgctgacagccggctgttaagccctgcctgccccgcgccaaaggaagtgactgctgccccagccgtggctgtgccccccgaggctactgtggccatcaccacagcactgagcaaggctggccccgccatacccaccccagcagtctcttctgcactggccgtggcggtccccctagggcccatcatggcagtcacagcagccccagccatggtggccaccctggggacagtgacaaaggacgggaagacagatgccccgccagaaggagctgccttaaatggcccagtgtgatgctgctgccgcccggccacggcccaccctggtcaggctgcctccttaatcgagaaaactacctggtgatgcaatcttttttttttttaatttaatttaattttaaaataaatgctgcattggtaaagctggcagttgaaacca

SEQ ID NO: 16505 - DNA, 2199 bp, Homo sapiens
  source 1..2199: mol_type = unassigned DNA
gctggaaaccaggcgggttgggacagagggcttggtggactccttttctcagggactggaaaggtcatacgctgtcagcagcagcgtactacacggcatcgagcctcggctgaaggacttccaccagctcctgctcaacccgcccaagaagaaagcgatcctgaccaccattggtgtgctggaggagcccctggggaatgcccgtctgcatggcgcccgcctcatggcagcactgctgcacacaaacacacccagcatcaaccaggagctctgccggctcaacacgatggacttactgctggacttgttctttaagtacacctggaataactttttgcacttccaagtggaactatgcatagccgctattctctcccacgctgcccgtgaggagaggacagaagccagcggatccgagagcagggtggagcctccgcatgagaacgggaaccggagcctggagactccccagccggccgccagcctccctgacaacacaatggtgacccacctgttccagaagtgctgcctggtgcagaggatcctggaggcctgggaagccaacgaccacacgcaggcagcgggtggcatgagacgtgggaacatgggccacctcacacggatcgccaacgcggtggtgcagaacctggagcggggccctgtgcagacgcacatcagcgaggtcatccgagggctccctgcggactgccgtggccgctgggagagcttcgtggaggagacgctgacggagacgaaccgcaggaacactgtggacctggtgagcactcaccaccttcactcctcaagtgaggacgaggacattgagggtgctttccctaacgagctgtcccttcagcaggccttctctgactaccagatccagcagatgacagccaacttcgtggatcagtttggcttcaatgatgaggagtttgccgaccaggacgacaacatcaatgccccgtttgacaggatcgcagagatcaacttcaacatcgacgctgacgaggacagtcccagcgcagctctgtttgaggcctgctgcagtgaccgcatccagccctttgatgatgatgaggacgaggacatctgggaggacagtgacactcgctgtgctgcccgggtgatggccagacccaggtttggagccccccatgcttcagagagttgctcaaagaatggcccagagcgtggaggccaggatgggaaggcgagcttggaagcacacagagatgcacctggggcaggtgccccaccggcccccgggaagaaggaagcgccccctgtggagggtgactcagaaggcgccatgtggacggcagtgtttgatgagccagcgaactcaacgcccacagccccaggagtggtgagggacgtgggttccagtgtgtgggcagctggcacctcagctccagaggagaaaggctgggccaagttcactgacttccaacctttctgctgctccgagtcagggcccaggtgcagctctccggtggacacagaatgcagccatgctgagggcagccggagccaaggccctgagaaagccttcagcccggcttctccatgtgcctggaacgtgtgtgtcaccaggaaggcccccctgctggcctctgacagtagctcctctgggggctcccacagcgaggatggcgaccagaaggcagcgagtgccatggatgcggtgagcaggggtcccggccgggaggcccccccgctgcccacagtggccaggacagaggaggctgtcggcagggtcgggtgtgctgacagccggctgttaagccctgcctgccccgcgccaaaggaagtgactgctgccccagccgtggctgtgccccccgaggctactgtggccatcaccacagcactgagcaaggctggccccgccatacccaccccagcagtctcttctgcactggccgtggcggtccccctagggcccatcatggcagtcacagcagccccagccatggtggccaccctggggacagtgacaaaggacgggaagacagatgccccgccagaaggagctgccttaaatggcccagtgtgatgctgctgccgcccggccacggcccaccctggtcaggctgcctccttaatcgagaaaactacctggtgatgcaatcttttttttttttaatttaatttaattttaaaataaatgctgcattggtaaagctggcagttgaaacc

SEQ ID NO: 16506 - DNA, 1811 bp, Homo sapiens
  source 1..1811: mol_type = unassigned DNA
cttactgctggacttgttctttaagtacacctggaataactttttgcacttccaagtggaactatgcatagccgctattctctcccacgctgcccgtgaggagaggacagaagccagcggatccgagagcagggtggagcctccgcatgagaacgggaaccggagcctggagactccccagccggccgccagcctccctgacaacacaatggtgacccacctgttccagaagtgctgcctggtgcagaggatcctggaggcctgggaagccaacgaccacacgcaggcagcgggtggcatgagacgtgggaacatgggccacctcacacggatcgccaacgcggtggtgcagaacctggagcggggccctgtgcagacgcacatcagcgaggtcatccgagggctccctgcggactgccgtggccgctgggagagcttcgtggaggagacgctgacggagacgaaccgcaggaacactgtggacctggccttctctgactaccagatccagcagatgacagccaacttcgtggatcagtttggcttcaatgatgaggagtttgccgaccaggacgacaacatcaatgccccgtttgacaggatcgcagagatcaacttcaacatcgacgctgacgaggacagtcccagcgcagctctgtttgaggcctgctgcagtgaccgcatccagccctttgatgatgatgaggacgaggacatctgggaggacagtgacactcgctgtgctgcccgggtgatggccagacccaggtttggagccccccatgcttcagagagttgctcaaagaatggcccagagcgtggaggccaggatgggaaggcgagcttggaagcacacagagatgcacctggggcaggtgccccaccggcccccgggaagaaggaagcgccccctgtggagggtgactcagaagcaggcgccatgtggacggcagtgtttgatgagccagcgaactcaacgcccacagccccaggagtggtgagggacgtgggttccagtgtgtgggcagctggcacctcagctccagaggagaaaggctgggccaagttcactgacttccaacctttctgctgctccgagtcagggcccaggtgcagctctccggtggacacagaatgcagccatgctgagggcagccggagccaaggccctgagaaagccttcagcccggcttctccatgtgcctggaacgtgtgtgtcaccaggaaggcccccctgctggcctctgacagtagctcctctgggggctcccacagcgaggatggcgaccagaaggcagcgagtgccatggatgcggtgagcaggggtcccggccgggaggcccccccgctgcccacagtggccaggacagaggaggctgtcggcagggtcgggtgtgctgacagccggctgttaagccctgcctgccccgcgccaaaggaagtgactgctgccccagccgtggctgtgccccccgaggctactgtggccatcaccacagcactgagcaaggctggccccgccatacccaccccagcagtctcttctgcactggccgtggcggtccccctagggcccatcatggcagtcacagcagccccagccatggtggccaccctggggacagtgacaaaggacgggaagacagatgccccgccagaaggagctgccttaaatggcccagtgtgatgctgctgccgcccggccacggcccaccctggtcaggctgcctccttaatcgagaaaactacctggtgatgcaatcttttttttttttaatttaatttaattttaaaataaatgctgcattggt

SEQ ID NO: 16507 - DNA, 550 bp, Homo sapiens
  source 1..550: mol_type = unassigned DNA
cccaggagtggtgagggacgtgggttccagtgtgtgggcagctggcacctcagctccagaggagaaaggctgggccaagttcactgacttccaacctttctgctggtaacaaatgcgctggcaggagggggctgtgccaggaagtgcctgtcagggccaggaggcacctgtcccccaggactgatcctgtcctcgtccttgtatgcagctccgagtcagggcccaggtgcagctctccggtggacacagaatgcagccatgctgagggcagccggagccaaggccctgagaaagccttcagcccggcttctccatgtgcctggaacgtgtgtgtcaccaggaaggcccccctgctggcctctgacagtagctcctctgggggctcccacagcgaggatggcgaccagaaggcagcgagtgccatggatgcggtgagcaggggtcccggccgggaggcccccccgctgcccacagtggccaggacagaggaggctgtcggcaggtgtgtggggcgtggcgggggcgggcctgccgggtgcatagggcgtgg

SEQ ID NO: 16508 - DNA, 1211 bp, Homo sapiens
  source 1..1211: mol_type = unassigned DNA
ccagtgagccgagatcacgccactgcactccggcctgcgcatgagagagactgactgtcggcaaaaacaaaaccaaaacaaacctttacccacttctcctaaacaacccctaaaaaactgctctgaaaagcagggaatatcattgtgcaaagtaagttgtttttttccacggggctgtctgcgtaaaacttgccacttagagccctgcctgcaccgtcgtcacggcccagcctgcaggtgagcttcctcgcgcccccgcctgacctgagtgcccctccctcagtcagacacagtgtcgtcgccctgcaggaagccagggggcccgtctgctgctcgtggccaggctgggccttggggtgcccgaccccctccagagcaagccccttagatgcccggcagggtcctctctaccctcccatcccctgggaggtttccccagactgtgtccagtgtgaggctgaagttgagatcatagcacaggaggctctggggtccttgaagaatgaggcgcttgatgatgagcaggatctgagtgctgcctggaggaggtttgaggtcatcaatggacaggcagcttgtcccagtacttggaacttggggcagcagagctgcctagctgggcacaacctgggccaccccacaaagggcaggagtgagaggggccaaagatggtgctcccaggccgcctggacctttttgtccagctggtccttgggcatgaggcggggtggcactgagggtgggggtgcccgtaaccggagtccatgtttgccacacagggtcgggtgtgctgacagccggctgttaagccctgcctgccccgcgccaaaggaagtgactgctgccccagccgtggctgtgccccccgaggctactgtggccatcaccacagcactgagcaaggctggccccgccatacccaccccagcagtctcttctgcactggccgtggcggtccccctagggcccatcatggcagtcacagcagccccagccatggtggccaccctggggacagtgacaaaggacgggaagacagatgccccgccagaaggagctgccttaaatggcccagtgtgatgctgctgccgcccggccacggcccaccctggtcaggctgcctccttaatcgagaaaactacctggtgatgcaatcttttttttttttaatttaatttaattttaaaataaatgctgcattggtaaagctg

SEQ ID NO: 16509 - DNA, 4104 bp, Homo sapiens
  source 1..4104: mol_type = unassigned DNA
gtgcgccgccgccgccattttggagcgatcggagtgccgcccgcggccccgagtcggtctcgagccgccggccggccgtgccggtgtccgtaggcgctgcgccctcggccgggcccatgtgtgtgcggcccgcccgaggccgcccgggctttgcctccaccagcgccctggcctccgctcgggcctccacacgggcctccgaagagctgccgcgacgcccggcccgcagggcaggtaaagagattataaatcttccactgaatgaaaaaaattttcttaaagctgcatatactccaagaaaaaaaccacaaatgtttttctgttttgcctgaatacatgatttaaacaagagatttccacagaagctctgcggccgtcacgatgttctggaagtttgacttgaacaccacgtcccatgttgacaagctgctggacaaggagcatgtgacgctgcaggagttaatggatgaagatgacatcttgcaggagtgtaaggctcagaaccagaagctgctggacttcctgtgcaggcagcagtgcatggaggagctggtgagcctcatcacacaggatccgcccctggacatggaggagaaggtccgcttcaaatatccaaacacagcctgtgagcttctgacttgtgatgtgccgcagatcagcgaccgcctcggtggggacgagagcctgctgagcctcctgtacgacttcttggaccatgagccgcctctcaatcctctgctcgccagttttttcagcaagaccattggcaatctcattgcaagaaaaaccgaacaggtgattacgtttttgaagaagaaggacaagttcatcagcctggtgttgaagcacatcggcacctcagcgcttatggacctgctgctgcgcctggtcagctgtgtggagccagccgggctccggcaggacgtcctgcactggctgaatgaagagaaggtcatccagaggcttgtggagttgatccacccgagccaggatgaagataggcagtcaaatgcttctcagactctctgtgacatagttaggctgggcagagaccagggcagtcagctgcaagaggctctggagccagacccgctcctcacagcgctggagtcgcaggactgtgtggagcagcttctgaagaacatgtttgatggagaccggacggagagctgcctcgtcagtgggactcaggtgttactcaccttgctggaaaccaggcgggttgggacagagggcttggtggactccttttctcagggactggaaaggtcatacgctgtcagcagcagcgtactacacggcatcgagcctcggctgaaggacttccaccagctcctgctcaacccgcccaagaagaaagcgatcctgaccaccattggtgtgctggaggagcccctggggaatgcccgtctgcatggcgcccgcctcatggcagcactgctgcacacaaacacacccagcatcaaccaggagctctgccggctcaacacgatggacttactgctggacttgttctttaagtacacctggaataactttttgcacttccaagtggaactatgcatagccgctattctctcccacgctgcccgtgaggagaggacagaagccagcggatccgagagcagggtggagcctccgcatgagaacgggaaccggagcctggagactccccagccggccgccagcctccctgacaacacaatggtgacccacctgttccagaagtgctgcctggtgcagaggatcctggaggcctgggaagccaacgaccacacgcaggcagcgggtggcatgagacgtgggaacatgggccacctcacacggatcgccaacgcggtggtgcagaacctggagcggggccctgtgcagacgcacatcagcgaggtcatccgagggctccctgcggactgccgtggccgctgggagagcttcgtggaggagacgctgacggagacgaaccgcaggaacactgtggacctggtgagcactcaccaccttcactcctcaagtgaggacgaggacattgagggtgctttccctaacgagctgtcccttcagcaggccttctctgactaccagatccagcagatgacagccaacttcgtggatcagtttggcttcaatgatgaggagtttgccgaccaggacgacaacatcaatgccccgtttgacaggatcgcagagatcaacttcaacatcgacgctgacgaggacagtcccagcgcagctctgtttgaggcctgctgcagtgaccgcatccagccctttgatgatgatgaggacgaggacatctgggaggacagtgacactcgctgtgctgcccgggtgatggccagacccaggtttggagccccccatgcttcagagagttgctcaaagaatggcccagagcgtggaggccaggatgggaaggcgagcttggaagcacacagagatgcacctggggcaggtgccccaccggcccccgggaagaaggaagcgccccctgtggagggtgactcagaaggcgccatgtggacggcagtgtttgatgagccagcgaactcaacgcccacagccccaggagtggtgagggacgtgggttccagtgtgtgggcagctggcacctcagctccagaggagaaaggctgggccaagttcactgacttccaacctttctgctgctccgagtcagggcccaggtgcagctctccggtggacacagaatgcagccatgctgagggcagccggagccaaggccctgagaaagccttcagcccggcttctccatgtgcctggaacgtgtgtgtcaccaggaaggcccccctgctggcctctgacagtagctcctctgggggctcccacagcgaggatggcgaccagaaggcagcgagtgccatggatgcggtgagcaggggtcccggccgggaggcccccccgctgcccacagtggccaggacagaggaggctgtcggcagggtcgggtgtgctgacagccggctgttaagccctgcctgccccgcgccaaaggaagtgactgctgccccagccgtggctgtgccccccgaggctactgtggccatcaccacagcactgagcaaggctggccccgccatacccaccccagcagtctcttctgcactggccgtggcggtccccctagggcccatcatggcagtcacagcagccccagccatggtggccaccctggggacagtgacaaaggacgggaagacagatgccccgccagaaggagctgccttaaatggcccagtgtgatgctgctgccgcccggccacggcccaccctggtcaggctgcctccttaatcgagaaaactacctggtgatgcaatcttttttttttttaatttaatttaattttaaaataaatgctgcattggtaaagctggcagttgaaaccagttggacggcccagcttgcgtctcttctgcctgagtgggcctctcaggtcactcgtgccctgctggaggacagaggggcacctcagccgcccccaagcccagagcacagcaataaggtcggcctgcaggagccggggtgggggtgggggtggggggggcaggaccctgagatgccaccaggacctgatgggccaggaagggcgtggacatggaggctgtttttacagttttttttttgttgttgttttgtttttaaagaatacagaaggagccaagcttttttgcactttgtatccagctgcaagctcagggcagagtcaagggcctgggttggaaaaacctgactcacaggaatgcataattgacccttgcagctacccaatagcccttggagctggcactgaaccaggctgcaagatttgactgccttaaaaacacaaggccctctaggcctggcagggatgtccctgtgcccagcacagggtgcctggcagggggagaccacaggtatgcaggtggggggacatggtgtggcactaggggctcgaagactggtttctagcactaccggtcacggccatgtcgtcctagaagggtccagaagattattttacgttgagtccatttttaatgttctgatcacctgacagggcaccccaaacccccaactcccaataaaagccgtgacgttcggacaaa

SEQ ID NO: 16510 - DNA, 4903 bp, Homo sapiens
  source 1..4903: mol_type = unassigned DNA
ccggaggcggagggggcggagccgcgctcacagctgccacccggccgccgggcccaggcagaagccacccgcccgcggccgggcacgcaccgcgcgcagaccttctgcgaacaatgctccggccgggcggctggcggctcggagaccgacggaggggccgggggagcgcagcccagaggaagccgctctgtgacccacctctgaatcccacaaaactgcaccagagagccgggcgcaagatgaaccagcaccctgtcggctcaagatgcaccagaccctctgcctgaaccccgagagcctgaaaatgtctgcgtgcagtgactttgtggagcacatctggaaacccgggtcctgcaagaactgcttctgcctgcggagcgaccaccagctggtggccggccctccccagcccagagcgggcagcctgccccctccaccgcgcctgcctcccaggcctgagaactgccgcctggaagatgaaggtgtgaacagctcaccttactccaagcccacaattgccgtgaagcccaccatgatgagctccgaggcctctgatgtgtggacagaggccaacctgagtgccgaagtctcgcaggtcatctggagacgagcccctggcaagctccccctcccgaagcaggaggatgcccccgtcgtctacctgggcagcttccgaggtgtacagaagcctgctggtccctctacctcccctgatggcaattctcgctgtcccccagcttacaccatggtcggcctgcacaaccttgagccccgcggcgagaggaacattgccttccacccggtgagcttcccggaggagaaggctgtgcacaaagaaaaaccctcatttccttaccaagaccggccctccacccaggagagcttccgccagaaactggctgcctttgctgggaccacatctggctgtcaccagggccctgggcccctgcgggaatccctgccctcggaggatgacagtgatcaaaggtgctcgccctccggggacagcgagggtggagagtactgctccatcctggactgctgccctgggagccctgttgccaaggctgcctcccagactgcaggttcccggggcaggcatggtggcagggactgctcacccacgtgctgggagcaggggaagtgttccgggcccgcagagcaggagaagcggggcccgagcttccccaaggagtgctgtagccagggccccactgcccacccatcctgcctgggccccaagaaactgtccctcacctcggaggctgccatttcttccgacggcctctcttgtggcagcggcagcggcagcggcagcggcgccagtagccccttcgtcccccacctcgagagtgattactgctccctcatgaaggaacctgccccagagaagcagcaggaccctggctgcccaggggtgacccctagcagatgccttgggctgacgggggagccccagcccccggcccacccccgggaggctacacagcctgaacccatctatgctgagagcaccaagaggaagaaggcagctccggtgccttccaagtcacaggccaagatagaacatgcagctgctgcccagggccaaggccaggtatgcacaggtaatgcctgggcccagaaagcagcatctggctggggccgggacagcccagacccaactccccaggtgtcagccaccatcacagtcatggcggcccacccggaagaggaccatcggacgatctacctgagcagccctgactctgcagtgggggtgcagtggccacgagggcctgtgagccagaactccgaggtaggtgaagaggagacttcggctgggcaggggctgagctccagggaaagccatgctcacagtgccagcgagagcaagcccaaggagaggcccgccattccccccaagttgtccaagagtagccctgtagggtccccggtgtcaccgtctgctggagggcccccagtgtcaccgctggctgaccttagtgatgggagctctggcggcagcagcattgggccccagcctccatcccaaggtcctgctgaccccgctccttcctgccggaccaacggtgtcgctatcagtgacccatccaggtgtccccagcctgccgcctcgtcagcctcggaacagaggcggcccaggttccaggcaggcacctggagtcgtcagtgccggatagaggaagaagaggaggtggagcaggaattgctgagtcacagctggggaagagagaccaaaaatggccccacggaccattcaaactccacgacctggcaccgtctccaccccacagatggctcctctgggcagaacagcaaagttgggaccgggatgagcaaatccgcctcttttgcctttgagttccccaaggacagaagtgggattgagacattctcacctcctcctccgcctccaaagtcgcggcaccttctaaaaatgaacaagagcagctctgatttggaaaaagtgagccagggctctgcagaaagcctcagcccatccttcaggggtgtccacgtcagcttcaccaccggctccacggacagcctggcctcagactctaggacctgcagcgatggaggtccctcgtctgagctggctcactcgcccaccaacagcgggaagaagctctttgctcccgttccgtttccttcaggctccactgaggacgtgtcccccagtggcccccagcagccccctccactcccccagaaaaagatagtgagccgggcagcctcttcaccggatggcttcttctggacccaaggctcccccaagcccggaacagcaagccccaagctgaacctaagccactcggaaaccaacgtccacgacgaatctcactttagctattcgttgagccccgggaaccgccaccatcctgtcttctcctcttccgatcctctggagaaagctttcaaaggcagtggccactggcttccggcagcagggctggcgggcaacagaggcggctgcgggagccctggcctccagtgcaaaggggccccctccgcctcatcctcccagctgagcgtgtccagtcaagcctccaccgggagcacccagcttcagctgcacggtctcctgagcaacatcagcagcaaggagggcacctatgccaagctggggggactctacacccagtccctggcccgccttgtagccaaatgtgaggacctcttcatgggcggccagaaaaaggagctccacttcaatgagaataactggtcgctcttcaagctgacttgtaacaagccctgctgtgactcgggggatgccatttattactgtgccacctgctctgaggaccccggcagcacctatgctgtgaaaatctgcaaagcccctgagcccaaaacagtctcctactgcagcccgtccgtgcccgtgcactttaacatccagcaggactgcggccacttcgtcgcctcggtgccgtccagcatgctcagctcccccgacgcgcccaaggaccctgtgcctgccctgcccacacacccccctgcccaggagcaggactgcgtggtggtcatcacccgagaggtgccacatcagaccgcctccgacttcgtgcgggactcggcggccagccaccaggcggagcccgaggcgtacgagcggcgcgtgtgcttcctgcttctgcaactctgcaacgggctggagcacctgaaggagcacgggatcatccaccgggacctgtgcctggagaacctgctgctggtgcactgcaccctccaggccggccccgggcccgcccccgcccccgccccggctcccgcccccgccgccgccgcgcctccctgctcctctgccgccccgcctgctggtggcactctcagccccgcagccggccccgcctccccggaagggccccgggagaagcagctgccccggctcatcatcagcaactttttgaaggccaagcagaagccgggcggcaccccaaacctgcagcagaagaagagccaggcccggctggcccccgagatcgtgtctgcttcccagtaccgcaagttcgatgagttccagacaggcatcctcatctacgagctgctgcaccaacccaacccgttcgaggtgcgcgcccagctgcgggagagagactaccggcaggaggacctgccgccgctgcccgcgctgtccctctactcacccggcctgcagcagctggcacatctgctactggaggccgaccccatcaagcgtatccgcatcggcgaggccaagcgcgtgctgcagtgcctgctgtgggggcctcggcgcgagctggtgcagcagccgggcacctcggaggaggcgctgtgcggcacgctgcacaactggatcgacatgaagcgggccctgatgatgatgaagtttgcggagaaggcggtggatcgcaggcggggcgtggagctggaggactggctttgctgccagtacctggcgtctgcggagcccggggccctcttacagtcgctgaagctcctgcagcttctgtgagccaagccccagcctgcaccgtcgctgccccttccctgcctaaccctttcctgtctcgccttggaagcacccatgtctccctgggaaatggtacagatgactgggatacctggatgtaaaatatataaatatatatatagaaaatacatataccatatataaatatgaaagactaaggatgctgttgcccgtccacactcgtctcctctctgcactaagtcctccctgttttcttctgtaattatacacatttccagttccatgcaacgtcctgaggacagttctgtgaactgaatgcagcctggacactggcctcaataccttgtttaggatttcttcacccttttgtcaaattgttatttaaagaaaaaaaaaaaagaagaaaattccattaaaattttttttggttgagtcatg

SEQ ID NO: 16511 - DNA, 4639 bp, Homo sapiens
  source 1..4639: mol_type = unassigned DNA
atgcaccagaccctctgcctgaaccccgagagcctgaaaatgtctgcgtgcagtgactttgtggagcacatctggaaacccgggtcctgcaagaactgcttctgcctgcggagcgaccaccagctggtggccggccctccccagcccagagcgggcagcctgccccctccaccgcgcctgcctcccaggcctgagaactgccgcctggaagatgaaggtgtgaacagctcaccttactccaagcccacaattgccgtgaagcccaccatgatgagctccgaggcctctgatgtgtggacagaggccaacctgagtgccgaagtctcgcaggtcatctggagacgagcccctggcaagctccccctcccgaagcaggaggatgcccccgtcgtctacctgggcagcttccgaggtgtacagaagcctgctggtccctctacctcccctgatggcaattctcgctgtcccccagcttacaccatggtcggcctgcacaaccttgagccccgcggcgagaggaacattgccttccacccggtgagcttcccggaggagaaggctgtgcacaaagaaaaaccctcatttccttaccaagaccggccctccacccaggagagcttccgccagaaactggctgcctttgctgggaccacatctggctgtcaccagggccctgggcccctgcgggaatccctgccctcggaggatgacagtgatcaaaggtgctcgccctccggggacagcgagggtggagagtactgctccatcctggactgctgccctgggagccctgttgccaaggctgcctcccagactgcaggttcccggggcaggcatggtggcagggactgctcacccacgtgctgggagcaggggaagtgttccgggcccgcagagcaggagaagcggggcccgagcttccccaaggagtgctgtagccagggccccactgcccacccatcctgcctgggccccaagaaactgtccctcacctcggaggctgccatttcttccgacggcctctcttgtggcagcggcagcggcagcggcagcggcgccagtagccccttcgtcccccacctcgagagtgattactgctccctcatgaaggaacctgccccagagaagcagcaggaccctggctgcccaggggtgacccctagcagatgccttgggctgacgggggagccccagcccccggcccacccccgggaggctacacagcctgaacccatctatgctgagagcaccaagaggaagaaggcagctccggtgccttccaagtcacaggccaagatagaacatgcagctgctgcccagggccaaggccaggtatgcacaggtaatgcctgggcccagaaagcagcatctggctggggccgggacagcccagacccaactccccaggtgtcagccaccatcacagtcatggcggcccacccggaagaggaccatcggacgatctacctgagcagccctgactctgcagtgggggtgcagtggccacgagggcctgtgagccagaactccgaggtaggtgaagaggagacttcggctgggcaggggctgagctccagggaaagccatgctcacagtgccagcgagagcaagcccaaggagaggcccgccattccccccaagttgtccaagagtagccctgtagggtccccggtgtcaccgtctgctggagggcccccagtgtcaccgctggctgaccttagtgatgggagctctggcggcagcagcattgggccccagcctccatcccaaggtcctgctgaccccgctccttcctgccggaccaacggtgtcgctatcagtgacccatccaggtgtccccagcctgccgcctcgtcagcctcggaacagaggcggcccaggttccaggcaggcacctggagtcgtcagtgccggatagaggaagaagaggaggtggagcaggaattgctgagtcacagctggggaagagagaccaaaaatggccccacggaccattcaaactccacgacctggcaccgtctccaccccacagatggctcctctgggcagaacagcaaagttgggaccgggatgagcaaatccgcctcttttgcctttgagttccccaaggacagaagtgggattgagacattctcacctcctcctccgcctccaaagtcgcggcaccttctaaaaatgaacaagagcagctctgatttggaaaaagtgagccagggctctgcagaaagcctcagcccatccttcaggggtgtccacgtcagcttcaccaccggctccacggacagcctggcctcagactctaggacctgcagcgatggaggtccctcgtctgagctggctcactcgcccaccaacagcgggaagaagctctttgctcccgttccgtttccttcaggctccactgaggacgtgtcccccagtggcccccagcagccccctccactcccccagaaaaagatagtgagccgggcagcctcttcaccggatggcttcttctggacccaaggctcccccaagcccggaacagcaagccccaagctgaacctaagccactcggaaaccaacgtccacgacgaatctcactttagctattcgttgagccccgggaaccgccaccatcctgtcttctcctcttccgatcctctggagaaagctttcaaaggcagtggccactggcttccggcagcagggctggcgggcaacagaggcggctgcgggagccctggcctccagtgcaaaggggccccctccgcctcatcctcccagctgagcgtgtccagtcaagcctccaccgggagcacccagcttcagctgcacggtctcctgagcaacatcagcagcaaggagggcacctatgccaagctggggggactctacacccagtccctggcccgccttgtagccaaatgtgaggacctcttcatgggcggccagaaaaaggagctccacttcaatgagaataactggtcgctcttcaagctgacttgtaacaagccctgctgtgactcgggggatgccatttattactgtgccacctgctctgaggaccccggcagcacctatgctgtgaaaatctgcaaagcccctgagcccaaaacagtctcctactgcagcccgtccgtgcccgtgcactttaacatccagcaggactgcggccacttcgtcgcctcggtgccgtccagcatgctcagctcccccgacgcgcccaaggaccctgtgcctgccctgcccacacacccccctgcccaggagcaggactgcgtggtggtcatcacccgagaggtgccacatcagaccgcctccgacttcgtgcgggactcggcggccagccaccaggcggagcccgaggcgtacgagcggcgcgtgtgcttcctgcttctgcaactctgcaacgggctggagcacctgaaggagcacgggatcatccaccgggacctgtgcctggagaacctgctgctggtgcactgcaccctccaggccggccccgggcccgcccccgcccccgccccggctcccgcccccgccgccgccgcgcctccctgctcctctgccgccccgcctgctggtggcactctcagccccgcagccggccccgcctccccggaagggccccgggagaagcagctgccccggctcatcatcagcaactttttgaaggccaagcagaagccgggcggcaccccaaacctgcagcagaagaagagccaggcccggctggcccccgagatcgtgtctgcttcccagtaccgcaagttcgatgagttccagacaggcatcctcatctacgagctgctgcaccaacccaacccgttcgaggtgcgcgcccagctgcgggagagagactaccggcaggaggacctgccgccgctgcccgcgctgtccctctactcacccggcctgcagcagctggcacatctgctactggaggccgaccccatcaagcgtatccgcatcggcgaggccaagcgcgtgctgcagtgcctgctgtgggggcctcggcgcgagctggtgcagcagccgggcacctcggaggaggcgctgtgcggcacgctgcacaactggatcgacatgaagcgggccctgatgatgatgaagtttgcggagaaggcggtggatcgcaggcggggcgtggagctggaggactggctttgctgccagtacctggcgtctgcggagcccggggccctcttacagtcgctgaagctcctgcagcttctgtgagccaagccccagcctgcaccgtcgctgccccttccctgcctaaccctttcctgtctcgccttggaagcacccatgtctccctgggaaatggtacagatgactgggatacctggatgtaaaatatataaatatatatatagaaaatacatataccatatataaatatgaaagactaaggatgctgttgcccgtccacactcgtctcctctctgcactaagtcctccctgttttcttctgtaattatacacatttccagttccatgcaacgtcctgaggacagttctgtgaactgaatgcagcctggacactggcctcaataccttgtttaggatttcttcacccttttgtcaaattgttatttaaagaaaaaaaaaaaagaagaaaattccattaaaattttttttggttgagtcatga

SEQ ID NO: 16512 - DNA, 2612 bp, Homo sapiens
  source 1..2612: mol_type = unassigned DNA
gggaagccagacggttaacacagacaaagtgctgccgtgacactcggccctccagtgttgcggagaggcaagagcagcgaccgcggcacctgtccgcccggagctgggacgcgggcgcccgggcggccggacgaagcgaggagggaccgccgaggctgcccccaagtgtaactccagcactgtgaggtttcagggattggcagaggggaccaaggggaccatgaaaatggacatggaggatgcggatatgactctgtggacagaggctgagtttgaagagaagtgtacatacattgtgaacgaccacccctgggattctggtgctgatggcggtacttcggttcaggcggaggcatccttaccaaggaatctgcttttcaagtatgccaccaacagtgaagaggttattggagtgatgagtaaagaatacataccaaagggcacacgttttggacccctaataggtgaaatctacaccaatgacacagttcctaagaacgccaacaggaaatatttttggaggatctattccagaggggagcttcaccacttcattgacggctttaatgaagagaaaagcaactggatgcgctatgtgaatccagcacactctccccgggagcaaaacctggctgcgtgtcagaacgggatgaacatctacttctacaccattaagcccatccctgccaaccaggaacttcttgtgtggtattgtcgggactttgcagaaaggcttcactacccttatcccggagagctgacaatgatgaatctcacacaaacacagagcagtctaaagcaaccgagcactgagaaaaatgaactctgcccaaagaatgtcccaaagagagagtacagcgtgaaagaaatcctaaaattggactccaacccctccaaaggaaaggacctctaccgttctaacatttcacccctcacatcagaaaaggacctcgatgactttagaagacgtgggagccccgaaatgcccttctaccctcgggtcgtttaccccatccgggcccctctgccagaagactttttgaaagcttccctggcctacgggatcgagagacccacgtacatcactcgctcccccattccatcctccaccactccaagcccctctgcaagaagcagccccgaccaaagcctcaagagctccagccctcacagcagccctgggaatacggtgtcccctgtgggccccggctctcaagagcaccgggactcctacgcttacttgaacgcgtcctacggcacggaaggtttgggctcctaccctggctacgcacccctgccccacctcccgccagctttcatcccctcgtacaacgctcactaccccaagttcctcttgcccccctacggcatgaattgtaatggcctgagcgctgtgagcagcatgaatggcatcaacaactttggcctcttcccgaggctgtgccctgtctacagcaatctcctcggtgggggcagcctgccccaccccatgctcaaccccacttctctcccgagctcgctgccctcagatggagcccggaggttgctccagccggagcatcccagggaggtgcttgtcccggcgccccacagtgccttctcctttaccggggccgccgccagcatgaaggacaaggcctgtagccccacaagcgggtctcccacggcgggaacagccgccacggcagaacatgtggtgcagcccaaagctacctcagcagcgatggcagcccccagcagcgacgaagccatgaatctcattaaaaacaaaagaaacatgaccggctacaagacccttccctacccgctgaagaagcagaacggcaagatcaagtacgaatgcaacgtttgcgccaagactttcggccagctctccaatctgaaggtccacctgagagtgcacagtggagaacggcctttcaaatgtcagacttgcaacaagggctttactcagctcgcccacctgcagaaacactacctggtacacacgggagaaaagccacatgaatgccaggtctgccacaagagatttagcagcaccagcaatctcaagacccacctgcgactccattctggagagaaaccataccaatgcaaggtgtgccctgccaagttcacccagtttgtgcacctgaaactgcacaagcgtctgcacacccgggagcggccccacaagtgctcccagtgccacaagaactacatccatctctgtagcctcaaggttcacctgaaagggaactgcgctgcggccccggcgcctgggctgcccttggaagatctgacccgaatcaatgaagaaatcgagaagtttgacatcagtgacaatgctgaccggctcgaggacgtggaggatgacatcagtgtgatctctgtagtggagaaggaaattctggccgtggtcagaaaagagaaagaagaaactggcctgaaagtgtctttgcaaagaaacatggggaatggactcctctcctcagggtgcagcctttatgagtcatcagatctacccctcatgaagttgcctcccagcaacccactacctctggtacctgtaaaggtcaaacaagaaacagttgaaccaatggatccttaagattttcagaaaacacttattt

SEQ ID NO: 16513 - DNA, 5164 bp, Homo sapiens
  source 1..5164: mol_type = unassigned DNA
gggaagccagacggttaacacagacaaagtgctgccgtgacactcggccctccagtgttgcggagaggcaagagcagcgaccgcggcacctgtccgcccggagctgggacgcgggcgcccgggcggccggacgaagcgaggagggaccgccgaggtgcgcgtctgtgcggctcagcctggcgggggacgcggggagaatgtggactgggtagagatgaacgagacttttctcagatgttggatatttgcttggaaaaacgtgtgggtacgaccttggctgcccccaagtgtaactccagcactgtgaggtttcagggattggcagaggggaccaaggggaccatgaaaatggacatggaggatgcggatatgactctgtggacagaggctgagtttgaagagaagtgtacatacattgtgaacgaccacccctgggattctggtgctgatggcggtacttcggttcaggcggaggcatccttaccaaggaatctgcttttcaagtatgccaccaacagtgaagaggttattggagtgatgagtaaagaatacataccaaagggcacacgttttggacccctaataggtgaaatctacaccaatgacacagttcctaagaacgccaacaggaaatatttttggaggatctattccagaggggagcttcaccacttcattgacggctttaatgaagagaaaagcaactggatgcgctatgtgaatccagcacactctccccgggagcaaaacctggctgcgtgtcagaacgggatgaacatctacttctacaccattaagcccatccctgccaaccaggaacttcttgtgtggtattgtcgggactttgcagaaaggcttcactacccttatcccggagagctgacaatgatgaatctcacacaaacacagagcagtctaaagcaaccgagcactgagaaaaatgaactctgcccaaagaatgtcccaaagagagagtacagcgtgaaagaaatcctaaaattggactccaacccctccaaaggaaaggacctctaccgttctaacatttcacccctcacatcagaaaaggacctcgatgactttagaagacgtgggagccccgaaatgcccttctaccctcgggtcgtttaccccatccgggcccctctgccagaagactttttgaaagcttccctggcctacgggatcgagagacccacgtacatcactcgctcccccattccatcctccaccactccaagcccctctgcaagaagcagccccgaccaaagcctcaagagctccagccctcacagcagccctgggaatacggtgtcccctgtgggccccggctctcaagagcaccgggactcctacgcttacttgaacgcgtcctacggcacggaaggtttgggctcctaccctggctacgcacccctgccccacctcccgccagctttcatcccctcgtacaacgctcactaccccaagttcctcttgcccccctacggcatgaattgtaatggcctgagcgctgtgagcagcatgaatggcatcaacaactttggcctcttcccgaggctgtgccctgtctacagcaatctcctcggtgggggcagcctgccccaccccatgctcaaccccacttctctcccgagctcgctgccctcagatggagcccggaggttgctccagccggagcatcccagggaggtgcttgtcccggcgccccacagtgccttctcctttaccggggccgccgccagcatgaaggacaaggcctgtagccccacaagcgggtctcccacggcgggaacagccgccacggcagaacatgtggtgcagcccaaagctacctcagcagcgatggcagcccccagcagcgacgaagccatgaatctcattaaaaacaaaagaaacatgaccggctacaagacccttccctacccgctgaagaagcagaacggcaagatcaagtacgaatgcaacgtttgcgccaagactttcggccagctctccaatctgaaggtccacctgagagtgcacagtggagaacggcctttcaaatgtcagacttgcaacaagggctttactcagctcgcccacctgcagaaacactacctggtacacacgggagaaaagccacatgaatgccaggtctgccacaagagatttagcagcaccagcaatctcaagacccacctgcgactccattctggagagaaaccataccaatgcaaggtgtgccctgccaagttcacccagtttgtgcacctgaaactgcacaagcgtctgcacacccgggagcggccccacaagtgctcccagtgccacaagaactacatccatctctgtagcctcaaggttcacctgaaagggaactgcgctgcggccccggcgcctgggctgcccttggaagatctgacccgaatcaatgaagaaatcgagaagtttgacatcagtgacaatgctgaccggctcgaggacgtggaggatgacatcagtgtgatctctgtagtggagaaggaaattctggccgtggtcagaaaagagaaagaagaaactggcctgaaagtgtctttgcaaagaaacatggggaatggactcctctcctcagggtgcagcctttatgagtcatcagatctacccctcatgaagttgcctcccagcaacccactacctctggtacctgtaaaggtcaaacaagaaacagttgaaccaatggatccttaagattttcagaaaacacttattttgtttcttaagttatgacttggtgagtcagggtgcctgtaggaagtggcttgtacataatcccagctctgcaaagctctctcgacagcaaatggtttcccctcacctctggaattaaagaaggaactccaaagttactgaaatctcagggcatgaacaaggcaaaggccatatatatatatatatatatatctgtatacatattatatatacttatttacacctgtgtctatatatttgcccctgtgtattttgaatatttgtgtggacatgtttgcatagccttcccattactaagactattacctagtcataattattttttcaatgataatccttcataatttattatacaatttatcattcagaaagcaataattaaaaaagtttacaatgactggaaagattccttgtaatttgagtataaatgtatttttgtcttgtggccattctttgtagataatttctgcacatctgtataagtacctaagatttagttaaacaaatatatgacttcagtcaacctctctctctaataatggtttgaaaatgaggtttgggtaattgccaatgttggacagttgatgtgttcattcctgggatcctatcatttgaacagcattgtacataacttgggggtatgtgtgcaggattacccaagaataacttaagtagaagaaacaagaaagggaatcttgtatatttttgttgatagttcatgtttttcccccagccacaattttaccggaagggtgacaggaaggctttaccaacctgtctctccctccaaaagagcagaatcctcccaccgccctgccctccccaccgagtcctgtggccattcagagcggccacatgacttttgcatccattgtattatcagaaaatgtgaagaagaaaaaaatgccatgttttaaaaccactgcgaaaatttccccaaagcataggtggctttgtgtgtgtgcgatttgggggcttgagtctgggtggtgttttgttgttggtttttgttgctttttttttttttttttttttaatgtcaaaattgcacaaacatggtgctctaccaggaaggattcgaggtagataggctcaggccacactttaaaaacaaacacacaaacaacaaaaaacgggtattctagtcatcttggggtaaaagcgggtaatgaacattcctatccccaacacatcaattgtattttttctgtaaaactcagattttcctcagtatttgtgtttttacattttatggttaatttaatggaagatgaaagggcattgcaaagttgttcaacaacagttacctcattgagtgtgtccagtagtgcaggaaatgatgtcttatctaatgatttgcttctctagaggagaaaccgagtaaatgtgctccagcaagatagactttgtgttattctatcttttattctgctaagcccaaagattacatgttggtgttcaaagtgtagcaaaaaatgatgtatatttataaatctatttataccactatatcatatgtatatatatttataaccacttaaattgtgagccaagccatgtaaaagatctactttttctaagggcaaaaaaaaaaaaaaaaaaaaaagaacactcctttctgagactttgcttaatacttggtgacctcacaatcacgtcggtatgattgggcacccttgcctactgtaagagaccctaaaaccttggtgcagtggtggggaccacaaaacaaccagggaggaagagatacatcattttttagtattaaggaccatctaagacagctctattttttttttgccactttatgattatgtggtcacacccaagtcacagaaataaaaaactgactttaccgctgcaatttttctgttttcctccttactaaatactgatacattactccaatctattttataattatatttgacattttgttcacatcaactaatgttcacctgtagaagagaacaaatttcgaataatccagggaaacccaagagccttactggtcttctgtaacttccaagactgacagctttttatgtatcagtgtttgataaacacagtccttaactgaaggtaaaccaaagcatcacgttgacattagaccaaatacttttgattcccaactactcgtttgttctttttctccttttgtgctttcccatagtgagaatttttataaagacttcttgcttctctcaccatccatccttctcttttctgcctcttacatgtgaatgttgagcccacaatcaacagtggttttattttttcctctactcaaagttaaaactgaccaaagttactggctttttactttgctagaacaacaaactatcttatgtttacatactggtttacaatgttatttatgtgcaaattgtcaaaatgtaaattaaatataaatgttcatgctttaccaaaa

SEQ ID NO: 16514 - DNA, 583 bp, Homo sapiens
  source 1..583: mol_type = unassigned DNA
ccttttcagtcttccatgtgagaggatgaaagagagctcgcagcagagggaggaggcagttgttttgaaagttgttttgcgttgggagctggtgggaaagttcggtcttccccatttggaaaaggcaggctgggttccgctcctgcaccacacgcgctttccatttttagcttcattcagaggcagacagagctccttcctcttcctctccttgtttgtgacacttttctgaggcagcttttccacagtgccgagggtctggcggccatgaccccaggcattctgggacactggactgtgtgcccagaacatttttctgccatgagaggctgcccccaagtgtaactccagcactgtgaggtttcagggattggcagaggggaccaaggggaccatgaaaatggacatggaggatgcggatatgactctgtggacagaggctgagtttgaagagaagtgtacatacattgtgaacgaccacccctgggattctggtgctgatggcggtacttcggttcaggcggaggcatccttaccaaggaatctgcttttcaagtatgccaccaacagtgaagaggttatt

SEQ ID NO: 16515 - DNA, 649 bp, Homo sapiens
  source 1..649: mol_type = unassigned DNA
ccctgggattctggtgctgatggcggtacttcggttcaggcggaggcatccttaccaaggaatctgcttttcaagtatgccaccaacagtgaagaggttattggagtgatgagtaaagaatacataccaaagggcacacgttttggacccctaataggtgaaatctacaccaatgacacagttcctaagaacgccaacaggaaatatttttggagggtaagtaagggaaatttcttcagacccattaaatgttaggaaaaaatggagctaaaagagctgggtggctcacctttctcatcctgtgctgagaaatgctggggctcacccataagtatccagcatccccatggacacagggaattctgaacaaatgtgatgaaaccgatgaaatgtctggcctgtaggtggttagtgatggagatacgggctatatgtgaatcttgatttttgcaattcattagagctttgtaatgaaaggaaacagtttgttgcttgctttaaggataggttcatttgcatttctccgcaaggaagtagtaatgagttaccaagccttagatttcacccctttttgatttcttgctgacttaactttaattgaatggaagagttatcacaaatgaattatctttttggttttttttttttt

SEQ ID NO: 16516 - DNA, 583 bp, Homo sapiens
  source 1..583: mol_type = unassigned DNA
aagaggaaaagtgacttctcagtaatagactgtcaaattcgggctgctgcccgagtgttcgctttgttatggcaggtgaagttcacctttgccccacccagtgtttccacaaaaagatctattccagaggggagcttcaccacttcattgacggctttaatgaagagaaaagcaactggatgcgctatgtgaatccagcacactctccccgggagcaaaacctggctgcgtgtcagaacgggatgaacatctacttctacaccattaagcccatccctgccaaccaggaacttcttgtgtggtattgtcgggactttgcagaaaggcttcactacccttatcccggagagctgacaatgatgaatctcacacaaacacagagcagtctaaagcaaccgagcactgagaaaaatgaactctgcccaaagaatgtcccaaagagagagtacagcgtgaaagaaatcctaaaattggactccaacccctccaaaggaaaggacctctaccgttctaacatttcacccctcacatcagaaaaggacctcgatgactttagaagacgtgggagccccgaaatgccctt

SEQ ID NO: 16517 - DNA, 580 bp, Homo sapiens
  source 1..580: mol_type = unassigned DNA
aatcggaactgaagtcagtagcatcgcccatttgccattcactgcagtagcaaaagtagtactctgtggtgggttaatcggtttgaggcagctccttaaatgaacatttgtgtttcatttttctgttattttcccgaacatgaaaagacgataaaactgaaatggaaaagatctattccagaggggagcttcaccacttcattgacggctttaatgaagagaaaagcaactggatgcgctatgtgaatccagcacactctccccgggagcaaaacctggctgcgtgtcagaacgggatgaacatctacttctacaccattaagcccatccctgccaaccaggaacttcttgtgtggtattgtcgggactttgcagaaaggcttcactacccttatcccggagagctgacaatgatgaatctcagtaagtggattacagaacaaaaaaataaaaaatgccagtaatgtcggttctgcccctttgaactaataacatgttgtttaattatacggctttgtcatgtgttggatgaagtaggtggcttaagctagggactaggaagaggaaaaacattttttga

SEQ ID NO: 16518 - DNA, 4675 bp, Homo sapiens
  source 1..4675: mol_type = unassigned DNA
cagtagcatcgcccatttgccattcactgcagtagcaaaagtagtactctgtggtgggttaatcggtttgaggcagctccttaaatgaacatttgtgtttcatttttctgttattttcccgaacatgaaaagacgataaaactgaaatggaaaagatctattccagaggggagcttcaccacttcattgacggctttaatgaagagaaaagcaactggatgcgctatgtgaatccagcacactctccccgggagcaaaacctggctgcgtgtcagaacgggatgaacatctacttctacaccattaagcccatccctgccaaccaggaacttcttgtgtggtattgtcgggactttgcagaaaggcttcactacccttatcccggagagctgacaatgatgaatctcacacaaacacagagcagtctaaagcaaccgagcactgagaaaaatgaactctgcccaaagaatgtcccaaagagagagtacagcgtgaaagaaatcctaaaattggactccaacccctccaaaggaaaggacctctaccgttctaacatttcacccctcacatcagaaaaggacctcgatgactttagaagacgtgggagccccgaaatgcccttctaccctcgggtcgtttaccccatccgggcccctctgccagaagactttttgaaagcttccctggcctacgggatcgagagacccacgtacatcactcgctcccccattccatcctccaccactccaagcccctctgcaagaagcagccccgaccaaagcctcaagagctccagccctcacagcagccctgggaatacggtgtcccctgtgggccccggctctcaagagcaccgggactcctacgcttacttgaacgcgtcctacggcacggaaggtttgggctcctaccctggctacgcacccctgccccacctcccgccagctttcatcccctcgtacaacgctcactaccccaagttcctcttgcccccctacggcatgaattgtaatggcctgagcgctgtgagcagcatgaatggcatcaacaactttggcctcttcccgaggctgtgccctgtctacagcaatctcctcggtgggggcagcctgccccaccccatgctcaaccccacttctctcccgagctcgctgccctcagatggagcccggaggttgctccagccggagcatcccagggaggtgcttgtcccggcgccccacagtgccttctcctttaccggggccgccgccagcatgaaggacaaggcctgtagccccacaagcgggtctcccacggcgggaacagccgccacggcagaacatgtggtgcagcccaaagctacctcagcagcgatggcagcccccagcagcgacgaagccatgaatctcattaaaaacaaaagaaacatgaccggctacaagacccttccctacccgctgaagaagcagaacggcaagatcaagtacgaatgcaacgtttgcgccaagactttcggccagctctccaatctgaaggtccacctgagagtgcacagtggagaacggcctttcaaatgtcagacttgcaacaagggctttactcagctcgcccacctgcagaaacactacctggtacacacgggagaaaagccacatgaatgccaggtctgccacaagagatttagcagcaccagcaatctcaagacccacctgcgactccattctggagagaaaccataccaatgcaaggtgtgccctgccaagttcacccagtttgtgcacctgaaactgcacaagcgtctgcacacccgggagcggccccacaagtgctcccagtgccacaagaactacatccatctctgtagcctcaaggttcacctgaaagggaactgcgctgcggccccggcgcctgggctgcccttggaagatctgacccgaatcaatgaagaaatcgagaagtttgacatcagtgacaatgctgaccggctcgaggacgtggaggatgacatcagtgtgatctctgtagtggagaaggaaattctggccgtggtcagaaaagagaaagaagaaactggcctgaaagtgtctttgcaaagaaacatggggaatggactcctctcctcagggtgcagcctttatgagtcatcagatctacccctcatgaagttgcctcccagcaacccactacctctggtacctgtaaaggtcaaacaagaaacagttgaaccaatggatccttaagattttcagaaaacacttattttgtttcttaagttatgacttggtgagtcagggtgcctgtaggaagtggcttgtacataatcccagctctgcaaagctctctcgacagcaaatggtttcccctcacctctggaattaaagaaggaactccaaagttactgaaatctcagggcatgaacaaggcaaaggccatatatatatatatatatatatctgtatacatattatatatacttatttacacctgtgtctatatatttgcccctgtgtattttgaatatttgtgtggacatgtttgcatagccttcccattactaagactattacctagtcataattattttttcaatgataatccttcataatttattatacaatttatcattcagaaagcaataattaaaaaagtttacaatgactggaaagattccttgtaatttgagtataaatgtatttttgtcttgtggccattctttgtagataatttctgcacatctgtataagtacctaagatttagttaaacaaatatatgacttcagtcaacctctctctctaataatggtttgaaaatgaggtttgggtaattgccaatgttggacagttgatgtgttcattcctgggatcctatcatttgaacagcattgtacataacttgggggtatgtgtgcaggattacccaagaataacttaagtagaagaaacaagaaagggaatcttgtatatttttgttgatagttcatgtttttcccccagccacaattttaccggaagggtgacaggaaggctttaccaacctgtctctccctccaaaagagcagaatcctcccaccgccctgccctccccaccgagtcctgtggccattcagagcggccacatgacttttgcatccattgtattatcagaaaatgtgaagaagaaaaaaatgccatgttttaaaaccactgcgaaaatttccccaaagcataggtggctttgtgtgtgtgcgatttgggggcttgagtctgggtggtgttttgttgttggtttttgttgctttttttttttttttttttttaatgtcaaaattgcacaaacatggtgctctaccaggaaggattcgaggtagataggctcaggccacactttaaaaacaaacacacaaacaacaaaaaacgggtattctagtcatcttggggtaaaagcgggtaatgaacattcctatccccaacacatcaattgtattttttctgtaaaactcagattttcctcagtatttgtgtttttacattttatggttaatttaatggaagatgaaagggcattgcaaagttgttcaacaacagttacctcattgagtgtgtccagtagtgcaggaaatgatgtcttatctaatgatttgcttctctagaggagaaaccgagtaaatgtgctccagcaagatagactttgtgttattctatcttttattctgctaagcccaaagattacatgttggtgttcaaagtgtagcaaaaaatgatgtatatttataaatctatttataccactatatcatatgtatatatatttataaccacttaaattgtgagccaagccatgtaaaagatctactttttctaagggcaaaaaaaaaaaaaaaaaaaaaagaacactcctttctgagactttgcttaatacttggtgacctcacaatcacgtcggtatgattgggcacccttgcctactgtaagagaccctaaaaccttggtgcagtggtggggaccacaaaacaaccagggaggaagagatacatcattttttagtattaaggaccatctaagacagctctattttttttttgccactttatgattatgtggtcacacccaagtcacagaaataaaaaactgactttaccgctgcaatttttctgttttcctccttactaaatactgatacattactccaatctattttataattatatttgacattttgttcacatcaactaatgttcacctgtagaagagaacaaatttcgaataatccagggaaacccaagagccttactggtcttctgtaacttccaagactgacagctttttatgtatcagtgtttgataaacacagtccttaactgaaggtaaaccaaagcatcacgttgacattagaccaaatacttttgattcccaactactcgtttgttctttttctccttttgtgctttcccatagtgagaatttttataaagacttcttgcttctctcaccatccatccttctcttttctgcctcttacatgtgaatgttgagcccacaatcaacagtggttttattttttcctctactcaaagttaaaactgaccaaagttactggctttttactttgctagaacaacaaactatcttatgtttacatactggtttacaatgttatttatgtgcaaattgtcaaaatgtaaattaaatataaatgttcatgctttaccaaaat

SEQ ID NO: 16519 - DNA, 649 bp, Homo sapiens
  source 1..649: mol_type = unassigned DNA
agacgccgcccggcagcagccggcggtcgctccctccctcccagctgctgcagcagagaccggggccatttcgcgaggcggacgggctcctcggcaggctccgattggggtgggagagcggccgccgaggggcccgcagtagctgcgctcccggggaaggagccccacagtccccagatactatcaaatcagcctgggaagcatcttttcgctcagcaagttcaagagaacaaatatgttacaatccttgcctattcttgcctccacttcataatgtcataaaagccacctggggtgtcatttatcaacctctctccagcccactcttccaaaataacactacagtttcctacatgtgtatttttgccaggactccaaagagccttgctaaagtggaacaaggagtagagaattgaactgtgaaaaagaagcccgagattccccagcgacgtggtgttgcagccccgttgaaggagtcaacttgcaggctgttaaagacctcaagtcattagcatcagctgctgcactaaaggggcaagtcagcgcctctaagtggcttagcgcacaaacgaggctcccgagacggcctcggcaactccatcccctcctccaccacccgctggatgtgaaaagctttccggagcccatc

SEQ ID NO: 16520 - DNA, 584 bp, Homo sapiens
  source 1..584: mol_type = unassigned DNA
acgccgcccggcagcagccggcggtcgctccctccctcccagctgctgcagcagagaccggggccatttcgcgaggcggacgggctcctcggcaggctccgattggggtgggagagcggccgccgaggggcccgcagtagctgcgctcccggggaaggagccccacagtccccaggagtagagaattgaactgtgaaaaagaagcccgagattccccagcgacgtggtgttgcagccccgttgaaggagtcaacttgcaggctgttaaagacctcaagtcattagcatcagctgctgcactaaaggggcaagtcagcgcctctaagtggcttagcgcacaaacgaggctcccgagacggcctcggcaactccatcccctcctccaccacccgctggatgtgaaaagctttccggagcccatcttgggggaagcttggtagtgttggcgctcctgaagagagacgacgcccgtttatcacccccaggcaactagctgcgcaaatcagcggtggctccagggctagagaatccctggagctaaccgcacccctctccctttcacggaacgcggactccggggaaat

SEQ ID NO: 16521 - DNA, 395 bp, Homo sapiens
  source 1..395: mol_type = unassigned DNA
ctacagggctggctctgccccggcgtcccgcccccgccccggggaacgctgcctctgccgcaaagatgcccccttccgctggaaagcggtcataaaagccacctggggtgtcatttatcaacctctctccagcccactcttccaaaataacactacagtttcctacatgtgtatttttgccaggactccaaagagccttgctaaagtggaacaagcaaaatcctcccctggcctcctgggactgcagtcaccaggctgtcaaagcctcaataccccactgagttccagagaagggtctcaaagctgggagaggatcaaactaacatggagtagagaattgaactgtgaaaaagaagcccgagattccccagcgacgtggtgttgcagccccgttg

SEQ ID NO: 16522 - DNA, 677 bp, Homo sapiens
  source 1..677: mol_type = unassigned DNA
ggcgtcccgcccccgccccggggaacgctgcctctgccgcaaagatgcccccttccgctggaaagcggtcataaaagccacctggggtgtcatttatcaacctctctccagcccactcttccaaaataacactacagtttcctacatgtgtatttttgccaggactccaaagagccttgctaaagtggaacaaggagtagagaattgaactgtgaaaaagaagcccgagattccccagcgacgtggtgttgcagccccgttgaaggagtcaacttgcaggctgttaaagacctcaagtcattagcatcagctgctgcactaaaggggcaagtcagcgcctctaagtggcttagcgcacaaacgaggctcccgagacggcctcggcaactccatcccctcctccaccacccgctggatgtgaaaagctttccggagcccatcttgggggaagcttggtagtgttggcgctcctgaagagagacgacgcccgtttatcacccccaggcaactagctgcgcaaatcagcggtggctccagggctagagaatccctggagctaaccgcacccctctccctttcacggaacgcggactccggggaaatacgcacggggtccgcacgcgctgggtgtccagctctctgtcacagcttctccaagtgcctagtgaaacggggaa

SEQ ID NO: 16523 - DNA, 3706 bp, Homo sapiens
  source 1..3706: mol_type = unassigned DNA
ggcgtcccgcccccgccccggggaacgctgcctctgccgcaaagatgcccccttccgctggaaagcggtcataaaagccacctggggtgtcatttatcaacctctctccagcccactcttccaaaataacactacagtttcctacatgtgtatttttgccaggactccaaagagccttgctaaagtggaacaaggagtagagaattgaactgtgaaaaagaagcccgagattccccagcgacgtggtgttgcagccccgttgaaggagtcaacttgcaggctgttaaagacctcaagtcattagcatcagctgctgcactaaaggggcaagtcagcgcctctaagtggcttagcgcacaaacgaggctcccgagacggcctcggcaactccatcccctcctccaccacccgctggatgtgaaaagctttccggagcccatcttgggggaagcttggtagtgttggcgctcctgaagagagacgacgcccgtttatcacccccaggcaactagctgcgcaaatcagcggtggctccagggctagagaatccctggagctaaccgcacccctctccctttcacggaacgcggactccggggaaatacgcacggggtccgcacgcgctgggtgtccagctctctgtcacagcttctccaagtgcctagtgaaacggggaaaggccctctccaatcattttggaagagcctaaaaggcggcaacaccaacacctcttgacatggaaatacactgatacaataggcaaaaggaaacactcgattgcatcttcccggttccaggtggccttatttgggagattctatactgaccttattcctgtgatggaggatactggcatccagcgaggcatctgggatggagatgccaaggctgtccaacaatgtctgacagatatttttaccagcgtttacaccacctgcgacatccctgagaatgctatatttggtccctgtgtcctgagccatacttccctatatgacagcatagctttcatagctctcaagtctactgacaagagaacagtaccgtatatctttcgggtagacacctcagcagcaaatggttcctcagaaggtctcatgtggctgcggttggtccaatcggccagagataaggaagagcagaaccttgaagcctacataaaaaacggacagctgttctaccgctctctccgcaggattgccaaagacgaggagttactagtttggtacgggaaagaactgactgagttactcttgctctgcccctctagatcccacaacaaaatgaatgggtcgtccccttacacatgcctggaatgcagccaacgtttccagtttgagttcccctatgtggcgcatctgcgtttccgctgccccaagagacttcacagcgctgatataagtccccaagacgaacaaggcggcggcgtgggcaccaaggaccacgggggcggcggcggcggtggcaaagaccagcagcagcagcagcaggaggcacctttaggcccgggtcccaagttttgcaaagccggccccctccaccactacccatccccctccccggaaagcagcaacccatccgctgccgccggcggcagcagcgcgaagccatccacagacttccacaacctggccagggagctggaaaactcccggggaggcagcagctgctccccagcccagagcctcagcagcggtagcggcagcggcggcggcggcggccaccaggaggcggagctgagtcccgacggcatcgccacgggcggcggcaaaggaaagaggaaattcccggaggaggcggcggagggcggcggtggcgctggtctggtagggggccggggccgcttcgtagagcggcccctcccggcctccaaggaggatctggtgtgcacaccgcagcagtaccgagcctcgggcagctacttcggcctggaagagaacggccgcctcttcgcgccgccaagtcccgagacgggcgaggcgaagcgcagcgccttcgtggaggtgaagaaggctgcccgcgcggccagcctgcaggaggaggggacagccgacggcgcgggagtcgcctccgaggaccaggacgctggcggcggcggcggctcctccacgcccgcggccgcgtcaccggtgggcgccgagaagctgctggccccgcggcctgggggcccgctgcccagccggctcgagggcggcagtcctgcgaggggcagcgccttcacttcggtgccgcagctgggcagcgcgggcagcaccagcggtgggggcggaacgggcgccggggccgcaggcggcgcgggcgggggccagggcgccgcgtcggacgagcgcaaaagcgccttctcgcagccagcacgctctttctcgcagctgtccccgctggtgctgggccagaagctgggcgcgctcgagccatgccaccccgccgacggcgtgggccccaccagactctatcccgccgccgcggaccctctagcggtgaagctccagggggccgcggacctgaacggaggttgcgggtccctgccgagcggcggcggcggcctgcctaagcagagccccttcctgtacgccaccgccttctggcccaagagctccgctgccgctgcagccgcggctgcggcggcggccgcggggcccttgcagctgcagctgccctcggcgctcacgctgctgccgccctccttcacctcgctgtgtctgcccgcgcagaactggtgcgccaagtgcaatgcctccttccgcatgacctccgacctggtgtaccatatgaggtcgcaccacaaaaaggagtatgcgatggagcccttggtgaagcggcggcgagaggagaaactcaagtgccccatctgcaatgagtccttcagggagcgccaccacctctccaggcacatgacctcgcataattgactcggaaaggaccccagctttccacgcgcgcgcaagcacagttaagccacctgcaggaataaacacgcgagaacatccaccgcttccttgcaccccgaaaccctgcacaaagacacatacattcaccgcccccccgcccccccaacgcgcacacacacgtcctctcctcccaggaacctcattcaaatatttacccgggacacacacccccccccacacacacacacagacacactcacacacaagagccaggatggtggagttttgattgggtgggttgtttgagggggttttcttttgaatgcacgcattttcactttccccaaaacaaaggtacattttttaaaatgtcatatattgcaacatattgatgcatttgtcatacgtttctacttaaattattaagcacttacgatttagatgtaataattatatgtaagggcaaaatttattttagatataaagtaaaggaggagggtgagatgctttctgcatttcttgatgacagtttgtgttcctacaaaaataaacaaaatgaataaaaagggatcaccattcaatttgagtttccagggggaagtgcatgtataatgaaatgataatggacttcaatgaagaatgtcatcaattatgtacatatgtattttcttttaatacaaagtgtaattttgtgccagtgaaatggagtctgaatagttatgtgtttcttttatccctggaaatatttattaaactttatagtttatccgagtatgttggatgctttgacaataaatgactattttcttcaaagcaaa

SEQ ID NO: 16524 - DNA, 783 bp, Homo sapiens
  source 1..783: mol_type = unassigned DNA
ccggggaacgctgcctctgccgcaaagatgcccccttccgctggaaagcggtgcctccctgggtgctcgcgaaagcagccctgagaatggcagctctcagaggttgaagtcattcttttcgggggacggggcacggcgactgtttgattgggggcctcgctagaggaatgtgcaaggacagaagggaaactgaggagacccgcaactcattagcgaaataatagggtgcacttcaataaaaatgcggtcctgaagtggagcagactcaccggcaaggagcccggaaaatcgtcaggggcggcggcaaaatactatcaaatcagcctgggaagcatcttttcgctcagcaagttcaagagaacaaatatgttacaatccttgcctattcttgcctccacttcataatgtcataaaagccacctggggtgtcatttatcaacctctctccagcccactcttccaaaataacactacagtttcctacatgtgtatttttgccaggactccaaagagccttgctaaagtggaacaaggagtagagaattgaactgtgaaaaagaagcccgagattccccagcgacgtggtgttgcagccccgttgaaggagtcaacttgcaggctgttaaagacctcaagtcattagcatcagctgctgcactaaaggggcaagtcagcgcctctaagtggcttagcgcacaaacgaggctcccgagacggcctcggcaactccatcccctcctccaccacccgctggatgtgaaaagctttccggagcccatcttg

SEQ ID NO: 16525 - DNA, 2514 bp, Homo sapiens
  source 1..2514: mol_type = unassigned DNA
aaaagcagcatcagacaagagctttattaatcccttacacgagcaaatgcgatctctgacctactagacttgttttcctacaatttcacaaaaagcctcgctagaggaatgtgcaaggacagaagggaaactgaggagacccgcaactcattagcgaaataatagggtgcacttcaataaaaatgcggtcctgaagtggagcagactcaccggcaaggagcccggaaaatcgtcaggggcggcggcaaaatactatcaaatcagcctgggaagcatcttttcgctcagcaagttcaagagaacaaatatgttacaatccttgcctattcttgcctccacttcataatgtcataaaagccacctggggtgtcatttatcaacctctctccagcccactcttccaaaataacactacagtttcctacatgtgtatttttgccaggactccaaagagccttgctaaagtggaacaagcaaaatcctcccctggcctcctgggactgcagtcaccaggctgtcaaagcctcaataccccactgagttccagagaagggtctcaaagctgggagaggatcaaactaacatggagtagagaattgaactgtgaaaaagaagcccgagattccccagcgacgtggtgttgcagccccgttgaaggagtcaacttgcaggctgttaaagacctcaagtcattagcatcagctgctgcactaaaggggcaagtcagcgcctctaagtggcttagcgcacaaacgaggctcccgagacggcctcggcaactccatcccctcctccaccacccgctggatgtgaaaagctttccggagcccatcttgggggaagcttggtagtgttggcgctcctgaagagagacgacgcccgtttatcacccccaggcaactagctgcgcaaatcagcggtggctccagggctagagaatccctggagctaaccgcacccctctccctttcacggaacgcggactccggggaaatacgcacggggtccgcacgcgctgggtgtccagctctctgtcacagcttctccaagtgcctagtgaaacggggaaaggccctctccaatcattttggaagagcctaaaaggcggcaacaccaacacctcttgacatggaaatacactgatacaataggcaaaaggaaacactcgattgcatcttcccggttccaggtggccttatttgggagattctatactgaccttattcctgtgatggaggatactggcatccagcgaggcatctgggatggagatgccaaggctgtccaacaatgtctgacagatatttttaccagcgtttacaccacctgcgacatccctgagaatgctatatttggtccctgtgtcctgagccatacttccctatatgacagcatagctttcatagctctcaagtctactgacaagagaacagtaccgtatatctttcgggtagacacctcagcagcaaatggttcctcagaaggtctcatgtggctgcggttggtccaatcggccagagataaggaagagcagaaccttgaagcctacataaaaaacggacagctgttctaccgctctctccgcaggattgccaaagacgaggagttactagtttggtacgggaaagaactgactgagttactcttgctctgcccctctagatcccacaacaaaatgaatgggtcgtccccttacacatgcctggaatgcagccaacgtttccagtttgagttcccctatgtggcgcatctgcgtttccgctgccccaagagacttcacagcgctgatataagtccccaagacgaacaaggcggcggcgtgggcaccaaggaccacgggggcggcggcggcggtggcaaagaccagcagcagcagcagcaggaggcacctttaggcccgggtcccaagttttgcaaagccggccccctccaccactacccatccccctccccggaaagcagcaacccatccgctgccgccggcggcagcagcgcgaagccatccacagacttccacaacctggccagggagctggaaaactcccggggaggcagcagctgctccccagcccagagcctcagcagcggtagcggcagcggcggcggcggcggccaccaggaggcggagctgagtcccgacggcatcgccacgggcggcggcaaaggaaagaggaaattcccggaggaggcggcggagggcggcggtggcgctggtctggtagggggccggggccgcttcgtagagcggcccctcccggcctccaaggaggatctggtgtgcacaccgcagcagtaccgagcctcgggcagctacttcggcctggaagagaacggccgcctcttcgcgccgccaagtcccgagacgggcgaggcgaagcgcagcgccttcgtggaggtgaagaaggctgcccgcgcggccagcctgcaggaggaggggacagccgacggcgcgggagtcgcctccgaggaccaggacgctggcggcggcggcggctcctccacgcccgcggccgc

SEQ ID NO: 16526 - DNA, 634 bp, Homo sapiens
  source 1..634: mol_type = unassigned DNA
cgctagaggaatgtgcaaggacagaagggaaactgaggagacccgcaactcattagcgaaataatagggtgcacttcaataaaaatgcggtcctgaagtggagcagactcaccggcaaggagcccggaaaatcgtcaggggcggcggcaaaatactatcaaatcagcctgggaagcatcttttcgctcagcaagttcaagagaacaaatatgttacaatccttgcctattcttgcctccacttcataatgtcataaaagccacctggggtgtcatttatcaacctctctccagcccactcttccaaaataacactacagtttcctacatgtgtatttttgccaggactccaaagagccttgctaaagtggaacaagcaaaatcctcccctggcctcctgggactgcagtcaccaggctgtcaaagcctcaataccccactgagttccagagaagggtctcaaagctgggagaggatcaaactaacatggagtagagaattgaactgtgaaaaagaagcccgagattccccagcgacgtggtgttgcagccccgttgaaggagtcaacttgcaggctgttaaagacctcaagtcattagcatcagctgctgcactaaaggggcaagtcagcgcct

SEQ ID NO: 16527 - DNA, 3124 bp, Homo sapiens
  source 1..3124: mol_type = unassigned DNA
gtcactgcatcgggtccatctgtacaactctctccgtttctccgtctctctccctccctccctccctccacccccccaatctttttctccccatctctccatctctctcttatctcttcaggaagagcctaaaaggcggcaacaccaacacctcttgacatggaaatacactgatacaataggcaaaaggaaacactcgattgcatcttcccggttccaggtggccttatttgggagattctatactgaccttattcctgtgatggaggatactggcatccagcgaggcatctgggatggagatgccaaggctgtccaacaatgtctgacagatatttttaccagcgtttacaccacctgcgacatccctgagaatgctatatttggtccctgtgtcctgagccatacttccctatatgacagcatagctttcatagctctcaagtctactgacaagagaacagtaccgtatatctttcgggtagacacctcagcagcaaatggttcctcagaaggtctcatgtggctgcggttggtccaatcggccagagataaggaagagcagaaccttgaagcctacataaaaaacggacagctgttctaccgctctctccgcaggattgccaaagacgaggagttactagtttggtacgggaaagaactgactgagttactcttgctctgcccctctagatcccacaacaaaatgaatgggtcgtccccttacacatgcctggaatgcagccaacgtttccagtttgagttcccctatgtggcgcatctgcgtttccgctgccccaagagacttcacagcgctgatataagtccccaagacgaacaaggcggcggcgtgggcaccaaggaccacgggggcggcggcggcggtggcaaagaccagcagcagcagcagcaggaggcacctttaggcccgggtcccaagttttgcaaagccggccccctccaccactacccatccccctccccggaaagcagcaacccatccgctgccgccggcggcagcagcgcgaagccatccacagacttccacaacctggccagggagctggaaaactcccggggaggcagcagctgctccccagcccagagcctcagcagcggtagcggcagcggcggcggcggcggccaccaggaggcggagctgagtcccgacggcatcgccacgggcggcggcaaaggaaagaggaaattcccggaggaggcggcggagggcggcggtggcgctggtctggtagggggccggggccgcttcgtagagcggcccctcccggcctccaaggaggatctggtgtgcacaccgcagcagtaccgagcctcgggcagctacttcggcctggaagagaacggccgcctcttcgcgccgccaagtcccgagacgggcgaggcgaagcgcagcgccttcgtggaggtgaagaaggctgcccgcgcggccagcctgcaggaggaggggacagccgacggcgcgggagtcgcctccgaggaccaggacgctggcggcggcggcggctcctccacgcccgcggccgcgtcaccggtgggcgccgagaagctgctggccccgcggcctgggggcccgctgcccagccggctcgagggcggcagtcctgcgaggggcagcgccttcacttcggtgccgcagctgggcagcgcgggcagcaccagcggtgggggcggaacgggcgccggggccgcaggcggcgcgggcgggggccagggcgccgcgtcggacgagcgcaaaagcgccttctcgcagccagcacgctctttctcgcagctgtccccgctggtgctgggccagaagctgggcgcgctcgagccatgccaccccgccgacggcgtgggccccaccagactctatcccgccgccgcggaccctctagcggtgaagctccagggggccgcggacctgaacggaggttgcgggtccctgccgagcggcggcggcggcctgcctaagcagagccccttcctgtacgccaccgccttctggcccaagagctccgctgccgctgcagccgcggctgcggcggcggccgcggggcccttgcagctgcagctgccctcggcgctcacgctgctgccgccctccttcacctcgctgtgtctgcccgcgcagaactggtgcgccaagtgcaatgcctccttccgcatgacctccgacctggtgtaccatatgaggtcgcaccacaaaaaggagtatgcgatggagcccttggtgaagcggcggcgagaggagaaactcaagtgccccatctgcaatgagtccttcagggagcgccaccacctctccaggcacatgacctcgcataattgactcggaaaggaccccagctttccacgcgcgcgcaagcacagttaagccacctgcaggaataaacacgcgagaacatccaccgcttccttgcaccccgaaaccctgcacaaagacacatacattcaccgcccccccgcccccccaacgcgcacacacacgtcctctcctcccaggaacctcattcaaatatttacccgggacacacacccccccccacacacacacacagacacactcacacacaagagccaggatggtggagttttgattgggtgggttgtttgagggggttttcttttgaatgcacgcattttcactttccccaaaacaaaggtacattttttaaaatgtcatatattgcaacatattgatgcatttgtcatacgtttctacttaaattattaagcacttacgatttagatgtaataattatatgtaagggcaaaatttattttagatataaagtaaaggaggagggtgagatgctttctgcatttcttgatgacagtttgtgttcctacaaaaataaacaaaatgaataaaaagggatcaccattcaatttgagtttccagggggaagtgcatgtataatgaaatgataatggacttcaatgaagaatgtcatcaattatgtacatatgtattttcttttaatacaaagtgtaattttgtgccagtgaaatggagtctgaatagttatgtgtttcttttatccctggaaatatttattaaactttatagtttatccgagtatgttggatgctttgacaataaatgactattttcttcaaa

SEQ ID NO: 16528 - DNA, 4095 bp, Homo sapiens
  source 1..4095: mol_type = unassigned DNA
aaaagcagcatcagacaagagctttattaatcccttacacgagcaaatgcgatctctgacctactagacttgttttcctacaatttcacaaaaagcctcgctagaggaatgtgcaaggacagaagggaaactgaggagacccgcaactcattagcgaaataatagggtgcacttcaataaaaatgcggtcctgaagtggagcagactcaccggcaaggagcccggaaaatcgtcaggggcggcggcaaaatactatcaaatcagcctgggaagcatcttttcgctcagcaagttcaagagaacaaatatgttacaatccttgcctattcttgcctccacttcataatgtcataaaagccacctggggtgtcatttatcaacctctctccagcccactcttccaaaataacactacagtttcctacatgtgtatttttgccaggactccaaagagccttgctaaagtggaacaagcaaaatcctcccctggcctcctgggactgcagtcaccaggctgtcaaagcctcaataccccactgagttccagagaagggtctcaaagctgggagaggatcaaactaacatggagtagagaattgaactgtgaaaaagaagcccgagattccccagcgacgtggtgttgcagccccgttgaaggagtcaacttgcaggctgttaaagacctcaagtcattagcatcagctgctgcactaaaggggcaagtcagcgcctctaagtggcttagcgcacaaacgaggctcccgagacggcctcggcaactccatcccctcctccaccacccgctggatgtgaaaagctttccggagcccatcttgggggaagcttggtagtgttggcgctcctgaagagagacgacgcccgtttatcacccccaggcaactagctgcgcaaatcagcggtggctccagggctagagaatccctggagctaaccgcacccctctccctttcacggaacgcggactccggggaaatacgcacggggtccgcacgcgctgggtgtccagctctctgtcacagcttctccaagtgcctagtgaaacggggaaaggccctctccaatcattttggaagagcctaaaaggcggcaacaccaacacctcttgacatggaaatacactgatacaataggcaaaaggaaacactcgattgcatcttcccggttccaggtggccttatttgggagattctatactgaccttattcctgtgatggaggatactggcatccagcgaggcatctgggatggagatgccaaggctgtccaacaatgtctgacagatatttttaccagcgtttacaccacctgcgacatccctgagaatgctatatttggtccctgtgtcctgagccatacttccctatatgacagcatagctttcatagctctcaagtctactgacaagagaacagtaccgtatatctttcgggtagacacctcagcagcaaatggttcctcagaaggtctcatgtggctgcggttggtccaatcggccagagataaggaagagcagaaccttgaagcctacataaaaaacggacagctgttctaccgctctctccgcaggattgccaaagacgaggagttactagtttggtacgggaaagaactgactgagttactcttgctctgcccctctagatcccacaacaaaatgaatgggtcgtccccttacacatgcctggaatgcagccaacgtttccagtttgagttcccctatgtggcgcatctgcgtttccgctgccccaagagacttcacagcgctgatataagtccccaagacgaacaaggcggcggcgtgggcaccaaggaccacgggggcggcggcggcggtggcaaagaccagcagcagcagcagcaggaggcacctttaggcccgggtcccaagttttgcaaagccggccccctccaccactacccatccccctccccggaaagcagcaacccatccgctgccgccggcggcagcagcgcgaagccatccacagacttccacaacctggccagggagctggaaaactcccggggaggcagcagctgctccccagcccagagcctcagcagcggtagcggcagcggcggcggcggcggccaccaggaggcggagctgagtcccgacggcatcgccacgggcggcggcaaaggaaagaggaaattcccggaggaggcggcggagggcggcggtggcgctggtctggtagggggccggggccgcttcgtagagcggcccctcccggcctccaaggaggatctggtgtgcacaccgcagcagtaccgagcctcgggcagctacttcggcctggaagagaacggccgcctcttcgcgccgccaagtcccgagacgggcgaggcgaagcgcagcgccttcgtggaggtgaagaaggctgcccgcgcggccagcctgcaggaggaggggacagccgacggcgcgggagtcgcctccgaggaccaggacgctggcggcggcggcggctcctccacgcccgcggccgcgtcaccggtgggcgccgagaagctgctggccccgcggcctgggggcccgctgcccagccggctcgagggcggcagtcctgcgaggggcagcgccttcacttcggtgccgcagctgggcagcgcgggcagcaccagcggtgggggcggaacgggcgccggggccgcaggcggcgcgggcgggggccagggcgccgcgtcggacgagcgcaaaagcgccttctcgcagccagcacgctctttctcgcagctgtccccgctggtgctgggccagaagctgggcgcgctcgagccatgccaccccgccgacggcgtgggccccaccagactctatcccgccgccgcggaccctctagcggtgaagctccagggggccgcggacctgaacggaggttgcgggtccctgccgagcggcggcggcggcctgcctaagcagagccccttcctgtacgccaccgccttctggcccaagagctccgctgccgctgcagccgcggctgcggcggcggccgcggggcccttgcagctgcagctgccctcggcgctcacgctgctgccgccctccttcacctcgctgtgtctgcccgcgcagaactggtgcgccaagtgcaatgcctccttccgcatgacctccgacctggtgtaccatatgaggtcgcaccacaaaaaggagtatgcgatggagcccttggtgaagcggcggcgagaggagaaactcaagtgccccatctgcaatgagtccttcagggagcgccaccacctctccaggcacatgacctcgcataattgactcggaaaggaccccagctttccacgcgcgcgcaagcacagttaagccacctgcaggaataaacacgcgagaacatccaccgcttccttgcaccccgaaaccctgcacaaagacacatacattcaccgcccccccgcccccccaacgcgcacacacacgtcctctcctcccaggaacctcattcaaatatttacccgggacacacacccccccccacacacacacacagacacactcacacacaagagccaggatggtggagttttgattgggtgggttgtttgagggggttttcttttgaatgcacgcattttcactttccccaaaacaaaggtacattttttaaaatgtcatatattgcaacatattgatgcatttgtcatacgtttctacttaaattattaagcacttacgatttagatgtaataattatatgtaagggcaaaatttattttagatataaagtaaaggaggagggtgagatgctttctgcatttcttgatgacagtttgtgttcctacaaaaataaacaaaatgaataaaaagggatcaccattcaatttgagtttccagggggaagtgcatgtataatgaaatgataatggacttcaatgaagaatgtcatcaattatgtacatatgtattttcttttaatacaaagtgtaattttgtgccagtgaaatggagtctgaatagttatgtgtttcttttatccctggaaatatttattaaactttatagtttatccgagtatgttggatgctttgacaataaatgactattttcttcaaagc

SEQ ID NO: 16529 - DNA, 5747 bp, Homo sapiens
  source 1..5747: mol_type = unassigned DNA
ctgggagatcagatcttctagctggctctctgctgccacagctccgccgaagggagggggtggaagaggaggactaaactcagagctgagaggagaggcaggtgtgtgcaggtgcatcacctggatcatgaggtcacccctctgctggctcctcccacttctcatcttggcctcagtggcccaaggccagccaacaagacgaccaagacccgggactgggcccgggcgcagacccaggcccaggcccaggcccacacccagctttcctcagcctgatgaaccagcagagccaacagacctgcctcctcccctccctccaggccctccatctatcttccctgactgtccccgcgaatgctactgcccccctgatttcccatctgccctctactgtgatagccgcaacctgcgaaaggtccctgtcatcccgccccgcatccattacctctatctccagaacaacttcatcactgagctcccggtggagtccttccagaatgccacaggcctgcgatggattaacctggacaacaaccgaatccgcaagatagaccagagggtgctggagaaactgcccggcctggtgttcctctacatggagaagaaccagttggaagaggtcccctcggccctgccccggaacctggagcagctgaggctgagccagaaccacatctccagaatcccgcctggtgtcttcagcaagctggagaacctgctgctcctggatctccagcacaacaggctgagcgacggcgtcttcaagcccgacaccttccatggcctcaagaacctcatgcagctcaacctggcccacaacatcctgagaaagatgccgcccagggtccccaccgccattcaccagctctacctggacagtaacaagattgagaccatccctaacggatacttcaagagctttcccaatcttgccttcattcggcttaactacaacaagctgacagacaggggactccccaagaactcctttaatatctccaacctgcttgtgctccacctgtcccacaacaggatcagcagtgtgcccgccatcaacaacaggctggaacacctgtacctcaacaacaatagcatcgagaaaatcaacggaacccagatttgccccaacgacctagtggcgttccatgacttctcctcggacctggagaacgtgccacacctgcgctacctgcggctggatggaaactacttgaagccgcccatcccgctggacctcatgatgtgcttccgcctcctgcagtccgtggtcatctaggccctactccgccaccggatctgctctgaccgcacttgaaggctggggcccaggcacctgtgccggccattcgttttctctctctccctttctttctcccagctttgcctcccttatcccaccctcgaggcagggaaaagccatctattcttctgcagcctcaggagcgagacttcaaggactcagtttggttccacccagttgaaagacacccagtgcacacccaaactcctggccttctgtggtttccctttgctccagaaacacagatgtgtctaaagacttggtgtccccttctctctcctcccccacccgccactcctgggtacatctgggccgtggactatctgatcttggtcctggccgagcaaacagcccggaggtaaggttcagaaagtccccctggggactcctccatcttcggcagctctggctcaaagaggccgagaaacccagttctcctgggccaaggatcccttctggcaaagctgctgctccgccgcttggttccccggcaccagacatcgccctggccctgctggcccgggtatcgggaaggaggagcgagggaatgacggaggtagggtgcagggtcagggctcccgcaggggcctgcatctggccagcaggacacagggatgcgcagggcgcccccttctgttccagggtgaacatagcacacgccctcctggctgggcctcaggaggaacagccaaggagaagaatggcccaaggaactaggaagcagccatgggagaggggaagggttcaagcccgggatgggcccgcgtgacgtcgatgggtcctgcggcccccttgcccaacctcgggtttagggaggagggttcacagtgtttttgtgggggcgggggaaggaagaggcagccccgcccccgccatctgttctccatcagtgtgcgcggcccagccatttccaccctcgggaggcggctcctgagaaacagggaggaaggggcggagcacctggacgtctcccagaagcccctccacgtttgaaaatgcgcctcctcctcggagacagacgcatcggtgccacctagtggctggtgggagtaacagctggtcccagtcttgcgcctggccctcttcctggggtgattttcctcggtggaggaggcccgtggggtcccaacacggaagagccatgggccgtgtgcatggtgtcgctctcctctagggtctagcgggcacaaacgtccccaggctgggctcattcccatcgtgagtgagcccaggtgaggacatagtcggctcccgtttgttgtaggcccttcccaggtgccttctcagctccctcatctgtaaaccgaggaggtggataagatgctcccggccgggcgcggtggctcacgcctgtaatcccagcactttgggaggccgaggcgggcagattattgcctgagctcaggagttcgaaaccaccctgggcaacatggtgaaacccccgtctctactaaaatacaaaaaaattagccaggcatagtggcgcgcgcctataatcccagctactgggaggctgaggcgggagaatcgcttgagccggggaggcggaggttgcagtgaggcgagattgtgccactgcactccagcttgggcgacagagtgagactccgtctcaaaaaagaaaaaaaaaagatgctcctctgaggtccctccggcgctcatgttccgagtctgcagctccacactttaaatcatactcgaatgcaggacaagtcctaaatatttgccccttcccttgcagtaatttattttctgtatggactgtccctcccccagaggcttccccaccctccattgcctggcccaggtgagcagcttggcaggtctccaagtggaacccggtccagacagggctgcctcgacttcacctttccccctaacttcctccaagggatgctgccccttctcagccccctgcgtgtgtatattggtgggaggcatagaggatggatgttctagaaatgagtaagacacagtgcccacccccaagttaggatgaaaaaagttccagaggtttttaagaaattggattaagctgggtccctaacttcaagaaattcccattatgctccttctcacctttcttttttgctaattatggaaaatagggcccatttcatcatagcctccttcccccgtgctccactacaatcgccgcattctttctagctgcagctggtttcttcaaggctcctgcttaaagtccacacgttattatggccgaaagcaacctggtgcttcggcctggataagagccccttctgcatcttattcacagcttgcagcctcagcccctttgatgaggccctcaggggagaggtcattaccttgatcctgcaaacccagactcgttgagcagcaacgcaatcaccatcatcccactgcccaatctagaatatgtctgctctcctttgctctctgcagctgtaagccagaggggattcaaggtaaataggctttacaggctcccctcctccaaacacacacagaatgggctggtttctttcaagtttaaaaaaagcccccttctccatgcacaagttcattccctccatgctgtcgtcatcgacatatacaggtgtgtacgtaggtgtatgtgtgtactctgcacgtatatctcttctgtcttgaagaccctgttaactttgtgaaataacttccacatttcaacacacttcacagtacaggaaataaagtaatatgaaaaacaccctgcgtgaactcaacggtgtgaacaggtcaagaataacacttcaaagtcatcttgccagccaggcgtggtggatcacgcctgtaatcccagcactctgggaggccaaagcgggcagatcacctgaggtcaggagttcaagaccagcctggccaacatagtgaaaccccttgtttactcaaaatacaaaaattggctgggtgcggtggtacatgcctgtagtcccagctacttgggaggctgaggcaggagaattgcttgaaccctggaggcagaagttgcagtgagccgagatcgcaccactgcactccagcctaggagacaaaacgagacttcatttaaaaaaaataaaaataaaaataaaaataaagtcatcttgccacccaccccctaccattgagccaccatgcccagccccaaagcctcttaattgctctaacaagatgagtggggaaaagattatactcttaagaaattcctacgaaagctatccaaaagccttttctttcctcttttcttattatttttaaatagaggcagggtctcattatgttgcccaggctggtctggaactcctggcctcaagtgatcctcccaccttggcctccccagagtgctgggattacacacgtgagtcaccatgcccagccccaaagccatttcttgaagaatttctcgcaaactcacaaccctcatgaaaaattaatcctcagttccacgagactgcccacccacagacaaaaaaatatatatattcctaaagtcggaccagaaatctgacagctgcctttgaaacccaaagcctcgggttctttcaagctacatgtactaaattgtcgaaggtctcccaggagctctgtactgaggcagacacagaaagacacaaaacggtcgtctttcctgcccaagtaaagcttacagactaactggggagatgtagtgtgcatacaaaacagtaaaagagccatctcaaggacagagagcatagaccaagtcatctggaatggtctacatgccatgcggaagtccaccgaagggttagaacagggtgtcccagactctctcttctgagggaaggttggttgcaaaagtgggattcatgaccctcccaggctacaccatcttctttagaatgagaactgccaggtgacgccctcgctgctcctacctggctactaaacatcgacttcggttcacttcacggatgttcagtggatatcggtcacatgccaggtccccagctacgcattcaaggatggataatatacatagcagcacatccttgaggaactcataccttggtaaagggaaagaaatccatgaatggatacctctgtgtcctaagtgtttgtaataatgctgtgtgtcaggcctctgagcccaagctaagccatcatatcccctgtgacctgcatgtgcacatccagacggctggttcctaccttaactgatgatattccaccacaaaagaagtgaaaatggctggtccctgccttaactgatgacattaccttgtgaaattccttctcctggctcatcctggctcaaaagctcccccactgaacaccttgcaacccccacccctggccaccagagaacaaccccctttgactgtaattttccattacctacccacatcttataaaatggccccatccctatctcccttcgctgactcttttcggactcagcccgcctgcacccaggtgaaataaacagccttgttgctcacacaaa

SEQ ID NO: 16530 - DNA, 4682 bp, Homo sapiens
  source 1..4682: mol_type = unassigned DNA
ggccgttttcagaggtggagtccatcctcaaccagtccttctgctcccgccgccctctgcgcctcctggtggccacgaaggccaaagagatcatcaaaatccccgaccagccggacacactgtgcttccagattcgtggagctgccccaccgtacgtctatgctgtggggagaggctctgaggccatggctgcagggctctgtgctggtcagtgcattctgaaggtcaatggcagcaacgtgatgaacgatggtgcccctgaggtcctggagcacttccaggcattccggagtcggcgcgaagaggccctgggcctgtaccagtggatctaccacacccatgaggatgcccaggaagcacgagccagtcaggaggcctccactgaggaccccagtggcgagcaggcccaggaggaagaccaggctgattcagccttcccactgctgtccctgggtccccggctgagcctgtgtgaggacagccccatggtcaccctgactgtggacaacgtgcacctggaacacggcgtggtgtatgagtatgtgagcacggcaggcgtcaggtgccatgtgctggagaagatcgtggagccccgcggctgcttcggcctcaccgccaagatcctcgaggcctttgctgccaatgacagcgtcttcgtggagaactgcaggcggctcatggccctgagcagcgccatcgtgaccatgccccactttgagttccgcaacatctgtgacaccaagctggagagcattggccagaggattgcctgctaccaggagtttgcagcccaactgaagagcagggtcagcccacccttcaaacaagcccccctggagccccacccgctgtgtggcctggacttctgccccaccaattgccacatcaacctcatggaagtgtcctaccccaagaccaccccctcagtgggcaggtccttcagcatccgctttggacgcaaaccctccctcatcggccttgacccggagcaaggccacctgaaccccatgtcgtacacccagcactgcatcaccaccatggctgctccctcctggaagtgcttgcctgctgcagagggtgatccccaaggccagggtctccatgatggcagcttcgggccagccagtgggacccttggtcaggaagaccggggcctcagcttcctactcaagcaggaggaccgtgagatccaggatgcctacctgcagctcttcaccaagctggatgtggccctgaaggagatgaagcaatatgtcacccagatcaacaggctgctgtccaccatcacagagcccacctcgggtgggtcctgcgacgcatccttggctgaggaggcctcctccctgcccctggtcagtgaagagagcgagatggacaggagtgaccatgggggcatcaagaaggtgtgcttcaaggtggccgaggaggaccaggaggactcaggccacgacaccatgagttatcgcgactcctacagcgagtgtaacagcaatcgagactcggtcctgtcctacaccagcgtgagaagtaacagctcctacttgggcagcgacgagatggggtctggagatgagctgccctgtgacatgcggatcccatctgacaagcaggacaagcttcatggctgcctggagcacctctttaaccaggtggactccatcaatgctctcctcaaggggccagtcatgagccgggctttcgaagagaccaagcatttccctatgaaccacagcttacaagagtttaaacagaaagaagagtgtacaatccgtggccggagcctgatccagattagcatccaggaggacccctggaacctccccaactccatcaagaccctggtggacaacattcagagatatgtggaagatgggaagaaccagctgctcctggccttgctgaagtgcacagacacggagctgcagctgcgcagagacgcgatcttctgccaggccctggtggccgccgtgtgcaccttctccaagcagctgctggcggccctgggctaccgctacaacaacaatggcgagtacgaggagagcagccgcgacgccagccgcaagtggctggagcaggtggcggccacgggcgtcctgctgcactgccagtccctgctctcgccagccacagtgaaggaggaacggaccatgctggaggacatctgggtgacgctgtcagagctggacaatgtcaccttctcctttaagcagctggacgagaactatgtggccaacaccaacgtcttctaccacattgagggcagccggcaggcgctgaaggtcatcttctacctcgacagctaccacttctccaagctgccctcccgcctggagggtggggccagcctgaggctgcacacagcgctgttcacgaaaggtgagcttcaggcctggggcagggaggaccacgggggccgggccaaggccaccaagcacaccggctcccaaccgcctgcccgcccccgacatctcccctcccagtgctggagaacgtggaggggctgccttctccaggcagccaggccgcggaggatttgcagcaggacatcaacgcgcagtccctggagaaagttcagcagtattaccgcaaactcagggcattttacctggagcggtctaacctgcccacggatgccagcaccacggcggtaaagatagaccagctgatccgccccatcaatgccctggatgagctctgccgcctcatgaagtcctttgtccacccaaagcctggtgctgctgggagtgtgggcgccggcctcatccccatctcctcggagctctgctaccgcctgggggcctgccagatggtcatgtgtggcacaggcatgcagaggagcaccctgagcgtgtccctggagcaggcggccatcttggcacggagccacgggttgctgcccaagtgcatcatgcaggccacggacatcatgcggaagcagggcccaagggtggagattctggccaaaaacctgcgagtcaaggaccagatgccccagggtgctccgcgcctctaccgcctctgccagccgccggtggatggggacctctgaacacccaaatgccccacgctgggccgcggcctctggagctgggatttgggaggacacagcaggcagcgctggccttctccagggatggcccaaggcttccgcagccgcccgttccgggacctgcccagcgtcctccctgcctccttccgggacaagcctggccaccctcgctgtgatgacgagctggctgattggccctgggccggcccattcttcacacgcctgccagaagctggaggggtgctggagacccatagagctgatgggagcagctggtgcctggccttcggctcctgcgtccccagaacccaagggaacgtcatggaggccacatggggccacccggctccctcgggatggctccgcctgcacttttgaaaccccggtttccttcaacgtccacattccaggtgaccacacgtgtctcctcctcctcatcttagcttccaggttcaccctaaccctgtactaacctgcttggtggacttggaaaagacttggctctgtcgggaaaggagagacggggcctccatcacgcctgttaccagaggatccccgagagccacaccagctctggacatcaccgcccctggaactggggccaccagccctgggcacgagatttgctctgactttatttatatggcatgaaatctctggtttattttgggattttttgttgttggtgttgtcaaagtttgttttttctaaagttgtgtgattatatatttgacattttacatttcaaagaaaggtatgttgtctaacaggggaccaacagaaggtagtattgacaactgttcctgcttctactaaaaaaaaaagagcacaaaagaaaaactaaattattgaaaaattaaaaaatgtcattgtttcctgtttgttaatattagggttgtaaggtgtcgttttgaggtatcgactgtgattccttcccccaccctccattctccagcggttggccggtgttagaactcgctctctttgagtgactggctacaagggcctgagaggtggccagccagggttggagctggaggggatggagccccacctgaggtgccgtgtcacacgggttagagggtcactgggaaacaccgggcggtggcttctgtgatttattttcttgatggtaacttctcagagcagggcgattgggacatcaccagccagagcacaggaagccaccctgcctgctggggaggagggacccacacaagccccctcggcagtttgtccccccagcttcggtatgccttcagggaaaggtcacagctggggaggaagcggggggacgcctgtcacccctggcaggtggtgagttcaggtgggggctccctgctgcccccaggcctgggagcttgaagccctcccggcatctggcatccgagcctcccgccctccagggtgcgcttccctctcttgccgcagcatacacgagggcaggcagtggccttgtcactgtatcttgcatcagagacaaaggaggacccgctttagccctgctgcgggaaatgggggagggcccagggccagcgcattgtgcactggtttactttaaaatgtacagattcttctcgttaaattcttgatagattttttattattattaaaagtcagtttataatacaaa

SEQ ID NO: 16531 - DNA, 6636 bp, Homo sapiens
  source 1..6636: mol_type = unassigned DNA
cggcgccgcgcggccgcgctagaatggaggcgcccagcggcagcgagcccggcggcgacggggccggggactgcgcccacccggacccccgggcccctggcgccgcggcgcccagctccggccccggcccgtgcgcggccgcccgggagtccgagcgccagctgcgcctccgcctctgcgtcctcaacgagatcttgggcaccgagagggactacgtgggcaccttgcgcttcttgcagtcggcattcctgcatcgcatccggcagaacgtggccgactcagtggagaagggcctcacggaggagaatgtcaaggtcctgttctcgaacatcgaagacatcctggaagttcataaggatttcttggccgccttggagtattgtttacacccggagccgcagtctcagcatgaacttgggaatgttttcttaaaattcaaggacaagttctgcgtgtacgaggagtattgcagcaaccatgagaaagccctgaggctgctggtggagctgaacaagatccctaccgtgcgcgccttccttttgagctgcatgcttctgggaggccggaagaccacggacatccctttggaaggctacctgttgtctccgatccagaggatctgcaagtacccgctcctccttaaggagctggccaagaggactcccggcaagcacccagaccaccccgcggtccagagtgccctgcaggccatgaagaccgtttgctccaacatcaatgagaccaagcggcagatggagaagctggaagccctggagcagctgcagtcccacatcgaaggctgggagggttccaacctcacagacatctgcactcagctcctcctgcaagggactttgttaaagatctctgcgggcaacatccaggaaagggccttcttcctcttcgacaaccttctcgtctactgcaagcggaaatccagggtcaccgggagcaagaagtccaccaagaggaccaaatccatcaacggctccctctacatcttcaggggtcgaatcaacactgaagtcatggaggtggagaatgtggaagatgggacagcggattaccatagcaacggctataccgtcaccaacggctggaagatccacaacacggccaagaataagtggtttgtctgcatggccaagacggcagaggagaagcagaagtggctggatgccatcatccgcgagcgggagcagcgcgagagcctgaagctgggcatggagcgtgatgcctacgtcatgattgcggagaagggggagaagctgtaccacatgatgatgaacaagaaggtgaacctcatcaaggaccgccggagaaagctgagcactgtccccaagtgctttcttggcaatgagttcgttgcctggctcctagaaattggtgaaatcagcaagacggaagaaggagtcaacttgggccaagccctgttggagaatggcatcatccaccatgtttccgacaagcaccagttcaagaatgagcaggtgatgtatcgcttccgctacgacgatggcacctacaaggcccgaagtgagctggaggacatcatgtccaagggtgtgaggctttactgccgtcttcacagcctctacaccccggtgatcaaagaccgtgattaccacctgaagacctacaagtcagtgcttcccgggagcaagctggtggactggctgctggctcagggagactgccagactcgggaggaggcagtggcgctcggcgtgggtctgtgcaacaatggcttcatgcaccacgtgctggagaagagcgagttcagggatgagtcccagtacttccgctttcatgctgacgaggagatggaggggaccagcagcaagaacaaacagcttcgcaacgacttcaagctggtggagaacattctggccaagcgcctgctgatcctgccccaggaggaggactatggctttgacatcgaggagaagaacaaggctgtggtggtgaagtccgtccagaggggctcgctggctgaggtggctggcctgcaggtggggaggaagatctactccatcaatgaggacctggtgttcctgcggccgttttcagaggtggagtccatcctcaaccagtccttctgctcccgccgccctctgcgcctcctggtggccacgaaggccaaagagatcatcaaaatccccgaccagccggacacactgtgcttccagattcgtggagctgccccaccgtacgtctatgctgtggggagaggctctgaggccatggctgcagggctctgtgctggtcagtgcattctgaaggtcaatggcagcaacgtgatgaacgatggtgcccctgaggtcctggagcacttccaggcattccggagtcggcgcgaagaggccctgggcctgtaccagtggatctaccacacccatgaggatgcccaggaagcacgagccagtcaggaggcctccactgaggaccccagtggcgagcaggcccaggaggaagaccaggctgattcagccttcccactgctgtccctgggtccccggctgagcctgtgtgaggacagccccatggtcaccctgactgtggacaacgtgcacctggaacacggcgtggtgtatgagtatgtgagcacggcaggcgtcaggtgccatgtgctggagaagatcgtggagccccgcggctgcttcggcctcaccgccaagatcctcgaggcctttgctgccaatgacagcgtcttcgtggagaactgcaggcggctcatggccctgagcagcgccatcgtgaccatgccccactttgagttccgcaacatctgtgacaccaagctggagagcattggccagaggattgcctgctaccaggagtttgcagcccaactgaagagcagggtcagcccacccttcaaacaagcccccctggagccccacccgctgtgtggcctggacttctgccccaccaattgccacatcaacctcatggaagtgtcctaccccaagaccaccccctcagtgggcaggtccttcagcatccgctttggacgcaaaccctccctcatcggccttgacccggagcaaggccacctgaaccccatgtcgtacacccagcactgcatcaccaccatggctgctccctcctggaagtgcttgcctgctgcagagggtgatccccaaggccagggtctccatgatggcagcttcgggccagccagtgggacccttggtcaggaagaccggggcctcagcttcctactcaagcaggaggaccgtgagatccaggatgcctacctgcagctcttcaccaagctggatgtggccctgaaggagatgaagcaatatgtcacccagatcaacaggctgctgtccaccatcacagagcccacctcgggtgggtcctgcgacgcatccttggctgaggaggcctcctccctgcccctggtcagtgaagagagcgagatggacaggagtgaccatgggggcatcaagaaggtgtgcttcaaggtggccgaggaggaccaggaggactcaggccacgacaccatgagttatcgcgactcctacagcgagtgtaacagcaatcgagactcggtcctgtcctacaccagcgtgagaagtaacagctcctacttgggcagcgacgagatggggtctggagatgagctgccctgtgacatgcggatcccatctgacaagcaggacaagcttcatggctgcctggagcacctctttaaccaggtggactccatcaatgctctcctcaaggggccagtcatgagccgggctttcgaagagaccaagcatttccctatgaaccacagcttacaagagtttaaacagaaagaagagtgtacaatccgtggccggagcctgatccagattagcatccaggaggacccctggaacctccccaactccatcaagaccctggtggacaacattcagagatatgtggaagatgggaagaaccagctgctcctggccttgctgaagtgcacagacacggagctgcagctgcgcagagacgcgatcttctgccaggccctggtggccgccgtgtgcaccttctccaagcagctgctggcggccctgggctaccgctacaacaacaatggcgagtacgaggagagcagccgcgacgccagccgcaagtggctggagcaggtggcggccacgggcgtcctgctgcactgccagtccctgctctcgccagccacagtgaaggaggaacggaccatgctggaggacatctgggtgacgctgtcagagctggacaatgtcaccttctcctttaagcagctggacgagaactatgtggccaacaccaacgtcttctaccacattgagggcagccggcaggcgctgaaggtcatcttctacctcgacagctaccacttctccaagctgccctcccgcctggagggtggggccagcctgaggctgcacacagcgctgttcacgaaagtgctggagaacgtggaggggctgccttctccaggcagccaggccgcggaggatttgcagcaggacatcaacgcgcagtccctggagaaagttcagcagtattaccgcaaactcagggcattttacctggagcggtctaacctgcccacggatgccagcaccacggcggtaaagatagaccagctgatccgccccatcaatgccctggatgagctctgccgcctcatgaagtcctttgtccacccaaagcctggtgctgctgggagtgtgggcgccggcctcatccccatctcctcggagctctgctaccgcctgggggcctgccagatggtcatgtgtggcacaggcatgcagaggagcaccctgagcgtgtccctggagcaggcggccatcttggcacggagccacgggttgctgcccaagtgcatcatgcaggccacggacatcatgcggaagcagggcccaagggtggagattctggccaaaaacctgcgagtcaaggaccagatgccccagggtgctccgcgcctctaccgcctctgccagccgccggtggatggggacctctgaacacccaaatgccccacgctgggccgcggcctctggagctgggatttgggaggacacagcaggcagcgctggccttctccagggatggcccaaggcttccgcagccgcccgttccgggacctgcccagcgtcctccctgcctccttccgggacaagcctggccaccctcgctgtgatgacgagctggctgattggccctgggccggcccattcttcacacgcctgccagaagctggaggggtgctggagacccatagagctgatgggagcagctggtgcctggccttcggctcctgcgtccccagaacccaagggaacgtcatggaggccacatggggccacccggctccctcgggatggctccgcctgcacttttgaaaccccggtttccttcaacgtccacattccaggtgaccacacgtgtctcctcctcctcatcttagcttccaggttcaccctaaccctgtactaacctgcttggtggacttggaaaagacttggctctgtcgggaaaggagagacggggcctccatcacgcctgttaccagaggatccccgagagccacaccagctctggacatcaccgcccctggaactggggccaccagccctgggcacgagatttgctctgactttatttatatggcatgaaatctctggtttattttgggattttttgttgttggtgttgtcaaagtttgttttttctaaagttgtgtgattatatatttgacattttacatttcaaagaaaggtatgttgtctaacaggggaccaacagaaggtagtattgacaactgttcctgcttctactaaaaaaaaaagagcacaaaagaaaaactaaattattgaaaaattaaaaaatgtcattgtttcctgtttgttaatattagggttgtaaggtgtcgttttgaggtatcgactgtgattccttcccccaccctccattctccagcggttggccggtgttagaactcgctctctttgagtgactggctacaagggcctgagaggtggccagccagggttggagctggaggggatggagccccacctgaggtgccgtgtcacacgggttagagggtcactgggaaacaccgggcggtggcttctgtgatttattttcttgatggtaacttctcagagcagggcgattgggacatcaccagccagagcacaggaagccaccctgcctgctggggaggagggacccacacaagccccctcggcagtttgtccccccagcttcggtatgccttcagggaaaggtcacagctggggaggaagcggggggacgcctgtcacccctggcaggtggtgagttcaggtgggggctccctgctgcccccaggcctgggagcttgaagccctcccggcatctggcatccgagcctcccgccctccagggtgcgcttccctctcttgccgcagcatacacgagggcaggcagtggccttgtcactgtatcttgcatcagagacaaaggaggacccgctttagccctgctgcgggaaatgggggagggcccagggccagcgcattgtgcactggtttactttaaaatgtacagattcttctcgttaaattcttgatagattttttattattattaaaagtcagtttataatacaaa

SEQ ID NO: 16532 - DNA, 478 bp, Homo sapiens
  source 1..478: mol_type = unassigned DNA
gaaacagtagcagtgctttacaatcttgtcatgcgttagtgcctgttgtccattttgcagatgaagaaactgaggctcagagaggtcaggtgatttgccctgtggctcacagccaggacctggtcttcagactccacatcccttgtgggtttggagttctgtagctgtatccccctcttaggaaagtgctggggatggtgtgaggtggggcaggaatgactgatggctgctgcttctacctcctgccaggagatgagctgccctgtgacatgcggatcccatctgacaagcaggacaagcttcatggctgcctggagcacctctttaaccaggtggactccatcaatgctctcctcaaggggccagtcatgagccgggctttcgaagagaccaagcatttccctatgaaccacagcttacaaggtgaggggatagccagtccaaggtgacagcctgcgatggggaagggtgttagaca

SEQ ID NO: 16533 - DNA, 362 bp, Homo sapiens
  source 1..362: mol_type = unassigned DNA
gaagatgggacaggtagcccctcccccagccttgcctgagccctgcctgagccctgcctgctccctggcactctctctgtttcatttaaatatatttttttcttttatcatgagatgtaatctacctacagaaaagtgcccagagcatagatgcatgaagcgaacatctgggtggttagcattcaagttaagaaataaaacactgcaccccaaatccttcctccttgcaatgccttcttccccctagaagtaaccactgtctgaattttgtgatgatcattttcttgctttttaaagacatttttacctcctaagcatttatgactaaacattttaattaaaatttctatttttgagcctta

SEQ ID NO: 16534 - DNA, 10750 bp, Homo sapiens
  source 1..10750: mol_type = unassigned DNA
gccagagcagcggggccgggcgcgcagggcctggccggagcccccactcccaggagtttcctctgcagagccccgcgccccccgcgccgggatttcagcccgatcccctcctctccctgcgcccagcctctccccagcatgtaaagtcttctgtctctcctcggagttggcggaggcggcaactttccattctcgccgccgggggccgggcagcagcgggcgcgcgggtcagcgctcagcacggcgggcagcgccgcgctgcgcaccgccgccgaccatgagcgaggacagccgcggagacagccgcgccgagagcgccaaggacctggagaagcagcttcgcctgcgcgtgtgcgtgctcagcgagctccagaagaccgagcgggactatgtgggcacgctggagttcctggtgtcggcattcttacacagaatgaaccagtgtgcagcatcaaaagttgacaaaaatgtgacagaagaaacagtgaagatgttgttctcaaacattgaagacatccttgcagtacataaagaattcttaaaagtcgtggaagaatgcttacaccccgaacctaatgctcaacaagaagtgggaacctgctttcttcactttaaagacaagtttcgtatctatgatgaatattgtagtaaccatgagaaggcacaaaaattacttcttgaactcaacaaaataagaacaatccggacatttcttttgaactgcatgctgcttggaggacggaagaacacagatgttcccttggaaggatatttagtaacaccaatacaaagaatatgcaagtaccctcttattttgaaggagttgctgaagcggactccacggaaacacagtgactatgcagcagtgatggaagccctccaagccatgaaagctgtctgttccaacataaacgaggccaagagacagatggagaagttagaagttttagaggaatggcagtctcacattgaaggctgggaggggtccaacatcactgacacctgcactgaaatgctaatgtgtggagtcttactgaaaatttcttctggaaatattcaagaacgggtgttttttcttttcgataatcttttggtgtactgcaaaagaaaacacagacggttgaagaacagcaaggcatctacagatggacatcggtacctttttcgtggccggatcaacacggaggtgatggaagtggagaatgtggatgatggcaccgctgatttccatagcagtggacacattgttgttaatggatggaagatacataacacagcaaaaaataaatggtttgtttgtatggcaaaaacacctgaagagaagcatgaatggtttgaagctattttgaaagaaagagaacggcggaaaggtttaaaattaggaatggagcaagatacctgggtcatgatctctgaacagggtgagaaactttataaaatgatgtgcagacaaggaaatctgatcaaagaccgaaagagaaaactgactacgttccctaaatgctttcttggaagcgaatttgtgtcatggctgttggaaattggagagattcacaggcctgaggaaggcgtgcacttgggacaagcattattagaaaatggaatcattcaccatgttactgataaacatcaattcaaaccagaacagatgttatatagatttcgctatgatgatggaacattttatccaagaaatgagatgcaggacgtgatttcaaagggtgtaagattatattgtcgtcttcatagcctttttactccagtgataagagataaagattaccatttaaggacctacaaatctgtggtcatggccaacaaactgatagactggttaattgcacagggagattgccgcaccagagaagaggcaatgatatttggcgttggactctgtgacaatggatttatgcaccatgtccttgaaaaaagcgaattcaaagatgaacccctacttttccgttttttttcggatgaggaaatggagggatcaaatatgaaacatcgacttatgaaacatgacttaaaagttgtggaaaatgttatagctaagtcattattgattaaatccaatgaaggcagctatggctttggattagaagacaaaaataaagttccaataataaagttggtagaaaagggatctaatgctgagatggctggcatggaagtcgggaaaaagatttttgctattaatggtgacctagtttttatgagacctttcaatgaagtggattgcttcctgaaatcgtgtttaaacagcagaaaacctctaagagttcttgtgagcacaaagccaagagagacagtgaaaattccagattcagctgatggacttggcttccagatccggggatttggcccttctgttgtgcatgctgtaggaagaggaactgtggctgcagcagctggtcttcaccctggacagtgcattatcaaggtgaatggaatcaatgtcagcaaagagacacatgccagtgtcattgcacacgttacagcctgcaggaagtacaggcggccaacgaagcaagattccatacaatgggtttataatagcattgagagtgctcaagaagaccttcaaaaatctcactccaagccccctggagatgaagcaggggatgcttttgactgtaaagtagaagaggttattgacaaattcaacactatggccatcattgatgggaagaaggagcatgtgagtctgacagtggacaatgtccacctggaatatggtgtcgtgtatgagtacgacagcacagctggcatcaagtgcaatgtggtggaaaagatgattgagcccaaaggtttcttcagcttaactgccaagattcttgaagccctggctaaaagtgatgagcattttgtacaaaactgtaccagcctaaattctctaaatgaagtgattcctactgaccttcagagtaaattcagtgccctttgcagtgaaagaattgaacacctatgtcagagaatatccagttataaaaagttttctcgtgtactgaagaatagggcctggcctacttttaaacaggccaaatctaaaatctccccactgcacagcagtgatttctgccctaccaactgccatgtcaatgtgatggaagtttcttatcccaaaacatcaacctctttgggaagtgcatttggtgttcagttggatagcaggaagcataattctcatgataaagaaaacaaatcttcggagcaagggaaactgagccctatggtgtacattcagcacaccatcacaaccatggcggccccttcaggtctgtctctgggacagcaggatggccatggtctcaggtatctgctaaaagaagaagacttagaaacccaagacatctatcagaaactgctgggcaaacttcagactgcactgaaagaggtggagatgtgtgtttgtcaaatagatgaccttctgtcttcaataacatattctcctaaattagaacgtaagacatcagagggcataataccaacagacagtgacaatgagaagggagaaagaaacagcaaacgggtatgttttaatgtagcaggagatgaacaggaagattctggtcatgacaccatcagcaacagagactcttacagtgactgcaacagcaataggaattccatcgcctccttcaccagcatctgcagcagccagtgcagctcgtatttccacagtgatgaaatggactcaggtgatgaacttcccttaagtgttcgcatatctcatgataaacaggacaagatacatagttgccttgagcatcttttcagccaggtggattcaattaccaatctcctaaaagggcaggctgttgtgagggcctttgaccaaaccaagtatctcactccaggccgaggattgcaagaatttcaacaggaaatggaaccaaagctgagttgtccaaaaaggctacggcttcatatcaagcaagatccttggaatcttcccagcagcgtccggactcttgctcagaacatcaggaaatttgttgaagaggtaaagtgtaggctactcctggctcttcttgaatattcagatagtgagacacagctccgtagagacatggttttctgccagactcttgtggccactgtctgtgccttctctgagcagctcatggcggccttgaaccagatgtttgacaacagcaaggaaaatgagatggaaacttgggaagccagcaggaggtggctggaccagatagcgaatgcaggtgttctttttcactttcagtcacttctgtcaccaaacttgacagatgaacaagccatgttagaagatacactggttgcactatttgatttggaaaaggtttccttttactttaaaccatcagaagaggaacctctggttgcaaatgttcctcttacatatcaagcagaaggaagtcggcaagctctgaaagtttacttctacattgatagttatcattttgaacaacttcctcaacggctgaaaaatggaggagggtttaaaattcatcctgttctttttgcacaagcactagagagcatggaaggatattattacagagacaatgtttctgtggaagaatttcaagctcagataaatgcagcctcactggaaaaggtcaaacagtacaaccagaagctcagggcattctacttggacaagtcaaattcaccaccaaactccacatccaaagctgcctatgtagataagctaatgaggcctctcaacgctttggatgaactttaccgactggtagcctcgtttatcagatccaagcgcacagctgcctgtgcaaacacagcttgcagtgcttctggggttggactgctgtcagtttcctcggagctgtgcaacaggctgggcgcctgccacatcatcatgtgcagcagcggtgtgcatcggtgcaccctgagcgtgacgctggagcaagccatcattctggccagaagccacggactgccacctcgttacatcatgcaggctacagatgtgatgcggaagcagggagcaagagttcagaacacagcgaagaatttgggagtcagagaccggactccacagtctgcaccaaggctgtacaagctgtgcgagccacctcccccagctggagaagaatgaaaagaactcccaagaaaccaggcaggcagaagctcctgaatgctggactagacaaactacatgctggctaaacattctccactgaagatacatcaatgcttttttttttttttttttctgtaaatctttcttcccattgcaaacaagtagtgatcagtttatactttgatatttatgctggaaatggatagaagttcaatcagacagttcagcttcacgaactgatgtctctctgtattgacattaagtattcacttttagagtaaaatccatccctgggacataaagaaaaaaatattagagatttaaaaattaaccaccatgcctcctctcccattcattaaaatggttttattatgcttgttttcatctttcccaagtggacacatgtaataatggagagttcctcttgaagaaggccattattgaagaaacctggcgacatcttgcaaatcatcatgagaaatgttaaggacaatatagactgtgtgctatacattttcagtcccccatttgcaagagagaaagtcattaatgtgtaaaaggtggaaaagcatgctttactctttctcctaagggcttatttcttattagaggagaagaaagctgactaaggcctccagcaggactcactttcttctagctgcctttgggcatcctttattcttgtggacagctctagcaaatcaatgctatttttggtgtctgcaatgggcatggcttccttgggccatgaatactgggtgctgtgccataatggccctggggatcagggaagtgccctggggatcagggaggggaaccaggatgaagaaggggactgtaagcctattttaaaactaaacctttaagttagatacctaaaactcttaattttatgaaggctctcatatgagaggtcagactcttcaaagaatacaccatcatgagaatttttctgttaagatatatgtataagatatgaaaataaggctttatttgtactttaaaaggaccattaggggacttgtaatttatggatgcacaaggtgtattctatccttattctaaagtatatgtaatgtttatcatttctacattgatgcaataacattgtttttagcatagtaaatacagtaatatttattttaaatccataattttcaaacaaaacactcatgattgtgataattatatgggtttacactaatttagtatgtgaaatgcttttcatatctaaattatgtgcaaactattattaattttttttttattttttgaaactgagtctcactctgttacccagactggagtgcggtggtgcaatcttggctcactgcaacctccacctcctgggttcaagccattctcttgcctcagcctcccaggagctgggactacaggtgtgcaccaccatgctcagctaatttttgtatttttagtagagacgtgttttcaccatgttggccaggctggtcttgaactcctgacatcaagtgatccacccacctcagcctcccaaagtgctaggattacaggcgtgagccgctgctcccggcccattattaaattttaatttatgaaatttgatcatggttttcaaactattattaaaacctttatcattaaccattatgtattgaataacaaaaataccatgttacatgtgtaggcaatatgtgtatactactaggtaaggtaataataattgttatttggcacagaagctctagagacttttgtgagaagtccatatacaatgaaaaacaaggaacctaacatcagagttttcaagaaaaagttgaacattttgaatttaataaagatatctttacaaaaataaccttcaaggatttaacatttgtaggactaataaaggaacacagctgattagctagcaagtcctttcatattgtcatgactgttttctcatcaccatcctggaagcagtaatcctcattagaggcatgcaagggtcattaaaatgatttcagttgtactttgccatatttcatggggcaaattatcagctatattgtggtatttataagctaacatattttatatttttaaggatctactttcttcataatagaatgtgcttcatattatttttagggttaaacataagtgtgtcgtctatcatgcttggtacttactaaatgctcaaaaattagtaatggtttatattaacatcagtcactctaacttctgatcgtaataaaaattgtagctaacacttattaagggattactacatgcccagtaatacctccaaatgctttgcctgtattctgttgttattgcttcacttaatcctcataataatgacgtgacatggtactctttttatcgcgcccatttttagagttgaggaaccaaagcaaagaataacccagtgacttgcacaaagtcacatgattgacaaggggtagaaccaaaatttgaacccaggaagtctgccttcttaatgcattatgctacttttccttatcaatataagaactattgtaatattacgatgatttgtaagtaaatttggagttatgcggcatgtgttgtcattaaattatacatcttgtattaaaaaacggtgaatggaaatatgtaaatgctttaattatatgaaaattatagtgtttcctggacattttacaactctggatgcacattttgaggtaactcaacagtgttgcaatctgaaaaactattttgtatcatgttcctcctcatcaaaaataacagttttagatagtacatctcatacaactttattataattccaacacagtggtaagagtaaaaaacatacctaatggatgaatgaataatgacaattttttcaatgccatatgtacctccatgtgacattgggcattaaatggccttgaggttttaggatgtgtttaccttaatgctacatgctcctctataaccagtgcaccttcaaatactgctaaaacctgctaacttcttccaggttctgagcatggacaactcccaccgccccccaacctaaaagggaaggtcatgcatagaaagtttggattttaacttagagcctgactcaaaaataattgtgaactaaaaattcatagtcaatactttttaagcattctattatctcctataattttttctaatattaattccaaatattacaaaatttaatgtgatattaaagtatgaaaaatttgagaagattagaattttacatgtatttccattcctatttaaagagagaaaatggggagataatttctgtgctagttttacttatattggatatataatattgaatttatagtataagctttattttatcagttcgcaaatctgaagtctcatactgttttctgtctctttaaaacacattcttctggtggcttgggttcattgtgcattcattggccactcttcttgcagcaaattttaaatcaatttaaaattaggtaaactttttatgatactataatatatatgacgttgaaatgacattggttctgagtctattaatttaaattttgggatcattacattcagaatgaaatgaaattgaccttgatactaactttgagagccaaaaaaatgaatgggtaaacaaagcctaagggtcatgttaattaatttaacaaaacacactattttcagtcctttgggcttgtacattttatagacaaaattagcatttattgatttggaagtgttcaattgagagtaaatgactctgtgttttgaaactaatacctttgcatttaaaatactgaagtattattttgttagttgaagtagatcttttcctgtgtagcatgatttaatgcagagcagttattcacttatacttctgaaaagccataatattgaaatttaaaatgaatagtcttactttaaggtcacttttactttacattttactttaaaggtcgtttttagactttatgcactagtggtattgaaactaacctttaatatttgactaaattgcttgtgaatttttggaaactatgtttaatttttaaagacattgttatgtgaattatcttactaaattatcacttaagaactctctcatagcagtaatttcattaacacatatatatactaaccaatttgctaaatgaattgtcggttgtcctgcttaagtactagggccaagctttgaaatgacttaaagtgatctgaattttgattgagaaaaataatctgtcttctatcgaatgtttgaacttttagtgatgagcctcagcaaagtttcaccctgcatgaagcagaacaggtgggggaaaattacaagaggggtctgtaccaaaaatggccccaggatattccattgaacaaatattgaccattatcttcctaggtgctacaactccatactagtcattacagttagtctttggtttcacaaaaatgttactgcttcaaaggcttggcattaacagtgatgtcagcattcatactgccaacagtctgctggtcatacatggaagactgttaaagtgtggtctgtgcatcattgagcaattgttatgtagacacaaggcctgcttcactcaggatagcttgctcctctcgctgagaagagatacctgaagtctactaagtctactaaatgagatatatatgtgtatgtatatgcctatatatattattatatttactagtgtttgtgataatgttataaaaattaataagattgttttgttttgtatgaatgtacgacaaatcgagttgttcaatgtattgaatgaatgtcttactgtaagcatcagagctgtccaaccatgtgtaaatgtacctggtcttttgatcactgacactactttgctgttcaatctggaatcaactgacctggctctgccattgagaaataactaatttagaacaaaattgttaaattttaaaattgcatttctactagaaatagctttggagagttaattttaggtgcgaataacaggataaatgctatctgatcaagcattcatccgaaaaatgtttttgagaattcactttgtgcaaggcacagctgttggggctggtatatgtgtggacatgtttgatttgaaaaccttcgtggtgtctctgtgtgttattgatcatctgtgtcttttgcttaaaatggcattatttgtaacacaaacctaatatcatatatacaaatatactgtatgtagccaagaacactaaattggtaagacgctttagaaaatatgcatttgaatttgaatatctaatgcctcaagcaaatttattagagtttcagatgaatatatatttttgtaactggcaagtaaatgagtagaacagagctttttgcctaaaaatatttttataagtactcatttacatagtattcattattttaaatgacaaaatatcaaattggttctataaatagtaattgttttgaatatatccatacttaacatcatatgaaatccaaaatttaatgataaatttcatctggatgtgttattataaaagtcatctttttttcctttgtaaaatatccatgtaacatagcttccattactccatattttatgtatggttaaaattatcaaagtgcattatgtattttatattgtttatttttgtctgcatgaaagattggaatagtaaccgtgtatgataaatgttaataataataaagtgaaatgtagtatgacc

SEQ ID NO: 16535 - DNA, 3612 bp, Homo sapiens
  source 1..3612: mol_type = unassigned DNA
gcgccgcgctgcgcaccgccgccgaccatgagcgaggacagccgcggagacagccgcgccgagagcgccaaggacctggagaagcagcttcgcctgcgcgtgtgcgtgctcagcgagctccagaagaccgagcgggactatgtgggcacgctggagttcctggtgtcggcattcttacacagaatgaaccagtgtgcagcatcaaaagttgacaaaaatgtgacagaagaaacagtgaagatgttgttctcaaacattgaagacatccttgcagtacataaagaattcttaaaagtcgtggaagaatgcttacaccccgaacctaatgctcaacaagaagtgggaacctgctttcttcactttaaagacaagtttcgtatctatgatgaatattgtagtaaccatgagaaggcacaaaaattacttcttgaactcaacaaaataagaacaatccggacatttcttttgaactgcatgctgcttggaggacggaagaacacagatgttcccttggaaggatatttagtaacaccaatacaaagaatatgcaagtaccctcttattttgaaggagttgctgaagcggactccacggaaacacagtgactatgcagcagtgatggaagccctccaagccatgaaagctgtctgttccaacataaacgaggccaagagacagatggagaagttagaagttttagaggaatggcagtctcacattgaaggctgggaggggtccaacatcactgacacctgcactgaaatgctaatgtgtggagtcttactgaaaatttcttctggaaatattcaagaacgggtgttttttcttttcgataatcttttggtgtactgcaaaagaaaacacagacggttgaagaacagcaaggcatctacagatggacatcggtacctttttcgtggccggatcaacacggaggtgatggaagtggagaatgtggatgatggcaccgctgatttccatagcagtggacacattgttgttaatggatggaagatacataacacagcaaaaaataaatggtttgtttgtatggcaaaaacacctgaagagaagcatgaatggtttgaagctattttgaaagaaagagaacggcggaaaggtttaaaattaggaatggagcaagatacctgggtcatgatctctgaacagggtgagaaactttataaaatgatgtgcagacaaggaaatctgatcaaagaccgaaagagaaaactgactacgttccctaaatgctttcttggaagcgaatttgtgtcatggctgttggaaattggagagattcacaggcctgaggaaggcgtgcacttgggacaagcattattagaaaatggaatcattcaccatgttactgataaacatcaattcaaaccagaacagatgttatatagatttcgctatgatgatggaacattttatccaagaaatgagatgcaggacgtgatttcaaagggtgtaagattatattgtcgtcttcatagcctttttactccagtgataagagataaagattaccatttaaggacctacaaatctgtggtcatggccaacaaactgatagactggttaattgcacagggagattgccgcaccagagaagaggcaatgatatttggcgttggactctgtgacaatggatttatgcaccatgtccttgaaaaaagcgaattcaaagatgaacccctacttttccgttttttttcggatgaggaaatggagggatcaaatatgaaacatcgacttatgaaacatgacttaaaagttgtggaaaatgttatagctaagtcattattgattaaatccaatgaaggcagctatggctttggattagaagacaaaaataaagttccaataataaagttggtagaaaagggatctaatgctgagatggctggcatggaagtcgggaaaaagatttttgctattaatggtgacctagtttttatgagacctttcaatgaagtggattgcttcctgaaatcgtgtttaaacagcagaaaacctctaagagttcttgtgagcacaaagccaagagagacagtgaaaattccagattcagctgatggacttggcttccagatccggggatttggcccttctgttgtgcatgctgtaggaagaggaactgtggctgcagcagctggtcttcaccctggacagtgcattatcaaggtgaatggaatcaatgtcagcaaagagacacatgccagtgtcattgcacacgttacagcctgcaggaagtacaggcggccaacgaagcaagattccatacaatgggtttataatagcattgagagtgctcaagaagaccttcaaaaatctcactccaagccccctggagatgaagcaggggatgcttttgactgtaaagtagaagaggttattgacaaattcaacactatggccatcattgatgggaagaaggagcatgtgagtctgacagtggacaatgtccacctggaatatggtgtcgtgtatgagtacgacagcacagctggcatcaagtgcaatgtggtggaaaagatgattgagcccaaaggtttcttcagcttaactgccaagattcttgaagccctggctaaaagtgatgagcattttgtacaaaactgtaccagcctaaattctctaaatgaagtgattcctactgaccttcagagtaaattcagtgccctttgcagtgaaagaattgaacacctatgtcagagaatatccagttataaaaaggttcaagcttcagaaaggttttacaatttcacagcacggcatgctgtctgggagcacagttttgatcttcacagtgtaagcagcacatttccagtacctgtgactatggagttcctcctgctgcctcctcctctcttaggaatatcccaggatggaagacagcactgcattcctgaggaccttccttctcaagaaatgctcttagcagagagggcccctgtctgattcttaccctttggaacagttcaggcacccttagacacagtacacagcccttcctagcatgtgggcagggggacatcctgtattcacaggcatttgtattgagctacaagttggaaagccagtccccctagcaagagaatcttctgccagctctccccgattactccattaacacttcttgacatcaccctattcatttccttttcagcttgtaccaaaatttctaactatctggcttttacgtgcattatataattgtatatatacagtcatgcactgcataacatttcagtaaatgacagaccatatatatatggattatatatatatatatatatggatatatatacacatatatatacacacacatatatatatatatacatatatatgtatatatatataaaatggtggtcccataagattatactactacattttggctctactttttctatgttcagatagatgcacctattggtgtatttttcagaatacatccccgttgttaagcaatgcattactgtattatatatatggcacatgtattatatatatggcacattgccgttacttttaatggcaaaaaccgcaatcacttttgctccaacctagtaattgcaataaacaattgttgtatatagc

SEQ ID NO: 16536 - DNA, 3015 bp, Homo sapiens
  source 1..3015: mol_type = unassigned DNA
agaagaccgagcgggactatgtgggcacgctggagttcctggtgtcgaaagacaagtttcgtatctatgatgaatattgtagtaaccatgagaaggcacaaaaattacttcttgaactcaacaaaataagaacaatccggacatttcttttgaactgcatgctgcttggaggacggaagaacacagatgttcccttggaaggatatttagtaacaccaatacaaagaatatgcaagtaccctcttattttgaaggagttgctgaagcggactccacggaaacacagtgactatgcagcagtgatggaagccctccaagccatgaaagctgtctgttccaacataaacgaggccaagagacagatggagaagttagaagttttagaggaatggcagtctcacattgaaggctgggaggggtccaacatcactgacacctgcactgaaatgctaatgtgtggagtcttactgaaaatttcttctggaaatattcaagaacgggtgttttttcttttcgataatcttttggtgtactgcaaaagaaaacacagacggttgaagaacagcaaggcatctacagatggacatcggtacctttttcgtggccggatcaacacggaggtgatggaagtggagaatgtggatgatggcaccgctgatttccatagcagtggacacattgttgttaatggatggaagatacataacacagcaaaaaataaatggtttgtttgtatggcaaaaacacctgaagagaagcatgaatggtttgaagctattttgaaagaaagagaacggcggaaaggtttaaaattaggaatggagcaagatacctgggtcatgatctctgaacagggtgagaaactttataaaatgatgtgcagacaaggaaatctgatcaaagaccgaaagagaaaactgactacgttccctaaatgctttcttggaagcgaatttgtgtcatggctgttggaaattggagagattcacaggcctgaggaaggcgtgcacttgggacaagcattattagaaaatggaatcattcaccatgttactgataaacatcaattcaaaccagaacagatgttatatagatttcgctatgatgatggaacattttatccaagaaatgagatgcaggacgtgatttcaaagggtgtaagattatattgtcgtcttcatagcctttttactccagtgataagagataaagattaccatttaaggacctacaaatctgtggtcatggccaacaaactgatagactggttaattgcacagggagattgccgcaccagagaagaggcaatgatatttggcgttggactctgtgacaatggatttatgcaccatgtccttgaaaaaagcgaattcaaagatgaacccctacttttccgttttttttcggatgaggaaatggagggatcaaatatgaaacatcgacttatgaaacatgacttaaaagttgtggaaaatgttatagctaagtcattattgattaaatccaatgaaggcagctatggctttggattagaagacaaaaataaagttccaataataaagttggtagaaaagggatctaatgctgagatggctggcatggaagtcgggaaaaagatttttgctattaatggtgacctagtttttatgagacctttcaatgaagtggattgcttcctgaaatcgtgtttaaacagcagaaaacctctaagagttcttgtgagcacaaagccaagagagacagtgaaaattccagattcagctgatggacttggcttccagatccggggatttggcccttctgttgtgcatgctgtaggaagaggaactgtggctgcagcagctggtcttcaccctggacagtgcattatcaaggtgaatggaatcaatgtcagcaaagagacacatgccagtgtcattgcacacgttacagcctgcaggaagtacaggcggccaacgaagcaagattccatacaatgggtttataatagcattgagagtgctcaagaagaccttcaaaaatctcactccaagccccctggagatgaagcaggggatgcttttgactgtaaagtagaagaggttattgacaaattcaacactatggccatcattgatgggaagaaggagcatgtgagtctgacagtggacaatgtccacctggaatatggtgtcgtgtatgagtacgacagcacagctggcatcaagtgcaatgtggtggaaaagatgattgagcccaaaggtttcttcagcttaactgccaagattcttgaagccctggctaaaagtgatgagcattttgtacaaaactgtaccagcctaaattctctaaatgaagtgattcctactgaccttcagagtaaattcagtgccctttgcagtgaaagaattgaacacctatgtcagagaatatccagttataaaaagttttctcgtgtactgaagaatagggcctggcctacttttaaacaggccaaatctaaaatctccccactgcacagcagtgatttctgccctaccaactgccatgtcaatgtgatggaagtttcttatcccaaaacatcaacctctttgggaagtgcatttggtgttcagttggatagcaggaagcataattctcatgataaagaaaacaaatcttcggagcaagggaaactgagccctatggtgtacattcagcacaccatcacaaccatggcggccccttcaggtctgtctctgggacagcaggatggccatggtctcaggtatctgctaaaagaagaagacttagaaacccaagacatctatcagaaactgctgggcaaacttcagactgcactgaaagaggtggagatgtgtgtttgtcaaatagatgaatgaattaaaccgttcaagattgctaagagaaaaggagagtatttttttaagcaattgcatgacatctttgaattgtgttggaatccttgtgacagcagtttatattttaggatatgatattttacttcatttaataaatgagattttattgcatgat

SEQ ID NO: 16537 - DNA, 425 bp, Homo sapiens
  source 1..425: mol_type = unassigned DNA
tttcaagctcagataaatgcagcctcactggaaaaggtcaaacagtacaaccagaagctcagggcattctacttggacaagtcaaattcaccaccaaactccacatccaaagctgcctatgtagataagctaatgaggcctctcaacgctttggatgaactttaccgactggtagcctcgtttatcagatccaagcgcacagctgcctgtgcaaacacagcttgcagtgcttctggggttggactgctgtcagtttcctcggagctgtgcaacaggctgggcgcctgccacatcatcatgtgcagcagcggtgtgcatcggtatgtgaccctcccgccttgcttgcctctttgttagatcacactttatttgatggtttttgtttacattttggcttcacaaaattaaaactggaaacattcaaa

SEQ ID NO: 16538 - DNA, 566 bp, Homo sapiens
  source 1..566: mol_type = unassigned DNA
aaaggtcaaacagtacaaccagaagctcagggcattctacttggacaagtcaaattcaccaccaaactccacatccaaagctgcctatgtagataagctaatgaggcctctcaacgctttggatgaactttaccgactggtagcctcgtttatcagatccaagcgcacagctgcctgtgcaaacacagcttgcagtgcttctggggttggactgctgtcagtttcctcggagctgtgcaacaggctgggcgcctgccacatcatcatgtgcagcagcggtgtgcatcggtgcaccctgagcgtgacgctggagcaagccatcattctggccagaagccacggactgccacctcgttacatcatgcaggctacagatgtgatgcggaagcagattttgtgtatatacttttcatacagttgttattttaattcactgcttgagtttgaaggaaagataaaagacagaagagaagggtactatgttttcatgatgttttgctaatgattgtaacaaccttgggcagcactttatgtaaccagctgatttgattaataaaaggcttgca

SEQ ID NO: 16539 - DNA, 5902 bp, Homo sapiens
  source 1..5902: mol_type = unassigned DNA
agcgcgcggctccggagcccgagcgcactccgcctgcagcccagctgccagcgccgtctcccgcggccgccgccgcccgacagcgcgcccggaacatgccagcctcgcgcagcctgcgctgacttccccgagacgcgccgcggtcggcacggagactttctgggctctggatggttcgtgcgctgctcaccctcgcccacccctgacgccgcggaccgcagctcctcagccccgcagccccgcagcccagcagccccgcagcggcgccgaggacagtgcagccgagttgcgtctccctcgcgcgagcagccattgtttgatgtcctgtgactgagaaaccaggctttaaactttatgcctttggagatggagcccaagatgagcaaactggcctttggctgtcagagaagttccacatcagatgatgactctggctgtgcattggaggagtacgcctgggtccccccgggcctgagaccagagcagatccagctctattttgcttgcttaccagaggaaaaagttccttacgttaacagccccggagagaagcatcggattaaacagcttttgtaccagttaccaccacatgataatgaggtacggtattgccagtctttgagtgaagaggagaaaaaagagttgcaggtgttcagtgctcagcggaagaaagaagcactgggaagaggaacaattaagcttctgtccagagcagtcatgcatgctgtgtgtgagcagtgtggtttgaagataaatggaggtgaagttgcagtgttcgcctcccgtgcgggccctggtgtgtgctggcacccatcctgttttgtctgtttcacgtgtaatgagctgctggtcgacctcatctatttttatcaggatggaaaaattcactgtggcaggcaccatgcagaactgctcaaaccacggtgctcagcatgtgacgagataatttttgctgatgagtgcacagaagctgagggtcgccattggcacatgaaacacttctgctgccttgagtgtgaaacggtcctgggaggacagaggtatatcatgaaggacggccgccccttctgctgtggctgttttgagtctctctatgcggagtactgtgaaacctgtggggaacatattggtgtggaccatgcacagatgacctatgacgggcagcactggcacgccacggaagcctgcttttcttgtgcccagtgtaaagcctctttgttgggatgtcccttccttcccaaacagggtcagatttactgctcaaaaacgtgcagtcttggtgaagacgtccatgcctctgattcttccgactctgcatttcagtcagctcgatcaagagactcccgaagaagtgtccgaatgggcaagagcagccggtcagcagatcagtgtagacagtctctcctcttatcgcctgctctgaactacaagtttcctggcctctcaggcaatgctgatgacaccctttctcgaaaattggatgatctgagtctctccagacaaggaacaagttttgccagtgaagaattttggaaaggcagagtagagcaggaaactccagaagaccctgaagaatgggctgatcatgaagattatatgacgcagctcctcctcaagtttggtgataaaagcctctttcagccacagcccaatgagatggatattcgagccagtgagcactggatatctgataacatggttaaaagtaagaccgagttaaagcaaaataaccagagccttgcaagtaaaaaataccagtctgatatgtactgggcacagtcacaagatggactgggcgattctgcttatggcagccacccaggccctgcaagcagtagaaggcttcaggaattggaactggaccatggggcttcagggtataatcatgatgaaacacagtggtatgaagattccctggagtgtctgtcagacctgaaaccagagcaaagtgttcgggattcgatggattctttggcattgtccaatatcacaggggcttcggtggatggagaaaacaagccaaggccatcattgtattctctgcaaaattttgaggagatggaaacagaagattgtgagaagatgagcaatatgggaactttgaactcttccatgctgcacaggagtgcagagtccttaaagagtctaagttcagagttgtgtccagagaaaatcctgcctgaagagaagccagtacatctgccagtgctcagaaggtccaagtctcaatccagaccccagcaggtcaagttttctgatgatgtcattgacaatgggaactatgacattgaaatccggcagcctccgatgagtgaaaggactcggagacgcgtctacaattttgaagagaggggatccaggtctcatcaccaccgccgccggagaagtagaaagtcccgctccgacaatgccctgaatcttgttacagaaagaaaatactctcccaaggacagactgcggctgtacacccccgataactatgagaaatttatacagaataaaagtgcccgggagatccaagcatacatccagaatgctgatctctacggacagtacgcccatgccacttccgattatggcctgcagaacccaggaatgaatcggtttctgggactctacggcgaggatgatgattcctggtgttcttcctcctcctcctcttccgactcggaagaagaaggatattttcttggacaaccaatccctcaaccccggccacagagatttgcctactatacagatgacctttctagtccaccatctgcacttcccacccctcagtttggtcagaggacaacaaaatccaagaagaaaaagggacacaagggcaaaaattgtattatttcttaaccaagtagtgatgcagagcatttgtttaaaacttagccattaaccgtctgaatcgtttccttttcttccgtaggaaagttgtgaaaatagtttaaagtgctttctttgcccatgtaaatgagaactcaactgctgtttacagtgtcagattaacatttgaaaggtgtgatttctccaatttaccctctttggatggtgccaggtggacgtgacatctcgtgcctgtccggtgcgggtgcgttacagatggacgtagctgctttggttttccagtcctcaagggaatactgaagatgctgactgaaggggattggatgttgattttagaagatggagaactccagccacctttgtaaagcactagtgtttgtcatttatgtaagtcaggtcggctcaggtcttgatagtccgtcttggtgtgaggcatgcctgtcacgatgacctagctaacactgtgcatcttattgtgaggccagcttgtcccctcgaaccctctttggccaggtaaacattgtattgtatcagcgccagctacagattgaaaaaaaaaaacaaaaaacattgctatttataacttagtatttcatagacttaagtgtattcctaatttaacggtgcaaatattaatgtatatactgtacagttcagattttaaagctgatatttttatatccctgaattgtaagccgtttgttacgctgcagtgctagatttgccagggaaccagaatttatggatgaactgattgcttatattttagtcagggtttataaatgtagatggtcaaatttacattgcctagtgatggaaaattcaactttttttgatttttttttccaatattaaaaaaggctctgtatgcatggtggggctatgtaagtactctttaaaactatggccctattaatcttacaagtgttacttatgggtcaagcaatgtaaactgtataaatgtaaaaacaacccctccacacacataacccctggaatatatggtaaaaacaagtagaagctgtttcagcgagtgggttttttccccctgcctgcggggggtgcctttctcattttcagcaaggtgatgattatctcatgggaaatgacaaagatctgcttttgtggcagaggactttgtagatttgttattttaagagaggttattcctttttattccttccctcccactaatttgttggcctttaacagcaattttgaaaactgggtcttctggttatgtttttgttttaaaatctttaaattagaggatgctgtgccattgagtactgtaagttaatatgaggttctggttcaaggaaaacttacgttggatctgaaccaatgagcagatattttgatatgtgccactcttgcatatacatctcagtcctaactaaaggttctagtggcatccaggacctttagggaggcatttaataaacacttaataaataacaaaactacctttctgaatataaatctttgcaaatgtatccagataacttccattttgtgcctgtgttcaggcatgatttattttgcagttgccctaccattaacagacctccatttgtctcgtgtgtccacacgccccacttgtaggccagaaatagggcttcagacacagaggcttattttttccatatagactggagtggggaaaatttggccttagggaggacagacacaagtccaatgggtaaaccagcgagtagtaggtggacagccgtcccacacaagggtttgtatctgggctacacagattcccttcagaaaagcaccaatggtgagagagttcttcactcagtaacttacattccctggtctggtgcctttaaaaaaccatcagcaatgaaaaggaagtgcatacacatgacaaaaaaattcaaatagggcaaaagtcagagacagcatctcctttccattcttcatcccagtcccccaggtcctctccccagaagtaaccactcttacccagttttagtgtctccttcagacattcaaagcacattcgtataaatgtgtcttttaaaagtggtagtgacctatatgtgctgtgacatgcttttttccctttgtatgtggacatttcacgttagtgcatataggtctacccattctttcagtgactgcttaatagcctactcctaatgatggagttgactttcctcatacattatgctacactggcacatgtgcacataaatcgggagcagcgtagttactgggacaaaggttacgtatttaagactgatggatattgccaattttcctccaaaagaaattctcctgatttacattaatgtaatgtaaatgagagtgtttgttccatcacaacctctcaatgtattagcagatttcttgattttgaagaaattttcagaacctgtgctgccacaagtgggcatccttttagaaaagactgttgcaatatgttgcttataaaggatggataataaatagtaaacaggtgatacttagcctgaagaaatgcaggtataaggtgaaggtactgccctcacttttcaagtacattctcaaaagataggggtaacatagcctgccaaaggcttaaggaaatgcagatatttattcacaataataatgtgactttcttttccttttttttttttttttgagatggagtttcgctcctgttgcccaggctggagcgcaacggcacaatctcagttcactgcaacctctgcctcccgggttcaagcaattctcctgtctcagcctccggagtagctgagattacaggtgcctgccaccatgctcggctaattttttatatttttagtagagacagtgtttcaccaagttggccaggctggtctcgaactcctgaccttcaggtgatccacctgcctcagcctcccaaagtgcaggggattacaggcatgagccactgcgtctggcaataatgtaactttgaagcttaaaaattaatcccagtttgtagcaataacagaagactatctacaacggaagaaagaagcaactgccttacagttctgtaaagaattggcaagaaaataaagcctatagttgccga

SEQ ID NO: 16540 - DNA, 5761 bp, Homo sapiens
  source 1..5761: mol_type = unassigned DNA
atgggcagagtggagatgatttctttaagaggtggcctttcatattctcccagcgtttcgtggcccgcgcgtgcacctgcgggagggggaagtttacataagcgtcctagggtatttgcatcttagcggcttcactcactgggctcgggagaatggagcgggcgggcggcgcagccattgtttgatgtcctgtgactgagaaaccaggctttaaactttatgcctttggagatggagcccaagatgagcaaactggcctttggctgtcagagaagttccacatcagatgatgactctggctgtgcattggaggagtacgcctgggtccccccgggcctgagaccagagcagatccagctctattttgcttgcttaccagaggaaaaagttccttacgttaacagccccggagagaagcatcggattaaacagcttttgtaccagttaccaccacatgataatgaggtacggtattgccagtctttgagtgaagaggagaaaaaagagttgcaggtgttcagtgctcagcggaagaaagaagcactgggaagaggaacaattaagcttctgtccagagcagtcatgcatgctgtgtgtgagcagtgtggtttgaagataaatggaggtgaagttgcagtgttcgcctcccgtgcgggccctggtgtgtgctggcacccatcctgttttgtctgtttcacgtgtaatgagctgctggtcgacctcatctatttttatcaggatggaaaaattcactgtggcaggcaccatgcagaactgctcaaaccacggtgctcagcatgtgacgagataatttttgctgatgagtgcacagaagctgagggtcgccattggcacatgaaacacttctgctgccttgagtgtgaaacggtcctgggaggacagaggtatatcatgaaggacggccgccccttctgctgtggctgttttgagtctctctatgcggagtactgtgaaacctgtggggaacatattggtgtggaccatgcacagatgacctatgacgggcagcactggcacgccacggaagcctgcttttcttgtgcccagtgtaaagcctctttgttgggatgtcccttccttcccaaacagggtcagatttactgctcaaaaacgtgcagtcttggtgaagacgtccatgcctctgattcttccgactctgcatttcagtcagctcgatcaagagactcccgaagaagtgtccgaatgggcaagagcagccggtcagcagatcagtgtagacagtctctcctcttatcgcctgctctgaactacaagtttcctggcctctcaggcaatgctgatgacaccctttctcgaaaattggatgatctgagtctctccagacaaggaacaagttttgccagtgaagaattttggaaaggcagagtagagcaggaaactccagaagaccctgaagaatgggctgatcatgaagattatatgacgcagctcctcctcaagtttggtgataaaagcctctttcagccacagcccaatgagatggatattcgagccagtgagcactggatatctgataacatggttaaaagtaagaccgagttaaagcaaaataaccagagccttgcaagtaaaaaataccagtctgatatgtactgggcacagtcacaagatggactgggcgattctgcttatggcagccacccaggccctgcaagcagtagaaggcttcaggaattggaactggaccatggggcttcagggtataatcatgatgaaacacagtggtatgaagattccctggagtgtctgtcagacctgaaaccagagcaaagtgttcgggattcgatggattctttggcattgtccaatatcacaggggcttcggtggatggagaaaacaagccaaggccatcattgtattctctgcaaaattttgaggagatggaaacagaagattgtgagaagatgagcaatatgggaactttgaactcttccatgctgcacaggagtgcagagtccttaaagagtctaagttcagagttgtgtccagagaaaatcctgcctgaagagaagccagtacatctgccagtgctcagaaggtccaagtctcaatccagaccccagcaggtcaagttttctgatgatgtcattgacaatgggaactatgacattgaaatccggcagcctccgatgagtgaaaggactcggagacgcgtctacaattttgaagagaggggatccaggtctcatcaccaccgccgccggagaagtagaaagtcccgctccgacaatgccctgaatcttgttacagaaagaaaatactctcccaaggacagactgcggctgtacacccccgataactatgagaaatttatacagaataaaagtgcccgggagatccaagcatacatccagaatgctgatctctacggacagtacgcccatgccacttccgattatggcctgcagaacccaggaatgaatcggtttctgggactctacggcgaggatgatgattcctggtgttcttcctcctcctcctcttccgactcggaagaagaaggatattttcttggacaaccaatccctcaaccccggccacagagatttgcctactatacagatgacctttctagtccaccatctgcacttcccacccctcagtttggtcagaggacaacaaaatccaagaagaaaaagggacacaagggcaaaaattgtattatttcttaaccaagtagtgatgcagagcatttgtttaaaacttagccattaaccgtctgaatcgtttccttttcttccgtaggaaagttgtgaaaatagtttaaagtgctttctttgcccatgtaaatgagaactcaactgctgtttacagtgtcagattaacatttgaaaggtgtgatttctccaatttaccctctttggatggtgccaggtggacgtgacatctcgtgcctgtccggtgcgggtgcgttacagatggacgtagctgctttggttttccagtcctcaagggaatactgaagatgctgactgaaggggattggatgttgattttagaagatggagaactccagccacctttgtaaagcactagtgtttgtcatttatgtaagtcaggtcggctcaggtcttgatagtccgtcttggtgtgaggcatgcctgtcacgatgacctagctaacactgtgcatcttattgtgaggccagcttgtcccctcgaaccctctttggccaggtaaacattgtattgtatcagcgccagctacagattgaaaaaaaaaaacaaaaaacattgctatttataacttagtatttcatagacttaagtgtattcctaatttaacggtgcaaatattaatgtatatactgtacagttcagattttaaagctgatatttttatatccctgaattgtaagccgtttgttacgctgcagtgctagatttgccagggaaccagaatttatggatgaactgattgcttatattttagtcagggtttataaatgtagatggtcaaatttacattgcctagtgatggaaaattcaactttttttgatttttttttccaatattaaaaaaggctctgtatgcatggtggggctatgtaagtactctttaaaactatggccctattaatcttacaagtgttacttatgggtcaagcaatgtaaactgtataaatgtaaaaacaacccctccacacacataacccctggaatatatggtaaaaacaagtagaagctgtttcagcgagtgggttttttccccctgcctgcggggggtgcctttctcattttcagcaaggtgatgattatctcatgggaaatgacaaagatctgcttttgtggcagaggactttgtagatttgttattttaagagaggttattcctttttattccttccctcccactaatttgttggcctttaacagcaattttgaaaactgggtcttctggttatgtttttgttttaaaatctttaaattagaggatgctgtgccattgagtactgtaagttaatatgaggttctggttcaaggaaaacttacgttggatctgaaccaatgagcagatattttgatatgtgccactcttgcatatacatctcagtcctaactaaaggttctagtggcatccaggacctttagggaggcatttaataaacacttaataaataacaaaactacctttctgaatataaatctttgcaaatgtatccagataacttccattttgtgcctgtgttcaggcatgatttattttgcagttgccctaccattaacagacctccatttgtctcgtgtgtccacacgccccacttgtaggccagaaatagggcttcagacacagaggcttattttttccatatagactggagtggggaaaatttggccttagggaggacagacacaagtccaatgggtaaaccagcgagtagtaggtggacagccgtcccacacaagggtttgtatctgggctacacagattcccttcagaaaagcaccaatggtgagagagttcttcactcagtaacttacattccctggtctggtgcctttaaaaaaccatcagcaatgaaaaggaagtgcatacacatgacaaaaaaattcaaatagggcaaaagtcagagacagcatctcctttccattcttcatcccagtcccccaggtcctctccccagaagtaaccactcttacccagttttagtgtctccttcagacattcaaagcacattcgtataaatgtgtcttttaaaagtggtagtgacctatatgtgctgtgacatgcttttttccctttgtatgtggacatttcacgttagtgcatataggtctacccattctttcagtgactgcttaatagcctactcctaatgatggagttgactttcctcatacattatgctacactggcacatgtgcacataaatcgggagcagcgtagttactgggacaaaggttacgtatttaagactgatggatattgccaattttcctccaaaagaaattctcctgatttacattaatgtaatgtaaatgagagtgtttgttccatcacaacctctcaatgtattagcagatttcttgattttgaagaaattttcagaacctgtgctgccacaagtgggcatccttttagaaaagactgttgcaatatgttgcttataaaggatggataataaatagtaaacaggtgatacttagcctgaagaaatgcaggtataaggtgaaggtactgccctcacttttcaagtacattctcaaaagataggggtaacatagcctgccaaaggcttaaggaaatgcagatatttattcacaataataatgtgactttcttttccttttttttttttttttgagatggagtttcgctcctgttgcccaggctggagcgcaacggcacaatctcagttcactgcaacctctgcctcccgggttcaagcaattctcctgtctcagcctccggagtagctgagattacaggtgcctgccaccatgctcggctaattttttatatttttagtagagacagtgtttcaccaagttggccaggctggtctcgaactcctgaccttcaggtgatccacctgcctcagcctcccaaagtgcaggggattacaggcatgagccactgcgtctggcaataatgtaactttgaagcttaaaaattaatcccagtttgtagcaataacagaagactatctacaacggaagaaagaagcaactgccttacagttctgtaaagaattggcaagaaaataaagcctatagt

SEQ ID NO: 16541 - DNA, 4075 bp, Homo sapiens
  source 1..4075: mol_type = unassigned DNA
agaccagcctgtgggattacacgagacaggatcgagtccaaacgggtccccagctcggcaaggcgcgccggaaggaatctaacagccattgtttgatgtcctgtgactgagaaaccaggctttaaactttatgcctttggagatggagcccaagatgagcaaactggcctttggctgtcagagaagttccacatcagatgatgactctggctgtgcattggaggagtacgcctgggtccccccgggcctgagaccagagcagatccagctctattttgcttgcttaccagaggaaaaagttccttacgttaacagccccggagagaagcatcggattaaacagcttttgtaccagttaccaccacatgataatgaggtacggtattgccagtctttgagtgaagaggagaaaaaagagttgcaggtgttcagtgctcagcggaagaaagaagcactgggaagaggaacaattaagcttctgtccagagcagtcatgcatgctgtgtgtgagcagtgtggtttgaagataaatggaggtgaagttgcagtgttcgcctcccgtgcgggccctggtgtgtgctggcacccatcctgttttgtctgtttcacgtgtaatgagctgctggtcgacctcatctatttttatcaggatggaaaaattcactgtggcaggcaccatgcagaactgctcaaaccacggtgctcagcatgtgacgagataatttttgctgatgagtgcacagaagctgagggtcgccattggcacatgaaacacttctgctgccttgagtgtgaaacggtcctgggaggacagaggtatatcatgaaggacggccgccccttctgctgtggctgttttgagtctctctatgcggagtactgtgaaacctgtggggaacatattggtgtggaccatgcacagatgacctatgacgggcagcactggcacgccacggaagcctgcttttcttgtgcccagtgtaaagcctctttgttgggatgtcccttccttcccaaacagggtcagatttactgctcaaaaacgtgcagtcttggtgaagacgtccatgcctctgattcttccgactctgcatttcagtcagctcgatcaagagactcccgaagaagtgtccgaatgggcaagagcagccggtcagcagatcagtgtagacagtctctcctcttatcgcctgctctgaactacaagtttcctggcctctcaggcaatgctgatgacaccctttctcgaaaattggatgatctgagtctctccagacaaggaacaagttttgccagtgaagaattttggaaaggcagagtagagcaggaaactccagaagaccctgaagaatgggctgatcatgaagattatatgacgcagctcctcctcaagtttggtgataaaagcctctttcagccacagcccaatgagatggatattcgagccagtgagcactggatatctgataacatggttaaaagtaagaccgagttaaagcaaaataaccagagccttgcaagtaaaaaataccagtctgatatgtactgggcacagtcacaagatggactgggcgattctgcttatggcagccacccaggccctgcaagcagtagaaggcttcaggaattggaactggaccatggggcttcagggtataatcatgatgaaacacagtggtatgaagattccctggagtgtctgtcagacctgaaaccagagcaaagtgttcgggattcgatggattctttggcattgtccaatatcacaggggcttcggtggatggagaaaacaagccaaggccatcattgtattctctgcaaaattttgaggagatggaaacagaagattgtgagaagatgagcaatatgggaactttgaactcttccatgctgcacaggagtgcagagtccttaaagagtctaagttcagagttgtgtccagagaaaatcctgcctgaagagaagccagtacatctgccagtgctcagaaggtccaagtctcaatccagaccccagcaggtcaagttttctgatgatgtcattgacaatgggaactatgacattgaaatccggcagcctccgatgagtgaaaggactcggagacgcgtctacaattttgaagagaggggatccaggtctcatcaccaccgccgccggagaagtagaaagtcccgctccgacaatgccctgaatcttgttacagaaagaaaatactctcccaaggacagactgcggctgtacacccccgataactatgagaaatttatacagaataaaagtgcccgggagatccaagcatacatccagaatgctgatctctacggacagtacgcccatgccacttccgattatggcctgcagaacccaggaatgaatcggtttctgggactctacggcgaggatgatgattcctggtgttcttcctcctcctcctcttccgactcggaagaagaaggatattttcttggacaaccaatccctcaaccccggccacagagatttgcctactatacagatgacctttctagtccaccatctgcacttcccacccctcagtttggtcagaggacaacaaaatccaagaagaaaaagggacacaagggcaaaaattgtattatttcttaaccaagtagtgatgcagagcatttgtttaaaacttagccattaaccgtctgaatcgtttccttttcttccgtaggaaagttgtgaaaatagtttaaagtgctttctttgcccatgtaaatgagaactcaactgctgtttacagtgtcagattaacatttgaaaggtgtgatttctccaatttaccctctttggatggtgccaggtggacgtgacatctcgtgcctgtccggtgcgggtgcgttacagatggacgtagctgctttggttttccagtcctcaagggaatactgaagatgctgactgaaggggattggatgttgattttagaagatggagaactccagccacctttgtaaagcactagtgtttgtcatttatgtaagtcaggtcggctcaggtcttgatagtccgtcttggtgtgaggcatgcctgtcacgatgacctagctaacactgtgcatcttattgtgaggccagcttgtcccctcgaaccctctttggccaggtaaacattgtattgtatcagcgccagctacagattgaaaaaaaaaaacaaaaaacattgctatttataacttagtatttcatagacttaagtgtattcctaatttaacggtgcaaatattaatgtatatactgtacagttcagattttaaagctgatatttttatatccctgaattgtaagccgtttgttacgctgcagtgctagatttgccagggaaccagaatttatggatgaactgattgcttatattttagtcagggtttataaatgtagatggtcaaatttacattgcctagtgatggaaaattcaactttttttgatttttttttccaatattaaaaaaggctctgtatgcatggtggggctatgtaagtactctttaaaactatggccctattaatcttacaagtgttacttatgggtcaagcaatgtaaactgtataaatgtaaaaacaacccctccacacacataacccctggaatatatggtaaaaacaagtagaagctgtttcagcgagtgggttttttccccctgcctgcggggggtgcctttctcattttcagcaaggtgatgattatctcatgggaaatgacaaagatctgcttttgtggcagaggactttgtagatttgttattttaagagaggttattcctttttattccttccctcccactaatttgttggcctttaacagcaattttgaaaactgggtcttctggttatgtttttgttttaaaatctttaaattagaggatgctgtgccattgagtactgtaagttaatatgaggttctggttcaaggaaaacttacgttggatctgaaccaatgagcagatattttgatatgtgccactcttgcatatacatctcagtcctaactaaaggttctagtggcatccaggacctttagggaggcatttaataaacacttaataaataa

SEQ ID NO: 16542 - DNA, 4278 bp, Homo sapiens
  source 1..4278: mol_type = unassigned DNA
cctcgcccgccaggcggggccagcaccgggacgcgacccgggggcgcggtccgctgcaatgtagtggggacccggtgcttgctgccccaccctgctggggtctcctccggaaatgagtgggtgcgggtgactcgtagggcacccagccctctgttccttcgggagtcctccgctcccgctccgggccgccagcctccttcagacgcagagcgggcgggcggctagtgcgcgccgagggctcaggggccggcgccgcgaggggctgcaggccgcgctcggccgctgtccgggccgcagcagccattgtttgatgtcctgtgactgagaaaccaggctttaaactttatgcctttggagatggagcccaagatgagcaaactggcctttggctgtcagagaagttccacatcagatgatgactctggctgtgcattggaggagtacgcctgggtccccccgggcctgagaccagagcagatccagctctattttgcttgcttaccagaggaaaaagttccttacgttaacagccccggagagaagcatcggattaaacagcttttgtaccagttaccaccacatgataatgaggtacggtattgccagtctttgagtgaagaggagaaaaaagagttgcaggtgttcagtgctcagcggaagaaagaagcactgggaagaggaacaattaagcttctgtccagagcagtcatgcatgctgtgtgtgagcagtgtggtttgaagataaatggaggtgaagttgcagtgttcgcctcccgtgcgggccctggtgtgtgctggcacccatcctgttttgtctgtttcacgtgtaatgagctgctggtcgacctcatctatttttatcaggatggaaaaattcactgtggcaggcaccatgcagaactgctcaaaccacggtgctcagcatgtgacgagataatttttgctgatgagtgcacagaagctgagggtcgccattggcacatgaaacacttctgctgccttgagtgtgaaacggtcctgggaggacagaggtatatcatgaaggacggccgccccttctgctgtggctgttttgagtctctctatgcggagtactgtgaaacctgtggggaacatattggtgtggaccatgcacagatgacctatgacgggcagcactggcacgccacggaagcctgcttttcttgtgcccagtgtaaagcctctttgttgggatgtcccttccttcccaaacagggtcagatttactgctcaaaaacgtgcagtcttggtgaagacgtccatgcctctgattcttccgactctgcatttcagtcagctcgatcaagagactcccgaagaagtgtccgaatgggcaagagcagccggtcagcagatcagtgtagacagtctctcctcttatcgcctgctctgaactacaagtttcctggcctctcaggcaatgctgatgacaccctttctcgaaaattggatgatctgagtctctccagacaaggaacaagttttgccagtgaagaattttggaaaggcagagtagagcaggaaactccagaagaccctgaagaatgggctgatcatgaagattatatgacgcagctcctcctcaagtttggtgataaaagcctctttcagccacagcccaatgagatggatattcgagccagtgagcactggatatctgataacatggttaaaagtaagaccgagttaaagcaaaataaccagagccttgcaagtaaaaaataccagtctgatatgtactgggcacagtcacaagatggactgggcgattctgcttatggcagccacccaggccctgcaagcagtagaaggcttcaggaattggaactggaccatggggcttcagggtataatcatgatgaaacacagtggtatgaagattccctggagtgtctgtcagacctgaaaccagagcaaagtgttcgggattcgatggattctttggcattgtccaatatcacaggggcttcggtggatggagaaaacaagccaaggccatcattgtattctctgcaaaattttgaggagatggaaacagaagattgtgagaagatgagcaatatgggaactttgaactcttccatgctgcacaggagtgcagagtccttaaagagtctaagttcagagttgtgtccagagaaaatcctgcctgaagagaagccagtacatctgccagtgctcagaaggtccaagtctcaatccagaccccagcaggtcaagttttctgatgatgtcattgacaatgggaactatgacattgaaatccggcagcctccgatgagtgaaaggactcggagacgcgtctacaattttgaagagaggggatccaggtctcatcaccaccgccgccggagaagtagaaagtcccgctccgacaatgccctgaatcttgttacagaaagaaaatactctcccaaggacagactgcggctgtacacccccgataactatgagaaatttatacagaataaaagtgcccgggagatccaagcatacatccagaatgctgatctctacggacagtacgcccatgccacttccgattatggcctgcagaacccaggaatgaatcggtttctgggactctacggcgaggatgatgattcctggtgttcttcctcctcctcctcttccgactcggaagaagaaggatattttcttggacaaccaatccctcaaccccggccacagagatttgcctactatacagatgacctttctagtccaccatctgcacttcccacccctcagtttggtcagaggacaacaaaatccaagaagaaaaagggacacaagggcaaaaattgtattatttcttaaccaagtagtgatgcagagcatttgtttaaaacttagccattaaccgtctgaatcgtttccttttcttccgtaggaaagttgtgaaaatagtttaaagtgctttctttgcccatgtaaatgagaactcaactgctgtttacagtgtcagattaacatttgaaaggtgtgatttctccaatttaccctctttggatggtgccaggtggacgtgacatctcgtgcctgtccggtgcgggtgcgttacagatggacgtagctgctttggttttccagtcctcaagggaatactgaagatgctgactgaaggggattggatgttgattttagaagatggagaactccagccacctttgtaaagcactagtgtttgtcatttatgtaagtcaggtcggctcaggtcttgatagtccgtcttggtgtgaggcatgcctgtcacgatgacctagctaacactgtgcatcttattgtgaggccagcttgtcccctcgaaccctctttggccaggtaaacattgtattgtatcagcgccagctacagattgaaaaaaaaaaacaaaaaacattgctatttataacttagtatttcatagacttaagtgtattcctaatttaacggtgcaaatattaatgtatatactgtacagttcagattttaaagctgatatttttatatccctgaattgtaagccgtttgttacgctgcagtgctagatttgccagggaaccagaatttatggatgaactgattgcttatattttagtcagggtttataaatgtagatggtcaaatttacattgcctagtgatggaaaattcaactttttttgatttttttttccaatattaaaaaaggctctgtatgcatggtggggctatgtaagtactctttaaaactatggccctattaatcttacaagtgttacttatgggtcaagcaatgtaaactgtataaatgtaaaaacaacccctccacacacataacccctggaatatatggtaaaaacaagtagaagctgtttcagcgagtgggttttttccccctgcctgcggggggtgcctttctcattttcagcaaggtgatgattatctcatgggaaatgacaaagatctgcttttgtggcagaggactttgtagatttgttattttaagagaggttattcctttttattccttccctcccactaatttgttggcctttaacagcaattttgaaaactgggtcttctggttatgtttttgttttaaaatctttaaattagaggatgctgtgccattgagtactgtaagttaatatgaggttctggttcaaggaaaacttacgttggatctgaaccaatgagcagatattttgatatgtgccactcttgcatatacatctcagtcctaactaaaggttctagtggcatccaggacctttagggaggcatttaataaaca

SEQ ID NO: 16543 - DNA, 4277 bp, Homo sapiens
  source 1..4277: mol_type = unassigned DNA
gtcctagggtatttgcatcttagcggcttcactcactgggctcgggagaatggagcgggcgggcggcgatcgccggccccaggcgggctcccggcgctgagcggagacgagtttttctccccgcagaggaggatcctggaaggacgcggagctggggcttgggggatgcagtggcctggacgaggtgactccaacccgggggagcagagtccgtcacgccggcagggaccgagggtctctgcggagctggaggaccttttgtgggatgcctcacggctgctgaggggctgcagcggcagccattgtttgatgtcctgtgactgagaaaccaggctttaaactttatgcctttggagatggagcccaagatgagcaaactggcctttggctgtcagagaagttccacatcagatgatgactctggctgtgcattggaggagtacgcctgggtccccccgggcctgagaccagagcagatccagctctattttgcttgcttaccagaggaaaaagttccttacgttaacagccccggagagaagcatcggattaaacagcttttgtaccagttaccaccacatgataatgaggtacggtattgccagtctttgagtgaagaggagaaaaaagagttgcaggtgttcagtgctcagcggaagaaagaagcactgggaagaggaacaattaagcttctgtccagagcagtcatgcatgctgtgtgtgagcagtgtggtttgaagataaatggaggtgaagttgcagtgttcgcctcccgtgcgggccctggtgtgtgctggcacccatcctgttttgtctgtttcacgtgtaatgagctgctggtcgacctcatctatttttatcaggatggaaaaattcactgtggcaggcaccatgcagaactgctcaaaccacggtgctcagcatgtgacgagataatttttgctgatgagtgcacagaagctgagggtcgccattggcacatgaaacacttctgctgccttgagtgtgaaacggtcctgggaggacagaggtatatcatgaaggacggccgccccttctgctgtggctgttttgagtctctctatgcggagtactgtgaaacctgtggggaacatattggtgtggaccatgcacagatgacctatgacgggcagcactggcacgccacggaagcctgcttttcttgtgcccagtgtaaagcctctttgttgggatgtcccttccttcccaaacagggtcagatttactgctcaaaaacgtgcagtcttggtgaagacgtccatgcctctgattcttccgactctgcatttcagtcagctcgatcaagagactcccgaagaagtgtccgaatgggcaagagcagccggtcagcagatcagtgtagacagtctctcctcttatcgcctgctctgaactacaagtttcctggcctctcaggcaatgctgatgacaccctttctcgaaaattggatgatctgagtctctccagacaaggaacaagttttgccagtgaagaattttggaaaggcagagtagagcaggaaactccagaagaccctgaagaatgggctgatcatgaagattatatgacgcagctcctcctcaagtttggtgataaaagcctctttcagccacagcccaatgagatggatattcgagccagtgagcactggatatctgataacatggttaaaagtaagaccgagttaaagcaaaataaccagagccttgcaagtaaaaaataccagtctgatatgtactgggcacagtcacaagatggactgggcgattctgcttatggcagccacccaggccctgcaagcagtagaaggcttcaggaattggaactggaccatggggcttcagggtataatcatgatgaaacacagtggtatgaagattccctggagtgtctgtcagacctgaaaccagagcaaagtgttcgggattcgatggattctttggcattgtccaatatcacaggggcttcggtggatggagaaaacaagccaaggccatcattgtattctctgcaaaattttgaggagatggaaacagaagattgtgagaagatgagcaatatgggaactttgaactcttccatgctgcacaggagtgcagagtccttaaagagtctaagttcagagttgtgtccagagaaaatcctgcctgaagagaagccagtacatctgccagtgctcagaaggtccaagtctcaatccagaccccagcaggtcaagttttctgatgatgtcattgacaatgggaactatgacattgaaatccggcagcctccgatgagtgaaaggactcggagacgcgtctacaattttgaagagaggggatccaggtctcatcaccaccgccgccggagaagtagaaagtcccgctccgacaatgccctgaatcttgttacagaaagaaaatactctcccaaggacagactgcggctgtacacccccgataactatgagaaatttatacagaataaaagtgcccgggagatccaagcatacatccagaatgctgatctctacggacagtacgcccatgccacttccgattatggcctgcagaacccaggaatgaatcggtttctgggactctacggcgaggatgatgattcctggtgttcttcctcctcctcctcttccgactcggaagaagaaggatattttcttggacaaccaatccctcaaccccggccacagagatttgcctactatacagatgacctttctagtccaccatctgcacttcccacccctcagtttggtcagaggacaacaaaatccaagaagaaaaagggacacaagggcaaaaattgtattatttcttaaccaagtagtgatgcagagcatttgtttaaaacttagccattaaccgtctgaatcgtttccttttcttccgtaggaaagttgtgaaaatagtttaaagtgctttctttgcccatgtaaatgagaactcaactgctgtttacagtgtcagattaacatttgaaaggtgtgatttctccaatttaccctctttggatggtgccaggtggacgtgacatctcgtgcctgtccggtgcgggtgcgttacagatggacgtagctgctttggttttccagtcctcaagggaatactgaagatgctgactgaaggggattggatgttgattttagaagatggagaactccagccacctttgtaaagcactagtgtttgtcatttatgtaagtcaggtcggctcaggtcttgatagtccgtcttggtgtgaggcatgcctgtcacgatgacctagctaacactgtgcatcttattgtgaggccagcttgtcccctcgaaccctctttggccaggtaaacattgtattgtatcagcgccagctacagattgaaaaaaaaaaacaaaaaacattgctatttataacttagtatttcatagacttaagtgtattcctaatttaacggtgcaaatattaatgtatatactgtacagttcagattttaaagctgatatttttatatccctgaattgtaagccgtttgttacgctgcagtgctagatttgccagggaaccagaatttatggatgaactgattgcttatattttagtcagggtttataaatgtagatggtcaaatttacattgcctagtgatggaaaattcaactttttttgatttttttttccaatattaaaaaaggctctgtatgcatggtggggctatgtaagtactctttaaaactatggccctattaatcttacaagtgttacttatgggtcaagcaatgtaaactgtataaatgtaaaaacaacccctccacacacataacccctggaatatatggtaaaaacaagtagaagctgtttcagcgagtgggttttttccccctgcctgcggggggtgcctttctcattttcagcaaggtgatgattatctcatgggaaatgacaaagatctgcttttgtggcagaggactttgtagatttgttattttaagagaggttattcctttttattccttccctcccactaatttgttggcctttaacagcaattttgaaaactgggtcttctggttatgtttttgttttaaaatctttaaattagaggatgctgtgccattgagtactgtaagttaatatgaggttctggttcaaggaaaacttacgttggatctgaaccaatgagcagatattttgatatgtgccactcttgcatatacatctcagtcctaactaaaggttctagtggcatccaggacctttagggaggcatttaataaaca

SEQ ID NO: 16544 - DNA, 3735 bp, Homo sapiens
  source 1..3735: mol_type = unassigned DNA
aactctggaagtagagaactggtgagaaagactgtgcactcagtgtggtgtttctgttttgctttctgtgaaggtacggtattgccagtctttgagtgaagaggagaaaaaagagttgcaggtgttcagtgctcagcggaagaaagaagcactgggaagaggaacaattaagcttctgtccagagcagtcatgcatgctgtgtgtgagcagtgtggtttgaagataaatggaggtgaagttgcagtgttcgcctcccgtgcgggccctggtgtgtgctggcacccatcctgttttgtctgtttcacgtgtaatgagctgctggtcgacctcatctatttttatcaggatggaaaaattcactgtggcaggcaccatgcagaactgctcaaaccacggtgctcagcatgtgacgagataatttttgctgatgagtgcacagaagctgagggtcgccattggcacatgaaacacttctgctgccttgagtgtgaaacggtcctgggaggacagaggtatatcatgaaggacggccgccccttctgctgtggctgttttgagtctctctatgcggagtactgtgaaacctgtggggaacatattggtgtggaccatgcacagatgacctatgacgggcagcactggcacgccacggaagcctgcttttcttgtgcccagtgtaaagcctctttgttgggatgtcccttccttcccaaacagggtcagatttactgctcaaaaacgtgcagtcttggtgaagacgtccatgcctctgattcttccgactctgcatttcagtcagctcgatcaagagactcccgaagaagtgtccgaatgggcaagagcagccggtcagcagatcagtgtagacagtctctcctcttatcgcctgctctgaactacaagtttcctggcctctcaggcaatgctgatgacaccctttctcgaaaattggatgatctgagtctctccagacaaggaacaagttttgccagtgaagaattttggaaaggcagagtagagcaggaaactccagaagaccctgaagaatgggctgatcatgaagattatatgacgcagctcctcctcaagtttggtgataaaagcctctttcagccacagcccaatgagatggatattcgagccagtgagcactggatatctgataacatggttaaaagtaagaccgagttaaagcaaaataaccagagccttgcaagtaaaaaataccagtctgatatgtactgggcacagtcacaagatggactgggcgattctgcttatggcagccacccaggccctgcaagcagtagaaggcttcaggaattggaactggaccatggggcttcagggtataatcatgatgaaacacagtggtatgaagattccctggagtgtctgtcagacctgaaaccagagcaaagtgttcgggattcgatggattctttggcattgtccaatatcacaggggcttcggtggatggagaaaacaagccaaggccatcattgtattctctgcaaaattttgaggagatggaaacagaagattgtgagaagatgagcaatatgggaactttgaactcttccatgctgcacaggagtgcagagtccttaaagagtctaagttcagagttgtgtccagagaaaatcctgcctgaagagaagccagtacatctgccagtgctcagaaggtccaagtctcaatccagaccccagcaggtcaagttttctgatgatgtcattgacaatgggaactatgacattgaaatccggcagcctccgatgagtgaaaggactcggagacgcgtctacaattttgaagagaggggatccaggtctcatcaccaccgccgccggagaagtagaaagtcccgctccgacaatgccctgaatcttgttacagaaagaaaatactctcccaaggacagactgcggctgtacacccccgataactatgagaaatttatacagaataaaagtgcccgggagatccaagcatacatccagaatgctgatctctacggacagtacgcccatgccacttccgattatggcctgcagaacccaggaatgaatcggtttctgggactctacggcgaggatgatgattcctggtgttcttcctcctcctcctcttccgactcggaagaagaaggatattttcttggacaaccaatccctcaaccccggccacagagatttgcctactatacagatgacctttctagtccaccatctgcacttcccacccctcagtttggtcagaggacaacaaaatccaagaagaaaaagggacacaagggcaaaaattgtattatttcttaaccaagtagtgatgcagagcatttgtttaaaacttagccattaaccgtctgaatcgtttccttttcttccgtaggaaagttgtgaaaatagtttaaagtgctttctttgcccatgtaaatgagaactcaactgctgtttacagtgtcagattaacatttgaaaggtgtgatttctccaatttaccctctttggatggtgccaggtggacgtgacatctcgtgcctgtccggtgcgggtgcgttacagatggacgtagctgctttggttttccagtcctcaagggaatactgaagatgctgactgaaggggattggatgttgattttagaagatggagaactccagccacctttgtaaagcactagtgtttgtcatttatgtaagtcaggtcggctcaggtcttgatagtccgtcttggtgtgaggcatgcctgtcacgatgacctagctaacactgtgcatcttattgtgaggccagcttgtcccctcgaaccctctttggccaggtaaacattgtattgtatcagcgccagctacagattgaaaaaaaaaaacaaaaaacattgctatttataacttagtatttcatagacttaagtgtattcctaatttaacggtgcaaatattaatgtatatactgtacagttcagattttaaagctgatatttttatatccctgaattgtaagccgtttgttacgctgcagtgctagatttgccagggaaccagaatttatggatgaactgattgcttatattttagtcagggtttataaatgtagatggtcaaatttacattgcctagtgatggaaaattcaactttttttgatttttttttccaatattaaaaaaggctctgtatgcatggtggggctatgtaagtactctttaaaactatggccctattaatcttacaagtgttacttatgggtcaagcaatgtaaactgtataaatgtaaaaacaacccctccacacacataacccctggaatatatggtaaaaacaagtagaagctgtttcagcgagtgggttttttccccctgcctgcggggggtgcctttctcattttcagcaaggtgatgattatctcatgggaaatgacaaagatctgcttttgtggcagaggactttgtagatttgttattttaagagaggttattcctttttattccttccctcccactaatttgttggcctttaacagcaattttgaaaactgggtcttctggttatgtttttgttttaaaatctttaaattagaggatgctgtgccattgagtactgtaagttaatatgaggttctggttcaaggaaaacttacgttggatctgaaccaatgagcagatattttgatatgtgccactcttgcatatacatctcagtcctaactaaaggttctagtggcatccagga

SEQ ID NO: 16545 - DNA, 3778 bp, Homo sapiens
  source 1..3778: mol_type = unassigned DNA
gggagaatggagcgggcgggcggcgatcgccggccccaggcgggctcccggcgctgagcggagacgagtttttctccccgcagaggaggatcctggaaggacgcggagctggggcttgggggatgcagtggcctggacgaggtgactccaacccgggggagcagagtccgtcacgccggcagggaccgagggtctctgcggagctggaggaccttttgtgggatgcctcacggctgctgaggggctgcagcggccattgtttgatgtcctgtgactgagaaaccaggctttaaactttatgcctttggagatggagcccaagatgagcaaactggcctttggctgtcagagaagttccacatcagatgatgactctggctgtgcattggaggagtacgcctgggtccccccgggcctgagaccagagcagatccagctctattttgcttgcttaccagaggaaaaagttccttacgttaacagccccggagagaagcatcggattaaacagcttttgtaccagttaccaccacatgataatgaggtacggtattgccagtctttgagtgaagaggagaaaaaagagttgcaggtgttcagtgctcagcggaagaaagaagcactgggaagaggaacaattaagcttctgtccagagcagtcatgcatgctgtgtgtgagcagtgtggtttgaagataaatggaggtgaagttgcagtgttcgcctcccgtgcgggccctggtgtgtgctggcacccatcctgttttgtctgtttcacgtgtaatgagctgctggtcgacctcatctatttttatcaggatggaaaaattcactgtggcaggcaccatgcagaactgctcaaaccacggtgctcagcatgtgacgagataatttttgctgatgagtgcacagaagctgagggtcgccattggcacatgaaacacttctgctgccttgagtgtgaaacggtcctgggaggacagaggtatatcatgaaggacggccgccccttctgctgtggctgttttgagtctctctatgcggagtactgtgaaacctgtggggaacatattggtgtggaccatgcacagatgacctatgacgggcagcactggcacgccacggaagcctgcttttcttgtgcccagtgtaaagcctctttgttgggatgtcccttccttcccaaacagggtcagatttactgctcaaaaacgtgcagtcttggtgaagacgtccatgcctctgattcttccgactctgcatttcagtcagctcgatcaagagactcccgaagaagtgtccgaatgggcaagagcagccggtcagcagatcagtgtagacagtctctcctcttatcgcctgctctgaactacaagtttcctggcctctcaggcaatgctgatgacaccctttctcgaaaattggatgatctgagtctctccagacaaggaacaagttttgccagtgaagaattttggaaaggcagagtagagcaggaaactccagaagaccctgaagaatgggctgatcatgaagattatatgacgcagctcctcctcaagtttggtgataaaagcctctttcagccacagcccaatgagatggatattcgagccagtgagcactggatatctgataacatggttaaaagtaagaccgagttaaagcaaaataaccagagccttgcaagtaaaaaataccagtctgatatgtactgggcacagtcacaagatggactgggcgattctgcttatggcagccacccaggccctgcaagcagtagaaggcttcaggaattggaactggaccatggggcttcagggtataatcatgatgaaacacagtggtatgaagattccctggagtgtctgtcagacctgaaaccagagcaaagtgttcgggattcgatggattctttggcattgtccaatatcacaggggcttcggtggatggagaaaacaagccaaggccatcattgtattctctgcaaaattttgaggagatggaaacagaagattgtgagaagatgagcaatatgggaactttgaactcttccatgctgcacaggagtgcagagtccttaaagagtctaagttcagagttgtgtccagagaaaatcctgcctgaagagaagccagtacatctgccagtgctcagaaggtccaagtctcaatccagaccccagcaggtcaagttttctgatgatgtcattgacaatgggaactatgacattgaaatccggcagcctccgatgagtgaaaggactcggagacgcgtctacaattttgaagagaggggatccaggtctcatcaccaccgccgccggagaagtagaaagtcccgctccgacaatgccctgaatcttgttacagaaagaaaatactctcccaaggacagactgcggctgtacacccccgataactatgagaaatttatacagaataaaagtgcccgggagatccaagcatacatccagaatgctgatctctacggacagtacgcccatgccacttccgattatggcctgcagaacccaggaatgaatcggtttctgggactctacggcgaggatgatgattcctggtgttcttcctcctcctcctcttccgactcggaagaagaaggatattttcttggacaaccaatccctcaaccccggccacagagatttgcctactatacagatgacctttctagtccaccatctgcacttcccacccctcagtttggtcagaggacaacaaaatccaagaagaaaaagggacacaagggcaaaaattgtattatttcttaaccaagtagtgatgcagagcatttgtttaaaacttagccattaaccgtctgaatcgtttccttttcttccgtaggaaagttgtgaaaatagtttaaagtgctttctttgcccatgtaaatgagaactcaactgctgtttacagtgtcagattaacatttgaaaggtgtgatttctccaatttaccctctttggatggtgccaggtggacgtgacatctcgtgcctgtccggtgcgggtgcgttacagatggacgtagctgctttggttttccagtcctcaagggaatactgaagatgctgactgaaggggattggatgttgattttagaagatggagaactccagccacctttgtaaagcactagtgtttgtcatttatgtaagtcaggtcggctcaggtcttgatagtccgtcttggtgtgaggcatgcctgtcacgatgacctagctaacactgtgcatcttattgtgaggccagcttgtcccctcgaaccctctttggccaggtaaacattgtattgtatcagcgccagctacagattgaaaaaaaaaaacaaaaaacattgctatttataacttagtatttcatagacttaagtgtattcctaatttaacggtgcaaatattaatgtatatactgtacagttcagattttaaagctgatatttttatatccctgaattgtaagccgtttgttacgctgcagtgctagatttgccagggaaccagaatttatggatgaactgattgcttatattttagtcagggtttataaatgtagatggtcaaatttacattgcctagtgatggaaaattcaactttttttgatttttttttccaatattaaaaaaggctctgtatgcatggtggggctatgtaagtactctttaaaactatggccctattaatcttacaagtgttacttatgggtcaagcaatgtaaactgtataaatgtaaaaacaacccctccacacacataacccc

SEQ ID NO: 16546 - DNA, 3803 bp, Homo sapiens
  source 1..3803: mol_type = unassigned DNA
gcactccgcctgcagcccagctgccagcgccgtctcccgcggccgccgccgcccgacagcgcgcccggaacatgccagcctcgcgcagcctgcgctgacttccccgagacgcgccgcggtcggcacggagactttctgggctctggatggttcgtgcgctgctcaccctcgcccacccctgacgccgcggaccgcagctcctcagccccgcagccccgcagcccagcagccccgcagcggcgccgaggacagtgcagccgagttgcgtctccctcgcgcgagccattgtttgatgtcctgtgactgagaaaccaggctttaaactttatgcctttggagatggagcccaagatgagcaaactggcctttggctgtcagagaagttccacatcagatgatgactctggctgtgcattggaggagtacgcctgggtccccccgggcctgagaccagagcagatccagctctattttgcttgcttaccagaggaaaaagttccttacgttaacagccccggagagaagcatcggattaaacagcttttgtaccagttaccaccacatgataatgaggtacggtattgccagtctttgagtgaagaggagaaaaaagagttgcaggtgttcagtgctcagcggaagaaagaagcactgggaagaggaacaattaagcttctgtccagagcagtcatgcatgctgtgtgtgagcagtgtggtttgaagataaatggaggtgaagttgcagtgttcgcctcccgtgcgggccctggtgtgtgctggcacccatcctgttttgtctgtttcacgtgtaatgagctgctggtcgacctcatctatttttatcaggatggaaaaattcactgtggcaggcaccatgcagaactgctcaaaccacggtgctcagcatgtgacgagataatttttgctgatgagtgcacagaagctgagggtcgccattggcacatgaaacacttctgctgccttgagtgtgaaacggtcctgggaggacagaggtatatcatgaaggacggccgccccttctgctgtggctgttttgagtctctctatgcggagtactgtgaaacctgtggggaacatattggtgtggaccatgcacagatgacctatgacgggcagcactggcacgccacggaagcctgcttttcttgtgcccagtgtaaagcctctttgttgggatgtcccttccttcccaaacagggtcagatttactgctcaaaaacgtgcagtcttggtgaagacgtccatgcctctgattcttccgactctgcatttcagtcagctcgatcaagagactcccgaagaagtgtccgaatgggcaagagcagccggtcagcagatcagtgtagacagtctctcctcttatcgcctgctctgaactacaagtttcctggcctctcaggcaatgctgatgacaccctttctcgaaaattggatgatctgagtctctccagacaaggaacaagttttgccagtgaagaattttggaaaggcagagtagagcaggaaactccagaagaccctgaagaatgggctgatcatgaagattatatgacgcagctcctcctcaagtttggtgataaaagcctctttcagccacagcccaatgagatggatattcgagccagtgagcactggatatctgataacatggttaaaagtaagaccgagttaaagcaaaataaccagagccttgcaagtaaaaaataccagtctgatatgtactgggcacagtcacaagatggactgggcgattctgcttatggcagccacccaggccctgcaagcagtagaaggcttcaggaattggaactggaccatggggcttcagggtataatcatgatgaaacacagtggtatgaagattccctggagtgtctgtcagacctgaaaccagagcaaagtgttcgggattcgatggattctttggcattgtccaatatcacaggggcttcggtggatggagaaaacaagccaaggccatcattgtattctctgcaaaattttgaggagatggaaacagaagattgtgagaagatgagcaatatgggaactttgaactcttccatgctgcacaggagtgcagagtccttaaagagtctaagttcagagttgtgtccagagaaaatcctgcctgaagagaagccagtacatctgccagtgctcagaaggtccaagtctcaatccagaccccagcaggtcaagttttctgatgatgtcattgacaatgggaactatgacattgaaatccggcagcctccgatgagtgaaaggactcggagacgcgtctacaattttgaagagaggggatccaggtctcatcaccaccgccgccggagaagtagaaagtcccgctccgacaatgccctgaatcttgttacagaaagaaaatactctcccaaggacagactgcggctgtacacccccgataactatgagaaatttatacagaataaaagtgcccgggagatccaagcatacatccagaatgctgatctctacggacagtacgcccatgccacttccgattatggcctgcagaacccaggaatgaatcggtttctgggactctacggcgaggatgatgattcctggtgttcttcctcctcctcctcttccgactcggaagaagaaggatattttcttggacaaccaatccctcaaccccggccacagagatttgcctactatacagatgacctttctagtccaccatctgcacttcccacccctcagtttggtcagaggacaacaaaatccaagaagaaaaagggacacaagggcaaaaattgtattatttcttaaccaagtagtgatgcagagcatttgtttaaaacttagccattaaccgtctgaatcgtttccttttcttccgtaggaaagttgtgaaaatagtttaaagtgctttctttgcccatgtaaatgagaactcaactgctgtttacagtgtcagattaacatttgaaaggtgtgatttctccaatttaccctctttggatggtgccaggtggacgtgacatctcgtgcctgtccggtgcgggtgcgttacagatggacgtagctgctttggttttccagtcctcaagggaatactgaagatgctgactgaaggggattggatgttgattttagaagatggagaactccagccacctttgtaaagcactagtgtttgtcatttatgtaagtcaggtcggctcaggtcttgatagtccgtcttggtgtgaggcatgcctgtcacgatgacctagctaacactgtgcatcttattgtgaggccagcttgtcccctcgaaccctctttggccaggtaaacattgtattgtatcagcgccagctacagattgaaaaaaaaaaacaaaaaacattgctatttataacttagtatttcatagacttaagtgtattcctaatttaacggtgcaaatattaatgtatatactgtacagttcagattttaaagctgatatttttatatccctgaattgtaagccgtttgttacgctgcagtgctagatttgccagggaaccagaatttatggatgaactgattgcttatattttagtcagggtttataaatgtagatggtcaaatttacattgcctagtgatggaaaattcaactttttttgatttttttttccaatattaaaaaaggctctgtatgcatggtggggctatgtaagtactctttaaaactatggccctattaatcttacaagtgttacttatgggtcaagcaatgtaaactgtataaatgtaaaaacaacccctccacacacataa

SEQ ID NO: 16547 - DNA, 3635 bp, Homo sapiens
  source 1..3635: mol_type = unassigned DNA
ttttgaagatcgccggccccaggcgggctcccggcgctgagcggagacgagtttttctccccgcagaggaggatcctggaaggacgcggagctggggcttgggggatgcagtggcctggacgaggtgactccaacccgggggagcagagtccgtcacgccggcagggaccgagggtctctgcggagctggaggaccttttgtgggatgcctcacggctgctgaggggctgcagcggccattgtttgatgtcctgtgactgagaaaccaggctttaaactttatgcctttggagatggagcccaagatgagcaaactggcctttggctgtcagagaagttccacatcagatgatgactctggctgtgcattggaggagtacgcctgggtccccccgggcctgagaccagagcagatccagctctattttgcttgcttaccagaggaaaaagttccttacgttaacagccccggagagaagcatcggattaaacagcttttgtaccagttaccaccacatgataatgaggtacggtattgccagtctttgagtgaagaggagaaaaaagagttgcaggtgttcagtgctcagcggaagaaagaagcactgggaagaggaacaattaagcttctgtccagagcagtcatgcatgctgtgtgtgagcagtgtggtttgaagataaatggaggtgaagttgcagtgttcgcctcccgtgcgggccctggtgtgtgctggcacccatcctgttttgtctgtttcacgtgtaatgagctgctggtcgacctcatctatttttatcaggatggaaaaattcactgtggcaggcaccatgcagaactgctcaaaccacggtgctcagcatgtgacgagataatttttgctgatgagtgcacagaagctgagggtcgccattggcacatgaaacacttctgctgccttgagtgtgaaacggtcctgggaggacagaggtatatcatgaaggacggccgccccttctgctgtggctgttttgagtctctctatgcggagtactgtgaaacctgtggggaacatattggtgtggaccatgcacagatgacctatgacgggcagcactggcacgccacggaagcctgcttttcttgtgcccagtgtaaagcctctttgttgggatgtcccttccttcccaaacagggtcagatttactgctcaaaaacgtgcagtcttggtgaagacgtccatgcctctgattcttccgactctgcatttcagtcagctcgatcaagagactcccgaagaagtgtccgaatgggcaagagcagccggtcagcagatcagtgtagacagtctctcctcttatcgcctgctctgaactacaagtttcctggcctctcaggcaatgctgatgacaccctttctcgaaaattggatgatctgagtctctccagacaaggaacaagttttgccagtgaagaattttggaaaggcagagtagagcaggaaactccagaagaccctgaagaatgggctgatcatgaagattatatgacgcagctcctcctcaagtttggtgataaaagcctctttcagccacagcccaatgagatggatattcgagccagtgagcactggatatctgataacatggttaaaagtaagaccgagttaaagcaaaataaccagagccttgcaagtaaaaaataccagtctgatatgtactgggcacagtcacaagatggactgggcgattctgcttatggcagccacccaggccctgcaagcagtagaaggcttcaggaattggaactggaccatggggcttcagggtataatcatgatgaaacacagtggtatgaagattccctggagtgtctgtcagacctgaaaccagagcaaagtgttcgggattcgatggattctttggcattgtccaatatcacaggggcttcggtggatggagaaaacaagccaaggccatcattgtattctctgcaaaattttgaggagatggaaacagaagattgtgagaagatgagcaatatgggaactttgaactcttccatgctgcacaggagtgcagagtccttaaagagtctaagttcagagttgtgtccagagaaaatcctgcctgaagagaagccagtacatctgccagtgctcagaaggtccaagtctcaatccagaccccagcaggtcaagttttctgatgatgtcattgacaatgggaactatgacattgaaatccggcagcctccgatgagtgaaaggactcggagacgcgtctacaattttgaagagaggggatccaggtctcatcaccaccgccgccggagaagtagaaagtcccgctccgacaatgccctgaatcttgttacagaaagaaaatactctcccaaggacagactgcggctgtacacccccgataactatgagaaatttatacagaataaaagtgcccgggagatccaagcatacatccagaatgctgatctctacggacagtacgcccatgccacttccgattatggcctgcagaacccaggaatgaatcggtttctgggactctacggcgaggatgatgattcctggtgttcttcctcctcctcctcttccgactcggaagaagaaggatattttcttggacaaccaatccctcaaccccggccacagagatttgcctactatacagatgacctttctagtccaccatctgcacttcccacccctcagtttggtcagaggacaacaaaatccaagaagaaaaagggacacaagggcaaaaattgtattatttcttaaccaagtagtgatgcagagcatttgtttaaaacttagccattaaccgtctgaatcgtttccttttcttccgtaggaaagttgtgaaaatagtttaaagtgctttctttgcccatgtaaatgagaactcaactgctgtttacagtgtcagattaacatttgaaaggtgtgatttctccaatttaccctctttggatggtgccaggtggacgtgacatctcgtgcctgtccggtgcgggtgcgttacagatggacgtagctgctttggttttccagtcctcaagggaatactgaagatgctgactgaaggggattggatgttgattttagaagatggagaactccagccacctttgtaaagcactagtgtttgtcatttatgtaagtcaggtcggctcaggtcttgatagtccgtcttggtgtgaggcatgcctgtcacgatgacctagctaacactgtgcatcttattgtgaggccagcttgtcccctcgaaccctctttggccaggtaaacattgtattgtatcagcgccagctacagattgaaaaaaaaaaacaaaaaacattgctatttataacttagtatttcatagacttaagtgtattcctaatttaacggtgcaaatattaatgtatatactgtacagttcagattttaaagctgatatttttatatccctgaattgtaagccgtttgttacgctgcagtgctagatttgccagggaaccagaatttatggatgaactgattgcttatattttagtcagggtttataaatgtagatggtcaaatttacattgcctagtgatggaaaattcaactttttttgatttttttttccaatattaaaaaaggctctgt

SEQ ID NO: 16548 - DNA, 3341 bp, Homo sapiens
  source 1..3341: mol_type = unassigned DNA
ctgggctcgggagaatggagcgggcgggcggcggtaggtgctcgagccgctaggctggccaagggggtgggtaacttttcgaggaattgtgcgcgcgggacctcgtggagatcggccaggggcacggtcagcagtgacagttcctggaaagcgggcggcggcgggagcaggctgggcaggcgccgcccgcgggcgggagcggggagctgggtccggctgggatcgaagggcgggatcggcaggaaacgaaatgcagccattgtttgatgtcctgtgactgagaaaccaggctttaaactttatgcctttggagatggagcccaagatgagcaaactggcctttggctgtcagagaagttccacatcagatgatgactctggctgtgcattggaggagtacgcctgggtccccccgggcctgagaccagagcagatccagctctattttgcttgcttaccagaggaaaaagttccttacgttaacagccccggagagaagcatcggattaaacagcttttgtaccagttaccaccacatgataatgaggtacggtattgccagtctttgagtgaagaggagaaaaaagagttgcaggtgttcagtgctcagcggaagaaagaagcactgggaagaggaacaattaagcttctgtccagagcagtcatgcatgctgtgtgtgagcagtgtggtttgaagataaatggaggtgaagttgcagtgttcgcctcccgtgcgggccctggtgtgtgctggcacccatcctgttttgtctgtttcacgtgtaatgagctgctggtcgacctcatctatttttatcaggatggaaaaattcactgtggcaggcaccatgcagaactgctcaaaccacggtgctcagcatgtgacgagataatttttgctgatgagtgcacagaagctgagggtcgccattggcacatgaaacacttctgctgccttgagtgtgaaacggtcctgggaggacagaggtatatcatgaaggacggccgccccttctgctgtggctgttttgagtctctctatgcggagtactgtgaaacctgtggggaacatattggtgtggaccatgcacagatgacctatgacgggcagcactggcacgccacggaagcctgcttttcttgtgcccagtgtaaagcctctttgttgggatgtcccttccttcccaaacagggtcagatttactgctcaaaaacgtgcagtcttggtgaagacgtccatgcctctgattcttccgactctgcatttcagtcagctcgatcaagagactcccgaagaagtgtccgaatgggcaagagcagccggtcagcagatcagtgtagacagtctctcctcttatcgcctgctctgaactacaagtttcctggcctctcaggcaatgctgatgacaccctttctcgaaaattggatgatctgagtctctccagacaaggaacaagttttgccagtgaagaattttggaaaggcagagtagagcaggaaactccagaagaccctgaagaatgggctgatcatgaagattatatgacgcagctcctcctcaagtttggtgataaaagcctctttcagccacagcccaatgagatggatattcgagccagtgagcactggatatctgataacatggttaaaagtaagaccgagttaaagcaaaataaccagagccttgcaagtaaaaaataccagtctgatatgtactgggcacagtcacaagatggactgggcgattctgcttatggcagccacccaggccctgcaagcagtagaaggcttcaggaattggaactggaccatggggcttcagggtataatcatgatgaaacacagtggtatgaagattccctggagtgtctgtcagacctgaaaccagagcaaagtgttcgggattcgatggattctttggcattgtccaatatcacaggggcttcggtggatggagaaaacaagccaaggccatcattgtattctctgcaaaattttgaggagatggaaacagaagattgtgagaagatgagcaatatgggaactttgaactcttccatgctgcacaggagtgcagagtccttaaagagtctaagttcagagttgtgtccagagaaaatcctgcctgaagagaagccagtacatctgccagtgctcagaaggtccaagtctcaatccagaccccagcaggtcaagttttctgatgatgtcattgacaatgggaactatgacattgaaatccggcagcctccgatgagtgaaaggactcggagacgcgtctacaattttgaagagaggggatccaggtctcatcaccaccgccgccggagaagtagaaagtcccgctccgacaatgccctgaatcttgttacagaaagaaaatactctcccaaggacagactgcggctgtacacccccgataactatgagaaatttatacagaataaaagtgcccgggagatccaagcatacatccagaatgctgatctctacggacagtacgcccatgccacttccgattatggcctgcagaacccaggaatgaatcggtttctgggactctacggcgaggatgatgattcctggtgttcttcctcctcctcctcttccgactcggaagaagaaggatattttcttggacaaccaatccctcaaccccggccacagagatttgcctactatacagatgacctttctagtccaccatctgcacttcccacccctcagtttggtcagaggacaacaaaatccaagaagaaaaagggacacaagggcaaaaattgtattatttcttaaccaagtagtgatgcagagcatttgtttaaaacttagccattaaccgtctgaatcgtttccttttcttccgtaggaaagttgtgaaaatagtttaaagtgctttctttgcccatgtaaatgagaactcaactgctgtttacagtgtcagattaacatttgaaaggtgtgatttctccaatttaccctctttggatggtgccaggtggacgtgacatctcgtgcctgtccggtgcgggtgcgttacagatggacgtagctgctttggttttccagtcctcaagggaatactgaagatgctgactgaaggggattggatgttgattttagaagatggagaactccagccacctttgtaaagcactagtgtttgtcatttatgtaagtcaggtcggctcaggtcttgatagtccgtcttggtgtgaggcatgcctgtcacgatgacctagctaacactgtgcatcttattgtgaggccagcttgtcccctcgaaccctctttggccaggtaaacattgtattgtatcagcgccagctacagattgaaa

SEQ ID NO: 16549 - DNA, 3311 bp, Homo sapiens
  source 1..3311: mol_type = unassigned DNA
acttttgaagatcgccggccccaggcgggctcccggcgctgagcggagacgagtttttctccccgcagaggaggatcctggaaggacgcggagctggggcttgggggatgcagtggcctggacgaggtgactccaacccgggggagcagagtccgtcacgccggcagggaccgagggtctctgcggagctggaggaccttttgtgggatgcctcacggctgctgaggggctgcagcggcagccattgtttgatgtcctgtgactgagaaaccaggctttaaactttatgcctttggagatggagcccaagatgagcaaactggcctttggctgtcagagaagttccacatcagatgatgactctggctgtgcattggaggagtacgcctgggtccccccgggcctgagaccagagcagatccagctctattttgcttgcttaccagaggaaaaagttccttacgttaacagccccggagagaagcatcggattaaacagcttttgtaccagttaccaccacatgataatgaggtacggtattgccagtctttgagtgaagaggagaaaaaagagttgcaggtgttcagtgctcagcggaagaaagaagcactgggaagaggaacaattaagcttctgtccagagcagtcatgcatgctgtgtgtgagcagtgtggtttgaagataaatggaggtgaagttgcagtgttcgcctcccgtgcgggccctggtgtgtgctggcacccatcctgttttgtctgtttcacgtgtaatgagctgctggtcgacctcatctatttttatcaggatggaaaaattcactgtggcaggcaccatgcagaactgctcaaaccacggtgctcagcatgtgacgagataatttttgctgatgagtgcacagaagctgagggtcgccattggcacatgaaacacttctgctgccttgagtgtgaaacggtcctgggaggacagaggtatatcatgaaggacggccgccccttctgctgtggctgttttgagtctctctatgcggagtactgtgaaacctgtggggaacatattggtgtggaccatgcacagatgacctatgacgggcagcactggcacgccacggaagcctgcttttcttgtgcccagtgtaaagcctctttgttgggatgtcccttccttcccaaacagggtcagatttactgctcaaaaacgtgcagtcttggtgaagacgtccatgcctctgattcttccgactctgcatttcagtcagctcgatcaagagactcccgaagaagtgtccgaatgggcaagagcagccggtcagcagatcagtgtagacagtctctcctcttatcgcctgctctgaactacaagtttcctggcctctcaggcaatgctgatgacaccctttctcgaaaattggatgatctgagtctctccagacaaggaacaagttttgccagtgaagaattttggaaaggcagagtagagcaggaaactccagaagaccctgaagaatgggctgatcatgaagattatatgacgcagctcctcctcaagtttggtgataaaagcctctttcagccacagcccaatgagatggatattcgagccagtgagcactggatatctgataacatggttaaaagtaagaccgagttaaagcaaaataaccagagccttgcaagtaaaaaataccagtctgatatgtactgggcacagtcacaagatggactgggcgattctgcttatggcagccacccaggccctgcaagcagtagaaggcttcaggaattggaactggaccatggggcttcagggtataatcatgatgaaacacagtggtatgaagattccctggagtgtctgtcagacctgaaaccagagcaaagtgttcgggattcgatggattctttggcattgtccaatatcacaggggcttcggtggatggagaaaacaagccaaggccatcattgtattctctgcaaaattttgaggagatggaaacagaagattgtgagaagatgagcaatatgggaactttgaactcttccatgctgcacaggagtgcagagtccttaaagagtctaagttcagagttgtgtccagagaaaatcctgcctgaagagaagccagtacatctgccagtgctcagaaggtccaagtctcaatccagaccccagcaggtcaagttttctgatgatgtcattgacaatgggaactatgacattgaaatccggcagcctccgatgagtgaaaggactcggagacgcgtctacaattttgaagagaggggatccaggtctcatcaccaccgccgccggagaagtagaaagtcccgctccgacaatgccctgaatcttgttacagaaagaaaatactctcccaaggacagactgcggctgtacacccccgataactatgagaaatttatacagaataaaagtgcccgggagatccaagcatacatccagaatgctgatctctacggacagtacgcccatgccacttccgattatggcctgcagaacccaggaatgaatcggtttctgggactctacggcgaggatgatgattcctggtgttcttcctcctcctcctcttccgactcggaagaagaaggatattttcttggacaaccaatccctcaaccccggccacagagatttgcctactatacagatgacctttctagtccaccatctgcacttcccacccctcagtttggtcagaggacaacaaaatccaagaagaaaaagggacacaagggcaaaaattgtattatttcttaaccaagtagtgatgcagagcatttgtttaaaacttagccattaaccgtctgaatcgtttccttttcttccgtaggaaagttgtgaaaatagtttaaagtgctttctttgcccatgtaaatgagaactcaactgctgtttacagtgtcagattaacatttgaaaggtgtgatttctccaatttaccctctttggatggtgccaggtggacgtgacatctcgtgcctgtccggtgcgggtgcgttacagatggacgtagctgctttggttttccagtcctcaagggaatactgaagatgctgactgaaggggattggatgttgattttagaagatggagaactccagccacctttgtaaagcactagtgtttgtcatttatgtaagtcaggtcggctcaggtcttgatagtccgtcttggtgtgaggcatgcctgtcacgatgacctagctaacactgtgcatcttattgtgaggccagcttgtcccctcgaaccctctttggccaggtaaacattgtattgtatcagcgcc

SEQ ID NO: 16550 - DNA, 782 bp, Homo sapiens
  source 1..782: mol_type = unassigned DNA
cgactctgcatttcagtcagctcgatcaagagactcccgaagaagtgtccgaatgggcaagagcagccggtcagcagatcagtgtagacagtctctcctcttatcgcctgctctgaactacaagtttcctggcctctcaggcaatgctgatgacaccctttctcgaaaattggatgatctgagtctctccagacaaggaacaagttttgccagtgaagaattttggaaaggcagagtagagcaggaaactccagaagaccctgaagaatgggctgatcatgaagattatatgacgcagctcctcctcaagtttggtgataaaagcctctttcagccacagcccaatgagatggatattcgagccagtgagcactggatatctgataacatggttaaaagtaagaccgagttaaagcaaaataaccagagccttgcaagtaaaaaataccagtctgatatgtactgggcacagtcacaagatggactgggcgattctgcttatggcagccacccaggccctgcaagcagtagaaggcttcaggaattggaactggaccatggggcttcagggtataatcatgatgaaacacagtggtatgaagattccctggagtgtctgtcagacctgaaaccagagcaaagtgttcgggattcgatggattctttggcattgtccaatatcacaggtggagtttcgcccttgtcgcccaggatggagtgcaatggcgcagtctcacctcactgcaacctccatctcccgggttcaagtgattcttctgcct

SEQ ID NO: 16551 - DNA, 320 bp, Homo sapiens
  source 1..320: mol_type = unassigned DNA
tctttttgaagataatttttgctgatgagtgcacagaagctgagggtcgccattggcacatgaaacacttctgctgccttgagtgtgaaacggtcctgggaggacagaggtatatcatgaaggacggccgccccttctgctgtggctgttttgagtctctctatgcggagtactgtgaaacctgtggggaacatattggtgtggaccatgcacagatgacctatgacgggcagcactggcacgccacggaagcctgcttttcttgtgcccagtgtaaagcctctttgttgggatgtcccttccttcccaaacagggtcag

SEQ ID NO: 16552 - DNA, 789 bp, Homo sapiens
  source 1..789: mol_type = unassigned DNA
tgcgctgctcaccctcgcccacccctgacgccgcggaccgcagctcctcagccccgcagccccgcagcccagcagccccgcagcggcgccgaggacagtgcagccgagttgcgtctccctcgcgcgaggatagccattttctttgagcaagcacaacaaactttttaataaaggaattttaaagaaacatttatagcagtttggattaccccaaagaagtaaaggggaaaaggttatcttagagcatattcagccattgtttgatgtcctgtgactgagaaaccaggctttaaactttatgcctttggagatggagcccaagatgagcaaactggcctttggctgtcagagaagttccacatcagatgatgactctggctgtgcattggaggagtacgcctgggtccccccgggcctgagaccagagcagatccagctctattttgcttgcttaccagaggaaaaagttccttacgttaacagccccggagagaagcatcggattaaacagcttttgtaccagttaccaccacatgataatgaggtacggtattgccagtctttgagtgaagaggagaaaaaagagttgcaggtgttcagtgctcagcggaagaaagaagcactgggaagaggaacaattaagcttctgtccagagcagtcatgcatgctgtgtgtgagcagtgtggtttgaagataaatggaggtgaagttgcagtgttcgcctcccgtgcgggccctggtgtgtgctggcacccatcctgttttgtctgtttcacgtgtaatgagct

SEQ ID NO: 16553 - DNA, 554 bp, Homo sapiens
  source 1..554: mol_type = unassigned DNA
gtagacagggaaagcagatattggctgcagcatcgccagggctccgcagaggctctccgcatggctcctgtttgctgcatcacaaccaactcttcccttggttttctccggcgtggaaacagcagccattgtttgatgtcctgtgactgagaaaccaggctttaaactttatgcctttggagatggagcccaagatgagcaaactggcctttggctgtcagagaagttccacatcagatgatgactctggctgtgcattggaggagtacgcctgggtccccccgggcctgagaccagagcagatccagctctattttgcttgcttaccagaggaaaaagttccttacgttaacagccccggagagaagcatcggattaaacagcttttgtaccagttaccaccacatgataatgaggtacggtattgccagtctttgagtgaagaggagaaaaaagagttgcaggtgttcagtgctcagcggaagaaagaagcactgggaagaggaacaattaagcttctgtccagagcagtcatgcatgctgtgtgtgagcag

SEQ ID NO: 16554 - DNA, 712 bp, Homo sapiens
  source 1..712: mol_type = unassigned DNA
ggggcttcgcgtcggcgccgaggaggggttcgctcgctgcctctgcgtcctgagctcggcctctggctcctggggccggggacgcagagaggggctggagccggtcgacccacggcccagggcgccccctcgcggcctaagcagcggccgccgcctggagcgcagagtttgcggggcccagggggcgccgacgcccgctctgaggcgtctctgctgctgcggcggcggggatggggacgacccaggggaccccctgcagccatcactggcagccccatcaagaattggccggctgagttttcccaaacagccattgtttgatgtcctgtgactgagaaaccaggctttaaactttatgcctttggagatggagcccaagatgagcaaactggcctttggctgtcagagaagttccacatcagatgatgactctggctgtgcattggaggagtacgcctgggtccccccgggcctgagaccagagcagatccagctctattttgcttgcttaccagaggaaaaagttccttacgttaacagccccggagagaagcatcggattaaacagcttttgtaccagttaccaccacatgataatgaggtacggtattgccagtctttgagtgaagaggagaaaaaagagttgcaggtgttcagtgctcagcggaagaaagaagcactgggaagaggaacaattaagcttctgtccaga

SEQ ID NO: 16555 - DNA, 456 bp, Homo sapiens
  source 1..456: mol_type = unassigned DNA
catgccagcctcgcgcagcctgcgctgacttccccgagacgcgccgcggtcggcacggagactttctgggctctggatgcagccattgtttgatgtcctgtgactgagaaaccaggctttaaactttatgcctttggagatggagcccaagatgagcaaactggcctttggctgtcagagaagttccacatcagatgatgactctggctgtgcattggaggagtacgcctgggtccccccgggcctgagaccagagcagatccagctctattttgcttgcttaccagaggaaaaagttccttacgttaacagccccggagagaagcatcggattaaacagcttttgtaccagttaccaccacatgataatgaggtacggtattgccagtctttgagtgaagaggagaaaaaagagttgcaggtgttcagtgctcagcggaagaaagaagcactggg

SEQ ID NO: 16556 - DNA, 711 bp, Homo sapiens
  source 1..711: mol_type = unassigned DNA
catgccagcctcgcgcagcctgcgctgacttccccgagacgcgccgcggtcggcacggagactttctgggctctggatggttcgtgcgctgctcaccctcgcccacccctgacgccgcggaccgcagctcctcagccccgcagccccgcagcccagcagccccgcagcggcgccgaggacagtgcagccgagttgcgtctccctcgcgcgagataaggtctcgctctgttgcccaggctggagtgcagtggcgcgatcatggctcactgcagcctcgacctcctggactcaagcgattctcccaccttggcctcctgagtagctgggaccacagcagccattgtttgatgtcctgtgactgagaaaccaggctttaaactttatgcctttggagatggagcccaagatgagcaaactggcctttggctgtcagagaagttccacatcagatgatgactctggctgtgcattggaggagtacgcctgggtccccccgggcctgagaccagagcagatccagctctattttgcttgcttaccagaggaaaaagttccttacgttaacagccccggagagaagcatcggattaaacagcttttgtaccagttaccaccacatgataatgaggtacggtattgccagtctttgagtgaagaggagaaaaaagagttgcaggtgttcagtgctcagcggaagaaagaagcactggg

SEQ ID NO: 16557 - DNA, 766 bp, Homo sapiens
  source 1..766: mol_type = unassigned DNA
acggagactttctgggctctggatggttcgtgcgctgctcaccctcgcccacccctgacgccgcggaccgcagctcctcagccccgcagccccgcagcccagcagccccgcagcggcgccgaggacagtgcagccgagttgcgtctccctcgcgcgaggatagccattttctttgagcaagcacaacaaactttttaataaaggaattttaaagaaacatttatagcagtttggattaccccaaagaagtaaaggggaaaaggttatcttagagcatattcagccattgtttgatgtcctgtgactgagaaaccaggctttaaactttatgcctttggagatggagcccaagatgagcaaactggcctttggctgtcagagaagttccacatcagatgatgactctggctgtgcattggaggagtacgcctgggtccccccgggcctgagaccagagcagatccagctctattttgcttgcttaccagaggaaaaagttccttacgttaacagccccggagagaagcatcggattaaacagcttttgtaccagttaccaccacatgataatgagtgtttgcagccacccaccaatgatcaggaacctacaaattcctgagatttcccagcccctgcatccagagtgaatgctttatggtcattcaggcctgcagttgagttgagtgcatgtagaatggagagtaaaagtggcaattaacaagtttaaaccttttgtggaaaggttaatgtcctatatatatttttt

SEQ ID NO: 16558 - DNA, 453 bp, Homo sapiens
  source 1..453: mol_type = unassigned DNA
actccgcctgcagcccagctgccagcgccgtctcccgcggccgccgccgcccgacagcgcgcccggaacatgccagcctcgcgcagcctgcgctgacttccccgagacgcgccgcggtcggcacggagactttctgggctctggatggttcgtgcgctgctcaccctcgcccacccctgacgccgcggaccgcagctcctcagccccgcagccccgcagcccagcagccccgcagcggcgccgaggacagtgcagccgagttgcgtctccctcgcgcgagatcgccggccccaggcgggctcccggcgctgagcggagacgagtttttctccccgcagaggaggatcctggaaggacgcggagctggggcttgggggatgcagtggcctggacgaggtgactccaacccgggggagcagagtccgtcacgccggcagggaccgagggtctctg

SEQ ID NO: 16559 - DNA, 574 bp, Homo sapiens
  source 1..574: mol_type = unassigned DNA
gcactccgcctgcagcccagctgccagcgccgtctcccgcggccgccgccgcccgacagcgcgcccggaacatgccagcctcgcgcagcctgcgctgacttccccgagacgcgccgcggtcggcacggagactttctgggctctggatggttcgtgcgctgctcaccctcgcccacccctgacgccgcggaccgcagctcctcagccccgcagccccgcagcccagcagccccgcagcggcgccgaggacagtgcagccgagttgcgtctccctcgcgcgagtgaccagcctagaagctgaagctacccagcggctgccagctagcagtcatctcattagcatacaaaaaagactatcatgttggaatcatgtgaaatcacgttggacattccaaggattttaggagttgtgtgccaggaaacctggacaaagaccaactatacatttcacgatgtcagaacgagtaagtggcaaagctggcaccaaggctggatgactccagaattcgtgtccttaaccactatgcctcactatcttccaaaaaaacaaatattctaaagacaatcataactg

SEQ ID NO: 16560 - DNA, 3711 bp, Homo sapiens
  source 1..3711: mol_type = unassigned DNA
agagctgccgcggggggaacgcggacctcttttccccgagcccagggtcggctggggccgccgccaggcaagttcgccccaggagcgggcgccgctggccgagatgctcctccgggacttggtgctgcgccgtggctgctgctggtcctcgctgctgctgcactgcgcgctccacccgctctggggcttcgtgcaggtgacgcatggtgagccccagaagtcctgctccaaagtgactgacagctgccgacacgtctgccagtgccggccccctcccccgctgcccccgccgcccccacccccgccacctcccagactcctctccgccccagctcccaactctacctcttgccccactgaggaaagctggtggtcggggctggtgatcatcattgccgtatgctgtgcctccctggtgtttctgactgtgcttgtcatcatttgctacaaagccataaaaaggaaaccactgagaaaagacgaaaatggcaccagcgttgctgagtatcccatgagtgcttcgcagagcaacaaaggagtagacgtgaacaacgcagtggtgtgagtctgcaggccctggacccgctggccagagggacaccttggtggcactggtggacatgggaaagcaggtggacatgagctaaccctgagcttgtccaggacttcattgcctcacaggccctgagcctcccgaaggagaaaccattgtcttcccaggcttgcccctggtcagcctgcgggcccaggcagctcggacaccaggctgagcccggcgcagcacctgggcagtgtccccaccccaggccctccacatcctcctccctgtctggtgtctggtctgtcgactgcccccagctgctgtctaaagcatgcgcactggcgaagccagagggatctgtctttctactgtggcagggaggcttccccctttagccaaaagaaagatggtccggagcccactccctgccggaaaacctctcctcctcccaggaagcctgcctgctccactgttcacattctcaacagaagccatcggcacagccagcagacagacgtcccctttcaaaggtgcttcccacacatctgttcatcgccccatctgcagttgttgtcaatcttcagggcctgccttctccctcctatccccactgacaccctacaccctaggctcctgactgcctgccatggagggctgtgagtccagcctgcagaatcccctcctgagcagacacaggagtgcgtttacactcgggggcagtgtctggccttccgggggcaaaacgactcactgaacccgcagcccagggccactgggcaagggcagaggccactgcacctgtcctcagactcatccccacacttgaccccataggaactgatgcatctgtgtgagccaggccctgccttagtcagcagaggccactacttgtgccaaatccactgtgggcctgctgtaccaggctgatgctggccaggcgctggatgtcccccacagtcccctgaggcctgactgttgtactcaggccctctcccagagtcctccatcatctccccattttaccctaccccgagccccagtcgccaagaaggaggtgttgttcttccagggtcttcctttcaatgtctgtttccacagtctcatgctatagaagcgctgagccctccagcgtggttggaggatcaagggatgaaatgggacaggaggagaggggtcctccaggctggtgacccctgccctgttggcctgtctcccaagtggcagccttccctgtgggccacatcaggaaacccacggagacagggtgattttgcatctcctggaaaatgagtgggacactcctggccccctggctctccccaccacccctacatatgtgctcagaaggagcccaatgcattgaatggttccactgtcgagccctctaagacctggtttgcctcctaaacctccagtgtgctcctctgataggtgtttaagctacaggtgagactttgaagtccagagaagacagacacacctgaaaaccggtccccatttgggccgaaccttaaaaagcccattgtcccagagtcctagtgcccacggagctgtctgtgtgtcattgtcctgcccaggtcatcaggtgtgggctgaggacaggcccagggcataccctcccataaaggggttttcttctttcctcatttccttctatttgaggacttgtttggggtttagatttgaattttgcttcccctggacacctgggcatcagcatagtgccaccccctgctcctgacctggccagtacttcacagtgctcttgaggtgcggagccagctgacaaataggccagagggtgtgggccagcagcaggttaaagggggaaacccagcagaccccaccccagggcactctcccctactgccttcagccttctggtgcctgttgaacccccaagctgtgccctaagcagacccctgggcaggaccctagccctaagcacacaccaccctgtgctgcaaccatgagaaagtgcccatgccttgggctgtccagaagctcaggagtgatcagagggcaccttctctaagaggggaggttcctggctaagggaccatggagtggtgggcagcctgaaggggctgggcacagcccagctttgcgcacactcgcctggtcccatcattccctaccttggcttaaacctaggaggcctggattttgcagttagcctaatcttccagccccaggcgaggctccctggtgaggaatcagctgagccatcaccacgttttggggcctgtatcctcttccctgagccgctgacgcatccagggctctagtctgcacataaattccctctcagctgggcttgtaaaatcccttctcaccccagttagcaaaaatcaagggaagagcctagtttttttaaaagattcacttaatatccaccccccacctcaagcccaagaccgcccattcaaaaaacaagtatacggcacagcaagggagacccactagattttgagcttacagagacataagggtacttaaaaccctgccggcctagtatttgagcttagaacttttatttaaaatgagccggcagtctctagacacacaccgatcctcaggctagtccgagccctgaggtcaagaatgaaatgcacttcccttctcattttctcaaatagatcttttccagccgtctcacagttgaccccaactttggaactcagatcataggatctcccagaggtttcaggtgttcctaagaagcttctaaaggaagttttggaagaaagactaataggtgtaaacatataaacatatatattatatatagctatatatatttaaagagatctctacatatatatatatatataaatacaactactgtactctctgcatctgtacaaagtatgagttaaactgcccaggtagtgtgagatacgtaatgcatgaatgtgaatatcctgaaatctgccttcttagcaacgtgccgcgtgtactggagagaggacagttgctcctgggagttctctcaatgggcaaatgtacaagttgatgccgtcttatccaccaacaagccattaaggttggtttcctgctgagacttttgtaccggaagcgagaccggcagcactgggggtgtccatatgccacttatgaggaagaaagcaccatgacttttttattttcaataaaaatatagagatgtc

SEQ ID NO: 16561 - DNA, 1081 bp, Homo sapiens
  source 1..1081: mol_type = unassigned DNA
cgccaggcaagttcgccccaggagcgggcgccgctggccgagatgctcctccgggacttggtgctgcgccgtggctgctgctggtcctcgctgctgctgcactgcgcgctccacccgctctggggcttcgtgcaggtgacgcatggtgagccccagaagtcctgctccaaagtgactgacagctgccgacacgtctgccagtgccggccccctcccccgctgcccccgccgcccccacccccgccacctcccagactcctctccgccccagctcccaactctacctcttgccccactgaggaaagctggtggtcggggctggtgatcatcattgccgtatgctgtgcctccctggtgtttctgactgtgcttgtcatcatttgctacaaagccataaaaaggaaccatgccatctagggagccctctgtggccatctctgcctggaccagggtggaaatgcctcttcttggtttaatgagaccagcctcagctgactcacagagctgcagagccaggctgggtcctaacaactctctctagcatttccggagccccacggggcacgcgttaggaaaccactgagaaaagacgaaaatggcaccagcgttgctgagtatcccatgagtgcttcgcagagcaacaaaggagtagacgtgaacaacgcagtggtgtgagtctgcaggccctggacccgctggccagagggacaccttggtggcactggtggacatgggaaagcaggtggacatgagctaaccctgagcttgtccaggacttcattgcctcacaggccctgagcctcccgaaggagaaaccattgtcttcccaggcttgcccctggtcagcctgcgggcccaggcagctcggacaccaggctgagcccggcgcagcacctgggcagtgtccccaccccaggccctccacatcctcctccctgtctggtgtctggtctgtcgactgcccccagctgctgtctaaagcatgcgcactggcgaagccagagggatctgtctttctactgtggcagggaggcttccccctttagccaaaagaaagatggtccggagcccactccctgcc

SEQ ID NO: 16562 - DNA, 3649 bp, Homo sapiens
  source 1..3649: mol_type = unassigned DNA
ctcctgacagttcgccccaggagcgggcgccgctggccgagatgctcctccgggacttggtgctgcgccgtggctgctgctggtcctcgctgctgctgcactgcgcgctccacccgctctggggcttcgtgcaggtgacgcatggtgagccccagaagtcctgctccaaagtgactgacagctgccgacacgtctgccagtgccggccccctcccccgctgcccccgccgcccccacccccgccacctcccagactcctctccgccccagctcccaactctacctcttgccccactgaggaaagctggtggtcggggctggtgatcatcattgccgtatgctgtgcctccctggtgtttctgactgtgcttgtcatcatttgctacaaagccataaaaaggaaaccactgagaaaagacgaaaatggcaccagcgttgctgagtatcccatgagtgcttcgcagagcaacaaaggagtagacgtgaacaacgcagtggtgtgagtctgcaggccctggacccgctggccagagggacaccttggtggcactggtggacatgggaaagcaggtggacatgagctaaccctgagcttgtccaggacttcattgcctcacaggccctgagcctcccgaaggagaaaccattgtcttcccaggcttgcccctggtcagcctgcgggcccaggcagctcggacaccaggctgagcccggcgcagcacctgggcagtgtccccaccccaggccctccacatcctcctccctgtctggtgtctggtctgtcgactgcccccagctgctgtctaaagcatgcgcactggcgaagccagagggatctgtctttctactgtggcagggaggcttccccctttagccaaaagaaagatggtccggagcccactccctgccggaaaacctctcctcctcccaggaagcctgcctgctccactgttcacattctcaacagaagccatcggcacagccagcagacagacgtcccctttcaaaggtgcttcccacacatctgttcatcgccccatctgcagttgttgtcaatcttcagggcctgccttctccctcctatccccactgacaccctacaccctaggctcctgactgcctgccatggagggctgtgagtccagcctgcagaatcccctcctgagcagacacaggagtgcgtttacactcgggggcagtgtctggccttccgggggcaaaacgactcactgaacccgcagcccagggccactgggcaagggcagaggccactgcacctgtcctcagactcatccccacacttgaccccataggaactgatgcatctgtgtgagccaggccctgccttagtcagcagaggccactacttgtgccaaatccactgtgggcctgctgtaccaggctgatgctggccaggcgctggatgtcccccacagtcccctgaggcctgactgttgtactcaggccctctcccagagtcctccatcatctccccattttaccctaccccgagccccagtcgccaagaaggaggtgttgttcttccagggtcttcctttcaatgtctgtttccacagtctcatgctatagaagcgctgagccctccagcgtggttggaggatcaagggatgaaatgggacaggaggagaggggtcctccaggctggtgacccctgccctgttggcctgtctcccaagtggcagccttccctgtgggccacatcaggaaacccacggagacagggtgattttgcatctcctggaaaatgagtgggacactcctggccccctggctctccccaccacccctacatatgtgctcagaaggagcccaatgcattgaatggttccactgtcgagccctctaagacctggtttgcctcctaaacctccagtgtgctcctctgataggtgtttaagctacaggtgagactttgaagtccagagaagacagacacacctgaaaaccggtccccatttgggccgaaccttaaaaagcccattgtcccagagtcctagtgcccacggagctgtctgtgtgtcattgtcctgcccaggtcatcaggtgtgggctgaggacaggcccagggcataccctcccataaaggggttttcttctttcctcatttccttctatttgaggacttgtttggggtttagatttgaattttgcttcccctggacacctgggcatcagcatagtgccaccccctgctcctgacctggccagtacttcacagtgctcttgaggtgcggagccagctgacaaataggccagagggtgtgggccagcagcaggttaaagggggaaacccagcagaccccaccccagggcactctcccctactgccttcagccttctggtgcctgttgaacccccaagctgtgccctaagcagacccctgggcaggaccctagccctaagcacacaccaccctgtgctgcaaccatgagaaagtgcccatgccttgggctgtccagaagctcaggagtgatcagagggcaccttctctaagaggggaggttcctggctaagggaccatggagtggtgggcagcctgaaggggctgggcacagcccagctttgcgcacactcgcctggtcccatcattccctaccttggcttaaacctaggaggcctggattttgcagttagcctaatcttccagccccaggcgaggctccctggtgaggaatcagctgagccatcaccacgttttggggcctgtatcctcttccctgagccgctgacgcatccagggctctagtctgcacataaattccctctcagctgggcttgtaaaatcccttctcaccccagttagcaaaaatcaagggaagagcctagtttttttaaaagattcacttaatatccaccccccacctcaagcccaagaccgcccattcaaaaaacaagtatacggcacagcaagggagacccactagattttgagcttacagagacataagggtacttaaaaccctgccggcctagtatttgagcttagaacttttatttaaaatgagccggcagtctctagacacacaccgatcctcaggctagtccgagccctgaggtcaagaatgaaatgcacttcccttctcattttctcaaatagatcttttccagccgtctcacagttgaccccaactttggaactcagatcataggatctcccagaggtttcaggtgttcctaagaagcttctaaaggaagttttggaagaaagactaataggtgtaaacatataaacatatatattatatatagctatatatatttaaagagatctctacatatatatatatatataaatacaactactgtactctctgcatctgtacaaagtatgagttaaactgcccaggtagtgtgagatacgtaatgcatgaatgtgaatatcctgaaatctgccttcttagcaacgtgccgcgtgtactggagagaggacagttgctcctgggagttctctcaatgggcaaatgtacaagttgatgccgtcttatccaccaacaagccattaaggttggtttcctgctgagacttttgtaccggaagcgagaccggcagcactgggggtgtccatatgccacttatgaggaagaaagcaccatgacttttttattttcaataaaaatatagagatgtc

SEQ ID NO: 16563 - DNA, 1080 bp, Homo sapiens
  source 1..1080: mol_type = unassigned DNA
ctcctgacagttcgccccaggagcgggcgccgctggccgagatgctcctccgggacttggtgctgcgccgtggctgctgctggtcctcgctgctgctgcactgcgcgctccacccgctctggggcttcgtgcaggtgacgcatggtgagccccagaagtcctgctccaaagtgactgacagctgccgacacgtctgccagtgccggccccctcccccgctgcccccgccgcccccacccccgccacctcccagactcctctccgccccagctcccaactctacctcttgccccactgaggaaagctggtggtcggggctggtgatcatcattgccgtatgctgtgcctccctggtgtttctgactgtgcttgtcatcatttgctacaaagccataaaaaggaaccatgccatctagggagccctctgtggccatctctgcctggaccagggtggaaatgcctcttcttggtttaatgagaccagcctcagctgactcacagagctgcagagccaggctgggtcctaacaactctctctagcatttccggagccccacggggcacgcgttaggaaaccactgagaaaagacgaaaatggcaccagcgttgctgagtatcccatgagtgcttcgcagagcaacaaaggagtagacgtgaacaacgcagtggtgtgagtctgcaggccctggacccgctggccagagggacaccttggtggcactggtggacatgggaaagcaggtggacatgagctaaccctgagcttgtccaggacttcattgcctcacaggccctgagcctcccgaaggagaaaccattgtcttcccaggcttgcccctggtcagcctgcgggcccaggcagctcggacaccaggctgagcccggcgcagcacctgggcagtgtccccaccccaggccctccacatcctcctccctgtctggtgtctggtctgtcgactgcccccagctgctgtctaaagcatgcgcactggcgaagccagagggatctgtctttctactgtggcagggaggcttccccctttagccaaaagaaagatggtccggagcccactccctgcc

SEQ ID NO: 16564 - DNA, 3711 bp, Homo sapiens; identical to SEQ ID NO: 16560
  source 1..3711: mol_type = unassigned DNA

SEQ ID NO: 16565 - DNA, 1081 bp, Homo sapiens; identical to SEQ ID NO: 16561
  source 1..1081: mol_type = unassigned DNA

SEQ ID NO: 16566 - DNA, 1080 bp, Homo sapiens; identical to SEQ ID NO: 16563
  source 1..1080: mol_type = unassigned DNA

SEQ ID NO: 16567 - DNA, 3649 bp, Homo sapiens; identical to SEQ ID NO: 16562
  source 1..3649: mol_type = unassigned DNA

SEQ ID NO: 16568 - DNA, 3305 bp, Homo sapiens
  source 1..3305: mol_type = unassigned DNA
gagctggtttattctgcggccgaggattacatttatgcacgaacgggcttactggttccagattccccacttgggcacaggcataggaggcttgttttccaaattgctggttttaattgcacctgcctttcagattacctctgggaatctgtgggaggagccgagagggtggaaaatgtttcttagctttgcaaaaggaagaaaactttgtcacccagcgggagacctcagccacgagtaacccggggagacaccagaaccgggacgggctttgactgatttgcctacgagggttccgtaggaaaggacgcttgaattcggcgcttcggcggcggcggcggccgcgcgagttccctgctcaccctccctctccgcggaagtccccacgaggtggcttcagggtgtaacagagcgcgcggctccagtccgaaggcagcggccgggggagggaaggaggggaccgaacccccgaggagtttcgcagaatcaacttctggttagagttatgggaagcgcggttatggacaccaagaagaaaaaagatgtttccagccccggcgggagcggcggcaagaaaaatgccagccagaagaggcgttcgctgcgcgtgcacattccggacctgagctccttcgccatgccgctcctggacggagacctggagggttccggaaagcattcctctcgaaaggtggacagccccttcggcccgggcagcccctccaaagggttcttctccagaggcccccagccccggccctccagccccatgtctgcacctgtgaggcccaagaccagccccggctctcccaaaaccgtgttcccgttctcctaccaggagtccccgccacgctcccctcgacgcatgagcttcagtgggatcttccgctcctcctccaaagagtcttcccccaactccaaccctgctacctcgcccgggggcatcaggtttttctcccgctccagaaaaacctccggcctctcctcctctccgtcaacacccacccaagtgaccaagcagcacacgtttcccctggaatcctataagcacgagcctgaacggttagagaatcgcatctatgcctcgtcttcccccccggacacagggcagaggttctgcccgtcttccttccagagcccgaccaggcctccactggcatcaccgacacactatgctccctccaaagccgcggcgctggcggcggccctgggacccgcggaagccggcatgctggagaagctggagttcgaggacgaagcagtagaagactcagaaagtggtgtttacatgcgattcatgaggtcacacaagtgttatgacatcgttccaaccagttcaaagcttgttgtctttgatactacattacaagttaaaaaggccttctttgctttggtagccaacggtgtccgagcagcgccactgtgggagagtaaaaaacaaagttttgtaggaatgctaacaattacagatttcataaatatactacatagatactataaatcacctatggtacagatttatgaattagaggaacataaaattgaaacatggagggagctttatttacaagaaacatttaagcctttagtgaatatatctccagatgcaagcctcttcgatgctgtatactccttgatcaaaaataaaatccacagattgcccgttattgaccctatcagtgggaatgcactttatatacttacccacaaaagaatcctcaagttcctccagctttttatgtctgatatgccaaagcctgccttcatgaagcagaacctggatgagcttggaataggaacgtaccacaacattgccttcatacatccagacactcccatcatcaaagccttgaacatatttgtggaaagacgaatatcagctctgcctgttgtggatgagtcaggaaaagttgtagatatttattccaaatttgatgtaattaatcttgctgctgagaaaacatacaataacctagatatcacggtgacccaggcccttcagcaccgttcacagtattttgaaggtgttgtgaagtgcaataagctggaaatactggagaccatcgtggacagaatagtaagagctgaggtccatcggctggtggtggtaaatgaagcagatagtattgtgggtattatttccctgtcggacattctgcaagccctgatcctcacaccagcaggtgccaaacaaaaggagacagaaacggagtgaccgccgtgaatgtagacgccctaggaggagaacttgaacaaagtctctgggtcacgttttgcctcatgaacactggctgcaagtggttaagaatgtatatcagggtttaacaataggtatttcttccagtgatgttgaaattaagcttaaaaaagaaagattttatgtgcttgaagattcaggcttgcattaaaagactgttttcagacctttgtctgaaggattttaaatgctgtatgtcattaaagtgcactgtgtcctgaagttttcattatttttcatttcaaagaattcactggtatggaacaggtgatgtggcataaggtgagtgcacggtatgttcagatcacagtgccttatgtccgaatacagcaatatgtcaccgccgcagccggggcgcacgcgtgtgaaacaacaccgagcttgaatgtggaagtctttgaaccttttaccaaatcagtttgttttctttagatttgtcaaaaagttgtaatttgaatataaataattactttaaaattgtaatgacacttttacacgtaagtgttttgttctgggctaccgtgtcaacgaggctgctttacaacagctttatttatttttactttcatgcaatttttttacacatcttttggtggagtaaacttcaccacatccatgaataaactctcagttattttgaaatggcaaatttctcattatttaagtttggatctggaaaggacatgacttctgaaatagccgctgctgggttttaaaagctgaggtctctcaaagtgtggaggagacgttgccgtcaggcgggagccaagtgccgggaagatgtctattttttttcttgtgtattgaaatgtaaaatcatgatgtttgttatgactgctgatgcgattgtttttgtaaattttattgtggcatatacagtattgtcatacagttgaagagaaacaatgtttcctaatgtaagtgctctgaaaatgttgacactgtatatatatatatgaggatagtttgttttttttttgttttgggtttttttttttcagattgaaaaattaaaatagatcctactatctaccattttgttaaagaa

SEQ ID NO: 16569 - DNA, 2318 bp, Homo sapiens
  source 1..2318: mol_type = unassigned DNA
gcggccgcgccacctgcggcggcggcggcggcctcgggcgggtgggggcagcgctcccgctccgcccccggcccccgctgcccgcgtcccctgccaggcccctcctcccggcggcgcggcagagccaggccccagcgctcggccggccgcgagcccgccggccggggacgagcgtcgcagctcatgctgatcgctgtcctcctcctccccctcaggcggcgctggcggcggccctgggacccgcggaagccggcatgctggagaagctggagttcgaggacgaagcagtagaagactcagaaagtggtgtttacatgcgattcatgaggtcacacaagtgttatgacatcgttccaaccagttcaaagcttgttgtctttgatactacattacaagttaaaaaggccttctttgctttggtagccaacggtgtccgagcagcgccactgtgggagagtaaaaaacaaagttttgtaggaatgctaacaattacagatttcataaatatactacatagatactataaatcacctatggtacagatttatgaattagaggaacataaaattgaaacatggagggagctttatttacaagaaacatttaagcctttagtgaatatatctccagatgcaagcctcttcgatgctgtatactccttgatcaaaaataaaatccacagattgcccgttattgaccctatcagtgggaatgcactttatatacttacccacaaaagaatcctcaagttcctccagctttttatgtctgatatgccaaagcctgccttcatgaagcagaacctggatgagcttggaataggaacgtaccacaacattgccttcatacatccagacactcccatcatcaaagccttgaacatatttgtggaaagacgaatatcagctctgcctgttgtggatgagtcaggaaaagttgtagatatttattccaaatttgatgtaattaatcttgctgctgagaaaacatacaataacctagatatcacggtgacccaggcccttcagcaccgttcacagtattttgaaggtgttgtgaagtgcaataagctggaaatactggagaccatcgtggacagaatagtaagagctgaggtccatcggctggtggtggtaaatgaagcagatagtattgtgggtattatttccctgtcggacattctgcaagccctgatcctcacaccagcaggtgccaaacaaaaggagacagaaacggagtgaccgccgtgaatgtagacgccctaggaggagaacttgaacaaagtctctgggtcacgttttgcctcatgaacactggctgcaagtggttaagaatgtatatcagggtttaacaataggtatttcttccagtgatgttgaaattaagcttaaaaaagaaagattttatgtgcttgaagattcaggcttgcattaaaagactgttttcagacctttgtctgaaggattttaaatgctgtatgtcattaaagtgcactgtgtcctgaagttttcattatttttcatttcaaagaattcactggtatggaacaggtgatgtggcataaggtgagtgcacggtatgttcagatcacagtgccttatgtccgaatacagcaatatgtcaccgccgcagccggggcgcacgcgtgtgaaacaacaccgagcttgaatgtggaagtctttgaaccttttaccaaatcagtttgttttctttagatttgtcaaaaagttgtaatttgaatataaataattactttaaaattgtaatgacacttttacacgtaagtgttttgttctgggctaccgtgtcaacgaggctgctttacaacagctttatttatttttactttcatgcaatttttttacacatcttttggtggagtaaacttcaccacatccatgaataaactctcagttattttgaaatggcaaatttctcattatttaagtttggatctggaaaggacatgacttctgaaatagccgctgctgggttttaaaagctgaggtctctcaaagtgtggaggagacgttgccgtcaggcgggagccaagtgccgggaagatgtctattttttttcttgtgtattgaaatgtaaaatcatgatgtttgttatgactgctgatgcgattgtttttgtaaattttattgtggcatatacagtattgtcatacagttgaagagaaacaatgtttcctaatgtaagtgctctgaaaatgttgacactgtatatatatatatgaggatagtttgttttttttttgttttgggtttttttttttcagattgaaaaattaaaatagatcctactatctacca

SEQ ID NO: 16570 - DNA, 2699 bp, Homo sapiens
  source 1..2699: mol_type = unassigned DNA
gcttccggcagcttcttgctacttaaggacagccgggctgacgctccagctgctgtggccggaggtgcagccccgtcaggacggctccactccctggcgcctcacagactctggggctgcggtgaggtcgccctgaagaccccctggtgaggacgcttgaacccgggctgtcacctgagcacaggctgccactctgagcttttggggcgccctgtgcctgtcgggctgatgctcctctggctcccggccacctggggctgacaccggttctgtgggtcctgatatgttcacctgtcgccactcctgtggccacagctacccatgaagcgctttgggagcctcaggagcaacaagaaacacaaggaccaaaatcgaagcacggagaggcgccagtcggagcctcatggccttttcgcctccggcctctcctcctctccgtcaacacccacccaagtgaccaagcagcacacgtttcccctggaatcctataagcacgagcctgaacggttagagaatcgcatctatgcctcgtcttcccccccggacacagggcagaggttctgcccgtcttccttccagagcccgaccaggcctccactggcatcaccgacacactatgctccctccaaagccgcggcgctggcggcggccctgggacccgcggaagccggcatgctggagaagctggagttcgaggacgaagcagtagaagactcagaaagtggtgtttacatgcgattcatgaggtcacacaagtgttatgacatcgttccaaccagttcaaagcttgttgtctttgatactacattacaagttaaaaaggccttctttgctttggtagccaacggtgtccgagcagcgccactgtgggagagtaaaaaacaaagttttgtaggaatgctaacaattacagatttcataaatatactacatagatactataaatcacctatggtacagatttatgaattagaggaacataaaattgaaacatggagggagctttatttacaagaaacatttaagcctttagtgaatatatctccagatgcaagcctcttcgatgctgtatactccttgatcaaaaataaaatccacagattgcccgttattgaccctatcagtgggaatgcactttatatacttacccacaaaagaatcctcaagttcctccagctttttatgtctgatatgccaaagcctgccttcatgaagcagaacctggatgagcttggaataggaacgtaccacaacattgccttcatacatccagacactcccatcatcaaagccttgaacatatttgtggaaagacgaatatcagctctgcctgttgtggatgagtcaggaaaagttgtagatatttattccaaatttgatgtaattaatcttgctgctgagaaaacatacaataacctagatatcacggtgacccaggcccttcagcaccgttcacagtattttgaaggtgttgtgaagtgcaataagctggaaatactggagaccatcgtggacagaatagtaagagctgaggtccatcggctggtggtggtaaatgaagcagatagtattgtgggtattatttccctgtcggacattctgcaagccctgatcctcacaccagcaggtgccaaacaaaaggagacagaaacggagtgaccgccgtgaatgtagacgccctaggaggagaacttgaacaaagtctctgggtcacgttttgcctcatgaacactggctgcaagtggttaagaatgtatatcagggtttaacaataggtatttcttccagtgatgttgaaattaagcttaaaaaagaaagattttatgtgcttgaagattcaggcttgcattaaaagactgttttcagacctttgtctgaaggattttaaatgctgtatgtcattaaagtgcactgtgtcctgaagttttcattatttttcatttcaaagaattcactggtatggaacaggtgatgtggcataaggtgagtgcacggtatgttcagatcacagtgccttatgtccgaatacagcaatatgtcaccgccgcagccggggcgcacgcgtgtgaaacaacaccgagcttgaatgtggaagtctttgaaccttttaccaaatcagtttgttttctttagatttgtcaaaaagttgtaatttgaatataaataattactttaaaattgtaatgacacttttacacgtaagtgttttgttctgggctaccgtgtcaacgaggctgctttacaacagctttatttatttttactttcatgcaatttttttacacatcttttggtggagtaaacttcaccacatccatgaataaactctcagttattttgaaatggcaaatttctcattatttaagtttggatctggaaaggacatgacttctgaaatagccgctgctgggttttaaaagctgaggtctctcaaagtgtggaggagacgttgccgtcaggcgggagccaagtgccgggaagatgtctattttttttcttgtgtattgaaatgtaaaatcatgatgtttgttatgactgctgatgcgattgtttttgtaaattttattgtggcatatacagtattgtcatacagttgaagagaaacaatgtttcctaatgtaagtgctctgaaaatgttgacactgtatatatatatatgaggatagtttgttttttttttgttttgggttttttttttt

SEQ ID NO: 16571 - DNA, 2281 bp, Homo sapiens
  source 1..2281: mol_type = unassigned DNA
gggaatgacagtttgctgcagtcccgtcaatgggggaatctgcccgagctctgcctgcattttgagcagcaaagcagctccagccaccaagaccgttgcctgcgctgtcttaggccagcccatgctgtctgccagccgcttgttgcgctgccttggggactgggaacacacccagccccggtccccatctgttgcagacatgcagtggcagcagctcggagcacagccgaaccctagaaattgcctgtgctgaaggggctgggaaaccccttctctgatggacctttcgagtgaggcagcaggatttgtcagagctgggagtgccgcccgtccccgtcactcgcatcctgccatccagcagcttacaagcctgcactgcttattagcatctggaagagaagacctccaggaccccttggggctgagacctgagctccttcgccatgccgctcctggacggagacctggagggttccggaaagcattcctctcgaaaggtggacagccccttcggcccgggcagcccctccaaagggttcttctccagaggcccccagccccggccctccagccccatgtctgcacctgtgaggcccaagaccagccccggctctcccaaaaccgtgttcccgttctcctaccaggagtccccgccacgctcccctcgacgcatgagcttcagtgggatcttccgctcctcctccaaagagtcttcccccaactccaaccctgctacctcgcccgggggcatcaggtttttctcccgctccagaaaaacctccggcctctcctcctctccgtcaacacccacccaagtgaccaagcagcacacgtttcccctggaatcctataagcacgagcctgaacggttagagaatcgcatctatgcctcgtcttcccccccggacacagggcagaggttctgcccgtcttccttccagagcccgaccaggcctccactggcatcaccgacacactatgctccctccaaagccgcggcgctggcggcggccctgggacccgcggaagccggcatgctggagaagctggagttcgaggacgaagcagtagaagactcagaaagtggtgtttacatgcgattcatgaggtcacacaagtgttatgacatcgttccaaccagttcaaagcttgttgtctttgatactacattacaagttaaaaaggccttctttgctttggtagccaacggtgtccgagcagcgccactgtgggagagtaaaaaacaaagttttgtaggaatgctaacaattacagatttcataaatatactacatagatactataaatcacctatggtacagatttatgaattagaggaacataaaattgaaacatggagggagctttatttacaagaaacatttaagcctttagtgaatatatctccagatgcaagcctcttcgatgctgtatactccttgatcaaaaataaaatccacagattgcccgttattgaccctatcagtgggaatgcactttatatacttacccacaaaagaatcctcaagttcctccagctttttatgtctgatatgccaaagcctgccttcatgaagcagaacctggatgagcttggaataggaacgtaccacaacattgccttcatacatccagacactcccatcatcaaagccttgaacatatttgtggaaagacgaatatcagctctgcctgttgtggatgagtcaggaaaagttgtagatatttattccaaatttgatgtaattaatcttgctgctgagaaaacatacaataacctagatatcacggtgacccaggcccttcagcaccgttcacagtattttgaaggtgttgtgaagtgcaataagctggaaatactggagaccatcgtggacagaatagtaagagctgaggtccatcggctggtggtggtaaatgaagcagatagtattgtgggtattatttccctgtcggacattctgcaagccctgatcctcacaccagcaggtgccaaacaaaaggagacagaaacggagtgaccgccgtgaatgtagacgccctaggaggagaacttgaacaaagtctctgggtcacgttttgcctcatgaacactggctgcaagtggttaagaatgtatatcagggtttaacaataggtatttcttccagtgatgttgaaattaagcttaaaaaagaaagattttatgtgcttgaagattcaggcttgcattaaaagactgttttcagacctttgtctgaaggattttaaatgctgtatgtcattaaagtgcactgtgtcc

SEQ ID NO: 16572 - DNA, 570 bp, Homo sapiens
  source 1..570: mol_type = unassigned DNA
agaaatcaggctctcttaagctcactaattttggtcattgaagtgaactgaaatgaaaggatataatttattctcttgcttcattacagaatcttgctgctgagaaaacatacaataacctagatatcacggtgacccaggcccttcagcaccgttcacagtattttgaaggtgttgtgaagtgcaataagctggaaatactggagaccatcgtggacagaatagtaagagctgaggtccatcggctggtggtggtaaatgaagcagatagtattgtgggtattatttccctgtcggacattctgcaagccctgatcctcacaccagcaggtgccaaacaaaaggagacagaaacggagtgaccgccgtgaatgtagacgccctaggaggagaacttgaacaaagtctctgggtcacgttttgcctcatgaacactggctgcaagtggttaagaatgtatatcagggtttaacaataggtatttcttccagtgatgttgaaattaagcttaaaaaagaaagattttatgtgcttgaagattcaggcttgcattaaaagactgttttcaga

SEQ ID NO: 16573 - DNA, 480 bp, Homo sapiens
  source 1..480: mol_type = unassigned DNA
tagaaatcaggctctcttaagctcactaattttggtcattgaagtgaactgaaatgaaaggatataatttattctcttgcttcattacagaatcttgctgctgagaaaacatacaataacctagatatcacggtgacccaggcccttcagcaccgttcacagtattttgaaggtgttgtgaagtgcaataagctggaaatactggagaccatcgtggacagaatagtaagagctgaggtccatcggctggtggtggtaaatgaagcagatagtattgtgggtattatttccctgtcggacattctgcaagccctgatcctcacaccagcaggtaaaatgctggtttctgacctttgccatcggcgtctaggaagggtgggaggtagaacaggaagtgcagcatttaaaccatcatttctccacccacctacagatcaaggctttgagtatattactttgaaaccattttcgttttctctt

SEQ ID NO: 16574 - DNA, 564 bp, Homo sapiens
  source 1..564: mol_type = unassigned DNA
aggaatgctaacaattacagatttcataaatatactacatagatactataaatcacctatggtacagatttatgaattagaggaacataaaattgaaacatggagggagctttatttacaagaaacatttaagcctttagtgaatatatctccagatgcaagcctcttcgatgctgtatactccttgatcaaaaataaaatccacagattgcccgttattgaccctatcagtgggaatgcactttatatacttacccacaaaagaatcctcaagttcctccagctttttgtacaccaggaggatggaatcaactataccctttataaaagatgtctgatatgccaaagcctgccttcatgaagcagaacctggatgagcttggaataggaacgtaccacaacattgccttcatacatccagacactcccatcatcaaagccttgaacatatttgtggaaagacgaatatcagctctgcctgttgtggatgagtcaggaaaagttgtagatatttattccaaatttgatgtaattaatcttgctgctgagaaaacatacaataac

SEQ ID NO: 16575 - DNA, 1413 bp, Homo sapiens
  source 1..1413: mol_type = unassigned DNA
gatttgcctacgagggttccgtaggaaaggacgcttgaattcggcgcttcggcggcggcggcggccgcgcgagttccctgctcaccctccctctccgcggaagtccccacgaggtggcttcagggtgtaacagagcgcgcggctccagtccgaaggcagcggccgggggagggaaggaggggaccgaacccccgaggagtttcgcagaatcaacttctggttagagttatgggaagcgcggttatggacaccaagaagaaaaaagatgtttccagccccggcgggagcggcggcaagaaaaatgccagccagaagaggcgttcgctgcgcgtgcacattccggacctgagctccttcgccatgccgctcctggacggagacctggagggttccggaaagcattcctctcgaaaggtggacagccccttcggcccgggcagcccctccaaagggttcttctccagaggcccccagccccggccctccagccccatgtctgcacctgtgaggcccaagaccagccccggctctcccaaaaccgtgttcccgttctcctaccaggagtccccgccacgctcccctcgacgcatgagcttcagtgggatcttccgctcctcctccaaagagtcttcccccaactccaaccctgctacctcgcccgggggcatcaggtttttctcccgctccagaaaaacctccggcctctcctcctctccgtcaacacccacccaagtgaccaagcagcacacgtttcccctggaatcctataagcacgagcctgaacggttagagaatcgcatctatgcctcgtcttcccccccggacacagggcagaggttctgcccgtcttccttccagagcccgaccaggcctccactggcatcaccgacacactatgctccctccaaagcccagtagaagactcagaaagtggtgtttacatgcgattcatgaggtcacacaagtgttatgacatcgttccaaccagttcaaagcttgttgtctttgatactacattacaagttaaaaaggccttctttgctttggtagccaacggtgtccgagcagcgccactgtgggagagtaaaaaacaaagttttgtaggaatgctaacaattacagatttcataaatatactacatagatactataaatcacctatggtacagatttatgaattagaggaacataaaattgaaacatggagggagctttatttacaagaaacatttaagcctttagtgaatatatctccagatgcaagcctcttcgatgctgtatactccttgatcaaaaataaaatccacagattgcccgttattgaccctatcagtgggaatgcactttatatacttacccacaaaagaatcctcaagttcctccagctttttgtaagtagtttttagcgtttct

SEQ ID NO: 16576 - DNA, 1123 bp, Homo sapiens
  source 1..1123: mol_type = unassigned DNA
aggacttcctctttcaggcccggcttgcaagagcgctagggccaagctcctttcagccctaatcggtactggagctaatcgcattcgcggcgcccgtgcactctgcagggatgggccgtggggccagggacctcagtcccctctcggcctgtcctgcccttccaggaggctagcggctgctggccgcgcagcctgccaacctgagttggccatagtagagtctcagatacccagctcctgagcggccagggccagattcagggtgtgtacgtttttggcagcggctccccaaccgagaagacactcggctgcgaagagaggacgcgaattaagagttccatgctggaaaaaaaaaaatggatagcgacaaagtgcatctacaatacgtgtagcccacggaacgatttttgttaagggggccgaggatgggcagttacatctaaaatttggaaagggaagaggaaagcgagaaaggatcccctagctggcgccccggggcgttctgcagcctccagcccctctccccctccccgcgccgcggagcccacacctgcgcaggtggagcctgccgagcgcggccgccggtgctgggaaggcggcgctggcggcggccctgggacccgcggaagccggcatgctggagaagctggagttcgaggacgaagcagtagaagactcagaaagtggtgtttacatgcgattcatgaggtcacacaagtgttatgacatcgttccaaccagttcaaagcttgttgtctttgatactacattacaagttaaaaaggccttctttgctttggtagccaacggtgtccgagcagcgccactgtgggagagtaaaaaacaaagttttgtaggaatgctaacaattacagatttcataaatatactacatagatactataaatcacctatggtacagatttatgaattagaggaacataaaattgaaacatggagggagctttatttacaagaaacatttaagcctttagtgaatatatctccagatgcaagcctcttcgatgctgtatactccttgatcaaaaataaaatccacagattgcccgttattgaccctatcagtgggaatgcactttatatacttacccacaaaagaatc

SEQ ID NO: 16577 - DNA, 573 bp, Homo sapiens
  source 1..573: mol_type = unassigned DNA
gcagctcatgctgatcgctgtcctcctcctccccctcaggcggcgctggcggcggccctgggacccgcggaagccggcatgctggagaagctggagttcgaggacgaagcaaggtgtcagggagcgctaattgtttgtgcttgtcaccatgcactcggaggcaaccccgaatcatacccacagtccagaccctttaatcatagactggtgcccttatctgcgcctgtgaagatatgaccgcagtagaagactcagaaagtggtgtttacatgcgattcatgaggtcacacaagtgttatgacatcgttccaaccagttcaaagcttgttgtctttgatactacattacaagttaaaaaggccttctttgctttggtagccaacggtgtccgagcagcgccactgtgggagagtaaaaaacaaagttttgtaggaatgctaacaattacagatttcataaatatactacatagatactataaatcacctatggtacagatttatgaattagaggaacataaaattgaaacatggagggagctttatttacaagaaacatttaagcctttagtga

SEQ ID NO: 16578 - DNA, 653 bp, Homo sapiens
  source 1..653: mol_type = unassigned DNA
gctgatcgctgtcctcctcctccccctcaggcggcgctggcggcggccctgggacccgcggaagccggcatgctggagaagctggagttcgaggacgaagcagtagaagactcagaaagtggtgtttacatgcgattcatgaggtcacacaagtgttatgacatcgttccaaccagttcaaagcttgttgtctttgatactacattacaagttaaaaaggccttctttgctttggtagccaacggtgtccgagcagcgccactgtgggagagtaaaaaacaaagttttgtaggaatgctaacaattacagatttcataaatatactacatagatactataaatcacctatggtacagatttatgaattagaggaacataaaattgaaacatggaggggtaagcactattggatgtttaaaatcttttagtatcgggaaagctatgtttagtatgaaaagtatgttttcattttgcagatccttttctctctgctccataaaatgttatataaaacattctctttatttctgttaattttgatagtatgctactgtactaaagctgaacaatataagtattgtcccttctgtttatagacatgtataggacaccttcagcaggcaaggccttatcctagggccaggaatgtgaa

SEQ ID NO: 16579 - DNA, 539 bp, Homo sapiens
  source 1..539: mol_type = unassigned DNA
aggccccagcgctcggccggccgcgagcccgccggccggggacgagcgtcgcagctcatgctgatcgctgtcctcctcctccccctcaggcggcgctggcggcggccctgggacccgcggaagccggcatgctggagaagctggagttcgaggacgaagcagtagaagactcagaaagtggtgtttacatgcgattcatgaggtcacacaagtgttatgacatcgttccaaccagttcaaagcttgttgtctttgatactacattacaagttaaaaaggccttctttgctttggtagccaacggtgtccgagcagcgccactgtgggagagtaaaaaacaaagttttgtaggtaagcagtgtgggcctgaggaaaatcgaaaatggaaaccttgaaagcagaaagcctaaagtattttaatagatgccggtttggaattcaacctagtaaacatgtttccaagttaaagaacattcttgctggcagggtgcagtggcccatgcccgtaatctcagcactttgggaggccaaggcaggga

SEQ ID NO: 16580 - DNA, 1670 bp, Homo sapiens
  source 1..1670: mol_type = unassigned DNA
gagctggtttattctgcggccgaggattacatttatgcacgaacgggcttactggttccagattccccacttgggcacaggcataggaggcttgttttccaaattgctggttttaattgcacctgcctttcagattacctctgggaatctgtgggaggagccgagagggtggaaaatgtttcttagctttgcaaaaggaagaaaactttgtcacccagcgggagacctcagccacgagtaacccggggagacaccagaaccgggacgggctttgactgatttgcctacgagggttccgtaggaaaggacgcttgaattcggcgcttcggcggcggcggcggccgcgcgagttccctgctcaccctccctctccgcggaagtccccacgaggtggcttcagggtgtaacagagcgcgcggctccagtccgaaggcagcggccgggggagggaaggaggggaccgaacccccgaggagtttcgcagaatcaacttctggttagagttatgggaagcgcggttatggacaccaagaagaaaaaagatgtttccagccccggcgggagcggcggcaagaaaaatgccagccagaagaggcgttcgctgcgcgtgcacattccggacctgagctccttcgccatgccgctcctggacggagacctggagggttccggaaagcattcctctcgaaaggtggacagccccttcggcccgggcagcccctccaaagggttcttctccagaggcccccagccccggccctccagccccatgtctgcacctgtgaggcccaagaccagccccggctctcccaaaaccgtgttcccgttctcctaccaggagtccccgccacgctcccctcgacgcatgagcttcagtgggatcttccgctcctcctccaaagagtcttcccccaactccaaccctgctacctcgcccgggggcatcaggtttttctcccgctccagaaaaacctccggcctctcctcctctccgtcaacacccacccaagtgaccaagcagcacacgtttcccctggaatcctataagcacgagcctgaacggttagagaatcgcatctatgcctcgtcttcccccccggacacagggcagaggttctgcccgtcttccttccagagcccgaccaggcctccactggcatcaccgacacactatgctccctccaaagccgtaagtctgggcccttctgtgggtggggctgccgggtggcagagggagggcagagcagttattgccccaagctgagcagtctatctgcagccgaggctgaggtcgtgtgctcccgacatcttcaggatattgtaccataaatcacaggctgagggagaaatggtgagggcacaatagcaaatggaaatacacaaaaaatagctgggtgcggtggctcacacctgtagtcccagcactttgggaggccaagataggcagatcacttgaggccaggagttcgagaccagcctggccaacatggcaaaaccctgtctctaccaaaactgcaaaaattagctgggtgtggtggcgtgcacctgtatcccaactactcgggaggctgaggcataagaattgcttaaacctagatggcagacactgcagtgagctgagatcatgacaccgcactccagcccctatgtaacagagcagactctgtctg

SEQ ID NO: 16581 - DNA, 562 bp, Homo sapiens
  source 1..562: mol_type = unassigned DNA
agaccccctggtgaggacgcttgaacccgggctgtcacctgagcacaggctgccactctgagcttttggggcgccctgtgcctgtcgggctgatgctcctctggctcccggccacctggggctgacaccggttctgtgggtcctgatatgttcacctgtcgccactcctgtggccacagctacccatgaagcgctttgggagcctcaggagcaacaagaaacacaaggaccaaaatcgaagcacggagaggcgccagtcggagcctcatggccttttcgggaggtgactttggcaaaatgtctgaactgtaaatgaaaactggaagagcagaaaaagaaaaagcctccggcctctcctcctctccgtcaacacccacccaagtgaccaagcagcacacgtttcccctggaatcctataagcacgagcctgaacggttagagaatcgcatctatgcctcgtcttcccccccggacacagggcagaggttctgcccgtcttccttccagagcccgaccaggcctccactggcatcaccgacacactatgctccctccaaagccg

SEQ ID NO: 16582 - DNA, 575 bp, Homo sapiens
  source 1..575: mol_type = unassigned DNA
actggcccagcggcacagactctgcggccccatgcttgctgcaggcgcaagagggtgcttggtcggggagttaattcaaacacatctggaacctgctgcctgccgggtacagtatgaggccaagaatagagaggacctgagctccttcgccatgccgctcctggacggagacctggagggttccggaaagcattcctctcgaaaggtggacagccccttcggcccgggcagcccctccaaagggttcttctccagaggcccccagccccggccctccagccccatgtctgcacctgtgaggcccaagaccagccccggctctcccaaaaccgtgttcccgttctcctaccaggagtccccgccacgctcccctcgacgcatgagcttcagtgggatcttccgctcctcctccaaagagtcttcccccaactccaaccctgctacctcgcccgggggcatcaggtttttctcccgctccagaaaaacctccggcctctcctcctctccgtcaacacccacccaagtgaccaagcagcacacgtttcccctggaatcctataagcacgagcctgaac

SEQ ID NO: 16583 - DNA, 510 bp, Homo sapiens
  source 1..510: mol_type = unassigned DNA
gcggccgcgcgagttccctgctcaccctccctctccgcggaagtccccacgaggtggcttcagggtgtaacagagcgcgcggctccagtccgaaggcagcggccgggggagggaaggaggggaccgaacccccgaggagtttcgcagaatcaacttctggttagagttatgggaagcgcggttatggacaccaagaagaaaaaagatgtttccagccccggcgggagcggcggcaagaaaaatgccagccagaagaggcgttcgctgcgcgtgcacattccgcactctcaacgccctgcgagcgccgacggttggatggagggagggtcgcccggattcacccccagctgccatccccgtgggccagcactgcctctttctctccctcttcttccaccttatcttcctgtccactttccccctttccctcccccataattgaccccaatgtggaattgagggtcatttcaaaatatttctgatactatttgaagaaaataaactttatct

SEQ ID NO: 16584 - DNA, 2326 bp, Homo sapiens
  source 1..2326: mol_type = unassigned DNA
gccacagtgtcgcacacttgctctcagttggtctggggctggccacatggagcccgggctggagcacgcactgcgcaggaccccttcctggagcagccttgggggttctgagcatcaagagatgagcttcctagagcaagaaaacagcagctcatggccatcaccagctgtgaccagcagctcagaaagaatccgtgggaaacggagggccaaagccttgagatggacaaggcagaagtcggtggaggaaggggagccaccaggtcagggggaaggtccccggtccaggccagctgctgagtccaccgggctggaggccacattccccaagaccacacccttggctcaagctgatcctgccggggtgggcactccaccaacagggtgggactgcctcccctctgactgtacagcctcagctgcaggctccagcacagatgatgtggagctggccacggagttcccagccacagaggcctgggagtgtgagctagaaggcctgctggaagagaggcctgccctgtgcctgtccccgcaggccccatttcccaagctgggctgggatgacgaactgcggaaacccggcgcccagatctacatgcgcttcatgcaggagcacacctgctacgatgccatggcaactagctccaagctagtcatcttcgacaccatgctggagatcaagaaggccttctttgctctggtggccaacggtgtgcgggcagcccctctatgggacagcaagaagcagagctttgtggggatgctgaccatcactgacttcatcctggtgctgcatcgctactacaggtcccccctggtccagatctatgagattgaacaacataagattgagacctggagggagatctacctgcaaggctgcttcaagcctctggtctccatctctcctaatgatagcctgtttgaagctgtctacaccctcatcaagaaccggatccatcgcctgcctgttcttgacccggtgtcaggcaacgtactccacatcctcacacacaaacgcctgctcaagttcctgcacatctttggttccctgctgccccggccctccttcctctaccgcactatccaagatttgggcatcggcacattccgagacttggctgtggtgctggagacagcacccatcctgactgcactggacatctttgtggaccggcgtgtgtctgcactgcctgtggtcaacgaatgtggtcaggtcgtgggcctctattcccgctttgatgtgattcacctggctgcccagcaaacctacaaccacctggacatgagtgtgggagaagccctgaggcagaggacactatgtctggagggagtcctttcctgccagccccacgagagcttgggggaagtgatcgacaggattgctcgggagcaggtacacaggctggtgctagtggacgagacccagcatctcttgggcgtggtctccctctccgacatccttcaggcactggtgctcagccctgctggcatcgatgccctcggggcctgagaagatctgagtcctcaatcccaagccacctgcacacctggaagccaatgaagggaactggagaactcagccttcatcttcccccacccccatttgctggttcagctatgattcaggcttcttcagccctcccaaattgcccttgccctacctgtgctcccagaagccctcgggcatgcccagtgcaccatgggatgatgaaattaaggagaacagctgagtcaagcttggaggtccctgaaccagaggcactaggattaccccagggccatctgtgctccatgcccgcccatccccttgccgcctgactgggtcggatggccccagtgggtttagtcagggcttctggattcctcggtttctgggctacctatggcttcagccttcagctcctgggagtcccagctgttgttcccagcaacgtcgccactgccctcctactctccaggctttgtcatttcaaggctgctgaaatgctgcatttcaggggccaccatggagcagccgttatttatagaactgcctgttggaggtggggagtcctccctccattcttgtccagaaaactccttagctctcgcagtgagccatgttcttagtctccagggatggatggccttgtatatggacccctgagaatgagcaattgagaaaacaaaacaaaaggaacaatccatgaacttagattttattggtttcactcaaaatgctgcagtcatttgacctgaacttgtggcaagagacttgtgctttctaaattcaaagactagaaggaaaatggataaaaatcacaagtgccgtttctcttgc

SEQ ID NO: 16585 - DNA, 2222 bp, Homo sapiens
  source 1..2222: mol_type = unassigned DNA
ctgctcaatgaccatgttcccacatgctccaagccacatcccctcaaaaagggtccctctagcttgtcctcagtgacccaggaggcagctgaggaccaagtacccagattatccggtgcgccccttccctcccagcaacccccagccttcagggctgtagcagctgagcaaatgggggcccctccctctcattgcctgacacccaatcagagagaaaccgatcctggcagggcagggtgcccggggccgggcccagaatagtgcagcccagccacagtgtcgcacacttgctctcagttggtctggggctggccacatggagcccgggctggagcacgcactgcgcaggaccccttcctggagcagccttgggggttctgagcatcaagagatgagcttcctagagcaagaaaacagcagctcatggccatcaccagctgtgaccagcagctcagaaagaatccgtgggaaacggagggccaaagccttgagatggacaaggcagaagtcggtggaggaaggggagccaccaggtcagggggaaggtccccggtccaggccagctgctgagtccaccgggctggaggccacattccccaagaccacacccttggctcaagctgatcctgccggggtgggcactccaccaacagggtgggactgcctcccctctgactgtacagcctcagctgcaggctccagcacagatgatgtggagctggccacggagttcccagccacagaggcctgggagtgtgagctagaaggcctgctggaagagaggcctgccctgtgcctgtccccgcaggccccatttcccaagctgggctgggatgacgaactgcggaaacccggcgcccagatctacatgcgcttcatgcaggagcacacctgctacgatgccatggcaactagctccaagctagtcatcttcgacaccatgctggagatcaagaaggccttctttgctctggtggccaacggtgtgcgggcagcccctctatgggacagcaagaagcagagctttgtggggatgctgaccatcactgacttcatcctggtgctgcatcgctactacaggtcccccctggtccagatctatgagattgaacaacataagattgagacctggagggagatctacctgcaaggctgcttcaagcctctggtctccatctctcctaatgatagcctgtttgaagctgtctacaccctcatcaagaaccggatccatcgcctgcctgttcttgacccggtgtcaggcaacgtactccacatcctcacacacaaacgcctgctcaagttcctgcacatctttggttccctgctgccccggccctccttcctctaccgcactatccaagatttgggcatcggcacattccgagacttggctgtggtgctggagacagcacccatcctgactgcactggacatctttgtggaccggcgtgtgtctgcactgcctgtggtcaacgaatgtggtcaggtcgtgggcctctattcccgctttgatgtgattcacctggctgcccagcaaacctacaaccacctggacatgagtgtgggagaagccctgaggcagaggacactatgtctggagggagtcctttcctgccagccccacgagagcttgggggaagtgatcgacaggattgctcgggagcaggtacacaggctggtgctagtggacgagacccagcatctcttgggcgtggtctccctctccgacatccttcaggcactggtgctcagccctgctggcatcgatgccctcggggcctgagaagatctgagtcctcaatcccaagccacctgcacacctggaagccaatgaagggaactggagaactcagccttcatcttcccccacccccatttgctggttcagctatgattcaggtaggctctgccctgggccatgacaccagcctcttagtcttcctgatttcctggatctcagattgggacaccctgaggatgggagtggccaagctcaaagctgagcagccctgtgaaaactgcaagtgtaaggactcacaggtccccactttgtcccattttcagctgaggtcatggagactgtcctagaagggagggacaaagccccggctaaaagctaaggctgcgatgtgacttcagacactctgggaagatttacttgttccctcacaattcaatttccacctgctggaaatccccttagaaggaagcaagctata

SEQ ID NO: 16586 - DNA, 1199 bp, Homo sapiens
  source 1..1199: mol_type = unassigned DNA
acacttgctctcagttggtctggggctggccacatggagcccgggctggagcacgcactgcgcaggaccccttcctggagcagccttgggggttctgagcatcaagagatgagcttcctagagcaagaaaacagcagctcatggccatcaccagctgtgaccagcagctcagaaagaatccgtgggaaacggagggccaaagccttgagatggacaaggcagaagtcggtggaggaaggggagccaccaggtcagggggaaggtccccggtccaggccagctgctgagtccaccgggctggaggccacattccccaagaccacacccttggctcaagctgatcctgccggggtgggcactccaccaacagggtgggactgcctcccctctgactgtacagcctcagctgcaggctccagcacagatgatgtggagctggccacggagttcccagccacagaggcctgggagtgtgagctagaaggcctgctggaagagaggcctgccctgtgcctgtccccgcaggccccatttcccaagctgggctgggatgacgaactgcggaaacccggcgcccagatctacatgcgcttcatgcaggagcacacctgctacgatgccatggcaactagctccaagctagtcatcttcgacaccatgctggagatcaagaaggccttctttgctctggtggccaacggtgtgcgggcagcccctctatgggacagcaagaagcagagctttgtggggatgctgaccatcactgacttcatcctggtgctgcatcgctactacaggtcccccctgagatctacctgcaaggctgcttcaagcctctggtctccatctctcctaatgatagcctgtttgaagctgtctacaccctcatcaagaaccggatccatcgcctgcctgttcttgacccggtgtcaggcaacgtactccacatcctcacacacaaacgcctgctcaagttcctgcacatctttggttccctgctgccccggccctccttcctctaccgcactatccaagatttgggcatcggcacattccgagacttggctgtggtgctggagacagcacccatcctgactgcactggacatctttgtggaccggcgtgtgtctgcactgcctgtggtcaacgaatgtggtcaggtcgtgggcctctattcccgctttgatgtgattcacctg

SEQ ID NO: 16587 - DNA, 1619 bp, Homo sapiens
  source 1..1619: mol_type = unassigned DNA
acacttgctctcagttggtctggggctggccacatggagcccgggctggagcacgcactgcgcaggaccccttcctggagcagccttgggggttctgagcatcaagagatgagcttcctagagcaagaaaacagcagctcatggccatcaccagctgtgaccagcagctcagaaagaatccgtgggaaacggagggccaaagccttgagatggacaaggcagaagtcggtggaggaaggggagccaccaggtcagggggaaggtccccggtccaggccagctgctgagtccaccgggctggaggccacattccccaagaccacacccttggctcaagctgatcctgccggggtgggcactccaccaacagggtgggactgcctcccctctgactgtacagcctcagctgcaggctccagcacagatgatgtggagctggccacggagttcccagccacagaggcctgggagtgtgagctagaaggcctgctggaagagaggcctgccctgtgcctgtccccgcaggccccatttcccaagctgggctgggatgacgaactgcggaaacccggcgcccagatctacatgcgcttcatgcaggagcacacctgctacgatgccatggcaactagctccaagctagtcatcttcgacaccatgctggagatcaagaaggccttctttgctctggtggccaacggtgtgcgggcagcccctctatgggacagcaagaagcagagctttgtggggatgctgaccatcactgacttcatcctggtgctgcatcgctactacaggtcccccctggtgaggagtgggctgggaatcttatgggcacccagaggggcgggggcggaggggagtcctcctggagcctggtgccctagaagcccacgtctttctgacttctggagtcctgtcgatgtctctaggtccagatctatgagattgaacaacataagattgagacctggagggagatctacctgcaaggctgcttcaagcctctggtctccatctctcctaatgatagcctgtttgaagctgtctacaccctcatcaagaaccggatccatcgcctgcctgttcttgacccggtgtcaggcaacgtactccacatcctcacacacaaacgcctgctcaagttcctgcacatctttggttccctgctgccccggccctccttcctctaccgcactatccaagatttgggcatcggcacattccgagacttggctgtggtgctggagacagcacccatcctgactgcactggacatctttgtggaccggcgtgtgtctgcactgcctgtggtcaacgaatgtggtacccacccccaggatgagaggctcgggctgggctggggcctgggagaacctggtggggagaatatgggaagggcagggtttctcatgccatccctgtggggggtacaggatggactggggattagaagtctccgtctactctgagacttgggcaagttgcttagcctctctgtgcctcagtttcctcctttgtgaaatgggattcttcacaacactcatctttctgacttcacaggaggatttaaaaggttatgtgcatgaaaatgggcatagcgagaggaagcagcagat

SEQ ID NO: 16588 - DNA, 331 bp, Homo sapiens
  source 1..331: mol_type = unassigned DNA
acttgctctcagttggtctggggctggccacatggagcccgggctggagcacgcactgcgcaggaccccttcctggagcagccttgggggttctgagcatcaagagatgagcttcctagagcaagaaaacagcagctcatggccatcaccagctgtgaccagcagctcagaaagaatccgtgggaaacggagggccaaagccttgagatggacaaggcagaagtcggtggaggaaggggagccaccaggtccccggtccaggccagctgctgagtccaccgggctggaggccacattccccaagaccacacccttggctcaagctgatcct

SEQ ID NO: 16589 - DNA, 2301 bp, Homo sapiens
  source 1..2301: mol_type = unassigned DNA
agttggtctggggctggccacatggagcccgggctggagcacgcactgcgcaggaccccttcctggagcagccttgggggttctgagcatcaagagatgagcttcctagagcaagaaaacagcagctcatggccatcaccagctgtgaccagcagctcagaaagaatccgtgggaaacggagggccaaagccttgagatggacaaggcagaagtcggtggaggaaggggagccaccaggtcagggggaaggtccccggtccaggccagctgctgagtccaccgggctggaggccacattccccaagaccacacccttggctcaagctgatcctgccggggtgggcactccaccaacagggtgggactgcctcccctctgactgtacagcctcagctgcaggctccagcacagatgatgtggagctggccacggagttcccagccacagaggcctgggagtgtgagctagaaggcctgctggaagagaggcctgccctgtgcctgtccccgcaggccccatttcccaagctgggctgggatgacgaactgcggaaacccggcgcccagatctacatgcgcttcatgcaggagcacacctgctacgatgccatggcaactagctccaagctagtcatcttcgacaccatgctggagatcaagaaggccttctttgctctggtggccaacggtgtgcgggcagcccctctatgggacagcaagaagcagagctttgtggggatgctgaccatcactgacttcatcctggtgctgcatcgctactacaggtcccccctggtccagatctatgagattgaacaacataagattgagacctggagggagatctacctgcaaggctgcttcaagcctctggtctccatctctcctaatgatagcctgtttgaagctgtctacaccctcatcaagaaccggatccatcgcctgcctgttcttgacccggtgtcaggcaacgtactccacatcctcacacacaaacgcctgctcaagttcctgcacatctttggttccctgctgccccggccctccttcctctaccgcactatccaagatttgggcatcggcacattccgagacttggctgtggtgctggagacagcacccatcctgactgcactggacatctttgtggaccggcgtgtgtctgcactgcctgtggtcaacgaatgtggtcaggtcgtgggcctctattcccgctttgatgtgattcacctggctgcccagcaaacctacaaccacctggacatgagtgtgggagaagccctgaggcagaggacactatgtctggagggagtcctttcctgccagccccacgagagcttgggggaagtgatcgacaggattgctcgggagcaggtacacaggctggtgctagtggacgagacccagcatctcttgggcgtggtctccctctccgacatccttcaggcactggtgctcagccctgctggcatcgatgccctcggggcctgagaagatctgagtcctcaatcccaagccacctgcacacctggaagccaatgaagggaactggagaactcagccttcatcttcccccacccccatttgctggttcagctatgattcaggcttcttcagccctcccaaattgcccttgccctacctgtgctcccagaagccctcgggcatgcccagtgcaccatgggatgatgaaattaaggagaacagctgagtcaagcttggaggtccctgaaccagaggcactaggattaccccagggccatctgtgctccatgcccgcccatccccttgccgcctgactgggtcggatggccccagtgggtttagtcagggcttctggattcctcggtttctgggctacctatggcttcagccttcagctcctgggagtcccagctgttgttcccagcaacgtcgccactgccctcctactctccaggctttgtcatttcaaggctgctgaaatgctgcatttcaggggccaccatggagcagccgttatttatagaactgcctgttggaggtggggagtcctccctccattcttgtccagaaaactccttagctctcgcagtgagccatgttcttagtctccagggatggatggccttgtatatggacccctgagaatgagcaattgagaaaacaaaacaaaaggaacaatccatgaacttagattttattggtttcactcaaaatgctgcagtcatttgacctgaacttgtggcaagagacttgtgctttctaaattcaaagactagaaggaaaatggataaaaatcacaagtgccgtttctcttgc

SEQ ID NO: 16590 - DNA, 2689 bp, Homo sapiens
  source 1..2689: mol_type = unassigned DNA
gggcgagtgacagccccggctccgcgcgccgcggccgccagagccggcgcaggggaagcgcccgcggccccgggtgcagcagcggccgccgcctcccgcgcctccccggcccgcagcccgcggtcccgcggccccggggccggcacctctcgggctccggctccccgcgcgcaagatggctgacccggctgcggggccgccgccgagcgagggcgaggagagcaccgtgcgcttcgcccgcaaaggcgccctccggcagaagaacgtgcatgaggtcaagaaccacaaattcaccgcccgcttcttcaagcagcccaccttctgcagccactgcaccgacttcatctggggcttcgggaagcagggattccagtgccaagtttgctgctttgtggtgcacaagcggtgccatgaatttgtcacattctcctgccctggcgctgacaagggtccagcctccgatgacccccgcagcaaacacaagtttaagatccacacgtactccagccccacgttttgtgaccactgtgggtcactgctgtatggactcatccaccaggggatgaaatgtgacacctgcatgatgaatgtgcacaagcgctgcgtgatgaatgttcccagcctgtgtggcacggaccacacggagcgccgcggccgcatctacatccaggcccacatcgacagggacgtcctcattgtcctcgtaagagatgctaaaaaccttgtacctatggaccccaatggcctgtcagatccctacgtaaaactgaaactgattcccgatcccaaaagtgagagcaaacagaagaccaaaaccatcaaatgctccctcaaccctgagtggaatgagacatttagatttcagctgaaagaatcggacaaagacagaagactgtcagtagagatttgggattgggatttgaccagcaggaatgacttcatgggatctttgtcctttgggatttctgaacttcagaaagccagtgttgatggctggtttaagttactgagccaggaggaaggcgagtacttcaatgtgcctgtgccaccagaaggaagtgaggccaatgaagaactgcggcagaaatttgagagggccaagatcagtcagggaaccaaggtcccggaagaaaagacgaccaacactgtctccaaatttgacaacaatggcaacagagaccggatgaaactgaccgattttaacttcctaatggtgctggggaaaggcagctttggcaaggtcatgctttcagaacgaaaaggcacagatgagctctatgctgtgaagatcctgaagaaggacgttgtgatccaagatgatgacgtggagtgcactatggtggagaagcgggtgttggccctgcctgggaagccgcccttcctgacccagctccactcctgcttccagaccatggaccgcctgtactttgtgatggagtacgtgaatgggggcgacctcatgtatcacatccagcaagtcggccggttcaaggagccccatgctgtattttacgctgcagaaattgccatcggtctgttcttcttacagagtaagggcatcatttaccgtgacctaaaacttgacaacgtgatgctcgattctgagggacacatcaagattgccgattttggcatgtgtaaggaaaacatctgggatggggtgacaaccaagacattctgtggcactccagactacatcgcccccgagataattgcttatcagccctatgggaagtccgtggattggtgggcatttggagtcctgctgtatgaaatgttggctgggcaggcaccctttgaaggggaggatgaagatgaactcttccaatccatcatggaacacaacgtagcctatcccaagtctatgtccaaggaagctgtggccatctgcaaagggctgatgaccaaacacccaggcaaacgtctgggttgtggacctgaaggcgaacgtgatatcaaagagcatgcatttttccggtatattgattgggagaaacttgaacgcaaagagatccagcccccttataagccaaaagctagagacaagagagacacctccaacttcgacaaagagttcaccagacagcctgtggaactgacccccactgataaactcttcatcatgaacttggaccaaaatgaatttgctggcttctcttatactaacccagagtttgtcattaatgtgtaggtgaatgcaaactccatcgttgagcctggggtgtaagacttcaagccaagcgtatgtatcaattctagtcttccaggattcacggtgcacatgctggcattcaacatgtggaaagcttgtcttagagggcttttctttgtatgtgtagcttgctagtttgttttctacatttgaaaatgtttagtttagaataagcgcattatccaattatagaggtacaattttccaaacttccagaaactcatcaaatgaacagacaatgtcaaaactactgtgtctgataccaaaatgcttcagtatttgtaatttttcaagtcagaagctgatgttcctggtaaaagtttttacagttattctataatatcttctttgaatgctaagcatgagcgatatttttaaaaattgtgagtaagctttgcagttactgtgaactattgtctcttggaggaagttttttgtttaagaattgatatgattaaactgaattaatatatgcaa

SEQ ID NO: 16591 - DNA, 7969 bp, Homo sapiens
  source 1..7969: mol_type = unassigned DNA
gcgcgccgcggccgccagagccggcgcaggggaagcgcccgcggccccgggtgcagcagcggccgccgcctcccgcgcctccccggcccgcagcccgcggtcccgcggccccggggccggcacctctcgggctccggctccccgcgcgcaagatggctgacccggctgcggggccgccgccgagcgagggcgaggagagcaccgtgcgcttcgcccgcaaaggcgccctccggcagaagaacgtgcatgaggtcaagaaccacaaattcaccgcccgcttcttcaagcagcccaccttctgcagccactgcaccgacttcatctggggcttcgggaagcagggattccagtgccaagtttgctgctttgtggtgcacaagcggtgccatgaatttgtcacattctcctgccctggcgctgacaagggtccagcctccgatgacccccgcagcaaacacaagtttaagatccacacgtactccagccccacgttttgtgaccactgtgggtcactgctgtatggactcatccaccaggggatgaaatgtgacacctgcatgatgaatgtgcacaagcgctgcgtgatgaatgttcccagcctgtgtggcacggaccacacggagcgccgcggccgcatctacatccaggcccacatcgacagggacgtcctcattgtcctcgtaagagatgctaaaaaccttgtacctatggaccccaatggcctgtcagatccctacgtaaaactgaaactgattcccgatcccaaaagtgagagcaaacagaagaccaaaaccatcaaatgctccctcaaccctgagtggaatgagacatttagatttcagctgaaagaatcggacaaagacagaagactgtcagtagagatttgggattgggatttgaccagcaggaatgacttcatgggatctttgtcctttgggatttctgaacttcagaaagccagtgttgatggctggtttaagttactgagccaggaggaaggcgagtacttcaatgtgcctgtgccaccagaaggaagtgaggccaatgaagaactgcggcagaaatttgagagggccaagatcagtcagggaaccaaggtcccggaagaaaagacgaccaacactgtctccaaatttgacaacaatggcaacagagaccggatgaaactgaccgattttaacttcctaatggtgctggggaaaggcagctttggcaaggtcatgctttcagaacgaaaaggcacagatgagctctatgctgtgaagatcctgaagaaggacgttgtgatccaagatgatgacgtggagtgcactatggtggagaagcgggtgttggccctgcctgggaagccgcccttcctgacccagctccactcctgcttccagaccatggaccgcctgtactttgtgatggagtacgtgaatgggggcgacctcatgtatcacatccagcaagtcggccggttcaaggagccccatgctgtattttacgctgcagaaattgccatcggtctgttcttcttacagagtaagggcatcatttaccgtgacctaaaacttgacaacgtgatgctcgattctgagggacacatcaagattgccgattttggcatgtgtaaggaaaacatctgggatggggtgacaaccaagacattctgtggcactccagactacatcgcccccgagataattgcttatcagccctatgggaagtccgtggattggtgggcatttggagtcctgctgtatgaaatgttggctgggcaggcaccctttgaaggggaggatgaagatgaactcttccaatccatcatggaacacaacgtagcctatcccaagtctatgtccaaggaagctgtggccatctgcaaagggctgatgaccaaacacccaggcaaacgtctgggttgtggacctgaaggcgaacgtgatatcaaagagcatgcatttttccggtatattgattgggagaaacttgaacgcaaagagatccagcccccttataagccaaaagcttgtgggcgaaatgctgaaaacttcgaccgatttttcacccgccatccaccagtcctaacacctcccgaccaggaagtcatcaggaatattgaccaatcagaattcgaaggattttcctttgttaactctgaatttttaaaacccgaagtcaagagctaagtagatgtgtagatctccgtccttcatttctgtcattcaagctcaacggctattgtggtgacatttttatgtttttcattgccaagttgcatccatgtttgattttctgatgagactagagtgacagtgtttcagaacccaaatgtcctcaggtagtttggagcatctctatgagatgggattatgcagatggcctatggaaaatgcagctgcataattaacacattatcaaagtcctcttacaatttattttccgcagcatgtcagctaagtagacccaatggggagagaaaatgcctgctttctttccctctttttctgcactgccatattcacccccaaccatccaatctgtggataattggatgttagcggtactcttccacttccgggcctggagcttggcttgtatccaagtgtatggttgctttgcctaagaggaatccctctatttcacctgttctggaggcaccagaccttgaaaagaacatgctcaaaataaaatgttatctgttatttttgtaaactcaaagttaagatgatcaaagttctaaaattccaagaatgtgcttttagacggtctcaatctaaaagcacttcaaggggtcaaagggcaaccagcttgggtgctacctcagtgttgtagtttctgatactttatgtctttgctcaccctcatccccaaactacttgaaaagggcatttggcaccactctctgaaacaacacagtcactctagcaaggcccccaaagggccctggttttacattacatttcaaactttatttgctttggggttttgtttctgttgttgttcaaatgcaaaaaaaagaaaaaaaaagaaaaaaaaaggtgactcacattgttacacatgctttaaaatatgtattcaaatgttattaaccacaatgacgacctgctttgatttaaccaagaagacggctgcggagcctagcagactcaggcctgtgggaatgggatttgttacaaatctaggtttgttactggcttcagaaagctaattaagtgctctgaaaaagacaccgtttcttgaaacaaagatggttgtattcctcactttgatgttgttttgcaagatgtttgtggaaatgttcatttgtatctggatctctgttatgtgccatttttcttctagcatcgagatacaataaaaaaaaaaaaaaagaaaagaagaagaaatactatttcaaggaaaactgctctttttgagaaacgtggacctaaactacaaagtgggaactgaggagggaactcaggagaaaggaactaactgcggagctttaatcttggccccagtgttcagccactcggaggggcgggggctgtggcccattcaggggctgctggtgggctgtagtggggtgggatgacctggccagagccaacgaggatactggagcccaaagtcaagtttagagaccagctgggaacgtgaatggggctcttgattttcttatcaaaatcaccactcctcccagcttggactaaatattctttctagcaagcagctttgtgagctccctgaagcccaaggaaacccttcggtgggagaaatttcatttctgtctgagaggattaaggcagcaggtgactccccctcctcgcctgccgtgtcctgctattctcaggcagctctaaggagaattcttatcacagttcaagtgatttccagaagttccagggcttctgagagaccatcaagggaactttaacaacttgacaaatgtccttgaagtaagatgcctcatctttagggaaaaatggggtttggatttctgcttaggcaaagtctcctgcagttcatccttctctgtcctcttcttgcttcaggcttggggaccgtccctgctgtccccactgtggtggcaatcaggacctaaggtgaagcaaacttgaagttctatctgacaagtttaggcagtaagagaaggagggaaatcggagcaaagctccctcactttattgttgagaaactggcatctggaaagaggaaggaatttgcccaaagtcagtcagctgggataaaaacctgggtgtcctgtccagaaagtgcagggtgctttctgctctgtagcaaggcagcagacatctctgagccaggcccaccaacaggcccttatctggtggttggatcatgatcccattttgcttggacatgctctcaggaagataaaaaccatggagaaacactaggccattgacaaatgatctgagacaactttagaaaacaatgtaggatgaatggaaagagaaagaaaggaaagaaagaagaaaaagaaagaaggaaagaaagaaagagaaaggaaggaaggaaagaaggaaggaaaagaaggaaggaaggaaggaatatagtgttataaatactgcactcaacattttccaaattcttgccattatttttcaaaagtttaatagtttgcagaaatagatactcaagccaaagtctgttttagagaaactttccatggaaagtcagaatttctaccacttccttttctatccacatttccagtgcagaagaaactgagaaacagagctttttgaagagaggacagggccatagcaacaaggaccttcttgggggattaatgggaggtcagtagaattaataaccctccttggatgagtgctactgttttcacatggcttcagatgctatcaacctcaaagaaatgatctcaacagagaagcttattctctcccaacttctacggtaaaatccaggagtattttctctggggatctgcccacaggacaaagtccataaaagcaagtcctgtctggaccatgtggttatctgaagcattagccatcaccagcacaacaaacggggcagggctttccaaggtggggctggtcagaagggaatctttgataagaggcccacaggcagggaaagcgaaatagggttgatgagaccaggggagacctaaaaaaaaggcagctttgtgtcttctagctccaaatatacctgccttttagctcacacactgtcctggagttctcagacctttaggggccctaacacagttcagttcatacaggggttcaaaagggacagtggcccatttgggagacctttaggatcaatgggaatcaattccattgttttgcctcagagtaaagtttctggctcggggacaattataagttgcaaaaaggatagaggcatatcccaagtcttccttcattccacaaataattacaaacaacctactgtgtgccaggcactattcttagcactggaaatacactagtgaagaagcagatgaggaccctgtttattgtttctctccaagaaattctccaagaatattgtttcttggagagaaataataaataaacaagacaatttctgaaagcaataagtgcaatcaagataattaaaggatgctaaagtgtgacttgtggggattgggagagagatgcacagacaatattaaagaggaggcattcgagctttgttgtgaacaccggaagtaacatgccgagcgcctgggggatggaaactcctatagcaccccacaggctaacagcaagcaggacaagacaaaaagggcaggtgggacatggtagagatggaccctacccaggaaacagctccatcagcatcttagcctgccccactctagccacacatacccacgtgtgctcctgagttcagtgtgcccacctcactcccacaccctcacatagacttggcaagagtaaggagggaactccatagagacattttacctatctcaggggagcagccacaaagaagcaagtcttgtaaaaggtcttttgcaaaggagagtgaacccagcaatgagagatccttaacagctagtgcccattagggggctaaacctaaagcctgggtggtgatggctcaaacgctaatgagtcagtgaatccttaccgaccccctggcctttataatctgaggcaactttggctgcagcccgggaatgtgcagggcactagggaatacaaggccttcttccctggttgtcttgtaataaaacagccatggggttgtccctccagtccgagagactgtgatgaggcctacatagcagcgatgtggtcaggtaaaaatcaggaacccactgaaatcttgggcaagccaccctgcctgcttgtgcctcggttctctcatatgtcatatataggaggtgaggactccagctccacctgccccaggtgggtgtggtgatgatgaggaaagacaagaggcttgcaaggaccctgaagaggtcggagcatcatacagattcctttattagcccacattctgatgttccctggtgagacttgccccaagcaattgctagtaaatgggggttaatttcttctccacctccctactgaacaaaaaaagaaatgccagacttactaggagaatcgagttgctttgagtttcttttgttttgttttgttttgttttgttttaaggctccccttacacaccctcctttaagctttgggttttctctcttatagtttgttgacacatgctaaaaatgtctttggagagaacttctgcctgataaacacccaattctagactgtgggtggattttcgagctgacggtggtcaattcctttcattaagcagtgatctgatttctccacatggccattctgccttcttgggggcagagtagatgggcagcagttcaccttttcagagaaagaggtcttctagccacctgggctgctactgaatggttttctccaggacgctctacctaatgattatttctataacattaagcatggtaataagtagcttccaattcaattcatcctaaagccaaagaaaatacagcaacacacacacacacacacacacacacacacacacacacacacacacaccactttatggcaattcttaactgacattcaatgacttacttcttttcttagaaaatttccaccacatttctatccccaagccaacatacaatgtgaaatgaaagccagtgcgtggagtgcagctgctaaaaattttcagcacagggctctttctgactctgctcatgagatggtatcagccacccaatgactggcgtatcttggtcctgtgtctttcttcttacgctgtgttaatgtgtttactttccatttggcagagagacaagagagacacctccaacttcgacaaagagttcaccagacagcctgtggaactgacccccactgataaactcttcatcatgaacttggaccaaaatgaatttgctggcttctcttatactaacccagagtttgtcattaatgtgtaggtgaatgcaaactccatcgttgagcctggggtgtaagacttcaagccaagcgtatgtatcaattctagtcttccaggattcacggtgcacatgctggcattcaacatgtggaaagcttgtcttagagggcttttctttgtatgtgtagcttgctagtttgttttctacatttgaaaatgtttagtttagaataagcgcattatccaattatagaggtacaattttccaaacttccagaaactcatcaaatgaacagacaatgtcaaaactactgtgtctgataccaaaatgcttcagtatttgtaatttttcaagtcagaagctgatgttcctggtaaaagtttttacagttattctataatatcttctttgaatgctaagcatgagcgatatttttaaaaattgtgagtaagctttgcagttactgtgaactattgtctcttggaggaagttttttgtttaagaattgatatgattaaactgaattaatatatgcaa

SEQ ID NO: 16592 - DNA, 480 bp, Homo sapiens
  source 1..480: mol_type = unassigned DNA
gcggccgccgcctcccgcgcctccccggcccgcagcccgcggtcccgcggccccggggccggcacctctcgggctccggctccccgcgcgcaagatggctgacccggctgcggggccgccgccgagcgagggcgaggagagcaccgtgcgcttcgcccgcaaaggcgccctccggcagaagaacgtgcatgaggtcaagaaccacaaattcaccgcccgcttcttcaagcagcccaccttctgcagccactgcaccgacttcatctgaagggacacactttccttcccactgatgtggagcattggccaatggaacgtgagcagacacaatctactctacatttaaacagaggctttgagaagctattgtgtggtttagccattgttcttcccacctctgccacaagaccaagaaagggctgttgcctcagctgcgtcctgggatggaaaagacacaggaagtagaatcacagagccaca

SEQ ID NO: 16593 - DNA, 569 bp, Homo sapiens
  source 1..569: mol_type = unassigned DNA
acaaaggcggaagactcttgggcacccgcctgtggctgggagtttgcacctggggtacagaggcagggaggaaggcgggtgactctgtgggtaactagctggaggctgggccccccgggctgcctgacatacacctccttctgcttttgcaggggcttcgggaagcagggattccagtgccaagtaagagatgctaaaaaccttgtacctatggaccccaatggcctgtcagatccctacgtaaaactgaaactgattcccgatcccaaaagtgagagcaaacagaagaccaaaaccatcaaatgctccctcaaccctgagtggaatgagacatttagatttcagctgaaagaatcggacaaagacagaagactgtcagtagagatttgggattgggatttgaccagcaggaatgacttcatgggatctttgtcctttgggatttctgaacttcagaaagccagtgttgatggctggtttaagttactgagccaggaggaaggcgagtacttcaatgtgcctgtgccaccagaaggaagtgaggccaatgaagaactgcggcagaaatt

SEQ ID NO: 16594 - DNA, 467 bp, Homo sapiens
  source 1..467: mol_type = unassigned DNA
ctgggcacagggctccagcgatggtcccaacaggtacaatgacctctggggaccaagttcagttcttggtgagttctccagtgcctctcgatgtaggatgaaccgttggcatgctccactgacgctggctccttctgttgtttctcttggctccaggacccccgcagcaaacacaagtttaagatccacacgtactccagccccacgttttgtgaccactgtgggtcactgctgtatggactcatccaccaggggatgaaatgtgacacctgcatgatgaatgtgcacaagcgctgcgtgatgaatgttcccagcctgtgtggcacggaccacacggagcgccgcggccgcatctacatccaggcccacatcgacagggacgtcctcattgtcctcgtaagagatgctaaaaaccttgtacctatggaccccaatggcctgtcagatccctacgtaaaactgaaact

SEQ ID NO: 16595 - DNA, 541 bp, Homo sapiens
  source 1..541: mol_type = unassigned DNA
gtaagagatgctaaaaaccttgtacctatggaccccaatggcctgtcagatccctacgtaaaactgaaactgattcccgatcccaaaagtgagagcaaacagaagaccaaaaccatcaaatgctccctcaaccctgagtggaatgagacatttagatttcagctgaaagaatcggacaaagacagaagactgtcagtagagatttgggattgggatttgaccagcaggaatgacttcatgggatctttgtcctttgggatttctgaacttcagaaagccagtgttgatggctggaatccctggaagtccctgctgtgtggatagcacccttctcgatttccagcaaagatacagatgctctcttgtttttatatttcttttggtaatttccgtggaattttggaagaaaatttggaatattaaatgtggaggcgtagaggctcaaattgtcttctctgctttgaatcacctagcccatttttggaagctgcgtaagaagattcgtgaatggagagaaaacattgtgatgaaaattttaaac

SEQ ID NO: 16596 - DNA, 556 bp, Homo sapiens
  source 1..556: mol_type = unassigned DNA
ttcaaaggaaaagaaagaacaggatgtggtcatggaattgtttggctttcaagagccactgaagggctttcagcattcaagtggcacagtcagagctgcattttcagaacagtcattagctgaagcaagttaatctccctgagcctcagtgtgtttatctacgaaatgggggtcatgctttcagaacgaaaaggcacagatgagctctatgctgtgaagatcctgaagaaggacgttgtgatccaagatgatgacgtggagtgcactatggtggagaagcgggtgttggccctgcctgggaagccgcccttcctgacccagctccactcctgcttccagaccatggaccgcctgtactttgtgatggagtacgtgaatgggggcgacctcatgtatcacatccagcaagtcggccggttcaaggagccccatgctgtattttacgctgcagaaattgccatcggtctgttcttcttacagagtaagggcatcatttaccgtgacctaaaacttgacaacgtgatgctcgattctgagggacacatcaagattgccg

SEQ ID NO: 16597 - DNA, 599 bp, Homo sapiens
  source 1..599: mol_type = unassigned DNA
gttttcatcataaattccagctcttcccccactgtccatttggagccccagaagctacgggatgctaatgttgctgtttgctgtcctcttccaggaccgcctgtactttgtgatggagtacgtgaatgggggcgacctcatgtatcacatccagcaagtcggccggttcaaggagccccatgctgtattttacgctgcagaaattgccatcggtctgttcttcttacagagtaagggcatcatttaccggtaagtgaacactgctgtactttccatctcttcatctccctcagctcctccctgccctgcctctttcttcagctgcttttaaaattagaatccgcggtgggggaggaatcctccagaactaacttgggcatgtgttctgccaggcagcatcgcccactgccctggcaaagtttgggcagctctatatggtggtagaaaatctcggtggactgtgtcaccaatgatggttcagagcctcaaacaggagactgtttgctctaagaggagactcacagagaggacctcagtacttctttctcttgcttgtggaccctacatttgaggagcaggcaaagaattttggctggcag

SEQ ID NO: 16598 - DNA, 693 bp, Homo sapiens
  source 1..693: mol_type = unassigned DNA
tgttgcccagctagtgaaactataatccttcatccagttcatcatatcccatgtccccttctccactatacaattgctgaacttctgcctacccccagtttgtccttaaggcaaccccatcaccctctaaaccaccctttgaatccatctgtactttcagcactttatgagctatatagctgaccatccatgggttctttaatgtcctacacctagttcaatattgtattgaattctgagcattgccaagcatatggtgtccttgagtttctccatcgctttttttttttttttaatttcagattttacgctgcagaaattgccatcggtctgttcttcttacagagtaagggcatcatttaccgtgacctaaaacttgacaacgtgatgctcgattctgagggacacatcaagattgccgattttggcatgtgtaaggaaaacatctgggatggggtgacaaccaagacattctgtggcactccagactacatcgcccccgagataattgcttatcagccctatgggaagtccgtggattggtgggcatttggagtcctgctgtatgaaatgttggctgggcaggcaccctttgaaggggaggatgaagatgaactcttccaatccatcatggaacacaacgtagcctatcccaagtctatgtccaaggaagctgtggccatctgcaaaggg

SEQ ID NO: 16599 - DNA, 536 bp, Homo sapiens
  source 1..536: mol_type = unassigned DNA
gtctatgtccaaggaagctgtggccatctgcaaagggctgatgaccaaacacccaggcaaacgtctgggttgtggacctgaaggcgaacgtgatatcaaagagcatgcatttttccggtatattgattgggagaaacttgaacgcaaagagatccagcccccttataagccaaaagctgtaagtagcccattctctctgactgccgggtattcacacacaaggtattcttgcctgtgcctcatgttttccaaatgctccctgaggggtagacgtcaatgtgtctactggaacatgggtgtatgtattcacacatatgcacaaaatcactggttactaagatggacattttccattggcccagcttagtctctataaagatggaaacgacgatgcctattgaatttttgtttcttcgattcaattattgtaactgtcttagctgacaactttctgagaatggttcttgggtgagcagagttcagatccatttttggactgtgataaaggatctaattttgccctcattctttctctt

SEQ ID NO: 16600 - DNA, 589 bp, Homo sapiens
  source 1..589: mol_type = unassigned DNA
aaggattagggagtcctgagccccaggctgctctgctcagtcttggaaggcctcacgcaacccccttcacaaagcctgcccgattgtgtcctcaagggacaatttatagcatgcaatgacagtgcggagggcaggtctgtctggggagatgaaacgacctgtgcgattacaggagattcctactttcctcgcccccagtcctcaaggtcttctcagaggttcccactaggaggccggctgcagtgccctggacgaccctcacacccaggacctcagttgctccatccaaggaatgggcgagctcaggtcttcctgactttcctggagaacaaagaggccccactgcaggccccaccatggcgccgttcctgcgcatcgccttcaactcctatgagctgggctccctgcaggccgaggacgaggcgaaccagcccttctgtgccgtgaagatgaaggaggcgctcagcacagagcgtgggaaaacactggtgcagaagaagccgaccatgtatcctgagtggaagtcgacgttcgatgcccacatctatgaggggcgcgtcatccagattgtgctaatgcgggcagcaga

SEQ ID NO: 16601 - DNA, 2810 bp, Homo sapiens
  source 1..2810: mol_type = unassigned DNA
ggcctggcagggcgaggcctggcgggggcggggcctggcgggggcggggccggcggcacctgggtgaggtcgctcggccccgccccctcgcacttccgtgtgccgcggcgccggagcccgaggcggctgtagcccacatctcccgagcgacccccggcgcccgcccgccgcgcggaggcccgggccacacctcactggccgcttggcccatcccagtcagcgccgcgccgaaccccgtccgcgcgcgccggggagcggcgcccccgccgctgccgccgcgacccttggcgcctgcccctgcaacgggagccccactgcaggccccaccatggcgccgttcctgcgcatcgccttcaactcctatgagctgggctccctgcaggccgaggacgaggcgaaccagcccttctgtgccgtgaagatgaaggaggcgctcagcacagagcgtgggaaaacactggtgcagaagaagccgaccatgtatcctgagtggaagtcgacgttcgatgcccacatctatgaggggcgcgtcatccagattgtgctaatgcgggcagcagaggagccagtgtctgaggtgaccgtgggtgtgtcggtgctggccgagcgctgcaagaagaacaatggcaaggctgagttctggctggacctgcagcctcaggccaaggtgttgatgtctgttcagtatttcctggaggacgtggattgcaaacagtctatgcgcagtgaggacgaggccaagttcccaacgatgaaccgccgcggagccatcaaacaggccaaaatccactacatcaagaaccatgagtttatcgccaccttctttgggcaacccaccttctgttctgtgtgcaaagactttgtctggggcctcaacaagcaaggctacaaatgcaggcaatgtaacgctgccatccacaagaaatgcatcgacaagatcatcggcagatgcactggcaccgcggccaacagccgggacactatattccagaaagaacgcttcaacatcgacatgccgcaccgcttcaaggttcacaactacatgagccccaccttctgtgaccactgcggcagcctgctctggggactggtgaagcagggattaaagtgtgaagactgcggcatgaatgtgcaccataaatgccgggagaaggtggccaacctctgcggcatcaaccagaagcttttggctgaggccttgaaccaagtcacccagagagcctcccggagatcagactcagcctcctcagagcctgttgggatatatcagggtttcgagaagaagaccggagttgctggggaggacatgcaagacaacagtgggacctacggcaagatctgggagggcagcagcaagtgcaacatcaacaacttcatcttccacaaggtcctgggcaaaggcagcttcgggaaggtgctgcttggagagctgaagggcagaggagagtactttgccatcaaggccctcaagaaggatgtggtcctgatcgacgacgacgtggagtgcaccatggttgagaagcgggtgctgacacttgccgcagagaatccctttctcacccacctcatctgcaccttccagaccaaggaccacctgttctttgtgatggagttcctcaacgggggggacctgatgtaccacatccaggacaaaggccgctttgaactctaccgtgccacgttttatgccgctgagataatgtgtggactgcagtttctacacagcaagggcatcatttacagggacctcaaactggacaatgtgctgctggaccgggatggccacatcaagattgccgactttgggatgtgcaaagagaacatattcggggagagccgggccagcaccttctgcggcacccctgactatatcgcccctgagatcctacagggcctgaagtacacattctctgtggactggtggtctttcggggtccttctgtacgagatgctcattggccagtcccccttccatggtgatgatgaggatgaactcttcgagtccatccgtgtggacacgccacattatccccgctggatcaccaaggagtccaaggacatcctggagaagctctttgaaagggaaccaaccaagaggctgggagtgaccggaaacatcaaaatccaccccttcttcaagaccataaactggactctgctggaaaagcggaggttggagccacctttcaggcccaaagtgaagtcacccagagactacagtaactttgaccaggagttcctgaacgagaaggcgcgcctctcctacagcgacaagaacctcatcgactccatggaccagtctgcattcgctggcttctcctttgtgaaccccaaattcgagcacctcctggaagattgaggttcctggacagatcaggctagccctgccctccacccacacctgcccgctccccacgataagcaccagtgggactgtggtgacttctgctgctggccccgcccctgcccccagagcgtccttggctgccgtctggccgggctctcatggtacttcctctgtgaactgtgtgtgaatctgcttttcctctgccttcggagggaaattgtaaatcctgtgtttcattacttgaatgtagttatctattgaaaatatatattatatacatagacatatatatatatataataggctgtatatattgctcagtagagaaaaaccatgggggactggtgatatgttgatctttttcaaaaaaatatatatatgacaaaaaaaaaaaaaaaggagcacaagctgtttgaaccaccaggtttatttgtgtgtctaaataaacaccaaatagtaccaa

SEQ ID NO: 16602 - DNA, 2680 bp, Homo sapiens
  source 1..2680: mol_type = unassigned DNA
ccgccccctcgcacttccgtgtgccgcggcgccggagcccgaggcggctgtagcccacatctcccgagcgacccccggcgcccgcccgccgcgcggaggcccgggccacacctcactggccgcttggcccatcccagtcagcgccgcgccgaaccccgtccgcgcgcgccggggagcggcgcccccgccgctgccgccgcgacccttggcgcctgcccctgcaacgggaggtctgcagggaactggccaggcaagggggcaggcccgtttctcctggtggttggtgcgttgtagcagcagcgggagccaggactaaggacaagcaggagctgggagccccagccccactgcaggccccaccatggcgccgttcctgcgcatcgccttcaactcctatgagctgggctccctgcaggccgaggacgaggcgaaccagcccttctgtgccgtgaagatgaaggaggcgctcagcacagagcgtgggaaaacactggtgcagaagaagccgaccatgtatcctgagtggaagtcgacgttcgatgcccacatctatgaggggcgcgtcatccagattgtgctaatgcgggcagcagaggagccagtgtctgaggtgaccgtgggtgtgtcggtgctggccgagcgctgcaagaagaacaatggcaaggctgagttctggctggacctgcagcctcaggccaaggtgttgatgtctgttcagtatttcctggaggacgtggattgcaaacagtctatgcgcagtgaggacgaggccaagttcccaacgatgaaccgccgcggagccatcaaacaggccaaaatccactacatcaagaaccatgagtttatcgccaccttctttgggcaacccaccttctgttctgtgtgcaaagactttgtctggggcctcaacaagcaaggctacaaatgcaggcaatgtaacgctgccatccacaagaaatgcatcgacaagatcatcggcagatgcactggcaccgcggccaacagccgggacactatattccagaaagaacgcttcaacatcgacatgccgcaccgcttcaaggttcacaactacatgagccccaccttctgtgaccactgcggcagcctgctctggggactggtgaagcagggattaaagtgtgaagactgcggcatgaatgtgcaccataaatgccgggagaaggtggccaacctctgcggcatcaaccagaagcttttggctgaggccttgaaccaagtcacccagagagcctcccggagatcagactcagcctcctcagagcctgttgggatatatcagggtttcgagaagaagaccggagttgctggggaggacatgcaagacaacagtgggacctacggcaagatctgggagggcagcagcaagtgcaacatcaacaacttcatcttccacaaggtcctgggcaaaggcagcttcgggaaggtgctgcttggagagctgaagggcagaggagagtactttgccatcaaggccctcaagaaggatgtggtcctgatcgacgacgacgtggagtgcaccatggttgagaagcgggtgctgacacttgccgcagagaatccctttctcacccacctcatctgcaccttccagaccaaggaccacctgttctttgtgatggagttcctcaacgggggggacctgatgtaccacatccaggacaaaggccgctttgaactctaccgtgccacgttttatgccgctgagataatgtgtggactgcagtttctacacagcaagggcatcatttacagggacctcaaactggacaatgtgctgctggaccgggatggccacatcaagattgccgactttgggatgtgcaaagagaacatattcggggagagccgggccagcaccttctgcggcacccctgactatatcgcccctgagatcctacagggcctgaagtacacattctctgtggactggtggtctttcggggtccttctgtacgagatgctcattggccagtcccccttccatggtgatgatgaggatgaactcttcgagtccatccgtgtggacacgccacattatccccgctggatcaccaaggagtccaaggacatcctggagaagctctttgaaagggaaccaaccaagaggctgggagtgaccggaaacatcaaaatccaccccttcttcaagaccataaactggactctgctggaaaagcggaggttggagccacctttcaggcccaaagtgaagtcacccagagactacagtaactttgaccaggagttcctgaacgagaaggcgcgcctctcctacagcgacaagaacctcatcgactccatggaccagtctgcattcgctggcttctcctttgtgaaccccaaattcgagcacctcctggaagattgaggttcctggacagatcaggctagccctgccctccacccacacctgcccgctccccacgataagcaccagtgggactgtggtgacttctgctgctggccccgcccctgcccccagagcgtccttggctgccgtctggccgggctctcatggtacttcctctgtgaactgtgtgtgaatctgcttttcctctgccttcggagggaaattgtaaatcctgtgtttcattacttgaatgtagttatctattgaaaatatatattatatacatagacatatatatatatataa

SEQ ID NO: 16603 - DNA, 404 bp, Homo sapiens
  source 1..404: mol_type = unassigned DNA
ggcggctgtagcccacatctcccgagcgacccccggcgcccgcccgccgcgcggaggcccgggccacacctcactggccgcttggcccatcccagtcagcgccgcgccgaaccccgtccgcgcgcgccggggagcggcgcccccgccgctgccgccgcgacccttggcgcctgcccctgcaacgggaggctggagtgcagtggcaagatctcggctcactgcaacctctacctcccgggttcaagtgattcttctgcctcagcctcccagccccactgcaggccccaccatggcgccgttcctgcgcatcgccttcaactcctatgagctgggctccctgcaggccgaggacgaggcgaaccagcccttctgtgccgtgaagatgaaggaggcgctcagcacag

SEQ ID NO: 16604 - DNA, 562 bp, Homo sapiens
  source 1..562: mol_type = unassigned DNA
aaactgagaaactgagccgcggtcagcgaaagtcccgccgcgccgagacctgccggtctgcagggaactggccaggcaagggggcaggcccgtttctcctggtggttggtgcgttgtagcagcagcgggagccaggactaaggacaagcaggagctgggagccccagccccactgcaggccccaccatggcgccgttcctgcgcatcgccttcaactcctatgagctgggctccctgcaggccgaggacgaggcgaaccagcccttctgtgccgtgaagatgaaggaggcgctcagcacagagcgtgggaaaacactggtgcagaagaagccgaccatgtatcctgagtggaagtcgacgttcgatgcccacatctatgaggggcgcgtcatccagattgtgctaatgcgggcagcagaggagccagtgtctgaggtgaccgtgggtgtgtcggtgctggccgagcgctgcaagaagaacaatggcaaggctgagttctggctggacctgcagcctcaggccaaggtgttgatgtctgttcagtatttcctggaggacgtgg

SEQ ID NO: 16605 - DNA, 777 bp, Homo sapiens
  source 1..777: mol_type = unassigned DNA
ggggcaggcccgtttctcctggtggttggtgcgttgtagcagcagcgggagccaggactaaggacaagcaggagctgggagccccagccccactgcaggccccaccatggcgccgttcctgcgcatcgccttcaactcctatgagctgggctccctgcaggccgaggacgaggcgaaccagcccttctgtgccgtgaagatgaaggaggcgctcagcacagagcgtgggaaaacactggtgcagaagaagccgaccatgtatcctgagtggaagtcgacgttcgatgcccacatctatgaggggcgcgtcatccagattgtgctaatgcgggcagcagaggagccagtgtctgaggtgaccgtgggtgtgtcggtgctggccgagcgctgcaagaagaacaatggcaaggctgagttctggctggacctgcagcctcaggccaaggtgttgatgtctgttcagtatttcctggaggacgtggattgcaaacagtctatgcgcagtgaggacgaggccaagttcccaacgatgaaccgccgcggagccatcaaacaggccaaaatccactacatcaagaaccatgagtttatcgccaccttctttgggcaacccaccttctgttctgtgtgcaaagactttgtctggggcctcaacaagcaaggctacaaatgcaggcactgcggcatgaatgtgcaccataaatgccgggagaaggtggccaacctctgcggcatcaaccagaagcttttggctgaggccttgaaccaagtcaccca

SEQ ID NO: 16606 - DNA, 571 bp, Homo sapiens
  source 1..571: mol_type = unassigned DNA
attcctaggtcggtttcggggccatccccgccgcctatccttcgccctaggtcacctggaggtggctggaaggccagtggactccacatttagggagagtggttacaagaggactcggattcccccaccttcccttcggctttgggaatcccaggaaacccgccccgaacccctgaaaagtcccagagaagaaagggggccctgaggcagaaggtggtccacgaagtcaagagccacaagttcaccgctcgcttcttcaagcagcccaccttctgcagccactgcaccgacttcatctggggtatcggaaagcagggcctgcaatgtcaagtctgcagctttgtggttcatcgacgatgccacgaatttgtgaccttcgagtgtccaggcgctgggaagggcccccagacggacgacccccggaacaaacacaagttccgcctgcatagctacagcagccccaccttctgcgaccactgtggctccctcctctacgggcttgtgcaccagggcatgaaatgctcctgctgcgagatgaacgtgcaccggcgctgtgtgcgtagcgtgccct

SEQ ID NO: 16607 - DNA, 678 bp, Homo sapiens
  source 1..678: mol_type = unassigned DNA
acacaaataatggagaggccaggggaggaaataaagactcagccggcatcggagaaaaaagggggccctgaggcagaaggtggtccacgaagtcaagagccacaagttcaccgctcgcttcttcaagcagcccaccttctgcagccactgcaccgacttcatctggggtatcggaaagcagggcctgcaatgtcaagtctgcagctttgtggttcatcgacgatgccacgaatttgtgaccttcgagtgtccaggcgctgggaagggcccccagacggacgacccccggaacaaacacaagttccgcctgcatagctacagcagccccaccttctgcgaccactgtggctccctcctctacgggcttgtgcaccagggcatgaaatgctcctgctgcgagatgaacgtgcaccggcgctgtgtgcgtagcgtgccctccctgtgcggtgtggaccacaccgagcgccgcgggcgcctgcagctggagatccgggctcccacagcagatgagatccacgtaactgttggcgaggcccgtaacctaattcctatggaccccaatggtctctctgatccctatgtgaaactgaagctcatcccagaccctcggaacctgacgaaacagaagacccgaacggtgaaagccacgctaaaccctgtgtggaatgagacctttgt

SEQ ID NO: 16608 - DNA, 3133 bp, Homo sapiens
  source 1..3133: mol_type = unassigned DNA
cggagctggagctcccaccgccgccgcccgtgcctccggctgccggcgcccctgcctttggctcttcctccccactcgcccgctccccctggcggagccggcgcgcccggggtgccgctccctgcctggcgcgctccgcacctggaggtgccttgcccctctcctgcccacctcggaatttccctgtggctcctttgatccttcgagtctccagctcctctcccttccacctgtttcccccaagaaaggcaggatcctggtccctgctacgtttctggggccatggctggtctgggccccggcgtaggcgattcagaggggggaccccggcccctgttttgcagaaagggggccctgaggcagaaggtggtccacgaagtcaagagccacaagttcaccgctcgcttcttcaagcagcccaccttctgcagccactgcaccgacttcatctggggtatcggaaagcagggcctgcaatgtcaagtctgcagctttgtggttcatcgacgatgccacgaatttgtgaccttcgagtgtccaggcgctgggaagggcccccagacggacgacccccggaacaaacacaagttccgcctgcatagctacagcagccccaccttctgcgaccactgtggctccctcctctacgggcttgtgcaccagggcatgaaatgctcctgctgcgagatgaacgtgcaccggcgctgtgtgcgtagcgtgccctccctgtgcggtgtggaccacaccgagcgccgcgggcgcctgcagctggagatccgggctcccacagcagatgagatccacgtaactgttggcgaggcccgtaacctaattcctatggaccccaatggtctctctgatccctatgtgaaactgaagctcatcccagaccctcggaacctgacgaaacagaagacccgaacggtgaaagccacgctaaaccctgtgtggaatgagacctttgtgttcaacctgaagccaggggatgtggagcgccggctcagcgtggaggtgtgggactgggaccggacctcccgcaacgacttcatgggggccatgtcctttggcgtctcggagctgctcaaggcgcccgtggatggctggtacaagttactgaaccaggaggagggcgagtattacaatgtgccggtggccgatgctgacaactgcagcctcctccagaagtttgaggcttgtaactaccccctggaattgtatgagcgggtgcggatgggcccctcttcctctcccatcccctccccttcccctagtcccaccgaccccaagcgctgcttcttcggggcgagtccaggacgcctgcacatctccgacttcagcttcctcatggttctaggaaaaggcagttttgggaaggtgatgctggccgagcgcaggggctctgatgagctctacgccatcaagatcttgaaaaaggacgtgatcgtccaggacgacgatgtggactgcacgctggtggagaaacgtgtgctggcgctggggggccggggtcctggcggccggccccacttcctcacccagctccactccaccttccagaccccggaccgcctgtatttcgtgatggagtacgtcaccgggggagacttgatgtaccacattcaacagctgggcaagtttaaggagccccatgcagcgttctacgcggcagaaatcgctatcggcctcttcttccttcacaatcagggcatcatctacagggacctgaagctggacaatgtgatgctggatgctgagggacacatcaagatcactgactttggcatgtgtaaggagaacgtcttccccgggacgacaacccgcaccttctgcgggaccccggactacatagccccggagatcattgcctaccagccctatgggaagtctgtcgattggtggtcctttggagttctgctgtatgagatgttggcaggacagcctcccttcgatggggaggacgaggaggagctgtttcaggccatcatggaacaaactgtcacctaccccaagtcgctttcccgggaagccgtggccatctgcaaggggttcctgaccaagcacccagggaagcgcctgggctcagggcctgatggggaacctaccatccgtgcacatggctttttccgctggattgactgggagcggctggaacgattggagatcccgcctcctttcagaccccgcccgtgtggccgcagcggcgagaactttgacaagttcttcacgcgggcggcgccagcgctgacccctccagaccgcctagtcctggccagcatcgaccaggccgatttccagggcttcacctacgtgaaccccgacttcgtgcacccggatgcccgcagccccaccagcccagtgcctgtgcccgtcatgtaatctcacccgccgccactaggtgtccccaacgtcccctccgccgtgccggcggcagccccacttcacccccaacttcaccaccccctgtcccattctagatcctgcaccccagcattccagctctgcccccgcgggttctagacgcccctcccaagcgttcctggccttctgaactccatacagcctctacagccgtcccgcgttcaagacttgagcggagcccgatattctccctgaccttagcgttctggactctgccccaatcgggtccagagaccacaccactaaccatccccaactccatggggttcgagactccatcttggtagttctgtgcctccccccagaccccgcccctggggaaatagcctcacggggttggctgttccagactcaggttccagaacagccctcggcctccgaggctccccgcctccactctagttctagatgagtgggaggcgtgcccccctcctccagtacgtcccgctgctgtgctctggggatttctgggatatatggaggattctttccccagaggctcccaatcagcttttgttctagacttccccatcccgaagccatcacttctccccgcagcccgcctgccgtgcatggctcctgtctggctcggacccaccccaactctccccagtgcctgccactctctgggactctcctcctcccctcctcttcccttagcctctcccacccggccacagctgctggagaataaatttgggatgctgatgctgaa

SEQ ID NO: 16609 - DNA, 560 bp, Homo sapiens
  source 1..560: mol_type = unassigned DNA
accgccgccgcccgtgcctccggctgccggcgcccctgcctttggctcttcctccccactcgcccgctccccctggcggagccggcgcgcccggggtgccgctccctgcctggcgcgctccgcacctggagaaagggggccctgaggcagaaggtggtccacgaagtcaagagccacaagttcaccgctcgcttcttcaagcagcccaccttctgcagccactgcaccgacttcatctggggtatcggaaagcagggcctgcaatgtcaagtctgcagctttgtggttcatcgacgatgccacgaatttgtgaccttcgagtgtccaggcgctgggaagggcccccagacggacgacccccggaacaaacacaagttccgcctgcatagctacagcagccccaccttctgcgaccactgtggctccctcctctacgggcttgtgcaccagggcatgaaatgctcctgctgcgagatgaacgtgcaccggcgctgtgtgcgtagcgtgccctccctgtgcggtgtggaccacaccgagcgccgcgggcgcctgcagctgga

SEQ ID NO: 16610 - DNA, 3224 bp, Homo sapiens
  source 1..3224: mol_type = unassigned DNA
ccgccagccccgccagtccccgcgcagtccccgcgcagtccccgcgcagtcccagcgccaccgggcagcagcggcgccgtgctcgctccagggcgcaaccatgtcgccatttcttcggattggcttgtccaactttgactgcgggtcctgccagtcttgtcagggcgaggctgttaacccttactgtgctgtgctcgtcaaagagtatgtcgaatcagagaacgggcagatgtatatccagaaaaagcctaccatgtacccaccctgggacagcacttttgatgcccatatcaacaagggaagagtcatgcagatcattgtgaaaggcaaaaacgtggacctcatctctgaaaccaccgtggagctctactcgctggctgagaggtgcaggaagaacaacgggaagacagaaatatggacacaaaggacatgaatgaatttgagacggaaggcttctttgctttgcatcagcgccggggtgccatcaagcaggcaaaggtccaccacgtcaagtgccacgagttcactgccaccttcttcccacagcccacattttgctctgtctgccacgagtttgtctggggcctgaacaaacagggctaccagtgccgacaatgcaatgcagcaattcacaagaagtgtattgataaagttatagcaaagtgcacaggatcagctatcaatagccgagaaaccatgttccacaaggagagattcaaaattgacatgccacacagatttaaagtctacaattacaagagcccgaccttctgtgaacactgtgggaccctgctgtggggactggcacggcaaggactcaagtgtgatgcatgtggcatgaatgtgcatcatagatgccagacaaaggtggccaacctttgtggcataaaccagaagctaatggctgaagcgctggccatgattgagagcactcaacaggctcgctgcttaagagatactgaacagatcttcagagaaggtccggttgaaattggtctcccatgctccatcaaaaatgaagcaaggccgccatgtttaccgacaccgggaaaaagagagcctcagggcatttcctgggagtctccgttggatgaggtggataaaatgtgccatcttccagaacctgaactgaacaaagaaagaccatctctgcagattaaactaaaaattgaggattttatcttgcacaaaatgttggggaaaggaagttttggcaaggtcttcctggcagaattcaagaaaaccaatcaatttttcgcaataaaggccttaaagaaagatgtggtcttgatggacgatgatgttgagtgcacgatggtagagaagagagttctttccttggcctgggagcatccgtttctgacgcacatgttttgtacattccagaccaaggaaaacctcttttttgtgatggagtacctcaacggaggggacttaatgtaccacatccaaagctgccacaagttcgacctttccagagcgacgttttatgctgctgaaatcattcttggtctgcagttccttcattccaaaggaatagtctacagggacctgaagctagataacatcctgttagacaaagatggacatatcaagatcgcggattttggaatgtgcaaggagaacatgttaggagatgccaagacgaataccttctgtgggacacctgactacatcgccccagagatcttgctgggtcagaaatacaaccactctgtggactggtggtccttcggggttctcctttatgaaatgctgattggtcagtcgcctttccacgggcaggatgaggaggagctcttccactccatccgcatggacaatcccttttacccacggtggctggagaaggaagcaaaggaccttctggtgaagctcttcgtgcgagaacctgagaagaggctgggcgtgaggggagacatccgccagcaccctttgtttcgggagatcaactgggaggaacttgaacggaaggagattgacccaccgttccggccgaaagtgaaatcaccatttgactgcagcaatttcgacaaagaattcttaaacgagaagccccggctgtcatttgccgacagagcactgatcaacagcatggaccagaatatgttcaggaacttttccttcatgaaccccgggatggagcggctgatatcctgaatcttgcccctccagagacaggaaagaatttgccttctccctgggaactggttcaagagacactgcttgggttcctttttcaacttggaaaaagaaagaaacactcaacaataaagactgagacccgttcgcccccatgtgacttttatctgtagcagaaaccaagtctacttcactaatgacgatgccgtgtgtctcgtctcctgacatgtctcacagacgctcctgaagttaggtcattactaaccatagttatttacttgaaagatgggtctccgcacttggaaaggtttcaagacttgatactgcaataaattatggctcttcacctgggcgccaactgctgatcaatgaaatgcttgttgaatcaggggcaaacggagtacagacgtctcaagactgaaacggccccattgcctggtctagtagcggatctcactcagccgcagacaagtaatcactaacccgttttattctattcctatctgtggatgtgtaaatggctggggggccagccctggataggtttttatgggaattctttacaataaacatagcttgtaacttgagatctacaaatccattcatcctgattgggcatgaaatccatggtcaagaggacaagtggaaagtgagagggaaggtttgctagacaccttcgcttgttatcttgtcaagatagaaaagatagtatcatttcacccttgccagtaaaaacctttccatccacccattctcagcagactccagtattggcacagtcactcactgccattctcacactataacaagaaaagaaatgaagtgcataagtctcctgggaaaagaaccttaaccccttctcgtgccatgactggtgatttcatgactcataagcccctccgtaggcatcattcaagatcaatggcccatgcatgctgtttgcagcagtcaattgagttgaattagaattccaaccatacattttaaaggtatttgtgctgtgtgtatattttgataaaatgttgtgacttcatggcaaacaggtggatgtgtaaaaatggaataaaaaaaaaaaaagagtc

SEQ ID NO: 16611 - DNA, 3285 bp, Homo sapiens
  source 1..3285: mol_type = unassigned DNA
ccgccagccccgccagtccccgcgcagtccccgcgcagtccccgcgcagtcccagcgccaccgggcagcagcggcgccgtgctcgctccagggcgcaaccatgtcgccatttcttcggattggcttgtccaactttgactgcgggtcctgccagtcttgtcagggcgaggctgttaacccttactgtgctgtgctcgtcaaagagtatgtcgaatcagagaacgggcagatgtatatccagaaaaagcctaccatgtacccaccctgggacagcacttttgatgcccatatcaacaagggaagagtcatgcagatcattgtgaaaggcaaaaacgtggacctcatctctgaaaccaccgtggagctctactcgctggctgagaggtgcaggaagaacaacgggaagacagaaatatggttagagctgaaacctcaaggccgaatgctaatgaatgcaagatactttctggaaatgagtgacacaaaggacatgaatgaatttgagacggaaggcttctttgctttgcatcagcgccggggtgccatcaagcaggcaaaggtccaccacgtcaagtgccacgagttcactgccaccttcttcccacagcccacattttgctctgtctgccacgagtttgtctggggcctgaacaaacagggctaccagtgccgacaatgcaatgcagcaattcacaagaagtgtattgataaagttatagcaaagtgcacaggatcagctatcaatagccgagaaaccatgttccacaaggagagattcaaaattgacatgccacacagatttaaagtctacaattacaagagcccgaccttctgtgaacactgtgggaccctgctgtggggactggcacggcaaggactcaagtgtgatgcatgtggcatgaatgtgcatcatagatgccagacaaaggtggccaacctttgtggcataaaccagaagctaatggctgaagcgctggccatgattgagagcactcaacaggctcgctgcttaagagatactgaacagatcttcagagaaggtccggttgaaattggtctcccatgctccatcaaaaatgaagcaaggccgccatgtttaccgacaccgggaaaaagagagcctcagggcatttcctgggagtctccgttggatgaggtggataaaatgtgccatcttccagaacctgaactgaacaaagaaagaccatctctgcagattaaactaaaaattgaggattttatcttgcacaaaatgttggggaaaggaagttttggcaaggtcttcctggcagaattcaagaaaaccaatcaatttttcgcaataaaggccttaaagaaagatgtggtcttgatggacgatgatgttgagtgcacgatggtagagaagagagttctttccttggcctgggagcatccgtttctgacgcacatgttttgtacattccagaccaaggaaaacctcttttttgtgatggagtacctcaacggaggggacttaatgtaccacatccaaagctgccacaagttcgacctttccagagcgacgttttatgctgctgaaatcattcttggtctgcagttccttcattccaaaggaatagtctacagggacctgaagctagataacatcctgttagacaaagatggacatatcaagatcgcggattttggaatgtgcaaggagaacatgttaggagatgccaagacgaataccttctgtgggacacctgactacatcgccccagagatcttgctgggtcagaaatacaaccactctgtggactggtggtccttcggggttctcctttatgaaatgctgattggtcagtcgcctttccacgggcaggatgaggaggagctcttccactccatccgcatggacaatcccttttacccacggtggctggagaaggaagcaaaggaccttctggtgaagctcttcgtgcgagaacctgagaagaggctgggcgtgaggggagacatccgccagcaccctttgtttcgggagatcaactgggaggaacttgaacggaaggagattgacccaccgttccggccgaaagtgaaatcaccatttgactgcagcaatttcgacaaagaattcttaaacgagaagccccggctgtcatttgccgacagagcactgatcaacagcatggaccagaatatgttcaggaacttttccttcatgaaccccgggatggagcggctgatatcctgaatcttgcccctccagagacaggaaagaatttgccttctccctgggaactggttcaagagacactgcttgggttcctttttcaacttggaaaaagaaagaaacactcaacaataaagactgagacccgttcgcccccatgtgacttttatctgtagcagaaaccaagtctacttcactaatgacgatgccgtgtgtctcgtctcctgacatgtctcacagacgctcctgaagttaggtcattactaaccatagttatttacttgaaagatgggtctccgcacttggaaaggtttcaagacttgatactgcaataaattatggctcttcacctgggcgccaactgctgatcaatgaaatgcttgttgaatcaggggcaaacggagtacagacgtctcaagactgaaacggccccattgcctggtctagtagcggatctcactcagccgcagacaagtaatcactaacccgttttattctattcctatctgtggatgtgtaaatggctggggggccagccctggataggtttttatgggaattctttacaataaacatagcttgtaacttgagatctacaaatccattcatcctgattgggcatgaaatccatggtcaagaggacaagtggaaagtgagagggaaggtttgctagacaccttcgcttgttatcttgtcaagatagaaaagatagtatcatttcacccttgccagtaaaaacctttccatccacccattctcagcagactccagtattggcacagtcactcactgccattctcacactataacaagaaaagaaatgaagtgcataagtctcctgggaaaagaaccttaaccccttctcgtgccatgactggtgatttcatgactcataagcccctccgtaggcatcattcaagatcaatggcccatgcatgctgtttgcagcagtcaattgagttgaattagaattccaaccatacattttaaaggtatttgtgctgtgtgtatattttgataaaatgttgtgacttcatggcaaacaggtggatgtgtaaaaatggaataaaaaaaaaaaaagagtc

SEQ ID NO: 16612 - DNA, 3077 bp, Homo sapiens
  source 1..3077: mol_type = unassigned DNA
atgtcaaatgagaacgggcagatgtatatccagaaaaagcctaccatgtacccaccctgggacagcacttttgatgcccatatcaacaagggaagagtcatgcagatcattgtgaaaggcaaaaacgtggacctcatctctgaaaccaccgtggagctctactcgctggctgagaggtgcaggaagaacaacgggaagacagaaatatggttagagctgaaacctcaaggccgaatgctaatgaatgcaagatactttctggaaatgagtgacacaaaggacatgaatgaatttgagacggaaggcttctttgctttgcatcagcgccggggtgccatcaagcaggcaaaggtccaccacgtcaagtgccacgagttcactgccaccttcttcccacagcccacattttgctctgtctgccacgagtttgtctggggcctgaacaaacagggctaccagtgccgacaatgcaatgcagcaattcacaagaagtgtattgataaagttatagcaaagtgcacaggatcagctatcaatagccgagaaaccatgttccacaaggagagattcaaaattgacatgccacacagatttaaagtctacaattacaagagcccgaccttctgtgaacactgtgggaccctgctgtggggactggcacggcaaggactcaagtgtgatgcatgtggcatgaatgtgcatcatagatgccagacaaaggtggccaacctttgtggcataaaccagaagctaatggctgaagcgctggccatgattgagagcactcaacaggctcgctgcttaagagatactgaacagatcttcagagaaggtccggttgaaattggtctcccatgctccatcaaaaatgaagcaaggccgccatgtttaccgacaccgggaaaaagagagcctcagggcatttcctgggagtctccgttggatgaggtggataaaatgtgccatcttccagaacctgaactgaacaaagaaagaccatctctgcagattaaactaaaaattgaggattttatcttgcacaaaatgttggggaaaggaagttttggcaaggtcttcctggcagaattcaagaaaaccaatcaatttttcgcaataaaggccttaaagaaagatgtggtcttgatggacgatgatgttgagtgcacgatggtagagaagagagttctttccttggcctgggagcatccgtttctgacgcacatgttttgtacattccagaccaaggaaaacctcttttttgtgatggagtacctcaacggaggggacttaatgtaccacatccaaagctgccacaagttcgacctttccagagcgacgttttatgctgctgaaatcattcttggtctgcagttccttcattccaaaggaatagtctacagggacctgaagctagataacatcctgttagacaaagatggacatatcaagatcgcggattttggaatgtgcaaggagaacatgttaggagatgccaagacgaataccttctgtgggacacctgactacatcgccccagagatcttgctgggtcagaaatacaaccactctgtggactggtggtccttcggggttctcctttatgaaatgctgattggtcagtcgcctttccacgggcaggatgaggaggagctcttccactccatccgcatggacaatcccttttacccacggtggctggagaaggaagcaaaggaccttctggtgaagctcttcgtgcgagaacctgagaagaggctgggcgtgaggggagacatccgccagcaccctttgtttcgggagatcaactgggaggaacttgaacggaaggagattgacccaccgttccggccgaaagtgaaatcaccatttgactgcagcaatttcgacaaagaattcttaaacgagaagccccggctgtcatttgccgacagagcactgatcaacagcatggaccagaatatgttcaggaacttttccttcatgaaccccgggatggagcggctgatatcctgaatcttgcccctccagagacaggaaagaatttgccttctccctgggaactggttcaagagacactgcttgggttcctttttcaacttggaaaaagaaagaaacactcaacaataaagactgagacccgttcgcccccatgtgacttttatctgtagcagaaaccaagtctacttcactaatgacgatgccgtgtgtctcgtctcctgacatgtctcacagacgctcctgaagttaggtcattactaaccatagttatttacttgaaagatgggtctccgcacttggaaaggtttcaagacttgatactgcaataaattatggctcttcacctgggcgccaactgctgatcaatgaaatgcttgttgaatcaggggcaaacggagtacagacgtctcaagactgaaacggccccattgcctggtctagtagcggatctcactcagccgcagacaagtaatcactaacccgttttattctattcctatctgtggatgtgtaaatggctggggggccagccctggataggtttttatgggaattctttacaataaacatagcttgtaacttgagatctacaaatccattcatcctgattgggcatgaaatccatggtcaagaggacaagtggaaagtgagagggaaggtttgctagacaccttcgcttgttatcttgtcaagatagaaaagatagtatcatttcacccttgccagtaaaaacctttccatccacccattctcagcagactccagtattggcacagtcactcactgccattctcacactataacaagaaaagaaatgaagtgcataagtctcctgggaaaagaaccttaaccccttctcgtgccatgactggtgatttcatgactcataagcccctccgtaggcatcattcaagatcaatggcccatgcatgctgtttgcagcagtcaattgagttgaattagaattccaaccatacattttaaaggtatttgtgctgtgtgtatattttgataaaatgttgtgacttcatggcaaacaggtggatgtgtaaaaatggaataaaaaaaaaaaaagagtc

SEQ ID NO: 16613 - DNA, 3096 bp, Homo sapiens
  source 1..3096: mol_type = unassigned DNA
ccgccagccccgccagtccccgcgcagtccccgcgcagtccccgcgcagtcccagcgccaccgggcagcagcggcgccgtgctcgctccagggcgcaaccatgtcgccatttcttcggattggcttgtccaactttgactgcgggtcctgccagtcttgtcagggcgaggctgttaacccttactgtgctgtgctcgtcaaagagtatgtcgaatcagagaacgggcagatgtatatccagaaaaagcctaccatgtacccaccctgggacagcacttttgatgcccatatcaacaagggaagagtcatgcagatcattgtgaaaggcaaaaacgtggacctcatctctgaaaccaccgtggagctctactcgctggctgagaggtgcaggaagaacaacgggaagacagaaatatggttagagctgaaacctcaaggccgaatgctaatgaatgcaagatactttctggaaatgagtgacacaaaggacatgaatgaatttgagacggaaggcttctttgctttgcatcagcgccggggtgccatcaagcaggcaaaggtccaccacgtcaagtgccacgagttcactgccaccttcttcccacagcccacattttgctctgtctgccacgagtttgtctggggcctgaacaaacagggctaccagtgccgacaatgcaatgcagcaattcacaagaagtgtattgataaagttatagcaaagtgcacaggatcagctatcaatagccgagaaaccatgttccacaaggagagattcaaaattgacatgccacacagatttaaagtctacaattacaagagcccgaccttctgtgaacactgtgggaccctgctgtggggactggcacggcaaggactcaagtgtgatgcatgtggcatgaatgtgcatcatagatgccagacaaaggtggccaacctttgtggcataaaccagaagctaatggctgaagcgctggccatgattgagagcactcaacaggctcgctgcttaagagatactgaacagatcttcagagaaggtccggttgaaattggtctcccatgctccatcaaaaatgaagcaaggccgccatgtttaccgacaccgggaaaaagagagcctcagggcatttcctgggagtctccgttggatgaggtggataaaatgtgccatcttccagaacctgaactgaacaaagaaagaccatctctgcagattaaactaaaaattgaggattttatcttgcacaaaatgttggggaaaggaagttttggcaaggtcttcctggcagaattcaagaaaaccaatcaatttttcgcaataaaggccttaaagaaagatgtggtcttgatggacgatgatgttgagtgcacgatggtagagaagagagttctttccttggcctgggagcatccgtttctgacgcacatgttttgtacattccagaccaaggaaaacctcttttttgtgatggagtacctcaacggaggggacttaatgtaccacatccaaagctgccacaagttcgacctttccagagcgacgttttatgctgctgaaatcattcttggtctgcagttccttcattccaaaggaatagtctacagggacctgaagctagataacatcctgttagacaaagatggacatatcaagatcgcggattttggaatgtgcaaggagaacatgttaggagatgccaagacgaataccttctgtgggacacctgactacatcgccccagagctcttcgtgcgagaacctgagaagaggctgggcgtgaggggagacatccgccagcaccctttgtttcgggagatcaactgggaggaacttgaacggaaggagattgacccaccgttccggccgaaagtgaaatcaccatttgactgcagcaatttcgacaaagaattcttaaacgagaagccccggctgtcatttgccgacagagcactgatcaacagcatggaccagaatatgttcaggaacttttccttcatgaaccccgggatggagcggctgatatcctgaatcttgcccctccagagacaggaaagaatttgccttctccctgggaactggttcaagagacactgcttgggttcctttttcaacttggaaaaagaaagaaacactcaacaataaagactgagacccgttcgcccccatgtgacttttatctgtagcagaaaccaagtctacttcactaatgacgatgccgtgtgtctcgtctcctgacatgtctcacagacgctcctgaagttaggtcattactaaccatagttatttacttgaaagatgggtctccgcacttggaaaggtttcaagacttgatactgcaataaattatggctcttcacctgggcgccaactgctgatcaatgaaatgcttgttgaatcaggggcaaacggagtacagacgtctcaagactgaaacggccccattgcctggtctagtagcggatctcactcagccgcagacaagtaatcactaacccgttttattctattcctatctgtggatgtgtaaatggctggggggccagccctggataggtttttatgggaattctttacaataaacatagcttgtaacttgagatctacaaatccattcatcctgattgggcatgaaatccatggtcaagaggacaagtggaaagtgagagggaaggtttgctagacaccttcgcttgttatcttgtcaagatagaaaagatagtatcatttcacccttgccagtaaaaacctttccatccacccattctcagcagactccagtattggcacagtcactcactgccattctcacactataacaagaaaagaaatgaagtgcataagtctcctgggaaaagaaccttaaccccttctcgtgccatgactggtgatttcatgactcataagcccctccgtaggcatcattcaagatcaatggcccatgcatgctgtttgcagcagtcaattgagttgaattagaattccaaccatacattttaaaggtatttgtgctgtgtgtatattttgataaaatgttgtgacttcatggcaaacaggtggatgtgtaaaaatggaataaaaaaaaaaaaagagtc

SEQ ID NO: 16614 - DNA, 6111 bp, Homo sapiens
  source 1..6111: mol_type = unassigned DNA
ctttgtggtctacagccacaccaccccaaatgtgcctgatcttgtctgatcttggaagctaagcattgttgggcctagttaggacctggataggagaaatcccttatggctaactatatgtcagaaagcatcagcttttctcgatggacccattcatctaatgaaatatgcctgtactattttaaaaagctttgtatttcgtcatagaaaagttcatccccccagaatgaaaatgaggacatttgagaaggtgatttaaggtgtggacatttgagaaggtgtcctatcaaattagtaaaccaaaggaaaagtactgaatagattaatccaaaacacttactgttttttaaacgaagaggatttcaccttgacagaaaaacaacttttattcaatatgtatttcctgaaattaaagagacaagtacagactgaaaggaaaatagattcgtaaataagctacgtcaactctatcctgctgaggatagctcagtgatgttaaatcctttacaaatccctggttgtcttcctacagacaagactgctttttgatgggactgatattaagagaaataggacctttggggcattcaactccttgataaaacttaaaagtatcggcatgagtggcttaacagaggaaataaagaagttttcaactaaatccaaaagtgcggtcattttctttactgctgttattttaaaaacctcttcataaccattgaaaaagaatcgacaactattttaaaagattaaagaaaggcagatgtctgcaaataattcccctccatcagcccagaagtctgtattacccacagctattcctgctgtgcttccagctgcttctccgtgttcaagtcctaagacgggactctctgcccgactctctaatggaagcttcagtgcaccatcactcaccaactccagaggctcagtgcatacagtttcatttctactgcaaattggcctcacacgggagagtgttaccattgaagcccaggaactgtctttatctgctgtcaaggatcttgtgtgctccatagtttatcaaaagtttccagagtgtggattctttggcatgtatgacaaaattcttctctttcgccatgacatgaactcagaaaacattttgcagctgattacctcagcagatgaaatacatgaaggagacctagtggaagtggttctttcagctttagccacagtagaagacttccagattcgtccacatactctctatgtacattcttacaaagctcctactttctgtgattactgtggtgagatgctctggggattggtacgtcaaggactgaaatgtgaaggctgtggattaaattaccataaacgatgtgccttcaagattccaaataactgtagtggagtaagaaagagacgtctgtcaaatgtatctttaccaggacccggcctctcagttccaagacccctacagcctgaatatgtagcccttcccagtgaagagtcacatgtccaccaggaaccaagtaagagaattccttcttggagtggtcgcccaatctggatggaaaagatggtaatgtgcagagtgaaagttccacacacatttgctgttcactcttacacccgtcccacgatatgtcagtactgcaagcggttactgaaaggcctctttcgccaaggaatgcagtgtaaagattgcaaattcaactgccataaacgctgtgcatcaaaagtaccaagagactgccttggagaggttactttcaatggagaaccttccagtctgggaacagatacagatataccaatggatattgacaataatgacataaatagtgatagtagtcggggtttggatgacacagaagagccatcacccccagaagataagatgttcttcttggatccatctgatctcgatgtggaaagagatgaagaagccgttaaaacaatcagtccatcaacaagcaataatattccgctaatgagggttgtacaatccatcaagcacacaaagaggaagagcagcacaatggtgaaggaagggtggatggtccattacaccagcagggataacctgagaaagaggcattattggagacttgacagcaaatgtctaacattatttcagaatgaatctggatcaaagtattataaggaaattccactttcagaaattctccgcatatcttcaccacgagatttcacaaacatttcacaaggcagcaatccacactgttttgaaatcattactgatactatggtatacttcgttggtgagaacaatggggacagctctcataatcctgttcttgctgccactggagttggacttgatgtagcacagagctgggaaaaagcaattcgccaagccctcatgcctgttactcctcaagcaagtgtttgcacttctccagggcaagggaaagatcacaaagatttgtctacaagtatctctgtatctaattgtcagattcaggagaatgtggatatcagtactgtttaccagatctttgcagatgaggtgcttggttcaggccagtttggcatcgtttatggaggaaaacatagaaagactgggagggatgtggctattaaagtaattgataagatgagattccccacaaaacaagaaagtcaactccgtaatgaagtggctattttacagaatttgcaccatcctgggattgtaaacctggaatgtatgtttgaaaccccagaacgagtctttgtagtaatggaaaagctgcatggagatatgttggaaatgattctatccagtgagaaaagtcggcttccagaacgaattactaaattcatggtcacacagatacttgttgctttgaggaatctgcattttaagaatattgtgcactgtgatttaaagccagaaaatgtgctgcttgcatcagcagagccatttcctcaggtgaagctgtgtgactttggatttgcacgcatcattggtgaaaagtcattcaggagatctgtggtaggaactccagcatacttagcccctgaagttctccggagcaaaggttacaaccgttccctagatatgtggtcagtgggagttatcatctatgtgagcctcagtggcacatttccttttaatgaggatgaagatataaatgaccaaatccaaaatgctgcatttatgtacccaccaaatccatggagagaaatttctggtgaagcaattgatctgataaacaatctgcttcaagtgaagatgagaaaacgttacagtgttgacaaatctcttagtcatccctggctacaggactatcagacttggcttgaccttagagaatttgaaactcgcattggagaacgttacattacacatgaaagtgatgatgctcgctgggaaatacatgcatacacacataaccttgtatacccaaagcacttcattatggctcctaatccagatgatatggaagaagatccttaatcactgagctaacctaaataaggaaggatttcattttatggactgatattttgctgtgtaacttgttctttgtagattgtcatctgcagtgctgcaaagatatgaagaaatatgataacgaataagtgacaccagtactgtagttcataatgagtaggtacaggcgggaaactgaataataagaagtcataatggaatcaaggtgaagctttttataaacttttttagcctaagcaataactggttttgtattttttcttaatccttcactttaatacaataggctcacttaatttgtcttcccatttctctttatatatatatatataaatataaatatatgtttgtttgtttttttaatgaaaaacaagtcaagctagcatccagttactatatagcttggctaaattatacaagacttacaagattgattactcgacaggcttgtatttaagaggtaactgtgaggttaccattatgtgatgttactataaggacttttaacattggtttaacaaaccatagaggcattgaagggtttttcttagatgcctagaaaaagcgcactgggctgttttacctttcttttttaggtcaatcaagactccaaaatagtgattcctaacctttttggagttgctctgctactctgaatatgttctatacagcataaggattgtcaccttctgtgtgttgcaacagcttctaagataattagggacaaatgatgttacaaaaggaagagtactgctggtctaagtgctgagttgtatgtctttgcatagctccactctgctgctaaatatgcatgttctgactgacaccatcttgatgccagtactggattccagcattcagcaggtgcagatctcggctttacacaatttatctttacctagggttcagtcagtaatttctgctttttagcagggccagtgcagggtcagttaatgctacagttactgtatagcaaacagtatccttttttctccttcccctagcctattgggctttgcagatatctggagtgttttaaagtcaattattttaagcagtttgaggggatgtgtaggagtggagcatgaaacagtttataaggctggggctgtattatcagcacagcaaattaaagaatgaaagaagtacttctttttacatttcagctccagcagccagctatttaaaaaatatttttaaatatcttccccaaagtttaagatgtgggaccatctacttgtaagaaacagtggcttatttcttcatttctcagtaatcattgtaaacctttttttttttcttctccactctaacaaaagtaaaagaacaaaacttttgctgaggtcttggactccactacttgttagttatgttggcctggacagatggcaggtctgtcggcagttcctcagtctgtaaaatgaagattatcattcttgcctctccctttgtcacagtgttgtcgtgaagatcagatatgtatgaatgcagtcaaataaactaaaaactaggaaagtgttaactatcgttgcccaccgaatttgaggtagcaaaaaaaaaaaagaatgttctggtacatgaacagactgagaaggcctttcgacatccctgaagctagtctcctgtctagactaaaaatatccttgaaagaatagtagcaaacagtatgcagtactcctgtgttctaagttcttttatgttttagtttaccctcacagcagccatagtgttaagtcattatgagcttcatcttaaagataagaaaactgaggcaaggggagattaacttactgccaaatttcaaacagttagtagtatttgagaccagtagtatggctctaatcttacccttagccctcccaaccattatgctgtactatctacccataaatacctccaggaaacattcccctcttggtaatttgtccttctatagaagcttcaaagattaaatcaaattaattttcaaaaaaaatttttttttagaaatgttattttccctgtgatagaggatgacttcccagtttcaccaaagtctgtttatatcaacacacacaaaatggaataattctgagtcactaggcaatcaatctactgtggttttactatgtaaggtgaaaattaactggaacgatgtttgtttgctatacttacatagtcaaactttacaagccatgaaattaattgcactctttgtatttgttgttaaatgcctaagaagttttctaaaaattttgtaaaggcactgtcagagaatctggagttgaatgattattccagatactgtataacctgcataactttttgtctttaagtcgtgtttgtaaaagaagtaattgctagaaacatttgataatgtacaaagtagtctataatgactgttcagtacatttttaatatttttttggttatatccaactttttgtaaatatactggaagcttgataataaaatgtatttcctatcaccatacttttccatgtgaaaacctgagcctatttctagtataagtatccaaagaaaagtttgacctggttgtgttattttaccagaccttggtaaaagaactattttggaaacagtatttgtaaatggaactaatgctatatttaaaaacactgatttttttttaacctgccaaaaataaaaaaaagctcattttataattttctactaaa

SEQ ID NO: 16615 - DNA, 2642 bp, Homo sapiens
  source 1..2642: mol_type = unassigned DNA
agctttaactggtagtagaaatggcaataaagaatatactcatgaagatgttgcacaaggataatggtgatgaagtttagggcagttttcatattgccacagttaatccgactattagcattttgtaaaaatactattagactgtaaaaccattctaaatatgccactatgttcatagaaattcaatttttgtagcctaaatgatatactaccttgtagcaaaatgtccccattttggcaggttttgtttttcattggaaacaaagagttacttaaagaaaatgagtcatttatttcagtctcaggtggctgagttgtcatttattcagtttggcttatcattaaataacagttattactatcattaacattattaacaaaatctttgtttagccattttggagactattccagaacccagctagttggtttttggtttctgttttttttttttttgagacagagtctcgccctgtcgccaggctgtagtgcagtggcacaatctccactcacttcaacctctgcctcccggttcaagcgattctcctgcctcagcctcccaagtagctgggactacaggcacctgccaccacgcccggctaatttttgtatttttagtagagacggggtttcaccatgttggccaggatggtctcgatctcttgaccttgtgatctgcccacctcagcttcccaaagtggtgggattataggcgtgagccactgcgcccggtgaacctagctagtttcttaatcatgaatacttcatagtttaaaaaagaaagtatttaactgtttgaggttcacatttcaaaacagtgtattttatgcatacatcccaaattttattgagccatgtttcagtgctgatttgacttgttacattttcttaattagtatctgtaaatcattttcctttaaataccttctagtagaagtacattttgctaacaacatgattaactggatttgatatttgagccatgtgaattcgagttatatatatagttgtattttgccttgttgtggatttgctagtccatcatgctgcctagggcaggaaaactcttcaacagcaagcccaaatgagaacctctcctgggctccaaatattccagtttgggagggtactttctattccgctcattgtttttaatttttttttttgtggccctccagaaaacattcatgacaagtaaataggatttaaaatattagcttaaaatagaatcttttatgtatcatcataacaggattaatttttcttcagccattgtttattttactaagatattttgaaaaattttagctcagttgtctttaaaaaggcttcatgttcctacagtatttatatgattttttaaaaatctacacaaacttacaaattttaaatattttttagtccatcaacaagcaataatattccgctaatgagggttgtacaatccatcaagcacacaaagaggaagagcagcacaatggtgaaggaagggtggatggtccattacaccagcagggataacctgagaaagaggcattattggagacttgacagcaaatgtctaacattatttcagaatgaatctggatcaaagtattataaggaaattccactttcagaaattctccgcatatcttcaccacgagatttcacaaacatttcacaaggcagcaatccacactgttttgaaatcattactgatactatggtatacttcgttggtgagaacaatggggacagctctcataatcctgttcttgctgccactggagttggacttgatgtagcacagagctgggaaaaagcaattcgccaagccctcatgcctgttactcctcaagcaagtgtttgcacttctccagggcaagggaaagatcacaaagatttgtctacaagtatctctgtatctaattgtcagattcaggagaatgtggatatcagtactgtttaccagatctttgcagatgaggtgcttggttcaggccagtttggcatcgtttatggaggaaaacatagaaagactgggagggatgtggctattaaagtaattgataagatgagattccccacaaaacaagaaagtcaactccgtaatgaagtggctattttacagaatttgcaccatcctgggattgtaaacctggaatgtatgtttgaaaccccagaacgagtctttgtagtaatggaaaagctgcatggagatatgttggaaatgattctatccagtgagaaaagtcggcttccagaacgaattactaaattcatggtcacacagatacttgttgctttgaggaatctgcattttaagaatattgtgcactgtgatttaaagccagaaaatgtgctgcttgcatcagcagagccatttcctcaggtgaagctgtgtgactttggatttgcacgcatcattggtgaaaagtcattcaggagatctgtggtaggaactccagcatacttagcccctgaagttctccggagcaaaggttacaaccgttccctagatatgtggtcagtgggagttatcatctatgtgagcctcagtggcacatttccttttaatgaggatgaagatataaatgaccaaatccaaaatgctgcatttatgtacccaccaaatccatggagagaaatttctggtgaag

SEQ ID NO: 16616 - DNA, 555 bp, Homo sapiens
  source 1..555: mol_type = unassigned DNA
ctacaagtatctctgtatctaattgtcagattcaggagaatgtggatatcagtactgtttaccagatctttgcagatgaggtgcttggttcaggccagtttggcatcgtttatggaggaaaacatagaaagactgggagggatgtggctattaaagtaattgataagatgagattccccacaaaacaagaaagtcaactccgtaatgaagtggctattttacagatacttgttgctttgaggaatctgcattttaagaatattgtgcactgtgatttaaagccagaaaatgtgctgcttgcatcagcagagccatttcctcaggtgaagctgtgtgactttggatttgcacgcatcattggtgaaaagtcattcaggagatctgtggtaggaactccagcatacttagcccctgaagttctccggagcaaaggttacaaccgttccctagatatgtggtcagtgggagttatcatctatgtgagcctcagtggcacatttccttttaatgaggatgaagatataaatgaccaaatccaaaatgctgcatttatgt

SEQ ID NO: 16617 - DNA, 518 bp, Homo sapiens
  source 1..518: mol_type = unassigned DNA
actgatactatggtatacttcgttggtgagaacaatggggacagctctcataatcctgttcttgctgccactggagttggacttgatgtagcacagagctgggaaaaagcaattcgccaagccctcatgcctgttactcctcaagcaagtgtttgcacttctccagggcaagggaaagatcacaaagatttgtctacaagtatctctgtatctaattgtcagattcaggagaatgtggatatcagtactgtttaccagatctttgcagatgaggtgcttggttcaggccagtttggcatcgtttatggagatttgtcagttttaagagtagttacatctctggaggacttcctgtcatcagaggaacaaagaactgtccgaggaaaacatagaaagactgggagggatgtggctattaaagtaattgataagatgagattccccacaaaacaagaaagtcaactccgtaatgaagtggctattttacagaatttgcaccatcctgggattgtaaacct

SEQ ID NO: 16618 - DNA, 4326 bp, Homo sapiens
  source 1..4326: mol_type = unassigned DNA
ggacatttgagaaggtgtcctatcaaattagtaaaccaaaggaaaagtactgaatagattaatccaaaacacttactgttttttaaacgaagaggatttcaccttgacagaaaaacaacttttattcaatatgtatttcctgaaattaaagagacaagtacagactgaaaggaaaatagattcgtaaataagctacgtcaactctatcctgctgaggatagctcagtgatgttaaatcctttacaaatccctggttgtcttcctacagacaagactgctttttgatgggactgatattaagagaaataggacctttggggcattcaactccttgataaaacttaaaagtatcggcatgagtggcttaacagaggaaataaagaagttttcaactaaatccaaaagtgcggtcattttctttactgctgttattttaaaaacctcttcataaccattgaaaaagaatcgacaactattttaaaagattaaagaaaggcagatgtctgcaaataattcccctccatcagcccagaagtctgtattacccacagctattcctgctgtgcttccagctgcttctccgtgttcaagtcctaagacgggactctctgcccgactctctaatggaagcttcagtgcaccatcactcaccaactccagaggctcagtgcatacagtttcatttctactgcaaattggcctcacacgggagagtgttaccattgaagcccaggaactgtctttatctgctgtcaaggatcttgtgtgctccatagtttatcaaaagtttccagagtgtggattctttggcatgtatgacaaaattcttctctttcgccatgacatgaactcagaaaacattttgcagctgattacctcagcagatgaaatacatgaaggagacctagtggaagtggttctttcagctttagccacagtagaagacttccagattcgtccacatactctctatgtacattcttacaaagctcctactttctgtgattactgtggtgagatgctctggggattggtacgtcaaggactgaaatgtgaaggctgtggattaaattaccataaacgatgtgccttcaagattccaaataactgtagtggagtaagaaagagacgtctgtcaaatgtatctttaccaggacccggcctctcagttccaagacccctacagcctgaatatgtagcccttcccagtgaagagtcacatgtccaccaggaaccaagtaagagaattccttcttggagtggtcgcccaatctggatggaaaagatggtaatgtgcagagtgaaagttccacacacatttgctgttcactcttacacccgtcccacgatatgtcagtactgcaagcggttactgaaaggcctctttcgccaaggaatgcagtgtaaagattgcaaattcaactgccataaacgctgtgcatcaaaagtaccaagagactgccttggagaggttactttcaatggagaaccttccagtctgggaacagatacagatataccaatggatattgacaataatgacataaatagtgatagtagtcggggtttggatgacacagaagagccatcacccccagaagataagatgttcttcttggatccatctgatctcgatgtggaaagagatgaagaagccgttaaaacaatcagtccatcaacaagcaataatattccgctaatgagggttgtacaatccatcaagcacacaaagaggaagagcagcacaatggtgaaggaagggtggatggtccattacaccagcagggataacctgagaaagaggcattattggagacttgacagcaaatgtctaacattatttcagaatgaatctggatcaaagtattataaggaaattccactttcagaaattctccgcatatcttcaccacgagatttcacaaacatttcacaaggcagcaatccacactgttttgaaatcattactgatactatggtatacttcgttggtgagaacaatggggacagctctcataatcctgttcttgctgccactggagttggacttgatgtagcacagagctgggaaaaagcaattcgccaagccctcatgcctgttactcctcaagcaagtgtttgcacttctccagggcaagggaaagatcacaaagatttgtctacaagtatctctgtatctaattgtcagattcaggagaatgtggatatcagtactgtttaccagatctttgcagatgaggtgcttggttcaggccagtttggcatcgtttatggaggtaagcaactacagccgtttgcatattgtacacattattttaaaaactggaaaatgtaaaacatctgccagctgttttgtcatctcatagttttgtccagtgccttttttttaaaggctgacttgttatctttcagctaaatccttctcactgtaatttgagtattcttcccttaatgtcattgcaaactttaaaaattaacagaatcagaaaattttacagtgtgttttatctcttcttgtagctcacacatacagatgtttgtcggaggcagggggggagatggtttgaagtttatgttgggctgagtgggcttattcattgaagtatattccctactagttttccaacacaaatggcaccatttgtctactgttggcatgattgttctattaagtctgaaaacctgaacctgaaatccaactttgcgatttaggatattgatgaagtcatttaaccttactgtgcgttagcatcttcaactgtttaatggaactaataaaacctgacctgtgtagctcatagggcttaaatattaattaaacttaatatatgtaaaggtactaagaaagaaatgttaaacccttgttatcccttgctaagacttggtacagtagtttcctagttggctgttctgcctccattcttaccttcttttcatacaactcttagagtcaatctttcagaaaattcacatctgatattagtattacctcacatagaacccttaagtggttcacagtcatctacagattcatagccagttttcttagcagaggatttcaaggctgctgtaatttatccctgcttctctagcctcagatctaattgcagcttcctctttgctttctatctttcagtcctgtttacatgcctccataccctttgcctctctgctccttctccatccctttgtctcttctagtgcacattttttcatacttcagggctcaactaaagggctttctctgtggaaatttcttgtccccgtacctatttctccatcaaataaaaacatggttcccctttggtactcctgctacccaacatacttctctcacaatatctattaccctttgggtttacattattgtcttcccactgaactttattggagcgttggctgtgagatgtctggatcttctttgtattcctagcacctagtattgtgacataaagcagtcgcctagaaaatgtgttgactctgcatgcatatataatatctatggtttgcaacttcagatttgtcagttttaagagtagttacatctctggaggacttcctgtcatcagaggaacaaagaactgtccgaggtacctttggcttcttaccaaaaatgcacacatttgttcagtcttttcaagtagacttacgattgtgccattgagacaaatgagttaatctaaaataaatagctatgtagagaagagcaagtcagatacatatttgaagaacaaataccaaaaatatacctgtcattttcactgcttaatctgtagcatctaaaggcatacctagtacataataggtataactagttaatttgaattaataaatgagggaatgactgttcattataataaacttctacctttttttaatatctagattctagaatatagagacaaatataaattttttatatctagattctagaatatagagacacccagagtttgtgggtacatggttaaatcactctgtgctgactcattgaatctagaataaaattgattcattcatacagtatttccatcttgacagagtctctgaaggactaggtcagggtaattaactatcattgatttaacaaggtagattacttttcagcaacaagttcattcaaattttctcctgtttagataatgcagctgactttattaggggcaaatattatgtatggaggggaaaacaattttttcctaaattaaaggtgagtgaaggagtgtggagaaagaacaaaaatgagccaaaaagaaaattcaagagtaaatacatataaatttcagtctgtggacaactccctaataaagctgtcagtttgcttca

SEQ ID NO: 16619 - DNA, 760 bp, Homo sapiens
  source 1..760: mol_type = unassigned DNA
tactctctatgtacattcttacaaagctcctactttctgtgattactgtggtgagatgctctggggattggtacgtcaaggactgaaatgtgaaggctgtggattaaattaccataaacgatgtgccttcaagattccaaataactgtagtggagtaagaaagagacgtctgtcaaatgtatctttaccaggacccggcctctcagttccaagacccctacagcctgaatatgtagcccttcccagtgaagagtcacatgtccaccaggaaccaagtaagagaattccttcttggagtggtcgcccaatctggatggaaaagatggtaatgtgcagagtgaaagttccacacacatttgctgttcactcttacacccgtcccacgatatgtcagtactgcaagcggttactgaaaggcctctttcgccaaggaatgcagtgtaaagattgcaaattcaactgccataaacgctgtgcatcaaaagtaccaagagactgccttggagaggttactttcaatggaggtaaaattatttttcttaatttttgtgaaagatcagaaaaggccatgattctttggtgtattatctttggataaggttctgttttcctgatttattttgtttcttaaagattttcttctgatttaataatcaaacaaaatacacagaccactgacagtatacatttattagtaatcacgccttcccgtctttcctctggccacctgttactttgtagtctaatatagccagtggta

SEQ ID NO: 16620 - DNA, 695 bp, Homo sapiens
  source 1..695: mol_type = unassigned DNA
ggagggagggaggaaggggcgccggaggcgggcgggatcctgcgaggcgcgtgaagcctcgctggcgcctcgtccggtactcagacgctggcgggcgcagtttctcacgacgggccgagcctgccacttttccagagtgtggattctttggcatgtatgacaaaattcttctctttcgccatgacatgaactcagaaaacattttgcagctgattacctcagcagatgaaatacatgaaggagacctagtggaagtggttctttcagctttagccacagtagaagacttccagattcgtccacatactctctatgtacattcttacaaagctcctactttctgtgattactgtggtgagatgctctggggattggtacgtcaaggactgaaatgtgaaggctgtggattaaattaccataaacgatgtgccttcaagattccaaataactgtagtggagtaagaaagagacgtctgtcaaatgtatctttaccaggacccggcctctcagttccaagacccctacagcctgaatatgtagcccttcccagtgaagagtcacatgtccaccaggaaccaagtaagagaattccttcttggagtggtcgcccaatctggatggaaaagatggtaatgtgcagagtgaaagttccacacacatttgctgttcactcttacacccgtcccacgatatgt

SEQ ID NO: 16621 - DNA, 436 bp, Homo sapiens
  source 1..436: mol_type = unassigned DNA
gtgcaccatcactcaccaactccagaggctcagtgcatacagtttcatttctactgcaaattggcctcacacgggagagtgttaccattgaagcccaggaactgtctttatctgctgtcaaggatcttgtgtgctccatagtttatcaaaagtttccagagtgtggattctttggcatgtatgacaaaattcttctctttcgccatgacatgaactcagaaaacattttgcagctgattacctcagcagatgaaatacatgaaggagacctagtggaagtggttctttcaggtaagtaagtggctttttagagtgattgccttttcccctcaaagagcctaattttctgtactaaatgctgcaattcgattatatttagtctttgtattattgttacttaatttctttcatctctaataatggtcaccatatgatt

SEQ ID NO: 16622 - DNA, 539 bp, Homo sapiens
  source 1..539: mol_type = unassigned DNA
aacttgggttcgcgctccgctggagaccaccgcgcccggcccatcggaggcgatccgttcccgggtctcccaaactagttcccgaagccagacccgcggcgctcgcagtgccgaattttggaccagctttttcgtttcatttcctcactttgcgttgtagtcgtctcaaaggggctaactatatgtcagaaagcatcagcttttctcgatggacccattcatctaatgaaatatgcctgtactattttaaaaagctttgtatttcgtcatagaaaagttcatccccccagaatgaaaatgaggacatttgagaaggtgatttaaggtgtggacatttgagaaggtgtcctatcaaattagtaaaccaaaggaaaagtactgaatagattaatccaaaacacttactgttttttaaacgaagaggatttcaccttgacagaaaaacaacttttattcaatatgtatttcctgaaattaaagagacaagtacagactgaaaggaaaatagattcgtaaataagctacgtcaactctatcct

SEQ ID NO: 16623 - DNA, 5900 bp, Homo sapiens
  source 1..5900: mol_type = unassigned DNA
aaagttcatccccccagaatgaaaatgaggacatttgagaaggtgatttaaggtgtggacatttgagaaggtgtcctatcaaattagtaaaccaaaggaaaagtactgaatagattaatccaaaacacttactgttttttaaacgaagaggatttcaccttgacagaaaaacaacttttattcaatatgtatttcctgaaattaaagagacaagtacagactgaaaggaaaatagattcgtaaataagctacgtcaactctatcctgctgaggatagctcagtgatgttaaatcctttacaaatccctggttgtcttcctacagacaagactgctttttgatgggactgatattaagagaaataggacctttggggcattcaactccttgataaaacttaaaagtatcggcatgagtggcttaacagaggaaataaagaagttttcaactaaatccaaaagtgcggtcattttctttactgctgttattttaaaaacctcttcataaccattgaaaaagaatcgacaactattttaaaagattaaagaaaggcagatgtctgcaaataattcccctccatcagcccagaagtctgtattacccacagctattcctgctgtgcttccagctgcttctccgtgttcaagtcctaagacgggactctctgcccgactctctaatggaagcttcagtgcaccatcactcaccaactccagaggctcagtgcatacagtttcatttctactgcaaattggcctcacacgggagagtgttaccattgaagcccaggaactgtctttatctgctgtcaaggatcttgtgtgctccatagtttatcaaaagtttccagagtgtggattctttggcatgtatgacaaaattcttctctttcgccatgacatgaactcagaaaacattttgcagctgattacctcagcagatgaaatacatgaaggagacctagtggaagtggttctttcagctttagccacagtagaagacttccagattcgtccacatactctctatgtacattcttacaaagctcctactttctgtgattactgtggtgagatgctctggggattggtacgtcaaggactgaaatgtgaaggctgtggattaaattaccataaacgatgtgccttcaagattccaaataactgtagtggagtaagaaagagacgtctgtcaaatgtatctttaccaggacccggcctctcagttccaagacccctacagcctgaatatgtagcccttcccagtgaagagtcacatgtccaccaggaaccaagtaagagaattccttcttggagtggtcgcccaatctggatggaaaagatggtaatgtgcagagtgaaagttccacacacatttgctgttcactcttacacccgtcccacgatatgtcagtactgcaagcggttactgaaaggcctctttcgccaaggaatgcagtgtaaagattgcaaattcaactgccataaacgctgtgcatcaaaagtaccaagagactgccttggagaggttactttcaatggagaaccttccagtctgggaacagatacagatataccaatggatattgacaataatgacataaatagtgatagtagtcggggtttggatgacacagaagagccatcacccccagaagataagatgttcttcttggatccatctgatctcgatgtggaaagagatgaagaagccgttaaaacaatcagtccatcaacaagcaataatattccgctaatgagggttgtacaatccatcaagcacacaaagaggaagagcagcacaatggtgaaggaagggtggatggtccattacaccagcagggataacctgagaaagaggcattattggagacttgacagcaaatgtctaacattatttcagaatgaatctggatcaaagtattataaggaaattccactttcagaaattctccgcatatcttcaccacgagatttcacaaacatttcacaaggcagcaatccacactgttttgaaatcattactgatactatggtatacttcgttggtgagaacaatggggacagctctcataatcctgttcttgctgccactggagttggacttgatgtagcacagagctgggaaaaagcaattcgccaagccctcatgcctgttactcctcaagcaagtgtttgcacttctccagggcaagggaaagatcacaaagatttgtctacaagtatctctgtatctaattgtcagattcaggagaatgtggatatcagtactgtttaccagatctttgcagatgaggtgcttggttcaggccagtttggcatcgtttatggaggaaaacatagaaagactgggagggatgtggctattaaagtaattgataagatgagattccccacaaaacaagaaagtcaactccgtaatgaagtggctattttacagaatttgcaccatcctgggattgtaaacctggaatgtatgtttgaaaccccagaacgagtctttgtagtaatggaaaagctgcatggagatatgttggaaatgattctatccagtgagaaaagtcggcttccagaacgaattactaaattcatggtcacacagatacttgttgctttgaggaatctgcattttaagaatattgtgcactgtgatttaaagccagaaaatgtgctgcttgcatcagcagagccatttcctcaggtgaagctgtgtgactttggatttgcacgcatcattggtgaaaagtcattcaggagatctgtggtaggaactccagcatacttagcccctgaagttctccggagcaaaggttacaaccgttccctagatatgtggtcagtgggagttatcatctatgtgagcctcagtggcacatttccttttaatgaggatgaagatataaatgaccaaatccaaaatgctgcatttatgtacccaccaaatccatggagagaaatttctggtgaagcaattgatctgataaacaatctgcttcaagtgaagatgagaaaacgttacagtgttgacaaatctcttagtcatccctggctacaggactatcagacttggcttgaccttagagaatttgaaactcgcattggagaacgttacattacacatgaaagtgatgatgctcgctgggaaatacatgcatacacacataaccttgtatacccaaagcacttcattatggctcctaatccagatgatatggaagaagatccttaatcactgagctaacctaaataaggaaggatttcattttatggactgatattttgctgtgtaacttgttctttgtagattgtcatctgcagtgctgcaaagatatgaagaaatatgataacgaataagtgacaccagtactgtagttcataatgagtaggtacaggcgggaaactgaataataagaagtcataatggaatcaaggtgaagctttttataaacttttttagcctaagcaataactggttttgtattttttcttaatccttcactttaatacaataggctcacttaatttgtcttcccatttctctttatatatatatatataaatataaatatatgtttgtttgtttttttaatgaaaaacaagtcaagctagcatccagttactatatagcttggctaaattatacaagacttacaagattgattactcgacaggcttgtatttaagaggtaactgtgaggttaccattatgtgatgttactataaggacttttaacattggtttaacaaaccatagaggcattgaagggtttttcttagatgcctagaaaaagcgcactgggctgttttacctttcttttttaggtcaatcaagactccaaaatagtgattcctaacctttttggagttgctctgctactctgaatatgttctatacagcataaggattgtcaccttctgtgtgttgcaacagcttctaagataattagggacaaatgatgttacaaaaggaagagtactgctggtctaagtgctgagttgtatgtctttgcatagctccactctgctgctaaatatgcatgttctgactgacaccatcttgatgccagtactggattccagcattcagcaggtgcagatctcggctttacacaatttatctttacctagggttcagtcagtaatttctgctttttagcagggccagtgcagggtcagttaatgctacagttactgtatagcaaacagtatccttttttctccttcccctagcctattgggctttgcagatatctggagtgttttaaagtcaattattttaagcagtttgaggggatgtgtaggagtggagcatgaaacagtttataaggctggggctgtattatcagcacagcaaattaaagaatgaaagaagtacttctttttacatttcagctccagcagccagctatttaaaaaatatttttaaatatcttccccaaagtttaagatgtgggaccatctacttgtaagaaacagtggcttatttcttcatttctcagtaatcattgtaaacctttttttttttcttctccactctaacaaaagtaaaagaacaaaacttttgctgaggtcttggactccactacttgttagttatgttggcctggacagatggcaggtctgtcggcagttcctcagtctgtaaaatgaagattatcattcttgcctctccctttgtcacagtgttgtcgtgaagatcagatatgtatgaatgcagtcaaataaactaaaaactaggaaagtgttaactatcgttgcccaccgaatttgaggtagcaaaaaaaaaaaagaatgttctggtacatgaacagactgagaaggcctttcgacatccctgaagctagtctcctgtctagactaaaaatatccttgaaagaatagtagcaaacagtatgcagtactcctgtgttctaagttcttttatgttttagtttaccctcacagcagccatagtgttaagtcattatgagcttcatcttaaagataagaaaactgaggcaaggggagattaacttactgccaaatttcaaacagttagtagtatttgagaccagtagtatggctctaatcttacccttagccctcccaaccattatgctgtactatctacccataaatacctccaggaaacattcccctcttggtaatttgtccttctatagaagcttcaaagattaaatcaaattaattttcaaaaaaaatttttttttagaaatgttattttccctgtgatagaggatgacttcccagtttcaccaaagtctgtttatatcaacacacacaaaatggaataattctgagtcactaggcaatcaatctactgtggttttactatgtaaggtgaaaattaactggaacgatgtttgtttgctatacttacatagtcaaactttacaagccatgaaattaattgcactctttgtatttgttgttaaatgcctaagaagttttctaaaaattttgtaaaggcactgtcagagaatctggagttgaatgattattccagatactgtataacctgcataactttttgtctttaagtcgtgtttgtaaaagaagtaattgctagaaacatttgataatgtacaaagtagtctataatgactgttcagtacatttttaatatttttttggttatatccaactttttgtaaatatactggaagcttgataataaaatgtatttcctatcaccatacttttccatgtgaaaacctgagcctatttctagtataagtatccaaagaaaagtttgacctggttgtgttattttaccagaccttggtaaaagaactattttggaaacagtatttgtaaatggaactaatgctatatttaaaaacactgatttttttttaacctgccaaaaataaaaaaaagctcattttataattttctact

SEQ ID NO: 16624 - DNA, 6487 bp, Homo sapiens
  source 1..6487: mol_type = unassigned DNA
gcggaggggctcagtgaaaaaatgagcgagctagaggaagactttgccaagattctcatgctcaaggaggagaggatcaaagagctggagaagcggctgtcagagaaggaggaagaaattcaggagctgaagaggaaactccacaaatgccagtcggtgctcccagtgccctcgacccacatcggcccccggaccacccgggcgcagggcatctcggccgagccgcagacgtacaggtccttccacgacctccgacaggcattccggaagttcaccaagtccgaaaggtccaaggatcttataaaggaagctatccttgacaatgactttatgaagaacttggagctgtcgcagatccaggagattgtggattgtatgtacccggtggagtatggcaaggacagttgcatcatcaaagaaggagacgtggggtcactggtgtatgtcatggaagatggtaaggttgaagttacaaaagaaggtgtgaagttgtgtaccatgggtccaggaaaagtgtttggggaattggctattctttacaactgtacccggacagcgaccgtcaagactcttgtaaatgtaaaactctgggccattgatcgacaatgttttcaaacaataatgatgaggacaggactcatcaagcataccgagtatatggaatttttaaaaagcgttccaacattccagagccttcctgaagagatcctcagcaagcttgctgatgtccttgaagagacccactatgaaaatggagaatatattatcaggcaaggtgcaagaggggacaccttctttatcatcagcaaaggaacggtaaatgtcactcgtgaagactcaccgagtgaagacccagtctttcttagaactttaggaaaaggagactggtttggagagaaagccttgcagggggaagatgtgagaacagcaaacgtaattgctgcagaagctgtaacctgccttgtgattgacagagactcttttaaacatttgattggagggctggatgatgtttctaataaagcatatgaagatgcagaagctaaagcaaaatatgaagctgaagcggctttcttcgccaacctgaagctgtctgatttcaacatcattgatacccttggagttggaggtttcggacgagtagaactggtccagttgaaaagtgaagaatccaaaacgtttgcaatgaagattctcaagaaacgtcacattgtggacacaagacagcaggagcacatccgctcagagaagcagatcatgcagggggctcattccgatttcatagtgagactgtacagaacatttaaggacagcaaatatttgtatatgttgatggaagcttgtctaggtggagagctctggaccattctcagggatagaggttcgtttgaagattctacaaccagattttacacagcatgtgtggtagaagcttttgcctatctgcattccaaaggaatcatttacagggacctcaagccagaaaatctcatcctagatcaccgaggttatgccaaactggttgattttggctttgcaaagaaaataggatttggaaagaaaacatggactttttgtgggactccagagtatgtagccccagagatcatcctgaacaaaggccatgacatttcagccgactactggtcactgggaatcctaatgtatgaactcctgactggcagcccacctttctcaggcccagatcctatgaaaacctataacatcatattgagggggattgacatgatagaatttccaaagaagattgccaaaaatgctgctaatttaattaaaaaactatgcagggacaatccatcagaaagattagggaatttgaaaaatggagtaaaagacattcaaaagcacaaatggtttgagggctttaactgggaaggcttaagaaaaggtaccttgacacctcctataataccaagtgttgcatcacccacagacacaagtaattttgacagtttccctgaggacaacgatgaaccaccacctgatgacaactcaggatgggatatagacttctaatgtatttctcttacctgcttctgccttgctgaagacagctttttctgagacacagctgccagcaaacctgagggaaagagagaagattagtgctcggggtcaccatgatgcctttgatcgatgctgctccagtaactacagtggcattaggacttaccgcttagatgacaatagtgctctttacatgttttctgtttgaacctaaaatagcagttgacatggtggtcctgaagcaaagcctttcaccagtaaaagatgttttctattgttgcaatgaccttgctttgctctgattataatttgaaagactgtaggaaacacttcaatgtagtataagagtctgtaccttgctggaatattcaagaagatgaaagaataatatattgggtacaatagattactatggtacagaaactgggctattccctttcttcaagtgaaggctgtgggatctattactgcaggccggtgtatataccatacaaaagaggaccacacatctgttggtcacagagttcatgtcacaccagtgctagaagtttcatgattttatttcccagcagtgctgatgacaagactgaatgttaccttttctttctgacagattttaaaaattgatatgataaaagcacaactgctatagattctgctgagacctctcatagtaggtatatatgagttttcacagaagactgaaaaataatgcatgatatttgtttgttttttttgataaattggcatgacagagtggggaaaaaaagcaattcacaaaaccatttcatattttttaaaatattgtgcttaaagatggtcctggaagtaaatgactagcagccaattggttttacttaacataccctcaaactgaggcttaaagtattcccttttataaaaataaatgcttggggtagggtggagtggggagggattaaaacccatccaaaaaataaataaaaactatataggtgctatgtatatctttcatctgtaaatgtcagtgtctgaacagacaacacaaattcaaatcattatacgtgtagccagaaactcaagcattttcactaaagttattaaaccaaactcctgtccaatttcacttatacaacatagtcagtctagagttgagagacaaaggtaattataaacctatttgaactagcttcttgtcttaggcctgaaccaaaaaacaacaaacaaacaaaaaacaagaatgaaaaacagaaataaaagaagtagaaaagacaaagaaagaaagcccaaagtcaaagttgttaatatttacaggtttaccagatctggaacattacttatttgaggtcagagaacaaaacaagaacctggccaggtgttgattaccttttagtgaataagctgagtccatatacttgtctaactaagaaagcagtacagaggaaaacaggaacctgatttttttaaaataaattttaaataaaatagaattactacaattctgcaatttcatactacctaaaaaagactagatttgaaaatgtcaagctgatttactttattcacatggagaaaagaatccacaaattaaactgagtccttcactggcatgccagttgactattattagctgtcataagtaactcagccatttggaagcatttcctggacaaaattacattatacctgtgaagaaaaatatagaagctttcaagctgtcattctgttttggccctgtgtgaatttggtatattaaattgacgcttgctttttttttcagtagagttttctttttaatcaatcaaacgcctacatttctggaagaaaaagtccaattagatcattacaccttaactaagaaggcaaatcttataaattttgcttgaattgttcttactcaaaactaccttagaatatggtatcttatgaaaatataatattcttaaaattttggaggataaaatgaaaagggtataaacttcaattagaactttaatcctaaaatattgttattcttgtatttttggagttttccgtcccttacaatttctccaaattggtctattccccaagatatccactgttttctacagattttagaatataaaattaaacatatcaacctaaaatctagctatgaatgttatttcaagagttttatatttttaattggctttttaaaaatatgtaattccaatattatagtgaatgttcagtaacttttgttgaaagataatgtggtttaggcttgctaaagaaaggcttgctagaatactaaatttaccttgttatttggaaagagaatctgctcctataacgttttaaaaatccccaaagtcccagagattagcacttgctatggattttggaactatggttcaagtctaagacaaccaatatgaataagttcaatggagaaggaagaagtagcattcagcacaagaaactgtagattgtttctcccacttgttactgcatctttgttcatttcacccatagcattgcatttgatgtctgaagtaattaccacaaaataaaggtaaactacatcttccaagatgtaccaacagaaaacattcgtctaattttgtcaacattgaatttttaggatttaaatcttgtcttaatgaagactctagggctaaaattcatggtcagttccataaaatgcatctcactttatttctgaatttttcacaacccctctattttcttacattaaagaacatctggataagttagaatagtgccaacttgtttgatttgttatatgattttcttgttaatgtgttgagtatgggaaataagggctttctgtgtgtcttgactcacaggaaaactgaaactgccaagggaagcaacattaaaacaactgggatagattgaatacatttgaaaaaataatttctggaaaaacgctatacatgctttttatgtttatatcttctttcttattaagacatgaatcagatccatgtggcattcaaaacaaatttattttggttatattctttacaagtcataatttttacctaaaattgtggaatatgcatgtgaattacacatgtgtagtaataaactcaactattgaatttttcctgtttcatttctaaatgactgaactgatggtaaacaaatttaatgaagtcagctaccatgttgaaaataaggatattagaactgatttcatacaatagaggtgatctgtgcattatccataacaacgttttctttcactataggaccacagacaaatatttatgtaaataggtatttttgtgtgatattttgtggtacatataactttttttagtgtttcacagcattattatttcattttatttgtattgaataatgtttttaggtccaagtagacttgaattaatgtcataattgtcagtattattgaaaattatgtcaactgtactgttattcatctgtcccatagtttagaacatgacctggctatctggcattgttgcaagtgccttaaattcatggcatcctattaaaaaaacaaatttggtgttatgctgcatgacaaagacaaacacacctcaaaatgttgtcctttcttagcttgctgcgttttacagttctttctgctaacaatttataagcctttattatataatattgatgaattacagaaatgatgaagttgttctcttatttctgttaaatgtaccagagctgtgtatctgttaatgagatacagcgtcatttctgtgaaatgtataaatgtatgtgcaggtcaaattaatatatgacattctatcagtctgtatacaggtattcctgttttgctaagctgtgcagattctgtaaaaataaattagtgcagtcaagttctaacatatctcattttatagactccattgacaatggtccaaccgaaaagaaaaattggaaatgactgctaaccagacctcgttatgaaaccaatgatgaaaaagtcacttggtgcacctctcaacaaaacaggatgctttttccgagttcttgtatatgcaaatcatttacgaggcaagttttcaacagacctagaaagcaaaacattgaaagtgtgttgttagccctcctctctgcccctgaatcaacagacagagctctgggaccttggcaatgactcagaggttggggctttctgagtaaagggacatttctttaagcatcatctatcaaatttatttcaatgtatgatgtttttacaactggtcagttcttttgtattcttacagctatggttatttgattgtcctcttacaatttgttctacatgaaagagttctttgttagtcagaatgcaacaaactgtcatcaaatggtcattgaccacttgcactcttttgatgtagattaaaaactttttcataaatttacctgctttgatttgctctgtatttttcctgcagctgtaattgctgagtgcctgttgtatactttatagagttgaaataaaaaaataattacttttgaa

SEQ ID NO: 16625 - DNA, 6928 bp, Homo sapiens
  source 1..6928: mol_type = unassigned DNA
gccccgcaagcttccttgggcgcccggcgcgagggactctgagagcccagccgctgcctcggagcccccattcacgtcccctcctcccgctcccccgccaccgcgcctccgactcttctcccccgcgccgcggcgcccaccgcgtctcaggtttaatcccgggttggacctgctggtttgctctccccgctctgagcctcacagccagcccagagaagtggaatctgcactgaaactctgggtggctggagccggcggactgggcatgctcagaagccagggctggctttggtctcaagtaggaagctttggcactcgggaggcagcggcgactttggggaaagttgatcggagaggggaggaagcctcaagacgcggagcagcggcaggaaggagcccccggcagcccggaggagcatgggcaccttgcgggatttacagtacgcgctccaggagaagatcgaggagctgaggcagcgggatgctctcatcgacgagctggagctggagttggatcagaaggacgaactgatccagaagctgcagaacgagctggacaagtaccgctcggtgatccgaccagccacccagcaggcgcagaagcagagcgcgagcaccttgcagggcgagccgcgcaccaagcggcaggcgatctccgccgagcccaccgccttcgacatccaggatctcagccatgtgaccctgcccttctaccccaagagcccacagtccaaggatcttataaaggaagctatccttgacaatgactttatgaagaacttggagctgtcgcagatccaggagattgtggattgtatgtacccggtggagtatggcaaggacagttgcatcatcaaagaaggagacgtggggtcactggtgtatgtcatggaagatggtaaggttgaagttacaaaagaaggtgtgaagttgtgtaccatgggtccaggaaaagtgtttggggaattggctattctttacaactgtacccggacagcgaccgtcaagactcttgtaaatgtaaaactctgggccattgatcgacaatgttttcaaacaataatgatgaggacaggactcatcaagcataccgagtatatggaatttttaaaaagcgttccaacattccagagccttcctgaagagatcctcagcaagcttgctgatgtccttgaagagacccactatgaaaatggagaatatattatcaggcaaggtgcaagaggggacaccttctttatcatcagcaaaggaacggtaaatgtcactcgtgaagactcaccgagtgaagacccagtctttcttagaactttaggaaaaggagactggtttggagagaaagccttgcagggggaagatgtgagaacagcaaacgtaattgctgcagaagctgtaacctgccttgtgattgacagagactcttttaaacatttgattggagggctggatgatgtttctaataaagcatatgaagatgcagaagctaaagcaaaatatgaagctgaagcggctttcttcgccaacctgaagctgtctgatttcaacatcattgatacccttggagttggaggtttcggacgagtagaactggtccagttgaaaagtgaagaatccaaaacgtttgcaatgaagattctcaagaaacgtcacattgtggacacaagacagcaggagcacatccgctcagagaagcagatcatgcagggggctcattccgatttcatagtgagactgtacagaacatttaaggacagcaaatatttgtatatgttgatggaagcttgtctaggtggagagctctggaccattctcagggatagaggttcgtttgaagattctacaaccagattttacacagcatgtgtggtagaagcttttgcctatctgcattccaaaggaatcatttacagggacctcaagccagaaaatctcatcctagatcaccgaggttatgccaaactggttgattttggctttgcaaagaaaataggatttggaaagaaaacatggactttttgtgggactccagagtatgtagccccagagatcatcctgaacaaaggccatgacatttcagccgactactggtcactgggaatcctaatgtatgaactcctgactggcagcccacctttctcaggcccagatcctatgaaaacctataacatcatattgagggggattgacatgatagaatttccaaagaagattgccaaaaatgctgctaatttaattaaaaaactatgcagggacaatccatcagaaagattagggaatttgaaaaatggagtaaaagacattcaaaagcacaaatggtttgagggctttaactgggaaggcttaagaaaaggtaccttgacacctcctataataccaagtgttgcatcacccacagacacaagtaattttgacagtttccctgaggacaacgatgaaccaccacctgatgacaactcaggatgggatatagacttctaatgtatttctcttacctgcttctgccttgctgaagacagctttttctgagacacagctgccagcaaacctgagggaaagagagaagattagtgctcggggtcaccatgatgcctttgatcgatgctgctccagtaactacagtggcattaggacttaccgcttagatgacaatagtgctctttacatgttttctgtttgaacctaaaatagcagttgacatggtggtcctgaagcaaagcctttcaccagtaaaagatgttttctattgttgcaatgaccttgctttgctctgattataatttgaaagactgtaggaaacacttcaatgtagtataagagtctgtaccttgctggaatattcaagaagatgaaagaataatatattgggtacaatagattactatggtacagaaactgggctattccctttcttcaagtgaaggctgtgggatctattactgcaggccggtgtatataccatacaaaagaggaccacacatctgttggtcacagagttcatgtcacaccagtgctagaagtttcatgattttatttcccagcagtgctgatgacaagactgaatgttaccttttctttctgacagattttaaaaattgatatgataaaagcacaactgctatagattctgctgagacctctcatagtaggtatatatgagttttcacagaagactgaaaaataatgcatgatatttgtttgttttttttgataaattggcatgacagagtggggaaaaaaagcaattcacaaaaccatttcatattttttaaaatattgtgcttaaagatggtcctggaagtaaatgactagcagccaattggttttacttaacataccctcaaactgaggcttaaagtattcccttttataaaaataaatgcttggggtagggtggagtggggagggattaaaacccatccaaaaaataaataaaaactatataggtgctatgtatatctttcatctgtaaatgtcagtgtctgaacagacaacacaaattcaaatcattatacgtgtagccagaaactcaagcattttcactaaagttattaaaccaaactcctgtccaatttcacttatacaacatagtcagtctagagttgagagacaaaggtaattataaacctatttgaactagcttcttgtcttaggcctgaaccaaaaaacaacaaacaaacaaaaaacaagaatgaaaaacagaaataaaagaagtagaaaagacaaagaaagaaagcccaaagtcaaagttgttaatatttacaggtttaccagatctggaacattacttatttgaggtcagagaacaaaacaagaacctggccaggtgttgattaccttttagtgaataagctgagtccatatacttgtctaactaagaaagcagtacagaggaaaacaggaacctgatttttttaaaataaattttaaataaaatagaattactacaattctgcaatttcatactacctaaaaaagactagatttgaaaatgtcaagctgatttactttattcacatggagaaaagaatccacaaattaaactgagtccttcactggcatgccagttgactattattagctgtcataagtaactcagccatttggaagcatttcctggacaaaattacattatacctgtgaagaaaaatatagaagctttcaagctgtcattctgttttggccctgtgtgaatttggtatattaaattgacgcttgctttttttttcagtagagttttctttttaatcaatcaaacgcctacatttctggaagaaaaagtccaattagatcattacaccttaactaagaaggcaaatcttataaattttgcttgaattgttcttactcaaaactaccttagaatatggtatcttatgaaaatataatattcttaaaattttggaggataaaatgaaaagggtataaacttcaattagaactttaatcctaaaatattgttattcttgtatttttggagttttccgtcccttacaatttctccaaattggtctattccccaagatatccactgttttctacagattttagaatataaaattaaacatatcaacctaaaatctagctatgaatgttatttcaagagttttatatttttaattggctttttaaaaatatgtaattccaatattatagtgaatgttcagtaacttttgttgaaagataatgtggtttaggcttgctaaagaaaggcttgctagaatactaaatttaccttgttatttggaaagagaatctgctcctataacgttttaaaaatccccaaagtcccagagattagcacttgctatggattttggaactatggttcaagtctaagacaaccaatatgaataagttcaatggagaaggaagaagtagcattcagcacaagaaactgtagattgtttctcccacttgttactgcatctttgttcatttcacccatagcattgcatttgatgtctgaagtaattaccacaaaataaaggtaaactacatcttccaagatgtaccaacagaaaacattcgtctaattttgtcaacattgaatttttaggatttaaatcttgtcttaatgaagactctagggctaaaattcatggtcagttccataaaatgcatctcactttatttctgaatttttcacaacccctctattttcttacattaaagaacatctggataagttagaatagtgccaacttgtttgatttgttatatgattttcttgttaatgtgttgagtatgggaaataagggctttctgtgtgtcttgactcacaggaaaactgaaactgccaagggaagcaacattaaaacaactgggatagattgaatacatttgaaaaaataatttctggaaaaacgctatacatgctttttatgtttatatcttctttcttattaagacatgaatcagatccatgtggcattcaaaacaaatttattttggttatattctttacaagtcataatttttacctaaaattgtggaatatgcatgtgaattacacatgtgtagtaataaactcaactattgaatttttcctgtttcatttctaaatgactgaactgatggtaaacaaatttaatgaagtcagctaccatgttgaaaataaggatattagaactgatttcatacaatagaggtgatctgtgcattatccataacaacgttttctttcactataggaccacagacaaatatttatgtaaataggtatttttgtgtgatattttgtggtacatataactttttttagtgtttcacagcattattatttcattttatttgtattgaataatgtttttaggtccaagtagacttgaattaatgtcataattgtcagtattattgaaaattatgtcaactgtactgttattcatctgtcccatagtttagaacatgacctggctatctggcattgttgcaagtgccttaaattcatggcatcctattaaaaaaacaaatttggtgttatgctgcatgacaaagacaaacacacctcaaaatgttgtcctttcttagcttgctgcgttttacagttctttctgctaacaatttataagcctttattatataatattgatgaattacagaaatgatgaagttgttctcttatttctgttaaatgtaccagagctgtgtatctgttaatgagatacagcgtcatttctgtgaaatgtataaatgtatgtgcaggtcaaattaatatatgacattctatcagtctgtatacaggtattcctgttttgctaagctgtgcagattctgtaaaaataaattagtgcagtcaagttctaacatatctcattttatagactccattgacaatggtccaaccgaaaagaaaaattggaaatgactgctaaccagacctcgttatgaaaccaatgatgaaaaagtcacttggtgcacctctcaacaaaacaggatgctttttccgagttcttgtatatgcaaatcatttacgaggcaagttttcaacagacctagaaagcaaaacattgaaagtgtgttgttagccctcctctctgcccctgaatcaacagacagagctctgggaccttggcaatgactcagaggttggggctttctgagtaaagggacatttctttaagcatcatctatcaaatttatttcaatgtatgatgtttttacaactggtcagttcttttgtattcttacagctatggttatttgattgtcctcttacaatttgttctacatgaaagagttctttgttagtcagaatgcaacaaactgtcatcaaatggtcattgaccacttgcactcttttgatgtagattaaaaactttttcataaatttacctgctttgatttgctctgtatttttcctgcagctgtaattgctgagtgcctgttgtatactttatagagttgaaataaaaaaataattacttttgaa

SEQ ID NO: 16626 - DNA, 585 bp, Homo sapiens
  source 1..585: mol_type = unassigned DNA
agttgcatcatcaaagaaggagacgtggggtcactggtgtatgtcatggaagatggtaaggttgaagttacaaaagaaggtgtgaagttgtgtaccatgggtccaggaaaagtgtttggggaattggctattctttacaactgtacccggacagcgaccgtcaagactcttgtaaatgtaaaactctgggccattgatcgacaatgttttcaaacaataatgatgaggacaggactcatcaagcataccgagtatatggaatttttaaaaagcgttccaacattccagagccttcctgaagagatcctcagcaagcttgctgatgtccttgaagagacccactatgaaaatggagaatatattatcaggcaaggtgcaagaggggacaccttctttatcatcagcaaaggaacggtaaatgtcactcgtgaagactcaccgagtgaagacccagtctttcttagaactttaggaaaaggagactggtttggagagaaagccttgcagggctggacttggaatctgtttgaatacgttgtggaataaattccttaatttctaataaatcagtgttatattaattgg

SEQ ID NO: 16627 - DNA, 1786 bp, Homo sapiens
  source 1..1786: mol_type = unassigned DNA
ttcataggaggcacacataaataatgttggtttaattaattaaattaacaaaaggctgcactctcctaaccagattgtgtatctcctctgcacctgaagttcagacttggtaaagcaggattttacacattaatttgagaagatctggagacccactatgaaaatggagaatatattatcaggcaaggtgcaagaggggacaccttctttatcatcagcaaaggaacggtaaatgtcactcgtgaagactcaccgagtgaagacccagtctttcttagaactttaggaaaaggagactggtttggagagaaagccttgcaggggcatttgggaaatactgatggagaagcaaaacatgtttcttcatggatcttacattctgagggaagatgtgagaacagcaaacgtaattgctgcagaagctgtaacctgccttgtgattgacagagactcttttaaacatttgattggagggctggatgatgtttctaataaagcatatgaagatgcagaagctaaagcaaaatatgaagctgaagcggctttcttcgccaacctgaagctgtctgatttcaacatcattgatacccttggagttggaggtttcggacgagtagaactggtccagttgaaaagtgaagaatccaaaacgtttgcaatgaagattctcaagaaacgtcacattgtggacacaagacagcaggagcacatccgctcagagaagcagatcatgcagggggctcattccgatttcatagtgagactgtacagaacatttaaggacagcaaatatttgtatatgttgatggaagcttgtctaggtggagagctctggaccattctcagggatagaggttcgtttgaagattctacaaccagattttacacagcatgtgtggtagaagcttttgcctatctgcattccaaaggaatcatttacagggacctcaagccagaaaatctcatcctagatcaccgaggttatgccaaactggttgattttggctttgcaaagaaaataggatttggaaagaaaacatggactttttgtgggactccagagtatgtagccccagagatcatcctgaacaaaggccatgacatttcagccgactactggtcactgggaatcctaatgtatgaactcctgactggcagcccacctttctcaggcccagatcctatgaaaacctataacatcatattgagggggattgacatgatagaatttccaaagaagattgccaaaaatgctgctaatttaattaaaaaactatgcagggacaatccatcagaaagattagggaatttgaaaaatggagtaaaagacattcaaaagcacaaatggtttgagggctttaactgggaaggcttaagaaaaggtaccttgacacctcctataataccaagtgttgcatcacccacagacacaagtaattttgacagtttccctgaggacaacgatgaaccaccacctgatgacaactcaggatgggatatagacttctaatgtatttctcttacctgcttctgccttgctgaagacagctttttctgagacacagctgccagcaaacctgagggaaagagagaagattagtgctcggggtcaccatgatgcctttgatcgatgctgctccagtaactacagtggcattaggacttaccgcttagatgacaatagtgctctttacatgttttctgtttgaacctaaaatagcagttgacatggtggtcctgaagcaaagcctttcaccagtaaaagatgttttctattgttgcaatg

SEQ ID NO: 16628 - DNA, 5922 bp, Homo sapiens
  source 1..5922: mol_type = unassigned DNA
tccagctcttgtaaatgtaaaactctgggccattgatcgacaatgttttcaaacaataatgatgaggacaggactcatcaagcataccgagtatatggaatttttaaaaagcgttccaacattccagagccttcctgaagagatcctcagcaagcttgctgatgtccttgaagagacccactatgaaaatggagaatatattatcaggcaaggtgcaagaggggacaccttctttatcatcagcaaaggaacggtaaatgtcactcgtgaagactcaccgagtgaagacccagtctttcttagaactttaggaaaaggagactggtttggagagaaagccttgcagggggaagatgtgagaacagcaaacgtaattgctgcagaagctgtaacctgccttgtgattgacagagactcttttaaacatttgattggagggctggatgatgtttctaataaagcatatgaagatgcagaagctaaagcaaaatatgaagctgaagcggctttcttcgccaacctgaagctgtctgatttcaacatcattgatacccttggagttggaggtttcggacgagtagaactggtccagttgaaaagtgaagaatccaaaacgtttgcaatgaagattctcaagaaacgtcacattgtggacacaagacagcaggagcacatccgctcagagaagcagatcatgcagggggctcattccgatttcatagtgagactgtacagaacatttaaggacagcaaatatttgtatatgttgatggaagcttgtctaggtggagagctctggaccattctcagggatagaggttcgtttgaagattctacaaccagattttacacagcatgtgtggtagaagcttttgcctatctgcattccaaaggaatcatttacagggacctcaagccagaaaatctcatcctagatcaccgaggttatgccaaactggttgattttggctttgcaaagaaaataggatttggaaagaaaacatggactttttgtgggactccagagtatgtagccccagagatcatcctgaacaaaggccatgacatttcagccgactactggtcactgggaatcctaatgtatgaactcctgactggcagcccacctttctcaggcccagatcctatgaaaacctataacatcatattgagggggattgacatgatagaatttccaaagaagattgccaaaaatgctgctaatttaattaaaaaactatgcagggacaatccatcagaaagattagggaatttgaaaaatggagtaaaagacattcaaaagcacaaatggtttgagggctttaactgggaaggcttaagaaaaggtaccttgacacctcctataataccaagtgttgcatcacccacagacacaagtaattttgacagtttccctgaggacaacgatgaaccaccacctgatgacaactcaggatgggatatagacttctaatgtatttctcttacctgcttctgccttgctgaagacagctttttctgagacacagctgccagcaaacctgagggaaagagagaagattagtgctcggggtcaccatgatgcctttgatcgatgctgctccagtaactacagtggcattaggacttaccgcttagatgacaatagtgctctttacatgttttctgtttgaacctaaaatagcagttgacatggtggtcctgaagcaaagcctttcaccagtaaaagatgttttctattgttgcaatgaccttgctttgctctgattataatttgaaagactgtaggaaacacttcaatgtagtataagagtctgtaccttgctggaatattcaagaagatgaaagaataatatattgggtacaatagattactatggtacagaaactgggctattccctttcttcaagtgaaggctgtgggatctattactgcaggccggtgtatataccatacaaaagaggaccacacatctgttggtcacagagttcatgtcacaccagtgctagaagtttcatgattttatttcccagcagtgctgatgacaagactgaatgttaccttttctttctgacagattttaaaaattgatatgataaaagcacaactgctatagattctgctgagacctctcatagtaggtatatatgagttttcacagaagactgaaaaataatgcatgatatttgtttgttttttttgataaattggcatgacagagtggggaaaaaaagcaattcacaaaaccatttcatattttttaaaatattgtgcttaaagatggtcctggaagtaaatgactagcagccaattggttttacttaacataccctcaaactgaggcttaaagtattcccttttataaaaataaatgcttggggtagggtggagtggggagggattaaaacccatccaaaaaataaataaaaactatataggtgctatgtatatctttcatctgtaaatgtcagtgtctgaacagacaacacaaattcaaatcattatacgtgtagccagaaactcaagcattttcactaaagttattaaaccaaactcctgtccaatttcacttatacaacatagtcagtctagagttgagagacaaaggtaattataaacctatttgaactagcttcttgtcttaggcctgaaccaaaaaacaacaaacaaacaaaaaacaagaatgaaaaacagaaataaaagaagtagaaaagacaaagaaagaaagcccaaagtcaaagttgttaatatttacaggtttaccagatctggaacattacttatttgaggtcagagaacaaaacaagaacctggccaggtgttgattaccttttagtgaataagctgagtccatatacttgtctaactaagaaagcagtacagaggaaaacaggaacctgatttttttaaaataaattttaaataaaatagaattactacaattctgcaatttcatactacctaaaaaagactagatttgaaaatgtcaagctgatttactttattcacatggagaaaagaatccacaaattaaactgagtccttcactggcatgccagttgactattattagctgtcataagtaactcagccatttggaagcatttcctggacaaaattacattatacctgtgaagaaaaatatagaagctttcaagctgtcattctgttttggccctgtgtgaatttggtatattaaattgacgcttgctttttttttcagtagagttttctttttaatcaatcaaacgcctacatttctggaagaaaaagtccaattagatcattacaccttaactaagaaggcaaatcttataaattttgcttgaattgttcttactcaaaactaccttagaatatggtatcttatgaaaatataatattcttaaaattttggaggataaaatgaaaagggtataaacttcaattagaactttaatcctaaaatattgttattcttgtatttttggagttttccgtcccttacaatttctccaaattggtctattccccaagatatccactgttttctacagattttagaatataaaattaaacatatcaacctaaaatctagctatgaatgttatttcaagagttttatatttttaattggctttttaaaaatatgtaattccaatattatagtgaatgttcagtaacttttgttgaaagataatgtggtttaggcttgctaaagaaaggcttgctagaatactaaatttaccttgttatttggaaagagaatctgctcctataacgttttaaaaatccccaaagtcccagagattagcacttgctatggattttggaactatggttcaagtctaagacaaccaatatgaataagttcaatggagaaggaagaagtagcattcagcacaagaaactgtagattgtttctcccacttgttactgcatctttgttcatttcacccatagcattgcatttgatgtctgaagtaattaccacaaaataaaggtaaactacatcttccaagatgtaccaacagaaaacattcgtctaattttgtcaacattgaatttttaggatttaaatcttgtcttaatgaagactctagggctaaaattcatggtcagttccataaaatgcatctcactttatttctgaatttttcacaacccctctattttcttacattaaagaacatctggataagttagaatagtgccaacttgtttgatttgttatatgattttcttgttaatgtgttgagtatgggaaataagggctttctgtgtgtcttgactcacaggaaaactgaaactgccaagggaagcaacattaaaacaactgggatagattgaatacatttgaaaaaataatttctggaaaaacgctatacatgctttttatgtttatatcttctttcttattaagacatgaatcagatccatgtggcattcaaaacaaatttattttggttatattctttacaagtcataatttttacctaaaattgtggaatatgcatgtgaattacacatgtgtagtaataaactcaactattgaatttttcctgtttcatttctaaatgactgaactgatggtaaacaaatttaatgaagtcagctaccatgttgaaaataaggatattagaactgatttcatacaatagaggtgatctgtgcattatccataacaacgttttctttcactataggaccacagacaaatatttatgtaaataggtatttttgtgtgatattttgtggtacatataactttttttagtgtttcacagcattattatttcattttatttgtattgaataatgtttttaggtccaagtagacttgaattaatgtcataattgtcagtattattgaaaattatgtcaactgtactgttattcatctgtcccatagtttagaacatgacctggctatctggcattgttgcaagtgccttaaattcatggcatcctattaaaaaaacaaatttggtgttatgctgcatgacaaagacaaacacacctcaaaatgttgtcctttcttagcttgctgcgttttacagttctttctgctaacaatttataagcctttattatataatattgatgaattacagaaatgatgaagttgttctcttatttctgttaaatgtaccagagctgtgtatctgttaatgagatacagcgtcatttctgtgaaatgtataaatgtatgtgcaggtcaaattaatatatgacattctatcagtctgtatacaggtattcctgttttgctaagctgtgcagattctgtaaaaataaattagtgcagtcaagttctaacatatctcattttatagactccattgacaatggtccaaccgaaaagaaaaattggaaatgactgctaaccagacctcgttatgaaaccaatgatgaaaaagtcacttggtgcacctctcaacaaaacaggatgctttttccgagttcttgtatatgcaaatcatttacgaggcaagttttcaacagacctagaaagcaaaacattgaaagtgtgttgttagccctcctctctgcccctgaatcaacagacagagctctgggaccttggcaatgactcagaggttggggctttctgagtaaagggacatttctttaagcatcatctatcaaatttatttcaatgtatgatgtttttacaactggtcagttcttttgtattcttacagctatggttatttgattgtcctcttacaatttgttctacatgaaagagttctttgttagtcagaatgcaacaaactgtcatcaaatggtcattgaccacttgcactcttttgatgtagattaaaaactttttcataaatttacctgctttgatttgctctgtatttttcctgcagctgtaattgctgagtgcctgttgtatactttatagagttgaaataaaaaaataattacttttg

SEQ ID NO: 16629 - DNA, 3431 bp, Homo sapiens
  source 1..3431: mol_type = unassigned DNA
aggcggctggggagggcggcgtgggagaggacgctgagacgcaggggcggccgcgccgaggtgacaagctgcgcacctggaaagttacccggctgtctggtgaggtccctgagcaaaatgggaaatggttcagtgaaacctaaacattctaagcacccagatggacactctgggaacctcaccactgatgctctgcggaacaaggtgacagagctggagagagagttgaggaggaaggatgctgagatccaggagcgggagtaccatttgaaggagctgcgggagcagctgtcgaagcagactgtggccattgctgaactcacagaggagctccagaacaagtgcatccagctgaacaagctgcaggatgtggtgcatatgcagggaggaagcccgcttcaggcctctccagataaagtgcctcttgaggtccaccggaagacctctggattggtctctctccatagcaggaggggagcaaaggctggcgtgtctgctgagccaacaacccggacctatgacctgaacaaaccccctgaattttcctttgagaaagcaagagtcagaaaagactccagtgagaagaagctcattacagatgcccttaataaaaatcagtttctgaaaagactggatcctcagcagatcaaagacatggtggaatgcatgtatgggagaaactatcagcaagggagttacattattaagcaaggagaaccaggaaaccatatctttgtgctggcagagggtcgactagaggtgttccaaggggagaaattgctgtcctccatccctatgtggaccacatttggggagcttgccattttatacaattgtacaaggactgcctctgtgaaagctattaccaatgttaaaacatgggcactagatcgagaggtattccagaatataatgaggaggacagcccaagctagagatgaacaatacagaaacttcctcagaagtgtatccttgctgaagaatttacctgaagataaattaaccaagatcattgactgcttggaagtggaatactatgacaaaggagattacatcattagagagggcgaggaaggaagtacctttttcattttggcaaaaggaaaggtaaaagtaacacagagcacagaaggccatgatcaaccacagctgataaaaacactgcagaaaggagaatactttggagaaaaagctcttatcagtgatgatgtcaggtcagctaacattattgctgaagaaaatgatgttgcatgcctggttatagatcgagaaacattcaaccaaactgtcggtacatttgaagagctgcaaaaataccttgaaggatatgtggcaaacctgaaccgtgatgatgaaaaaagacatgcgaagcggtccatgtctaactggaagctgtccaaagcactctctctggaaatgattcagctgaaggagaaggtggccagattttcctcatcatccccattccagaaccttgagattattgcaacactgggcgttggtgggttcggaagagttgagcttgttaaagtaaaaaatgagaatgttgcttttgctatgaagtgtataaggaagaagcacatagttgacaccaagcagcaggagcatgtctactcagagaagaggatcctagaggagctgtgctctccattcattgtgaaattatatcgtactttcaaggacaataagtatgtatacatgcttctggaggcctgcttaggtggggagctctggagtatattaagggacagaggcagctttgatgaacccacctccaaattctgcgttgcttgtgtgacagaagcatttgattacctgcatcgactaggtattatctacagagacttgaaaccagaaaacttaattctagatgctgagggttaccttaaattggttgactttggatttgcgaagaaaatagggtctggacagaaaacatggacattctgtgggactccagaatatgtagctcctgaagtcattctcaacaagggacatgacttcagtgtggatttctggtcactgggaattctagtgtatgagctcctaacgggcaacccacccttttctggggttgaccaaatgatgacctacaatttgattctcaaaggaattgaaaaaatggattttcccaggaagataacacgacgacctgaggatttgattcggaggctttgcaggcaaaatccaacagaaaggctgggaaatctgaagaatggaataaatgacattaagaaacacaggtggttaaatggttttaattgggagggactgaaagcacggagccttccatcacctttgcaaagagagctcaagggacccatagatcacagctactttgacaaatatcctcctgaaaagggaatgcctccagatgagctatcaggctgggataaagacttctgacagaagaaaagttgattactgcctgtactctacagaagaggacctcaaggatcaataatccaacacattattttcttttcagagtattataatatctttggaagaccattagggaaaagaaattcctgcacaatgggaagaggagaatggtgtggatatggttctgagttatagtgtcttatttagatgctgtgaattattgatgtattacattatttgcttttctcaactgctagaggctaccccattttcctttccacaatcagagccatttttgttaaagtggcagttttttctgcaatctattgttccattccaatcatatccttctcgtttgagtactactaacgtttaaaaagggtcttgcccttgaataactaagtcatacaaatagaaggaaaaacaatggtgaattttggagagctccccagctctcagcaacttcatataagcatggtggtatcttaaaatggtggtttgcagaaaccatggtagccaacagaacctcctgactttcacctgcttttaacctgaaaatatattaatacgcctctgacatgagtccagggagaggcaagattgagcaatagtcagtggcaccatttcctaaagtaactgaatcaatcaatccagtcaggtaattattttctattggggaacttagaaaaaaaagtaaagcaagaaatattttctctcctttatgatcagtgataccttagagacttttcgaaagtccttgttaaagatagttacaatgtgtggttaaatgatgctaaaatattttcacaaccagagtagaaaacgtgctggaacaaaattgcgaaggcttttgcctcccagtaaatagaaaggaaaatatattctagtaggtaagactgctgactctttgaaaatctgaggtattttgaaaaattctgtgatagttgctattaataaaccaaaattgtatagaatcatcgttaatttttaatataaatcccattgacaaatgttgatgcactgtagtcactgctgagttaatagcg

SEQ ID NO: 16630 - DNA, 2623 bp, Homo sapiens
  source 1..2623: mol_type = unassigned DNA
gagctgacctgcgctgggctccggcgccgcaggcggctggggagggcggcgtgggagaggacgctgagacgcaggggcggccgcgccgaggtgacaagctgcgcacctggaaagttacccggctgtctggtccctgagcaaaatgggaaatggttcagtgaaacctaaacattctaagcacccagatggacactctgggaacctcaccactgatgctctgcggaacaaggtgacagagctggagagagagttgaggaggaaggatgctgagatccaggagcgggagtaccatttgaaggagctgcgggagcagctgtcgaagcagactgtggccattgctgaactcacagaggagctccagaacaagtgcatccagctgaacaagctgcaggatgtggtgcatatgcagggaggaagcccgcttcaggcctctccagataaagtgcctcttgaggtccaccggaagacctctggattggtctctctccatagcaggaggggagcaaaggctggcgtgtctgctgagccaacaacccggacctatgacctgaacaaaccccctgaattttcctttgagaaagcaagagtcagaaaagactccagtgagaagaagctcattacagatgcccttaataaaaatcagtttctgaaaagactggatcctcagcagatcaaagacatggtggaatgcatgtatgggagaaactatcagcaagggagttacattattaagcaaggagaaccaggaaaccatatctttgtgctggcagagggtcgactagaggtgttccaaggggagaaattgctgtcctccatccctatgtggaccacatttggggagcttgccattttatacaattgtacaaggactgcctctgtgaaagctattaccaatgttaaaacatgggcactagatcgagaggtattccagaatataatgaggaggacagcccaagctagagatgaacaatacagaaacttcctcagaagtgtatccttgctgaagaatttacctgaagataaattaaccaagatcattgactgcttggaagtggaatactatgacaaaggagattacatcattagagagggcgaggaaggaagtacctttttcattttggcaaaaggaaaggtaaaagtaacacagagcacagaaggccatgatcaaccacagctgataaaaacactgcagaaaggagaatactttggagaaaaagctcttatcagtgatgatgtcaggtcagctaacattattgctgaagaaaatgatgttgcatgcctggttatagatcgagaaacattcaaccaaactgtcggtacatttgaagagctgcaaaaataccttgaaggatatgtggcaaacctgaaccgtgatgatgaaaaaagacatgcgaagcggtccatgtctaactggaagctgtccaaagcactctctctggaaatgattcagctgaaggagaaggttaaagtaaaaaatgagaatgttgcttttgctatgaagtgtataaggaagaagcacatagttgacaccaagcagcaggagcatgtctactcagagaagaggatcctagaggagctgtgctctccattcattgtgaaattatatcgtactttcaaggacaataagtatgtatacatgcttctggaggcctgcttaggtggggagctctggagtatattaagggacagaggcagctttgatgaacccacctccaaattctgcgttgcttgtgtgacagaagcatttgattacctgcatcgactaggtattatctacagagacttgaaaccagaaaacttaattctagatgctgagggttaccttaaattggttgactttggatttgcgaagaaaatagggtctggacagaaaacatggacattctgtgggactccagaatatgtagctcctgaagtcattctcaacaagggacatgacttcagtgtggatttctggtcactgggaattctagtgtatgagctcctaacgggcaacccacccttttctggggttgaccaaatgatgacctacaatttgattctcaaaggaattgaaaaaatggattttcccaggaagataacacgacgacctgaggatttgattcggaggctttgcaggcaaaatccaacagaaaggctgggaaatctgaagaatggaataaatgacattaagaaacacaggtggttaaatggttttaattgggagggactgaaagcacggagccttccatcacctttgcaaagagagctcaagggacccatagatcacagctactttgacaaatatcctcctgaaaagggaatgcctccagatgagctatcaggctgggataaagacttctgacagaagaaaagttgattactgcctgtactctacagaagaggacctcaaggatcaataatccaacacattattttcttttcagagtattataatatctttggaagaccattagggaaaagaaattcctgcacaatgggaagaggagaatggtgtggatatggttctgagttatagtgtcttatttagatgctgtgaattattgatgtattacattatttgcttttctcaactgctagaggctaccccattttcctttccacaatcagagccatttttgtt

SEQ ID NO: 16631 - DNA, 1774 bp, Homo sapiens
  source 1..1774: mol_type = unassigned DNA
agactgctgtgctagcaatcagcaagactccgtgggcgtaggaccctccgagccaggaatactatgacaaaggagattacatcattagagagggcgaggaaggaagtacctttttcattttggcaaaaggaaaggtcctccactttggacagataaaggagcttctaccagtagagtcccatgcaattctgtttgaacactggctttggagtggaggccacaggaccccctaagaaataataacttcttagtgatgttatgtaaaagtaacacagagcacagaaggccatgatcaaccacagctgataaaaacactgcagaaaggagaatactttggagaaaaagctcttatcagtgatgatgtcaggtcagctaacattattgctgaagaaaatgatgttgcatgcctggttatagatcgagaaacattcaaccaaactgtcggtacatttgaagagctgcaaaaataccttgaaggatatgtggcaaacctgaaccgtgatgatgaaaaaagacatgcgaagcggtccatgtctaactggaagctgtccaaagcactctctctggaaatgattcagctgaaggagaaggtggccagattttcctcatcatccccattccagaaccttgagattattgcaacactgggcgttggtgggttcggaagagttgagcttgttaaagtaaaaaatgagaatgttgcttttgctatgaagtgtataaggaagaagcacatagttgacaccaagcagcaggagcatgtctactcagagaagaggatcctagaggagctgtgctctccattcattgtgaaattatatcgtactttcaaggacaataagtatgtatacatgcttctggaggcctgcttaggtggggagctctggagtatattaagggacagaggcagctttgatgaacccacctccaaattctgcgttgcttgtgtgacagaagcatttgattacctgcatcgactaggtattatctacagagacttgaaaccagaaaacttaattctagatgctgagggttaccttaaattggttgactttggatttgcgaagaaaatagggtctggacagaaaacatggacattctgtgggactccagaatatgtagctcctgaagtcattctcaacaagggacatgacttcagtgtggatttctggtcactgggaattctagtgtatgagctcctaacgggcaacccacccttttctggggttgaccaaatgatgacctacaatttgattctcaaaggaattgaaaaaatggattttcccaggaagataacacgacgacctgaggatttgattcggaggctttgcaggcaaaatccaacagaaaggctgggaaatctgaagaatggaataaatgacattaagaaacacaggtggttaaatggttttaattgggagggactgaaagcacggagccttccatcacctttgcaaagagagctcaagggacccatagatcacagctactttgacaaatatcctcctgaaaagggaatgcctccagatgagctatcaggctgggataaagacttctgacagaagaaaagttgattactgcctgtactctacagaagaggacctcaaggatcaataatccaacacattattttcttttcagagtattataatatctttggaagaccattagggaaaagaaattcctgcacaatgggaagaggagaatggtgtggatatggttctgagttatagtgtcttatttagatgctgtgaattattgatgtattacatta

SEQ ID NO: 16632 - DNA, 1640 bp, Homo sapiens
  source 1..1640: mol_type = unassigned DNA
agtttgagcttcctggctgctttgtttacctaagcaagcctgggcaatggcgggcgcccctccccgagcctcgctgctgccttgcagtttgatctcagactgctgtgctagcaatcagcaagactccgtgggcgtaggaccctccgagccaggaatactatgacaaaggagattacatcattagagagggcgaggaaggaagtacctttttcattttggcaaaaggaaaggtaaaagtaacacagagcacagaaggccatgatcaaccacagctgataaaaacactgcagaaaggagaatactttggagaaaaagctcttatcagtgatgatgtcaggtcagctaacattattgctgaagaaaatgatgttgcatgcctggttatagatcgagaaacattcaaccaaactgtcggtacatttgaagagctgcaaaaataccttgaaggatatgtggcaaacctgaaccgtgatgatgaaaaaagacatgcgaagcggtccatgtctaactggaagctgtccaaagcactctctctggaaatgattcagctgaaggagaaggtggccagattttcctcatcatccccattccagaaccttgagattattgcaacactgggcgttggtgggttcggaagagttgagcttgttaaagtaaaaaatgagaatgttgcttttgctatgaagtgtataaggaagaagcacatagttgacaccaagcagcaggagcatgtctactcagagaagaggatcctagaggagctgtgctctccattcattgtgaaattatatcgtactttcaaggacaataagtatgtatacatgcttctggaggcctgcttaggtggggagctctggagtatattaagggacagaggcagctttgatgaacccacctccaaattctgcgttgcttgtgtgacagaagcatttgattacctgcatcgactaggtattatctacagagacttgaaaccagaaaacttaattctagatgctgagggttaccttaaattggttgactttggatttgcgaagaaaatagggtctggacagaaaacatggacattctgtgggactccagaatatgtagctcctgaagtcattctcaacaagggacatgacttcagtgtggatttctggtcactgggaattctagtgtatgagctcctaacgggcaacccacccttttctggggttgaccaaatgatgacctacaatttgattctcaaaggaattgaaaaaatggattttcccaggaagataacacgacgacctgaggatttgattcggaggctttgcaggcaaaatccaacagaaaggctgggaaatctgaagaatggaataaatgacattaagaaacacaggtggttaaatggttttaattgggagggactgaaagcacggagccttccatcacctttgcaaagagagctcaagggacccatagatcacagctactttgacaaatatcctcctgaaaagggaatgcctccagatgagctatcaggctgggataaagacttctgacagaagaaaagttgattactgcctgtactctacagaagaggacctcaaggatcaataatccaacacattattttcttttcagagtattataatatctttggaagaccatta

SEQ ID NO: 16633 - DNA, 493 bp, Homo sapiens
  source 1..493: mol_type = unassigned DNA
agcaatcagcaagactccgtgggcgtaggaccctccgagccaggaatactatgacaaaggagattacatcattagagagggcgaggaaggaagtacctttttcattttggcaaaaggaaaggtaaaagtaacacagagcacagaaggccatgatcaaccacagctgataaaaacactgcagaaaggagaatactttggagaaaaagctcttatcagtgatgatgtcaggtcagctaacattattgctgaagaaaatgatgttgcatgcctggttatagatcgagaaacattcaaccaaactgtcggtacatttgaagagctgcaaaaataccttgaaggatatgtggcaaacctgaaccgtgatgatgaaaaaagacatgcgaagcggtccatgtctaactggaagctgtccaaagcactctctctggaaatgattcagctgaaggagaaggttaaagtaaaaaatgagaatgttgcttttgctatgaagtgt

SEQ ID NO: 16634 - DNA, 3852 bp, Homo sapiens
  source 1..3852: mol_type = unassigned DNA
catcccaacaggaatactatgacaaaggagattacatcattagagagggcgaggaaggaagtacctttttcattttggcaaaaggaaaggtcctccactttggacagataaaggagcttctaccagtagagtcccatgcaattctgtttgaacactggctttggagtggaggccacaggaccccctaagaaataataacttcttagtgatgttatgtaaaagtaacacagagcacagaaggccatgatcaaccacagctgataaaaacactgcagaaaggagaatactttggagaaaaagctcttatcagtgatgatgtcaggtcagctaacattattgctgaagaaaatgatgttgcatgcctggttatagatcgagaaacattcaaccaaactgtcggtacatttgaagagctgcaaaaataccttgaaggatatgtggcaaacctgaaccgtgatgatgaaaaaagacatgcgaagcggtccatgtctaactggaagctgtccaaagcactctctctggaaatgattcagctgaaggagaaggtggccagattttcctcatcatccccattccagaaccttgagattattgcaacactgggcgttggtgggttcggaagagttgagcttgttaaagtaaaaaatgagaatgttgcttttgctatgaagtgtataaggaagaagcacatagttgacaccaagcagcaggagcatgtctactcagagaagaggatcctagaggagctgtgctctccattcattgtgaaattatatcgtactttcaaggacaataagtatgtatacatgcttctggaggcctgcttaggtggggagctctggagtatattaagggacagaggcagctttgatgaacccacctccaaattctgcgttgcttgtgtgacagaagcatttgattacctgcatcgactaggtattatctacagagacttgaaaccagaaaacttaattctagatgctgagggttaccttaaattggttgactttggatttgcgaagaaaatagggtctggacagaaaacatggacattctgtgggactccagaatatgtagctcctgaagtcattctcaacaagggacatgacttcagtgtggatttctggtcactgggaattctagtgtatgagctcctaacgggcaacccacccttttctggggttgaccaaatgatgacctacaatttgattctcaaaggaattgaaaaaatggattttcccaggaagataacacgacgacctgaggatttgattcggaggctttgcaggcaaaatccaacagaaaggctgggaaatctgaagaatggaataaatgacattaagaaacacaggtggttaaatggttttaattgggagggactgaaagcacggagccttccatcacctttgcaaagagagctcaagggacccatagatcacagctactttgacaaatatcctcctgaaaagggaatgcctccagatgagctatcaggctgggataaagacttctgacagaagaaaagttgattactgcctgtactctacagaagaggacctcaaggatcaataatccaacacattattttcttttcagagtattataatatctttggaagaccattagggaaaagaaattcctgcacaatgggaagaggagaatggtgtggatatggttctgagttatagtgtcttatttagatgctgtgaattattgatgtattacattatttgcttttctcaactgctagaggctaccccattttcctttccacaatcagagccatttttgttaaagtggcagttttttctgcaatctattgttccattccaatcatatccttctcgtttgagtactactaacgtttaaaaagggtcttgcccttgaataactaagtcatacaaatagaaggaaaaacaatggtgaattttggagagctccccagctctcagcaacttcatataagcatggtggtatcttaaaatggtggtttgcagaaaccatggtagccaacagaacctcctgactttcacctgcttttaacctgaaaatatattaatacgcctctgacatgagtccagggagaggcaagattgagcaatagtcagtggcaccatttcctaaagtaactgaatcaatcaatccagtcaggtaattattttctattggggaacttagaaaaaaaagtaaagcaagaaatattttctctcctttatgatcagtgataccttagagacttttcgaaagtccttgttaaagatagttacaatgtgtggttaaatgatgctaaaatattttcacaaccagagtagaaaacgtgctggaacaaaattgcgaaggcttttgcctcccagtaaatagaaaggaaaatatattctagtaggtaagactgctgactctttgaaaatctgaggtattttgaaaaattctgtgatagttgctattaataaaccaaaattgtatagaatcatcgttaatttttaatataaatcccattgacaaatgttgatgcactgtagtcactgctgagttaatagcgctttttaaagacatctgagtcatggatgtgtttataaatttagattgttaagacaggcaagccaccagaaaagtgataggatttcagaagtaaaagggacaacagcatccctcctatcccttccttgcactctcccaaataataagtaggatagtttcaatagcatgggacctagtacctaagaacttcactggtgaatggttgtatgtattgaccatgatcattcccttaccctccttccaaaatgaatgagaagcagagacttttctgtattttttaaatctagcagagtaaaaatactgtataagttccgggattattcaagcttctggttatattttcatatgttaatgttctatgtcaaaaggaacctctacccagtccccactcataatttcatcatccagaaaaaagccagctatatgcttccttaatgagttaagctagataagtgaagcccaatccagaaaggtgcatccttaacaaattagatttccacatttataatccttttgctgaaccaaagagtttttgtttcctggagctgtatttttaaagattatgtattgtacatagaataatcatttttaataggattgacataacctgcttaaagaatttctaagagtttttaaagatttttatttgaatttggttggtttgtactgtatgtttttccatgtatatatttttaaatttccaacctataaagatagaaaatttatgtattgggtggatattagaactatacagttataataggaatgatattctcaaagcagatcaatagttgtaatttttaaaaccctacatatatagaaataaccaagttagagtactacaggtttatttttcctgtgattgaccatgtcaatgtgttatcctcccatgtgattttttattgtttccttagagtactttaaaagatgaagaaatgagagactgaaccattgaataatcccaactccaccatttcctaactgagtgactctgggaaagtgatttagcttttttgagtactagctttctcattcatagaaaaaggcagagtaaagtaatatttacttagaggtttgtttcagggattaagttatgtagagagtcttttgcccggtatctgtgaaataaccattgctgcatagacgggagctactgttactgtctctattaaaattaaaggggccttaataaccatttagtcctgaatcttatgtatcattggtatctgtatgcagaattgtacttatcaaatccagtatctgtcttttttttcttttaaatcatgaagtaaaaatgattgaccaaaaacttcg

SEQ ID NO: 16635 - DNA, 4822 bp, Homo sapiens
  source 1..4822: mol_type = unassigned DNA
gagccggcagccccgggcccacgctgcgcaccgtgtgcacggcggggctggctgagctgacctgcgctgggctccggcgccgcaggcggctggggagggcggcgtgggagaggacgctgagacgcaggggcggccgcgccgaggtgacaagctgcgcacctggaaagttacccggctgtctggtccctgagcaaaatgggaaatggttcagtgaaacctaaacattctaagcacccagatggacactctgggaacctcaccactgatgctctgcggaacaaggtgacagagctggagagagagttgaggaggaaggatgctgagatccaggagcgggagtaccatttgaaggagctgcgggagcagctgtcgaagcagactgtggccattgctgaactcacagaggagctccagaacaagtgcatccagctgaacaagctgcaggatgtggtgcatatgcagggaggaagcccgcttcaggcctctccagataaagtgcctcttgaggtccaccggaagacctctggattggtctctctccatagcaggaggggagcaaaggctggcgtgtctgctgagccaacaacccggacctatgacctgaacaaaccccctgaattttcctttgagaaagcaagagtcagaaaagactccagtgagaagaagctcattacagatgcccttaataaaaatcagtttctgaaaagactggatcctcagcagatcaaagacatggtggaatgcatgtatgggagaaactatcagcaagggagttacattattaagcaaggagaaccaggaaaccatatctttgtgctggcagagggtcgactagaggtgttccaaggggagaaattgctgtcctccatccctatgtggaccacatttggggagcttgccattttatacaattgtacaaggactgcctctgtgaaagctattaccaatgttaaaacatgggcactagatcgagaggtattccagaatataatgaggaggacagcccaagctagagatgaacaatacagaaacttcctcagaagtgtatccttgctgaagaatttacctgaagataaattaaccaagatcattgactgcttggaagtggaatactatgacaaaggagattacatcattagagagggcgaggaaggaagtacctttttcattttggcaaaaggaaaggtaaaagtaacacagagcacagaaggccatgatcaaccacagctgataaaaacactgcagaaaggagaatactttggagaaaaagctcttatcagtgatgatgtcaggtcagctaacattattgctgaagaaaatgatgttgcatgcctggttatagatcgagaaacattcaaccaaactgtcggtacatttgaagagctgcaaaaataccttgaaggatatgtggcaaacctgaaccgtgatgatgaaaaaagacatgcgaagcggtccatgtctaactggaagctgtccaaagcactctctctggaaatgattcagctgaaggagaaggtggccagattttcctcatcatccccattccagaaccttgagattattgcaacactgggcgttggtgggttcggaagagttgagcttgttaaagtaaaaaatgagaatgttgcttttgctatgaagtgtataaggaagaagcacatagttgacaccaagcagcaggagcatgtctactcagagaagaggatcctagaggagctgtgctctccattcattgtgaaattatatcgtactttcaaggacaataagtatgtatacatgcttctggaggcctgcttaggtggggagctctggagtatattaagggacagaggcagctttgatgaacccacctccaaattctgcgttgcttgtgtgacagaagcatttgattacctgcatcgactaggtattatctacagagacttgaaaccagaaaacttaattctagatgctgagggttaccttaaattggttgactttggatttgcgaagaaaatagggtctggacagaaaacatggacattctgtgggactccagaatatgtagctcctgaagtcattctcaacaagggacatgacttcagtgtggatttctggtcactgggaattctagtgtatgagctcctaacgggcaacccacccttttctggggttgaccaaatgatgacctacaatttgattctcaaaggaattgaaaaaatggattttcccaggaagataacacgacgacctgaggatttgattcggaggctttgcaggcaaaatccaacagaaaggctgggaaatctgaagaatggaataaatgacattaagaaacacaggtggttaaatggttttaattgggagggactgaaagcacggagccttccatcacctttgcaaagagagctcaagggacccatagatcacagctactttgacaaatatcctcctgaaaagggaatgcctccagatgagctatcaggctgggataaagacttctgacagaagaaaagttgattactgcctgtactctacagaagaggacctcaaggatcaataatccaacacattattttcttttcagagtattataatatctttggaagaccattagggaaaagaaattcctgcacaatgggaagaggagaatggtgtggatatggttctgagttatagtgtcttatttagatgctgtgaattattgatgtattacattatttgcttttctcaactgctagaggctaccccattttcctttccacaatcagagccatttttgttaaagtggcagttttttctgcaatctattgttccattccaatcatatccttctcgtttgagtactactaacgtttaaaaagggtcttgcccttgaataactaagtcatacaaatagaaggaaaaacaatggtgaattttggagagctccccagctctcagcaacttcatataagcatggtggtatcttaaaatggtggtttgcagaaaccatggtagccaacagaacctcctgactttcacctgcttttaacctgaaaatatattaatacgcctctgacatgagtccagggagaggcaagattgagcaatagtcagtggcaccatttcctaaagtaactgaatcaatcaatccagtcaggtaattattttctattggggaacttagaaaaaaaagtaaagcaagaaatattttctctcctttatgatcagtgataccttagagacttttcgaaagtccttgttaaagatagttacaatgtgtggttaaatgatgctaaaatattttcacaaccagagtagaaaacgtgctggaacaaaattgcgaaggcttttgcctcccagtaaatagaaaggaaaatatattctagtaggtaagactgctgactctttgaaaatctgaggtattttgaaaaattctgtgatagttgctattaataaaccaaaattgtatagaatcatcgttaatttttaatataaatcccattgacaaatgttgatgcactgtagtcactgctgagttaatagcgctttttaaagacatctgagtcatggatgtgtttataaatttagattgttaagacaggcaagccaccagaaaagtgataggatttcagaagtaaaagggacaacagcatccctcctatcccttccttgcactctcccaaataataagtaggatagtttcaatagcatgggacctagtacctaagaacttcactggtgaatggttgtatgtattgaccatgatcattcccttaccctccttccaaaatgaatgagaagcagagacttttctgtattttttaaatctagcagagtaaaaatactgtataagttccgggattattcaagcttctggttatattttcatatgttaatgttctatgtcaaaaggaacctctacccagtccccactcataatttcatcatccagaaaaaagccagctatatgcttccttaatgagttaagctagataagtgaagcccaatccagaaaggtgcatccttaacaaattagatttccacatttataatccttttgctgaaccaaagagtttttgtttcctggagctgtatttttaaagattatgtattgtacatagaataatcatttttaataggattgacataacctgcttaaagaatttctaagagtttttaaagatttttatttgaatttggttggtttgtactgtatgtttttccatgtatatatttttaaatttccaacctataaagatagaaaatttatgtattgggtggatattagaactatacagttataataggaatgatattctcaaagcagatcaatagttgtaatttttaaaaccctacatatatagaaataaccaagttagagtactacaggtttatttttcctgtgattgaccatgtcaatgtgttatcctcccatgtgattttttattgtttccttagagtactttaaaagatgaagaaatgagagactgaaccattgaataatcccaactccaccatttcctaactgagtgactctgggaaagtgatttagcttttttgagtactagctttctcattcatagaaaaaggcagagtaaagtaatatttacttagaggtttgtttcagggattaagttatgtagagagtcttttgcccggtatctgtgaaataaccattgctgcatagacgggagctactgttactgtctctattaaaattaaaggggccttaataaccatttagtcctgaatcttatgtatcattggtatctgtatgcagaattgtacttatcaaatccagtatctgtcttttttttcttttaaatcatgaagtaaaaatgattgaccaaaaacttcg

SEQ ID NO: 16636 - DNA, 7218 bp, Homo sapiens
  source 1..7218: mol_type = unassigned DNA
gcacgcggccaccgagctggaggaggcggcgggcgtgagaccgggaatgcttggggcccccgccttcctcgcagccatccagcactcggtgcacgccccgcgaggccagcggctgctccctcccggggctattgctgctagtgccgtgagcaccgcccagccattgtctctgtgtctccgtcagccgtgccgagccgcgcacccagaggcgagggcgcgcatggggagcctccgttgatgctgccgcggctgccgcgccgccctccgaggctgcgtcccggggagtccggcttcccgagcgctccggcctggcccggcgccccggacctgagtgcctccccatggaggcgcccgggccggcccaggcggccgcggcggagagcaactcccgagaggtgacggaggatgccgccgactgggcgcccgcgctctgccccagccccgaggcgcggtcgccggaggcgcctgcctaccgcctgcaggactgcgacgcgctggtcaccatgggcactgggacgttcgggcgggtgcacctggtgaaggagaagacagccaagcatttcttcgccctcaaggtgatgagcattcccgacgtcatccgccggaagcaggagcagcacgtgcacaatgagaagtctgtcctgaaggaagtcagccacccgttcctcatcaggctgttctggacgtggcatgaggagcgcttcctctacatgctcatggagtatgtgccgggtggcgagctcttcagctacctgcgcaaccgggggcacttctccagcaccacggggctcttctactctgcggagatcatctgtgccattgagtacctgcactccaaggagatcgtctacagggatttgaagccggagaacatcctgctggatagggatggtcacatcaagctcacggactttgggtttgccaagaagctggtagacaggacttggaccctctgtggaacacccgagtacctagcccccgaagtcattcagagcaagggccacggaagggccgtggactggtgggccctcggcatcctgatattcgagatgctttcggggtttcctccattttttgatgacaacccgtttggcatttatcagaaaattcttgcaggcaaactatatttccccagacatttggatttccatgtaaaaacggggcgaatgatgtgaaacaccatcggtggttccgctccgtggactggaaagctgttccgcagagaaaactgaagcctcccatcgtgcccacgatagctggcaacggcgacacttccaacttcgaaacttaccctgagcatgactgggacacagccgcgcccgtgccgcagaaggatttagaaatcttcaagaatttctgaggacgagctcacatctggaagaaacaggaagattggaatctgcctggaacaaagaactgcacctaagcagaccagaagcaaaatgtcttcttcacggcctgaggacatttccagttttctctgtacctgtgtgtatagaaatagatcagagcacagttgaaattcatggaactggcattatttaagcaaccagaattccacactgtaggaaggttttgaaaattgtttcgttatagattttatcttatcttttggtgttgtcttggtttttctcatagactttataagtttgaactggacttatttgattataaccacaaattgtgtgtgtgtgtgtgtgtgtatatatagaagtcattatggcagatgcacaaattgtgcagtgatgtaaatatacatacttcacagagcctattatttttatttttcaattcagtttctcaaattatcttcccttctcttggggacaacatctgaagggtatgttgcatgcatttttaaaaaaatcatctcatatgcattgtatagtttgggggaataagatatccgggggccgggggtgtctacattcagtatctttagttcttcctacctagtaacttgagactttaaaagaagaaacatggagaagatgtgggagcgaatttattgcaggaatccacaatgactttgaagttgttggagcaatgcattgtattcagaaaacctgtgtcacattaaaaaatttcatctaggctaggtgcagtggcttgttcctgtagtcccagcactctgggaacctgggttgggaggattgcttaaggccaggagtttgagaccagcttgggcaacatagtgaaaccctgtctgtatggaatttacacaaattataaaaattagtcgggtgtcattgtgcatacctgtagtcccagctattcaggagctgtggtaggaggatggcttgagctcaagaggttgaggctgcagtgagccctgattgtgccagtgcactccagcctggacgacagagcaagaccctgtattaaaaaaaaaattcatcctgcacagggaaatggctacctattaaagtcccagttgaaattttttgaaaaaatacacctcccacagttcacaaataacttttaagatcagctcatctataaggctgaccttcatgcagagattttatttcacctttagttttgggaaaagcgagaaacagatgatctataggatgtgagtgggtggcagagtcaaaaggaacctcacctgttcctaatttctccttttaaatattcatgttgagtgtgcctaatactctcctcgacaagtcatgctgttttatgcagaataatccaggcgtgagagtgttctcttgggaaatgactggggagacacctgaaaggagcaacctccagatgttcttccctgggtgttgatgtcatgacagccatacagtgagtttgttctgaaacatctcttgctaaatgtgggtcatgctagacacagcataaactgagggtgtgggttctggctttgtacataactcattttctcccttgctttttctctggaccatcctggctggaaacttggctgtagacatctgaagagggtgcaccttttctctttactgtgactcacctcaaatatggcattgctcaaatctgctgtgtatgaggtcacagggcccagctgtggcaggggtgagtgcattgaagaagtaggttttggagccttccaggaattccttgttgacaacaggggtacactcacacagacctccaagactttcttctccacctcttctttttctcatgccctgccttcatctgtctccttctgcacccagagtaggggtggagtatacccttgccatgtgttagtgaaaatgtgtgcagtgagaagccagttgggtcccctcggctcctaatctcttctcaaaactcagtagctcaggttctctggagccatccggtgcattccttgctattggagctgtttttccaagcaatatctgggaagagatttctccctctagcacttgctacctctcttctgcacacatatcacacatcagtactgtggagagtttctgttaggaaaagccatacatttttaaaaatgtagcaaaatgtcaagggaaatgtaatcagatttggccagagttcgcctacagataagaaggcactgggccaggctcacacctgtaatcctaagtaacactttgggaggctggggcgagaggattgcttgagcccaggagttcaatacctgtctgggaaacacctcatctctacaaaatacaaaaaagttaactgggcatggtggagcatgcctgtagtctcagctactcaggaggctgagatgagaggatcacttgagcctgaggaggtccaggccacagtgatctgagatcacaccattgccctccagcctgggtgacagagtgagaccctgttccaaaaaaaaaaaaaaacccaaaaaacctcaatggctttttgcttttgaaggtggtatgaagagaacgtccactttaaggctttaaaagacagtgaagctggttgtagggctcacttttataatcctaggatttggggaagctgaagcagaaagattgcttgagcctgggagtttgagactggcctgggcagcatagcgagaccccatctctatataaaaaaaaagatgttaaaacagtgaaattacagaaacagaacatagccaccctgtttcatcagtgaccttttcttcacgtgacggtcaactcagtaggtgagaataattagtaggttcagcagaataaactctttacaattaataactcagtggaaaatgatgttcagatggtgaaatgtggaaatgttttagacaactctattttcagcctgtgcttctcactcaccatcctgttgggattaacagttgagggccatcgctgcctaaacatttagcgtgcggtttcccatcagttttactgtgaatgtgaaaaggtgaaactgttgctgacttcggcagcaggtatactaaaattggaatgacacagaggagattagcatggccccctgcgcgaggaagatccgcagattcatgcagcattccatatttttttaaaaaaaggttacactgtgcaccgacgtggagctagaaggaaaagcatgaagtctcatgtttgctgactataaaaataaatcatagtaataatattattgaacattctactttaaaaattattaataaaaccataaatgaaacacttgagcacactttaaaaagtacataaacccatgagtccatatgtgtaattttatgttgtctgttttattatccaggatttcatactcagatgagcattagcatcaggaaagcctgaaatgccttaattgtgaactgatacgcaggaaaatgaaatatgtaagcacattggtgaccttgttctttacagacatcatgatcagcctccagccatacagaacaaatgagaaattagaagcaattccaagaacgtgtgatggtgtgaaacccacttttgaccgtcacacacatttcagcatttgaagagacacaggctacctggaaactgcccatggcggggtcataatttaaatgtcccaatgtcatatagaggttaatttaatcaaaatgagctaaaacatggaacaatcactgaataatttaaaaagagtttacctggcagagtgtgtcatgcctgcaatcccagcactttgggaggccaaggcaggcagatcacctgaggtcaggagtttgagaccagcctggccaacatgatgaaacccttgtctctattaaaaacacaaaaattagccagatgtggtggcacatgcctgtaatcccagttagtcgggaggctgaggcaggagaatatggaactcaggaggcggaggctgcagtcaaccaagattgcgccactgcactccagccagggcgaaggagtgagactcccatctcaaaaaataaaaaaaaaaataaataaaaatagttgacccgggtgggcattccaaaatgttcccatagatgatcgtgaaacaatcactgtgcaaaatgtagaggaaaattcttacgataatcacaaaatttgtatcagaaaaacattacaaatttactttgctccatgtaattttatgaattggcagtattttcttaaattgggatacagtaagagaatatctttaggaaatggaaatgttaaaacaagaagtaacaagaggttgtttttctgaagggaaatgccaccggcctgctttcataggcattgataaagccaggaaggaaataaagtcacaaccgaatagtatacactgtatctactgaattcttctaattccttcacaacagaagtctaaatcctgcttagcctaaacatatctatagccagcgatgggcaaattatatttgctgtcagcatgatggaataagaaacagaaaccccccagcagtggggtaagattgcacgcttcatcccctcaaaatgcagttcagccccactccctctccatgcccatcaaacaactgcaaaatcacttgttactgaatttctcattcagcgttttgtttctttctgtccatacttaaagaccaaattatttgtttgctttgaagaaaaagcaaaagcaacaaaaacaccaaatcatttgaaatcactacccattaaaaaaaatcaccagtggaactaaacagttgagtggtttgggatgtgttgttcgccatttctgtgtttgacctacatggtctctagttctttggacaattgtaactgtgaaactatggcttaacactgttaaagactccaaggctccactctgtagccaggtgcaactcaggctgcacaaataccccaccagaatgtcacaatcattcattgctccagctgctgagtgaacagagtgcaagacagcactggcttgggttttatttttgcagccagttaactttgcatcaggtctacacagtccttgcagcctttgatttctccagttgtacagatttgaaatggggtgcccgggttcctctcgtttttccttcaatctacctagcatgcattttacacacattggaggagtcgtatgcactgtttttctcttgctgatggaggcaagaacgccttctaattagtataacttaaatggacgggattcacttaaaagcaagaagaaaagcacatgaacaggtgtcttaatgcatttggatactttggggtgtgtgcctgtctgtgtgtgtgtcttggtgaaggtgggctgtattttcaccaagccttttcataatcaagtttgctttgcaaaccatctggccttgcccccagcagtacagtccttcctaataacggggatgctctgtcatgtttctctgtaaattgttgtgtgttgggaagttctgttgaggcttagtttgatcttccatggtggacatgtctgttctgtatataaaaagcattacatctgtgttttagcaggtgggatttgaagcttttccacagtccttgtgctctgagatggctgttgagctctgctcagctgtcacagctgaattctttttttgtgctgaacactgggcagcctcaccttgttgccaacgtgcttctggggcccctgtgactgctgccggatgctgtgcacacaggcagagtgccttggcaggtttgtgcaccccttggcgagccagaactgggaaccccgcggagtgaccccaccttctcatggggggtcagggaggggagtgcctatttttaatcttgtttgttgcgcaatggaaatcactgtgatttgtacatatgccctaggaaaattttaccgctgtctaatttatgtaataatactgatgattctaggtttgtttaataaaactttatatcttttcagaag

SEQ ID NO: 16637 - DNA, 1019 bp, Homo sapiens
  source 1..1019: mol_type = unassigned DNA
atggaggcgcccgggccggcccaggcggccgcggcggagagcaactcccgagaggtgacggaggatgccgccgactgggcgcccgcgctctgccccagccccgaggcgcggtcgccggaggcgcctgcctaccgcctgcaggactgcgacgcgctggtcaccatgggcactgggacgttcgggcgggtgcacctggtgaaggagaagacagccaagcatttcttcgccctcaaggtgatgagcattcccgacgtcatccgccggaagcaggagcagcacgtgcacaatgagaagtctgtcctgaaggaagtcagccacccgttcctcatcaggctgttctggacgtggcatgaggagcgcttcctctacatgctcatggagtatgtgccgggtggcgagctcttcagctacctgcgcaaccgggggcacttctccagcaccacggggctcttctactctgcggagatcatctgtgccattgagtacctgcactccaaggagatcgtctacagggatttgaagccggagaacatcctgctggatagggatggtcacatcaagctcacggactttgggtttgccaagaagctggtagacaggacttggaccctctgtggaacacccgagtacctagcccccgaagtcattcagagcaagggccacggaagggccgtggactggtgggccctcggcatcctgatattcgagatgctttcggggtttcctccattttttgatgacaacccgtttggcatttatcagaaaattcttgcaggcaaactatatttccccagacatttggatttccatgtaaaaacggggcgaatgatgtgaaacaccatcggtggttccgctccgtggactggaaagctgttccgcagagaaaactgaagcctcccatcgtgcccacgatagctggcaacggcgacacttccaacttcgaaacttaccctgagcatgactgggacacagccgcgcccgtgccgcagaaggatttagaaatcttcaagaatttctga

SEQ ID NO: 16638 - DNA, 480 bp, Homo sapiens
  source 1..480: mol_type = unassigned DNA
aggagatcgtctacagggatttgaagccggagaacatcctgctggatagggatggtcacatcaagctcacggactttgggtttgccaagaagctggtagacagacagggtctcatcctgtcacccaagctgaagtgccgttgcacaatcttgtctcactacagcctcaaactcctcggctcaagtgatcctccctcctcagcctctgaagtagctgggactacaggcatgtgccaccataccaggctaatttttttatttttaattttagagatgtgatctcactttattgctcaggctggtcttgaactcttggccccaagatatcgtcccacctcagcttcccaaagcactggaattagaagcatgtgccactgtgcctggccaattctatttttgaatttaacatttttagcaccagacagttgttaaatcagtatcattttattatttgtttatttatttagatggagtctcactc

SEQ ID NO: 16639 - DNA, 288 bp, Homo sapiens
  source 1..288: mol_type = unassigned DNA
accttccaaagtgttgggattacaggtgtgagccaacgcaccaggtcttgaataacatttttgaacgtttcccagaaaggacttggaccctctgtggaacacccgagtacctagcccccgaagtcattcagagcaagggccacggaagggccgtggactggtgggccctcggcatcctgatattcgagatgctttcggggtttcctccattttttgatgacaacccgtttggcatttatcagaaaattcttgcaggcaaactatatttccccagacatttggatttcc

SEQ ID NO: 16640 - DNA, 1204 bp, Homo sapiens
  source 1..1204: mol_type = unassigned DNA
atttctgcaccagggaggcttgctgtttgaatgtgtgccaggttgaatggagtctctggcttcagatggattcaagctgaaagaggtttcttctgtgaacagccccccctcccagcccccccagcccgtcgtccctgctaagcccgtgcaatgcgtccatcatgtgtccactcaacccagctgcccaggacggggcaagatgtccaagctgctgaacccagaggagatgacctcgagagattattacttcgactcctatgcccactttgggatccacgaggaaatgctgaaggatgaggtgcggactctcacttaccggaactccatgtaccacaacaagcacgtgttcaaggacaaagtggtactggatgtggggagtggtactgggatcctttccatgttcgctgccaaggcaggggccaagaaggtgtttgggatcgaatgctccagtatttctgactactcagagaagatcattaaggccaaccacttggacaacatcatcaccatatttaagggtaaagtggaagaggtggagctgcctgtggagaaggtggacatcatcatcagcgagtggatgggctactgtctgttctatgagtccatgctcaacacggtgatctttgccagggacaagtggctgaaacctggagggcttatgtttccagaccgggcagctttgtacgtggtagcgattgaagacagacagtacaaggacttcaaaatccactggtgggagaatgtctatggctttgacatgacctgcatccgggacgtggccatgaaggagcctctagtggacatcgtggatccaaagcaagtggtgaccaatgcctgtttgataaaggaggtggacatttacacagtgaagacggaagagctatcgttcacatctgcattctgcctgcagatacagcgcaacgactacgtccacgccctggtcacctattttaatattgaatttaccaagtgccacaagaaaatggggttttccacagcccctgatgctccctacacccactggaagcagaccgtcttctacttggaagattacctcactgtccggaggggggaggaaatctacgggaccatatccatgaagccaaatgccaaaaatgtgcgagacctcgatttcacagtagacttggattttaagggacagctgtgtgaaacatctgtatctaatgactacaaaatgcgttag

SEQ ID NO: 16641 - DNA, 2366 bp, Homo sapiens
  source 1..2366: mol_type = unassigned DNA
agttggcggctgcctccggccggccggactttgcgagcagcctggagaggatccgcgaccgccgccgccgccgccgcggaggcttcggggctgcttccctcgagcttagcccgcagcgcgggtggagaggggcggggagggggtcgggggcacgagaagaacttgaaaccgtgtgaaggaatccggagcagatgagaagggaggaaaataaaagaaagtggagactgcagaacagactccgctgtggctgactgtgccggccgacgctccagctgaggggctgggttggatttttttttttctcccatcctctcgctctctcttttaaagcgacaccagctctctctcctcctctactatctcggtatcaccaaacccttgccggctcttatgggcatgaaacactcctcccgctgcctgctcctgaggaggaaaatggcggagaacgcggccgagagcaccgaggtgaacagccccccctcccagcccccccagcccgtcgtccctgctaagcccgtgcaatgcgtccatcatgtgtccactcaacccagctgcccaggacggggcaagatgtccaagctgctgaacccagaggagatgacctcgagagattattacttcgactcctatgcccactttgggatccacgaggaaatgctgaaggatgaggtgcggactctcacttaccggaactccatgtaccacaacaagcacgtgttcaaggacaaagtggtactggatgtggggagtggtactgggatcctttccatgttcgctgccaaggcaggggccaagaaggtgtttgggatcgaatgctccagtatttctgactactcagagaagatcattaaggccaaccacttggacaacatcatcaccatatttaagggtaaagtggaagaggtggagctgcctgtggagaaggtggacatcatcatcagcgagtggatgggctactgtctgttctatgagtccatgctcaacacggtgatctttgccagggacaagtggctgaaacctggagggcttatgtttccagaccgggcagctttgtacgtggtagcgattgaagacagacagtacaaggacttcaaaatccactggtgggagaatgtctatggctttgacatgacctgcatccgggacgtggccatgaaggagcctctagtggacatcgtggatccaaagcaagtggtgaccaatgcctgtttgataaaggaggtggacatttacacagtgaagacggaagagctatcgttcacatctgcattctgcctgcagatacagcgcaacgactacgtccacgccctggtcacctattttaatattgaatttaccaagtgccacaagaaaatggggttttccacagcccctgatgctccctacacccactggaagcagaccgtcttctacttggaagattacctcactgtccggaggggggaggaaatctacgggaccatatccatgaagccaaatgccaaaaatgtgcgagacctcgatttcacagtagacttggattttaagggacagctgtgtgaaacatctgtatctaatgactacaaaatgcgttagcacacgtgggaagctgcagagagcaacgagaaaaggaactctcacctcgatctgccgtgccgtcccaaagaataccgtttgcaggactacacacttgaaaaccagagttttcaactctgccttgaagattggtgaactccccagggctcccgtgggctctgccactggacagaaggcctccagctcctccgctctgccctggtagcccttcacgaaggctttgtgttgccaacaaagagcgacctggcgtgctgtggctgggccccgagggtggaaacgtattcgcgtctccccgtctcctccttaactgtgactctccgggtcttctgagttttgcatgctgcgggtgtctaggacagattgcttccactagaacctggagacatagcatctttgatagcataagccagattatctgtgtgtgcggtggtgtgcgtgtgcgtgcatgtgtgaatgtgagcagcatagttgatatttacccacaaacacctgtatatgcgtgcatatacaaccaagtgggtagacctaggtgttctctcagaggggtgtgtgtgtgtgtgcgtgcgcgtgtgcctagaatatatattactctcagaggagattctgttgcttttgaataggaatttgttttgtgattagttcgccccttccccaccccttaccagatgttaagcagctatgaaacattctctgtactagttctggtctccttttgactggactgtggctctgaaccttgagcatagtaccacggactccgtgggcgctcaataaacacacatgagaacaaa

SEQ ID NO: 16642 - DNA, 5899 bp, Homo sapiens
  source 1..5899: mol_type = unassigned DNA
ccggactttgcgagcagcctggagaggatccgcgaccgccgccgccgccgccgcggaggcttcggggctgcttccctcgagcttagcccgcagcgcgggtggagaggggcggggagggggtcgggggcacgagaagaacttgaaaccgtgtgaaggaatccggagcagatgagaagggaggaaaataaaagaaagtggagactgcagaacagactccgctgtggctgactgtgccggccgacgctccagctgaggggctgggttggatttttttttttctcccatcctctcgctctctcttttaaagcgacaccagctctctctcctcctctactatctcggtatcaccaaacccttgccggctcttatgggcatgaaacactcctcccgctgcctgctcctgaggaggaaaatggcggagaacgcggccgagagcaccgaggtgaacagccccccctcccagcccccccagcccgtcgtccctgctaagcccgtgcaatgcgtccatcatgtgtccactcaacccagctgcccaggacggggcaagatgtccaagctgctgaacccagaggagatgacctcgagagattattacttcgactcctatgcccactttgggatccacgaggaaatgctgaaggatgaggtgcggactctcacttaccggaactccatgtaccacaacaagcacgtgttcaaggacaaagtggtactggatgtggggagtggtactgggatcctttccatgttcgctgccaaggcaggggccaagaaggtgtttggggtgagcacgccgcttcctcctgcatgctggcttccacagagccagcctcttgccctctgcctccacccgcccttctagaagtacaaaatttggtccatctcttttgctggggtcacaccttcgaggagtagaagaaatcaggtgtgactctcaggaaggggagcaggctgcctgtcccctgtgcatggctcctggatccttacaaccactgacatttgcggaggaactgtggctttcctgagaccattccaatgtcatcatgacctttcagtgcttagccccaaggtcagcttcagaggcagtgcaggtggttactcgggggagctctggtttgaatctctgcatttccattcactaggcatgtgaccttggactattcacttccctgcacctcactttttctccatctataaaatgagcttaatagcagtcccttgcccatagggtgattgtgaggattaaatgagtataatacatatgtaaagtgcttaaaacagtgcccagcatatggcaaatgctcggcgtctattattatagttgagatggggccctagagataatgggaacatctccttcttgttttctttagagggcaagtcggtcaacttaaattctgttgctttggctgtggcagcgtttccaggctagatgtggaggctgaccctctgggaagcctcctacctatcccctggctctcccaaggcagctttgcccagcctgatgacagagggcctgggaaggtccagagctggaaagaaactaaaaagaagagctgcgagatgctggctgatatttgaaaaatgcagtgggcccagggctggagcacaagcattcatcttggtcaaaatgaaaggcaaaccacaatgagattcccagtctgcatgtgagccggcccatttgcagaggcctcagcgacctgagcagcattcagtgggtctttgctcccatgcatttggttgggccatcccatagccagccctggggacccccccccgcccactgactcccaggttgactagatccccctagatcctcctggccacctgctgcctccagaggtctgctcctaagtcacccagcagggcagcattcctcctccaagcctgacttggaaaacccttgggccatggctgccgagggtcttctggaagcttgggctgccctcaagctgcctcaggtgcagctttgaccaggaaaagctgtgacgttctcagccgaggcacttgctgagggcaggggcccatccggaggcccaagggcaggtcatgtcatcatcactggtataactgctggttctccaggatggagacctcaggcaagggtcttagtgaggtcacagggcatcagagctggacttgagtcctctggtgacccccacgtgctttctttcccagcaccgaggccccgtctcagtgccggccttggtgggggacagggctgagcatggtgtccctggcgcctgagtcatccgggggctccagccaaggagctgtcaggaggaggctcccacttggcgccttccagctgcggtgacttggcgcgatctgtctgcctcccgcccttttctctaacagctcttttataaatggctccaccacatttagctgggctcctttccggatggctcatttcacagtttctcctgttccagacccccttccacccactgctgtcctccagtggggagacgagatggcgggagagagagacagagagagagggagggaggaagaccatcgtcccagagtggagacaggcacagagaaagagacagatgtgacaagagcaatggagaggagacagagacagagaaaggtgcagagaaaagctagagaaatgggagaggggcctggaaaagcagaaagaagacaaagtagaaagcacaaaagaaaagaatcggcagaggctggtggatcacctgaggtcaggagttcaagaccagcctggccaacatggcgaaaccctgtctctactaaaaatacaaaaattagccgggcatggtggcgggtgcctgtaattccagctacttggagactgaggctggagaatcgcttgaacccgggaggcggaggttgcagtgagtccagatcgcgccattgcactccagcctgggcgacaaagtgagattttgtctcaaaaaataagaatcagaaaagtgaagacaggtggtaaagagagaagagggaagaaatggaagaggagaagatggaagaaaggaaaatgaggagggaaggacaccgccccgcactctgagtgttgagcaagcttcggctgagtttaccctcacacactcacgtgcattgggggcttcgacttctctcgggaggacactgaggcgcagttaggaagggcagtggccaggcataaatccaggcctggctccgggtcgcatgctcctcatcactcaacatggtcgcctcttgcagatcagatgatgacatggccagagggggagaagaagaggagggaatcacaccccacagacagtgcagcctgaaggccagggacctggcagcccaggaaagggctggttctcctgggacctgcaccctggctggagtcggcctccttggatgcagctctaaccaagtgaccccttctgaccccgtaggtgccctcacccttcctcaaggcgtggccagaggcgtcagaaactccctcagtgcccctttgcgagtacttctcaagggaatggtccctgcccgaggcctgggggtagtctgaggggcccccaagtgtggaggtgagtagagcccagggccttagcacaggccagcctctgtaagagagccggctccggaggtgaggacggctcttggcagctgcccctccatgtccagaacccctggcagtgtgcctgagacgctaaccctgggctggagcttggcttccaaccattcccatgagggcctgctctcagggaaggtccactcatctctcaaataccttggccctttgcttaggaggtctggagagcctggaaagacgtctgaattaaaaggaataatttctttcaaagatgaagcggcgagagctaacgtggggggtgggaggggaagagaaagatcttaaaccagccctgaggtcttgacctggctttttccagatggtcccatcctggcacgcggctcgtttaccctggaagggctgggctgcggtggggaggatcatgtcgagggaggctcgcaactctggcttggatctgccttcccgcgtcccccacggtggggaggacgtactgcctcctgccattctctgctggccaggagcatgaggtctgccagccccttttgagtctccagcacagagatcaatccctccatcacgggtggtgactagacatcagtcttttcgcaaaggcagcccaatttcgtggaaggccgctggccttgaggtgggggggctgggtttcggttttcagtctgccacaaagttgtgatgcagccgtgggcaagtcaccacccctgtctgggcctcagcgtctctatccattgaatcggtgtgggtcttgctgtgattttttttgacgccttgctcctttgtcctatgccctttccagatcgaatgctccagtatttctgactactcagagaagatcattaaggccaaccacttggacaacatcatcaccatatttaagggtaaagtggaagaggtggagctgcctgtggagaaggtggacatcatcatcagcgagtggatgggctactgtctgttctatgagtccatgctcaacacggtgatctttgccagggacaagtggctgaaacctggagggcttatgtttccagaccgggcagctttgtacgtggtagcgattgaagacagacagtacaaggacttcaaaatccactggtgggagaatgtctatggctttgacatgacctgcatccgggacgtggccatgaaggagcctctagtggacatcgtggatccaaagcaagtggtgaccaatgcctgtttgataaaggaggtggacatttacacagtgaagacggaagagctatcgttcacatctgcattctgcctgcagatacagcgcaacgactacgtccacgccctggtcacctattttaatattgaatttaccaagtgccacaagaaaatggggttttccacagcccctgatgctccctacacccactggaagcagaccgtcttctacttggaagattacctcactgtccggaggggggaggaaatctacgggaccatatccatgaagccaaatgccaaaaatgtgcgagacctcgatttcacagtagacttggattttaagggacagctgtgtgaaacatctgtatctaatgactacaaaatgcgttagcacacgtgggaagctgcagagagcaacgagaaaaggaactctcacctcgatctgccgtgccgtcccaaagaataccgtttgcaggactacacacttgaaaaccagagttttcaactctgccttgaagattggtgaactccccagggctcccgtgggctctgccactggacagaaggcctccagctcctccgctctgccctggtagcccttcacgaaggctttgtgttgccaacaaagagcgacctggcgtgctgtggctgggccccgagggtggaaacgtattcgcgtctccccgtctcctccttaactgtgactctccgggtcttctgagttttgcatgctgcgggtgtctaggacagattgcttccactagaacctggagacatagcatctttgatagcataagccagattatctgtgtgtgcggtggtgtgcgtgtgcgtgcatgtgtgaatgtgagcagcatagttgatatttacccacaaacacctgtatatgcgtgcatatacaaccaagtgggtagacctaggtgttctctcagaggggtgtgtgtgtgtgtgcgtgcgcgtgtgcctagaatatatattactctcagaggagattctgttgcttttgaataggaatttgttttgtgattagttcgccccttccccaccccttaccagatgttaagcagctatgaaacattctctgtactagttctggtctccttttgactggactgtggctctgaaccttgagcatagtaccacggactccgtgggcgctcaataaacacacatgagaac

SEQ ID NO: 16643 - DNA, 2595 bp, Homo sapiens
  source 1..2595: mol_type = unassigned DNA
attctctttcctgtgaacctccagaacaatttgcttgaacttctcttgtagaacaaaccttattccagcatctatcagagacaataagggtcttagaatctagaaaacagggtcctgggagggcacagttcccacacgtctatttcttccacaggacctgcacgctgccttgctgttggagatctgtgcagtaggcagttgtggaattaaaagcaacaccccatgtcgctgaatgttcagggatcacaggccactgccgtttcccacccactcccagcctccggggagtcttagcctgtggagtcccaggaagcacatggaaaagagagccttggaaccagagtggagtgacagctaaggggtgctggaggcccctgtgaccttgaccatgcacaatgcccagaccagctccgactttttcctctccttcacatatttaaatggagtcgatattggggtcagcttcatgcacggagccttcttcagctttagaggtgaacagccccccctcccagcccccccagcccgtcgtccctgctaagcccgtgcaatgcgtccatcatgtgtccactcaacccagctgcccaggacggggcaagatgtccaagctgctgaacccagaggagatgacctcgagagattattacttcgactcctatgcccactttgggatccacgaggaaatgctgaaggatgaggtgcggactctcacttaccggaactccatgtaccacaacaagcacgtgttcaaggacaaagtggtactggatgtggggagtggtactgggatcctttccatgttcgctgccaaggcaggggccaagaaggtgtttggggtgccctcacccttcctcaaggcgtggccagaggcgtcagaaactccctcagtgcccctttgcgagtacttctcaagggaatggtccctgcccgaggcctgggggtagtctgaggggcccccaagtgtggagatcgaatgctccagtatttctgactactcagagaagatcattaaggccaaccacttggacaacatcatcaccatatttaagggtaaagtggaagaggtggagctgcctgtggagaaggtggacatcatcatcagcgagtggatgggctactgtctgttctatgagtccatgctcaacacggtgatctttgccagggacaagtggctgaaacctggagggcttatgtttccagaccgggcagctttgtacgtggtagcgattgaagacagacagtacaaggacttcaaaatccactggctactgggaaataaatggccagcagaaagaagaaaaaaaaatctaatcccttgggtgatctgtgctctgaatgattgaaggtggggcagtccagctgaggagataagacccaaattaacccatataaagggtgggagaatgtctatggctttgacatgacctgcatccgggacgtggccatgaaggagcctctagtggacatcgtggatccaaagcaagtggtgaccaatgcctgtttgataaagatacagcgcaacgactacgtccacgccctggtcacctattttaatattgaatttaccaagtgccacaagaaaatggggttttccacagcccctgatgctccctacacccactggaagcagaccgtcttctacttggaagattacctcactgtccggaggggggaggaaatctacgggaccatatccatgaagccaaatgccaaaaatgtgcgagacctcgatttcacagtagacttggattttaagggacagctgtgtgaaacatctgtatctaatgactacaaaatgcgttagcacacgtgggaagctgcagagagcaacgagaaaaggaactctcacctcgatctgccgtgccgtcccaaagaataccgtttgcaggactacacacttgaaaaccagagttttcaactctgccttgaagattggtgaactccccagggctcccgtgggctctgccactggacagaaggcctccagctcctccgctctgccctggtagcccttcacgaaggctttgtgttgccaacaaagagcgacctggcgtgctgtggctgggccccgagggtggaaacgtattcgcgtctccccgtctcctccttaactgtgactctccgggtcttctgagttttgcatgctgcgggtgtctaggacagattgcttccactagaacctggagacatagcatctttgatagcataagccagattatctgtgtgtgcggtggtgtgcgtgtgcgtgcatgtgtgaatgtgagcagcatagttgatatttacccacaaacacctgtatatgcgtgcatatacaaccaagtgggtagacctaggtgttctctcagaggggtgtgtgtgtgtgtgcgtgcgcgtgtgcctagaatatatattactctcagaggagattctgttgcttttgaataggaatttgttttgtgattagttcgccccttccccaccccttaccagatgttaagcagctatgaaacattctctgtactagttctggtctccttttgactggactgtggctctgaaccttgagcatagtaccacggactccgtgggcgctcaataaacacacatgagaacaaa

SEQ ID NO: 16644 - DNA, 3528 bp, Homo sapiens
  source 1..3528: mol_type = unassigned DNA
agcgtgcgccgctggccaggtgcgcaatagtggggtatgcgtcacggtctgcgccgcccgcggggccaggacggggcggagcttccgcctgggctggggttggcgagttcacccgcggcggagggtaactttgctgtgctgttttttgagcagttgtctggtccctggaagtgtagcatcgagagagttttctaattacgtttacaaaatatcttccctttggccatacaagtggtgactgccatgtcgaactcgcggcccaggtcccgccgagacgccgggggtggcgctggggcagccggccgggacgagctggtgtcgcggtccttgcagagcgcagagcactgtctgggcgtccaggacttcggcactgcctatgcccactacctcctcgtgctcagcctggcgccggagctgaaacacgacgtgaaggaaacttttcagtacacacttttcagatgggctgaagagcttgatgctctcagtcggatacaagacttacttggttgctatgagcaggccttggaactgtttcctgatgatgaagtgatttgcaatagtatgggggagcatctcttcagaatgggctttagggatgaagcagctgggtattttcataaagcagtgaagctaaaccctgatttcagtgatgcaaaggagaatttttatcgtgttgcaaactggttggtggaacgctggcactttatcatgcttaatgacaccaagaggaatacaatttataatgcagcaatccaaaaggcagtttgtttggggtccaaaagtgttttggacattggagcaggaactggaatactaagcatgtttgctaaaaaagctggagcacattccgtgtatgcctgtgagttatccaagaccatgtatgaacttgcctgtgatgtcgtggcagcaaacaagatggaagcagggatcaaactcttacatacgaagtcacttgacatagagattccaaaacatattcccgaaagagtgtccctagttgtaacagaaactgtcgatgcaggtttatttggagaaggaattgtggagagtttgattcatgcatgggagcatttacttttacagccaaagaccaaaggtgaaagtgctaattgtgaaaagtatgggaaagttataccagcaagtgctgttatatttgggatggcagtagaatgtgcagagataagaagacatcatagagtgggtattaaggacattgctggtatccatttgccaacaaatgtgaaatttcagagtccggcttattcttctgtagatactgaagaaacaattgaaccttatacaactgaaaagatgagtcgagttcctggaggatatttggctttgacagagtgctttgaaattatgacagtagatttcaacaaccttcaggaattaaaaagtcttgcaactaaaaagcctgataagattggtattcctgttattaaagaaggcatactagatgctattatggtttggtttgtgctccagcttgatgatgaacatagtttatccacaagtcctagtgaggaaacatgttgggaacaggctgtctaccccgtacaggaccttgcagactactggataaagcctggagaccatgtgatgatggaagtatcttgtcaagactgttacttaagaatccagagtattagtgtcttgggtttggaatgtgaaatggatgttgcaaaaagttttacccagaataaagacttgttatcgttaggaaatgaggctgaactttgtagtgccctcgctaaccttcagaccagtaaaccagatgctgtagagcagacatgtatattggaatctacagaaattgctttgcttaacaacatcccatatcatgaaggctttaaaatggcaatgagcaaagttttgtcttcactgactccagagaaactgtatcagaccatggatactcactgtcagaatgagatgagctctggaactggacagagtaatactgtacagaacatccttgaacctttctacgtgttagatgtgtccgaaggcttctctgttctgcctgttattgctggcacacttgggcaggttaaaccatacagttctgtggagaaagaccagcatcgtattgctctggacctcatatctgaagccaatcactttcctaaagaaacacttgagttttggctgagacatgtggaggatgaatctgctatgttacaaaggccaaaatcagacaagttatggagcataattatattggatgtcattgagccatctgggctcattcagcaggaaataatggaaaaagctgcaatatccaggtgtttactacaatctggaggcaagatctttcctcagtatgtgctgatgtttgggttgcttgtggaatcacagacactcctagaggagaatgctgttcaaggaacagaacgtactcttggattaaatatagcaccttttattaaccagtttcaggtacctatacgtgtatttttggacctatcctcattgccctgtatacctttaagcaagccagtggaactcttaagactagatttaatgactccgtatttgaacacctctaacagagaagtaaaggtatacgtttgtaaatctggaagactgactgctattccattttggtatcatatgtaccttgatgaagagattaggttggatacttcaagtgaagcctcccactggaaacaagctgcagttgttttagataatcccatccaggttgaaatgggagaggaacttgtactcagcattcagcatcacaaaagcaatgtcagcatcacagtaaagcaatgaagagcagttttccaatgaaaactgtgtaaatagagcatcaacaagtacaaaattcttgtcttaattagtgggggtatataaaaattccttgtaatggtcaaatattttttaaaattgacattaataaagcatattttaaaagattctaaataaaagggtagcattattatagaaatactgctgcagatttgctttctggaaaaggatacatcactagttttttaaattaggaaacttcttttgctcgattttacagaatagggattttaaaagtcttatcgttattgacatgtgtaagtaaagcaaaactttacttttgtaggcatcttggccttttttcttaaatccaaacttgtaattgggaaacactgaaaggcttccactgaagactgagggttatggttacctgtaaattccaatcttgcttcctttaaatactcagtgtacatctgaaacatctcaggttttgttttgagaatgcaagcttgaaaaagaatttaagctataagctaaatgtaattaaaacagtaaaggagttagggaatacatcttcaggaggcagcatttttcttggtctactttggcaaaagaacatttaaaagctggtaacaaaacaaagttaaattgaaggaagacttaatcctatactatttttcaaagttttgatttggatgtacaataagtacattaattgatccaatttttacaaacttttgaaataaaggaagatcattattatgcctccta

SEQ ID NO: 16645 - DNA, 2012 bp, Homo sapiens
  source 1..2012: mol_type = unassigned DNA
acaaatatcttagttgcttgctttttactttattacagggtgtttttttttttttttagtgagcagacattcttaattttattatagacctatttatagttgttttcctttatagttagtggttttatatgtgtgtgtattatgtagttatgtttaagaaatctttgctcatgaggttttatttcatttttgtatttttttctggactcagtattagatatgttacttgattctaaaaaaatccatcttcctacccctcccctattttctctctctccagagtgggtattaaggacattgctggtatccatttgccaacaaatgtgaaatttcagagtccggcttattcttctgtagatactgaagaaacaattgaaccttatacaactgaaaagatgagtcgagttcctggaggatatttggctttgacagagtgctttgaaattatgacagtagatttcaacaaccttcaggaattaaaaagtcttgcaactaaaaagcctgataagattggtattcctgttattaaagaaggcatactagatgctattatggtttggtttgtgctccagcttgatgatgaacatagtttatccacaagtcctagtgaggaaacatgttgggaacaggctgtctaccccgtacaggaccttgcagactactggataaagcctggagaccatgtgatgatggaagtatcttgtcaagactgttacttaagaatccagagtattagtgtcttgggtttggaatgtgaaatggatgttgcaaaaagttttacccagaataaagacttgttatcgttaggaaatgaggctgaactttgtagtgccctcgctaaccttcagaccagtaaaccagatgctgtagagcagacatgtatattggaatctacagaaattgctttgcttaacaacatcccatatcatgaaggctttaaaatggcaatgagcaaagttttgtcttcactgactccagagaaactgtatcagaccatggatactcactgtcagaatgagatgagctctggaactggacagagtaatactgtacagaacatccttgaacctttctacgtgttagatgtgtccgaaggcttctctgttctgcctgttattgctggcacacttgggcaggttaaaccatacagttctgtggagaaagaccagcatcgtattgctctggacctcatatctgaagccaatcactttcctaaagaaacacttgagttttggctgagacatgtggaggatgaatctgctatgttacaaaggccaaaatcagacaagttatggagcataattatattggatgtcattgagccatctgggctcattcagcaggaaataatggaaaaagctgcaatatccaggtgtttactacaatctggaggcaagatctttcctcagtatgtgctgatgtttgggttgcttgtggaatcacagacactcctagaggagaatgctgttcaaggaacagaacgtactcttggattaaatatagcaccttttattaaccagtttcaggtacctatacgtgtatttttggacctatcctcattgccctgtatacctttaagcaagccagtggaactcttaagactagatttaatgactccgtatttgaacacctctaacagagaagtaaaggtatacgtttgtaaatctggaagactgactgctattccattttggtatcatatgtaccttgatgaagagattaggttggatacttcaagtgaagcctcccactggaaacaagctgcagttgttttagataatcccatccaggttgaaatgggagaggaacttgtactcagcattcagcatcacaaaagcaatgtcagcatcacagtaaagcaatgaagagcagttttccaatgaaaactgtgtaaatagagcatcaacaagtacaaaattcttgtcttaattagtgggggtatataaaaattccttgtaatggtcaaatattttttaaaattgacattaataaagcatattttaaaagattct

SEQ ID NO: 16646 - DNA, 2674 bp, Homo sapiens
  source 1..2674: mol_type = unassigned DNA
agttcacccgcggcggagggtaactttgctgtgctgttttttgagcagttgtctggtccctggaagtgtagcatcgagagagttttctaattacgtttacaaaatatcttccctttggccatacaagtggtgactgccatgtcgaactcgcggcccaggtcccgccgagacgccgggggtggcgctggggcagccggccgggacgagctggtgtcgcggtccttgcagagcgcagagcactgtctgggcgtccaggacttcggcactgcctatgcccactacctcctcgtgctcagcctggcgccggagctgaaacacgacgtgaagaatgggctttagggatgaagcagctgggtattttcataaagcagtgaagctaaaccctgatttcagtgatgcaaaggagaatttttatcgtgttgcaaactggttggtggaacgctggcactttatcatgcttaatgacaccaagaggaatacaatttataatgcagcaatccaaaaggcagtttgtttggggtccaaaagtgttttggacattggagcaggaactggaatactaagcatgtttgctaaaaaagctggagcacattccgtgtatgcctgtgagttatccaagaccatgtatgaacttgcctgtgatgtcgtggcagcaaacaagatggaagcagggatcaaactcttacatacgaagtcacttgacatagagattccaaaacatattcccgaaagagtgtccctagttgtaacagaaactgtcgatgcaggtttatttggagaaggaattgtggagagtttgattcatgcatgggagcatttacttttacagccaaagaccaaaggtgaaagtgctaattgtgaaaagtatgggaaagttataccagcaagtgctgttatatttgggatggcagtagaatgtgcagagataagaagacatcatagagtgggtattaaggacattgctggtatccatttgccaacaaatgtgaaatttcagagtccggcttattcttctgtagatactgaagaaacaattgaaccttatacaactgaaaagatgagtcgagttcctggaggatatttggctttgacagagtgctttgaaattatgacagtagatttcaacaaccttcaggaattaaaaagtcttgcaactaaaaagcctgataagattggtattcctgttattaaagaaggcatactagatgctattatggtttggtttgtgctccagcttgatgatgaacatagtttatccacaagtcctagtgaggaaacatgttgggaacaggctgtctaccccgtacaggaccttgcagactactggataaagcctggagaccatgtgatgatggaagtatcttgtcaagactgttacttaagaatccagagtattagtgtcttgggtttggaatgtgaaatggatgttgcaaaaagttttacccagaataaagacttgttatcgttaggaaatgaggctgaactttgtagtgccctcgctaaccttcagaccagtaaaccagatgctgtagagcagacatgtatattggaatctacagaaattgctttgcttaacaacatcccatatcatgaaggctttaaaatggcaatgagcaaagttttgtcttcactgactccagagaaactgtatcagaccatggatactcactgtcagaatgagatgagctctggaactggacagagtaatactgtacagaacatccttgaacctttctacgtgttagatgtgtccgaaggcttctctgttctgcctgttattgctggcacacttgggcaggttaaaccatacagttctgtggagaaagaccagcatcgtattgctctggacctcatatctgaagccaatcactttcctaaagaaacacttgagttttggctgagacatgtggaggatgaatctgctatgttacaaaggccaaaatcagacaagttatggagcataattatattggatgtcattgagccatctgggctcattcagcaggaaataatggaaaaagctgcaatatccaggtgtttactacaatctggaggcaagatctttcctcagtatgtgctgatgtttgggttgcttgtggaatcacagacactcctagaggagaatgctgttcaaggaacagaacgtactcttggattaaatatagcaccttttattaaccagtttcaggtacctatacgtgtatttttggacctatcctcattgccctgtatacctttaagcaagccagtggaactcttaagactagatttaatgactccgtatttgaacacctctaacagagaagtaaaggtatacgtttgtaaatctggaagactgactgctattccattttggtatcatatgtaccttgatgaagagattaggttggatacttcaagtgaagcctcccactggaaacaagctgcagttgttttagataatcccatccaggttgaaatgggagaggaacttgtactcagcattcagcatcacaaaagcaatgtcagcatcacagtaaagcaatgaagagcagttttccaatgaaaactgtgtaaatagagcatcaacaagtacaaaattcttgtcttaattagtgggggtatataaaaattccttgtaatggtcaaatattttttaaaattgacattaataaagcatattttaaaagattct

SEQ ID NO: 16647 - DNA, 401 bp, Homo sapiens
  source 1..401: mol_type = unassigned DNA
tttttgtactggaacaatgaaagttctaatgaaagccagccttagcttgatgtgggaatataaaggaggtaatgtaaaaagcattctgtcaagtactattgagtcaagtacaaagcaatccctgaccacaaaaggaatgtgtaaaagtgaaaaacttgagccctgaccacaaaaagaaaaagtgaaagtgaaaaatttatactttctctaggtacctatacgtgtatttttggacctatcctcattgccctgtatacctttaagcaagccagtggaactcttaagactagatttaatgactccgtatttgaacacctctaacagagaagtaaaggtatacgtttgtaaatctggaagactgactgctattccattttggtatcatatgtaccttgatgaag

SEQ ID NO: 16648 - DNA, 2657 bp, Homo sapiens
  source 1..2657: mol_type = unassigned DNA
gaatctcaactcgttttttccggtgactcattcccggccctgcttggcagcgctgcaccctttaacttaaacctcggccggccgcccgccgggggcacagagtgtgcgccgggccgcgcggcaattggtccccgcgccgacctccgcccgcgagcgccgccgcttcccttccccgccccgcgtccctccccctcggccccgcgcgtcgcctgtcctccgagccagtcgctgacagccgcggcgccgcgagcttctcctctcctcacgaccgaggcagagcagtcattatggcgaaccttggctgctggatgctggttctctttgtggccacatggagtgacctgggcctctgcaagaagcgcccgaagcctggaggatggaacactgggggcagccgatacccggggcagggcagccctggaggcaaccgctacccacctcagggcggtggtggctgggggcagcctcatggtggtggctgggggcagcctcatggtggtggctgggggcagccccatggtggtggctggggacagcctcatggtggtggctggggtcaaggaggtggcacccacagtcagtggaacaagccgagtaagccaaaaaccaacatgaagcacatggctggtgctgcagcagctggggcagtggtggggggccttggcggctacatgctgggaagtgccatgagcaggcccatcatacatttcggcagtgactatgaggaccgttactatcgtgaaaacatgcaccgttaccccaaccaagtgtactacaggcccatggatgagtacagcaaccagaacaactttgtgcacgactgcgtcaatatcacaatcaagcagcacacggtcaccacaaccaccaagggggagaacttcaccgagaccgacgttaagatgatggagcgcgtggttgagcagatgtgtatcacccagtacgagagggaatctcaggcctattaccagagaggatcgagcatggtcctcttctcctctccacctgtgatcctcctgatctctttcctcatcttcctgatagtgggatgaggaaggtcttcctgttttcaccatctttctaatctttttccagcttgagggaggcggtatccacctgcagcccttttagtggtggtgtctcactctttcttctctctttgtcccggataggctaatcaatacccttggcactgatgggcactggaaaacatagagtagacctgagatgctggtcaagccccctttgattgagttcatcatgagccgttgctaatgccaggccagtaaaagtataacagcaaataaccattggttaatctggacttatttttggacttagtgcaacaggttgaggctaaaacaaatctcagaacagtctgaaatacctttgcctggatacctctggctccttcagcagctagagctcagtatactaatgccctatcttagtagagatttcatagctatttagagatattttccattttaagaaaacccgacaacatttctgccaggtttgttaggaggccacatgatacttattcaaaaaaatcctagagattcttagctcttgggatgcaggctcagcccgctggagcatgagctctgtgtgtaccgagaactggggtgatgttttacttttcacagtatgggctacacagcagctgttcaacaagagtaaatattgtcacaacactgaacctctggctagaggacatattcacagtgaacataactgtaacatatatgaaaggcttctgggacttgaaatcaaatgtttgggaatggtgcccttggaggcaacctcccattttagatgtttaaaggaccctatatgtggcattcctttctttaaactataggtaattaaggcagctgaaaagtaaattgccttctagacactgaaggcaaatctcctttgtccatttacctggaaaccagaatgattttgacatacaggagagctgcagttgtgaaagcaccatcatcatagaggatgatgtaattaaaaaatggtcagtgtgcaaagaaaagaactgcttgcatttctttatttctgtctcataattgtcaaaaaccagaattaggtcaagttcatagtttctgtaattggcttttgaatcaaagaatagggagacaatctaaaaaatatcttaggttggagatgacagaaatatgattgatttgaagtggaaaaagaaattctgttaatgttaattaaagtaaaattattccctgaattgtttgatattgtcacctagcagatatgtattacttttctgcaatgttattattggcttgcactttgtgagtattctatgtaaaaatatatatgtatataaaatatatattgcataggacagacttaggagttttgtttagagcagttaacatctgaagtgtctaatgcattaacttttgtaaggtactgaatacttaatatgtgggaaacccttttgcgtggtccttaggcttacaatgtgcactgaatcgtttcatgtaagaatccaaagtggacaccattaacaggtctttgaaatatgcatgtactttatattttctatatttgtaactttgcatgttcttgttttgttatataaaaaaattgtaaatgtttaatatctgactgaaattaaacgagcgaagatgagcaccacc

SEQ ID NO: 16649 - DNA, 2539 bp, Homo sapiens
  source 1..2539: mol_type = unassigned DNA
cgcgcggcaattggtccccgcgccgacctccgcccgcgagcgccgccgcttcccttccccgccccgcgtccctccccctcggccccgcgcgtcgcctgtcctccgagccagtcgctgacagccgcggcgccgcgagcttctcctctcctcacgaccgagagcagtcattatggcgaaccttggctgctggatgctggttctctttgtggccacatggagtgacctgggcctctgcaagaagcgcccgaagcctggaggatggaacactgggggcagccgatacccggggcagggcagccctggaggcaaccgctacccacctcagggcggtggtggctgggggcagcctcatggtggtggctgggggcagcctcatggtggtggctgggggcagccccatggtggtggctggggacagcctcatggtggtggctggggtcaaggaggtggcacccacagtcagtggaacaagccgagtaagccaaaaaccaacatgaagcacatggctggtgctgcagcagctggggcagtggtggggggccttggcggctacatgctgggaagtgccatgagcaggcccatcatacatttcggcagtgactatgaggaccgttactatcgtgaaaacatgcaccgttaccccaaccaagtgtactacaggcccatggatgagtacagcaaccagaacaactttgtgcacgactgcgtcaatatcacaatcaagcagcacacggtcaccacaaccaccaagggggagaacttcaccgagaccgacgttaagatgatggagcgcgtggttgagcagatgtgtatcacccagtacgagagggaatctcaggcctattaccagagaggatcgagcatggtcctcttctcctctccacctgtgatcctcctgatctctttcctcatcttcctgatagtgggatgaggaaggtcttcctgttttcaccatctttctaatctttttccagcttgagggaggcggtatccacctgcagcccttttagtggtggtgtctcactctttcttctctctttgtcccggataggctaatcaatacccttggcactgatgggcactggaaaacatagagtagacctgagatgctggtcaagccccctttgattgagttcatcatgagccgttgctaatgccaggccagtaaaagtataacagcaaataaccattggttaatctggacttatttttggacttagtgcaacaggttgaggctaaaacaaatctcagaacagtctgaaatacctttgcctggatacctctggctccttcagcagctagagctcagtatactaatgccctatcttagtagagatttcatagctatttagagatattttccattttaagaaaacccgacaacatttctgccaggtttgttaggaggccacatgatacttattcaaaaaaatcctagagattcttagctcttgggatgcaggctcagcccgctggagcatgagctctgtgtgtaccgagaactggggtgatgttttacttttcacagtatgggctacacagcagctgttcaacaagagtaaatattgtcacaacactgaacctctggctagaggacatattcacagtgaacataactgtaacatatatgaaaggcttctgggacttgaaatcaaatgtttgggaatggtgcccttggaggcaacctcccattttagatgtttaaaggaccctatatgtggcattcctttctttaaactataggtaattaaggcagctgaaaagtaaattgccttctagacactgaaggcaaatctcctttgtccatttacctggaaaccagaatgattttgacatacaggagagctgcagttgtgaaagcaccatcatcatagaggatgatgtaattaaaaaatggtcagtgtgcaaagaaaagaactgcttgcatttctttatttctgtctcataattgtcaaaaaccagaattaggtcaagttcatagtttctgtaattggcttttgaatcaaagaatagggagacaatctaaaaaatatcttaggttggagatgacagaaatatgattgatttgaagtggaaaaagaaattctgttaatgttaattaaagtaaaattattccctgaattgtttgatattgtcacctagcagatatgtattacttttctgcaatgttattattggcttgcactttgtgagtattctatgtaaaaatatatatgtatataaaatatatattgcataggacagacttaggagttttgtttagagcagttaacatctgaagtgtctaatgcattaacttttgtaaggtactgaatacttaatatgtgggaaacccttttgcgtggtccttaggcttacaatgtgcactgaatcgtttcatgtaagaatccaaagtggacaccattaacaggtctttgaaatatgcatgtactttatattttctatatttgtaactttgcatgttcttgttttgttatataaaaaaattgtaaatgtttaatatctgactgaaattaaacgagcgaagatgagcaccacc

SEQ ID NO: 16650 - DNA, 806 bp, Homo sapiens
  source 1..806: mol_type = unassigned DNA
agtcgctgacagccgcggcgccgcgagcttctcctctcctcacgaccgaggcagtcattatggcgaaccttggctgctggatgctggttctctttgtggccacatggagtgacctgggcctctgcaagaagcgcccgaagcctggaggatggaacactgggggcagccgatacccggggcagggcagccctggaggcaaccgctacccacctcagggcggtggtggctgggggcagcctcatggtggtggctgggggcagcctcatggtggtggctgggggcagccccatggtggtggctggggacagcctcatggtggtggctggggtcaaggaggtggcacccacagtcagtggaacaagccgagtaagccaaaaaccaacatgaagcacatggctggtgctgcagcagctggggcagtggtggggggccttggcggctacatgctgggaagtgccatgagcaggcccatcatacatttcggcagtgactatgaggaccgttactatcgtgaaaacatgcaccgttaccccaaccaagtgtactacaggcccatggatgagtacagcaaccagaacaactttgtgcacgactgcgtcaatatcacaatcaagcagcacacggtcaccacaaccaccaagggggagaacttcaccgagaccgacgttaagatgatggagcgcgtggttgagcagatgtgtatcacccagtacgagagggaatctcaggcctattaccagagaggatcgagcatggtcctcttctcctctccacctgtgatcctcctgatctctttcctcatcttc

SEQ ID NO: 16651 - DNA, 855 bp, Homo sapiens
  source 1..855: mol_type = unassigned DNA
gggggcaggggagccgcgggggccgagtgaggaccccgggcctcgggtcccaggcgcaagggtgcccggccgggcggggtcgggaccccagtgaggaggggccgggggctgccccgcgggcgcgtgacgcgtctcgggcctgcccggctgcgctggtctccgctcgggtgaggcggcttggcttcgcttttcagagcagtcattatggcgaaccttggctgctggatgctggttctctttgtggccacatggagtgacctgggcctctgcaagaagcgcccgaagcctggaggatggaacactgggggcagccgatacccggggcagggcagccctggaggcaaccgctacccacctcagggcggtggtggctgggggcagcctcatggtggtggctgggggcagcctcatggtggtggctgggggcagccccatggtggtggctggggacagcctcatggtggtggctggggtcaaggaggtggcacccacagtcagtggaacaagccgagtaagccaaaaaccaacatgaagcacatggctggtgctgcagcagctggggcagtggtggggggccttggcggctacatgctgggaagtgccatgagcaggcccatcatacatttcggcagtgactatgaggaccgttactatcgtgaaaacatgcaccgttaccccaaccaagtgtactacaggcccatggatgagtacagcaaccagaacaactttgtgcacgactgcgtcaatatcacaatcaagcagcacacggtcaccacaaccaccaagggggagaacttcaccgagaccgacgttaagatgatggagcgcgtggttgagcagatgtgtatcacccag

SEQ ID NO: 16652 - DNA, 1348 bp, Homo sapiens
  source 1..1348: mol_type = unassigned DNA
cttctcttttccctagactgcagccagcggagcccgcagccggcccgagccaggaacccaggtccggagcctcaacttcaggatgttgacaacattgctgccgatactgctgctgtctggctgggccttttgtagccaagacgcctcagatggcctccaaagacttcatatgctccagatctcctacttccgcgacccctatcacgtgtggtaccagggcaacgcgtcgctggggggacacctaacgcacgtgctggaaggcccagacaccaacaccacgatcattcagctgcagcccttgcaggagcccgagagctgggcgcgcacgcagagtggcctgcagtcctacctgctccagttccacggcctcgtgcgcctggtgcaccaggagcggaccttggcctttcctctgaccatccgctgcttcctgggctgtgagctgcctcccgagggctctagagcccatgtcttcttcgaagtggctgtgaatgggagctcctttgtgagtttccggccggagagagccttgtggcaggcagacacccaggtcacctccggagtggtcaccttcaccctgcagcagctcaatgcctacaaccgcactcggtatgaactgcgggaattcctggaggacacctgtgtgcagtatgtgcagaaacatatttccgcggaaaacacgaaagggagccaaacaagccgctcctacacttcgctggtcctgggcgtcctggtgggcagtttcatcattgctggtgtggctgtaggcatcttcctgtgcacaggtggacggcgatgttaattactctccagccccctcagaaggggctggattgatggaggctggcaagggaaagtttcagctcactgtgaagccagactccccaactgaaacaccagaaggtttggagtgacagctcctttcttctcccacatctgcccactgaagatttgagggaggggagatggagaggagaggtggacaaagtacttggtttgctaagaacctaagaacgtgtatgctttgctgaattagtctgataagtgaatgtttatctatctttgtggaaaacagataatggagttggggcaggaagcctatggcccatcctccaaagacagacagaatcacctgaggcgttcaaaagatataaccaaataaacaagtcatccacaatcaaaatacaacattcaatacttccaggtgtgtcagacttgggatgggacgctgatataatagggtagaaagaagtaacacgaagaagtggtggaaatgtaaaatccaagtcatatggcagtgatcaattattaatcaattaataatattaataaatttcttatatttaaggca

SEQ ID NO: 16653 - DNA, 642 bp, Homo sapiens
  source 1..642: mol_type = unassigned DNA
cctacttccgcgacccctatcacgtgtggtaccagggcaacgcgtcgctggggggacacctaacgcacgtgctggaaggcccagacaccaacaccacgatcattcagctgcagcccttgcaggagcccgagagctgggcgcgcacgcagagtggcctgcagtcctacctgctccagttccacggcctcgtgcgcctggtgcaccaggagcggaccttggcctttcctctgaccatccgctgcttcctgggctgtgagctgcctcccgagggctctagagcccatgtcttcttcgaagtggctgtgaatgggagctcctttgtgagtttccggccggagagagccttgtggcaggcagacacccaggtcacctccggagtggtcaccttcaccctgcagcagctcaatgcctacaaccgcactcggtatgaactgcgggaattcctggaggacacctgtgtgcagtatgtgcagaaacatatttccgcggaaaacacgaaagataatggagttggggcaggaagcctatggcccatcctccaaagacagacagaatcacctgaggcgttcaaaagatataaccaaataaacaagtcatccacaatcaaaatacaacattcaatacttccagatctctactaag

SEQ ID NO: 16654 - DNA, 442 bp, Homo sapiens
  source 1..442: mol_type = unassigned DNA
gcctacaaccgcactcggtatgaactgcgggaattcctggaggacacctgtgtgcagtatgtgcagaaacatatttccgcggaaaacacgaaagatctctactaagaatgtcactctggccgggcgcagtggctcactcctgtaatcccagcactttgggaggccgaggcaggaggatcacttgaggttgggagttcgagaccagcatgaccaacatggaaaaaccccgtctctactaaaaatacaaaattagccaggcgtggtggtgcatgtctgtaatcccagctactcgggaggctgaggcaggagaatcacttgaacccgggaggcaggggttgcggtgagccgagatcacaccattgcactccagcctgggctacaagagcgaaactctgtctcaaataaataaataaataaaacaaaataaaaaataaagaatgtc

SEQ ID NO: 16655 - DNA, 3106 bp, Homo sapiens
  source 1..3106: mol_type = unassigned DNA
gtcccgccatggctctgaggcgcgccctgcccgcgctgcgcccctgcattccccgcttcgtcccgctgtccacggcgccggcctcccgcgagcagcccgcagcgggcccagcggccgtgccaggaggtgggtcggccacggcagtgcggccgccggtgcccgccgtggacttcggcaacgcgcaggaggcgtaccgcagccggcgaacctgggagctggcgcggagcctgctggtgctgcgcttgtgcgcctggcccgcgctgctggcgcgccacgagcagctgctgtatgtttccaggaaacttctaggacagaggctattcaacaagctcatgaagatgaccttctatgggcattttgtagccggggaggaccaggagtccatccagcccctgcttcggcactacagggccttcggtgtcagcgccatcctggactatggagtggaggaggacctgagccccgaggaggcagagcacaaggagatggagtcctgcacctcagctgcggagagggatggcagtggcacgaataagcgggacaagcaataccaggcccactgggccttcggggaccgcaggaatggtgtcatcagtgcccgcacctacttctacgccaatgaggccaagtgcgacagccacatggagacattcttgcgctgcatcgaagcctcaggtagagtcagcgatgacggcttcatagccattaagctcacagcactggggagaccccagtttctgctgcagttctcagaggtgctggccaagtggaggtgcttctttcaccaaatggctgtggagcaagggcaggcgggcctggctgccatggacaccaagctggaggtggcggtgctgcaggaaagtgtcgcaaagttgggcatcgcatccagggctgagattgaggactggttcacggcagagaccctgggagtgtctgggtgagagcagcccccaggctgagaggacacgagcatcagccatggttccagccaagccccagtgacgtctcccagtcctggctgccctgcctgagagggtgggccctgggatgacagtgctgaaggaactgcttttcacacagcaggacttgatggcttcaggagtccctgaggctggggctgggctgggcaggggagacacagggccagcacagaccccatagagggctctttatagaattatctgggtccagagcaaaggtggcactctcagccctccctggagtccacgccggcaggtgaaggatcagagccccatgccccatccttggagccaggggctgggacccagatcaccaggagcctccagttgaagtggggaggtgactggggtggtgcagtagtgagccatcccctcacacactgccagccttgcccactgtgtcctccctggccgcccggagctgtgtccgcctcctgcctggctgcctgtgctcggcccctccacaagcccaaaacagcctagggtactcagtgttttcagagccgcctagatgcaggactgtttgtgttttggttttaaatttatttaattaatttattttttatagagaccaggtctcaccatgttgcccaggctggtttcaaacccctgggctcaagtgacctgcccgccgcagcccccaaagtgctgggattataagtttgagcccccgcatgccactggttttaaatttttaaacagaaaacaatatttatatttcctctgtcttttaaaactgaacaccgaggtgggttttgtggtgggtggtgaacggacaggtttgggcctcgatcccccacccgaccctagcacccacaggtgggggtgccccctctgctgatgcgcctcctccctcagcaccatggacctgctggactggagcagcctcatcgacagcaggaccaagctgtccaagcacttggtagtccccaacgcacagacaggacagctggagcccctgctgtcccggttcactgaggaggaggagctacagatgaccaggatgctacagcggatggatgtcctggccaagaaagccacagagatgggcgtgcggctgatggtggatgccgagcagacctacttccagccggccatcagccgcctgacgctggagatgcagcggaagttcaatgtggagaagccgctcatcttcaacacataccagtgctacctcaaggatgcctatgacaatgtgaccctggacgtggagctggctcgccgtgagggctggtgttttggggccaagctggtgcggggcgcatacctggcccaggagcgagcccgtgcggcagagatcggctatgaggaccccatcaaccccacgtacgaggccaccaacgccatgtaccacaggtgcctggactacgtgttggaggagctgaagcacaacgccaaggccaaggtgatggtggcctcccacaatgaggacacagtgcgctttgcactgcgcaggatggaggagctgggcctgcatcctgctgaccaccgggtgtactttggacagctgctaggcatgtgtgaccagatcagcttcccgctgggccaggccggctaccccgtgtacaagtacgtgccctatggccccgtgatggaggtgctgccctacttgtcccgccgtgccctggagaacagcagcctcatgaagggcacccatcgggagcggcagctgctgtggctggagctcttgaggcggctccgaactggcaacctcttccatcgccctgcctagcacccgccagcacacccttagcctccagcaccccccgcccccgcccaggccatcaccacagctgcagccaaccccatcctcacacagattcaccttttttcaccccacacttgcagagctgctggaggtgaggtcaggtgcctcccagccctgcccagagtatgggcactcaggtgtgggccgaacctgatacctgcctgggacagccactggaaacttttgggaactctcctcgaatgtgtgggcccaaggcccccacctctgtgacccccatgtccttggacctagaggattgtccaccttctgccaaggccagcccacacagcccgagccccttggggagcagtggccgggctggggaggcctgcctggtcaataaaccactgttcctgca

SEQ ID NO: 16656 - DNA, 2034 bp, Homo sapiens
  source 1..2034: mol_type = unassigned DNA
cgtcccgccatggctctgaggcgcgccctgcccgcgctgcgcccctgcattccccgcttcgtcccgctgtccacggcgccggcctcccgcgagcagcccgcagcgggcccagcggccgtgccaggaggaaacttctaggacagaggctattcaacaagctcatgaagatgaccttctatgggcattttgtagccggggaggaccaggagtccatccagcccctgcttcggcactacagggccttcggtgtcagcgccatcctggactatggagtggaggaggacctgagccccgaggaggcagagcacaaggagatggagtcctgcacctcagctgcggagagggatggcagtggcacgaataagcgggacaagcaataccaggcccactgggccttcggggaccgcaggaatggtgtcatcagtgcccgcacctacttctacgccaatgaggccaagtgcgacagccacatggagacattcttgcgctgcatcgaagcctcaggtagagtcagcgatgacggcttcatagccattaagctcacagcactggggagaccccagtttctgctgcagttctcagaggtgctggccaagtggaggtgcttctttcaccaaatggctgtggagcaagggcaggcgggcctggctgccatggacaccaagctggaggtggcggtgctgcaggaaagtgtcgcaaagttgggcatcgcatccagggctgagattgaggactggttcacggcagagaccctgggagtgtctggcaccatggacctgctggactggagcagcctcatcgacagcaggaccaagctgtccaagcacttggtagtccccaacgcacagacaggacagctggagcccctgctgtcccggttcactgaggaggaggagctacagatgaccaggatgctacagcggatggatgtcctggccaagaaagccacagagatgggcgtgcggctgatggtggatgccgagcagacctacttccagccggccatcagccgcctgacgctggagatgcagcggaagttcaatgtggagaagccgctcatcttcaacacataccagtgctacctcaaggatgcctatgacaatgtgaccctggacgtggagctggctcgccgtgagggctggtgttttggggccaagctggtgcggggcgcatacctggcccaggagcgagcccgtgcggcagagatcggctatgaggaccccatcaaccccacgtacgaggccaccaacgccatgtaccacaggtgcctggactacgtgttggaggagctgaagcacaacgccaaggccaaggtgatggtggcctcccacaatgaggacacagtgcgctttgcactgcgcaggatggaggagctgggcctgcatcctgctgaccaccgggtgtactttggacagctgctaggcatgtgtgaccagatcagcttcccgctgggccaggccggctaccccgtgtacaagtacgtgccctatggccccgtgatggaggtgctgccctacttgtcccgccgtgccctggagaacagcagcctcatgaagggcacccatcgggagcggcagctgctgtggctggagctcttgaggcggctccgaactggcaacctcttccatcgccctgcctagcacccgccagcacacccttagcctccagcaccccccgcccccgcccaggccatcaccacagctgcagccaaccccatcctcacacagattcaccttttttcaccccacacttgcagagctgctggaggtgaggtcaggtgcctcccagccctgcccagagtatgggcactcaggtgtgggccgaacctgatacctgcctgggacagccactggaaacttttgggaactctcctcgaatgtgtgggcccaaggcccccacctctgtgacccccatgtccttggacctagaggattgtccaccttctgccaaggccagcccacacagcccgagccccttggggagcagtggccgggctggggaggcctgcctggtcaataaaccactgttcctgca

SEQ ID NO: 16657 - DNA, 2961 bp, Homo sapiens
  source 1..2961: mol_type = unassigned DNA
aatatttatatttcctctgtcttttaaaactgaacaccgaggtgggttttgtggtgggtggtgaacggacaggtttgggcctcgatcccccacccgaccctagcacccacaggtgggggtgccccctctgctgatgcgcctcctccctcagcaccatggacctgctggactggagcagcctcatcgacagcaggaccaagctgtccaagcacttggtagtccccaacgcacaggtaacacctccgctcctcagtgaggcccagctcagcagggcgctgcgctaagaagggaattcagcctgccacgtgtgtctcttgttgcctaccctgggaacttaacatgaccaaaatcactgcacactatggccccacagaccccctgtggtccagggggaagaagacaagcccactagtgtccacagagtgcttggcgggacagagacccacgcggagccttaagacaccacaaggagagggggtctgggggccttccccaagtcatctgtcttgtgcatcaggtcaccccaaacttcagaggcctgaaacggcagcagccactctgcttctgcctcatggttctggggttgacagggctcagctgggcagtcctcccctggggtctcctgggtagctgtactcacagagtggtggcgctgggacctgggggaggcacccattcacatgtctgggagttggtgctggctgtggcttgggctttttcccaacatggcagctgggctctaagggccagtgtcacctgagacgtgagagccaggcagaagctgggtgaccttttcctgcctcgcctcagaagtcacacggtgtcttttctggcaagttctgtttgttagaagcatgtcaccaggccagcctgtatacagcggggagaggaatgagactcatctgcctgtgggaggggggcccaggacctggcagactgcttgaaaccacagcttaaactgggattcaaagaaagaacagaagcaccttcagaaaacatcctgcagaggcagctttccatgacacatctagccccagtccactaagggcccagcctcaaacttagagcccccgacccagagcctcggggcgcagtgcgtacagtgtggctgtgcaccaaggccaccagctgttggagactttagcatggtgtagcaagggatagagtggtactgtttgtgcccagtgaggcaaggctgctggggccagcaaaggggtgagcgggaggccctgcgggatgggtccccacggcctctgagcaccagcaacttgaaggcctcatcctggtggttgccctggtccctggctacgtgtcagcacgtgctgcacaactgccctgtctgcctgtagccaggggtcttcctcctgggccctctgcctgctccgggtggagcccttctgtttgacgattgggtgatcagtgttcacttgttcaatgtcacatgggagttgcagggggctctcccacaacggtggggcctctgtgggaactggggagtacacacttcggagtgcaggcctggactgagcctggggcccactgacatgggcactgagctccctcgtggtacccctaggccccgcatagggcagtgcactggctgcgttggaggttcaggggcactgtgctgcttgtccaggtggccctccctcccagccctgcacagacgggtgagagggttcctgtgggctgggaatactgagagaggtttagcctgggcctcagggtggcactttcccgcccttgctgtggcctgaccgcgtgttgcacccccagacaggacagctggagcccctgctgtcccggttcactgaggaggaggagctacagatgaccaggatgctacagcggatggatgtcctggccaagaaagccacagagatgggcgtgcggctgatggtggatgccgagcagacctacttccagccggccatcagccgcctgacgctggagatgcagcggaagttcaatgtggagaagccgctcatcttcaacacataccagtgctacctcaaggatgcctatgacaatgtgaccctggacgtggagctggctcgccgtgagggctggtgttttggggccaagctggtgcggggcgcatacctggcccaggagcgagcccgtgcggcagagatcggctatgaggaccccatcaaccccacgtacgaggccaccaacgccatgtaccacaggtgcctggactacgtgttggaggagctgaagcacaacgccaaggccaaggtgatggtggcctcccacaatgaggacacagtgcgctttgcactgcgcaggatggaggagctgggcctgcatcctgctgaccaccgggtgtactttggacagctgctaggcatgtgtgaccagatcagcttcccgctgggccaggccggctaccccgtgtacaagtacgtgccctatggccccgtgatggaggtgctgccctacttgtcccgccgtgccctggagaacagcagcctcatgaagggcacccatcgggagcggcagctgctgtggctggagctcttgaggcggctccgaactggcaacctcttccatcgccctgcctagcacccgccagcacacccttagcctccagcaccccccgcccccgcccaggccatcaccacagctgcagccaaccccatcctcacacagattcaccttttttcaccccacacttgcagagctgctggaggtgaggtcaggtgcctcccagccctgcccagagtatgggcactcaggtgtgggccgaacctgatacctgcctgggacagccactggaaacttttgggaactctcctcgaatgtgtgggcccaaggcccccacctctgtgacccccatgtccttggacctagaggattgtccaccttctgccaaggccagcccacacagcccgagccccttggggagcagtggccgggctggggaggcctgcctggtcaataaaccactgttcctgc

SEQ ID NO: 16658 - DNA, 2567 bp, Homo sapiens
  source 1..2567: mol_type = unassigned DNA
ctcctggcctcaagcgaaccttacactttggcctcccaaagtgctgggattataggtgcatgccgctgcacctggcacttctgagcagtgcttggaagccgcctcctgatgggggctgagggtcagagtggccagctgaatgctgggccatcagggtgaggggcgtcttctcctcgtccattgcctgttctcccagggcaggtggaaggggaaggccctgcattggggtggcgtgaaacaagatgagatggtaagatctgctttcactttaaaggaacatttctggttgttgcttggaaagaagtgtcaggggcaagaatgctgcaggagggctggcctggaggacagggtgggactgcgggctggctgcacgggggcaggagcctgcgcttgcgtcagaggttcctgagagactcggtctctggggcagaggcctgagcaaggggacctcgctggggtgtctctgtcttagccacgctcggtgtttctgggtcctgtgacccacgtgtgagcagcctgtggtgctggtggcacagggaaggaaaccgaggcagggagcctgtgggggctgcttggcaggggacaggcagctcctgtgcccactgctgtcccacacctgcatggaaacagaaaccccgccacggagccccctcccatctccacagggcctctagagcgccatgtgcaaggacttcatgggcggggtggggtggggtcaggagcctgctgtgggctggccaggccctggccctccctgtcgcaccctgcgctgcctccatgcacctctcagggctgtcatggcttttcctgtggcttctgacaggtagagtcagcgatgacggcttcatagccattaagctcacagcactggggagaccccagtttctggtaagtgctagaaccttccacctgcagagtctggtgctgtgcgagatctcagggcagctgtgggcatccaccaaaaacacaggtgcccatgccttagaggcctgagctggccacaggggctgtgtgggggactggggtgggcaggggcgtgtgcagatggcattcaggcctgcgtttgcagctgcagttctcagaggtgctggccaagtggaggtgcttctttcaccaaatggctgtggagcaagggcaggcgggcctggctgccatggacaccaagctggaggtggcggtgctgcaggaaagtgtcgcaaagttgggcatcgcatccagggctgagattgaggactggttcacggcagagaccctgggagtgtctggcaccatggacctgctggactggagcagcctcatcgacagcaggaccaagctgtccaagcacttggtagtccccaacgcacagacaggacagctggagcccctgctgtcccggttcactgaggaggaggagctacagatgaccaggatgctacagcggatggatgtcctggccaagttgctcccactctcccaccccctgcgcctctcagaaagccacagagatgggcgtgcggctgatggtggatgccgagcagacctacttccagccggccatcagccgcctgacgctggagatgcagcggaagttcaatgtggagaagccgctcatcttcaacacataccagtgctacctcaaggatgcctatgacaatgtgaccctggacgtggagctggctcgccgtgagggctggtgttttggggccaagctggtgcggggcgcatacctggcccaggagcgagcccgtgcggcagagatcggctatgaggaccccatcaaccccacgtacgaggccaccaacgccatgtaccacaggtgcctggactacgtgttggaggagctgaagcacaacgccaaggccaaggtgatggtggcctcccacaatgaggacacagtgcgctttgcactgcgcaggatggaggagctgggcctgcatcctgctgaccaccgggtgtactttggacagctgctaggcatgtgtgaccagatcagcttcccgctgggccaggccggctaccccgtgtacaagtacgtgccctatggccccgtgatggaggtgctgccctacttgtcccgccgtgccctggagaacagcagcctcatgaagggcacccatcgggagcggcagctgctgtggctggagctcttgaggcggctccgaactggcaacctcttccatcgccctgcctagcacccgccagcacacccttagcctccagcaccccccgcccccgcccaggccatcaccacagctgcagccaaccccatcctcacacagattcaccttttttcaccccacacttgcagagctgctggaggtgaggtcaggtgcctcccagccctgcccagagtatgggcactcaggtgtgggccgaacctgatacctgcctgggacagccactggaaacttttgggaactctcctcgaatgtgtgggcccaaggcccccacctctgtgacccccatgtccttggacctagaggattgtccaccttctgccaaggccagcccacacagcccgagccccttggggagcagtggccgggctggggaggcctgcctggtcaataaaccactgttcctgc

SEQ ID NO: 16659 - DNA, 4676 bp, Homo sapiens
  source 1..4676: mol_type = unassigned DNA
cggtgcccgccgtggacttcggcaacgcgcaggaggcgtaccgcagccggcgaacctgggagctggcgcggagcctgctggtgctgcgcttgtgcgcctggcccgcgctgctggcgcgccacgagcagctgctgtatgtttccaggaaacttctaggacagaggctattcaacaagctcatgaagatgaccttctatgggcattttgtagccggggaggaccaggagtccatccagcccctgcttcggcactacagggccttcggtgtcagcgccatcctggactatggagtggaggaggacctgagccccgaggaggcagagcacaaggagatggagtcctgcacctcagctgcggagagggatggcagtggcacgaataagcgggacaagcaataccaggcccactgggccttcggggaccgcaggaatggtgtcatcagtgcccgcacctacttctacgccaatgaggccaagtgcgacagccacatggagacattcttgcgctgcatcgaagcctcaggtagagtcagcgatgacggcttcatagccattaagctcacagcactggggagaccccagtttctggtaagtgctagaaccttccacctgcagagtctggtgctgtgcgagatctcagggcagctgtgggcatccaccaaaaacacaggtgcccatgccttagaggcctgagctggccacaggggctgtgtgggggactggggtgggcaggggcgtgtgcagatggcattcaggcctgcgtttgcagctgcagttctcagaggtgctggccaagtggaggtgcttctttcaccaaatggctgtggagcaagggcaggcgggcctggctgccatggacaccaagctggaggtggcggtgctgcaggaaagtgtcgcaaagttgggcatcgcatccagggctgagattgaggactggttcacggcagagaccctgggagtgtctgggtgagagcagcccccaggctgagaggacacgagcatcagccatggttccagccaagccccagtgacgtctcccagtcctggctgccctgcctgagagggtgggccctgggatgacagtgctgaaggaactgcttttcacacagcaggacttgatggcttcaggagtccctgaggctggggctgggctgggcaggggagacacagggccagcacagaccccatagagggctctttatagaattatctgggtccagagcaaaggtggcactctcagccctccctggagtccacgccggcaggtgaaggatcagagccccatgccccatccttggagccaggggctgggacccagatcaccaggagcctccagttgaagtggggaggtgactggggtggtgcagtagtgagccatcccctcacacactgccagccttgcccactgtgtcctccctggccgcccggagctgtgtccgcctcctgcctggctgcctgtgctcggcccctccacaagcccaaaacagcctagggtactcagtgttttcagagccgcctagatgcaggactgtttgtgttttggttttaaatttatttaattaatttattttttatagagaccaggtctcaccatgttgcccaggctggtttcaaacccctgggctcaagtgacctgcccgccgcagcccccaaagtgctgggattataagtttgagcccccgcatgccactggttttaaatttttaaacagaaaacaatatttatatttcctctgtcttttaaaactgaacaccgaggtgggttttgtggtgggtggtgaacggacaggtttgggcctcgatcccccacccgaccctagcacccacaggtgggggtgccccctctgctgatgcgcctcctccctcagcaccatggacctgctggactggagcagcctcatcgacagcaggaccaagctgtccaagcacttggtagtccccaacgcacaggtaacacctccgctcctcagtgaggcccagctcagcagggcgctgcgctaagaagggaattcagcctgccacgtgtgtctcttgttgcctaccctgggaacttaacatgaccaaaatcactgcacactatggccccacagaccccctgtggtccagggggaagaagacaagcccactagtgtccacagagtgcttggcgggacagagacccacgcggagccttaagacaccacaaggagagggggtctgggggccttccccaagtcatctgtcttgtgcatcaggtcaccccaaacttcagaggcctgaaacggcagcagccactctgcttctgcctcatggttctggggttgacagggctcagctgggcagtcctcccctggggtctcctgggtagctgtactcacagagtggtggcgctgggacctgggggaggcacccattcacatgtctgggagttggtgctggctgtggcttgggctttttcccaacatggcagctgggctctaagggccagtgtcacctgagacgtgagagccaggcagaagctgggtgaccttttcctgcctcgcctcagaagtcacacggtgtcttttctggcaagttctgtttgttagaagcatgtcaccaggccagcctgtatacagcggggagaggaatgagactcatctgcctgtgggaggggggcccaggacctggcagactgcttgaaaccacagcttaaactgggattcaaagaaagaacagaagcaccttcagaaaacatcctgcagaggcagctttccatgacacatctagccccagtccactaagggcccagcctcaaacttagagcccccgacccagagcctcggggcgcagtgcgtacagtgtggctgtgcaccaaggccaccagctgttggagactttagcatggtgtagcaagggatagagtggtactgtttgtgcccagtgaggcaaggctgctggggccagcaaaggggtgagcgggaggccctgcgggatgggtccccacggcctctgagcaccagcaacttgaaggcctcatcctggtggttgccctggtccctggctacgtgtcagcacgtgctgcacaactgccctgtctgcctgtagccaggggtcttcctcctgggccctctgcctgctccgggtggagcccttctgtttgacgattgggtgatcagtgttcacttgttcaatgtcacatgggagttgcagggggctctcccacaacggtggggcctctgtgggaactggggagtacacacttcggagtgcaggcctggactgagcctggggcccactgacatgggcactgagctccctcgtggtacccctaggccccgcatagggcagtgcactggctgcgttggaggttcaggggcactgtgctgcttgtccaggtggccctccctcccagccctgcacagacgggtgagagggttcctgtgggctgggaatactgagagaggtttagcctgggcctcagggtggcactttcccgcccttgctgtggcctgaccgcgtgttgcacccccagacaggacagctggagcccctgctgtcccggttcactgaggaggaggagctacagatgaccaggatgctacagcggatggatgtcctggccaagaaagccacagagatgggcgtgcggctgatggtggatgccgagcagacctacttccagccggccatcagccgcctgacgctggagatgcagcggaagttcaatgtggagaagccgctcatcttcaacacataccagtgctacctcaaggatgcctatgacaatgtgaccctggacgtggagctggctcgccgtgagggctggtgttttggggccaagctggtgcggggcgcatacctggcccaggagcgagcccgtgcggcagagatcggctatgaggaccccatcaaccccacgtacgaggccaccaacgccatgtaccacaggtgcctggactacgtgttggaggagctgaagcacaacgccaaggccaaggtgatggtggcctcccacaatgaggacacagtgcgctttgcactgcgcaggatggaggagctgggcctgcatcctgctgaccaccgggtgtactttggacagctgctaggcatgtgtgaccagatcagcttcccgctgggccaggccggctaccccgtgtacaagtacgtgccctatggccccgtgatggaggtgctgccctacttgtcccgccgtgccctggagaacagcagcctcatgaagggcacccatcgggagcggcagctgctgtggctggagctcttgaggcggctccgaactggcaacctcttccatcgccctgcctagcacccgccagcacacccttagcctccagcaccccccgcccccgcccaggccatcaccacagctgcagccaaccccatcctcacacagattcaccttttttcaccccacacttgcagagctgctggaggtgaggtcaggtgcctcccagccctgcccagagtatgggcactcaggtgtgggccgaacctgatacctgcctgggacagccactggaaacttttgggaactctcctcgaatgtgtgggcccaaggcccccacctctgtgacccccatgtccttggacctagaggattgtccaccttctgccaaggccagcccacacagcccgagccccttggggagcagtggccgggctggggaggcctgcctggtcaataaaccactgttcctgc

SEQ ID NO: 16660 - DNA, 1985 bp, Homo sapiens
  source 1..1985: mol_type = unassigned DNA
gctgaagtgccagggtgcttgtgaagtctaagcccttgtctggcatttgtcaggaatataggctgctgtatgtttccaggaaacttctaggacagaggctattcaacaagctcatgaagatgaccttctatgggcattttgtagccggggaggaccaggagtccatccagcccctgcttcggcactacagggccttcggtgtcagcgccatcctggactatggagtggaggaggacctgagccccgaggaggcagagcacaaggagatggagtcctgcacctcagctgcggagagggatggcagtggcacgaataagcgggacaagcaataccaggcccactgggccttcggggaccgcaggaatggtgtcatcagtgcccgcacctacttctacgccaatgaggccaagtgcgacagccacatggagacattcttgcgctgcatcgaagcctcaggtagagtcagcgatgacggcttcatagccattaagctcacagcactggggagaccccagtttctgctgcagttctcagaggtgctggccaagtggaggtgcttctttcaccaaatggctgtggagcaagggcaggcgggcctggctgccatggacaccaagctggaggtggcggtgctgcaggaaagtgtcgcaaagttgggcatcgcatccagggctgagattgaggactggttcacggcagagaccctgggagtgtctggcaccatggacctgctggactggagcagcctcatcgacagcaggaccaagctgtccaagcacttggtagtccccaacgcacagacaggacagctggagcccctgctgtcccggttcactgaggaggaggagctacagatgaccaggatgctacagcggatggatgtcctggccaagaaagccacagagatgggcgtgcggctgatggtggatgccgagcagacctacttccagccggccatcagccgcctgacgctggagatgcagcggaagttcaatgtggagaagccgctcatcttcaacacataccagtgctacctcaaggatgcctatgacaatgtgaccctggacgtggagctggctcgccgtgagggctggtgttttggggccaagctggtgcggggcgcatacctggcccaggagcgagcccgtgcggcagagatcggctatgaggaccccatcaaccccacgtacgaggccaccaacgccatgtaccacaggtgcctggactacgtgttggaggagctgaagcacaacgccaaggccaaggtgatggtggcctcccacaatgaggacacagtgcgctttgcactgcgcaggatggaggagctgggcctgcatcctgctgaccaccgggtgtactttggacagctgctaggcatgtgtgaccagatcagcttcccgctgggccaggccggctaccccgtgtacaagtacgtgccctatggccccgtgatggaggtgctgccctacttgtcccgccgtgccctggagaacagcagcctcatgaagggcacccatcgggagcggcagctgctgtggctggagctcttgaggcggctccgaactggcaacctcttccatcgccctgcctagcacccgccagcacacccttagcctccagcaccccccgcccccgcccaggccatcaccacagctgcagccaaccccatcctcacacagattcaccttttttcaccccacacttgcagagctgctggaggtgaggtcaggtgcctcccagccctgcccagagtatgggcactcaggtgtgggccgaacctgatacctgcctgggacagccactggaaacttttgggaactctcctcgaatgtgtgggcccaaggcccccacctctgtgacccccatgtccttggacctagaggattgtccaccttctgccaaggccagcccacacagcccgagccccttggggagcagtggccgggctggggaggcctgcctggtcaataaaccactgttcctgc

SEQ ID NO: 16661 - DNA, 2462 bp, Homo sapiens
  source 1..2462: mol_type = unassigned DNA
ggtctcactctgttgctgtcttcacggagagcaggagcagaggctttgagaagccagtgggccttggcctcagccctgccggcagagggtccccaccatgcagctgaagtgccagggtgcttgtgaagtctaagcccttgtctggcatttgtcaggaatatagggtgaggcctctgggaccgagcggggcggggcggggcggggcggggcggggcgggaccaacagcgcacacttaagcggcccgggcgggtaccgccgtcccgccatggctctgaggcgcgccctgcccgcgctgcgcccctgcattccccgcttcgtcccgctgtccacggcgccggcctcccgcgagcagcccgcagcgggcccagcggccgtgccaggaggtgggtcggccacggcagtgcggccgccggtgcccgccgtggacttcggcaacgcgcaggaggcgtaccgcagccggcgaacctgggagctggcgcggagcctgctggtgctgcgcttgtgcgcctggcccgcgctgctggcgcgccacgagcagctgctgtatgtttccaggaaacttctaggacagaggctattcaacaagctcatgaagatgaccttctatgggcattttgtagccggggaggaccaggagtccatccagcccctgcttcggcactacagggccttcggtgtcagcgccatcctggactatggagtggaggaggacctgagccccgaggaggcagagcacaaggagatggagtcctgcacctcagctgcggagagggatggcagtggcacgaataagcgggacaagcaataccaggcccactgggccttcggggaccgcaggaatggtgtcatcagtgcccgcacctacttctacgccaatgaggccaagtgcgacagccacatggagacattcttgcgctgcatcgaagcctcaggtagagtcagcgatgacggcttcatagccattaagctcacagcactggggagaccccagtttctgctgcagttctcagaggtgctggccaagtggaggtgcttctttcaccaaatggctgtggagcaagggcaggcgggcctggctgccatggacaccaagctggaggtggcggtgctgcaggaaagtgtcgcaaagttgggcatcgcatccagggctgagattgaggactggttcacggcagagaccctgggagtgtctggcaccatggacctgctggactggagcagcctcatcgacagcaggaccaagctgtccaagcacttggtagtccccaacgcacagacaggacagctggagcccctgctgtcccggttcactgaggaggaggagctacagatgaccaggatgctacagcggatggatgtcctggccaagaaagccacagagatgggcgtgcggctgatggtggatgccgagcagacctacttccagccggccatcagccgcctgacgctggagatgcagcggaagttcaatgtggagaagccgctcatcttcaacacataccagtgctacctcaaggatgcctatgacaatgtgaccctggacgtggagctggctcgccgtgagggctggtgttttggggccaagctggtgcggggcgcatacctggcccaggagcgagcccgtgcggcagagatcggctatgaggaccccatcaaccccacgtacgaggccaccaacgccatgtaccacaggtgcctggactacgtgttggaggagctgaagcacaacgccaaggccaaggtgatggtggcctcccacaatgaggacacagtgcgctttgcactgcgcaggatggaggagctgggcctgcatcctgctgaccaccgggtgtactttggacagctgctaggcatgtgtgaccagatcagcttcccgctgggccaggccggctaccccgtgtacaagtacgtgccctatggccccgtgatggaggtgctgccctacttgtcccgccgtgccctggagaacagcagcctcatgaagggcacccatcgggagcggcagctgctgtggctggagctcttgaggcggctccgaactggcaacctcttccatcgccctgcctagcacccgccagcacacccttagcctccagcaccccccgcccccgcccaggccatcaccacagctgcagccaaccccatcctcacacagattcaccttttttcaccccacacttgcagagctgctggaggtgaggtcaggtgcctcccagccctgcccagagtatgggcactcaggtgtgggccgaacctgatacctgcctgggacagccactggaaacttttgggaactctcctcgaatgtgtgggcccaaggcccccacctctgtgacccccatgtccttggacctagaggattgtccaccttctgccaaggccagcccacacagcccgagccccttggggagcagtggccgggctggggaggcctgcctggtcaataaaccactgttcctgc

SEQ ID NO: 16662 - DNA, 4739 bp, Homo sapiens
  source 1..4739: mol_type = unassigned DNA
cttttaaaactgaacaccgaggtgggttttgtggtgggtggtgaacggacaggtttgggcctcgatcccccacccgaccctagcacccacaggtgggggtgccccctctgctgatgcgcctcctccctcagcaccatggacctgctggactggagcagcctcatcgacagcaggaccaagctgtccaagcacttggtagtccccaacgcacaggtaacacctccgctcctcagtgaggcccagctcagcagggcgctgcgctaagaagggaattcagcctgccacgtgtgtctcttgttgcctaccctgggaacttaacatgaccaaaatcactgcacactatggccccacagaccccctgtggtccagggggaagaagacaagcccactagtgtccacagagtgcttggcgggacagagacccacgcggagccttaagacaccacaaggagagggggtctgggggccttccccaagtcatctgtcttgtgcatcaggtcaccccaaacttcagaggcctgaaacggcagcagccactctgcttctgcctcatggttctggggttgacagggctcagctgggcagtcctcccctggggtctcctgggtagctgtactcacagagtggtggcgctgggacctgggggaggcacccattcacatgtctgggagttggtgctggctgtggcttgggctttttcccaacatggcagctgggctctaagggccagtgtcacctgagacgtgagagccaggcagaagctgggtgaccttttcctgcctcgcctcagaagtcacacggtgtcttttctggcaagttctgtttgttagaagcatgtcaccaggccagcctgtatacagcggggagaggaatgagactcatctgcctgtgggaggggggcccaggacctggcagactgcttgaaaccacagcttaaactgggattcaaagaaagaacagaagcaccttcagaaaacatcctgcagaggcagctttccatgacacatctagccccagtccactaagggcccagcctcaaacttagagcccccgacccagagcctcggggcgcagtgcgtacagtgtggctgtgcaccaaggccaccagctgttggagactttagcatggtgtagcaagggatagagtggtactgtttgtgcccagtgaggcaaggctgctggggccagcaaaggggtgagcgggaggccctgcgggatgggtccccacggcctctgagcaccagcaacttgaaggcctcatcctggtggttgccctggtccctggctacgtgtcagcacgtgctgcacaactgccctgtctgcctgtagccaggggtcttcctcctgggccctctgcctgctccgggtggagcccttctgtttgacgattgggtgatcagtgttcacttgttcaatgtcacatgggagttgcagggggctctcccacaacggtggggcctctgtgggaactggggagtacacacttcggagtgcaggcctggactgagcctggggcccactgacatgggcactgagctccctcgtggtacccctaggccccgcatagggcagtgcactggctgcgttggaggttcaggggcactgtgctgcttgtccaggtggccctccctcccagccctgcacagacgggtgagagggttcctgtgggctgggaatactgagagaggtttagcctgggcctcagggtggcactttcccgcccttgctgtggcctgaccgcgtgttgcacccccagacaggacagctggagcccctgctgtcccggttcactgaggaggaggagctacagatgaccaggatgctacagcggatggatgtcctggccaaggtgagctgtcccgctcgggcagagggtacctgggactcgtggagaagagggcacctgcctcacttgagcaacagttgctcccactctcccaccccctgcgcctctcagaaagccacagagatgggcgtgcggctgatggtggatgccgagcagacctacttccagccggccatcagccgcctgacgctggagatgcagcggaagttcaatgtggagaagccgctcatcttcaacacataccagtgctacctcaaggatgcctatgacaatgtgaccctggacgtggagctggctcgccgtgagggctggtgttttggggccaagctggtgcggggcgcatacctggcccaggagcgagcccgtgcggcagagatcggctatgaggaccccatcaaccccacgtacgaggccaccaacgccatgtaccacaggtgcctggactacgtgttggaggagctgaagcacaacgccaaggccaaggtgatggtggcctcccacaatgaggacacagtgcgctttgcactgcgcaggtaggtgtgccccaccctgcaccgaaaccccaacctgagccgttgtctcctccggctggggagaggtggcagcagcgcagagctcagggtgggcagagcgacctgctgggtggtcgggcatttgtggggaaaggctggtgaaatgagctggagggtggcttcagtgggcaggcccaggcccgctggcgttctggacatcggactgtgagagcacaatggctttttgcagttacgttggtttttaaaattaacttttttctttttttgagatagaatctcgctctgtcacctatgctggagtgcagtggcgtggtctcggctcactgcaacctccgcttcccaagttcaagcaattcttcatgcctcagcctcccaagtagctgggattacaggcatgtgccaccacgcctggctaatgttttgtatttttagcagagacagggtttcaccgtgttggccagactggtctcaaactcctggcctcaagtgatcctcccttcttggcctcccaaagtgctgggattacaagcatcagccactgtacccagacttttaaaaattaacatctgacttattaaacttcacaattaaaaaactaaatttcatcagggtattcggatggctcctgaaaggtacaaatgcagtgttggaggccagtccctcaggaggcctccacagtgccacctcattaatacgcccttaacattttaactacatctggaatgtaacggtttgttttctctttaaacatttgtcccatggagcacaacttcggtagaattctaacaagtcaaatgcagaagttaggtgaagtcagttcttggatactcctgtactgtcaccctggtcttatctcatgccttagtccaagctatgcacacaatggggtcctaggtccccctcccctcccagattccgccttcccagggatgggaccccctagaaccctcgggggcctgggcagtggcctcgctggctctcgccttcctaggagctgagcaggagctccactctcagcagggcagggtgccccagatccagggcttgtggcacgagggggctccccaagaagctgtgaagccacagggccaggcttggggccagggctgcagccaacaggacacatcctggtgctgctcgggagctgactcacggctctgaaatcattcagtgatgtccacattcagcctttgtttacgatgctgctactttttcatggcctgaaattgcagcacacccatttttgtgccctgatcctctgctaattgtcatagatgtgtcggtgatgggacagactcactttctccacacgcacaggcctggtggccagcactgcccagcactcgggagctggtgggggttcctctcagcttgtaatcaggactcccagcctctgggtggactctcaatgctggtggactcacagcctgactagacacatcaccatccaactccgaaaggacagcctgccctcagcagggcttcctctctccagcttccgcccggcacctgtctgtccctactatcttgctgtggcagtggcttccccagtggacacagcttccccctcccctgagtggcagccgggctctctcctcttggccccaagggccctgtgccaggctcccccagtaccacgctcacatccctgcctgagaggctggacccctgcaggcttcagctctgcccctgctgtgggtggttggggagctctggggagctggggtcccctcccatgggtaagtggttctagactatggcagctgctctgtcctgtgctgggcccagactgccacaccacccaccctcaaacaatcggagttggctttggccaaggaacaaaccagccccaaacttagaggctggaacagtggcatgttctgtaggccaggggtgggctggctcagctgatgcttctgctgctggctgtgcctgtgtccctcctgcgtctgtgatctggggccggtggggcctaatgagctcattcatggctggggcagtaaaggagactgcatcccgggtccagcgtcccacaggccagcccaggcttgagcacgtggtgggctcaggcttccagaaggcctggagagggcaagcctctgcttgtgtcacctttggtacctccctgctggccaaagtgcctcacgaggccaagcccagatgccaggtggagtgagccactgtcctgtgctgggaggagccgcagtcacatggcagaggctgtgcacaccagcaggggagggggcagccagcagtggcacccggctctcgggttcatgtcctggggttgaggaagacacaagatggaagccagggcgatgtggcagagatgggtgcctgctttagactgggtggtcccg

SEQ ID NO: 16663 - DNA, 441 bp, Homo sapiens
  source 1..441: mol_type = unassigned DNA
accgaggtgggttttgtggtgggtggtgaacggacaggtttgggcctcgatcccccacccgaccctagcacccacaggtgggggtgccccctctgctgatgcgcctcctccctcagcaccatggacctgctggactggagcagcctcatcgacagcaggaccaagctgtccaagcacttggtagtccccaacgcacagacaggacagctggagcccctgctgtcccggttcactgaggaggaggagctacagatgaccaggatgctacagcggatggatgtcctggccaaggtgagctgtcccgctcgggcagagggtacctgggactcgtggagaagagggcacctgcctcacttgagcaacagttgctcccactctcccaccccctgcgcctctcagaaagccacagagatgggcgtgcggctgatggtggatgccgag

SEQ ID NO: 16664 - DNA, 553 bp, Homo sapiens
  source 1..553: mol_type = unassigned DNA
cggtgcccgccgtggacttcggcaacgcgcaggaggcgtaccgcagccggcgaacctgggagctggcgcggagcctgctggtgctgcgcttgtgcgcctggcccgcgctgctggcgcgccacgagcaggtcctgcacctcagctgcggagagggatggcagtggcacgaataagcgggacaagcaataccaggcccactgggccttcggggaccgcaggaatggtgtcatcagtgcccgcacctacttctacgccaatgaggccaagtgcgacagccacatggagacattcttgcgctgcatcgaagcctcagctgcagttctcagaggtgctggccaagtggaggtgcttctttcaccaaatggctgtggagcaagggcaggcgggcctggctgccatggacaccaagctggaggtggcggtgctgcaggaaagtgtcgcaaagttgggcatcgcatccagggctgagattgaggactggttcacggcagagaccctgggagtgtctggcaccatggacctgctggactggagcagcctcatcgacagcagg

SEQ ID NO: 16665 - DNA, 472 bp, Homo sapiens
  source 1..472: mol_type = unassigned DNA
ttcatgggcggggtggggtggggtcaggagcctgctgtgggctggccaggccctggccctccctgtcgcaccctgcgctgcctccatgcacctctcagggctgtcatggcttttcctgtggcttctgacaggtagagtcagcgatgacggcttcatagccattaagctcacagcactggggagaccccagtttctgctgcagttctcagaggtgctggccaagtggaggtgcttctttcaccaaatggctgtggagcaagggcaggcgggcctggctgccatggacaccaagctggaggtggcggtgctgcaggaaagtgtcgcaaagttgggcatcgcatccagggctgagattgaggactggttcacggcagagaccctgggagtgtctgggtgagagcagcccccaggctgagaggacacgagcatcagccatggttccagccaagccccagtgacgtctcccagtcct

SEQ ID NO: 16666 - DNA, 594 bp, Homo sapiens
  source 1..594: mol_type = unassigned DNA
gggccagtcgtgcagaagccatgcccaccttgtggccgggatggagtggggactaggaaggcaccagccggggaggaccaggagtccatccagcccctgcttcggcactacagggccttcggtgtcagcgccatcctggactatggagtggaggaggacctgagccccgaggaggcagagcacaaggagatggagtcctgcacctcagctgcggagagggatggcagtggcacgaataagcgggacaagcaataccaggcccactgggccttcggggaccgcaggaatggtgtcatcagtgcccgcacctacttctacgccaatgaggccaagtgcgacagccacatggagacattcttgcgctgcatcgaagcctcaggtagagtcagcgatgacggcttcatagccattaagctcacagcactggggagaccccagtttctgctgcagttctcagaggtgctggccaagtggaggtgcttctttcaccaaatggctgtggagcaagggcaggcgggcctggctgccatggacaccaagctggaggtggcggtgctgcaggaaagtgtcgcaaagttgggcatcgcatccagg

SEQ ID NO: 16667 - DNA, 491 bp, Homo sapiens
  source 1..491: mol_type = unassigned DNA
cccgcgctgcgcccctgcattccccgcttcgtcccgctgtccacggcgccggcctcccgcgagcagcccgcagcgggcccagcggccgtgccaggaggtgggtcggccacggcagtgcggccgccggtgcccgccgtggacttcggcaacgcgcaggaggcgtaccgcagccggcgaacctgggagctggcgcggagcctgctggtgctgcgcttgtgcgcctggcccgcgctgctggcgcgccacgagcaggtcctgcacctcagctgcggagagggatggcagtggcacgaataagcgggacaagcaataccaggcccactgggccttcggggaccgcaggaatggtgtcatcagtgcccgcacctacttctacgccaatgaggccaagtgcgacagccacatggagacattcttgcgctgcatcgaagcctcagctgcagttctcagaggtgctggccaagtggaggtgcttctttcaccaaatggct

SEQ ID NO: 16668 - DNA, 632 bp, Homo sapiens
  source 1..632: mol_type = unassigned DNA
aggaccaggagtccatccagcccctgcttcggcactacagggccttcggtgtcagcgccatcctggactatggagtggaggaggacctgagccccgaggaggcagagcacaaggagatggagtcctgcacctcagctgcggagagggatggcagtggcacgaataagcgggacaagcaataccaggcccactgggccttcggggaccgcaggaatggtgtcatcagtgcccgcacctacttctacgccaatgaggccaagtgcgacagccacatggagacattcttgcgctgcatcgaagcctcaggtggggccccctctttgctggctatacccctgccatgtcccagcctgagcggacccctgggctcatggaggtgccggtgggtgaacactaagctggggcaggagccagagggctgggttctgaccacacttgggtccctcactgttcagccccttcctgaggggccccactgcctcccagaaggcatctcctctcctgccccagctccctgttccctgatcccgcctcatgccccccacccttctccctggctcagggccaggatcgggagctgcaggaagttggtccatgtcagctgccgagccacacttagcccagggtggagg

SEQ ID NO: 16669 - DNA, 2405 bp, Homo sapiens
  source 1..2405: mol_type = unassigned DNA
ggtctcactctgttgctgtcttcacggagagcaggagcagaggctttgagaagccagtgggccttggcctcagccctgccggcagagggtccccaccatgcagctgaagtgccagggtgcttgtgaagtctaagcccttgtctggcatttgtcaggaatataggcgcacacttaagcggcccgggcgggtaccgccgtcccgccatggctctgaggcgcgccctgcccgcgctgcgcccctgcattccccgcttcgtcccgctgtccacggcgccggcctcccgcgagcagcccgcagcgggcccagcggccgtgccaggaggtgggtcggccacggcagtgcggccgccggtgcccgccgtggacttcggcaacgcgcaggaggcgtaccgcagccggcgaacctgggagctggcgcggagcctgctggtgctgcgcttgtgcgcctggcccgcgctgctggcgcgccacgagcagctgctgtatgtttccaggaaacttctaggacagaggctattcaacaagctcatgaagatgaccttctatgggcattttgtagccggggaggaccaggagtccatccagcccctgcttcggcactacagggccttcggtgtcagcgccatcctggactatggagtggaggaggacctgagccccgaggaggcagagcacaaggagatggagtcctgcacctcagctgcggagagggatggcagtggcacgaataagcgggacaagcaataccaggcccactgggccttcggggaccgcaggaatggtgtcatcagtgcccgcacctacttctacgccaatgaggccaagtgcgacagccacatggagacattcttgcgctgcatcgaagcctcaggtagagtcagcgatgacggcttcatagccattaagctcacagcactggggagaccccagtttctgctgcagttctcagaggtgctggccaagtggaggtgcttctttcaccaaatggctgtggagcaagggcaggcgggcctggctgccatggacaccaagctggaggtggcggtgctgcaggaaagtgtcgcaaagttgggcatcgcatccagggctgagattgaggactggttcacggcagagaccctgggagtgtctggcaccatggacctgctggactggagcagcctcatcgacagcaggaccaagctgtccaagcacttggtagtccccaacgcacagacaggacagctggagcccctgctgtcccggttcactgaggaggaggagctacagatgaccaggatgctacagcggatggatgtcctggccaagaaagccacagagatgggcgtgcggctgatggtggatgccgagcagacctacttccagccggccatcagccgcctgacgctggagatgcagcggaagttcaatgtggagaagccgctcatcttcaacacataccagtgctacctcaaggatgcctatgacaatgtgaccctggacgtggagctggctcgccgtgagggctggtgttttggggccaagctggtgcggggcgcatacctggcccaggagcgagcccgtgcggcagagatcggctatgaggaccccatcaaccccacgtacgaggccaccaacgccatgtaccacaggtgcctggactacgtgttggaggagctgaagcacaacgccaaggccaaggtgatggtggcctcccacaatgaggacacagtgcgctttgcactgcgcaggatggaggagctgggcctgcatcctgctgaccaccgggtgtactttggacagctgctaggcatgtgtgaccagatcagcttcccgctgggccaggccggctaccccgtgtacaagtacgtgccctatggccccgtgatggaggtgctgccctacttgtcccgccgtgccctggagaacagcagcctcatgaagggcacccatcgggagcggcagctgctgtggctggagctcttgaggcggctccgaactggcaacctcttccatcgccctgcctagcacccgccagcacacccttagcctccagcaccccccgcccccgcccaggccatcaccacagctgcagccaaccccatcctcacacagattcaccttttttcaccccacacttgcagagctgctggaggtgaggtcaggtgcctcccagccctgcccagagtatgggcactcaggtgtgggccgaacctgatacctgcctgggacagccactggaaacttttgggaactctcctcgaatgtgtgggcccaaggcccccacctctgtgacccccatgtccttggacctagaggattgtccaccttctgccaaggccagcccacacagcccgagccccttggggagcagtggccgggctggggaggcctgcctggtcaataaaccactgttcctgcagctg

SEQ ID NO: 16670 - DNA, 900 bp, Homo sapiens
  source 1..900: mol_type = unassigned DNA
ctggagaggagattcccagccttcctgcccaacccgaaacttttccaacacacgcaggcgtattcctcgcaggattcggcggtcccgagtcgcagtcagggaggaggctcgggaagcacacgtgccctggcacactggaggagggtcccgggattcttgagctgtgcccagctgacgagcttttgaagatggcacaataaccgtccagtgatgcctgaccatgacagcacagccctcttaagccggcaaaccaagaggagaagagttgacattggagtgaaaaggacggtagggacagcatctgcattttttgctaaggcaagagcaacgttttttagtgccatgaatccccaaggttctgagcaggatgttgagtattcagtggtgcagcatgcagatggggaaaagtcaaatgtactccgcaagctgctgaagagggcgaactcgtatgaagatgccatgatgccttttccaggagcaaccataatttcccagctgttgaaaaataacatgaacaaaaatggtggcacggagcccagtttccaagccagcggtctctctagtacaggctccgaagtacatcaggaggatatatgcagcaactcttcaagagacagccccccagagtgtctttccccttttggcaggcctactatgagccagtttgatatggatcgcttatgtgatgagcacctgagagcaaagcgcgcccgggttgagaatataattcggggtatgagccattcccccagtgtggcattaaggggcaatgaaaatgaaagagagatggccccgcagtctgtgagtccccgagaaagttacagagaaaacaaacgcaagcaaaagcttccccagcagcagcaacagagtttccagcagctggtttcagcccgaaaagaa

SEQ ID NO: 16671 - DNA, 8240 bp, Homo sapiens
  source 1..8240: mol_type = unassigned DNA
aagtaaatcttgttgtggagcggagccctcagctgagggagcgctctgaaataatacaccattgcagccggggaaagcagagcggcgcaaaagagctctcgccgggtccgcctgctccctctccgcttcgctcctcttctcttctttacccttctcctctctcctcctctgctgctctctcctctcctcccgctcttctctctcctcctctcctgctctctcctcttcccttagctcctcttcttttcttctcctcttcttccctctcctcgcctctcccctgctcctcttctctcgtctcccctcccctcccgcctctctctcccctctccctctcccactcgccccgctcgctcgctcgctgtcgcacagactcaccgtcccttgtccaattatcatattcatcacccgcaagatatcaccgtgtgtgcactcgcgtgttttcctctctctgccgggggaaaaaaaagagagagagagagatagagagagagagagagagagagagagagaggctcggtcccactgctccctgcaccgcggtcccgggattcttgagctgtgcccagctgacgagcttttgaagatggcacaataaccgtccagtgatgcctgaccatgacagcacagccctcttaagccggcaaaccaagaggagaagagttgacattggagtgaaaaggacggtagggacagcatctgcattttttgctaaggcaagagcaacgttttttagtgccatgaatccccaaggttctgagcaggatgttgagtattcagtggtgcagcatgcagatggggaaaagtcaaatgtactccgcaagctgctgaagagggcgaactcgtatgaagatgccatgatgccttttccaggagcaaccataatttcccagctgttgaaaaataacatgaacaaaaatggtggcacggagcccagtttccaagccagcggtctctctagtacaggctccgaagtacatcaggaggatatatgcagcaactcttcaagagacagccccccagagtgtctttccccttttggcaggcctactatgagccagtttgatatggatcgcttatgtgatgagcacctgagagcaaagcgcgcccgggttgagaatataattcggggtatgagccattcccccagtgtggcattaaggggcaatgaaaatgaaagagagatggccccgcagtctgtgagtccccgagaaagttacagagaaaacaaacgcaagcaaaagcttccccagcagcagcaacagagtttccagcagctggtttcagcccgaaaagaacagaagcgagaggagcgccgacagctgaaacagcagctggaggacatgcagaaacagctgcgccagctgcaggaaaagttctaccaaatctatgacagcactgattcggaaaatgatgaagatggtaacctgtctgaagacagcatgcgctcggagatcctggatgccagggcccaggactctgtcggaaggtcagataatgagatgtgcgagctagacccaggacagtttattgaccgagctcgagccctgatcagagagcaggaaatggctgaaaacaagccgaagcgagaaggcaacaacaaagaaagagaccatgggccaaactccttacaaccggaaggcaaacatttggctgagaccttgaaacaggaactgaacactgccatgtcgcaagttgtggacactgtggtcaaagtcttttcggccaagccctcccgccaggttcctcaggtcttcccacctctccagatcccccaggccagatttgcagtcaatggggaaaaccacaatttccacaccgccaaccagcgcctgcagtgctttggcgacgtcatcattccgaaccccctggacacctttggcaatgtgcagatggccagttccactgaccagacagaagcactgcccctggttgtccgcaaaaactcctctgaccagtctgcctccggccctgccgctggcggccaccaccagcccctgcaccagtcgcctctctctgccaccacgggcttcaccacgtccaccttccgccaccccttcccccttcccttgatggcctatccatttcagagcccattaggtgctccctccggctccttctctggaaaagacagagcctctcctgaatccttagacttaactagggataccacgagtctgaggaccaagatgtcatctcaccacctgagccaccacccttgttcaccagcacacccgcccagcaccgccgaagggctctccttgtcgctcataaagtccgagtgcggcgatcttcaagatatgtctgaaatatcaccttattcgggaagtgcaatgcaggaaggattgtcacccaatcacttgaaaaaagcaaagctcatgtttttttatacccgttatcccagctccaatatgctgaagacctacttctccgacgtaaagttcaacagatgcattacctctcagctcatcaagtggtttagcaatttccgtgagttttactacattcagatggagaagtacgcacgtcaagccatcaacgatggggtcaccagtactgaagagctgtctataaccagagactgtgagctgtacagggctctgaacatgcactacaataaagcaaatgactttgaggttccagagagattcctggaagttgctcagatcacattacgggagtttttcaatgccattatcgcaggcaaagatgttgatccttcctggaagaaggccatatacaaggtcatctgcaagctggatagtgaagtccctgagattttcaaatccccgaactgcctacaagagctgcttcatgagtagaaatttcaacaactctttttgaatgtatgaagagtagcagtcccctttggatgtccaagttatatgtgtctagattttgatttcatatatatgtgtatgggaggcatggatatgttatgaaatcagctggtaattcctcctcatcacgtttctctcattttcttttgttttccattgcaaggggatggttgttttctttctgcctttagtttgcttttgcccaaggcccttaacatttggacacttaaaatagggttaattttcagggaaaaagaatgttggcgtgtgtaaagtctctattagcaatgaagggaatttgttaacgatgcatccacttgattgatgacttattgcaaatggcggttggctgaggaaaacccatgacacagcacaactctacagacagtgatgtgtctcttgtttctactgctaagaaggtctgaaaatttaatgaaaccacttcatacatttaagtattttgtttggtttgaactcaatcagtagcttttccttacatgtttaaaaataattccaatgacagatgagcagctcacttttccaaagtaccccaaaaggccaaattaaaaaagaaaaataatcactctcaagccttgtctaagaaaagaggcaaactctgaaagtcgtaccagtttcttctggaggcaaagcaattttgcacaaaaccagctctctcaagatgagactagaaattcatacctggtcttgtagccacctctctaaacttgaaaataggttcttcttcataagtgagcttacatcattcttcataaagaaaaatcctataacttgttatcatttttgcttcagatactaaaaggcactaagtttccaatttacgctgctcaactttgtttatatgcttaaaaggattctgtttacttaacaattttttcccctaaaatactattttctgaatacttccttccagtaaggaataaaggaaagcccaacttggccataaaattcttgcctacactagaagtttgttgacagccattagctgacttgatcgtcatctcctaagaggaacacatatattttcacaagcaattccacactatcctgatgggtatgcaaagtggtgacagtctaactcagtgtttcttcattttaggtataacattttaaagcaattgataatgcctcttccaattcagaagctagtattgaccaaaatgtgagaagagtgtatagcataggaaaatttggggttaacccaaaagacacaattccagcacacataagaaagctagctgctattttatgctttcttccatggttctcctcttttttcccttttatttttccctgtttttcaatgatgtacagtgttccctacttgcattgaaaaaactcgtatggcattcacactttttttcttaggtgggtttttgtgtccagatgcagtaagaattcattgttcatcctaaaactgttttccagacccttccttccccttaggtaatttgatatacacctcctaaaatgacacagtaacaaatctggtatttagaacatatagaacataaatgccattttttaattcaactttaataagaattacatttgactttggagaatacaggtcttgacccatgtgactgactagctgacccgatcgctgtaatttaacgtcatttataaattctgctgatggacaggaatgtatgaactcaattattgtcagcacaaagccttaaaacctgctgactttaaattaaatggtgcagtcctatgatgccctgcaccatccaggggactaacagggcctcgcagtgtagacagagggtgcagccacacgggcgggggcaccagccacctcactctgcacccgcggcctcacacatctcccagctcacactctactaatgcacagagtcattagatccaatttgttatttttctcacttgctttaaaaaaaagcagtttggataatcatgacattggaataaagtgggaaggaaaaattccatcagcacaaaatagggaagtaatcccaacttgtagtcacagttttctgactggctttgttttaaaagaggatggcagtccttgttcgtgtcagtgtgccactgggtttttgctgttccgtgtaattcatatcaactttgtgttgccatttgcaaggtaaaaggcaaagctgtagtgtattcacctatgtagacagattgctagatatctttttgatctggggcgagttcaatattgattccagacttatttggatttttttagtattattttcccctccctttctaatttaaatagacaaattaagcaaaagtgtgtgttcacaaccaaatgttgatgcccttatctactgataatatcctctcaatgttcactgaggcatagaaattatttcagagtagaaattgcagcatgaggataaactcacctctttgttctgaaaatagaactttatcactatgctttccggtggttttcccttttacaatcgaaatcttgtgcctcccaagtgcattggaaaatgacaaaagcctgtctctccaaattcctatttaacagtttgattttttttttttaatcaccatctttcaaatcttagctcaactctcaccaagtgaaaattggctacttgggagaaagttaactttctatggtgggatggtgaaggatgagggacagtttacataggaaaagaaaaaaaaaagtctaaagtccatgttgaaaaaccacactaccacttattttctgctaaccctaaattatttttgcgtatacgcttgaggttatagtctgtgcctagacctaaaatgcaccagcgggggggattttaaaaaatccttcaaaataccagttttttcccaacaagtacaattgttcttgtgccttctgtggctttcgatttcatctttttgactttatttccaattactacagctgcaataaacactagattttttttctggctgtttgacataacgttgatagctatgcatattttgtgtctttttaaaacaaagcgggagaatacgtttttgaagaagagaatttttagaacagtttgataccgcaaattattttttcctcaattgtttgagcagcattcgagttttgaaaattcttgtagaagccaattttttgtaactgtggtgcaaatcttgtgttttcttagcctaatgaaaagtagtatagaagcaatatttcataccatgtgctatatatgtgtgcgcagatgtgtgaacataaaatcacatacacacatatacacacatgtaaaaatatacatatatatatatgcgtgtgaagtggaaagcttaccttttcctatctagatttaagaacctattttagacatttgttatgttttgtgaaaagaatgttctatttgcaacaaaacatttaattcttactgtatctctggctgtttaatgaggacgtttcacattaaatggtaaaacacatggaagatgttagaatgtagtaattatttaagtaaacgttcacccacatattcctgaagtttgctttgtgcctccgagtattatttaattaaagaagtgttttatgtttgcagaatctttgtcactgtactagggatgtgggtgaatatcatttaaaaaaatttaaaacaacaaaaaaaaagcaaaacagaaacactaaagcaagaggggaacttttataaagcaatgtaaatatttaacctcatggctgtcattatgtaagacatgagattttaataaataactacattctcacgacatctgttgaatttactaggaacactacagtgactgtatagacagttgaaagcattcttgaaaatcctgctctctccttttaaaagttaacaatctcttttatcagatgtcaagggcaagggtaatgcagtttctgtaaatttatgaaatttctttttctatgtacatgaagacatttagtaagtaacacccccccttcccatgcgcacatgtgcgcatacacacacacacacacacacacacacacacaaacacacacactgtcataaagctaatgatttggggactttaaaaaataggatgtcctccaggaacaatcataaatttatgaaagaaagagtagtttacagactcccctgaaagaagcagtgtatatgtgaagacagtgcaaaaatctctttgccatgtatattatagcgtattcattggtgtgaatagtacaaatgtttccttctggtacaaactctgtgtttgcaaatttacaagaagcattgttttcaaaaagctccccttaaaaaatgtaactggtttatatgagtaagcagttaccgtattgcacttaaatgttatgttgaaggaaatgcagttttgttttctgtagatctgttggttgtaaaccatctataaaactaaagctaaaatgctcatattcagagctgggatcaaaactggtatttaacctttgcatcttcttataattatccttctaagaatataacagaatgtggaagtgtctggactttgagtcttttcaactgagccttctctcaaatctgacaccccctcagaatgcacaaacataagcagaaaaggcaaacaagcttaccttcttttgtgaaaacgtattcattctgtatttttttaaatattcaattcccctaaaaatggggagaaaatattttaaaattgtatattacgacttcaaatttagaactaagaaaaaaatgtatttgggattggtctcagcgctacctagaagaatcaaaggtcatggcttccctcaatattgtcccagccatttctcatatgtatatagtataaaccgtgacaaaacactgcctttatattatttagcaatatgttgtaaatagcattattaagctcttttttgtaataaagaccctttgatttgaatatagtacaataactgaactgataaagtcaatttttgatttttgtttgttttttttagctagaggcaatttcaattgtgaatttttgttgttgtctattgttctgaagactttgcataatttattggtttaatttatcctaatttatttgatgaaggtgtacaattttgtattaccaaggatgtactgtaatattaattgatatgataaacacaatgagactccctgtccatattaaaaagaaaataaaaaggtgcagtagacaattgattttaaaggaaaagttaaaaaaattagtttggcagctactaaattttaaaacaggaaaaaaaaaagttgttgtggggagggtgggaaaggggttttactttgtgtgttttaagcttttgtatactctccaaacttttaccttttgctttgtaccacttaaaggatacagtagtccaattgccttgtgtgccttccatctcctcttaaactgaatgtatgtgcagtatatatgcaagcttgtgcaaaataaaatatacattacaagctc

SEQ ID NO: 16672 - DNA, 562 bp, Homo sapiens
  source 1..562: mol_type = unassigned DNA
gttgtggagcggagccctcagctgagggagcgctctgaaataatacaccattgcagccggggaaagcagagcggcgcaaaagagctctcgccgggtccgcctgctccctctccgcttcgctcctcttctcttctttacccttctcctctctcctcctctgctgctctctcctctcctcccgctcttctctctcctcctctcctgctctctcctcttcccttagctcctcttcttttcttctcctcttcttccctctcctcgcctctcccctgctcctcttctctcgtctcccctcccctcccgcctctctctcccctctccctctcccactcgccccgctcgctcgctcgctgtcgcacagactcaccgtcccttgtccaattatcatattcatcacccgcaagatatcaccgtgtgtgcactcgcgtgttttcctctctctgccgggggaaaaaaaagagagagagagagatagagagagagagagagagagagagagagaggctcggtcccactgctccctgcaccgcgagaaaatggtgttattcaaatgaatcataat

SEQ ID NO: 16673 - DNA, 3075 bp, Homo sapiens
  source 1..3075: mol_type = unassigned DNA
ccccttttccagaatcacttgcactgtcttgttcttgaatgagaaaggaagaaaagagcctcccattactcagacccgtgtaaacattattccccccaggagaaaatggtgttattcaaatgaatcataataaaatagcctctaaacagtttctaagcgggagcctccgtggaactcagcgctccgctcctcccagttcctaagaggtcccgggattcttgagctgtgcccagctgacgagcttttgaagatggcacaataaccgtccagtgatgcctgaccatgacagcacagccctcttaagccggcaaaccaagaggagaagagttgacattggagtgaaaaggacggtagggacagcatctgcattttttgctaaggcaagagcaacgttttttagtgccatgaatccccaaggttctgagcaggatgttgagtattcagtggtgcagcatgcagatggggaaaagtcaaatgtactccgcaagctgctgaagagggcgaactcgtatgaagatgccatgatgccttttccaggagcaaccataatttcccagctgttgaaaaataacatgaacaaaaatggtggcacggagcccagtttccaagccagcggtctctctagtacaggctccgaagtacatcaggaggatatatgcagcaactcttcaagagacagccccccagagtgtctttccccttttggcaggcctactatgagccagtttgatatggatcgcttatgtgatgagcacctgagagcaaagcgcgcccgggttgagaatataattcggggtatgagccattcccccagtgtggcattaaggggcaatgaaaatgaaagagagatggccccgcagtctgtgagtccccgagaaagttacagagaaaacaaacgcaagcaaaagcttccccagcagcagcaacagagtttccagcagctggtttcagcccgaaaagaacagaagcgagaggagcgccgacagctgaaacagcagctggaggacatgcagaaacagctgcgccagctgcaggaaaagttctaccaaatctatgacagcactgattcggaaaatgatgaagatggtaacctgtctgaagacagcatgcgctcggagatcctggatgccagggcccaggactctgtcggaaggtcagataatgagatgtgcgagctagacccaggacagtttattgaccgagctcgagccctgatcagagagcaggaaatggctgaaaacaagccgaagcgagaaggcaacaacaaagaaagagaccatgggccaaactccttacaaccggaaggcaaacatttggctgagaccttgaaacaggaactgaacactgccatgtcgcaagttgtggacactgtggtcaaagtcttttcggccaagccctcccgccaggttcctcaggtcttcccacctctccagatcccccaggccagatttgcagtcaatggggaaaaccacaatttccacaccgccaaccagcgcctgcagtgctttggcgacgtcatcattccgaaccccctggacacctttggcaatgtgcagatggccagttccactgaccagacagaagcactgcccctggttgtccgcaaaaactcctctgaccagtctgcctccggccctgccgctggcggccaccaccagcccctgcaccagtcgcctctctctgccaccacgggcttcaccacgtccaccttccgccaccccttcccccttcccttgatggcctatccatttcagagcccattaggtgctccctccggctccttctctggaaaagacagagcctctcctgaatccttagacttaactagggataccacgagtctgaggaccaagatgtcatctcaccacctgagccaccacccttgttcaccagcacacccgcccagcaccgccgaagggctctccttgtcgctcataaagtccgagtgcggcgatcttcaagatatgtctgaaatatcaccttattcgggaagtgcaatgcaggaaggattgtcacccaatcacttgaaaaaagcaaagctcatgtttttttatacccgttatcccagctccaatatgctgaagacctacttctccgacgtaaagttcaacagatgcattacctctcagctcatcaagtggtttagcaatttccgtgagttttactacattcagatggagaagtacgcacgtcaagccatcaacgatggggtcaccagtactgaagagctgtctataaccagagactgtgagctgtacagggctctgaacatgcactacaataaagcaaatgactttgaggttccagagagattcctggaagttgctcagatcacattacgggagtttttcaatgccattatcgcaggcaaagatgttgatccttcctggaagaaggccatatacaaggtcatctgcaagctggatagtgaagtccctgagattttcaaatccccgaactgcctacaagagctgcttcatgagtagaaatttcaacaactctttttgaatgtatgaagagtagcagtcccctttggatgtccaagttatatgtgtctagattttgatttcatatatatgtgtatgggaggcatggatatgttatgaaatcagctggtaattcctcctcatcacgtttctctcattttcttttgttttccattgcaaggggatggttgttttctttctgcctttagtttgcttttgcccaaggcccttaacatttggacacttaaaatagggttaattttcagggaaaaagaatgttggcgtgtgtaaagtctctattagcaatgaagggaatttgttaacgatgcatccacttgattgatgacttattgcaaatggcggttggctgaggaaaacccatgacacagcacaactctacagacagtgatgtgtctcttgtttctactgctaagaaggtctgaaaatttaatgaaaccacttcatacatttaagtattttgtttggtttgaactcaatcagtagcttttccttacatgtttaaaaataattccaatgacagatgagcagctcacttttccaaagtaccccaaaaggccaaattaaaaaa

SEQ ID NO: 16674 - DNA, 560 bp, Homo sapiens
  source 1..560: mol_type = unassigned DNA
gttactccccctgctgaagctgaaggttggtggagtgatggagcgtggggatggtaaaggaggaggtcccgggattcttgagctgtgcccagctgacgagcttttgaagatggcacaataaccgtccagtgatgcctgaccatgacagcacagccctcttaagccggcaaaccaagaggagaagagttgacattggagtgaaaaggacggtagggacagcatctgcattttttgctaaggcaagagcaacgttttttagtgccatgaatccccaaggttctgagcaggatgttgagtattcagtggtgcagcatgcagatggggaaaagtcaaatgtactccgcaagctgctgaagagggcgaactcgtatgaagatgccatgatgccttttccaggagcaaccataatttcccagctgttgaaaaataacatgaacaaaaatggtggcacggagcccagtttccaagccagcggtctctctagtacaggctccgaagtacatcaggaggatatatgcagcaactcttcaagagacagccccccagagtgtctttcccct

SEQ ID NO: 16675 - DNA, 8498 bp, Homo sapiens
  source 1..8498: mol_type = unassigned DNA
gtgtcttaaagtaaatcttgttgtggagcggagccctcagctgagggagcgctctgaaataatacaccattgcagccggggaaagcagagcggcgcaaaagagctctcgccgggtccgcctgctccctctccgcttcgctcctcttctcttctttacccttctcctctctcctcctctgctgctctctcctctcctcccgctcttctctctcctcctctcctgctctctcctcttcccttagctcctcttcttttcttctcctcttcttccctctcctcgcctctcccctgctcctcttctctcgtctcccctcccctcccgcctctctctcccctctccctctcccactcgccccgctcgctcgctcgctgtcgcacagactcaccgtcccttgtccaattatcatattcatcacccgcaagatatcaccgtgtgtgcactcgcgtgttttcctctctctgccgggggaaaaaaaagagagagagagagatagagagagagagagagagagagagagagaggctcggtcccactgctccctgcaccgcggtcccgggattcttgagctgtgcccagctgacgagcttttgaagatggcacaataaccgtccagtgatgcctgaccatgacagcacagccctcttaagccggcaaaccaagaggagaagagttgacattggagtgaaaaggacggtagggacagcatctgcattttttgctaaggcaagagcaacgttttttagtgccatgaatccccaaggttctgagcaggatgttgagtattcagtggtgcagcatgcagatggggaaaagtcaaatgtactccgcaagctgctgaagagggcgaactcgtatgaagatgccatgatgccttttccaggagcaaccataatttcccagctgttgaaaaataacatgaacaaaaatggtggcacggagcccagtttccaagccagcggtctctctagtacaggctccgaagtacatcaggaggatatatgcagcaactcttcaagagacagccccccagagtgtctttccccttttggcaggcctactatgagccagtttgatatggatcgcttatgtgatgagcacctgagagcaaagcgcgcccgggttgagaatataattcggggtatgagccattcccccagtgtggcattaaggggcaatgaaaatgaaagagagatggccccgcagtctgtgagtccccgagaaagttacagagaaaacaaacgcaagcaaaagcttccccagcagcagcaacagagtttccagcagctggtttcagcccgaaaagaacagaagcgagaggagcgccgacagctgaaacagcagctggaggacatgcagaaacagctgcgccagctgcaggaaaagttctaccaaatctatgacagcactgattcggaaaatgatgaagatggtaacctgtctgaagacagcatgcgctcggagatcctggatgccagggcccaggactctgtcggaaggtcagataatgagatgtgcgagctagacccaggacagtttattgaccgagctcgagccctgatcagagagcaggaaatggctgaaaacaagccgaagcgagaaggcaacaacaaagaaagagaccatgggccaaactccttacaaccggaaggcaaacatttggctgagaccttgaaacaggaactgaacactgccatgtcgcaagttgtggacactgtggtcaaagtcttttcggccaagccctcccgccaggttcctcaggtcttcccacctctccagatcccccaggccagatttgcagtcaatggggaaaaccacaatttccacaccgccaaccagcgcctgcagtgctttggcgacgtcatcattccgaaccccctggacacctttggcaatgtgcagatggccagttccactgaccagacagaagcactgcccctggttgtccgcaaaaactcctctgaccagtctgcctccggccctgccgctggcggccaccaccagcccctgcaccagtcgcctctctctgccaccacgggcttcaccacgtccaccttccgccaccccttcccccttcccttgatggcctatccatttcagagcccattaggtgctccctccggctccttctctggaaaagacagagcctctcctgaatccttagacttaactagggataccacgagtctgaggaccaagatgtcatctcaccacctgagccaccacccttgttcaccagcacacccgcccagcaccgccgaagggctctccttgtcgctcataaagtccgagtgcggcgatcttcaagatatgtctgaaatatcaccttattcgggaagtgcaatgcaggaaggattgtcacccaatcacttgaaaaaagcaaagctcatgtttttttatacccgttatcccagctccaatatgctgaagacctacttctccgacgtaaagttcaacagatgcattacctctcagctcatcaagtggtttagcaatttccgtgagttttactacattcagatggagaagtacgcacgtcaagccatcaacgatggggtcaccagtactgaagagctgtctataaccagagactgtgagctgtacagggctctgaacatgcactacaataaagcaaatgactttgaggttccagagagattcctggaagttgctcagatcacattacgggagtttttcaatgccattatcgcaggcaaagatgttgatccttcctggaagaaggccatatacaaggtcatctgcaagctggatagtgaagtccctgagattttcaaatccccgaactgcctacaagagctgcttcatgagtagaaatttcaacaactctttttgaatgtatgaagagtagcagtcccctttggatgtccaagttatatgtgtctagattttgatttcatatatatgtgtatgggaggcatggatatgttatgaaatcagctggtaattcctcctcatcacgtttctctcattttcttttgttttccattgcaaggggatggttgttttctttctgcctttagtttgcttttgcccaaggcccttaacatttggacacttaaaatagggttaattttcagggaaaaagaatgttggcgtgtgtaaagtctctattagcaatgaagggaatttgttaacgatgcatccacttgattgatgacttattgcaaatggcggttggctgaggaaaacccatgacacagcacaactctacagacagtgatgtgtctcttgtttctactgctaagaaggtctgaaaatttaatgaaaccacttcatacatttaagtattttgtttggtttgaactcaatcagtagcttttccttacatgtttaaaaataattccaatgacagatgagcagctcacttttccaaagtaccccaaaaggccaaattaaaaaagaaaaataatcactctcaagccttgtctaagaaaagaggcaaactctgaaagtcgtaccagtttcttctggaggcaaagcaattttgcacaaaaccagctctctcaagatgagactagaaattcatacctggtcttgtagccacctctctaaacttgaaaataggttcttcttcataagtgagcttacatcattcttcataaagaaaaatcctataacttgttatcatttttgcttcagatactaaaaggcactaagtttccaatttacgctgctcaactttgtttatatgcttaaaaggattctgtttacttaacaattttttcccctaaaatactattttctgaatacttccttccagtaaggaataaaggaaagcccaacttggccataaaattcttgcctacactagaagtttgttgacagccattagctgacttgatcgtcatctcctaagaggaacacatatattttcacaagcaattccacactatcctgatgggtatgcaaagtggtgacagtctaactcagtgtttcttcattttaggtataacattttaaagcaattgataatgcctcttccaattcagaagctagtattgaccaaaatgtgagaagagtgtatagcataggaaaatttggggttaacccaaaagacacaattccagcacacataagaaagctagctgctattttatgctttcttccatggttctcctcttttttcccttttatttttccctgtttttcaatgatgtacagtgttccctacttgcattgaaaaaactcgtatggcattcacactttttttcttaggtgggtttttgtgtccagatgcagtaagaattcattgttcatcctaaaactgttttccagacccttccttccccttaggtaatttgatatacacctcctaaaatgacacagtaacaaatctggtatttagaacatatagaacataaatgccattttttaattcaactttaataagaattacatttgactttggagaatacaggtcttgacccatgtgactgactagctgacccgatcgctgtaatttaacgtcatttataaattctgctgatggacaggaatgtatgaactcaattattgtcagcacaaagccttaaaacctgctgactttaaattaaatggtgcagtcctatgatgccctgcaccatccaggggactaacagggcctcgcagtgtagacagagggtgcagccacacgggcgggggcaccagccacctcactctgcacccgcggcctcacacatctcccagctcacactctactaatgcacagagtcattagatccaatttgttatttttctcacttgctttaaaaaaaagcagtttggataatcatgacattggaataaagtgggaaggaaaaattccatcagcacaaaatagggaagtaatcccaacttgtagtcacagttttctgactggctttgttttaaaagaggatggcagtccttgttcgtgtcagtgtgccactgggtttttgctgttccgtgtaattcatatcaactttgtgttgccatttgcaaggtaaaaggcaaagctgtagtgtattcacctatgtagacagattgctagatatctttttgatctggggcgagttcaatattgattccagacttatttggatttttttagtattattttcccctccctttctaatttaaatagacaaattaagcaaaagtgtgtgttcacaaccaaatgttgatgcccttatctactgataatatcctctcaatgttcactgaggcatagaaattatttcagagtagaaattgcagcatgaggataaactcacctctttgttctgaaaatagaactttatcactatgctttccggtggttttcccttttacaatcgaaatcttgtgcctcccaagtgcattggaaaatgacaaaagcctgtctctccaaattcctatttaacagtttgattttttttttttaatcaccatctttcaaatcttagctcaactctcaccaagtgaaaattggctacttgggagaaagttaactttctatggtgggatggtgaaggatgagggacagtttacataggaaaagaaaaaaaaaagtctaaagtccatgttgaaaaaccacactaccacttattttctgctaaccctaaattatttttgcgtatacgcttgaggttatagtctgtgcctagacctaaaatgcaccagcgggggggattttaaaaaatccttcaaaataccagttttttcccaacaagtacaattgttcttgtgccttctgtggctttcgatttcatctttttgactttatttccaattactacagctgcaataaacactagattttttttctggctgtttgacataacgttgatagctatgcatattttgtgtctttttaaaacaaagcgggagaatacgtttttgaagaagagaatttttagaacagtttgataccgcaaattattttttcctcaattgtttgagcagcattcgagttttgaaaattcttgtagaagccaattttttgtaactgtggtgcaaatcttgtgttttcttagcctaatgaaaagtagtatagaagcaatatttcataccatgtgctatatatgtgtgcgcagatgtgtgaacataaaatcacatacacacatatacacacatgtaaaaatatacatatatatatatgcgtgtgaagtggaaagcttaccttttcctatctagatttaagaacctattttagacatttgttatgttttgtgaaaagaatgttctatttgcaacaaaacatttaattcttactgtatctctggctgtttaatgaggacgtttcacattaaatggtaaaacacatggaagatgttagaatgtagtaattatttaagtaaacgttcacccacatattcctgaagtttgctttgtgcctccgagtattatttaattaaagaagtgttttatgtttgcagaatctttgtcactgtactagggatgtgggtgaatatcatttaaaaaaatttaaaacaacaaaaaaaaagcaaaacagaaacactaaagcaagaggggaacttttataaagcaatgtaaatatttaacctcatggctgtcattatgtaagacatgagattttaataaataactacattctcacgacatctgttgaatttactaggaacactacagtgactgtatagacagttgaaagcattcttgaaaatcctgctctctccttttaaaagttaacaatctcttttatcagatgtcaagggcaagggtaatgcagtttctgtaaatttatgaaatttctttttctatgtacatgaagacatttagtaagtaacacccccccttcccatgcgcacatgtgcgcatacacacacacacacacacacacacacacacaaacacacacactgtcataaagctaatgatttggggactttaaaaaataggatgtcctccaggaacaatcataaatttatgaaagaaagagtagtttacagactcccctgaaagaagcagtgtatatgtgaagacagtgcaaaaatctctttgccatgtatattatagcgtattcattggtgtgaatagtacaaatgtttccttctggtacaaactctgtgtttgcaaatttacaagaagcattgttttcaaaaagctccccttaaaaaatgtaactggtttatatgagtaagcagttaccgtattgcacttaaatgttatgttgaaggaaatgcagttttgttttctgtagatctgttggttgtaaaccatctataaaactaaagctaaaatgctcatattcagagctgggatcaaaactggtatttaacctttgcatcttcttataattatccttctaagaatataacagaatgtggaagtgtctggactttgagtcttttcaactgagccttctctcaaatctgacaccccctcagaatgcacaaacataagcagaaaaggcaaacaagcttaccttcttttgtgaaaacgtattcattctgtatttttttaaatattcaattcccctaaaaatggggagaaaatattttaaaattgtatattacgacttcaaatttagaactaagaaaaaaatgtatttgggattggtctcagcgctacctagaagaatcaaaggtcatggcttccctcaatattgtcccagccatttctcatatgtatatagtataaaccgtgacaaaacactgcctttatattatttagcaatatgttgtaaatagcattattaagctcttttttgtaataaagaccctttgatttgaatatagtacaataactgaactgataaagtcaatttttgatttttgtttgttttttttagctagaggcaatttcaattgtgaatttttgttgttgtctattgttctgaagactttgcataatttattggtttaatttatcctaatttatttgatgaaggtgtacaattttgtattaccaaggatgtactgtaatattaattgatatgataaacacaatgagactccctgtccatattaaaaagaaaataaaaaggtgcagtagacaattgattttaaaggaaaagttaaaaaaattagtttggcagctactaaattttaaaacaggaaaaaaaaaagttgttgtggggagggtgggaaaggggttttactttgtgtgttttaagcttttgtatactctccaaacttttaccttttgctttgtaccacttaaaggatacagtagtccaattgccttgtgtgccttccatctcctcttaaactgaatgtatgtgcagtatatatgcaagcttgtgcaaaataaaatatacattacaagctcagtgccgtttgattttcttaaagaaagagtgacttttaatttttggacctgtatccaattgtaggacagtaggctagttgtgccagtaatgtcaagtatggagattttctttcactacaattcttcattctgttagcctaacgtgcagctcctagaaacaacctcttttactttagatgcttggaataattgcttggatttctctctctgaaacatctttcaggcttaactttatttagccctgaaactt

SEQ ID NO: 16676 - DNA, 8170 bp, Homo sapiens
  source 1..8170: mol_type = unassigned DNA
cccctcgtgagtccctccccttttccagaatcacttgcactgtcttgttcttgaatgagaaaggaagaaaagagcctcccattactcagacccgtgtaaacattattccccccaggagaaaatggtgttattcaaatgaatcataataaaatagcctctaaacagtttctaagcgggagcctccgtggaactcagcgctccgctcctcccagttcctaagaggtcccgggattcttgagctgtgcccagctgacgagcttttgaagatggcacaataaccgtccagtgatgcctgaccatgacagcacagccctcttaagccggcaaaccaagaggagaagagttgacattggagtgaaaaggacggtagggacagcatctgcattttttgctaaggcaagagcaacgttttttagtgccatgaatccccaaggttctgagcaggatgttgagtattcagtggtgcagcatgcagatggggaaaagtcaaatgtactccgcaagctgctgaagagggcgaactcgtatgaagatgccatgatgccttttccaggagcaaccataatttcccagctgttgaaaaataacatgaacaaaaatggtggcacggagcccagtttccaagccagcggtctctctagtacaggctccgaagtacatcaggaggatatatgcagcaactcttcaagagacagccccccagagtgtctttccccttttggcaggcctactatgagccagtttgatatggatcgcttatgtgatgagcacctgagagcaaagcgcgcccgggttgagaatataattcggggtatgagccattcccccagtgtggcattaaggggcaatgaaaatgaaagagagatggccccgcagtctgtgagtccccgagaaagttacagagaaaacaaacgcaagcaaaagcttccccagcagcagcaacagagtttccagcagctggtttcagcccgaaaagaacagaagcgagaggagcgccgacagctgaaacagcagctggaggacatgcagaaacagctgcgccagctgcaggaaaagttctaccaaatctatgacagcactgattcggaaaatgatgaagatggtaacctgtctgaagacagcatgcgctcggagatcctggatgccagggcccaggactctgtcggaaggtcagataatgagatgtgcgagctagacccaggacagtttattgaccgagctcgagccctgatcagagagcaggaaatggctgaaaacaagccgaagcgagaaggcaacaacaaagaaagagaccatgggccaaactccttacaaccggaaggcaaacatttggctgagaccttgaaacaggaactgaacactgccatgtcgcaagttgtggacactgtggtcaaagtcttttcggccaagccctcccgccaggttcctcaggtcttcccacctctccagatcccccaggccagatttgcagtcaatggggaaaaccacaatttccacaccgccaaccagcgcctgcagtgctttggcgacgtcatcattccgaaccccctggacacctttggcaatgtgcagatggccagttccactgaccagacagaagcactgcccctggttgtccgcaaaaactcctctgaccagtctgcctccggccctgccgctggcggccaccaccagcccctgcaccagtcgcctctctctgccaccacgggcttcaccacgtccaccttccgccaccccttcccccttcccttgatggcctatccatttcagagcccattaggtgctccctccggctccttctctggaaaagacagagcctctcctgaatccttagacttaactagggataccacgagtctgaggaccaagatgtcatctcaccacctgagccaccacccttgttcaccagcacacccgcccagcaccgccgaagggctctccttgtcgctcataaagtccgagtgcggcgatcttcaagatatgtctgaaatatcaccttattcgggaagtgcaatgcaggaaggattgtcacccaatcacttgaaaaaagcaaagctcatgtttttttatacccgttatcccagctccaatatgctgaagacctacttctccgacgtaaagttcaacagatgcattacctctcagctcatcaagtggtttagcaatttccgtgagttttactacattcagatggagaagtacgcacgtcaagccatcaacgatggggtcaccagtactgaagagctgtctataaccagagactgtgagctgtacagggctctgaacatgcactacaataaagcaaatgactttgaggttccagagagattcctggaagttgctcagatcacattacgggagtttttcaatgccattatcgcaggcaaagatgttgatccttcctggaagaaggccatatacaaggtcatctgcaagctggatagtgaagtccctgagattttcaaatccccgaactgcctacaagagctgcttcatgagtagaaatttcaacaactctttttgaatgtatgaagagtagcagtcccctttggatgtccaagttatatgtgtctagattttgatttcatatatatgtgtatgggaggcatggatatgttatgaaatcagctggtaattcctcctcatcacgtttctctcattttcttttgttttccattgcaaggggatggttgttttctttctgcctttagtttgcttttgcccaaggcccttaacatttggacacttaaaatagggttaattttcagggaaaaagaatgttggcgtgtgtaaagtctctattagcaatgaagggaatttgttaacgatgcatccacttgattgatgacttattgcaaatggcggttggctgaggaaaacccatgacacagcacaactctacagacagtgatgtgtctcttgtttctactgctaagaaggtctgaaaatttaatgaaaccacttcatacatttaagtattttgtttggtttgaactcaatcagtagcttttccttacatgtttaaaaataattccaatgacagatgagcagctcacttttccaaagtaccccaaaaggccaaattaaaaaagaaaaataatcactctcaagccttgtctaagaaaagaggcaaactctgaaagtcgtaccagtttcttctggaggcaaagcaattttgcacaaaaccagctctctcaagatgagactagaaattcatacctggtcttgtagccacctctctaaacttgaaaataggttcttcttcataagtgagcttacatcattcttcataaagaaaaatcctataacttgttatcatttttgcttcagatactaaaaggcactaagtttccaatttacgctgctcaactttgtttatatgcttaaaaggattctgtttacttaacaattttttcccctaaaatactattttctgaatacttccttccagtaaggaataaaggaaagcccaacttggccataaaattcttgcctacactagaagtttgttgacagccattagctgacttgatcgtcatctcctaagaggaacacatatattttcacaagcaattccacactatcctgatgggtatgcaaagtggtgacagtctaactcagtgtttcttcattttaggtataacattttaaagcaattgataatgcctcttccaattcagaagctagtattgaccaaaatgtgagaagagtgtatagcataggaaaatttggggttaacccaaaagacacaattccagcacacataagaaagctagctgctattttatgctttcttccatggttctcctcttttttcccttttatttttccctgtttttcaatgatgtacagtgttccctacttgcattgaaaaaactcgtatggcattcacactttttttcttaggtgggtttttgtgtccagatgcagtaagaattcattgttcatcctaaaactgttttccagacccttccttccccttaggtaatttgatatacacctcctaaaatgacacagtaacaaatctggtatttagaacatatagaacataaatgccattttttaattcaactttaataagaattacatttgactttggagaatacaggtcttgacccatgtgactgactagctgacccgatcgctgtaatttaacgtcatttataaattctgctgatggacaggaatgtatgaactcaattattgtcagcacaaagccttaaaacctgctgactttaaattaaatggtgcagtcctatgatgccctgcaccatccaggggactaacagggcctcgcagtgtagacagagggtgcagccacacgggcgggggcaccagccacctcactctgcacccgcggcctcacacatctcccagctcacactctactaatgcacagagtcattagatccaatttgttatttttctcacttgctttaaaaaaaagcagtttggataatcatgacattggaataaagtgggaaggaaaaattccatcagcacaaaatagggaagtaatcccaacttgtagtcacagttttctgactggctttgttttaaaagaggatggcagtccttgttcgtgtcagtgtgccactgggtttttgctgttccgtgtaattcatatcaactttgtgttgccatttgcaaggtaaaaggcaaagctgtagtgtattcacctatgtagacagattgctagatatctttttgatctggggcgagttcaatattgattccagacttatttggatttttttagtattattttcccctccctttctaatttaaatagacaaattaagcaaaagtgtgtgttcacaaccaaatgttgatgcccttatctactgataatatcctctcaatgttcactgaggcatagaaattatttcagagtagaaattgcagcatgaggataaactcacctctttgttctgaaaatagaactttatcactatgctttccggtggttttcccttttacaatcgaaatcttgtgcctcccaagtgcattggaaaatgacaaaagcctgtctctccaaattcctatttaacagtttgattttttttttttaatcaccatctttcaaatcttagctcaactctcaccaagtgaaaattggctacttgggagaaagttaactttctatggtgggatggtgaaggatgagggacagtttacataggaaaagaaaaaaaaaagtctaaagtccatgttgaaaaaccacactaccacttattttctgctaaccctaaattatttttgcgtatacgcttgaggttatagtctgtgcctagacctaaaatgcaccagcgggggggattttaaaaaatccttcaaaataccagttttttcccaacaagtacaattgttcttgtgccttctgtggctttcgatttcatctttttgactttatttccaattactacagctgcaataaacactagattttttttctggctgtttgacataacgttgatagctatgcatattttgtgtctttttaaaacaaagcgggagaatacgtttttgaagaagagaatttttagaacagtttgataccgcaaattattttttcctcaattgtttgagcagcattcgagttttgaaaattcttgtagaagccaattttttgtaactgtggtgcaaatcttgtgttttcttagcctaatgaaaagtagtatagaagcaatatttcataccatgtgctatatatgtgtgcgcagatgtgtgaacataaaatcacatacacacatatacacacatgtaaaaatatacatatatatatatgcgtgtgaagtggaaagcttaccttttcctatctagatttaagaacctattttagacatttgttatgttttgtgaaaagaatgttctatttgcaacaaaacatttaattcttactgtatctctggctgtttaatgaggacgtttcacattaaatggtaaaacacatggaagatgttagaatgtagtaattatttaagtaaacgttcacccacatattcctgaagtttgctttgtgcctccgagtattatttaattaaagaagtgttttatgtttgcagaatctttgtcactgtactagggatgtgggtgaatatcatttaaaaaaatttaaaacaacaaaaaaaaagcaaaacagaaacactaaagcaagaggggaacttttataaagcaatgtaaatatttaacctcatggctgtcattatgtaagacatgagattttaataaataactacattctcacgacatctgttgaatttactaggaacactacagtgactgtatagacagttgaaagcattcttgaaaatcctgctctctccttttaaaagttaacaatctcttttatcagatgtcaagggcaagggtaatgcagtttctgtaaatttatgaaatttctttttctatgtacatgaagacatttagtaagtaacacccccccttcccatgcgcacatgtgcgcatacacacacacacacacacacacacacacacaaacacacacactgtcataaagctaatgatttggggactttaaaaaataggatgtcctccaggaacaatcataaatttatgaaagaaagagtagtttacagactcccctgaaagaagcagtgtatatgtgaagacagtgcaaaaatctctttgccatgtatattatagcgtattcattggtgtgaatagtacaaatgtttccttctggtacaaactctgtgtttgcaaatttacaagaagcattgttttcaaaaagctccccttaaaaaatgtaactggtttatatgagtaagcagttaccgtattgcacttaaatgttatgttgaaggaaatgcagttttgttttctgtagatctgttggttgtaaaccatctataaaactaaagctaaaatgctcatattcagagctgggatcaaaactggtatttaacctttgcatcttcttataattatccttctaagaatataacagaatgtggaagtgtctggactttgagtcttttcaactgagccttctctcaaatctgacaccccctcagaatgcacaaacataagcagaaaaggcaaacaagcttaccttcttttgtgaaaacgtattcattctgtatttttttaaatattcaattcccctaaaaatggggagaaaatattttaaaattgtatattacgacttcaaatttagaactaagaaaaaaatgtatttgggattggtctcagcgctacctagaagaatcaaaggtcatggcttccctcaatattgtcccagccatttctcatatgtatatagtataaaccgtgacaaaacactgcctttatattatttagcaatatgttgtaaatagcattattaagctcttttttgtaataaagaccctttgatttgaatatagtacaataactgaactgataaagtcaatttttgatttttgtttgttttttttagctagaggcaatttcaattgtgaatttttgttgttgtctattgttctgaagactttgcataatttattggtttaatttatcctaatttatttgatgaaggtgtacaattttgtattaccaaggatgtactgtaatattaattgatatgataaacacaatgagactccctgtccatattaaaaagaaaataaaaaggtgcagtagacaattgattttaaaggaaaagttaaaaaaattagtttggcagctactaaattttaaaacaggaaaaaaaaaagttgttgtggggagggtgggaaaggggttttactttgtgtgttttaagcttttgtatactctccaaacttttaccttttgctttgtaccacttaaaggatacagtagtccaattgccttgtgtgccttccatctcctcttaaactgaatgtatgtgcagtatatatgcaagcttgtgcaaaataaaatatacattacaagctcagtgccgtttgattttcttaaagaaagagtgacttttaatttttggacctgtatccaattgtaggacagtaggctagttgtgccagtaatgtcaagtatggagattttctttcactacaattcttcattctgttagcctaacgtgcagctcctagaaacaacctcttttactttagatgcttggaataattgcttggatttctctctctgaaacatctttcaggcttaactttatttagccctgaaactt

SEQ ID NO: 16677 - DNA, 905 bp, Homo sapiens
  source 1..905: mol_type = unassigned DNA
ctccgcggccccctcccccggccccgggctccggctccggctccggctctggctctgcgcggtggcagcggcggcggcggcgcggggaccgaggttgaagttcatgagttcgcccagcctcagtgacctgggcaagagagagccggccgccgccgcggacgagcggggcacgcagcagcgccgggcctgcgccaacgccacctggaacagcatccacaacggggtgatcgccgtcttccagcgcaaggggctgcccgaccaggagctcttcagcctcaacgagggcgtccggcagctgttgaagacagagctggggtccttcttcacggagtacctgcagaaccagctgctgacaaaaggcatggtgatccttcgggacaagattcgcttctatgagggacagaagctgctggactcactggcagagacctgggacttcttcttcagtgacgtgctgcccatgctgcaggccatcttctacccggtgcagggcaaggagccatcggtgcgccagctggccctgctgcacttccggaatgccatcaccctcagtgtgaagctagaggatgcgctggcccgggcccatgcccgtgtgccccctgccatcgtgcagatgctgctggtgctgcagggggtacatgagtccaggggcgtgactgaggactacctgcgcctggagacgctggtccagaaggtggtgtcgccatacctgggcacctacggcctccactccagcgaggggcccttcacccattcctgcatcctggaaaagcgcctcctccgccgctcccgctcgggggacgtgctggccaagaaccctgtggtgcgctccaagagctacaacacgcctctgctgaaccccgtgcaggagcacgaggcggagggcgcggcggccggcggtacca

SEQ ID NO: 16678 - DNA, 920 bp, Homo sapiens
  source 1..920: mol_type = unassigned DNA
cagtgagccgcctgccctcaagctcctgggccccctctgccctttggccatgtgaacgcctcctaatgtgtaagccattcggctgcccccaaggccaggcatccagtgtgcttagtgctgagcagggtttcagagctcacccccaggagggtgcagacctcagccaaggtcgcagagcagaggagacccgtgggctgggattccacctgtgcccaccctggcagcatcccacctcctgagtcctctcggcacccagcaagcatccacaacggggtgatcgccgtcttccagcgcaaggggctgcccgaccaggagctcttcagcctcaacgagggcgtccggcagctgttgaagacagagctggggtccttcttcacggagtacctgcagaaccagctgctgacaaaaggcatggtgatccttcgggacaagattcgcttctatgagggacagaagctgctggactcactggcagagacctgggacttcttcttcagtgacgtgctgcccatgctgcaggccatcttctacccggtgcagggcaaggagccatcggtgcgccagctggccctgctgcacttccggaatgccatcaccctcagtgtgaagctagaggatgcgctggcccgggcccatgcccgtgtgccccctgccatcgtgcagatgctgctggtgctgcagggggtacatgagtccaggggcgtgactgaggactacctgcgcctggagacgctggtccagaaggtggtgtcgccatacctgggcacctacggcctccactccagcgaggggcccttcacccattcctgcatcctggaaaagcgcctcctccgccgctcccgctcgggggacgtgctggccaagaaccctgtggtgcgctccaagagctacaacacgcctctgctgaaccccgtgcagga

SEQ ID NO: 16679 - DNA, 1767 bp, Homo sapiens
  source 1..1767: mol_type = unassigned DNA
attcggctgcccccaaggccaggcatccagtgtgcttagtgctgagcagggtttcagagctcacccccaggagggtgcagacctcagccaaggtcgcagagcagaggagacccgtgggctgggattccacctgtgcccaccctggcagcatcccacctcctgagtcctctcggcacccagcaaggttgaagttcatgagttcgcccagcctcagtgacctgggcaagagagagccggccgccgccgcggacgagcggggcacgcagcagcgccgggcctgcgccaacgccacctggaacagcatccacaacggggtgatcgccgtcttccagcgcaaggggctgcccgaccaggagctcttcagcctcaacgagggcgtccggcagctgttgaagacagagctggggtccttcttcacggagtacctgcagaaccagctgctgacaaaaggcatggtgatccttcgggacaagattcgcttctatgagggacagaagctgctggactcactggcagagacctgggacttcttcttcagtgacgtgctgcccatgctgcaggccatcttctacccggtgcagggcaaggagccatcggtgcgccagctggccctgctgcacttccggaatgccatcaccctcagtgtgaagctagaggatgcgctggcccgggcccatgcccgtgtgccccctgccatcgtgcagatgctgctggtgctgcagggggtacatgagtccaggggcgtgactgaggactacctgcgcctggagacgctggtccagaaggtggtgtcgccatacctgggcacctacggcctccactccagcgaggggcccttcacccattcctgcatcctggaaaagcgcctcctccgccgctcccgctcgggggacgtgctggccaagaaccctgtggtgcgctccaagagctacaacacgcctctgctgaaccccgtgcaggagcacgaggcggagggcgcggcggccggcggtaccagcatccgcaggcactctgtgtcggagatgacgtcctgccccgagcctcagggcttctccgacccgcccggccagggccccaccgggaccttcaggtcctccccggcgccccactcagggccctgccccagcagactgtaccccacgacccagccccctgagcagggcttggatcccacccgcagctccctgccccgctccagcccggagaacctggtggaccagatcctggagtccgtggactcggattctgaagggattttcattgactttggccggggccggggctctggcatgtccgacttggagggctctgggggccggcagagtgtcgtgtgaggcctcacagctggccttgagtttttactgacacgtccctgtgtgcgggggtgtccatgtggcgtgtgtgtgagtgagacttttttactgcgtcccgtcccgccagccctatcggcctcgtcactggccttggtcactttgtatttctgtcttggttggaaataccatcagccttccttgctcggcccaggtctgtttcaggcatctgagtcggcgtttacccaggggccgggccagagacgggggtcggccgctcgctcccacgctcctcctgccccagccctctggtgtccacacctgcccacagagaatgtaaacccagtgggctctgcccacgccgggccccaaagtgaccagactccagcacacctgtctcctcctgcctggggtggccatggggatggaagggggtggaataaaacctgtcaacctg

SEQ ID NO: 16680 - DNA, 560 bp, Homo sapiens
  source 1..560: mol_type = unassigned DNA
agtgtgcttagtgctgagcagggtttcagagctcacccccaggagggtgcagacctcagccaaggtcgcagagcagaggagacccgtgggctgggattccacctgtgcccaccctggcagcatcccacctcctgagtcctctcggcacccagcaaggttgaagttcatgagttcgcccagcctcagtgacctgggcaagagagagccggccgccgccgcggacgagcggggcacgcagcagcgccgggcctgcgccaacgccacctggaacagcatccacaacggggtgatcgccgtcttccagcgcaaggggctgcccgaccaggagctcttcagcctcaacgagggcgtccggcagctgttgaagacagagctggggtccttcttcacggagtacctgcaggtagaaccagctgctgacaaaaggcatggtgatccttcgggacaagattcgcttctatgaggggcctgcacagggccctcagcactcggataaagaaaggaaagacggacaccagcctgcgcccacagcgagaaccccagagtgggagccagcacgg

SEQ ID NO: 16681 - DNA, 2279 bp, Homo sapiens
  source 1..2279: mol_type = unassigned DNA
agtgtgcttagtgctgagcagggtttcagagctcacccccaggagggtgcagacctcagccaaggtcgcagagcagaggagacccgtgggctgggattccacctgtgcccaccctggcagcatcccacctcctgagtcctctcggcacccagcaagagtcccttcagtgacttcgagcgtgcattgagagcccagtaacactggggggcaactgccacaaagacacagcctcagccaggcgcagtgactcatgcctgtaatcccagcaccttgggaggccaaggcttgtggatcacctgaggtcaggagtttgagaccagccggaccaacatggagaaaccccatctctactaaaaatacaaaaaaattagctaggcattgtggcgcatgcctgtaatcccggctactcgggaggctgagggaggagaagcacttgaacccaggaggcgcggttgcagtgagccgagatcgccccattgcactccagcctgggcaacaagagcgaaactccatctcaaaataataataataacaataatagtaagactcagcctccccgctctgggacactcagtctgatggggcaggctggtcagaagacatagagccatggtgtgtttggaactttcacagagggaagcctggggctcgggaagcccggaaaagatgccggcgcagcctgagggcttgtacaggttgaagttcatgagttcgcccagcctcagtgacctgggcaagagagagccggccgccgccgcggacgagcggggcacgcagcagcgccgggcctgcgccaacgccacctggaacagcatccacaacggggtgatcgccgtcttccagcgcaaggggctgcccgaccaggagctcttcagcctcaacgagggcgtccggcagctgttgaagacagagctggggtccttcttcacggagtacctgcagaaccagctgctgacaaaaggcatggtgatccttcgggacaagattcgcttctatgagggacagaagctgctggactcactggcagagacctgggacttcttcttcagtgacgtgctgcccatgctgcaggccatcttctacccggtgcagggcaaggagccatcggtgcgccagctggccctgctgcacttccggaatgccatcaccctcagtgtgaagctagaggatgcgctggcccgggcccatgcccgtgtgccccctgccatcgtgcagatgctgctggtgctgcagggggtacatgagtccaggggcgtgactgaggactacctgcgcctggagacgctggtccagaaggtggtgtcgccatacctgggcacctacggcctccactccagcgaggggcccttcacccattcctgcatcctggaaaagcgcctcctccgccgctcccgctcgggggacgtgctggccaagaaccctgtggtgcgctccaagagctacaacacgcctctgctgaaccccgtgcaggagcacgaggcggagggcgcggcggccggcggtaccagcatccgcaggcactctgtgtcggagatgacgtcctgccccgagcctcagggcttctccgacccgcccggccagggccccaccgggaccttcaggtcctccccggcgccccactcagggccctgccccagcagactgtaccccacgacccagccccctgagcagggcttggatcccacccgcagctccctgccccgctccagcccggagaacctggtggaccagatcctggagtccgtggactcggattctgaagggattttcattgactttggccggggccggggctctggcatgtccgacttggagggctctgggggccggcagagtgtcgtgtgaggcctcacagctggccttgagtttttactgacacgtccctgtgtgcgggggtgtccatgtggcgtgtgtgtgagtgagacttttttactgcgtcccgtcccgccagccctatcggcctcgtcactggccttggtcactttgtatttctgtcttggttggaaataccatcagccttccttgctcggcccaggtctgtttcaggcatctgagtcggcgtttacccaggggccgggccagagacgggggtcggccgctcgctcccacgctcctcctgccccagccctctggtgtccacacctgcccacagagaatgtaaacccagtgggctctgcccacgccgggccccaaagtgaccagactccagcacacctgtctcctcctgcctggggtggccatggggatggaagggggtggaataaaacctgtcaacctgg
